United States Patent Application Publication US 2005/0244851 A1 - sequence listing, part 47

SEQ ID NO: 1821104 - DNA, 25 bp, Homo sapien
ttgaaactcggtgtgtcccggagcc

SEQ ID NO: 1821105 - DNA, 25 bp, Homo sapien
gccagcaggacctgatgcgcatcca

SEQ ID NO: 1821106 - DNA, 25 bp, Homo sapien
gcatccatattagccgtccgagcgc

SEQ ID NO: 1821107 - DNA, 25 bp, Homo sapien
cctgatgcgcatccatattagccgt

SEQ ID NO: 1821108 - DNA, 25 bp, Homo sapien
gtccgagcgcaggaatccggcccga

SEQ ID NO: 1821109 - DNA, 25 bp, Homo sapien
cgccctctctccctcgacatcctcc

SEQ ID NO: 1821110 - DNA, 25 bp, Homo sapien
cagcaccgccgggactcggatggtg

SEQ ID NO: 1821111 - DNA, 25 bp, Homo sapien
cgcaccgccggccagaaacatcttc

SEQ ID NO: 1821112 - DNA, 25 bp, Homo sapien
gggactcggatggtgcgcgcaccgc

SEQ ID NO: 1821113 - DNA, 25 bp, Homo sapien
ctacatactttcgagtccttctcgg

SEQ ID NO: 1821114 - DNA, 25 bp, Homo sapien
atactttcgagtccttctcgggccg

SEQ ID NO: 1821115 - DNA, 25 bp, Homo sapien
gaagcgcggagatgacggcgcccgc

SEQ ID NO: 1821116 - DNA, 25 bp, Homo sapien
tcgagtccttctcgggccgggaagc

SEQ ID NO: 1821117 - DNA, 25 bp, Homo sapien
tgacaggcgccgcgtgcagctcgcg

SEQ ID NO: 1821118 - DNA, 25 bp, Homo sapien
aggcgccgcgtgcagctcgcgcccc

SEQ ID NO: 1821119 - DNA, 25 bp, Homo sapien
cttgacaggcgccgcgtgcagctcg

SEQ ID NO: 1821120 - DNA, 25 bp, Homo sapien
cgcttgacaggcgccgcgtgcagct

SEQ ID NO: 1821121 - DNA, 25 bp, Homo sapien
ccctcgctccttactggttaggaga

SEQ ID NO: 1821122 - DNA, 25 bp, Homo sapien
cgaaattctacacggcttcagagcc

SEQ ID NO: 1821123 - DNA, 25 bp, Homo sapien
acgtgagcccagatccggacgagca

SEQ ID NO: 1821124 - DNA, 25 bp, Homo sapien
cggacgagcagttcacattccatta

SEQ ID NO: 1821125 - DNA, 25 bp, Homo sapien
agttaatttctgaatcttctatgtc

SEQ ID NO: 1821126 - DNA, 25 bp, Homo sapien
ttaatttctgaatcttctatgtcct

SEQ ID NO: 1821127 - DNA, 25 bp, Homo sapien
ttctgaatcttctatgtcctttgac

SEQ ID NO: 1821128 - DNA, 25 bp, Homo sapien
ttagttaatttctgaatcttctatg

SEQ ID NO: 1821129 - DNA, 25 bp, Homo sapien
aaattcttacataaccgtctgccgt

SEQ ID NO: 1821130 - DNA, 25 bp, Homo sapien
ccgtctgccgtttttatagggcagt

SEQ ID NO: 1821131 - DNA, 25 bp, Homo sapien
gcagtgtttctgagccgggtgctct

SEQ ID NO: 1821132 - DNA, 25 bp, Homo sapien
tgtccatacatctcctcttgagagg

SEQ ID NO: 1821133 - DNA, 25 bp, Homo sapien
agtgtcccattggtgtcagtcgcac

SEQ ID NO: 1821134 - DNA, 25 bp, Homo sapien
aaaccagcggttagtcagtgtccca

SEQ ID NO: 1821135 - DNA, 25 bp, Homo sapien
ggtgtcagtcgcactgatggtgctc

SEQ ID NO: 1821136 - DNA, 25 bp, Homo sapien
tgaagatagctctttttacatctaa

SEQ ID NO: 1821137 - DNA, 25 bp, Homo sapien
cagcagctgggtagtttcagcaaaa

SEQ ID NO: 1821138 - DNA, 25 bp, Homo sapien
gattaggaggccagcattctgggct

SEQ ID NO: 1821139 - DNA, 25 bp, Homo sapien
taatactgagaagcaatctggatta

SEQ ID NO: 1821140 - DNA, 25 bp, Homo sapien
cacagcagctgggtagtttcagcaa

SEQ ID NO: 1821141 - DNA, 25 bp, Homo sapien
ctggcagcgtctggtggaaatagaa

SEQ ID NO: 1821142 - DNA, 25 bp, Homo sapien
tagaatctgttcaaaaggtggagct

SEQ ID NO: 1821143 - DNA, 25 bp, Homo sapien
cttacagcaattgccagctcgctgc

SEQ ID NO: 1821144 - DNA, 25 bp, Homo sapien
tgccttacagcaattgccagctcgc

SEQ ID NO: 1821145 - DNA, 25 bp, Homo sapien
ctcatctgggtcacgactctgcccc

SEQ ID NO: 1821146 - DNA, 25 bp, Homo sapien
tctgggtcacgactctgcccctcag

SEQ ID NO: 1821147 - DNA, 25 bp, Homo sapien
gtgccctcatctgggtcacgactct

SEQ ID NO: 1821148 - DNA, 25 bp, Homo sapien
tgtgccctcatctgggtcacgactc

SEQ ID NO: 1821149 - DNA, 25 bp, Homo sapien
cctgtttctgagatcatgcagccag

SEQ ID NO: 1821150 - DNA, 25 bp, Homo sapien
gacacatgaccaggaagctttatgg

SEQ ID NO: 1821151 - DNA, 25 bp, Homo sapien
ggagagtttctaccacttgactcaa

SEQ ID NO: 1821152 - DNA, 25 bp, Homo sapien
taatctcaatatacggtgatacctg

SEQ ID NO: 1821153 - DNA, 25 bp, Homo sapien
atcatttttatcctccatagccaac

SEQ ID NO: 1821154 - DNA, 25 bp, Homo sapien
tgcaaagtagtagtagtaaatccct

SEQ ID NO: 1821155 - DNA, 25 bp, Homo sapien
tctttcaggcctctggtaaagctgg

SEQ ID NO: 1821156 - DNA, 25 bp, Homo sapien
tgacttttactgataattcctccaa

SEQ ID NO: 1821157 - DNA, 25 bp, Homo sapien
ctgctcctgactgttaatagtcatg

SEQ ID NO: 1821158 - DNA, 25 bp, Homo sapien
cactgctcctgactgttaatagtca

SEQ ID NO: 1821159 - DNA, 25 bp, Homo sapien
agccactgctcctgactgttaatag

SEQ ID NO: 1821160 - DNA, 25 bp, Homo sapien
gctcctgactgttaatagtcatgtc

SEQ ID NO: 1821161 - DNA, 25 bp, Homo sapien
tacctaacttaatgtacaggaggca

SEQ ID NO: 1821162 - DNA, 25 bp, Homo sapien
aaacccaggccagtgtactccaata

SEQ ID NO: 1821163 - DNA, 25 bp, Homo sapien
gcccaaggttactctagctagttag

SEQ ID NO: 1821164 - DNA, 25 bp, Homo sapien
tatgtaccatcgtatgccagtcatg

SEQ ID NO: 1821165 - DNA, 25 bp, Homo sapien
tggcgatattgacacagagcagttg

SEQ ID NO: 1821166 - DNA, 25 bp, Homo sapien
ctgtttcacaggtggcgatattgac

SEQ ID NO: 1821167 - DNA, 25 bp, Homo sapien
gggtgtcttgcccataggcatgcac

SEQ ID NO: 1821168 - DNA, 25 bp, Homo sapien
caggtggcgatattgacacagagca

SEQ ID NO: 1821169 - DNA, 25 bp, Homo sapien
tatccatcaagcaatacaagtagtc

SEQ ID NO: 1821170 - DNA, 25 bp, Homo sapien
tatcctgagcaagtcgacaagtggg

SEQ ID NO: 1821171 - DNA, 25 bp, Homo sapien
gacaagtgggttatgactggcaaga

SEQ ID NO: 1821172 - DNA, 25 bp, Homo sapien
tacaatcgtagagcattgcactgga

SEQ ID NO: 1821173 - DNA, 25 bp, Homo sapien
ggagccacaattattcctactatga

SEQ ID NO: 1821174 - DNA, 25 bp, Homo sapien
tatgatgttagtagcagattgtatc

SEQ ID NO: 1821175 - DNA, 25 bp, Homo sapien
taatccaccaagagccaatacatca

SEQ ID NO: 1821176 - DNA, 25 bp, Homo sapien
cctggacgggcttgtatgaactttt

SEQ ID NO: 1821177 - DNA, 25 bp, Homo sapien
gaccagctggtagattgagaccttt

SEQ ID NO: 1821178 - DNA, 25 bp, Homo sapien
aaagctgcttttaggcagggcagca

SEQ ID NO: 1821179 - DNA, 25 bp, Homo sapien
cctttgtaaggatggaagctattgg

SEQ ID NO: 1821180 - DNA, 25 bp, Homo sapien
tgacacaatgatacccatgggcagc

SEQ ID NO: 1821181 - DNA, 25 bp, Homo sapien
gaggtgatcaggggtgatgatgact

SEQ ID NO: 1821182 - DNA, 25 bp, Homo sapien
caactgttggtctcagctgagtgag

SEQ ID NO: 1821183 - DNA, 25 bp, Homo sapien
atgatgacttttgatggaactgacc

SEQ ID NO: 1821184 - DNA, 25 bp, Homo sapien
ccaactgttggtctcagctgagtga

SEQ ID NO: 1821185 - DNA, 25 bp, Homo sapien
ttcagtagcttcagatcccaatggc

SEQ ID NO: 1821186 - DNA, 25 bp, Homo sapien
ttgatttgaaaagggacttcatctg

SEQ ID NO: 1821187 - DNA, 25 bp, Homo sapien
caatggctaggcaatatggagataa

SEQ ID NO: 1821188 - DNA, 25 bp, Homo sapien
tgtttatagatgtcagtaatgcccg

SEQ ID NO: 1821189 - DNA, 25 bp, Homo sapien
caaggtgactggttctattgctgcc

SEQ ID NO: 1821190 - DNA, 25 bp, Homo sapien
tgaatacaatatgttaacactcctg

SEQ ID NO: 1821191 - DNA, 25 bp, Homo sapien
aaaggtaccattgtttgttctgcaa

SEQ ID NO: 1821192 - DNA, 25 bp, Homo sapien
ctagccaaaggttcacacatgtgag

SEQ ID NO: 1821193 - DNA, 25 bp, Homo sapien
taaatctctttatgtgggcctgcca

SEQ ID NO: 1821194 - DNA, 25 bp, Homo sapien
gctgattggcaaggcaagtgacttt

SEQ ID NO: 1821195 - DNA, 25 bp, Homo sapien
aaggccctatcaaagacgtaatgca

SEQ ID NO: 1821196 - DNA, 25 bp, Homo sapien
ggatgaaagattctcaaggccctat

SEQ ID NO: 1821197 - DNA, 25 bp, Homo sapien
ttttactccttagctggacagcggg

SEQ ID NO: 1821198 - DNA, 25 bp, Homo sapien
gctggtcctcgccttttactcctta

SEQ ID NO: 1821199 - DNA, 25 bp, Homo sapien
aataggtttgaagccgctggtcctc

SEQ ID NO: 1821200 - DNA, 25 bp, Homo sapien
cagcgggttcgggatctgccccatg

SEQ ID NO: 1821201 - DNA, 25 bp, Homo sapien
gcttgcacgcgccaggcttcgtgtg

SEQ ID NO: 1821202 - DNA, 25 bp, Homo sapien
tggtgtccctaaacttgaaagtgga

SEQ ID NO: 1821203 - DNA, 25 bp, Homo sapien
caagagttgttccttagggtggtgt

SEQ ID NO: 1821204 - DNA, 25 bp, Homo sapien
tcctgctcgcaggtgggcttgcacg

SEQ ID NO: 1821205 - DNA, 25 bp, Homo sapien
ttgtgttcgcacagctgaaggcggc

SEQ ID NO: 1821206 - DNA, 25 bp, Homo sapien
ggaaaactgcgggtgccttccctca

SEQ ID NO: 1821207 - DNA, 25 bp, Homo sapien
gcctcgggaacacggtctgagtaga

SEQ ID NO: 1821208 - DNA, 25 bp, Homo sapien
gggcagccattgtgcctcgggaaca

SEQ ID NO: 1821209 - DNA, 25 bp, Homo sapien
gactgcccgcgtcagggctccacgg

SEQ ID NO: 1821210 - DNA, 25 bp, Homo sapien
tgggtgtccggtgagcgggtagcga

SEQ ID NO: 1821211 - DNA, 25 bp, Homo sapien
tccggtgagcgggtagcgaggccat

SEQ ID NO: 1821212 - DNA, 25 bp, Homo sapien
gggcagccgactgcccgcgtcaggg

SEQ ID NO: 1821213 - DNA, 25 bp, Homo sapien
cagtcagggcggcgggcgccgattg

SEQ ID NO: 1821214 - DNA, 25 bp, Homo sapien
agtcagggcggcgggcgccgattgg

SEQ ID NO: 1821215 - DNA, 25 bp, Homo sapien
gccagttctcgtggcttccgctttt

SEQ ID NO: 1821216 - DNA, 25 bp, Homo sapien
agccagttctcgtggcttccgcttt

SEQ ID NO: 1821217 - DNA, 25 bp, Homo sapien
gttctcgtggcttccgcttttacac

SEQ ID NO: 1821218 - DNA, 25 bp, Homo sapien
cagttctcgtggcttccgcttttac

SEQ ID NO: 1821219 - DNA, 25 bp, Homo sapien
cgcaaagctggacgcccttgtgtcc

SEQ ID NO: 1821220 - DNA, 25 bp, Homo sapien
ctgccctcggtgtcaagtctccctc

SEQ ID NO: 1821221 - DNA, 25 bp, Homo sapien
ctgccctcggcaccaccgggtgcgt

SEQ ID NO: 1821222 - DNA, 25 bp, Homo sapien
ccctccaggacgcagtttctcgatg

SEQ ID NO: 1821223 - DNA, 25 bp, Homo sapien
gctgcaccacctttggtggtcgctt

SEQ ID NO: 1821224 - DNA, 25 bp, Homo sapien
tcgcttttctcttaatagtgattct

SEQ ID NO: 1821225 - DNA, 25 bp, Homo sapien
tggtcgcttttctcttaatagtgat

SEQ ID NO: 1821226 - DNA, 25 bp, Homo sapien
ttggtggtcgcttttctcttaatag

SEQ ID NO: 1821227 - DNA, 25 bp, Homo sapien
cactctgccggcgaccagtgtgcat

SEQ ID NO: 1821228 - DNA, 25 bp, Homo sapien
tgttttgagcacaactgttagatac

SEQ ID NO: 1821229 - DNA, 25 bp, Homo sapien
tgagcacaactgttagatacaactg

SEQ ID NO: 1821230 - DNA, 25 bp, Homo sapien
tgttagatacaactggcctctgcag

SEQ ID NO: 1821231 - DNA, 25 bp, Homo sapien
gttttgacctggacctttcaactga

SEQ ID NO: 1821232 - DNA, 25 bp, Homo sapien
ttttgacctggacctttcaactgag

SEQ ID NO: 1821233 - DNA, 25 bp, Homo sapien
tacatgtgtggtcgcatgttttggt

SEQ ID NO: 1821234 - DNA, 25 bp, Homo sapien
ttcagagcaggtttacatgtgtggt

SEQ ID NO: 1821235 - DNA, 25 bp, Homo sapien
gcatttatgtctctgtgggaccggg

SEQ ID NO: 1821236 - DNA, 25 bp, Homo sapien
ctgtcatgtaacataggccccattc

SEQ ID NO: 1821237 - DNA, 25 bp, Homo sapien
gaatgtgcatttatgtctctgtggg

SEQ ID NO: 1821238 - DNA, 25 bp, Homo sapien
tcatgtaacataggccccattcagc

SEQ ID NO: 1821239 - DNA, 25 bp, Homo sapien
gtggggacggagaaggaagtgtgtg

SEQ ID NO: 1821240 - DNA, 25 bp, Homo sapien
cgaggtggggacggagaaggaagtg

SEQ ID NO: 1821241 - DNA, 25 bp, Homo sapien
gaggcgaggtggggacggagaagga

SEQ ID NO: 1821242 - DNA, 25 bp, Homo sapien
aggtggggacggagaaggaagtgtg

SEQ ID NO: 1821243 - DNA, 25 bp, Homo sapien
taggctatttctggtgtgtcgtggc

SEQ ID NO: 1821244 - DNA, 25 bp, Homo sapien
ataggctatttctggtgtgtcgtgg

SEQ ID NO: 1821245 - DNA, 25 bp, Homo sapien
ttctgcagaactcatggcagccgtt

SEQ ID NO: 1821246 - DNA, 25 bp, Homo sapien
tgccagggcaagacatgcagcttct

SEQ ID NO: 1821247 - DNA, 25 bp, Homo sapien
cgttttccacttggccgagctgggt

SEQ ID NO: 1821248 - DNA, 25 bp, Homo sapien
tagcctgtaaaatggactgtgggtg

SEQ ID NO: 1821249 - DNA, 25 bp, Homo sapien
cgcagcatgaggcatttgtggttca

SEQ ID NO: 1821250 - DNA, 25 bp, Homo sapien
cttggagtgcgcagcatgaggcatt

SEQ ID NO: 1821251 - DNA, 25 bp, Homo sapien
tgcatttcagcttggagtgcgcagc

SEQ ID NO: 1821252 - DNA, 25 bp, Homo sapien
cagcatgaggcatttgtggttcaga

SEQ ID NO: 1821253 - DNA, 25 bp, Homo sapien
gatggtttccgtgctgggatatttg

SEQ ID NO: 1821254 - DNA, 25 bp, Homo sapien
gaggaaaagatggtttccgtgctgg

SEQ ID NO: 1821255 - DNA, 25 bp, Homo sapien
aaaagatggtttccgtgctgggata

SEQ ID NO: 1821256 - DNA, 25 bp, Homo sapien
ggtttccgtgctgggatatttggat

SEQ ID NO: 1821257 - DNA, 25 bp, Homo sapien
gaagtcatagacatcctggaaaaca

SEQ ID NO: 1821258 - DNA, 25 bp, Homo sapien
gcaaatgataccaaagatccctagg

SEQ ID NO: 1821259 - DNA, 25 bp, Homo sapien
aatggacttgagaggtgacttgttc

SEQ ID NO: 1821260 - DNA, 25 bp, Homo sapien
gatccctaggtaccagagaagtcat

SEQ ID NO: 1821261 - DNA, 25 bp, Homo sapien
aaataataggtatttactcagcaga

SEQ ID NO: 1821262 - DNA, 25 bp, Homo sapien
tttggccatgaggaataatcctaac

SEQ ID NO: 1821263 - DNA, 25 bp, Homo sapien
cacatgacacttgaatgggctgaga

SEQ ID NO: 1821264 - DNA, 25 bp, Homo sapien
ggtcatggccttaacatctgcatag

SEQ ID NO: 1821265 - DNA, 25 bp, Homo sapien
tgagatttaggtgcaagttggtaga

SEQ ID NO: 1821266 - DNA, 25 bp, Homo sapien
gctggcttgggagtcatttcgctga

SEQ ID NO: 1821267 - DNA, 25 bp, Homo sapien
tttcctttttggccacatggaagta

SEQ ID NO: 1821268 - DNA, 25 bp, Homo sapien
cctttcctttttggccacatggaag

SEQ ID NO: 1821269 - DNA, 25 bp, Homo sapien
ttcctttttggccacatggaagtac

SEQ ID NO: 1821270 - DNA, 25 bp, Homo sapien
ttcctttcctttttggccacatgga

SEQ ID NO: 1821271 - DNA, 25 bp, Homo sapien
caagggattccagtagtggtataca

SEQ ID NO: 1821272 - DNA, 25 bp, Homo sapien
tgttgacagctcattacctacatgt

SEQ ID NO: 1821273 - DNA, 25 bp, Homo sapien
tccacagtctggtaagttgtatact

SEQ ID NO: 1821274 - DNA, 25 bp, Homo sapien
aaaacaagttatcagtccacacgtg

SEQ ID NO: 1821275 - DNA, 25 bp, Homo sapien
ttcttactcatagtataagacccga

SEQ ID NO: 1821276 - DNA, 25 bp, Homo sapien
gggtcctttgctccgtaatccatca

SEQ ID NO: 1821277 - DNA, 25 bp, Homo sapien
tctgactgccgctgggctgccttgc

SEQ ID NO: 1821278 - DNA, 25 bp, Homo sapien
tgttcagcttcgtcgtccctggctg

SEQ ID NO: 1821279 - DNA, 25 bp, Homo sapien
agttctcttgtgctccctctccact

SEQ ID NO: 1821280 - DNA, 25 bp, Homo sapien
ttctcttgtgctccctctccactgt

SEQ ID NO: 1821281 - DNA, 25 bp, Homo sapien
ctcttgtgctccctctccactgttc

SEQ ID NO: 1821282 - DNA, 25 bp, Homo sapien
cttgtgctccctctccactgttcct

SEQ ID NO: 1821283 - DNA, 25 bp, Homo sapien
ccttagatgtctgaggatgatcgtc

SEQ ID NO: 1821284 - DNA, 25 bp, Homo sapien
aggatgatcgtcataatctcccagg

SEQ ID NO: 1821285 - DNA, 25 bp, Homo sapien
ttttcgcacagatcccaaaccttac

SEQ ID NO: 1821286 - DNA, 25 bp, Homo sapien
cacctggaatgttagtagccttaga

SEQ ID NO: 1821287 - DNA, 25 bp, Homo sapien
gggccacatagaggcaccgttctaa

SEQ ID NO: 1821288 - DNA, 25 bp, Homo sapien
ttggccggtggggttgagccagtca

SEQ ID NO: 1821289 - DNA, 25 bp, Homo sapien
tgttctcccatgggcccctatcggg

SEQ ID NO: 1821290 - DNA, 25 bp, Homo sapien
agccagtcagctggctcctgttctc

SEQ ID NO: 1821291 - DNA, 25 bp, Homo sapien
tttatttcctggtcgccagatagca

SEQ ID NO: 1821292 - DNA, 25 bp, Homo sapien
ttatttcctggtcgccagatagcat

SEQ ID NO: 1821293 - DNA, 25 bp, Homo sapien
ctgaggtggaagtccagttctgcct

SEQ ID NO: 1821294 - DNA, 25 bp, Homo sapien
tagactgaggtggaagtccagttct

SEQ ID NO: 1821295 - DNA, 25 bp, Homo sapien
cttttagactgaggtggaagtccag

SEQ ID NO: 1821296 - DNA, 25 bp, Homo sapien
ttagactgaggtggaagtccagttc

SEQ ID NO: 1821297 - DNA, 25 bp, Homo sapien
tgggttgccgccctatccaaggcat

SEQ ID NO: 1821298 - DNA, 25 bp, Homo sapien
tcctgtcttaccaaagcctgtgcca

SEQ ID NO: 1821299 - DNA, 25 bp, Homo sapien
gctctaaggctcctgtcttaccaaa

SEQ ID NO: 1821300 - DNA, 25 bp, Homo sapien
cctgtgccagccacgggttgccggt

SEQ ID NO: 1821301 - DNA, 25 bp, Homo sapien
gaacaaggagttaaacactcactgt

SEQ ID NO: 1821302 - DNA, 25 bp, Homo sapien
gtagaacaaggagttaaacactcac

SEQ ID NO: 1821303 - DNA, 25 bp, Homo sapien
tgcagtaatgagaagagggggaaga

SEQ ID NO: 1821304 - DNA, 25 bp, Homo sapien
acactcactgtgagcaatcagttga

SEQ ID NO: 1821305 - DNA, 25 bp, Homo sapien
cagtgtactatggacatgccctagg

SEQ ID NO: 1821306 - DNA, 25 bp, Homo sapien
tattgttgtatgtgccagagaggga

SEQ ID NO: 1821307 - DNA, 25 bp, Homo sapien
gtattatccgtacctaccgcatggg

SEQ ID NO: 1821308 - DNA, 25 bp, Homo sapien
tagagctgaaaccaccgtaatgaca

SEQ ID NO: 1821309 - DNA, 25 bp, Homo sapien
tgagtggtgctcgtcttccaaaaca

SEQ ID NO: 1821310 - DNA, 25 bp, Homo sapien
gaactctttatcagttgctcccacg

SEQ ID NO: 1821311 - DNA, 25 bp, Homo sapien
gaaactgagccagagcacgcctctg

SEQ ID NO: 1821312 - DNA, 25 bp, Homo sapien
gctgagcagaagagtaggttaccat

SEQ ID NO: 1821313 - DNA, 25 bp, Homo sapien
gaatctggaacatcgtgcttgccca

SEQ ID NO: 1821314 - DNA, 25 bp, Homo sapien
atctggaacatcgtgcttgcccaca

SEQ ID NO: 1821315 - DNA, 25 bp, Homo sapien
cagaatctggaacatcgtgcttgcc

SEQ ID NO: 1821316 - DNA, 25 bp, Homo sapien
cgggtaaaactggtggatggcagca

SEQ ID NO: 1821317 - DNA, 25 bp, Homo sapien
ttgtttaaatatccaacctgtccga

SEQ ID NO: 1821318 - DNA, 25 bp, Homo sapien
aacctgtccgacctgttcgggctga

SEQ ID NO: 1821319 - DNA, 25 bp, Homo sapien
taaatatccaacctgtccgacctgt

SEQ ID NO: 1821320 - DNA, 25 bp, Homo sapien
gtccgacctgttcgggctgaacaag

SEQ ID NO: 1821321 - DNA, 25 bp, Homo sapien
aagtcttagcctgtgtattcatgac

SEQ ID NO: 1821322 - DNA, 25 bp, Homo sapien
ttcatgacacggatcctcatctcac

SEQ ID NO: 1821323 - DNA, 25 bp, Homo sapien
gtattcatgacacggatcctcatct

SEQ ID NO: 1821324 - DNA, 25 bp, Homo sapien
tgtgtattcatgacacggatcctca

SEQ ID NO: 1821325 - DNA, 25 bp, Homo sapien
ccttaaaccggagattcagttgcat

SEQ ID NO: 1821326 - DNA, 25 bp, Homo sapien
tgtatttccttaaaccggagattca

SEQ ID NO: 1821327 - DNA, 25 bp, Homo sapien
ttagtggaaaggttgttggccttca

SEQ ID NO: 1821328 - DNA, 25 bp, Homo sapien
gccttcagtggagacagattttgta

SEQ ID NO: 1821329 - DNA, 25 bp, Homo sapien
ttgagagccaataccgtgccactgc

SEQ ID NO: 1821330 - DNA, 25 bp, Homo sapien
tggcacagttcaaccacggctacgt

SEQ ID NO: 1821331 - DNA, 25 bp, Homo sapien
ggctatggtcctaaatctggcacag

SEQ ID NO: 1821332 - DNA, 25 bp, Homo sapien
tagttattcataaaaagctgtggct

SEQ ID NO: 1821333 - DNA, 25 bp, Homo sapien
actgctggatctatttttggctgcc

SEQ ID NO: 1821334 - DNA, 25 bp, Homo sapien
gctgtgaggtatcaaaactgctgga

SEQ ID NO: 1821335 - DNA, 25 bp, Homo sapien
ttattctggagagttaaggtcgcca

SEQ ID NO: 1821336 - DNA, 25 bp, Homo sapien
ttaggtactaggctcagttactggc

SEQ ID NO: 1821337 - DNA, 25 bp, Homo sapien
taggctaggtaagatacctgtgcac

SEQ ID NO: 1821338 - DNA, 25 bp, Homo sapien
agtttcagggattatcaactcacag

SEQ ID NO: 1821339 - DNA, 25 bp, Homo sapien
gcttagttacagtgcagattggaca

SEQ ID NO: 1821340 - DNA, 25 bp, Homo sapien
taaactcgatgtacccttatccagt

SEQ ID NO: 1821341 - DNA, 25 bp, Homo sapien
ggcctgagtcacatcgcttcgtatt

SEQ ID NO: 1821342 - DNA, 25 bp, Homo sapien
tgatcaccggtgttcatctggaaga

SEQ ID NO: 1821343 - DNA, 25 bp, Homo sapien
tgccaaggatgctgattgattgccc

SEQ ID NO: 1821344 - DNA, 25 bp, Homo sapien
tgagggtcatgatacgcacctgcct

SEQ ID NO: 1821345 - DNA, 25 bp, Homo sapien
gtctcgatcaagttggagcccgcca

SEQ ID NO: 1821346 - DNA, 25 bp, Homo sapien
acatcgagagctacgtgctggccgc

SEQ ID NO: 1821347 - DNA, 25 bp, Homo sapien
tttgcggtggacttcaatgagcccc

SEQ ID NO: 1821348 - DNA, 25 bp, Homo sapien
cttcgagtgcaaggagtgcagcgcc

SEQ ID NO: 1821349 - DNA, 25 bp, Homo sapien
tccataggagacaagagtgcactgt

SEQ ID NO: 1821350 - DNA, 25 bp, Homo sapien
gatccggtgttcagtgtccaacgag

SEQ ID NO: 1821351 - DNA, 25 bp, Homo sapien
aactgtctacaccttgaatgctggc

SEQ ID NO: 1821352 - DNA, 25 bp, Homo sapien
ttacccctcgggagcatctcgtgtg

SEQ ID NO: 1821353 - DNA, 25 bp, Homo sapien
tatatttaccttcctgcgatgtggg

SEQ ID NO: 1821354 - DNA, 25 bp, Homo sapien
tgaccaggcacattactcgtgagcg

SEQ ID NO: 1821355 - DNA, 25 bp, Homo sapien
gaggagaatgtaccccactgcacct

SEQ ID NO: 1821356 - DNA, 25 bp, Homo sapien
ctcgtgagcgaggtattcccagtct

SEQ ID NO: 1821357 - DNA, 25 bp, Homo sapien
cctgtgcttgctgcagtgtatggag

SEQ ID NO: 1821358 - DNA, 25 bp, Homo sapien
gacttcacaggaagatagatattct

SEQ ID NO: 1821359 - DNA, 25 bp, Homo sapien
tgttcacacagaaacgtgcacgccc

SEQ ID NO: 1821360 - DNA, 25 bp, Homo sapien
tgaaaagtgatatcttcgcatacga

SEQ ID NO: 1821361 - DNA, 25 bp, Homo sapien
gaagctacgtaacagtcggatgcca

SEQ ID NO: 1821362 - DNA, 25 bp, Homo sapien
taatcagctcccagcgacgtgtgta

SEQ ID NO: 1821363 - DNA, 25 bp, Homo sapien
tgtgactaaactctacgctgcggtg

SEQ ID NO: 1821364 - DNA, 25 bp, Homo sapien
gatcctagtgatttcagcccatgca

SEQ ID NO: 1821365 - DNA, 25 bp, Homo sapien
tcacatcagagtggtgtgggctacg

SEQ ID NO: 1821366 - DNA, 25 bp, Homo sapien
acgccgcacagcagaccgtgaatag

SEQ ID NO: 1821367 - DNA, 25 bp, Homo sapien
gagggcatccgtgaatgcaccggaa

SEQ ID NO: 1821368 - DNA, 25 bp, Homo sapien
aatagacgcatgagcgagtcaggga

SEQ ID NO: 1821369 - DNA, 25 bp, Homo sapien
gggcgcactcaagctttcaacattg

SEQ ID NO: 1821370 - DNA, 25 bp, Homo sapien
tggagagatcgcatttggcagtact

SEQ ID NO: 1821371 - DNA, 25 bp, Homo sapien
gaaacgtcctagcaacagtgtgaga

SEQ ID NO: 1821372 - DNA, 25 bp, Homo sapien
tcatcaaacagtctaggcagaaggt

SEQ ID NO: 1821373 - DNA, 25 bp, Homo sapien
gagccgtaggagtgaatgagatcag

SEQ ID NO: 1821374 - DNA, 25 bp, Homo sapien
ccaggggtcgggtaagagctacagc

SEQ ID NO: 1821375 - DNA, 25 bp, Homo sapien
gaagaaagacttgtgggtccactgc

SEQ ID NO: 1821376 - DNA, 25 bp, Homo sapien
tgagatcaggaaaggtggccggggt

SEQ ID NO: 1821377 - DNA, 25 bp, Homo sapien
ccagggcaagtgcttgagtgcgcca

SEQ ID NO: 1821378 - DNA, 25 bp, Homo sapien
aaaatgcggactgcgcgagaaagcc

SEQ ID NO: 1821379 - DNA, 25 bp, Homo sapien
tagcgtccatgcgtgtccaggaaca

SEQ ID NO: 1821380 - DNA, 25 bp, Homo sapien
gaaagcctggcttttagcgtccatg

SEQ ID NO: 1821381 - DNA, 25 bp, Homo sapien
atttccaggccagcgcatctgattg

SEQ ID NO: 1821382 - DNA, 25 bp, Homo sapien
tgcgtttgcggtgcgggctccaccc

SEQ ID NO: 1821383 - DNA, 25 bp, Homo sapien
cacatggcagcgctgagacttgagt

SEQ ID NO: 1821384 - DNA, 25 bp, Homo sapien
acttgagtgctggaacagcccagcg

SEQ ID NO: 1821385 - DNA, 25 bp, Homo sapien
agttgacccgcttcacagtgaagcc

SEQ ID NO: 1821386 - DNA, 25 bp, Homo sapien
gcccctcaagcaacagggaaccaca

SEQ ID NO: 1821387 - DNA, 25 bp, Homo sapien
atttggatgggacttccagacgcct

SEQ ID NO: 1821388 - DNA, 25 bp, Homo sapien
tggaaaaagttgacccgcttcacag

SEQ ID NO: 1821389 - DNA, 25 bp, Homo sapien
cccctgtgactaccccagctctctg

SEQ ID NO: 1821390 - DNA, 25 bp, Homo sapien
ctggtgttcactcgcttggttccta

SEQ ID NO: 1821391 - DNA, 25 bp, Homo sapien
tccaaatcctaaatccttcttccaa

SEQ ID NO: 1821392 - DNA, 25 bp, Homo sapien
ccagctctctggtgttcactcgctt

SEQ ID NO: 1821393 - DNA, 25 bp, Homo sapien
ccaccacaggaatgcttgcctgtga

SEQ ID NO: 1821394 - DNA, 25 bp, Homo sapien
gagttgttgaacaagatcctggtat

SEQ ID NO: 1821395 - DNA, 25 bp, Homo sapien
aagatcctggtatacaccatcatca

SEQ ID NO: 1821396 - DNA, 25 bp, Homo sapien
tgggccgtaaactcgcaatattcct

SEQ ID NO: 1821397 - DNA, 25 bp, Homo sapien
caaaacgatgcagaaaagatggccg

SEQ ID NO: 1821398 - DNA, 25 bp, Homo sapien
caggcgtaacccgtgtttgcaggca

SEQ ID NO: 1821399 - DNA, 25 bp, Homo sapien
taaggtacgcgttccaaccatcacg

SEQ ID NO: 1821400 - DNA, 25 bp, Homo sapien
tttgcaggcataactcgtgcgcacg

SEQ ID NO: 1821401 - DNA, 25 bp, Homo sapien
taataagcgatcagagtatgcagtc

SEQ ID NO: 1821402 - DNA, 25 bp, Homo sapien
tactgacttactggctgggtataca

SEQ ID NO: 1821403 - DNA, 25 bp, Homo sapien
cattgcagagaagacgtaatgctgg

SEQ ID NO: 1821404 - DNA, 25 bp, Homo sapien
tgattctccagagtttgcacagcct

SEQ ID NO: 1821405 - DNA, 25 bp, Homo sapien
cgtgcgtcttgagaccaagcaggaa

SEQ ID NO: 1821406 - DNA, 25 bp, Homo sapien
tgagaccaagcaggaatatgcactg

SEQ ID NO: 1821407 - DNA, 25 bp, Homo sapien
aatatgcactggtactttagaaaac

SEQ ID NO: 1821408 - DNA, 25 bp, Homo sapien
attttggattcctcgtgcgtcttga

SEQ ID NO: 1821409 - DNA, 25 bp, Homo sapien
gatcagctttaatttaagggacatg

SEQ ID NO: 1821410 - DNA, 25 bp, Homo sapien
tttcatgatcagctttaatttaagg

SEQ ID NO: 1821411 - DNA, 25 bp, Homo sapien
atgatcagctttaatttaagggaca

SEQ ID NO: 1821412 - DNA, 25 bp, Homo sapien
tcatgatcagctttaatttaaggga

SEQ ID NO: 1821413 - DNA, 25 bp, Homo sapien
gaggtgtccaattagacgggcacaa

SEQ ID NO: 1821414 - DNA, 25 bp, Homo sapien
aactggcacgctctggaaaggctgg

SEQ ID NO: 1821415 - DNA, 25 bp, Homo sapien
tagttcaagcaggaggttagaccag

SEQ ID NO: 1821416 - DNA, 25 bp, Homo sapien
taaacgtacaagttgaggccgagga

SEQ ID NO: 1821417 - DNA, 25 bp, Homo sapien
aaagggccagcagcttgtaggacca

SEQ ID NO: 1821418 - DNA, 25 bp, Homo sapien
tgtgctagctgggtggacttcaagt

SEQ ID NO: 1821419 - DNA, 25 bp, Homo sapien
tctagatctgattcccacagtggag

SEQ ID NO: 1821420 - DNA, 25 bp, Homo sapien
ccttgaaaccagatccgggaagcca

SEQ ID NO: 1821421 - DNA, 25 bp, Homo sapien
gatggcaactggtccttttaggaga

SEQ ID NO: 1821422 - DNA, 25 bp, Homo sapien
tgtggatgatggcaactggtccttt

SEQ ID NO: 1821423 - DNA, 25 bp, Homo sapien
caactggtccttttaggagagccat

SEQ ID NO: 1821424 - DNA, 25 bp, Homo sapien
gaatcttccactgtggatgatggca

SEQ ID NO: 1821425 - DNA, 25 bp, Homo sapien
tgttgaagctagaacccaggtgagt

SEQ ID NO: 1821426 - DNA, 25 bp, Homo sapien
tggcaacagaccaaacgtgaggagt

SEQ ID NO: 1821427 - DNA, 25 bp, Homo sapien
caaggttacctagggcagttgtgaa

SEQ ID NO: 1821428 - DNA, 25 bp, Homo sapien
tattccaaccaagccggaaatggca

SEQ ID NO: 1821429 - DNA, 25 bp, Homo sapien
gacccaggcaatgttctaagcagct

SEQ ID NO: 1821430 - DNA, 25 bp, Homo sapien
tattacagtatggtgctttacagcg

SEQ ID NO: 1821431 - DNA, 25 bp, Homo sapien
aaatgagagcagtcacttaagcggc

SEQ ID NO: 1821432 - DNA, 25 bp, Homo sapien
taagcggcttactgagacccaggca

SEQ ID NO: 1821433 - DNA, 25 bp, Homo sapien
aggtctcctaattcccacgctagca

SEQ ID NO: 1821434 - DNA, 25 bp, Homo sapien
ggtttgtaggtcacagaatcagact

SEQ ID NO: 1821435 - DNA, 25 bp, Homo sapien
gactatttagggctgatacttcaag

SEQ ID NO: 1821436 - DNA, 25 bp, Homo sapien
gccaatactagcgtatcaccaggaa

SEQ ID NO: 1821437 - DNA, 25 bp, Homo sapien
tcaaagagtaatagggttctaccta

SEQ ID NO: 1821438 - DNA, 25 bp, Homo sapien
gggttctacctaattgtgaactaga

SEQ ID NO: 1821439 - DNA, 25 bp, Homo sapien
taatagggttctacctaattgtgaa

SEQ ID NO: 1821440 - DNA, 25 bp, Homo sapien
ttcttcaaagagtaatagggttcta

SEQ ID NO: 1821441 - DNA, 25 bp, Homo sapien
agaagccttaccctgtgagccgggc

SEQ ID NO: 1821442 - DNA, 25 bp, Homo sapien
acaggctgccatgggtactgacaga

SEQ ID NO: 1821443 - DNA, 25 bp, Homo sapien
gaagtctacataagggacagcaggg

SEQ ID NO: 1821444 - DNA, 25 bp, Homo sapien
cagtccagaaggagatgtcaacaag

SEQ ID NO: 1821445 - DNA, 25 bp, Homo sapien
cacatcattaagtaaaggtggcaat

SEQ ID NO: 1821446 - DNA, 25 bp, Homo sapien
tgaggctcgcctattactatattga

SEQ ID NO: 1821447 - DNA, 25 bp, Homo sapien
tgatctactgtacctcgaaaataac

SEQ ID NO: 1821448 - DNA, 25 bp, Homo sapien
gatgaatgctatatatgaggctcgc

SEQ ID NO: 1821449 - DNA, 25 bp, Homo sapien
tctgaaaacatagttggtgtagcaa

SEQ ID NO: 1821450 - DNA, 25 bp, Homo sapien
tgtgcttgaacaaaccatgtgtgga

SEQ ID NO: 1821451 - DNA, 25 bp, Homo sapien
ggtttgatacacaagatccttaaag

SEQ ID NO: 1821452 - DNA, 25 bp, Homo sapien
ttcattacggagttagtttctgcta

SEQ ID NO: 1821453 - DNA, 25 bp, Homo sapien
catctgaggatttaagagttcaact

SEQ ID NO: 1821454 - DNA, 25 bp, Homo sapien
tgatgctagagcagacccctggcat

SEQ ID NO: 1821455 - DNA, 25 bp, Homo sapien
tgctagagcagacccctggcatctg

SEQ ID NO: 1821456 - DNA, 25 bp, Homo sapien
cctggcatctgaggatttaagagtt

SEQ ID NO: 1821457 - DNA, 25 bp, Homo sapien
tgcagctgcctacgttagtaccagg

SEQ ID NO: 1821458 - DNA, 25 bp, Homo sapien
tgatagcccctatttgcaaagtgat

SEQ ID NO: 1821459 - DNA, 25 bp, Homo sapien
tacaatctagggcaagagtaactct

SEQ ID NO: 1821460 - DNA, 25 bp, Homo sapien
tattccataaaactctgtagaggcc

SEQ ID NO: 1821461 - DNA, 25 bp, Homo sapien
tctgcttagtgtgtggaccaaggca

SEQ ID NO: 1821462 - DNA, 25 bp, Homo sapien
caacaatgattctggtaagaccaac

SEQ ID NO: 1821463 - DNA, 25 bp, Homo sapien
gaagatgcgcattaaacagcagcaa

SEQ ID NO: 1821464 - DNA, 25 bp, Homo sapien
cacacaactgagtgagtaggtctaa

SEQ ID NO: 1821465 - DNA, 25 bp, Homo sapien
cacgcacacacatagattttaatgg

SEQ ID NO: 1821466 - DNA, 25 bp, Homo sapien
acacgcacacacatagattttaatg

SEQ ID NO: 1821467 - DNA, 25 bp, Homo sapien
cacacgcacacacatagattttaat

SEQ ID NO: 1821468 - DNA, 25 bp, Homo sapien
cgcacacacatagattttaatggtt

SEQ ID NO: 1821469 - DNA, 25 bp, Homo sapien
tgctcagtccacacacaagtaggag

SEQ ID NO: 1821470 - DNA, 25 bp, Homo sapien
taggagttgccttctatggtgacat

SEQ ID NO: 1821471 - DNA, 25 bp, Homo sapien
tcagcaatattatcgccacagactc

SEQ ID NO: 1821472 - DNA, 25 bp, Homo sapien
taaagaccgaattgttgcacaaagg

SEQ ID NO: 1821473 - DNA, 25 bp, Homo sapien
ttcctgggcaaccttcttggtgaag

SEQ ID NO: 1821474 - DNA, 25 bp, Homo sapien
cctgggcaaccttcttggtgaagct

SEQ ID NO: 1821475 - DNA, 25 bp, Homo sapien
cgtttcctgggcaaccttcttggtg

SEQ ID NO: 1821476 - DNA, 25 bp, Homo sapien
atctcttctgtgcccgtttcctggg

SEQ ID NO: 1821477 - DNA, 25 bp, Homo sapien
tgcataagtaaacgcttaaaaactg

SEQ ID NO: 1821478 - DNA, 25 bp, Homo sapien
agtaaacgcttaaaaactgctgatt

SEQ ID NO: 1821479 - DNA, 25 bp, Homo sapien
taagtaaacgcttaaaaactgctga

SEQ ID NO: 1821480 - DNA, 25 bp, Homo sapien
tatacatgcataagtaaacgcttaa

SEQ ID NO: 1821481 - DNA, 25 bp, Homo sapien
gccttaacatttccagtagctgaga

SEQ ID NO: 1821482 - DNA, 25 bp, Homo sapien
tatgacagctagctcacagaaagag

SEQ ID NO: 1821483 - DNA, 25 bp, Homo sapien
aaagtggctctttgacctaggagtc

SEQ ID NO: 1821484 - DNA, 25 bp, Homo sapien
cagcactgaggaaccggtggataca

SEQ ID NO: 1821485 - DNA, 25 bp, Homo sapien
atttccaaattaaagcataagaaga

SEQ ID NO: 1821486 - DNA, 25 bp, Homo sapien
ctttaaggtcttaattaatcactat

SEQ ID NO: 1821487 - DNA, 25 bp, Homo sapien
ctacacactgaataaacctttaagg

SEQ ID NO: 1821488 - DNA, 25 bp, Homo sapien
ttctactctgcactgaagcaacaga

SEQ ID NO: 1821489 - DNA, 25 bp, Homo sapien
tcaacatcattctgacttgatgtac

SEQ ID NO: 1821490 - DNA, 25 bp, Homo sapien
tgacttgatgtacccatttctactt

SEQ ID NO: 1821491 - DNA, 25 bp, Homo sapien
tcattctgacttgatgtacccattt

SEQ ID NO: 1821492 - DNA, 25 bp, Homo sapien
tctgacttgatgtacccatttctac

SEQ ID NO: 1821493 - DNA, 25 bp, Homo sapien
gagtattaacgcaggctgagtgtgg

SEQ ID NO: 1821494 - DNA, 25 bp, Homo sapien
ggaaaccaacatgagaggacagctt

SEQ ID NO: 1821495 - DNA, 25 bp, Homo sapien
ctttgggaaaccaacatgagaggac

SEQ ID NO: 1821496 - DNA, 25 bp, Homo sapien
agagtattaacgcaggctgagtgtg

SEQ ID NO: 1821497 - DNA, 25 bp, Homo sapien
gatgacttgagccccgaaggcggag

SEQ ID NO: 1821498 - DNA, 25 bp, Homo sapien
atgacttgagccccgaaggcggagg

SEQ ID NO: 1821499 - DNA, 25 bp, Homo sapien
ggatgacttgagccccgaaggcgga

SEQ ID NO: 1821500 - DNA, 25 bp, Homo sapien
gatgaaggccaacaataaccagaag

SEQ ID NO: 1821501 - DNA, 25 bp, Homo sapien
acaataaccagaagcccaagaccag

SEQ ID NO: 1821502 - DNA, 25 bp, Homo sapien
tctagattctaggagttgatgaagg

SEQ ID NO: 1821503 - DNA, 25 bp, Homo sapien
aagaccagcaaggaacatatacata

SEQ ID NO: 1821504 - DNA, 25 bp, Homo sapien
ttgaagactgcatcttggaatacat

SEQ ID NO: 1821505 - DNA, 25 bp, Homo sapien
gaagactgcatcttggaatacattg

SEQ ID NO: 1821506 - DNA, 25 bp, Homo sapien
gattgaagactgcatcttggaatac

SEQ ID NO: 1821507 - DNA, 25 bp, Homo sapien
agactgcatcttggaatacattgcc

SEQ ID NO: 1821508 - DNA, 25 bp, Homo sapien
ggtggcactacagtgttcagaggaa

SEQ ID NO: 1821509 - DNA, 25 bp, Homo sapien
aaccaaatggtcgtccgcccatggg

SEQ ID NO: 1821510 - DNA, 25 bp, Homo sapien
tagttcagattgatgaccaaaccaa

SEQ ID NO: 1821511 - DNA, 25 bp, Homo sapien
ctgaggataacggaatgaggcatct

SEQ ID NO: 1821512 - DNA, 25 bp, Homo sapien
ttacaaacagtatagttgtatctgc

SEQ ID NO: 1821513 - DNA, 25 bp, Homo sapien
agttgtatctgcactcggtgaagct

SEQ ID NO: 1821514 - DNA, 25 bp, Homo sapien
tctccttttacaaacagtatagttg

SEQ ID NO: 1821515 - DNA, 25 bp, Homo sapien
tagttgtatctgcactcggtgaagc

SEQ ID NO: 1821516 - DNA, 25 bp, Homo sapien
agtgcctcttgaacagtaatgtgcc

SEQ ID NO: 1821517 - DNA, 25 bp, Homo sapien
gtaatgtgcctaccaattctttggg

SEQ ID NO: 1821518 - DNA, 25 bp, Homo sapien
ttgcagatctaattcaggtctaggg

SEQ ID NO: 1821519 - DNA, 25 bp, Homo sapien
ggttgtatgagctgagaatgcccca

SEQ ID NO: 1821520 - DNA, 25 bp, Homo sapien
tgttattactactacagctcttgtt

SEQ ID NO: 1821521 - DNA, 25 bp, Homo sapien
agtgtagtggagtatagtgcccagg

SEQ ID NO: 1821522 - DNA, 25 bp, Homo sapien
ttagttagtgttattactactacag

SEQ ID NO: 1821523 - DNA, 25 bp, Homo sapien
aacaaaaacctctctcatttctatg

SEQ ID NO: 1821524 - DNA, 25 bp, Homo sapien
caaatctgtgggttcatcttcttct

SEQ ID NO: 1821525 - DNA, 25 bp, Homo sapien
aaatctgtgggttcatcttcttcta

SEQ ID NO: 1821526 - DNA, 25 bp, Homo sapien
aatctgtgggttcatcttcttctac

SEQ ID NO: 1821527 - DNA, 25 bp, Homo sapien
agatcttgtgccactgctaacaagc

SEQ ID NO: 1821528 - DNA, 25 bp, Homo sapien
ctgtaagatcttgtgccactgctaa

SEQ ID NO: 1821529 - DNA, 25 bp, Homo sapien
catcctcaattatggaatcttctac

SEQ ID NO: 1821530 - DNA, 25 bp, Homo sapien
cttcatcctcaattatggaatcttc

SEQ ID NO: 1821531 - DNA, 25 bp, Homo sapien
gaactaaagagatttcactgcctgc

SEQ ID NO: 1821532 - DNA, 25 bp, Homo sapien
tttaagttctcactggctgctaaga

SEQ ID NO: 1821533 - DNA, 25 bp, Homo sapien
actgcctgctgaacaaagcctaaaa

SEQ ID NO: 1821534 - DNA, 25 bp, Homo sapien
taaagtcgtggttaaatttgagcac

SEQ ID NO: 1821535 - DNA, 25 bp, Homo sapien
aacctgcagattaactcattaacag

SEQ ID NO: 1821536 - DNA, 25 bp, Homo sapien
taaaaaatcttgttaaacctgcaga

SEQ ID NO: 1821537 - DNA, 25 bp, Homo sapien
gcagattaactcattaacagttgtt

SEQ ID NO: 1821538 - DNA, 25 bp, Homo sapien
tcttgttaaacctgcagattaactc

SEQ ID NO: 1821539 - DNA, 25 bp, Homo sapien
cttttcatcgcaaaacaactcgtga

SEQ ID NO: 1821540 - DNA, 25 bp, Homo sapien
tgaaagggatgcttagtcagactaa

SEQ ID NO: 1821541 - DNA, 25 bp, Homo sapien
gcttgcttaaacttacagaatgaaa

SEQ ID NO: 1821542 - DNA, 25 bp, Homo sapien
tgtcactaccgttaagacacacagc

SEQ ID NO: 1821543 - DNA, 25 bp, Homo sapien
ccggagcggccaccgcctccaactt

SEQ ID NO: 1821544 - DNA, 25 bp, Homo sapien
ctggccatcccctccgcacactccc

SEQ ID NO: 1821545 - DNA, 25 bp, Homo sapien
cggccaccgcctccaacttcaaact

SEQ ID NO: 1821546 - DNA, 25 bp, Homo sapien
ccaggacccggagcggccaccgcct

SEQ ID NO: 1821547 - DNA, 25 bp, Homo sapien
ggaacacgagtaagagaagcagcag

SEQ ID NO: 1821548 - DNA, 25 bp, Homo sapien
ctggggccgcctcggaacaagacag

SEQ ID NO: 1821549 - DNA, 25 bp, Homo sapien
cgcctcggaacaagacagtggcagg

SEQ ID NO: 1821550 - DNA, 25 bp, Homo sapien
agacagtggcagggaacacgagtaa

SEQ ID NO: 1821551 - DNA, 25 bp, Homo sapien
cggctccggcggtaatggcgttact

SEQ ID NO: 1821552 - DNA, 25 bp, Homo sapien
tgtccagtttccgtcggctaaggct

SEQ ID NO: 1821553 - DNA, 25 bp, Homo sapien
tcggctaaggctctcggcggctccg

SEQ ID NO: 1821554 - DNA, 25 bp, Homo sapien
tggcgttactcttcatccgggctcc

SEQ ID NO: 1821555 - DNA, 25 bp, Homo sapien
catatgtagtaatgactcttcctgg

SEQ ID NO: 1821556 - DNA, 25 bp, Homo sapien
catctgcatggattgatttggctag

SEQ ID NO: 1821557 - DNA, 25 bp, Homo sapien
ctcttcctggagtggttgacaaaaa

SEQ ID NO: 1821558 - DNA, 25 bp, Homo sapien
catctttggaatgtaagactttacc

SEQ ID NO: 1821559 - DNA, 25 bp, Homo sapien
tattttctttaaaaagagctggcat

SEQ ID NO: 1821560 - DNA, 25 bp, Homo sapien
tctattttctttaaaaagagctggc

SEQ ID NO: 1821561 - DNA, 25 bp, Homo sapien
ctattttctttaaaaagagctggca

SEQ ID NO: 1821562 - DNA, 25 bp, Homo sapien
gcgcccagcctgtatcctataaata

SEQ ID NO: 1821563 - DNA, 25 bp, Homo sapien
cagcctgtatcctataaatatgtac

SEQ ID NO: 1821564 - DNA, 25 bp, Homo sapien
cgcgcccagcctgtatcctataaat

SEQ ID NO: 1821565 - DNA, 25 bp, Homo sapien
gcccagcctgtatcctataaatatg

SEQ ID NO: 1821566 - DNA, 25 bp, Homo sapien
tcatggacttcggatgattttctaa

SEQ ID NO: 1821567 - DNA, 25 bp, Homo sapien
catggtcatggacttcggatgattt

SEQ ID NO: 1821568 - DNA, 25 bp, Homo sapien
tggtcatggacttcggatgattttc

SEQ ID NO: 1821569 - DNA, 25 bp, Homo sapien
atggacttcggatgattttctaagc

SEQ ID NO: 1821570 - DNA, 25 bp, Homo sapien
tttggggtcacggtaagatacacag

SEQ ID NO: 1821571 - DNA, 25 bp, Homo sapien
cgtaagtctggacaaggcaaatccc

SEQ ID NO: 1821572 - DNA, 25 bp, Homo sapien
atttccatgacaccaacactatagt

SEQ ID NO: 1821573 - DNA, 25 bp, Homo sapien
caaaagagacccgtaagtctggaca

SEQ ID NO: 1821574 - DNA, 25 bp, Homo sapien
cacaccagtctcaatgtctctgctg

SEQ ID NO: 1821575 - DNA, 25 bp, Homo sapien
gcagtgcctgcaccgttacatttca

SEQ ID NO: 1821576 - DNA, 25 bp, Homo sapien
gttacatttcacaccagtctcaatg

SEQ ID NO: 1821577 - DNA, 25 bp, Homo sapien
agccactcctaatgttgcagtgcct

SEQ ID NO: 1821578 - DNA, 25 bp, Homo sapien
agagccctctccaggtctgtatgca

SEQ ID NO: 1821579 - DNA, 25 bp, Homo sapien
actctttggtttagctgagacacac

SEQ ID NO: 1821580 - DNA, 25 bp, Homo sapien
gcaactctacgctgtttaagataga

SEQ ID NO: 1821581 - DNA, 25 bp, Homo sapien
gcaggcgagcttggcataggcaaac

SEQ ID NO: 1821582 - DNA, 25 bp, Homo sapien
ctggctttttctctgggctttctaa

SEQ ID NO: 1821583 - DNA, 25 bp, Homo sapien
taaatcctctaaatgtttatttctc

SEQ ID NO: 1821584 - DNA, 25 bp, Homo sapien
tctctgggctttctaattaaatcct

SEQ ID NO: 1821585 - DNA, 25 bp, Homo sapien
aaatcctctaaatgtttatttctct

SEQ ID NO: 1821586 - DNA, 25 bp, Homo sapien
gttgagaaggctatcctttttccac

SEQ ID NO: 1821587 - DNA, 25 bp, Homo sapien
gcctttatctttgggtatattatcc

SEQ ID NO: 1821588 - DNA, 25 bp, Homo sapien
tgagtttacttcgtatgtggtggag

SEQ ID NO: 1821589 - DNA, 25 bp, Homo sapien
aattgacccatgaaagagatatacc

SEQ ID NO: 1821590 - DNA, 25 bp, Homo sapien
gttagtaggctttttgtaggtgctc

SEQ ID NO: 1821591 - DNA, 25 bp, Homo sapien
ttttgcttcatgtccaatttggatg

SEQ ID NO: 1821592 - DNA, 25 bp, Homo sapien
gagaaagcatttagtctatcatcat

SEQ ID NO: 1821593 - DNA, 25 bp, Homo sapien
gaatgtactggaatgtcttgttcct

SEQ ID NO: 1821594 - DNA, 25 bp, Homo sapien
tgtggtgactgagggcacggcagga

SEQ ID NO: 1821595 - DNA, 25 bp, Homo sapien
caaggagatcctgttatgctgtggt

SEQ ID NO: 1821596 - DNA, 25 bp, Homo sapien
ggagatcctgttatgctgtggtgac

SEQ ID NO: 1821597 - DNA, 25 bp, Homo sapien
ctgtggtgactgagggcacggcagg

SEQ ID NO: 1821598 - DNA, 25 bp, Homo sapien
gggtggtgggcagttatctcatctt

SEQ ID NO: 1821599 - DNA, 25 bp, Homo sapien
tggtgggcagttatctcatctttgg

SEQ ID NO: 1821600 - DNA, 25 bp, Homo sapien
catctttgggttccacgatgctcac

SEQ ID NO: 1821601 - DNA, 25 bp, Homo sapien
gggggtggtgggcagttatctcatc

SEQ ID NO: 1821602 - DNA, 25 bp, Homo sapien
gcttcttagggccaatcttaccagt

SEQ ID NO: 1821603 - DNA, 25 bp, Homo sapien
gggcagcatgatcttcaccttgatg

SEQ ID NO: 1821604 - DNA, 25 bp, Homo sapien
tagggccaatcttaccagttgggtc

SEQ ID NO: 1821605 - DNA, 25 bp, Homo sapien
gccaatcttaccagttgggtcccag

SEQ ID NO: 1821606 - DNA, 25 bp, Homo sapien
gcacactctgtctgagcaacacatg

SEQ ID NO: 1821607 - DNA, 25 bp, Homo sapien
cacatggcgcacagcagtgtcaacg

SEQ ID NO: 1821608 - DNA, 25 bp, Homo sapien
atcaggccgtccacaaacttcatgg

SEQ ID NO: 1821609 - DNA, 25 bp, Homo sapien
caacgtagtagttaacagggtctct

SEQ ID NO: 1821610 - DNA, 25 bp, Homo sapien
ccagtttccatgatgaaccgcgaca

SEQ ID NO: 1821611 - DNA, 25 bp, Homo sapien
gtttccatgatgaaccgcgacacac

SEQ ID NO: 1821612 - DNA, 25 bp, Homo sapien
agtttccatgatgaaccgcgacaca

SEQ ID NO: 1821613 - DNA, 25 bp, Homo sapien
cagtttccatgatgaaccgcgacac

SEQ ID NO: 1821614 - DNA, 25 bp, Homo sapien
aactacagcagtcagttcccgaatc

SEQ ID NO: 1821615 - DNA, 25 bp, Homo sapien
gccctcctaggagtttgtaaggcag

SEQ ID NO: 1821616 - DNA, 25 bp, Homo sapien
cctagtggccacctcttcagcataa

SEQ ID NO: 1821617 - DNA, 25 bp, Homo sapien
ataaagctctacactgccctctgga

SEQ ID NO: 1821618 - DNA, 25 bp, Homo sapien
gtaactcgcatctcaactccagagt

SEQ ID NO: 1821619 - DNA, 25 bp, Homo sapien
gccagctcctgagtaagaaactcat

SEQ ID NO: 1821620 - DNA, 25 bp, Homo sapien
tgttctggtggctaagacaatgatt

SEQ ID NO: 1821621 - DNA, 25 bp, Homo sapien
tcctggttggtgtaactcgcatctc

SEQ ID NO: 1821622 - DNA, 25 bp, Homo sapien
ggaaatttgtaaggcgatcttgccg

SEQ ID NO: 1821623 - DNA, 25 bp, Homo sapien
ttgtaaggcgatcttgccgccatgc

SEQ ID NO: 1821624 - DNA, 25 bp, Homo sapien
aatttgtaaggcgatcttgccgcca

SEQ ID NO: 1821625 - DNA, 25 bp, Homo sapien
tttgtaaggcgatcttgccgccatg

SEQ ID NO: 1821626 - DNA, 25 bp, Homo sapien
tgatgtatggccaattttagccggg

SEQ ID NO: 1821627 - DNA, 25 bp, Homo sapien
ccggggggagctcgtctgcaaagat

SEQ ID NO: 1821628 - DNA, 25 bp, Homo sapien
cacagaactgatgtatggccaattt

SEQ ID NO: 1821629 - DNA, 25 bp, Homo sapien
tgcaaagatgaggtggaaccggcct

SEQ ID NO: 1821630 - DNA, 25 bp, Homo sapien
ggctttgccacaggataacaacagc

SEQ ID NO: 1821631 - DNA, 25 bp, Homo sapien
gctttgccacaggataacaacagct

SEQ ID NO: 1821632 - DNA, 25 bp, Homo sapien
ctttgccacaggataacaacagctt

SEQ ID NO: 1821633 - DNA, 25 bp, Homo sapien
aggctttgccacaggataacaacag

SEQ ID NO: 1821634 - DNA, 25 bp, Homo sapien
cacagccggtagttattggtgggca

SEQ ID NO: 1821635 - DNA, 25 bp, Homo sapien
ccaatgcctttagcttggcagtgat

SEQ ID NO: 1821636 - DNA, 25 bp, Homo sapien
gatctccaatgcctttagcttggca

SEQ ID NO: 1821637 - DNA, 25 bp, Homo sapien
gagcttcccacagccggtagttatt

SEQ ID NO: 1821638 - DNA, 25 bp, Homo sapien
tcaaaaacacagatagcatgtaaat

SEQ ID NO: 1821639 - DNA, 25 bp, Homo sapien
gtggtgggtgtaaacagagtaccaa

SEQ ID NO: 1821640 - DNA, 25 bp, Homo sapien
taaacagagtaccaaagaggaagcc

SEQ ID NO: 1821641 - DNA, 25 bp, Homo sapien
aggcagacttttcatgcttaggaca

SEQ ID NO: 1821642 - DNA, 25 bp, Homo sapien
tccatcgcgagtctgaggagtagat

SEQ ID NO: 1821643 - DNA, 25 bp, Homo sapien
aattccaggtattccatcgcgagtc

SEQ ID NO: 1821644 - DNA, 25 bp, Homo sapien
caggtattccatcgcgagtctgagg

SEQ ID NO: 1821645 - DNA, 25 bp, Homo sapien
caaattccaggtattccatcgcgag

SEQ ID NO: 1821646 - DNA, 25 bp, Homo sapien
cctctcaggcctagctttaagcagg

SEQ ID NO: 1821647 - DNA, 25 bp, Homo sapien
tttcctctcaggcctagctttaagc

SEQ ID NO: 1821648 - DNA, 25 bp, Homo sapien
tctcaggcctagctttaagcagggc

SEQ ID NO: 1821649 - DNA, 25 bp, Homo sapien
ttaagcagggcttcctctaacttgt

SEQ ID NO: 1821650 - DNA, 25 bp, Homo sapien
tggaacagatgggtgtttgcaacag

SEQ ID NO: 1821651 - DNA, 25 bp, Homo sapien
aactcaaccttcacgtacaggcagg

SEQ ID NO: 1821652 - DNA, 25 bp, Homo sapien
gaacagatgggtgtttgcaacagtg

SEQ ID NO: 1821653 - DNA, 25 bp, Homo sapien
cacgtacaggcaggagctaaagtca

SEQ ID NO: 1821654 - DNA, 25 bp, Homo sapien
gaaggcctcgcttggatcacacaga

SEQ ID NO: 1821655 - DNA, 25 bp, Homo sapien
aaggcctcgcttggatcacacagaa

SEQ ID NO: 1821656 - DNA, 25 bp, Homo sapien
ctatagaagggagcaggcgccagga

SEQ ID NO: 1821657 - DNA, 25 bp, Homo sapien
tatagaagggagcaggcgccaggaa

SEQ ID NO: 1821658 - DNA, 25 bp, Homo sapien
atcaagtcgggcaggtgccttgcac

SEQ ID NO: 1821659 - DNA, 25 bp, Homo sapien
gatcaagtcgggcaggtgccttgca

SEQ ID NO: 1821660 - DNA, 25 bp, Homo sapien
tctggatcaagtcgggcaggtgcct

SEQ ID NO: 1821661 - DNA, 25 bp, Homo sapien
tggatcaagtcgggcaggtgccttg

SEQ ID NO: 1821662 - DNA, 25 bp, Homo sapien
gatgtcctcaatgccgttcgtgtca

SEQ ID NO: 1821663 - DNA, 25 bp, Homo sapien
ttcttgcaggaacgggtgccctctc

SEQ ID NO: 1821664 - DNA, 25 bp, Homo sapien
gaactgggccacttcttcttgcagg

SEQ ID NO: 1821665 - DNA, 25 bp, Homo sapien
tggtgccaaggttaacgaagctcaa

SEQ ID NO: 1821666 - DNA, 25 bp, Homo sapien
tgtgcctccattcttccagcggcag

SEQ ID NO: 1821667 - DNA, 25 bp, Homo sapien
gtgtgcctccattcttccagcggca

SEQ ID NO: 1821668 - DNA, 25 bp, Homo sapien
tcagctgcatgaagtactccctcat

SEQ ID NO: 1821669 - DNA, 25 bp, Homo sapien
tcatcagctgcatgaagtactccct

SEQ ID NO: 1821670 - DNA, 25 bp, Homo sapien
ggagtgggatattgcaagcctttgg

SEQ ID NO: 1821671 - DNA, 25 bp, Homo sapien
gggatattgcaagcctttggtcagc

SEQ ID NO: 1821672 - DNA, 25 bp, Homo sapien
agtgggatattgcaagcctttggtc

SEQ ID NO: 1821673 - DNA, 25 bp, Homo sapien
ctgggagtgggatattgcaagcctt

SEQ ID NO: 1821674 - DNA, 25 bp, Homo sapien
cttctttattaagttgcctaaatgt

SEQ ID NO: 1821675 - DNA, 25 bp, Homo sapien
tgactctaggagatgtcccagtttt

SEQ ID NO: 1821676 - DNA, 25 bp, Homo sapien
tttgactctaggagatgtcccagtt

SEQ ID NO: 1821677 - DNA, 25 bp, Homo sapien
gcctaaatgtctttgatacttgtca

SEQ ID NO: 1821678 - DNA, 25 bp, Homo sapien
ctgcccatgtgtactgcagcacaga

SEQ ID NO: 1821679 - DNA, 25 bp, Homo sapien
atcagtaccattaagtggacttttg

SEQ ID NO: 1821680 - DNA, 25 bp, Homo sapien
tcagtaccattaagtggacttttgc

SEQ ID NO: 1821681 - DNA, 25 bp, Homo sapien
aaatccctgactgtatcagtgtctt

SEQ ID NO: 1821682 - DNA, 25 bp, Homo sapien
cagtaccattaagtggacttttgcc

SEQ ID NO: 1821683 - DNA, 25 bp, Homo sapien
catttagactgtggtacttatccag

SEQ ID NO: 1821684 - DNA, 25 bp, Homo sapien
caagaaatcaagctcctcatttaga

SEQ ID NO: 1821685 - DNA, 25 bp, Homo sapien
ggtaggtacatctctgatactcttg

SEQ ID NO: 1821686 - DNA, 25 bp, Homo sapien
gctcccagaagggtaggtacatctc

SEQ ID NO: 1821687 - DNA, 25 bp, Homo sapien
taaatatatttgttctcactttcaa

SEQ ID NO: 1821688 - DNA, 25 bp, Homo sapien
aatatatttgttctcactttcaatc

SEQ ID NO: 1821689 - DNA, 25 bp, Homo sapien
atatttgttctcactttcaatcatt

SEQ ID NO: 1821690 - DNA, 25 bp, Homo sapien
atatatttgttctcactttcaatca

SEQ ID NO: 1821691 - DNA, 25 bp, Homo sapien
ttccttagcaattaactctctaaag

SEQ ID NO: 1821692 - DNA, 25 bp, Homo sapien
taactctctaaaggttgtgattcta

SEQ ID NO: 1821693 - DNA, 25 bp, Homo sapien
gcaattaactctctaaaggttgtga

SEQ ID NO: 1821694 - DNA, 25 bp, Homo sapien
ctctctaaaggttgtgattctatct

SEQ ID NO: 1821695 - DNA, 25 bp, Homo sapien
agatggaggctcttcagtttttgca

SEQ ID NO: 1821696 - DNA, 25 bp, Homo sapien
gatggaggctcttcagtttttgcag

SEQ ID NO: 1821697 - DNA, 25 bp, Homo sapien
ttaagatggaggctcttcagttttt

SEQ ID NO: 1821698 - DNA, 25 bp, Homo sapien
aagatggaggctcttcagtttttgc

SEQ ID NO: 1821699 - DNA, 25 bp, Homo sapien
tcactctctttgaaatgttcagcat

SEQ ID NO: 1821700 - DNA, 25 bp, Homo sapien
gttcagcatcagaattgatgatgtc

SEQ ID NO: 1821701 - DNA, 25 bp, Homo sapien
ctctctttgaaatgttcagcatcag

SEQ ID NO: 1821702 - DNA, 25 bp, Homo sapien
tctcactctctttgaaatgttcagc

SEQ ID NO: 1821703 - DNA, 25 bp, Homo sapien
tccgggagcagattagaatgtgtcg

SEQ ID NO: 1821704 - DNA, 25 bp, Homo sapien
tgagaagctctttttatatctgcag

SEQ ID NO: 1821705 - DNA, 25 bp, Homo sapien
tatctgcaggattcagcctctcttc

SEQ ID NO: 1821706 - DNA, 25 bp, Homo sapien
cttcacaaggtgagcaatccgggag

SEQ ID NO: 1821707 - DNA, 25 bp, Homo sapien
ttagagatttagaatgtgtatcaat

SEQ ID NO: 1821708 - DNA, 25 bp, Homo sapien
agagatttagaatgtgtatcaatac

SEQ ID NO: 1821709 - DNA, 25 bp, Homo sapien
tagagatttagaatgtgtatcaata

SEQ ID NO: 1821710 - DNA, 25 bp, Homo sapien
caagacttcctctaattgatccttt

SEQ ID NO: 1821711 - DNA, 25 bp, Homo sapien
ttttacttcgttgatttgctgctga

SEQ ID NO: 1821712 - DNA, 25 bp, Homo sapien
cactccttgcaacctgctgtttaag

SEQ ID NO: 1821713 - DNA, 25 bp, Homo sapien
aactgagctgtctcaaatttaggga

SEQ ID NO: 1821714 - DNA, 25 bp, Homo sapien
tacactggagttcttggattcgcac

SEQ ID NO: 1821715 - DNA, 25 bp, Homo sapien
tcccgtttcaacaagtccaaagcag

SEQ ID NO: 1821716 - DNA, 25 bp, Homo sapien
gcgtgttagctaaaacctcttccaa

SEQ ID NO: 1821717 - DNA, 25 bp, Homo sapien
tggaattcctcctgtaaagacaaga

SEQ ID NO: 1821718 - DNA, 25 bp, Homo sapien
tctcacagttctcccgacatgcttc

SEQ ID NO: 1821719 - DNA, 25 bp, Homo sapien
ggaaatgcctgccgaagaccaagtt

SEQ ID NO: 1821720 - DNA, 25 bp, Homo sapien
gttgtaagctttcagcactttgctc

SEQ ID NO: 1821721 - DNA, 25 bp, Homo sapien
gtcctcttgaacaggttgtaagctt

SEQ ID NO: 1821722 - DNA, 25 bp, Homo sapien
ctcaggaatctccccataattctgt

SEQ ID NO: 1821723 - DNA, 25 bp, Homo sapien
aggaatctccccataattctgtatt

SEQ ID NO: 1821724 - DNA, 25 bp, Homo sapien
caggaatctccccataattctgtat

SEQ ID NO: 1821725 - DNA, 25 bp, Homo sapien
gaatctccccataattctgtatttc

SEQ ID NO: 1821726 - DNA, 25 bp, Homo sapien
taggttagaactattctctttatca

SEQ ID NO: 1821727 - DNA, 25 bp, Homo sapien
tgctttataattaactctcagatga

SEQ ID NO: 1821728 - DNA, 25 bp, Homo sapien
cagatgaactaggttagaactattc

SEQ ID NO: 1821729 - DNA, 25 bp, Homo sapien
tctctttatcaaatggttttacaat

SEQ ID NO: 1821730 - DNA, 25 bp, Homo sapien
ggaggaggctgtctaaaatactcgt

SEQ ID NO: 1821731 - DNA, 25 bp, Homo sapien
tacacttgactttgaaattctggct

SEQ ID NO: 1821732 - DNA, 25 bp, Homo sapien
aaatactcgttaccaagttggtctg

SEQ ID NO: 1821733 - DNA, 25 bp, Homo sapien
tctccactgcagtggattagaggcg

SEQ ID NO: 1821734 - DNA, 25 bp, Homo sapien
caaggaagatatgctgatggtgtca

SEQ ID NO: 1821735 - DNA, 25 bp, Homo sapien
ggtgtcaactggctgaattagtgca

SEQ ID NO: 1821736 - DNA, 25 bp, Homo sapien
ttgcaaacggtttcaaattgtctca

SEQ ID NO: 1821737 - DNA, 25 bp, Homo sapien
tctacccagtgaaatttgcaaacgg

SEQ ID NO: 1821738 - DNA, 25 bp, Homo sapien
atttaacaaattgtctagtgtgcca

SEQ ID NO: 1821739 - DNA, 25 bp, Homo sapien
taacaaattgtctagtgtgccataa

SEQ ID NO: 1821740 - DNA, 25 bp, Homo sapien
aattgtctagtgtgccataagcatc

SEQ ID NO: 1821741 - DNA, 25 bp, Homo sapien
aagcatcttcacaaagtgtggattc

SEQ ID NO: 1821742 - DNA, 25 bp, Homo sapien
caagtcacaagtggtgccggtggtt

SEQ ID NO: 1821743 - DNA, 25 bp, Homo sapien
gtgaaagcattacaccttgagaaag

SEQ ID NO: 1821744 - DNA, 25 bp, Homo sapien
gacattcatggtatccgattctgac

SEQ ID NO: 1821745 - DNA, 25 bp, Homo sapien
gccggtggtttccatacagattgga

SEQ ID NO: 1821746 - DNA, 25 bp, Homo sapien
ggactctcacaaactcgcaatcggg

SEQ ID NO: 1821747 - DNA, 25 bp, Homo sapien
tcctgccgcagtaaacacaaagtgg

SEQ ID NO: 1821748 - DNA, 25 bp, Homo sapien
tgtgggagggagaacgctttccaac

SEQ ID NO: 1821749 - DNA, 25 bp, Homo sapien
ccctactgtgggtgcggtgtcttcc

SEQ ID NO: 1821750 - DNA, 25 bp, Homo sapien
tccacagccctatacagcgcgccat

SEQ ID NO: 1821751 - DNA, 25 bp, Homo sapien
agcgcgccatccagagagctccgga

SEQ ID NO: 1821752 - DNA, 25 bp, Homo sapien
cctatacagcgcgccatccagagag

SEQ ID NO: 1821753 - DNA, 25 bp, Homo sapien
acagccctatacagcgcgccatcca

SEQ ID NO: 1821754 - DNA, 25 bp, Homo sapien
tgggtacatccgtctgagccgttcc

SEQ ID NO: 1821755 - DNA, 25 bp, Homo sapien
ggatatccacgccaaggcctttgga

SEQ ID NO: 1821756 - DNA, 25 bp, Homo sapien
aatggtttgcaaggcggatatccac

SEQ ID NO: 1821757 - DNA, 25 bp, Homo sapien
gttttcccgtcgcacgtggtggcca

SEQ ID NO: 1821758 - DNA, 25 bp, Homo sapien
ctttgctcaactttgctccgcctgg

SEQ ID NO: 1821759 - DNA, 25 bp, Homo sapien
ataagtcgccttgcctggccaggtc

SEQ ID NO: 1821760 - DNA, 25 bp, Homo sapien
tccgcctggtgaactttaaagctcc

SEQ ID NO: 1821761 - DNA, 25 bp, Homo sapien
aagctctctggaggggtatttcagc

SEQ ID NO: 1821762 - DNA, 25 bp, Homo sapien
ttgaaatgtgccaagagtacatggg

SEQ ID NO: 1821763 - DNA, 25 bp, Homo sapien
ttattgaaatgtgccaagagtacat

SEQ ID NO: 1821764 - DNA, 25 bp, Homo sapien
aaatgtgccaagagtacatgggcag

SEQ ID NO: 1821765 - DNA, 25 bp, Homo sapien
ttttattgaaatgtgccaagagtac

SEQ ID NO: 1821766 - DNA, 25 bp, Homo sapien
tcttgggacagatcaggtcccctct

SEQ ID NO: 1821767 - DNA, 25 bp, Homo sapien
ggttaatcttgggacagatcaggtc

SEQ ID NO: 1821768 - DNA, 25 bp, Homo sapien
gggacagatcaggtcccctctcgct

SEQ ID NO: 1821769 - DNA, 25 bp, Homo sapien
taagcctctacaaacctagctttca

SEQ ID NO: 1821770 - DNA, 25 bp, Homo sapien
gaagttgtcagtcacctccagcggg

SEQ ID NO: 1821771 - DNA, 25 bp, Homo sapien
aacacagcttcagagtgtaaggtat

SEQ ID NO: 1821772 - DNA, 25 bp, Homo sapien
agtgtaaggtatggaccacttgggt

SEQ ID NO: 1821773 - DNA, 25 bp, Homo sapien
gatctcaaagaagttgtcagtcacc

SEQ ID NO: 1821774 - DNA, 25 bp, Homo sapien
ccagcgaggggaaccgattgttcgg

SEQ ID NO: 1821775 - DNA, 25 bp, Homo sapien
ctccagcgaggggaaccgattgttc

SEQ ID NO: 1821776 - DNA, 25 bp, Homo sapien
tccagcgaggggaaccgattgttcg

SEQ ID NO: 1821777 - DNA, 25 bp, Homo sapien
cagcgaggggaaccgattgttcggg

SEQ ID NO: 1821778 - DNA, 25 bp, Homo sapien
gaagtctctgtaactgcaagacgtg

SEQ ID NO: 1821779 - DNA, 25 bp, Homo sapien
acttccaacccgcatgactgacagg

SEQ ID NO: 1821780 - DNA, 25 bp, Homo sapien
cgtgacttccaacccgcatgactga

SEQ ID NO: 1821781 - DNA, 25 bp, Homo sapien
tgtaactgcaagacgtgacttccaa

SEQ ID NO: 1821782 - DNA, 25 bp, Homo sapien
gtagtggcccggtccacagtgtagc

SEQ ID NO: 1821783 - DNA, 25 bp, Homo sapien
tagtggcccggtccacagtgtagcc

SEQ ID NO: 1821784 - DNA, 25 bp, Homo sapien
gcccggtccacagtgtagccgtcag

SEQ ID NO: 1821785 - DNA, 25 bp, Homo sapien
gtggcccggtccacagtgtagccgt

SEQ ID NO: 1821786 - DNA, 25 bp, Homo sapien
tactaggggccgttgcgacttgggc

SEQ ID NO: 1821787 - DNA, 25 bp, Homo sapien
ggtgagggccatgctcgggtggtgg

SEQ ID NO: 1821788 - DNA, 25 bp, Homo sapien
gcgacttgggccccaagggtgactc

SEQ ID NO: 1821789 - DNA, 25 bp, Homo sapien
gtgcccatactaggggccgttgcga

SEQ ID NO: 1821790 - DNA, 25 bp, Homo sapien
tggcaatgggtgtgatacccacggt

SEQ ID NO: 1821791 - DNA, 25 bp, Homo sapien
tcatggcaatgggtgtgatacccac

SEQ ID NO: 1821792 - DNA, 25 bp, Homo sapien
cctcatcatggcaatgggtgtgata

SEQ ID NO: 1821793 - DNA, 25 bp, Homo sapien
catcatggcaatgggtgtgataccc

SEQ ID NO: 1821794 - DNA, 25 bp, Homo sapien
gtaaagaacatccgtggtgatcgaa

SEQ ID NO: 1821795 - DNA, 25 bp, Homo sapien
taaagaacatccgtggtgatcgaat

SEQ ID NO: 1821796 - DNA, 25 bp, Homo sapien
tgtaaagaacatccgtggtgatcga

SEQ ID NO: 1821797 - DNA, 25 bp, Homo sapien
agttcccggggcgggagatcttctg

SEQ ID NO: 1821798 - DNA, 25 bp, Homo sapien
gagtagttgacaaaagctgggtgac

SEQ ID NO: 1821799 - DNA, 25 bp, Homo sapien
tagagtagttgacaaaagctgggtg

SEQ ID NO: 1821800 - DNA, 25 bp, Homo sapien
tggtagagtagttgacaaaagctgg

SEQ ID NO: 1821801 - DNA, 25 bp, Homo sapien
ctggtagagtagttgacaaaagctg

SEQ ID NO: 1821802 - DNA, 25 bp, Homo sapien
gacattaccatcacatagctgatga

SEQ ID NO: 1821803 - DNA, 25 bp, Homo sapien
gttgcaagcctctagcacatcttca

SEQ ID NO: 1821804 - DNA, 25 bp, Homo sapien
actgcgttgcaagcctctagcacat

SEQ ID NO: 1821805 - DNA, 25 bp, Homo sapien
tttttagacattaccatcacatagc

SEQ ID NO: 1821806 - DNA, 25 bp, Homo sapien
cagaggttttgtgtgggtcatcaca

SEQ ID NO: 1821807 - DNA, 25 bp, Homo sapien
gaggttttgtgtgggtcatcacagt

SEQ ID NO: 1821808 - DNA, 25 bp, Homo sapien
ggcagaggttttgtgtgggtcatca

SEQ ID NO: 1821809 - DNA, 25 bp, Homo sapien
gcagaggttttgtgtgggtcatcac

SEQ ID NO: 1821810 - DNA, 25 bp, Homo sapien
ctgtctgaagcttgaacttaagctt

SEQ ID NO: 1821811 - DNA, 25 bp, Homo sapien
aaagacacttatcctcctcagccca

SEQ ID NO: 1821812 - DNA, 25 bp, Homo sapien
tcagcccaggtatgaacgtaaagtt

SEQ ID NO: 1821813 - DNA, 25 bp, Homo sapien
caataaagataaactctagcttcta

SEQ ID NO: 1821814 - DNA, 25 bp, Homo sapien
acttacaataaagataaactctagc

SEQ ID NO: 1821815 - DNA, 25 bp, Homo sapien
tgctcggagggccaaccctctggtc

SEQ ID NO: 1821816 - DNA, 25 bp, Homo sapien
ttgggccaccatgtcatcagcgagc

SEQ ID NO: 1821817 - DNA, 25 bp, Homo sapien
ttatcagtctttgctcggagggcca

SEQ ID NO: 1821818 - DNA, 25 bp, Homo sapien
ccatgtggacacactagcatgctgg

SEQ ID NO: 1821819 - DNA, 25 bp, Homo sapien
tgggacttgtactgcttgtcatata

SEQ ID NO: 1821820 - DNA, 25 bp, Homo sapien
caaaggccaatccttagagccattt

SEQ ID NO: 1821821 - DNA, 25 bp, Homo sapien
aaaggccaatccttagagccatttg

SEQ ID NO: 1821822 - DNA, 25 bp, Homo sapien
attgacttatcttgattatacatcc

SEQ ID NO: 1821823 - DNA, 25 bp, Homo sapien
ttgacttatcttgattatacatccc

SEQ ID NO: 1821824 - DNA, 25 bp, Homo sapien
ggaccgtgccaaccagaatattttg

SEQ ID NO: 1821825 - DNA, 25 bp, Homo sapien
gatagtggcacacttgacaccaacg

SEQ ID NO: 1821826 - DNA, 25 bp, Homo sapien
tgtacatccagttccacatagggaa

SEQ ID NO: 1821827 - DNA, 25 bp, Homo sapien
taagcaatgcgacctacgatgatgg

SEQ ID NO: 1821828 - DNA, 25 bp, Homo sapien
ctctaccacagaaccgccactgatt

SEQ ID NO: 1821829 - DNA, 25 bp, Homo sapien
accacagaaccgccactgatttttt

SEQ ID NO: 1821830 - DNA, 25 bp, Homo sapien
tctaccacagaaccgccactgattt

SEQ ID NO: 1821831 - DNA, 25 bp, Homo sapien
cagaaccgccactgatttttttaga

SEQ ID NO: 1821832 - DNA, 25 bp, Homo sapien
gcgagaagtggtcaagttcctgacc

SEQ ID NO: 1821833 - DNA, 25 bp, Homo sapien
gaagggggcaatccatactaagcga

SEQ ID NO: 1821834 - DNA, 25 bp, Homo sapien
tcagagggttagcctggtgctggtg

SEQ ID NO: 1821835 - DNA, 25 bp, Homo sapien
aatccatactaagcgagaagtggtc

SEQ ID NO: 1821836 - DNA, 25 bp, Homo sapien
gaagcctggtggttggagccacact

SEQ ID NO: 1821837 - DNA, 25 bp, Homo sapien
cgagggcacaggtgaagcctggtgg

SEQ ID NO: 1821838 - DNA, 25 bp, Homo sapien
gaagtccagcaacaggctctgcctg

SEQ ID NO: 1821839 - DNA, 25 bp, Homo sapien
cacaggtgaagcctggtggttggag

SEQ ID NO: 1821840 - DNA, 25 bp, Homo sapien
gaggaggaagcagagctgtggtcac

SEQ ID NO: 1821841 - DNA, 25 bp, Homo sapien
tgaggaggaagcagagctgtggtca

SEQ ID NO: 1821842 - DNA, 25 bp, Homo sapien
ctgaggaggaagcagagctgtggtc

SEQ ID NO: 1821843 - DNA, 25 bp, Homo sapien
cctcctccacgtcccgcggatactt

SEQ ID NO: 1821844 - DNA, 25 bp, Homo sapien
cagcctccatggagatctcccctcc

SEQ ID NO: 1821845 - DNA, 25 bp, Homo sapien
ccacggtgcacggagacctcctctg

SEQ ID NO: 1821846 - DNA, 25 bp, Homo sapien
acggtgcacggagacctcctctgcc

SEQ ID NO: 1821847 - DNA, 25 bp, Homo sapien
ccgagttgctttgttcatttccacc

SEQ ID NO: 1821848 - DNA, 25 bp, Homo sapien
gagccgtcggacaggtttaacgaga

SEQ ID NO: 1821849 - DNA, 25 bp, Homo sapien
cgagagtgaagtgtgccgctccaca

SEQ ID NO: 1821850 - DNA, 25 bp, Homo sapien
cagttaaaactcaaggagccgtcgg

SEQ ID NO: 1821851 - DNA, 25 bp, Homo sapien
gcttcacgggtttgatgaaactgct

SEQ ID NO: 1821852 - DNA, 25 bp, Homo sapien
ctttgcaagacagaactgcttcacg

SEQ ID NO: 1821853 - DNA, 25 bp, Homo sapien
cacgggtttgatgaaactgctgtgg

SEQ ID NO: 1821854 - DNA, 25 bp, Homo sapien
cagaactgcttcacgggtttgatga

SEQ ID NO: 1821855 - DNA, 25 bp, Homo sapien
gaagtgtcctacaaccactctggca

SEQ ID NO: 1821856 - DNA, 25 bp, Homo sapien
gcgggtgggaagtgtcctacaacca

SEQ ID NO: 1821857 - DNA, 25 bp, Homo sapien
tcctggacagagcacgtgtggtcca

SEQ ID NO: 1821858 - DNA, 25 bp, Homo sapien
gcttacattggggacatgctttcct

SEQ ID NO: 1821859 - DNA, 25 bp, Homo sapien
cagcctcttaactgggagtggccct

SEQ ID NO: 1821860 - DNA, 25 bp, Homo sapien
gctggaatgttcaagctccgcgtca

SEQ ID NO: 1821861 - DNA, 25 bp, Homo sapien
tgactgggtctgtatccaaacccgg

SEQ ID NO: 1821862 - DNA, 25 bp, Homo sapien
gccaacggcgtagttaacactcagc

SEQ ID NO: 1821863 - DNA, 25 bp, Homo sapien
cgctgacttgggtgaacagctctga

SEQ ID NO: 1821864 - DNA, 25 bp, Homo sapien
cagctctgagttccggagagggttc

SEQ ID NO: 1821865 - DNA, 25 bp, Homo sapien
aggctcaagtcccaggaggcctcct

SEQ ID NO: 1821866 - DNA, 25 bp, Homo sapien
caagttgatgatctctgcctagggt

SEQ ID NO: 1821867 - DNA, 25 bp, Homo sapien
tggcgttgaaatctttactcctcgt

SEQ ID NO: 1821868 - DNA, 25 bp, Homo sapien
gaaaatggacctggcgttgaaatct

SEQ ID NO: 1821869 - DNA, 25 bp, Homo sapien
aatttggaaaatggacctggcgttg

SEQ ID NO: 1821870 - DNA, 25 bp, Homo sapien
gagaagcgcgcgagagacaagcatc

SEQ ID NO: 1821871 - DNA, 25 bp, Homo sapien
tagcgtttccagtgatcaacaaaag

SEQ ID NO: 1821872 - DNA, 25 bp, Homo sapien
ctgtggtcctagtcaatgcgtggta

SEQ ID NO: 1821873 - DNA, 25 bp, Homo sapien
gaggaaatcctcaaaagccgggcca

SEQ ID NO: 1821874 - DNA, 25 bp, Homo sapien
taaagcgttccctcctcactgtggt

SEQ ID NO: 1821875 - DNA, 25 bp, Homo sapien
ccggccaggtgtggcctaggcgccc

SEQ ID NO: 1821876 - DNA, 25 bp, Homo sapien
aggtgtggcctaggcgcccagtgcc

SEQ ID NO: 1821877 - DNA, 25 bp, Homo sapien
ggccaggtgtggcctaggcgcccag

SEQ ID NO: 1821878 - DNA, 25 bp, Homo sapien
ccaggtgtggcctaggcgcccagtg

SEQ ID NO: 1821879 - DNA, 25 bp, Homo sapien
agcgagcagcgacctcgcgagcctt

SEQ ID NO: 1821880 - DNA, 25 bp, Homo sapien
accaacacccagctccgacgcagct

SEQ ID NO: 1821881 - DNA, 25 bp, Homo sapien
ggcccgcctcgcttatgcctcggcg

SEQ ID NO: 1821882 - DNA, 25 bp, Homo sapien
ggcgctgagccgctctcccgattgc

SEQ ID NO: 1821883 - DNA, 25 bp, Homo sapien
ggccgcatgatccgcgccgagtctg

SEQ ID NO: 1821884 - DNA, 25 bp, Homo sapien
cacccgcggatcaacactctgggcc

SEQ ID NO: 1821885 - DNA, 25 bp, Homo sapien
tgatccgcgccgagtctggcccgga

SEQ ID NO: 1821886 - DNA, 25 bp, Homo sapien
atgagctgcaacggaggctcccacc

SEQ ID NO: 1821887 - DNA, 25 bp, Homo sapien
gcggcgtgatcaccgaccagaactc

SEQ ID NO: 1821888 - DNA, 25 bp, Homo sapien
ccagcaggatgtactattctcggcg

SEQ ID NO: 1821889 - DNA, 25 bp, Homo sapien
ggcgcggcgtgatcaccgaccagaa

SEQ ID NO: 1821890 - DNA, 25 bp, Homo sapien
atgtactattctcggcgcggcgtga

SEQ ID NO: 1821891 - DNA, 25 bp, Homo sapien
ccgtcctcctctggacgactgggag

SEQ ID NO: 1821892 - DNA, 25 bp, Homo sapien
cgactgggagactcgggtcccgaag

SEQ ID NO: 1821893 - DNA, 25 bp, Homo sapien
gctcgcgggacagggagggaccgtc

SEQ ID NO: 1821894 - DNA, 25 bp, Homo sapien
gggaccgtcctcctctggacgactg

SEQ ID NO: 1821895 - DNA, 25 bp, Homo sapien
gacgcgtgcggggacaggttggccc

SEQ ID NO: 1821896 - DNA, 25 bp, Homo sapien
ctgacgcgtgcggggacaggttggc

SEQ ID NO: 1821897 - DNA, 25 bp, Homo sapien
tgacgcgtgcggggacaggttggcc

SEQ ID NO: 1821898 - DNA, 25 bp, Homo sapien
cgcgccgcagcccccgcgggcgagc

SEQ ID NO: 1821899 - DNA, 25 bp, Homo sapien
cttcggtcgtccgcgccgcagcccc

SEQ ID NO: 1821900 - DNA, 25 bp, Homo sapien
ccgcagcccccgcgggcgagcgcac

SEQ ID NO: 1821901 - DNA, 25 bp, Homo sapien
gccgcagcccccgcgggcgagcgca

SEQ ID NO: 1821902 - DNA, 25 bp, Homo sapien
cccagtgtgccttggatcgcagagc

SEQ ID NO: 1821903 - DNA, 25 bp, Homo sapien
tgccttggatcgcagagcgccggcc

SEQ ID NO: 1821904 - DNA, 25 bp, Homo sapien
agtgtgccttggatcgcagagcgcc

SEQ ID NO: 1821905 - DNA, 25 bp, Homo sapien
gaaagaccccagtgtgccttggatc

SEQ ID NO: 1821906 - DNA, 25 bp, Homo sapien
gcctgcagtggtgctactgactaca

SEQ ID NO: 1821907 - DNA, 25 bp, Homo sapien
gttttcaaataatagcgaccgcctg

SEQ ID NO: 1821908 - DNA, 25 bp, Homo sapien
gatcctggcaatggaggttcctctc

SEQ ID NO: 1821909 - DNA, 25 bp, Homo sapien
aaaatagcccacaaatgctgacttc

SEQ ID NO: 1821910 - DNA, 25 bp, Homo sapien
taacacgtgagtctttaagtgaccc

SEQ ID NO: 1821911 - DNA, 25 bp, Homo sapien
tgccaggccagcaagggtttgcttt

SEQ ID NO: 1821912 - DNA, 25 bp, Homo sapien
gatctgaggccagtatctgaagaaa

SEQ ID NO: 1821913 - DNA, 25 bp, Homo sapien
gaaatctgctatctaccagttggag

SEQ ID NO: 1821914 - DNA, 25 bp, Homo sapien
tacctgaagcttagacacacgatgc

SEQ ID NO: 1821915 - DNA, 25 bp, Homo sapien
caaagccacgcatgcacgcatgaat

SEQ ID NO: 1821916 - DNA, 25 bp, Homo sapien
gcaagtaagtcatccaagttcccaa

SEQ ID NO: 1821917 - DNA, 25 bp, Homo sapien
gatgccttgccataataaacacctt

SEQ ID NO: 1821918 - DNA, 25 bp, Homo sapien
gcagagtgttcccagttcaaagcga

SEQ ID NO: 1821919 - DNA, 25 bp, Homo sapien
cattacgaagaccaccatcaaggag

SEQ ID NO: 1821920 - DNA, 25 bp, Homo sapien
caaagcgaagcttgcgagcctggag

SEQ ID NO: 1821921 - DNA, 25 bp, Homo sapien
gaagatcacccgactgacttatgag

SEQ ID NO: 1821922 - DNA, 25 bp, Homo sapien
aatttgctgacatgatctccttgaa

SEQ ID NO: 1821923 - DNA, 25 bp, Homo sapien
attcaagatgctattgacaagggcc

SEQ ID NO: 1821924 - DNA, 25 bp, Homo sapien
tctttgatcagtaccgatccggcag

SEQ ID NO: 1821925 - DNA, 25 bp, Homo sapien
gaaataaccatcacgggatcagatg

SEQ ID NO: 1821926 - DNA, 25 bp, Homo sapien
tcccagggtgtgattgaccaagaca

SEQ ID NO: 1821927 - DNA, 25 bp, Homo sapien
ccttcataggcttcgagggtgtgaa

SEQ ID NO: 1821928 - DNA, 25 bp, Homo sapien
aaaatggctcccgtatgaggctggc

SEQ ID NO: 1821929 - DNA, 25 bp, Homo sapien
tgggaggataagcaccgaagaagcc

SEQ ID NO: 1821930 - DNA, 25 bp, Homo sapien
tgcagtgcgtctgaagtgctaatca

SEQ ID NO: 1821931 - DNA, 25 bp, Homo sapien
aaatcccggtgcttgcagtagagtg

SEQ ID NO: 1821932 - DNA, 25 bp, Homo sapien
taagcagtacacttggatgcagtgc

SEQ ID NO: 1821933 - DNA, 25 bp, Homo sapien
taatttgactgtgcatgacagcggc

SEQ ID NO: 1821934 - DNA, 25 bp, Homo sapien
cactttcgagtacagctaattggat

SEQ ID NO: 1821935 - DNA, 25 bp, Homo sapien
gaatgtttaacggttctggcgcaaa

SEQ ID NO: 1821936 - DNA, 25 bp, Homo sapien
gcccagggcactggttatattcagt

SEQ ID NO: 1821937 - DNA, 25 bp, Homo sapien
ggcaagtcaactgccatgcagagcc

SEQ ID NO: 1821938 - DNA, 25 bp, Homo sapien
gtaattgtggagctttagtaaccca

SEQ ID NO: 1821939 - DNA, 25 bp, Homo sapien
ttatgaggataatttcccgtaattg

SEQ ID NO: 1821940 - DNA, 25 bp, Homo sapien
ccagctgcaagccatgactcctagt

SEQ ID NO: 1821941 - DNA, 25 bp, Homo sapien
gctttagtaacccatgttcctccag

SEQ ID NO: 1821942 - DNA, 25 bp, Homo sapien
tgtatgccctcagaagattgtcaag

SEQ ID NO: 1821943 - DNA, 25 bp, Homo sapien
gtgatttggcccatgcagtgtctga

SEQ ID NO: 1821944 - DNA, 25 bp, Homo sapien
tggattctcagatcggtgttctctc

SEQ ID NO: 1821945 - DNA, 25 bp, Homo sapien
tgtctgacatgtcgcaggtactgaa

SEQ ID NO: 1821946 - DNA, 25 bp, Homo sapien
gccttggagacactaataagcacgt

SEQ ID NO: 1821947 - DNA, 25 bp, Homo sapien
caatgcgaagagttggtgccaagcc

SEQ ID NO: 1821948 - DNA, 25 bp, Homo sapien
ccttccttgtatgctaatctggcga

SEQ ID NO: 1821949 - DNA, 25 bp, Homo sapien
cacgtgagggtttttggacaatgcg

SEQ ID NO: 1821950 - DNA, 25 bp, Homo sapien
tgctctagcacatcatccttatgca

SEQ ID NO: 1821951 - DNA, 25 bp, Homo sapien
ttccagtaggtcttgctctagcaca

SEQ ID NO: 1821952 - DNA, 25 bp, Homo sapien
atggagagctggttgacgccaaatg

SEQ ID NO: 1821953 - DNA, 25 bp, Homo sapien
tggagagctggttgacgccaaatgc

SEQ ID NO: 1821954 - DNA, 25 bp, Homo sapien
actcggattctcgcctcgcttctgg

SEQ ID NO: 1821955 - DNA, 25 bp, Homo sapien
tactcggattctcgcctcgcttctg

SEQ ID NO: 1821956 - DNA, 25 bp, Homo sapien
tagacagctatccttccgtgggctt

SEQ ID NO: 1821957 - DNA, 25 bp, Homo sapien
caggcgtagacagctatccttccgt

SEQ ID NO: 1821958 - DNA, 25 bp, Homo sapien
gggacaggcgtagacagctatcctt

SEQ ID NO: 1821959 - DNA, 25 bp, Homo sapien
cttgacaaagggacaggcgtagaca

SEQ ID NO: 1821960 - DNA, 25 bp, Homo sapien
ttgcattttaaattgtctccctgtg

SEQ ID NO: 1821961 - DNA, 25 bp, Homo sapien
cattttaaattgtctccctgtgggt

SEQ ID NO: 1821962 - DNA, 25 bp, Homo sapien
ccttgcattttaaattgtctccctg

SEQ ID NO: 1821963 - DNA, 25 bp, Homo sapien
tcacaataggattctgttcaccttg

SEQ ID NO: 1821964 - DNA, 25 bp, Homo sapien
tgaatcctcaactctcttgggaaac

SEQ ID NO: 1821965 - DNA, 25 bp, Homo sapien
gatgatgccctgtgttagagtaact

SEQ ID NO: 1821966 - DNA, 25 bp, Homo sapien
aaatattgattatggcttgcagagc

SEQ ID NO: 1821967 - DNA, 25 bp, Homo sapien
tcatctaggacaatggaagacccag

SEQ ID NO: 1821968 - DNA, 25 bp, Homo sapien
ggccattggccatatcacagtagct

SEQ ID NO: 1821969 - DNA, 25 bp, Homo sapien
gggtcattccaacaaatgcctctaa

SEQ ID NO: 1821970 - DNA, 25 bp, Homo sapien
taactcccaggttactggctacatg

SEQ ID NO: 1821971 - DNA, 25 bp, Homo sapien
ggctacatgcagattccagctactg

SEQ ID NO: 1821972 - DNA, 25 bp, Homo sapien
gtttcccagataggtatgggtccag

SEQ ID NO: 1821973 - DNA, 25 bp, Homo sapien
ccagataggtatgggtccagtcctt

SEQ ID NO: 1821974 - DNA, 25 bp, Homo sapien
caagtttcccagataggtatgggtc

SEQ ID NO: 1821975 - DNA, 25 bp, Homo sapien
taggtatgggtccagtcctttgagg

SEQ ID NO: 1821976 - DNA, 25 bp, Homo sapien
cttgggaataaccatccgattccat

SEQ ID NO: 1821977 - DNA, 25 bp, Homo sapien
gagtgcagcggtcattctggaagct

SEQ ID NO: 1821978 - DNA, 25 bp, Homo sapien
gcttccatggcagatgggcccattt

SEQ ID NO: 1821979 - DNA, 25 bp, Homo sapien
gctgtcagtaactctctggtcttca

SEQ ID NO: 1821980 - DNA, 25 bp, Homo sapien
tgtggttaatatatggctgtcagta

SEQ ID NO: 1821981 - DNA, 25 bp, Homo sapien
actgggcaaggacgttaatgagaac

SEQ ID NO: 1821982 - DNA, 25 bp, Homo sapien
tccccgagacgagatagcacattcc

SEQ ID NO: 1821983 - DNA, 25 bp, Homo sapien
tttcaaacccgaatctctgtgctgg

SEQ ID NO: 1821984 - DNA, 25 bp, Homo sapien
tacgtggctccaacggaaatttgca

SEQ ID NO: 1821985 - DNA, 25 bp, Homo sapien
tgggattgaccaaagctgacgtgac

SEQ ID NO: 1821986 - DNA, 25 bp, Homo sapien
tcaatggcaggacatcttatgggcg

SEQ ID NO: 1821987 - DNA, 25 bp, Homo sapien
gtctgccatagcgagccgactgtct

SEQ ID NO: 1821988 - DNA, 25 bp, Homo sapien
caggtgttccattcagagacgccca

SEQ ID NO: 1821989 - DNA, 25 bp, Homo sapien
ccgcacatgtgccaagtttatttgt

SEQ ID NO: 1821990 - DNA, 25 bp, Homo sapien
agtttatttgtaatgtgttgctggg

SEQ ID NO: 1821991 - DNA, 25 bp, Homo sapien
tgtccttgctaggaaccgcacatgt

SEQ ID NO: 1821992 - DNA, 25 bp, Homo sapien
accatgaaaagaagaatcgttgtct

SEQ ID NO: 1821993 - DNA, 25 bp, Homo sapien
ttgtcccttggactacccagatctt

SEQ ID NO: 1821994 - DNA, 25 bp, Homo sapien
tctgctttgtcccttggactaccca

SEQ ID NO: 1821995 - DNA, 25 bp, Homo sapien
tcccttggactacccagatcttcta

SEQ ID NO: 1821996 - DNA, 25 bp, Homo sapien
gctttgtcccttggactacccagat

SEQ ID NO: 1821997 - DNA, 25 bp, Homo sapien
ccttcctcaacgacgcggacatggt

SEQ ID NO: 1821998 - DNA, 25 bp, Homo sapien
ttcatgctggatctgtacaacgccc

SEQ ID NO: 1821999 - DNA, 25 bp, Homo sapien
accggcggctcaagacgcaggagaa

SEQ ID NO: 1822000 - DNA, 25 bp, Homo sapien
tgcagaaggagatcttgtcggtgct

SEQ ID NO: 1822001 - DNA, 25 bp, Homo sapien
gagaatttggttgcaagagtgtgat

SEQ ID NO: 1822002 - DNA, 25 bp, Homo sapien
ttggttgcaagagtgtgattcaaag

SEQ ID NO: 1822003 - DNA, 25 bp, Homo sapien
gcaagagtgtgattcaaagaagcag

SEQ ID NO: 1822004 - DNA, 25 bp, Homo sapien
ttgcaagagtgtgattcaaagaagc

SEQ ID NO: 1822005 - DNA, 25 bp, Homo sapien
gaaacgtgtgagtcggaaaacggca

SEQ ID NO: 1822006 - DNA, 25 bp, Homo sapien
cttttacccactggaaacgtgtgag

SEQ ID NO: 1822007 - DNA, 25 bp, Homo sapien
tgagtcggaaaacggcactagtctc

SEQ ID NO: 1822008 - DNA, 25 bp, Homo sapien
actcccatctctgatccagctttta

SEQ ID NO: 1822009 - DNA, 25 bp, Homo sapien
cgtccagaacgtctgcgtttgttga

SEQ ID NO: 1822010 - DNA, 25 bp, Homo sapien
tcaccgtccagaacgtctgcgtttg

SEQ ID NO: 1822011 - DNA, 25 bp, Homo sapien
gaacgtctgcgtttgttgattgttg

SEQ ID NO: 1822012 - DNA, 25 bp, Homo sapien
cagaacgtctgcgtttgttgattgt

SEQ ID NO: 1822013 - DNA, 25 bp, Homo sapien
tgtcatcgtaggatgatcccacgta

SEQ ID NO: 1822014 - DNA, 25 bp, Homo sapien
ctgtcatcgtaggatgatcccacgt

SEQ ID NO: 1822015 - DNA, 25 bp, Homo sapien
tgctgaaagtgtttcgttgaaggca

SEQ ID NO: 1822016 - DNA, 25 bp, Homo sapien
agtgtttcgttgaaggcagctaatg

SEQ ID NO: 1822017 - DNA, 25 bp, Homo sapien
actgtcctgagtcttcatcctcctt

SEQ ID NO: 1822018 - DNA, 25 bp, Homo sapien
gaaagtgtttcgttgaaggcagcta

SEQ ID NO: 1822019 - DNA, 25 bp, Homo sapien
ggacaatccgcaaaacttcattacc

SEQ ID NO: 1822020 - DNA, 25 bp, Homo sapien
cattacctcggttcacaaaaacaag

SEQ ID NO: 1822021 - DNA, 25 bp, Homo sapien
ttatttaccgaggacaatccgcaaa

SEQ ID NO: 1822022 - DNA, 25 bp, Homo sapien
caaaacttcattacctcggttcaca

SEQ ID NO: 1822023 - DNA, 25 bp, Homo sapien
gaatgatcaagattcattgccagtg

SEQ ID NO: 1822024 - DNA, 25 bp, Homo sapien
tgaatgatcaagattcattgccagt

SEQ ID NO: 1822025 - DNA, 25 bp, Homo sapien
cgaggtgaatgatcaagattcattg

SEQ ID NO: 1822026 - DNA, 25 bp, Homo sapien
atgatcaagattcattgccagtgtc

SEQ ID NO: 1822027 - DNA, 25 bp, Homo sapien
tagccaccagacttagacaagtgat

SEQ ID NO: 1822028 - DNA, 25 bp, Homo sapien
aagtttcctttgtgatgcactgccc

SEQ ID NO: 1822029 - DNA, 25 bp, Homo sapien
atgtgaattcgcagattgagtagcc

SEQ ID NO: 1822030 - DNA, 25 bp, Homo sapien
tcttgctagtagagaagaatgcccc

SEQ ID NO: 1822031 - DNA, 25 bp, Homo sapien
ccttgtccacggatgcatttgtggt

SEQ ID NO: 1822032 - DNA, 25 bp, Homo sapien
cttgtccacggatgcatttgtggtt

SEQ ID NO: 1822033 - DNA, 25 bp, Homo sapien
tgtccacggatgcatttgtggttgg

SEQ ID NO: 1822034 - DNA, 25 bp, Homo sapien
tcccttgtccacggatgcatttgtg

SEQ ID NO: 1822035 - DNA, 25 bp, Homo sapien
caggaacgtggtgtccccaggaagg

SEQ ID NO: 1822036 - DNA, 25 bp, Homo sapien
tggtgtccccaggaaggtcatacat

SEQ ID NO: 1822037 - DNA, 25 bp, Homo sapien
acgtggtgtccccaggaaggtcata

SEQ ID NO: 1822038 - DNA, 25 bp, Homo sapien
gaacgtggtgtccccaggaaggtca

SEQ ID NO: 1822039 - DNA, 25 bp, Homo sapien
tttgcaatgacggtatcctgggagt

SEQ ID NO: 1822040 - DNA, 25 bp, Homo sapien
gccgtgcgacgcagatgtgcagcca

SEQ ID NO: 1822041 - DNA, 25 bp, Homo sapien
gccagctgaagtccgttttgcaatg

SEQ ID NO: 1822042 - DNA, 25 bp, Homo sapien
cttgatgtttaagccgccgtgcgac

SEQ ID NO: 1822043 - DNA, 25 bp, Homo sapien
ccatgccctgccagtgagagcgcag

SEQ ID NO: 1822044 - DNA, 25 bp, Homo sapien
agcagggccgggaccatgtgtctcc

SEQ ID NO: 1822045 - DNA, 25 bp, Homo sapien
caaacacagctgttgagtgaaggat

SEQ ID NO: 1822046 - DNA, 25 bp, Homo sapien
tgttgagtgaaggatccgtcttcag

SEQ ID NO: 1822047 - DNA, 25 bp, Homo sapien
cacatcagatgttcgttctgatggt

SEQ ID NO: 1822048 - DNA, 25 bp, Homo sapien
gatgttcgttctgatggtgttatat

SEQ ID NO: 1822049 - DNA, 25 bp, Homo sapien
tttgcacatcagatgttcgttctga

SEQ ID NO: 1822050 - DNA, 25 bp, Homo sapien
agatgttcgttctgatggtgttata

SEQ ID NO: 1822051 - DNA, 25 bp, Homo sapien
atggcaccatcatctgtttggcatc

SEQ ID NO: 1822052 - DNA, 25 bp, Homo sapien
catggcaccatcatctgtttggcat

SEQ ID NO: 1822053 - DNA, 25 bp, Homo sapien
tagacttggctctggatcctgaggg

SEQ ID NO: 1822054 - DNA, 25 bp, Homo sapien
cattaggtgtgccatacaactgtgc

SEQ ID NO: 1822055 - DNA, 25 bp, Homo sapien
ctcaaacaggtaggcattcaaatcc

SEQ ID NO: 1822056 - DNA, 25 bp, Homo sapien
gccgagtaggaggacccattcttgc

SEQ ID NO: 1822057 - DNA, 25 bp, Homo sapien
gggtaaccaatgcttgcaaaccaag

SEQ ID NO: 1822058 - DNA, 25 bp, Homo sapien
ccctcaaggttgaaggtgtatggta

SEQ ID NO: 1822059 - DNA, 25 bp, Homo sapien
acctgttccaggtagctagacgcag

SEQ ID NO: 1822060 - DNA, 25 bp, Homo sapien
ccagatagcttttatggtggtccgc

SEQ ID NO: 1822061 - DNA, 25 bp, Homo sapien
ttgctgtggtaaaggacagttgtgc

SEQ ID NO: 1822062 - DNA, 25 bp, Homo sapien
ccttctccgtgacttgctgtggtaa

SEQ ID NO: 1822063 - DNA, 25 bp, Homo sapien
ccagaaaagctggacgtcccaccat

SEQ ID NO: 1822064 - DNA, 25 bp, Homo sapien
gtaaaggacagttgtgctcagtggc

SEQ ID NO: 1822065 - DNA, 25 bp, Homo sapien
ttcgcaagctctgtccatgggtaag

SEQ ID NO: 1822066 - DNA, 25 bp, Homo sapien
tgggtaaggctcgtactcagaggcc

SEQ ID NO: 1822067 - DNA, 25 bp, Homo sapien
tccacaggcctatctgggagttctg

SEQ ID NO: 1822068 - DNA, 25 bp, Homo sapien
tatggccccttgacttggagattct

SEQ ID NO: 1822069 - DNA, 25 bp, Homo sapien
gagtggagggaggtacacctggctc

SEQ ID NO: 1822070 - DNA, 25 bp, Homo sapien
tacttatcaagggtcttgactcttg

SEQ ID NO: 1822071 - DNA, 25 bp, Homo sapien
tgtcaaacctattacttatcaaggg

SEQ ID NO: 1822072 - DNA, 25 bp, Homo sapien
gctcagcatgtgttctgtcaaacct

SEQ ID NO: 1822073 - DNA, 25 bp, Homo sapien
cccaacagtctgcttcctacttcca

SEQ ID NO: 1822074 - DNA, 25 bp, Homo sapien
aacagtctgcttcctacttccaatg

SEQ ID NO: 1822075 - DNA, 25 bp, Homo sapien
acagtctgcttcctacttccaatgc

SEQ ID NO: 1822076 - DNA, 25 bp, Homo sapien
caacagtctgcttcctacttccaat

SEQ ID NO: 1822077 - DNA, 25 bp, Homo sapien
cttcttgagctgaatatgacaccag

SEQ ID NO: 1822078 - DNA, 25 bp, Homo sapien
caggtctggcagtttgacccaagaa

SEQ ID NO: 1822079 - DNA, 25 bp, Homo sapien
tgttctatccaggtctggcagtttg

SEQ ID NO: 1822080 - DNA, 25 bp, Homo sapien
ccctttcttccagggcaacttcagc

SEQ ID NO: 1822081 - DNA, 25 bp, Homo sapien
cttggccctgcctgatcacacacac

SEQ ID NO: 1822082 - DNA, 25 bp, Homo sapien
ctccgggtaccctgtgagttgagac

SEQ ID NO: 1822083 - DNA, 25 bp, Homo sapien
cagaggacccctcatgggtgaagtg

SEQ ID NO: 1822084 - DNA, 25 bp, Homo sapien
cccctcatgggtgaagtgggctccg

SEQ ID NO: 1822085 - DNA, 25 bp, Homo sapien
agtgggctccgggtaccctgtgagt

SEQ ID NO: 1822086 - DNA, 25 bp, Homo sapien
tggctgtgttatgtgtccttctctc

SEQ ID NO: 1822087 - DNA, 25 bp, Homo sapien
ggctgtgttatgtgtccttctctct

SEQ ID NO: 1822088 - DNA, 25 bp, Homo sapien
tggcagtggtgatggctgtgttatg

SEQ ID NO: 1822089 - DNA, 25 bp, Homo sapien
gtggtgatggctgtgttatgtgtcc

SEQ ID NO: 1822090 - DNA, 25 bp, Homo sapien
tttcttctgctgtaggattcacgtt

SEQ ID NO: 1822091 - DNA, 25 bp, Homo sapien
taggattcacgttcactttctcctg

SEQ ID NO: 1822092 - DNA, 25 bp, Homo sapien
cacctttgatgtattgatctcccag

SEQ ID NO: 1822093 - DNA, 25 bp, Homo sapien
tgtcctctgtggcatacacctttga

SEQ ID NO: 1822094 - DNA, 25 bp, Homo sapien
ggcttgctgcccgtatctacagctt

SEQ ID NO: 1822095 - DNA, 25 bp, Homo sapien
tggaggcttgctgcccgtatctaca

SEQ ID NO: 1822096 - DNA, 25 bp, Homo sapien
ttgctgcccgtatctacagctttct

SEQ ID NO: 1822097 - DNA, 25 bp, Homo sapien
gcccgtatctacagctttcttcact

SEQ ID NO: 1822098 - DNA, 25 bp, Homo sapien
cagggggagccacccgccatgtagc

SEQ ID NO: 1822099 - DNA, 25 bp, Homo sapien
gtcgccccctgtgcggacctgctgc

SEQ ID NO: 1822100 - DNA, 25 bp, Homo sapien
ctcatcaatctgtgatttgagatct

SEQ ID NO: 1822101 - DNA, 25 bp, Homo sapien
gaaccaagatcttgtgacttggcag

SEQ ID NO: 1822102 - DNA, 25 bp, Homo sapien
caagaacagtcctgggagaagcatt

SEQ ID NO: 1822103 - DNA, 25 bp, Homo sapien
tgctcagagatgttcgtgcaccctg

SEQ ID NO: 1822104 - DNA, 25 bp, Homo sapien
gtgcaccctgcggtggtatttttcc

SEQ ID NO: 1822105 - DNA, 25 bp, Homo sapien
ttgtgtgttcagagcgcacggctgt

SEQ ID NO: 1822106 - DNA, 25 bp, Homo sapien
gtgttgttgaggtgaagagggacag

SEQ ID NO: 1822107 - DNA, 25 bp, Homo sapien
ctaccgtttcggtgttgttgaggtg

SEQ ID NO: 1822108 - DNA, 25 bp, Homo sapien
tggctaccgtttcggtgttgttgag

SEQ ID NO: 1822109 - DNA, 25 bp, Homo sapien
tttctccccagctggtgatactgcg

SEQ ID NO: 1822110 - DNA, 25 bp, Homo sapien
tgatactgcgtaaagctctaggccg

SEQ ID NO: 1822111 - DNA, 25 bp, Homo sapien
ggtgtctgtgcctcgtactagaaat

SEQ ID NO: 1822112 - DNA, 25 bp, Homo sapien
taggccgctaccaattgctgcttgg

SEQ ID NO: 1822113 - DNA, 25 bp, Homo sapien
gaatttgacatcacggccactagca

SEQ ID NO: 1822114 - DNA, 25 bp, Homo sapien
cccgtgtagtatgggcctcagaaga

SEQ ID NO: 1822115 - DNA, 25 bp, Homo sapien
gactcgggcatgttttatcctgacg

SEQ ID NO: 1822116 - DNA, 25 bp, Homo sapien
tcaggcagtgcgctatttaccaggc

SEQ ID NO: 1822117 - DNA, 25 bp, Homo sapien
tggcctcagtgagaacaaaagttgt

SEQ ID NO: 1822118 - DNA, 25 bp, Homo sapien
tgagtgaggtgcacgtgcgcaccac

SEQ ID NO: 1822119 - DNA, 25 bp, Homo sapien
gccggcgccgacaacagagtcgtaa

SEQ ID NO: 1822120 - DNA, 25 bp, Homo sapien
aagcagcccttcatggtggctttct

SEQ ID NO: 1822121 - DNA, 25 bp, Homo sapien
tgctcacagcatgggtgttcctgta

SEQ ID NO: 1822122 - DNA, 25 bp, Homo sapien
ccgcccagcgtgatgtgacattttg

SEQ ID NO: 1822123 - DNA, 25 bp, Homo sapien
agcttgaggatccaccgcccagcgt

SEQ ID NO: 1822124 - DNA, 25 bp, Homo sapien
tcctggtgtttctcggaagcattgc

SEQ ID NO: 1822125 - DNA, 25 bp, Homo sapien
gatagtggtttggatcgacgtctcc

SEQ ID NO: 1822126 - DNA, 25 bp, Homo sapien
ttggatcgacgtctccctggatggc

SEQ ID NO: 1822127 - DNA, 25 bp, Homo sapien
tgcactggatagtggtttggatcga

SEQ ID NO: 1822128 - DNA, 25 bp, Homo sapien
tttccaaacatgtgcactggatagt

SEQ ID NO: 1822129 - DNA, 25 bp, Homo sapien
ttaacgacctctatgtggccctcac

SEQ ID NO: 1822130 - DNA, 25 bp, Homo sapien
cgagtgggagcgagaggcttgtttt

SEQ ID NO: 1822131 - DNA, 25 bp, Homo sapien
agatatggaaagagcggccaggccc

SEQ ID NO: 1822132 - DNA, 25 bp, Homo sapien
gcgcgttcttcaatggctgtattga

SEQ ID NO: 1822133 - DNA, 25 bp, Homo sapien
ttctgtggtgtccctgacattctct

SEQ ID NO: 1822134 - DNA, 25 bp, Homo sapien
ccctttgtttcgctgtcctcctcta

SEQ ID NO: 1822135 - DNA, 25 bp, Homo sapien
tgtcaggtccaaggcctagcaactg

SEQ ID NO: 1822136 - DNA, 25 bp, Homo sapien
caggtccaaggcctagcaactgaga

SEQ ID NO: 1822137 - DNA, 25 bp, Homo sapien
caaggcctagcaactgagatgagaa

SEQ ID NO: 1822138 - DNA, 25 bp, Homo sapien
ctgattgtcaggtccaaggcctagc

SEQ ID NO: 1822139 - DNA, 25 bp, Homo sapien
agcagagcctgtgtggaacgtgcac

SEQ ID NO: 1822140 - DNA, 25 bp, Homo sapien
tgaattctggattggaacaccccgg

SEQ ID NO: 1822141 - DNA, 25 bp, Homo sapien
agagccatggctggacctgatgctt

SEQ ID NO: 1822142 - DNA, 25 bp, Homo sapien
gaacaccccggtctcttatggtaga

SEQ ID NO: 1822143 - DNA, 25 bp, Homo sapien
gctttattccgaggtgaattctgga

SEQ ID NO: 1822144 - DNA, 25 bp, Homo sapien
cagaaggcctaaatgagatgcaagc

SEQ ID NO: 1822145 - DNA, 25 bp, Homo sapien
taccactgattgcatcgtgcagaag

SEQ ID NO: 1822146 - DNA, 25 bp, Homo sapien
cgccatcgggaatggatgggacact

SEQ ID NO: 1822147 - DNA, 25 bp, Homo sapien
tctctaccactgattgcatcgtgca

SEQ ID NO: 1822148 - DNA, 25 bp, Homo sapien
tttccactacagatcatggagagtc

SEQ ID NO: 1822149 - DNA, 25 bp, Homo sapien
ttcttttccactacagatcatggag

SEQ ID NO: 1822150 - DNA, 25 bp, Homo sapien
tgctgaagaaccttccttaggggaa

SEQ ID NO: 1822151 - DNA, 25 bp, Homo sapien
cactacagatcatggagagtcttgc

SEQ ID NO: 1822152 - DNA, 25 bp, Homo sapien
gatggaccaggttcacttcccagca

SEQ ID NO: 1822153 - DNA, 25 bp, Homo sapien
tgaatgcaaccaaccacgcgattgt

SEQ ID NO: 1822154 - DNA, 25 bp, Homo sapien
caattactgtgatggagaatgctcc

SEQ ID NO: 1822155 - DNA, 25 bp, Homo sapien
tattgctggcaacctacgtgcttcc

SEQ ID NO: 1822156 - DNA, 25 bp, Homo sapien
taagagcttgtggatgccactaact

SEQ ID NO: 1822157 - DNA, 25 bp, Homo sapien
cactaactcgaaaccagatgctggg

SEQ ID NO: 1822158 - DNA, 25 bp, Homo sapien
cgtgctgtgcgccaactaagctaaa

SEQ ID NO: 1822159 - DNA, 25 bp, Homo sapien
gttcaccttatgaaccccgagtatg

SEQ ID NO: 1822160 - DNA, 25 bp, Homo sapien
gaattatctgtgaaccatacgtgat

SEQ ID NO: 1822161 - DNA, 25 bp, Homo sapien
caagactcgtgatgcaaagctgaag

SEQ ID NO: 1822162 - DNA, 25 bp, Homo sapien
agattcctaccaccagttactttgg

SEQ ID NO: 1822163 - DNA, 25 bp, Homo sapien
tttgggccaagtatccacatcccct

SEQ ID NO: 1822164 - DNA, 25 bp, Homo sapien
tgtatgtgcttattcccaagggaga

SEQ ID NO: 1822165 - DNA, 25 bp, Homo sapien
gaagcagaccaagtatagcaagcct

SEQ ID NO: 1822166 - DNA, 25 bp, Homo sapien
caaggacagcatgagttagaggaca

SEQ ID NO: 1822167 - DNA, 25 bp, Homo sapien
gaagtagctcgatggtaaaaggaca

SEQ ID NO: 1822168 - DNA, 25 bp, Homo sapien
tccaacagttcatgtgggctctggc

SEQ ID NO: 1822169 - DNA, 25 bp, Homo sapien
gtaacgctgctttcatcacggctaa

SEQ ID NO: 1822170 - DNA, 25 bp, Homo sapien
ctcaggcacggtcagaagtaacgct

SEQ ID NO: 1822171 - DNA, 25 bp, Homo sapien
cagcagcggccgtgaaggtatcttc

SEQ ID NO: 1822172 - DNA, 25 bp, Homo sapien
tgggactgaactcctaaacgcaggg

SEQ ID NO: 1822173 - DNA, 25 bp, Homo sapien
aactcgtgggcaggtaaactatgct

SEQ ID NO: 1822174 - DNA, 25 bp, Homo sapien
gaacgtcaatactgccacaaggcca

SEQ ID NO: 1822175 - DNA, 25 bp, Homo sapien
tcaggagccacaaatagtccagcaa

SEQ ID NO: 1822176 - DNA, 25 bp, Homo sapien
aacgagtcaaggtctctgcctccac

SEQ ID NO: 1822177 - DNA, 25 bp, Homo sapien
ggctcaggacaaagcggtgtaacga

SEQ ID NO: 1822178 - DNA, 25 bp, Homo sapien
cctcctcggaaaagcaataacgtgg

SEQ ID NO: 1822179 - DNA, 25 bp, Homo sapien
ctaaagttcgtctttcgcttggctc

SEQ ID NO: 1822180 - DNA, 25 bp, Homo sapien
cagatattccgttcagcagtgcagt

SEQ ID NO: 1822181 - DNA, 25 bp, Homo sapien
tgcagtctacttcggcgatcttgac

SEQ ID NO: 1822182 - DNA, 25 bp, Homo sapien
tagagagttcctcccaagtaggagc

SEQ ID NO: 1822183 - DNA, 25 bp, Homo sapien
cagaccagggaattcctttttagag

SEQ ID NO: 1822184 - DNA, 25 bp, Homo sapien
ggagcataaaacttgatgaaggtta

SEQ ID NO: 1822185 - DNA, 25 bp, Homo sapien
caatggtgtcatcgaagttattttc

SEQ ID NO: 1822186 - DNA, 25 bp, Homo sapien
tattccttctgcaatggtgtcatcg

SEQ ID NO: 1822187 - DNA, 25 bp, Homo sapien
atcgaagttattttcagtgagtgcc

SEQ ID NO: 1822188 - DNA, 25 bp, Homo sapien
tctctatgcaacagaaagaacctag

SEQ ID NO: 1822189 - DNA, 25 bp, Homo sapien
tatcacgtggctaagtgtaccaggg

SEQ ID NO: 1822190 - DNA, 25 bp, Homo sapien
tgagtctgcacctctaagcctggag

SEQ ID NO: 1822191 - DNA, 25 bp, Homo sapien
gagtctggcatcgagtaacatgtca

SEQ ID NO: 1822192 - DNA, 25 bp, Homo sapien
tcctggccttcaggcatgacttcta

SEQ ID NO: 1822193 - DNA, 25 bp, Homo sapien
actcctggccttcaggcatgacttc

SEQ ID NO: 1822194 - DNA, 25 bp, Homo sapien
tccaaatccaaactcctggccttca

SEQ ID NO: 1822195 - DNA, 25 bp, Homo sapien
aaactcctggccttcaggcatgact

SEQ ID NO: 1822196 - DNA, 25 bp, Homo sapien
ctcatggttggaactgccactggac

SEQ ID NO: 1822197 - DNA, 25 bp, Homo sapien
cacgggcactctcgtccagtgcaga

SEQ ID NO: 1822198 - DNA, 25 bp, Homo sapien
ctgaagaggatgacacgggcactct

SEQ ID NO: 1822199 - DNA, 25 bp, Homo sapien
ggctcatggttggaactgccactgg

SEQ ID NO: 1822200 - DNA, 25 bp, Homo sapien
acagtcactggcctgatcgctgcgg

SEQ ID NO: 1822201 - DNA, 25 bp, Homo sapien
cctaggcaggttacagctacagtca

SEQ ID NO: 1822202 - DNA, 25 bp, Homo sapien
atcgctgcggatgccctcttggcta

SEQ ID NO: 1822203 - DNA, 25 bp, Homo sapien
aagcccctcagtgcatcaggactgc

SEQ ID NO: 1822204 - DNA, 25 bp, Homo sapien
ggtctccgtcgctccagtctctgtg

SEQ ID NO: 1822205 - DNA, 25 bp, Homo sapien
tgcgctgcagctgcgactccacgta

SEQ ID NO: 1822206 - DNA, 25 bp, Homo sapien
tcgctccagtctctgtgcgctgcag

SEQ ID NO: 1822207 - DNA, 25 bp, Homo sapien
gcctctgagggcgtgacggtctccg

SEQ ID NO: 1822208 - DNA, 25 bp, Homo sapien
cccgctttcccttgtactgatccac

SEQ ID NO: 1822209 - DNA, 25 bp, Homo sapien
ttattctagtgataacctgggccac

SEQ ID NO: 1822210 - DNA, 25 bp, Homo sapien
tcttagcggtggtgcaaagtctgca

SEQ ID NO: 1822211 - DNA, 25 bp, Homo sapien
gaaccggaccaagtgcaagccttag

SEQ ID NO: 1822212 - DNA, 25 bp, Homo sapien
tttggtgagagaactgtacaggccc

SEQ ID NO: 1822213 - DNA, 25 bp, Homo sapien
gagaagagtgggatagccacgaacc

SEQ ID NO: 1822214 - DNA, 25 bp, Homo sapien
ttccggagcagagttcatagtgctg

SEQ ID NO: 1822215 - DNA, 25 bp, Homo sapien
gttcatagtgctgtgtacaatcaac

SEQ ID NO: 1822216 - DNA, 25 bp, Homo sapien
gccacgaacctggtttccggagcag

SEQ ID NO: 1822217 - DNA, 25 bp, Homo sapien
ttttgaagagaatgttcctgaaagc

SEQ ID NO: 1822218 - DNA, 25 bp, Homo sapien
acattctgtagcaactctgccagca

SEQ ID NO: 1822219 - DNA, 25 bp, Homo sapien
ttgaagagaatgttcctgaaagcta

SEQ ID NO: 1822220 - DNA, 25 bp, Homo sapien
cattctgtagcaactctgccagcaa

SEQ ID NO: 1822221 - DNA, 25 bp, Homo sapien
cacacggaatgaataatgggccact

SEQ ID NO: 1822222 - DNA, 25 bp, Homo sapien
catgtgccagggatgaagggcttca

SEQ ID NO: 1822223 - DNA, 25 bp, Homo sapien
caagtttgcgactttgcacacggaa

SEQ ID NO: 1822224 - DNA, 25 bp, Homo sapien
tttcaacacctaagacccgtcagag

SEQ ID NO: 1822225 - DNA, 25 bp, Homo sapien
agtgaccacaccacggagcgaagaa

SEQ ID NO: 1822226 - DNA, 25 bp, Homo sapien
gcgaagaacttgataaagtggtcgc

SEQ ID NO: 1822227 - DNA, 25 bp, Homo sapien
tgacagtttcggaatgttcaaggcc

SEQ ID NO: 1822228 - DNA, 25 bp, Homo sapien
tgccaatcttgacagtttcggaatg

SEQ ID NO: 1822229 - DNA, 25 bp, Homo sapien
tagcaaatcttagttcggcatgagc

SEQ ID NO: 1822230 - DNA, 25 bp, Homo sapien
tcagatctttgtcctgcttagcaaa

SEQ ID NO: 1822231 - DNA, 25 bp, Homo sapien
cactagagagttaattgaagaatca

SEQ ID NO: 1822232 - DNA, 25 bp, Homo sapien
taatttatgtcagacctcactagag

SEQ ID NO: 1822233 - DNA, 25 bp, Homo sapien
tatagtctatgaaatgtgctacagc

SEQ ID NO: 1822234 - DNA, 25 bp, Homo sapien
tccgagatactgtgggtttggttcc

SEQ ID NO: 1822235 - DNA, 25 bp, Homo sapien
ggttccctagtgaatatcaaagtta

SEQ ID NO: 1822236 - DNA, 25 bp, Homo sapien
gattatcattaatacacaggcatac

SEQ ID NO: 1822237 - DNA, 25 bp, Homo sapien
tctaagagcccttgagtagcaggaa

SEQ ID NO: 1822238 - DNA, 25 bp, Homo sapien
gctgctggaaaaaccgctagacctg

SEQ ID NO: 1822239 - DNA, 25 bp, Homo sapien
tagaggaggtgcactgaacaacggt

SEQ ID NO: 1822240 - DNA, 25 bp, Homo sapien
tcttagccaaggatgcactgtccag

SEQ ID NO: 1822241 - DNA, 25 bp, Homo sapien
agcccttgcttgagctcgggggcac

SEQ ID NO: 1822242 - DNA, 25 bp, Homo sapien
tgctgagagctcatacagcccttgc

SEQ ID NO: 1822243 - DNA, 25 bp, Homo sapien
actgggcggttccacttccggctct

SEQ ID NO: 1822244 - DNA, 25 bp, Homo sapien
ttgtgcaacgtgcagctcaaagttg

SEQ ID NO: 1822245 - DNA, 25 bp, Homo sapien
ggaacccttgtacgatgctgctgtg

SEQ ID NO: 1822246 - DNA, 25 bp, Homo sapien
tacaaaatacaacgcccaatggacg

SEQ ID NO: 1822247 - DNA, 25 bp, Homo sapien
cagacacgagggtagcaaaatggac

SEQ ID NO: 1822248 - DNA, 25 bp, Homo sapien
gaactgatctcgtcaagccctctgg

SEQ ID NO: 1822249 - DNA, 25 bp, Homo sapien
gagccgcacagacacactggaaact

SEQ ID NO: 1822250 - DNA, 25 bp, Homo sapien
ccttcaaatcagtgggcgcttagct

SEQ ID NO: 1822251 - DNA, 25 bp, Homo sapien
tggcaacagtaagcggcaaagctcc

SEQ ID NO: 1822252 - DNA, 25 bp, Homo sapien
gatggaagcactgaatcagcagcca

SEQ ID NO: 1822253 - DNA, 25 bp, Homo sapien
taggagattctaggctgggcccagc

SEQ ID NO: 1822254 - DNA, 25 bp, Homo sapien
ctccagtgctggcttggataggaga

SEQ ID NO: 1822255 - DNA, 25 bp, Homo sapien
caggtggtccagagtcagtctctga

SEQ ID NO: 1822256 - DNA, 25 bp, Homo sapien
cagctgtcgggctaggcccgagcca

SEQ ID NO: 1822257 - DNA, 25 bp, Homo sapien
cttcttggcctggcttgaaaagctt

SEQ ID NO: 1822258 - DNA, 25 bp, Homo sapien
cccgaggaccctggtacttcacagc

SEQ ID NO: 1822259 - DNA, 25 bp, Homo sapien
gcttcttggcctggcttgaaaagct

SEQ ID NO: 1822260 - DNA, 25 bp, Homo sapien
tcccgaggaccctggtacttcacag

SEQ ID NO: 1822261 - DNA, 25 bp, Homo sapien
tgaggtgaaaacttccagcccgctg

SEQ ID NO: 1822262 - DNA, 25 bp, Homo sapien
tgaggcctcaaaagctacagtactc

SEQ ID NO: 1822263 - DNA, 25 bp, Homo sapien
ggtattcaactcttacaaggcctga

SEQ ID NO: 1822264 - DNA, 25 bp, Homo sapien
tcaaattaggactggagcagacacg

SEQ ID NO: 1822265 - DNA, 25 bp, Homo sapien
tgcagagaggatacgggagtaggtc

SEQ ID NO: 1822266 - DNA, 25 bp, Homo sapien
aatctgcagagaggatacgggagta

SEQ ID NO: 1822267 - DNA, 25 bp, Homo sapien
aggaatctgcagagaggatacggga

SEQ ID NO: 1822268 - DNA, 25 bp, Homo sapien
gcagagaggatacgggagtaggtcc

SEQ ID NO: 1822269 - DNA, 25 bp, Homo sapien
cctgaactttgaaagcaacagtttc

SEQ ID NO: 1822270 - DNA, 25 bp, Homo sapien
ttgaaagcaacagtttctcaacagg

SEQ ID NO: 1822271 - DNA, 25 bp, Homo sapien
tcactacctgcttctttgggatgct

SEQ ID NO: 1822272 - DNA, 25 bp, Homo sapien
ctcactacctgcttctttgggatgc

SEQ ID NO: 1822273 - DNA, 25 bp, Homo sapien
ggtatcctcgcaccccctgggcgga

SEQ ID NO: 1822274 - DNA, 25 bp, Homo sapien
cacacgtcggagtgggccgtgcagt

SEQ ID NO: 1822275 - DNA, 25 bp, Homo sapien
cactttagccacatagactttggca

SEQ ID NO: 1822276 - DNA, 25 bp, Homo sapien
ggcggagcacacgtcggagtgggcc

SEQ ID NO: 1822277 - DNA, 25 bp, Homo sapien
gctgttgtatttgtctcccaggtca

SEQ ID NO: 1822278 - DNA, 25 bp, Homo sapien
tgttgtatttgtctcccaggtcatt

SEQ ID NO: 1822279 - DNA, 25 bp, Homo sapien
gttgtatttgtctcccaggtcattc

SEQ ID NO: 1822280 - DNA, 25 bp, Homo sapien
cccaggtcattccaagtcggctgca

SEQ ID NO: 1822281 - DNA, 25 bp, Homo sapien
caggggactttgatcagatatgctc

SEQ ID NO: 1822282 - DNA, 25 bp, Homo sapien
tcaggggactttgatcagatatgct

SEQ ID NO: 1822283 - DNA, 25 bp, Homo sapien
ttcaggggactttgatcagatatgc

SEQ ID NO: 1822284 - DNA, 25 bp, Homo sapien
ggggactttgatcagatatgctcat

SEQ ID NO: 1822285 - DNA, 25 bp, Homo sapien
tgtggtgcgctaaatcaaaactgac

SEQ ID NO: 1822286 - DNA, 25 bp, Homo sapien
aggtgctatctagtcggccctgcgg

SEQ ID NO: 1822287 - DNA, 25 bp, Homo sapien
tgtggccaagaagtagagcaaagct

SEQ ID NO: 1822288 - DNA, 25 bp, Homo sapien
cactcagaaggtagcctgtggccaa

SEQ ID NO: 1822289 - DNA, 25 bp, Homo sapien
tcacaaactggccatacagaagttg

SEQ ID NO: 1822290 - DNA, 25 bp, Homo sapien
accaggttcagggtgactcacaaac

SEQ ID NO: 1822291 - DNA, 25 bp, Homo sapien
gaagttgtgacctgatgttggcaaa

SEQ ID NO: 1822292 - DNA, 25 bp, Homo sapien
tacagaagttgtgacctgatgttgg

SEQ ID NO: 1822293 - DNA, 25 bp, Homo sapien
agcagcaggataaccctgcagaagc

SEQ ID NO: 1822294 - DNA, 25 bp, Homo sapien
caggataaccctgcagaagccaagt

SEQ ID NO: 1822295 - DNA, 25 bp, Homo sapien
agcaggataaccctgcagaagccaa

SEQ ID NO: 1822296 - DNA, 25 bp, Homo sapien
ggataaccctgcagaagccaagtgc

SEQ ID NO: 1822297 - DNA, 25 bp, Homo sapien
caggtattgttggtcctacttgatc

SEQ ID NO: 1822298 - DNA, 25 bp, Homo sapien
tattgttggtcctacttgatcttgc

SEQ ID NO: 1822299 - DNA, 25 bp, Homo sapien
ttgttggtcctacttgatcttgccc

SEQ ID NO: 1822300 - DNA, 25 bp, Homo sapien
gtgccaggtattgttggtcctactt

SEQ ID NO: 1822301 - DNA, 25 bp, Homo sapien
ctggtttcaggctgggtaacagagc

SEQ ID NO: 1822302 - DNA, 25 bp, Homo sapien
ctacagtgagctgcggctgcgtacc

SEQ ID NO: 1822303 - DNA, 25 bp, Homo sapien
tgcgtaccactggtttcaggctggg

SEQ ID NO: 1822304 - DNA, 25 bp, Homo sapien
agctgcggctgcgtaccactggttt

SEQ ID NO: 1822305 - DNA, 25 bp, Homo sapien
gggcttttccgatctcacacataac

SEQ ID NO: 1822306 - DNA, 25 bp, Homo sapien
taaaattatggctttctgctctggc

SEQ ID NO: 1822307 - DNA, 25 bp, Homo sapien
agagggaccatctgctcaacggagg

SEQ ID NO: 1822308 - DNA, 25 bp, Homo sapien
caggaagctcttccgtgggatgagt

SEQ ID NO: 1822309 - DNA, 25 bp, Homo sapien
ggaaggggacgtgcccgcagtctgt

SEQ ID NO: 1822310 - DNA, 25 bp, Homo sapien
aagcctctggaaggggacgtgcccg

SEQ ID NO: 1822311 - DNA, 25 bp, Homo sapien
ctggaaggggacgtgcccgcagtct

SEQ ID NO: 1822312 - DNA, 25 bp, Homo sapien
cctctggaaggggacgtgcccgcag

SEQ ID NO: 1822313 - DNA, 25 bp, Homo sapien
gcgcgaagaacatgacgaagtgcgc

SEQ ID NO: 1822314 - DNA, 25 bp, Homo sapien
ggcgctctggatcccgtgcgtgaac

SEQ ID NO: 1822315 - DNA, 25 bp, Homo sapien
acatgacgaagtgcgcggcgctctg

SEQ ID NO: 1822316 - DNA, 25 bp, Homo sapien
aagtgcgcggcgctctggatcccgt

SEQ ID NO: 1822317 - DNA, 25 bp, Homo sapien
acaggtgcttgctgtgcgggtcctg

SEQ ID NO: 1822318 - DNA, 25 bp, Homo sapien
tacaggtgcttgctgtgcgggtcct

SEQ ID NO: 1822319 - DNA, 25 bp, Homo sapien
gtacaggtgcttgctgtgcgggtcc

SEQ ID NO: 1822320 - DNA, 25 bp, Homo sapien
caggtgcttgctgtgcgggtcctgt

SEQ ID NO: 1822321 - DNA, 25 bp, Homo sapien
cagcagcagcgcagtcagggccgcc

SEQ ID NO: 1822322 - DNA, 25 bp, Homo sapien
agcgcagtcagggccgccggccggg

SEQ ID NO: 1822323 - DNA, 25 bp, Homo sapien
aggaggcgtcctgggcgcgcgggca

SEQ ID NO: 1822324 - DNA, 25 bp, Homo sapien
ggccagcagcgggaggaggcgtcct

SEQ ID NO: 1822325 - DNA, 25 bp, Homo sapien
tgggcgcgctctcgccgcggcctcc

SEQ ID NO: 1822326 - DNA, 25 bp, Homo sapien
ggcggggctgggcgcgctctcgccg

SEQ ID NO: 1822327 - DNA, 25 bp, Homo sapien
cggggctgggcgcgctctcgccgcg

SEQ ID NO: 1822328 - DNA, 25 bp, Homo sapien
gctgggcgcgctctcgccgcggcct

SEQ ID NO: 1822329 - DNA, 25 bp, Homo sapien
gctgcactcccttccgacagcagcc

SEQ ID NO: 1822330 - DNA, 25 bp, Homo sapien
ctcccttccgacagcagccctgtag

SEQ ID NO: 1822331 - DNA, 25 bp, Homo sapien
atggcaaagcctctcgttggaagct

SEQ ID NO: 1822332 - DNA, 25 bp, Homo sapien
aagcctctcgttggaagctgtcctc

SEQ ID NO: 1822333 - DNA, 25 bp, Homo sapien
aggtggagaaaaagctagaggattg

SEQ ID NO: 1822334 - DNA, 25 bp, Homo sapien
gaggtggagaaaaagctagaggatt

SEQ ID NO: 1822335 - DNA, 25 bp, Homo sapien
tgcaagtgctggctcttctcgttca

SEQ ID NO: 1822336 - DNA, 25 bp, Homo sapien
tccatgtgggatctgtgaggtctcg

SEQ ID NO: 1822337 - DNA, 25 bp, Homo sapien
tctttgttgactggatcatgaccac

SEQ ID NO: 1822338 - DNA, 25 bp, Homo sapien
tgaccactaagctgaatgatctgtg

SEQ ID NO: 1822339 - DNA, 25 bp, Homo sapien
cagcacctggacttcataacaggag

SEQ ID NO: 1822340 - DNA, 25 bp, Homo sapien
gagaagacttctccctgatgcaggt

SEQ ID NO: 1822341 - DNA, 25 bp, Homo sapien
gacttcataacaggagagaagactt

SEQ ID NO: 1822342 - DNA, 25 bp, Homo sapien
acttctccctgatgcaggttgctca

SEQ ID NO: 1822343 - DNA, 25 bp, Homo sapien
tgcgctggcctgcagtgatggcctt

SEQ ID NO: 1822344 - DNA, 25 bp, Homo sapien
gccttggccttggatctgtggcatt

SEQ ID NO: 1822345 - DNA, 25 bp, Homo sapien
gatctgtggcattccacacgggcat

SEQ ID NO: 1822346 - DNA, 25 bp, Homo sapien
tgagttgttccactcctctctcagc

SEQ ID NO: 1822347 - DNA, 25 bp, Homo sapien
tctcacagcacttaggggccagctc

SEQ ID NO: 1822348 - DNA, 25 bp, Homo sapien
tctccaaggaaagatggagcaccct

SEQ ID NO: 1822349 - DNA, 25 bp, Homo sapien
tggcacaagagtatagcacccctga

SEQ ID NO: 1822350 - DNA, 25 bp, Homo sapien
aaaagaccggatatactacaacacg

SEQ ID NO: 1822351 - DNA, 25 bp, Homo sapien
cattcaggaccttctactgggcctc

SEQ ID NO: 1822352 - DNA, 25 bp, Homo sapien
tatcaaacgatctaacaatgagtgg

SEQ ID NO: 1822353 - DNA, 25 bp, Homo sapien
ggaagaacccagatattaaagctat

SEQ ID NO: 1822354 - DNA, 25 bp, Homo sapien
tcccagaagagagatataattgttc

SEQ ID NO: 1822355 - DNA, 25 bp, Homo sapien
gaaaaccattgtgacttagctgact

SEQ ID NO: 1822356 - DNA, 25 bp, Homo sapien
ttgttcagtgtggggggtcctctct

SEQ ID NO: 1822357 - DNA, 25 bp, Homo sapien
aaagactggcctttctgtgagcccc

SEQ ID NO: 1822358 - DNA, 25 bp, Homo sapien
agtgtggggggtcctctctctgcag

SEQ ID NO: 1822359 - DNA, 25 bp, Homo sapien
tctgcagcctcccgcacagttttac

SEQ ID NO: 1822360 - DNA, 25 bp, Homo sapien
cagaaccacagttcttcactaattg

SEQ ID NO: 1822361 - DNA, 25 bp, Homo sapien
cactgggaaaagcgtaagttcctct

SEQ ID NO: 1822362 - DNA, 25 bp, Homo sapien
gttaggatcatctttacactgggaa

SEQ ID NO: 1822363 - DNA, 25 bp, Homo sapien
ctaattgcagtcatctggacctctg

SEQ ID NO: 1822364 - DNA, 25 bp, Homo sapien
ggtctggaactcaaatgatccgctg

SEQ ID NO: 1822365 - DNA, 25 bp, Homo sapien
tggaactcaaatgatccgctggcct

SEQ ID NO: 1822366 - DNA, 25 bp, Homo sapien
ctggaactcaaatgatccgctggcc

SEQ ID NO: 1822367 - DNA, 25 bp, Homo sapien
ctggtctggaactcaaatgatccgc

SEQ ID NO: 1822368 - DNA, 25 bp, Homo sapien
caacacaagacaagaccgaggagct

SEQ ID NO: 1822369 - DNA, 25 bp, Homo sapien
tgctgtccagaaggagaacaacctg

SEQ ID NO: 1822370 - DNA, 25 bp, Homo sapien
tacacggctctttgaaggaggcgcc

SEQ ID NO: 1822371 - DNA, 25 bp, Homo sapien
tgcagtggcacggaggcaccttttt

SEQ ID NO: 1822372 - DNA, 25 bp, Homo sapien
aaatccaaatcatgaggccgggtgc

SEQ ID NO: 1822373 - DNA, 25 bp, Homo sapien
tctcaaagggacaaaacaaagtcat

SEQ ID NO: 1822374 - DNA, 25 bp, Homo sapien
gaggccgggtgctatggcttgcacc

SEQ ID NO: 1822375 - DNA, 25 bp, Homo sapien
gtcataaatatggtagcatatttca

SEQ ID NO: 1822376 - DNA, 25 bp, Homo sapien
ggaatccttagtctgtaaccaactg

SEQ ID NO: 1822377 - DNA, 25 bp, Homo sapien
aaccacgagaactgacctgaaagga

SEQ ID NO: 1822378 - DNA, 25 bp, Homo sapien
caaaggtaatgcttgtgaccacagg

SEQ ID NO: 1822379 - DNA, 25 bp, Homo sapien
taaccaactgaaccagccaagcaag

SEQ ID NO: 1822380 - DNA, 25 bp, Homo sapien
ttcatatgctgaagagacaactgac

SEQ ID NO: 1822381 - DNA, 25 bp, Homo sapien
ctccacgagagtcattttagcacca

SEQ ID NO: 1822382 - DNA, 25 bp, Homo sapien
aactgacaacccgaacttccacagg

SEQ ID NO: 1822383 - DNA, 25 bp, Homo sapien
caggttctcaccttctgtggcttat

SEQ ID NO: 1822384 - DNA, 25 bp, Homo sapien
gagcaaggagactttattctcccat

SEQ ID NO: 1822385 - DNA, 25 bp, Homo sapien
taaagtggctgagataagacaaggg

SEQ ID NO: 1822386 - DNA, 25 bp, Homo sapien
aagacaagggccaatttcattctac

SEQ ID NO: 1822387 - DNA, 25 bp, Homo sapien
catgtaaagtgcaggccttctatgg

SEQ ID NO: 1822388 - DNA, 25 bp, Homo sapien
catcctgcctgttatctctgtctgg

SEQ ID NO: 1822389 - DNA, 25 bp, Homo sapien
tgtctggcaaacaaccactccgtgc

SEQ ID NO: 1822390 - DNA, 25 bp, Homo sapien
ccctgagttcggagcacgtctggct

SEQ ID NO: 1822391 - DNA, 25 bp, Homo sapien
cagaacttcggagccttccagggca

SEQ ID NO: 1822392 - DNA, 25 bp, Homo sapien
gtggctggctgttatctctcgagcc

SEQ ID NO: 1822393 - DNA, 25 bp, Homo sapien
actgaggaagaccattgttgtggct

SEQ ID NO: 1822394 - DNA, 25 bp, Homo sapien
cagaggcacaagtccatctctctgg

SEQ ID NO: 1822395 - DNA, 25 bp, Homo sapien
tcgagccgactccacttggcagagg

SEQ ID NO: 1822396 - DNA, 25 bp, Homo sapien
taggggatgtcccagcttgcaagtg

SEQ ID NO: 1822397 - DNA, 25 bp, Homo sapien
cgctcacttggagagttatctaggg

SEQ ID NO: 1822398 - DNA, 25 bp, Homo sapien
tgtgctttgggaagcgtcatcagca

SEQ ID NO: 1822399 - DNA, 25 bp, Homo sapien
aaagccatggagtaggcgtgtttct

SEQ ID NO: 1822400 - DNA, 25 bp, Homo sapien
ctggagagcagagtgtaaacgggga

SEQ ID NO: 1822401 - DNA, 25 bp, Homo sapien
ggagagcagagtgtaaacggggaca

SEQ ID NO: 1822402 - DNA, 25 bp, Homo sapien
gcagagtgtaaacggggacacagaa

SEQ ID NO: 1822403 - DNA, 25 bp, Homo sapien
agagcagagtgtaaacggggacaca

SEQ ID NO: 1822404 - DNA, 25 bp, Homo sapien
ggattgaggtgattcgcagctgaat

SEQ ID NO: 1822405 - DNA, 25 bp, Homo sapien
cagctgaattgcagtgtctgtgagg

SEQ ID NO: 1822406 - DNA, 25 bp, Homo sapien
tatttctatacacatttactcccat

SEQ ID NO: 1822407 - DNA, 25 bp, Homo sapien
gtgtctgtgaggaacggtctatttc

SEQ ID NO: 1822408 - DNA, 25 bp, Homo sapien
gaagaggcggatggaaagacagcca

SEQ ID NO: 1822409 - DNA, 25 bp, Homo sapien
cgggttctgtaaagacacgtggaga

SEQ ID NO: 1822410 - DNA, 25 bp, Homo sapien
tctgtaaagacacgtggagaagatt

SEQ ID NO: 1822411 - DNA, 25 bp, Homo sapien
gacacgtggagaagattcgattccg

SEQ ID NO: 1822412 - DNA, 25 bp, Homo sapien
tgttgtttatacgagagtgccagct

SEQ ID NO: 1822413 - DNA, 25 bp, Homo sapien
tcaacgggagaagagctgaaaccca

SEQ ID NO: 1822414 - DNA, 25 bp, Homo sapien
agggctgtcctgccaaaacgctgaa

SEQ ID NO: 1822415 - DNA, 25 bp, Homo sapien
aacatgttcttcaccgggaatggca

SEQ ID NO: 1822416 - DNA, 25 bp, Homo sapien
agcatccagagtccagcagccgtgt

SEQ ID NO: 1822417 - DNA, 25 bp, Homo sapien
tttagcatgtctacagcagagaaat

SEQ ID NO: 1822418 - DNA, 25 bp, Homo sapien
tggctttcagctttagcatgtctac

SEQ ID NO: 1822419 - DNA, 25 bp, Homo sapien
gggctgctagtagaaacggcagcat

SEQ ID NO: 1822420 - DNA, 25 bp, Homo sapien
cacagccccactcgctgtcccttgg

SEQ ID NO: 1822421 - DNA, 25 bp, Homo sapien
gcacagccccactcgctgtcccttg

SEQ ID NO: 1822422 - DNA, 25 bp, Homo sapien
cagccccactcgctgtcccttgggg

SEQ ID NO: 1822423 - DNA, 25 bp, Homo sapien
ccccactcgctgtcccttggggcat

SEQ ID NO: 1822424 - DNA, 25 bp, Homo sapien
tgccttccaactccattatttcagg

SEQ ID NO: 1822425 - DNA, 25 bp, Homo sapien
ttttgtgagtagataattgccttcc

SEQ ID NO: 1822426 - DNA, 25 bp, Homo sapien
tgttttgtgagtagataattgcctt

SEQ ID NO: 1822427 - DNA, 25 bp, Homo sapien
taattgccttccaactccattattt

SEQ ID NO: 1822428 - DNA, 25 bp, Homo sapien
caaagcagcttaagtattcagatga

SEQ ID NO: 1822429 - DNA, 25 bp, Homo sapien
tctttgtccatagatggtatgcacc

SEQ ID NO: 1822430 - DNA, 25 bp, Homo sapien
tgtaatacacaactggccacctaag

SEQ ID NO: 1822431 - DNA, 25 bp, Homo sapien
gaaaacatgttatcacagtgacacc

SEQ ID NO: 1822432 - DNA, 25 bp, Homo sapien
ggatcttgtgtacacactctctcct

SEQ ID NO: 1822433 - DNA, 25 bp, Homo sapien
tcagtaaatgctgcaccacttgagc

SEQ ID NO: 1822434 - DNA, 25 bp, Homo sapien
ggcactgacgcaaacggctggatct

SEQ ID NO: 1822435 - DNA, 25 bp, Homo sapien
tctgcagagtggacctgctggccac

SEQ ID NO: 1822436 - DNA, 25 bp, Homo sapien
gcctgaccacacagcgaatgatgaa

SEQ ID NO: 1822437 - DNA, 25 bp, Homo sapien
ggattttcatggtatcacttatgga

SEQ ID NO: 1822438 - DNA, 25 bp, Homo sapien
tctgatgtgttgttgctagctcaac

SEQ ID NO: 1822439 - DNA, 25 bp, Homo sapien
tttaacctatggcaaagcctgacca

SEQ ID NO: 1822440 - DNA, 25 bp, Homo sapien
ggatcaaatgttagcgtacttacta

SEQ ID NO: 1822441 - DNA, 25 bp, Homo sapien
taggctctaagttatgttatacaaa

SEQ ID NO: 1822442 - DNA, 25 bp, Homo sapien
aatttgaagcttgagtttttgtgag

SEQ ID NO: 1822443 - DNA, 25 bp, Homo sapien
tataaggcacttaaaaagtaggctc

SEQ ID NO: 1822444 - DNA, 25 bp, Homo sapien
tctatagggtaattcagctctggat

SEQ ID NO: 1822445 - DNA, 25 bp, Homo sapien
taggagccatacctgcgtgagggac

SEQ ID NO: 1822446 - DNA, 25 bp, Homo sapien
tggcaagaagtctaaggccaaggtc

SEQ ID NO: 1822447 - DNA, 25 bp, Homo sapien
ggccactgaacaccagaaatgctag

SEQ ID NO: 1822448 - DNA, 25 bp, Homo sapien
tctgggaatgcctcaacgaagccaa

SEQ ID NO: 1822449 - DNA, 25 bp, Homo sapien
aagaaaaacgtctcctctgggaatg

SEQ ID NO: 1822450 - DNA, 25 bp, Homo sapien
gatcacattaggaaactcgtcacca

SEQ ID NO: 1822451 - DNA, 25 bp, Homo sapien
taaacaaattggtgctgcagggaaa

SEQ ID NO: 1822452 - DNA, 25 bp, Homo sapien
gaaaagtaccaattctcagattcag

SEQ ID NO: 1822453 - DNA, 25 bp, Homo sapien
taaatatgacctgagaaagaaggca

SEQ ID NO: 1822454 - DNA, 25 bp, Homo sapien
gattagctacaaatactgatcagac

SEQ ID NO: 1822455 - DNA, 25 bp, Homo sapien
catactgtagcatggccacatttga

SEQ ID NO: 1822456 - DNA, 25 bp, Homo sapien
aaaatatacacgctaggaaatggga

SEQ ID NO: 1822457 - DNA, 25 bp, Homo sapien
caggttataatctaggtcataaagc

SEQ ID NO: 1822458 - DNA, 25 bp, Homo sapien
ggtctaatggacatccaacaactaa

SEQ ID NO: 1822459 - DNA, 25 bp, Homo sapien
catatgttagtcgagaaagaaatca

SEQ ID NO: 1822460 - DNA, 25 bp, Homo sapien
tccaacatgccttggtgtcagcaag

SEQ ID NO: 1822461 - DNA, 25 bp, Homo sapien
gcaagtgcgctttttagtccaggta

SEQ ID NO: 1822462 - DNA, 25 bp, Homo sapien
acagtagcggatagagaaagttggc

SEQ ID NO: 1822463 - DNA, 25 bp, Homo sapien
tgagcctgtcaagcctacagtagcg

SEQ ID NO: 1822464 - DNA, 25 bp, Homo sapien
tgtaaaatatgcaacgcttcccaag

SEQ ID NO: 1822465 - DNA, 25 bp, Homo sapien
gcttgaagcagaggctaaacggtct

SEQ ID NO: 1822466 - DNA, 25 bp, Homo sapien
catacatttacacaggcaggcattg

SEQ ID NO: 1822467 - DNA, 25 bp, Homo sapien
tgaaaatagtaagtgctggaaggcc

SEQ ID NO: 1822468 - DNA, 25 bp, Homo sapien
gaaaatttcgctaggtccttctcca

SEQ ID NO: 1822469 - DNA, 25 bp, Homo sapien
ccttcatgaagttgtcccactggag

SEQ ID NO: 1822470 - DNA, 25 bp, Homo sapien
tcagcccttttgttgggttgctcct

SEQ ID NO: 1822471 - DNA, 25 bp, Homo sapien
cactggagcatatgctgtttctcac

SEQ ID NO: 1822472 - DNA, 25 bp, Homo sapien
cagaggaagttttacgtaggtagct

SEQ ID NO: 1822473 - DNA, 25 bp, Homo sapien
caaatttaggtctttctgacaccca

SEQ ID NO: 1822474 - DNA, 25 bp, Homo sapien
tgtcctacggacacttgggatctga

SEQ ID NO: 1822475 - DNA, 25 bp, Homo sapien
agaactctccaaaagatgcatgaag

SEQ ID NO: 1822476 - DNA, 25 bp, Homo sapien
tagtgtgcaggttaagagtgagcct

SEQ ID NO: 1822477 - DNA, 25 bp, Homo sapien
ggtcctcctatctctcagcaactta

SEQ ID NO: 1822478 - DNA, 25 bp, Homo sapien
caaatttggcactcagttgtgtgaa

SEQ ID NO: 1822479 - DNA, 25 bp, Homo sapien
ggcactgttcttgttggtcctccta

SEQ ID NO: 1822480 - DNA, 25 bp, Homo sapien
cccgcattgtgtctctacatttggg

SEQ ID NO: 1822481 - DNA, 25 bp, Homo sapien
catttgggaagagtatgttcatttg

SEQ ID NO: 1822482 - DNA, 25 bp, Homo sapien
gtcccgcattgtgtctctacatttg

SEQ ID NO: 1822483 - DNA, 25 bp, Homo sapien
ctgtcccgcattgtgtctctacatt

SEQ ID NO: 1822484 - DNA, 25 bp, Homo sapien
ttcaagaactcgcatttctcgaaga

SEQ ID NO: 1822485 - DNA, 25 bp, Homo sapien
tcaaattttcaagaactcgcatttc

SEQ ID NO: 1822486 - DNA, 25 bp, Homo sapien
gcatttctcgaagaccacgtttttc

SEQ ID NO: 1822487 - DNA, 25 bp, Homo sapien
gaactcgcatttctcgaagaccacg

SEQ ID NO: 1822488 - DNA, 25 bp, Homo sapien
ttattttacctgatcatttctgagt

SEQ ID NO: 1822489 - DNA, 25 bp, Homo sapien
cccagagctcatgttaaaatactag

SEQ ID NO: 1822490 - DNA, 25 bp, Homo sapien
tctacaattttcttatgctcccaga

SEQ ID NO: 1822491 - DNA, 25 bp, Homo sapien
tatatcgttctttccttgcttctac

SEQ ID NO: 1822492 - DNA, 25 bp, Homo sapien
actggtctgtgatccaaaagccttg

SEQ ID NO: 1822493 - DNA, 25 bp, Homo sapien
aactggtctgtgatccaaaagcctt

SEQ ID NO: 1822494 - DNA, 25 bp, Homo sapien
acgagtttcaccttgaataactggt

SEQ ID NO: 1822495 - DNA, 25 bp, Homo sapien
ataacgagtttcaccttgaataact

SEQ ID NO: 1822496 - DNA, 25 bp, Homo sapien
aatgaggtgcgctgagcccgcagtc

SEQ ID NO: 1822497 - DNA, 25 bp, Homo sapien
ccttgataatgaggtgcgctgagcc

SEQ ID NO: 1822498 - DNA, 25 bp, Homo sapien
tgagcccgcagtccccagggagtcc

SEQ ID NO: 1822499 - DNA, 25 bp, Homo sapien
ccagggagtccctcttcttgctgcc

SEQ ID NO: 1822500 - DNA, 25 bp, Homo sapien
acgctgcgcctgcgcaaacccggcc

SEQ ID NO: 1822501 - DNA, 25 bp, Homo sapien
gctgcgcctgcgcaaacccggccgc

SEQ ID NO: 1822502 - DNA, 25 bp, Homo sapien
gcgcctgcgcaaacccggccgccct

SEQ ID NO: 1822503 - DNA, 25 bp, Homo sapien
ctgcgcctgcgcaaacccggccgcc

SEQ ID NO: 1822504 - DNA, 25 bp, Homo sapien
gccaacccattggaacacagaatgc

SEQ ID NO: 1822505 - DNA, 25 bp, Homo sapien
tagaaagtaactgctccggtgacaa

SEQ ID NO: 1822506 - DNA, 25 bp, Homo sapien
ctccggtgacaaagccaacccattg

SEQ ID NO: 1822507 - DNA, 25 bp, Homo sapien
tgcaagagccactagaaagtaactg

SEQ ID NO: 1822508 - DNA, 25 bp, Homo sapien
cgctggcagtggatgatcgttcaca

SEQ ID NO: 1822509 - DNA, 25 bp, Homo sapien
gtggatgatcgttcacattcattcc

SEQ ID NO: 1822510 - DNA, 25 bp, Homo sapien
ggcagtggatgatcgttcacattca

SEQ ID NO: 1822511 - DNA, 25 bp, Homo sapien
atgatgcgctggcagtggatgatcg

SEQ ID NO: 1822512 - DNA, 25 bp, Homo sapien
gccagacatttgtgtttgaatctca

SEQ ID NO: 1822513 - DNA, 25 bp, Homo sapien
gttagttccctacctctgtgtgcct

SEQ ID NO: 1822514 - DNA, 25 bp, Homo sapien
cactccatgtagagtagtttacagg

SEQ ID NO: 1822515 - DNA, 25 bp, Homo sapien
tacaggtaagtttgagccagacatt

SEQ ID NO: 1822516 - DNA, 25 bp, Homo sapien
taagttagttgcgagaagtcctggt

SEQ ID NO: 1822517 - DNA, 25 bp, Homo sapien
ttcagaggagtaagacacaggaaga

SEQ ID NO: 1822518 - DNA, 25 bp, Homo sapien
gcacaataaagaattgcctagctga

SEQ ID NO: 1822519 - DNA, 25 bp, Homo sapien
tggtggtaccaagtaatacctgttc

SEQ ID NO: 1822520 - DNA, 25 bp, Homo sapien
gacacagatcagttaacagagagag

SEQ ID NO: 1822521 - DNA, 25 bp, Homo sapien
aaatggtgccaatagtctcgctcga

SEQ ID NO: 1822522 - DNA, 25 bp, Homo sapien
atgaagcaagcacaagccgacggaa

SEQ ID NO: 1822523 - DNA, 25 bp, Homo sapien
tctcgctcgaagcagggttgccaca

SEQ ID NO: 1822524 - DNA, 25 bp, Homo sapien
gagctacatactaggcttttttctt

SEQ ID NO: 1822525 - DNA, 25 bp, Homo sapien
ggaaactaaccttactgattgccaa

SEQ ID NO: 1822526 - DNA, 25 bp, Homo sapien
tcttcatgttgtctactttaatcct

SEQ ID NO: 1822527 - DNA, 25 bp, Homo sapien
tgattgccaagagctacatactagg

SEQ ID NO: 1822528 - DNA, 25 bp, Homo sapien
tcagtagttagtttcaccccaatga

SEQ ID NO: 1822529 - DNA, 25 bp, Homo sapien
tccagtttcccgtagggcagttcag

SEQ ID NO: 1822530 - DNA, 25 bp, Homo sapien
ccagtttcccgtagggcagttcagt

SEQ ID NO: 1822531 - DNA, 25 bp, Homo sapien
ttagtttcaccccaatgagtactga

SEQ ID NO: 1822532 - DNA, 25 bp, Homo sapien
ctaccataaatatccataaggggaa

SEQ ID NO: 1822533 - DNA, 25 bp, Homo sapien
tggcttccttggcacaatttatcag

SEQ ID NO: 1822534 - DNA, 25 bp, Homo sapien
gaaagagaggttaataaatagccaa

SEQ ID NO: 1822535 - DNA, 25 bp, Homo sapien
tcaaccacatttactagctcacata

SEQ ID NO: 1822536 - DNA, 25 bp, Homo sapien
tataactggatctcaacttgtttaa

SEQ ID NO: 1822537 - DNA, 25 bp, Homo sapien
tggtctagagtacattttccattta

SEQ ID NO: 1822538 - DNA, 25 bp, Homo sapien
tttaatagatcttctgtatggcatg

SEQ ID NO: 1822539 - DNA, 25 bp, Homo sapien
cattagtcctgtggtctagagtaca

SEQ ID NO: 1822540 - DNA, 25 bp, Homo sapien
caacactagacagatgttgcctgat

SEQ ID NO: 1822541 - DNA, 25 bp, Homo sapien
ctggataatgctgaatgtgacaaaa

SEQ ID NO: 1822542 - DNA, 25 bp, Homo sapien
ggataatgctgaatgtgacaaaacc

SEQ ID NO: 1822543 - DNA, 25 bp, Homo sapien
tgatgaagacaacactagacagatg

SEQ ID NO: 1822544 - DNA, 25 bp, Homo sapien
tacattaactgaggatttggaggtc

SEQ ID NO: 1822545 - DNA, 25 bp, Homo sapien
gtttcagcccagtgaacactgactt

SEQ ID NO: 1822546 - DNA, 25 bp, Homo sapien
gatgtccttcctgcgaaataccaag

SEQ ID NO: 1822547 - DNA, 25 bp, Homo sapien
tgttcagtacaaaacctgatgtcct

SEQ ID NO: 1822548 - DNA, 25 bp, Homo sapien
tgaatggagcagttcacccaatttg

SEQ ID NO: 1822549 - DNA, 25 bp, Homo sapien
gaactcaatcttttagtgaatggag

SEQ ID NO: 1822550 - DNA, 25 bp, Homo sapien
gaggctgagtaaatgcatgagaaca

SEQ ID NO: 1822551 - DNA, 25 bp, Homo sapien
gctacttccagtggtgtgtgactca

SEQ ID NO: 1822552 - DNA, 25 bp, Homo sapien
cccatgaatgggtggtgtcgttcct

SEQ ID NO: 1822553 - DNA, 25 bp, Homo sapien
caagtctctataatgctgacaggag

SEQ ID NO: 1822554 - DNA, 25 bp, Homo sapien
aaccagtagggcagtaacttgcagc

SEQ ID NO: 1822555 - DNA, 25 bp, Homo sapien
gaaggataaatcactccacatgcag

SEQ ID NO: 1822556 - DNA, 25 bp, Homo sapien
ggctaactggtagattcaaactgaa

SEQ ID NO: 1822557 - DNA, 25 bp, Homo sapien
gaaaggagcatctacctgtcaggtg

SEQ ID NO: 1822558 - DNA, 25 bp, Homo sapien
tataacatagtcagtccatggcaca

SEQ ID NO: 1822559 - DNA, 25 bp, Homo sapien
tgtcaggtgtgttttcataggcagc

SEQ ID NO: 1822560 - DNA, 25 bp, Homo sapien
gatgaggttacggttaccactttca

SEQ ID NO: 1822561 - DNA, 25 bp, Homo sapien
ttgttaactctgctacttttttgga

SEQ ID NO: 1822562 - DNA, 25 bp, Homo sapien
ttttaactagatgatccatttgaca

SEQ ID NO: 1822563 - DNA, 25 bp, Homo sapien
ctcaggaaacttttgccagaaactc

SEQ ID NO: 1822564 - DNA, 25 bp, Homo sapien
catccctttctagctcaagttcttt

SEQ ID NO: 1822565 - DNA, 25 bp, Homo sapien
atccctttctagctcaagttctttt

SEQ ID NO: 1822566 - DNA, 25 bp, Homo sapien
tcctttcttacaacaggaaacaatg

SEQ ID NO: 1822567 - DNA, 25 bp, Homo sapien
accatccctttctagctcaagttct

SEQ ID NO: 1822568 - DNA, 25 bp, Homo sapien
tctgttcacagggatgactatctcc

SEQ ID NO: 1822569 - DNA, 25 bp, Homo sapien
gaaccgttccggatcagggtgacac

SEQ ID NO: 1822570 - DNA, 25 bp, Homo sapien
cagtgtgtctatagtggtgcttggc

SEQ ID NO: 1822571 - DNA, 25 bp, Homo sapien
taaaagaaccacatgcctccaatgg

SEQ ID NO: 1822572 - DNA, 25 bp, Homo sapien
cactcctgttgtcccaatgtaatta

SEQ ID NO: 1822573 - DNA, 25 bp, Homo sapien
gcatttagctgcacaaggcactgtt

SEQ ID NO: 1822574 - DNA, 25 bp, Homo sapien
gcccagccttaatattgctaatctc

SEQ ID NO: 1822575 - DNA, 25 bp, Homo sapien
tcctttcacagccaagtgttttgga

SEQ ID NO: 1822576 - DNA, 25 bp, Homo sapien
gaaatgagctagacccgaagtgtac

SEQ ID NO: 1822577 - DNA, 25 bp, Homo sapien
ttccaaaaactgagcgccgtgcctt

SEQ ID NO: 1822578 - DNA, 25 bp, Homo sapien
tagcagccccaaaccatggataggt

SEQ ID NO: 1822579 - DNA, 25 bp, Homo sapien
gggcctgcgcagacctcaattatta

SEQ ID NO: 1822580 - DNA, 25 bp, Homo sapien
gattcagatgaacagcctccatttt

SEQ ID NO: 1822581 - DNA, 25 bp, Homo sapien
gaagatgaagggattcagatgaaca

SEQ ID NO: 1822582 - DNA, 25 bp, Homo sapien
ctggaagatgaagggattcagatga

SEQ ID NO: 1822583 - DNA, 25 bp, Homo sapien
tgaagggattcagatgaacagcctc

SEQ ID NO: 1822584 - DNA, 25 bp, Homo sapien
atggaggaaggctcggtgataagga

SEQ ID NO: 1822585 - DNA, 25 bp, Homo sapien
aatggaggaaggctcggtgataagg

SEQ ID NO: 1822586 - DNA, 25 bp, Homo sapien
ctaaagataaaggaggagggagaag

SEQ ID NO: 1822587 - DNA, 25 bp, Homo sapien
agataaaggaggagggagaaggaag

SEQ ID NO: 1822588 - DNA, 25 bp, Homo sapien
ggagctgaagatactaagaggacgt

SEQ ID NO: 1822589 - DNA, 25 bp, Homo sapien
agctgaagatactaagaggacgtag

SEQ ID NO: 1822590 - DNA, 25 bp, Homo sapien
aggagctgaagatactaagaggacg

SEQ ID NO: 1822591 - DNA, 25 bp, Homo sapien
gagctgaagatactaagaggacgta

SEQ ID NO: 1822592 - DNA, 25 bp, Homo sapien
tttgttacaaaaggcaccttgtata

SEQ ID NO: 1822593 - DNA, 25 bp, Homo sapien
aggcaccttgtataaaggaattcct

SEQ ID NO: 1822594 - DNA, 25 bp, Homo sapien
caggtttgttacaaaaggcaccttg

SEQ ID NO: 1822595 - DNA, 25 bp, Homo sapien
tgcaggtttgttacaaaaggcacct

SEQ ID NO: 1822596 - DNA, 25 bp, Homo sapien
aagccagtaactatacaaatactca

SEQ ID NO: 1822597 - DNA, 25 bp, Homo sapien
agccagtaactatacaaatactcac

SEQ ID NO: 1822598 - DNA, 25 bp, Homo sapien
tccatagtacaatagtatatctgct

SEQ ID NO: 1822599 - DNA, 25 bp, Homo sapien
tataccctgtaaggtagactttatc

SEQ ID NO: 1822600 - DNA, 25 bp, Homo sapien
taaggtagactttatcttcaagata

SEQ ID NO: 1822601 - DNA, 25 bp, Homo sapien
tctgctaatgtaaagttataccctg

SEQ ID NO: 1822602 - DNA, 25 bp, Homo sapien
cattccagcctgggtgacagagtga

SEQ ID NO: 1822603 - DNA, 25 bp, Homo sapien
gagccaagattacgccattgcattc

SEQ ID NO: 1822604 - DNA, 25 bp, Homo sapien
ttccagcctgggtgacagagtgaga

SEQ ID NO: 1822605 - DNA, 25 bp, Homo sapien
ccagcctgggtgacagagtgagaac

SEQ ID NO: 1822606 - DNA, 25 bp, Homo sapien
cagtctgagttctataagggcagaa

SEQ ID NO: 1822607 - DNA, 25 bp, Homo sapien
tgcaatccactctatgtacaatcgg

SEQ ID NO: 1822608 - DNA, 25 bp, Homo sapien
caagcgtttatatagtaggtgcaga

SEQ ID NO: 1822609 - DNA, 25 bp, Homo sapien
gaaactgtgtctaatgcaccaccag

SEQ ID NO: 1822610 - DNA, 25 bp, Homo sapien
cattgccaggatataacaatcagaa

SEQ ID NO: 1822611 - DNA, 25 bp, Homo sapien
cagaaggaattcctacagtgatatg

SEQ ID NO: 1822612 - DNA, 25 bp, Homo sapien
cagtgatatgctgttgtctgaataa

SEQ ID NO: 1822613 - DNA, 25 bp, Homo sapien
ttcttgtacaacttacattgccagg

SEQ ID NO: 1822614 - DNA, 25 bp, Homo sapien
gatgagctgctatagtagtcaatcc

SEQ ID NO: 1822615 - DNA, 25 bp, Homo sapien
tagtcaatcctgttagacttggacc

SEQ ID NO: 1822616 - DNA, 25 bp, Homo sapien
tctaaccactgctgaacgattgctt

SEQ ID NO: 1822617 - DNA, 25 bp, Homo sapien
tggagtgcccatctacttgagtgac

SEQ ID NO: 1822618 - DNA, 25 bp, Homo sapien
tctgccatttatggtgcaacgtggc

SEQ ID NO: 1822619 - DNA, 25 bp, Homo sapien
aacacttaaactgataatccaaggc

SEQ ID NO: 1822620 - DNA, 25 bp, Homo sapien
gcaacgtggcactcttccaatttaa

SEQ ID NO: 1822621 - DNA, 25 bp, Homo sapien
ttcccgcattcactgtgggtcgtaa

SEQ ID NO: 1822622 - DNA, 25 bp, Homo sapien
agtagcgacaactctgcggccgccg

SEQ ID NO: 1822623 - DNA, 25 bp, Homo sapien
tctccagtagcgacaactctgcggc

SEQ ID NO: 1822624 - DNA, 25 bp, Homo sapien
agcactgtatttattccccttactc

SEQ ID NO: 1822625 - DNA, 25 bp, Homo sapien
cactgtatttattccccttactcag

SEQ ID NO: 1822626 - DNA, 25 bp, Homo sapien
ttccggccgtagctcctggcagacg

SEQ ID NO: 1822627 - DNA, 25 bp, Homo sapien
cggccgtagctcctggcagacgcga

SEQ ID NO: 1822628 - DNA, 25 bp, Homo sapien
cttccggccgtagctcctggcagac

SEQ ID NO: 1822629 - DNA, 25 bp, Homo sapien
gccgtagctcctggcagacgcgaga

SEQ ID NO: 1822630 - DNA, 25 bp, Homo sapien
acctcccgcattggtggaaacagaa

SEQ ID NO: 1822631 - DNA, 25 bp, Homo sapien
tggtggaaacagaagtcccactcct

SEQ ID NO: 1822632 - DNA, 25 bp, Homo sapien
ggaaacagaagtcccactcctgcaa

SEQ ID NO: 1822633 - DNA, 25 bp, Homo sapien
gcagaacaagaacctcccgcattgg

SEQ ID NO: 1822634 - DNA, 25 bp, Homo sapien
gatcttggcttgagagccatgctgg

SEQ ID NO: 1822635 - DNA, 25 bp, Homo sapien
ggactccagttcatcaaggcttggg

SEQ ID NO: 1822636 - DNA, 25 bp, Homo sapien
tcactgagattgttgcagaggaggt

SEQ ID NO: 1822637 - DNA, 25 bp, Homo sapien
caggctcatcttgggggactccagt

SEQ ID NO: 1822638 - DNA, 25 bp, Homo sapien
agagtgataccctgtctcaacaaca

SEQ ID NO: 1822639 - DNA, 25 bp, Homo sapien
agttagctggacattgtggctcacg

SEQ ID NO: 1822640 - DNA, 25 bp, Homo sapien
gagtgataccctgtctcaacaacaa

SEQ ID NO: 1822641 - DNA, 25 bp, Homo sapien
caaaagttagctggacattgtggct

SEQ ID NO: 1822642 - DNA, 25 bp, Homo sapien
gtgctgcgtggaattctgcagatga

SEQ ID NO: 1822643 - DNA, 25 bp, Homo sapien
agtgctgcgtggaattctgcagatg

SEQ ID NO: 1822644 - DNA, 25 bp, Homo sapien
tgctgcgtggaattctgcagatgac

SEQ ID NO: 1822645 - DNA, 25 bp, Homo sapien
gtcaaatcaggcagttgtaacttgc

SEQ ID NO: 1822646 - DNA, 25 bp, Homo sapien
tctgcagtcaaatcaggcagttgta

SEQ ID NO: 1822647 - DNA, 25 bp, Homo sapien
atcaggcagttgtaacttgcgtttc

SEQ ID NO: 1822648 - DNA, 25 bp, Homo sapien
tgcagtcaaatcaggcagttgtaac

SEQ ID NO: 1822649 - DNA, 25 bp, Homo sapien
tagctgtctgatttgaaggcactgt

SEQ ID NO: 1822650 - DNA, 25 bp, Homo sapien
aaggcactgtaaaatctatgggctg

SEQ ID NO: 1822651 - DNA, 25 bp, Homo sapien
aaaatctatgggctgaaactcacct

SEQ ID NO: 1822652 - DNA, 25 bp, Homo sapien
cacggaggtaaggtcttaacgacat

SEQ ID NO: 1822653 - DNA, 25 bp, Homo sapien
gatctggatcacttggaaaggatgg

SEQ ID NO: 1822654 - DNA, 25 bp, Homo sapien
aaggatggtgaggcttccttcggct

SEQ ID NO: 1822655 - DNA, 25 bp, Homo sapien
agacttcatccagttggacagatag

SEQ ID NO: 1822656 - DNA, 25 bp, Homo sapien
tccagttggacagatagtggatctg

SEQ ID NO: 1822657 - DNA, 25 bp, Homo sapien
ccatatgccgccgtgcaagaagaga

SEQ ID NO: 1822658 - DNA, 25 bp, Homo sapien
agagtgctggcagcagtaattccga

SEQ ID NO: 1822659 - DNA, 25 bp, Homo sapien
tgtccatatatgtagcttcccatat

SEQ ID NO: 1822660 - DNA, 25 bp, Homo sapien
aagaagagagtgctggcagcagtaa

SEQ ID NO: 1822661 - DNA, 25 bp, Homo sapien
aatagttgtgcaccaaggctcctca

SEQ ID NO: 1822662 - DNA, 25 bp, Homo sapien
tgtcctgcccaaaacgagccaatag

SEQ ID NO: 1822663 - DNA, 25 bp, Homo sapien
gacatctccaatgagtaaggcacct

SEQ ID NO: 1822664 - DNA, 25 bp, Homo sapien
ctcagcacagcatgaggacgaggtg

SEQ ID NO: 1822665 - DNA, 25 bp, Homo sapien
gtaaactggcaaggacctcccctga

SEQ ID NO: 1822666 - DNA, 25 bp, Homo sapien
cctgatttagtctgcgccagctcat

SEQ ID NO: 1822667 - DNA, 25 bp, Homo sapien
ggacctcccctgatttagtctgcgc

SEQ ID NO: 1822668 - DNA, 25 bp, Homo sapien
gctcataggactgggtgtgtaattg

SEQ ID NO: 1822669 - DNA, 25 bp, Homo sapien
ttgatgcccagagacccttcctgaa

SEQ ID NO: 1822670 - DNA, 25 bp, Homo sapien
tgcccagagacccttcctgaagacc

SEQ ID NO: 1822671 - DNA, 25 bp, Homo sapien
gatgcccagagacccttcctgaaga

SEQ ID NO: 1822672 - DNA, 25 bp, Homo sapien
tcttgatgcccagagacccttcctg

SEQ ID NO: 1822673 - DNA, 25 bp, Homo sapien
agtttctctcgtatccaggggacat

SEQ ID NO: 1822674 - DNA, 25 bp, Homo sapien
cgatccagtttctctcgtatccagg

SEQ ID NO: 1822675 - DNA, 25 bp, Homo sapien
tccagtttctctcgtatccagggga

SEQ ID NO: 1822676 - DNA, 25 bp, Homo sapien
gatccagtttctctcgtatccaggg

SEQ ID NO: 1822677 - DNA, 25 bp, Homo sapien
tttctggttctttctgctttctctg

SEQ ID NO: 1822678 - DNA, 25 bp, Homo sapien
tctggttctttctgctttctctgcc

SEQ ID NO: 1822679 - DNA, 25 bp, Homo sapien
tggttctttctgctttctctgccca

SEQ ID NO: 1822680 - DNA, 25 bp, Homo sapien
ggttctttctgctttctctgcccaa

SEQ ID NO: 1822681 - DNA, 25 bp, Homo sapien
gaattctgttctcccgaactctgag

SEQ ID NO: 1822682 - DNA, 25 bp, Homo sapien
tctgttctcccgaactctgagatgt

SEQ ID NO: 1822683 - DNA, 25 bp, Homo sapien
gctggggaattctgttctcccgaac

SEQ ID NO: 1822684 - DNA, 25 bp, Homo sapien
gggaattctgttctcccgaactctg

SEQ ID NO: 1822685 - DNA, 25 bp, Homo sapien
taacatgctacgatggaggaagcac

SEQ ID NO: 1822686 - DNA, 25 bp, Homo sapien
gaacccaggtgacttccagcatcaa

SEQ ID NO: 1822687 - DNA, 25 bp, Homo sapien
gaagcactccgtgtcaggaacacca

SEQ ID NO: 1822688 - DNA, 25 bp, Homo sapien
ggttccctcggcactttcatatgag

SEQ ID NO: 1822689 - DNA, 25 bp, Homo sapien
tagccagtcactgtcaagagcactg

SEQ ID NO: 1822690 - DNA, 25 bp, Homo sapien
tgactgagctgtaggtacacgatgg

SEQ ID NO: 1822691 - DNA, 25 bp, Homo sapien
ggaatgacacgatcccctttgtggg

SEQ ID NO: 1822692 - DNA, 25 bp, Homo sapien
tacacgatggatctgagggcctgtt

SEQ ID NO: 1822693 - DNA, 25 bp, Homo sapien
gaataacctctcctacagcacaggg

SEQ ID NO: 1822694 - DNA, 25 bp, Homo sapien
tctttggagggaagtctacagtcaa

SEQ ID NO: 1822695 - DNA, 25 bp, Homo sapien
aatatggcccacgaggaataacctc

SEQ ID NO: 1822696 - DNA, 25 bp, Homo sapien
cagggaggcctgtttcctactagaa

SEQ ID NO: 1822697 - DNA, 25 bp, Homo sapien
tctggggtgtgaaaaactgacacta

SEQ ID NO: 1822698 - DNA, 25 bp, Homo sapien
cctctggggtgtgaaaaactgacac

SEQ ID NO: 1822699 - DNA, 25 bp, Homo sapien
ccctctggggtgtgaaaaactgaca

SEQ ID NO: 1822700 - DNA, 25 bp, Homo sapien
tggggtgtgaaaaactgacactaca

SEQ ID NO: 1822701 - DNA, 25 bp, Homo sapien
ccaagccagtgtctcatttcaggtg

SEQ ID NO: 1822702 - DNA, 25 bp, Homo sapien
ttctccttgaagtattgctgtagga

SEQ ID NO: 1822703 - DNA, 25 bp, Homo sapien
tgtgagaaccaggagtagactcgaa

SEQ ID NO: 1822704 - DNA, 25 bp, Homo sapien
agaattataaccctcaaggaaggcg

SEQ ID NO: 1822705 - DNA, 25 bp, Homo sapien
cactcttgggtgtaagtcattggtg

SEQ ID NO: 1822706 - DNA, 25 bp, Homo sapien
gactcgaagtcagctaaagaattat

SEQ ID NO: 1822707 - DNA, 25 bp, Homo sapien
ataattcagaccttccagcactggg

SEQ ID NO: 1822708 - DNA, 25 bp, Homo sapien
catggcccataggtgaaagaataat

SEQ ID NO: 1822709 - DNA, 25 bp, Homo sapien
ggcatggcccataggtgaaagaata

SEQ ID NO: 1822710 - DNA, 25 bp, Homo sapien
ggcccataggtgaaagaataattca

SEQ ID NO: 1822711 - DNA, 25 bp, Homo sapien
gggctctgatgcaatccccaggcag

SEQ ID NO: 1822712 - DNA, 25 bp, Homo sapien
ttgaggctgagagtttagaggtcac

SEQ ID NO: 1822713 - DNA, 25 bp, Homo sapien
tgctttctgccggtgacccattttg

SEQ ID NO: 1822714 - DNA, 25 bp, Homo sapien
gtttagaggtcactactggctctga

SEQ ID NO: 1822715 - DNA, 25 bp, Homo sapien
tggcttagaagttgattacaagttt

SEQ ID NO: 1822716 - DNA, 25 bp, Homo sapien
taacgactgagaatgtgaaggtgca

SEQ ID NO: 1822717 - DNA, 25 bp, Homo sapien
atatattacagtttacgccttggct

SEQ ID NO: 1822718 - DNA, 25 bp, Homo sapien
tattattgttataggtttgtggcaa

SEQ ID NO: 1822719 - DNA, 25 bp, Homo sapien
cttcaaaacaagtcccgggtctgag

SEQ ID NO: 1822720 - DNA, 25 bp, Homo sapien
tcctggttgagttatcatcacactt

SEQ ID NO: 1822721 - DNA, 25 bp, Homo sapien
gtcctggttgagttatcatcacact

SEQ ID NO: 1822722 - DNA, 25 bp, Homo sapien
ggtcctggttgagttatcatcacac

SEQ ID NO: 1822723 - DNA, 25 bp, Homo sapien
gggtcctggttgagttatcatcaca

SEQ ID NO: 1822724 - DNA, 25 bp, Homo sapien
tgtaccaggtcctttatttatagat

SEQ ID NO: 1822725 - DNA, 25 bp, Homo sapien
gcctggtctggccaagctcagacgc

SEQ ID NO: 1822726 - DNA, 25 bp, Homo sapien
ttccacatgagaggcctggtctggc

SEQ ID NO: 1822727 - DNA, 25 bp, Homo sapien
tggtctggccaagctcagacgcctc

SEQ ID NO: 1822728 - DNA, 25 bp, Homo sapien
ctgaacggttccacatgagaggcct

SEQ ID NO: 1822729 - DNA, 25 bp, Homo sapien
cttgcacaggccacttatgcttcat

SEQ ID NO: 1822730 - DNA, 25 bp, Homo sapien
taattccggcgaagtcccactggga

SEQ ID NO: 1822731 - DNA, 25 bp, Homo sapien
gagcatggcaagaagagaggagtga

SEQ ID NO: 1822732 - DNA, 25 bp, Homo sapien
ccggcgaagtcccactgggagcatg

SEQ ID NO: 1822733 - DNA, 25 bp, Homo sapien
ttggctaattccggcgaagtcccac

SEQ ID NO: 1822734 - DNA, 25 bp, Homo sapien
aagaatctgtgttactgttgaggct

SEQ ID NO: 1822735 - DNA, 25 bp, Homo sapien
tgttactgttgaggctctgccctga

SEQ ID NO: 1822736 - DNA, 25 bp, Homo sapien
tcaccgcgtcccctgatgcttcttc

SEQ ID NO: 1822737 - DNA, 25 bp, Homo sapien
tgtgacatggcagagctcaccgcgt

SEQ ID NO: 1822738 - DNA, 25 bp, Homo sapien
tccaagactgacaatgccaccaaca

SEQ ID NO: 1822739 - DNA, 25 bp, Homo sapien
tcatgtcattaaaagagttaggaga

SEQ ID NO: 1822740 - DNA, 25 bp, Homo sapien
caagtcagttcccataatcatgtca

SEQ ID NO: 1822741 - DNA, 25 bp, Homo sapien
tgtcttccagaggtgttgtctcgtc

SEQ ID NO: 1822742 - DNA, 25 bp, Homo sapien
ttctgcttgcccattgccggtccta

SEQ ID NO: 1822743 - DNA, 25 bp, Homo sapien
aagttttgtatggaacatatgttcc

SEQ ID NO: 1822744 - DNA, 25 bp, Homo sapien
ggtggtccaaaatccatttgaagtc

SEQ ID NO: 1822745 - DNA, 25 bp, Homo sapien
gccggtcctagtatttggctcagaa

SEQ ID NO: 1822746 - DNA, 25 bp, Homo sapien
caggtttcttgtaatcgcttcctga

SEQ ID NO: 1822747 - DNA, 25 bp, Homo sapien
gatctccatatacctcgtcatcctt

SEQ ID NO: 1822748 - DNA, 25 bp, Homo sapien
ctgattgatctccatatacctcgtc

SEQ ID NO: 1822749 - DNA, 25 bp, Homo sapien
ttgtaatcgcttcctgattgatctc

SEQ ID NO: 1822750 - DNA, 25 bp, Homo sapien
ccatgcatgtgaataggcgttttcc

SEQ ID NO: 1822751 - DNA, 25 bp, Homo sapien
ggagatttacatcacacagcaaaca

SEQ ID NO: 1822752 - DNA, 25 bp, Homo sapien
tcttcagcggacttgccaaatcatc

SEQ ID NO: 1822753 - DNA, 25 bp, Homo sapien
cagtcgaggcttgtgttcttcagcg

SEQ ID NO: 1822754 - DNA, 25 bp, Homo sapien
atttaaagctttctcatggttctcc

SEQ ID NO: 1822755 - DNA, 25 bp, Homo sapien
tccccatttaaagctttctcatggt

SEQ ID NO: 1822756 - DNA, 25 bp, Homo sapien
ttaaagctttctcatggttctccat

SEQ ID NO: 1822757 - DNA, 25 bp, Homo sapien
tacatccccatttaaagctttctca

SEQ ID NO: 1822758 - DNA, 25 bp, Homo sapien
cagaatcccggacaaatctggtgta

SEQ ID NO: 1822759 - DNA, 25 bp, Homo sapien
ggaattccctactgcccttgttgtg

SEQ ID NO: 1822760 - DNA, 25 bp, Homo sapien
caaatctggtgtaaaagctctcgct

SEQ ID NO: 1822761 - DNA, 25 bp, Homo sapien
tgtgtgcccggattgcatacaggac

SEQ ID NO: 1822762 - DNA, 25 bp, Homo sapien
tgctctggtgcttgattctgctgat

SEQ ID NO: 1822763 - DNA, 25 bp, Homo sapien
ttgctctggtgcttgattctgctga

SEQ ID NO: 1822764 - DNA, 25 bp, Homo sapien
ctgaaacttcaccatggacttcctc

SEQ ID NO: 1822765 - DNA, 25 bp, Homo sapien
gcagaaccgcatggagtactgatat

SEQ ID NO: 1822766 - DNA, 25 bp, Homo sapien
ccgcatggagtactgatatatttaa

SEQ ID NO: 1822767 - DNA, 25 bp, Homo sapien
taattccattaagcacattaagaat

SEQ ID NO: 1822768 - DNA, 25 bp, Homo sapien
ggtgctgcagaaccgcatggagtac

SEQ ID NO: 1822769 - DNA, 25 bp, Homo sapien
gagtaagaccaattctcctattctg

SEQ ID NO: 1822770 - DNA, 25 bp, Homo sapien
tagccctcatcagtcaatattatca

SEQ ID NO: 1822771 - DNA, 25 bp, Homo sapien
tggttccttaatacgagtaagacca

SEQ ID NO: 1822772 - DNA, 25 bp, Homo sapien
ggtcatgtagacttaaaagctggag

SEQ ID NO: 1822773 - DNA, 25 bp, Homo sapien
tgcagctgcactcttcgacagcgtt

SEQ ID NO: 1822774 - DNA, 25 bp, Homo sapien
gatgttggagctctgacaccttgcc

SEQ ID NO: 1822775 - DNA, 25 bp, Homo sapien
tgacctgcagaaccatagattccat

SEQ ID NO: 1822776 - DNA, 25 bp, Homo sapien
tccagtcctatacggtcagtggtaa

SEQ ID NO: 1822777 - DNA, 25 bp, Homo sapien
aatgaaaaccagtccgaattcctca

SEQ ID NO: 1822778 - DNA, 25 bp, Homo sapien
agtccgaattcctcatgctggaccc

SEQ ID NO: 1822779 - DNA, 25 bp, Homo sapien
gatcccgtctatcttaagccaggaa

SEQ ID NO: 1822780 - DNA, 25 bp, Homo sapien
taatgaagtatgcattaagatcccg

SEQ ID NO: 1822781 - DNA, 25 bp, Homo sapien
tatgcggttcataacagggttcccg

SEQ ID NO: 1822782 - DNA, 25 bp, Homo sapien
ggattacttgggcaaactgtagcaa

SEQ ID NO: 1822783 - DNA, 25 bp, Homo sapien
tataaggacataatgagaaggctcc

SEQ ID NO: 1822784 - DNA, 25 bp, Homo sapien
tgtgctaaggcggaaaatattgtcc

SEQ ID NO: 1822785 - DNA, 25 bp, Homo sapien
tcatgttaagccttactccaacttc

SEQ ID NO: 1822786 - DNA, 25 bp, Homo sapien
aaagttcatgttaagccttactcca

SEQ ID NO: 1822787 - DNA, 25 bp, Homo sapien
agttcatgttaagccttactccaac

SEQ ID NO: 1822788 - DNA, 25 bp, Homo sapien
ttaaagttcatgttaagccttactc

SEQ ID NO: 1822789 - DNA, 25 bp, Homo sapien
tattgtaaagtctgctagacgtggc

SEQ ID NO: 1822790 - DNA, 25 bp, Homo sapien
gaaatctgtccacaaatgggatagc

SEQ ID NO: 1822791 - DNA, 25 bp, Homo sapien
gaaaaggctgacaccgcaaaacaac

SEQ ID NO: 1822792 - DNA, 25 bp, Homo sapien
caattagtcttgcaacacatggtcc

SEQ ID NO: 1822793 - DNA, 25 bp, Homo sapien
ctgtgccagcgtccttgactttctt

SEQ ID NO: 1822794 - DNA, 25 bp, Homo sapien
tcatacagtgatggtagtcttattt

SEQ ID NO: 1822795 - DNA, 25 bp, Homo sapien
cactggactctggttaggcaattta

SEQ ID NO: 1822796 - DNA, 25 bp, Homo sapien
tgtggaaacaggcatcaaataaact

SEQ ID NO: 1822797 - DNA, 25 bp, Homo sapien
gacatgtatatctaccaaaggccat

SEQ ID NO: 1822798 - DNA, 25 bp, Homo sapien
tggaaacaggtcacatttgcactgg

SEQ ID NO: 1822799 - DNA, 25 bp, Homo sapien
taaacgaaagtacaatggtcattgc

SEQ ID NO: 1822800 - DNA, 25 bp, Homo sapien
gcaaagaatataaacgaaagtacaa

SEQ ID NO: 1822801 - DNA, 25 bp, Homo sapien
agtacaatggtcattgcttttcttc

SEQ ID NO: 1822802 - DNA, 25 bp, Homo sapien
gtgaatggtttagcaaagaatataa

SEQ ID NO: 1822803 - DNA, 25 bp, Homo sapien
aagaagctgttctggaaacgtgcca

SEQ ID NO: 1822804 - DNA, 25 bp, Homo sapien
ctttgaagtctgctgtaacgctgga

SEQ ID NO: 1822805 - DNA, 25 bp, Homo sapien
tattccaagactctacagttcctgg

SEQ ID NO: 1822806 - DNA, 25 bp, Homo sapien
tcccactgcatagcatgaggatgaa

SEQ ID NO: 1822807 - DNA, 25 bp, Homo sapien
aaaggaacgcataaccataggtccg

SEQ ID NO: 1822808 - DNA, 25 bp, Homo sapien
ggaacgcataaccataggtccgaac

SEQ ID NO: 1822809 - DNA, 25 bp, Homo sapien
cataaccataggtccgaactggatt

SEQ ID NO: 1822810 - DNA, 25 bp, Homo sapien
ctgttacagcaataagtgcaccaaa

SEQ ID NO: 1822811 - DNA, 25 bp, Homo sapien
caactcatagggtacagcaaggata

SEQ ID NO: 1822812 - DNA, 25 bp, Homo sapien
tgaaattaatttccgattggcatgt

SEQ ID NO: 1822813 - DNA, 25 bp, Homo sapien
tcaactttcctacattatgaacagc

SEQ ID NO: 1822814 - DNA, 25 bp, Homo sapien
caataagttgtttgacaatgcagtc

SEQ ID NO: 1822815 - DNA, 25 bp, Homo sapien
ttgaacaagggaaatgagaaattta

SEQ ID NO: 1822816 - DNA, 25 bp, Homo sapien
ttagagaaaattatttaacagaaga

SEQ ID NO: 1822817 - DNA, 25 bp, Homo sapien
tagagaaaattatttaacagaagat

SEQ ID NO: 1822818 - DNA, 25 bp, Homo sapien
caagggaaatgagaaatttagagaa

SEQ ID NO: 1822819 - DNA, 25 bp, Homo sapien
tgcagggcctaatccactagtgcat

SEQ ID NO: 1822820 - DNA, 25 bp, Homo sapien
tgtatacaaaaccaattgaatacga

SEQ ID NO: 1822821 - DNA, 25 bp, Homo sapien
caaaaccaattgaatacgaatacaa

SEQ ID NO: 1822822 - DNA, 25 bp, Homo sapien
gcatgtcaatcccagtaaaatgtat

SEQ ID NO: 1822823 - DNA, 25 bp, Homo sapien
tgtcaggtactgtgttgaagctcgg

SEQ ID NO: 1822824 - DNA, 25 bp, Homo sapien
tatggctcaattaggtttgcagaac

SEQ ID NO: 1822825 - DNA, 25 bp, Homo sapien
tgaagctcggtacggattattccat

SEQ ID NO: 1822826 - DNA, 25 bp, Homo sapien
taagggttttaactctatggctcaa

SEQ ID NO: 1822827 - DNA, 25 bp, Homo sapien
gaaataatcaagatgccattctccc

SEQ ID NO: 1822828 - DNA, 25 bp, Homo sapien
gccattctccctaaattaatttata

SEQ ID NO: 1822829 - DNA, 25 bp, Homo sapien
ctgaaataatcaagatgccattctc

SEQ ID NO: 1822830 - DNA, 25 bp, Homo sapien
cttattcttggactgaaataatcaa

SEQ ID NO: 1822831 - DNA, 25 bp, Homo sapien
ccccagaataactactggtagtaat

SEQ ID NO: 1822832 - DNA, 25 bp, Homo sapien
tcacaataccaatgggatttttagt

SEQ ID NO: 1822833 - DNA, 25 bp, Homo sapien
ttgggaatataaacaccccagaata

SEQ ID NO: 1822834 - DNA, 25 bp, Homo sapien
tataaacaccccagaataactactg

SEQ ID NO: 1822835 - DNA, 25 bp, Homo sapien
gaattagaagcattatgaagtttca

SEQ ID NO: 1822836 - DNA, 25 bp, Homo sapien
ttatgaagtttcatagctttctctt

SEQ ID NO: 1822837 - DNA, 25 bp, Homo sapien
catagctttctcttgaacatttcca

SEQ ID NO: 1822838 - DNA, 25 bp, Homo sapien
tttcagaattagaagcattatgaag

SEQ ID NO: 1822839 - DNA, 25 bp, Homo sapien
catagtgccagggaaataagcacca

SEQ ID NO: 1822840 - DNA, 25 bp, Homo sapien
tagtgccagggaaataagcaccaca

SEQ ID NO: 1822841 - DNA, 25 bp, Homo sapien
cacatagtgccagggaaataagcac

SEQ ID NO: 1822842 - DNA, 25 bp, Homo sapien
gcacatagtgccagggaaataagca

SEQ ID NO: 1822843 - DNA, 25 bp, Homo sapien
caggttgaaatttggtgcagttgtg

SEQ ID NO: 1822844 - DNA, 25 bp, Homo sapien
tcaggttgaaatttggtgcagttgt

SEQ ID NO: 1822845 - DNA, 25 bp, Homo sapien
cgtcaggttgaaatttggtgcagtt

SEQ ID NO: 1822846 - DNA, 25 bp, Homo sapien
ccgtcaggttgaaatttggtgcagt

SEQ ID NO: 1822847 - DNA, 25 bp, Homo sapien
ctgtcagcgagggtaaaccatatca

SEQ ID NO: 1822848 - DNA, 25 bp, Homo sapien
accatatcaggccaaggctcataca

SEQ ID NO: 1822849 - DNA, 25 bp, Homo sapien
cagcgagggtaaaccatatcaggcc

SEQ ID NO: 1822850 - DNA, 25 bp, Homo sapien
caggccaaggctcatacatatggca

SEQ ID NO: 1822851 - DNA, 25 bp, Homo sapien
atacccacccagctttatatttgct

SEQ ID NO: 1822852 - DNA, 25 bp, Homo sapien
aatacccacccagctttatatttgc

SEQ ID NO: 1822853 - DNA, 25 bp, Homo sapien
tcattatgcaaatacccacccagct

SEQ ID NO: 1822854 - DNA, 25 bp, Homo sapien
tagggtaattcaggtagcccaagga

SEQ ID NO: 1822855 - DNA, 25 bp, Homo sapien
aacaggaatcaatttgcagcacttg

SEQ ID NO: 1822856 - DNA, 25 bp, Homo sapien
taaaaactcctcctagcataacagg

SEQ ID NO: 1822857 - DNA, 25 bp, Homo sapien
catagtacccacagttagaaaagct

SEQ ID NO: 1822858 - DNA, 25 bp, Homo sapien
gaattttgagccattactgtgagca

SEQ ID NO: 1822859 - DNA, 25 bp, Homo sapien
tggtggagcaccacttcgccaggta

SEQ ID NO: 1822860 - DNA, 25 bp, Homo sapien
taaatgcgttcatgccatccatggg

SEQ ID NO: 1822861 - DNA, 25 bp, Homo sapien
gtagttaaccatgaaaatccacgtg

SEQ ID NO: 1822862 - DNA, 25 bp, Homo sapien
agtgccaagacccaaacccatgttt

SEQ ID NO: 1822863 - DNA, 25 bp, Homo sapien
taaaggtctaacgagtagcagtacc

SEQ ID NO: 1822864 - DNA, 25 bp, Homo sapien
cagatgtaataagacccaagtgcca

SEQ ID NO: 1822865 - DNA, 25 bp, Homo sapien
tagcacgcattaccacatatgagcc

SEQ ID NO: 1822866 - DNA, 25 bp, Homo sapien
tgagatgttgctgaaatgagaccca

SEQ ID NO: 1822867 - DNA, 25 bp, Homo sapien
caaatctagatggttgctacctgaa

SEQ ID NO: 1822868 - DNA, 25 bp, Homo sapien
tatacacacattagggtacgacaga

SEQ ID NO: 1822869 - DNA, 25 bp, Homo sapien
taagaacgcaacctcagctatcgga

SEQ ID NO: 1822870 - DNA, 25 bp, Homo sapien
cctgaataagctgaagttctattag

SEQ ID NO: 1822871 - DNA, 25 bp, Homo sapien
cacaggacttaaaaccctccactga

SEQ ID NO: 1822872 - DNA, 25 bp, Homo sapien
caaactgcactaaggtaaggtacca

SEQ ID NO: 1822873 - DNA, 25 bp, Homo sapien
tatggagtaaaaggcaaactgcact

SEQ ID NO: 1822874 - DNA, 25 bp, Homo sapien
gatgatcatctctacaagacaatga

SEQ ID NO: 1822875 - DNA, 25 bp, Homo sapien
taatgacacttacagggtgaatttc

SEQ ID NO: 1822876 - DNA, 25 bp, Homo sapien
ggcatctcaagttttatatcaccta

SEQ ID NO: 1822877 - DNA, 25 bp, Homo sapien
cccaagctatttggtaacagtggta

SEQ ID NO: 1822878 - DNA, 25 bp, Homo sapien
gatcttttattattgagctccaaga

SEQ ID NO: 1822879 - DNA, 25 bp, Homo sapien
tgagctccaagaatcaagtaaactg

SEQ ID NO: 1822880 - DNA, 25 bp, Homo sapien
caagaatcaagtaaactgcactatc

SEQ ID NO: 1822881 - DNA, 25 bp, Homo sapien
tattattgagctccaagaatcaagt

SEQ ID NO: 1822882 - DNA, 25 bp, Homo sapien
cctaagtgactatcttgggcaaaac

SEQ ID NO: 1822883 - DNA, 25 bp, Homo sapien
tgaatcagccagtatcccctaagtg

SEQ ID NO: 1822884 - DNA, 25 bp, Homo sapien
caagatagtctctacatatgcctcc

SEQ ID NO: 1822885 - DNA, 25 bp, Homo sapien
tccaagataccaatcaatacgtgaa

SEQ ID NO: 1822886 - DNA, 25 bp, Homo sapien
tgttaaacttgctgagattcatgcc

SEQ ID NO: 1822887 - DNA, 25 bp, Homo sapien
acttgctgagattcatgccaagtac

SEQ ID NO: 1822888 - DNA, 25 bp, Homo sapien
taaacttgctgagattcatgccaag

SEQ ID NO: 1822889 - DNA, 25 bp, Homo sapien
gttaaacttgctgagattcatgcca

SEQ ID NO: 1822890 - DNA, 25 bp, Homo sapien
cacaacgtcgtcaactgacttgatg

SEQ ID NO: 1822891 - DNA, 25 bp, Homo sapien
atgtgtggtgacattgtttgggttt

SEQ ID NO: 1822892 - DNA, 25 bp, Homo sapien
caacgtcgtcaactgacttgatgtg

SEQ ID NO: 1822893 - DNA, 25 bp, Homo sapien
ggatggcacagtgatagaaatatat

SEQ ID NO: 1822894 - DNA, 25 bp, Homo sapien
tggtttcctggactgttatgttctg

SEQ ID NO: 1822895 - DNA, 25 bp, Homo sapien
gttattttgctgcattcaatgcttt

SEQ ID NO: 1822896 - DNA, 25 bp, Homo sapien
tatgttctgtatgtcttttgcttgc

SEQ ID NO: 1822897 - DNA, 25 bp, Homo sapien
tgtatgtcttttgcttgctgtgtca

SEQ ID NO: 1822898 - DNA, 25 bp, Homo sapien
tttacagaggttaaccaggtcatcc

SEQ ID NO: 1822899 - DNA, 25 bp, Homo sapien
cagcagtagcatctcttaggttaaa

SEQ ID NO: 1822900 - DNA, 25 bp, Homo sapien
taaaatggccaaaattagagtcgcc

SEQ ID NO: 1822901 - DNA, 25 bp, Homo sapien
caaaaatttaaactctgcggcacga

SEQ ID NO: 1822902 - DNA, 25 bp, Homo sapien
ggtactggcaaactttatgagcaaa

SEQ ID NO: 1822903 - DNA, 25 bp, Homo sapien
tggcaaactttatgagcaaaactga

SEQ ID NO: 1822904 - DNA, 25 bp, Homo sapien
tgaaatggatggtggtactggcaaa

SEQ ID NO: 1822905 - DNA, 25 bp, Homo sapien
gatggtggtactggcaaactttatg

SEQ ID NO: 1822906 - DNA, 25 bp, Homo sapien
catccatgaataaggcctcgaagtt

SEQ ID NO: 1822907 - DNA, 25 bp, Homo sapien
cagaaggtcacgctttcccaaagtc

SEQ ID NO: 1822908 - DNA, 25 bp, Homo sapien
caacgtgaagtctgatcatgctgca

SEQ ID NO: 1822909 - DNA, 25 bp, Homo sapien
gatatggtgtgctcaagctgactca

SEQ ID NO: 1822910 - DNA, 25 bp, Homo sapien
ggtgtgtataattgcctgaggcctc

SEQ ID NO: 1822911 - DNA, 25 bp, Homo sapien
tgggccaaactccttgtgatgcaag

SEQ ID NO: 1822912 - DNA, 25 bp, Homo sapien
tgagttttccgacctgaaggacaaa

SEQ ID NO: 1822913 - DNA, 25 bp, Homo sapien
tgctgcagatctaggccatatgtgc

SEQ ID NO: 1822914 - DNA, 25 bp, Homo sapien
gccattatgccttgattaactgcgc

SEQ ID NO: 1822915 - DNA, 25 bp, Homo sapien
gccttgattaactgcgctccggaat

SEQ ID NO: 1822916 - DNA, 25 bp, Homo sapien
actgcgctccggaatcaatcatggc

SEQ ID NO: 1822917 - DNA, 25 bp, Homo sapien
gattaactgcgctccggaatcaatc

SEQ ID NO: 1822918 - DNA, 25 bp, Homo sapien
tgttagcgcaccaaatcattccatc

SEQ ID NO: 1822919 - DNA, 25 bp, Homo sapien
gccataaacttaatagcccagccag

SEQ ID NO: 1822920 - DNA, 25 bp, Homo sapien
gactggaggaaacttgcagaacttc

SEQ ID NO: 1822921 - DNA, 25 bp, Homo sapien
tcattacacaaaggtggagaaaccc

SEQ ID NO: 1822922 - DNA, 25 bp, Homo sapien
cagcgtaaaagaccccttgaggtca

SEQ ID NO: 1822923 - DNA, 25 bp, Homo sapien
cacggaacgaggaaacagttaactg

SEQ ID NO: 1822924 - DNA, 25 bp, Homo sapien
tccagagaccccgagaacagcgtaa

SEQ ID NO: 1822925 - DNA, 25 bp, Homo sapien
taaatacagtctagaggtatccagg

SEQ ID NO: 1822926 - DNA, 25 bp, Homo sapien
gcgaggaggaacagatgctcctccc

SEQ ID NO: 1822927 - DNA, 25 bp, Homo sapien
tctcgccagcccgagggcgaaaaac

SEQ ID NO: 1822928 - DNA, 25 bp, Homo sapien
attgggacctgagggagttctcgcc

SEQ ID NO: 1822929 - DNA, 25 bp, Homo sapien
cctgcgagtccacggattgggacct

SEQ ID NO: 1822930 - DNA, 25 bp, Homo sapien
agaggagatctgggtcccaaacaca

SEQ ID NO: 1822931 - DNA, 25 bp, Homo sapien
caggaaaggccccgaaggcacgcgt

SEQ ID NO: 1822932 - DNA, 25 bp, Homo sapien
tccattcctcgaacgctccttctgg

SEQ ID NO: 1822933 - DNA, 25 bp, Homo sapien
ctcatccattcctcgaacgctcctt

SEQ ID NO: 1822934 - DNA, 25 bp, Homo sapien
acccggaagggtgacggcagcctgc

SEQ ID NO: 1822935 - DNA, 25 bp, Homo sapien
ccaaggccggtatgtcacccggaag

SEQ ID NO: 1822936 - DNA, 25 bp, Homo sapien
agggtgacggcagcctgcgtggcgt

SEQ ID NO: 1822937 - DNA, 25 bp, Homo sapien
caaggccggtatgtcacccggaagg

SEQ ID NO: 1822938 - DNA, 25 bp, Homo sapien
tgagctagacggagcatctccccct

SEQ ID NO: 1822939 - DNA, 25 bp, Homo sapien
ctgagctagacggagcatctccccc

SEQ ID NO: 1822940 - DNA, 25 bp, Homo sapien
gcggcggtcgcctccccggaaagca

SEQ ID NO: 1822941 - DNA, 25 bp, Homo sapien
cctcctcgcccactcctgcactttc

SEQ ID NO: 1822942 - DNA, 25 bp, Homo sapien
cgcaggccacttccgcctatgtgtc

SEQ ID NO: 1822943 - DNA, 25 bp, Homo sapien
agcactctcaactccggcgcccgca

SEQ ID NO: 1822944 - DNA, 25 bp, Homo sapien
gtaggtcggtgagcgccgatctgct

SEQ ID NO: 1822945 - DNA, 25 bp, Homo sapien
tctgaagcccctcgggtttcagctg

SEQ ID NO: 1822946 - DNA, 25 bp, Homo sapien
gaagcccctcgggtttcagctgccg

SEQ ID NO: 1822947 - DNA, 25 bp, Homo sapien
ctctacccactgaaatggagtaggt

SEQ ID NO: 1822948 - DNA, 25 bp, Homo sapien
gacacttcccttgatatgactggtc

SEQ ID NO: 1822949 - DNA, 25 bp, Homo sapien
cttcccttgatatgactggtcttgt

SEQ ID NO: 1822950 - DNA, 25 bp, Homo sapien
cccttgatatgactggtcttgttca

SEQ ID NO: 1822951 - DNA, 25 bp, Homo sapien
ctgacacttcccttgatatgactgg

SEQ ID NO: 1822952 - DNA, 25 bp, Homo sapien
tctccttctaacctgccaaatttct

SEQ ID NO: 1822953 - DNA, 25 bp, Homo sapien
ttctaacctgccaaatttctgccct

SEQ ID NO: 1822954 - DNA, 25 bp, Homo sapien
tccttctaacctgccaaatttctgc

SEQ ID NO: 1822955 - DNA, 25 bp, Homo sapien
tttctctccttctaacctgccaaat

SEQ ID NO: 1822956 - DNA, 25 bp, Homo sapien
gctgggcaagcacatacatgtggaa

SEQ ID NO: 1822957 - DNA, 25 bp, Homo sapien
gggacgggctggaaccatgctcctt

SEQ ID NO: 1822958 - DNA, 25 bp, Homo sapien
tgttgttgggtagcctcaagtgagt

SEQ ID NO: 1822959 - DNA, 25 bp, Homo sapien
tctgaatgtcagtgccttcaagctg

SEQ ID NO: 1822960 - DNA, 25 bp, Homo sapien
cactctcaagatctggtaactgctg

SEQ ID NO: 1822961 - DNA, 25 bp, Homo sapien
tcataggctcctgtaacttataggc

SEQ ID NO: 1822962 - DNA, 25 bp, Homo sapien
gggtgagctgatatttcttcatagg

SEQ ID NO: 1822963 - DNA, 25 bp, Homo sapien
tcaccaccaatatatacatgaaagg

SEQ ID NO: 1822964 - DNA, 25 bp, Homo sapien
agaaagctttggcatagaaccttgt

SEQ ID NO: 1822965 - DNA, 25 bp, Homo sapien
agctttggcatagaaccttgttctg

SEQ ID NO: 1822966 - DNA, 25 bp, Homo sapien
gcatagaaccttgttctgttggatt

SEQ ID NO: 1822967 - DNA, 25 bp, Homo sapien
aaaagaaagctttggcatagaacct

SEQ ID NO: 1822968 - DNA, 25 bp, Homo sapien
tgattcattgtaaccaggagcaagt

SEQ ID NO: 1822969 - DNA, 25 bp, Homo sapien
attcattgtaaccaggagcaagttt

SEQ ID NO: 1822970 - DNA, 25 bp, Homo sapien
tctgattcattgtaaccaggagcaa

SEQ ID NO: 1822971 - DNA, 25 bp, Homo sapien
gattcattgtaaccaggagcaagtt

SEQ ID NO: 1822972 - DNA, 25 bp, Homo sapien
gattttgccattatcagctttgtca

SEQ ID NO: 1822973 - DNA, 25 bp, Homo sapien
ccttgtactttctgataaaccagga

SEQ ID NO: 1822974 - DNA, 25 bp, Homo sapien
ctacaagaatctcgccacacactgg

SEQ ID NO: 1822975 - DNA, 25 bp, Homo sapien
ccttgttgtggagaactatttcgtg

SEQ ID NO: 1822976 - DNA, 25 bp, Homo sapien
cagaaagttgaactctaccaggtgc

SEQ ID NO: 1822977 - DNA, 25 bp, Homo sapien
agggagccagaaagttgaactctac

SEQ ID NO: 1822978 - DNA, 25 bp, Homo sapien
ttcagggccctgtgcaagcttcagg

SEQ ID NO: 1822979 - DNA, 25 bp, Homo sapien
gtgcaagcttcagggagccagaaag

SEQ ID NO: 1822980 - DNA, 25 bp, Homo sapien
ctccagcaccaaaagtgtggaaggc

SEQ ID NO: 1822981 - DNA, 25 bp, Homo sapien
cagcaccaaaagtgtggaaggcaaa

SEQ ID NO: 1822982 - DNA, 25 bp, Homo sapien
caccaaaagtgtggaaggcaaaagc

SEQ ID NO: 1822983 - DNA, 25 bp, Homo sapien
ccagcaccaaaagtgtggaaggcaa

SEQ ID NO: 1822984 - DNA, 25 bp, Homo sapien
tgaactctgatcaaaggccacagct

SEQ ID NO: 1822985 - DNA, 25 bp, Homo sapien
catacagtaaaaagattgaactctg

SEQ ID NO: 1822986 - DNA, 25 bp, Homo sapien
tacagccgataagagtcaggcccca

SEQ ID NO: 1822987 - DNA, 25 bp, Homo sapien
attcctgatgacaagagttttaaga

SEQ ID NO: 1822988 - DNA, 25 bp, Homo sapien
gaatttggaatcagagcagactctc

SEQ ID NO: 1822989 - DNA, 25 bp, Homo sapien
tgacaacttgttgggtacatatcag

SEQ ID NO: 1822990 - DNA, 25 bp, Homo sapien
tgtccccaattaggttatcagtcac

SEQ ID NO: 1822991 - DNA, 25 bp, Homo sapien
cactcgctaggccttccaaattgtg

SEQ ID NO: 1822992 - DNA, 25 bp, Homo sapien
ctggaagtctatcaaattaatcgca

SEQ ID NO: 1822993 - DNA, 25 bp, Homo sapien
gaagtctatcaaattaatcgcaaaa

SEQ ID NO: 1822994 - DNA, 25 bp, Homo sapien
tctatcaaattaatcgcaaaaatct

SEQ ID NO: 1822995 - DNA, 25 bp, Homo sapien
ctactggaagtctatcaaattaatc

SEQ ID NO: 1822996 - DNA, 25 bp, Homo sapien
gctcatcatataccgctgaaatctg

SEQ ID NO: 1822997 - DNA, 25 bp, Homo sapien
gctgaaatctgagttggtgggctca

SEQ ID NO: 1822998 - DNA, 25 bp, Homo sapien
tacggactcatagtatcaacagtcg

SEQ ID NO: 1822999 - DNA, 25 bp, Homo sapien
ccatgctctggaattgctcatcata

SEQ ID NO: 1823000 - DNA, 25 bp, Homo sapien
cttttataacagttgtcacgtacca

SEQ ID NO: 1823001 - DNA, 25 bp, Homo sapien
tgtcacgtaccaaatattctgataa

SEQ ID NO: 1823002 - DNA, 25 bp, Homo sapien
tctgataaattatcatcctcgttgc

SEQ ID NO: 1823003 - DNA, 25 bp, Homo sapien
gataaattatcatcctcgttgctga

SEQ ID NO: 1823004 - DNA, 25 bp, Homo sapien
aatctccacagagcctaactgacaa

SEQ ID NO: 1823005 - DNA, 25 bp, Homo sapien
aaaatctccacagagcctaactgac

SEQ ID NO: 1823006 - DNA, 25 bp, Homo sapien
ctccacagagcctaactgacaacct

SEQ ID NO: 1823007 - DNA, 25 bp, Homo sapien
cagtaggctcctctgccaaatttaa

SEQ ID NO: 1823008 - DNA, 25 bp, Homo sapien
gaaattgatcctggatatttgtcca

SEQ ID NO: 1823009 - DNA, 25 bp, Homo sapien
cttaggagggtggttaatttgacat

SEQ ID NO: 1823010 - DNA, 25 bp, Homo sapien
tggctttactcaaacctaaagtgac

SEQ ID NO: 1823011 - DNA, 25 bp, Homo sapien
gctgtgactccagtccttaggaggg

SEQ ID NO: 1823012 - DNA, 25 bp, Homo sapien
ttgtacaggtatttactggaatctg

SEQ ID NO: 1823013 - DNA, 25 bp, Homo sapien
tcctcctgttgtacaggtatttact

SEQ ID NO: 1823014 - DNA, 25 bp, Homo sapien
cctgttgtacaggtatttactggaa

SEQ ID NO: 1823015 - DNA, 25 bp, Homo sapien
tacaggtatttactggaatctgagc

SEQ ID NO: 1823016 - DNA, 25 bp, Homo sapien
aagtgggggacttctgctaaattgg

SEQ ID NO: 1823017 - DNA, 25 bp, Homo sapien
tctgagtttgctttacgagtgattt

SEQ ID NO: 1823018 - DNA, 25 bp, Homo sapien
aattggggatctgggtaaccgagca

SEQ ID NO: 1823019 - DNA, 25 bp, Homo sapien
ttgctttacgagtgattttctctgg

SEQ ID NO: 1823020 - DNA, 25 bp, Homo sapien
gagttgtttgatgcgtaagatgagc

SEQ ID NO: 1823021 - DNA, 25 bp, Homo sapien
taattatctgggctgaatagcacca

SEQ ID NO: 1823022 - DNA, 25 bp, Homo sapien
acagaaaatttacagacctatggaa

SEQ ID NO: 1823023 - DNA, 25 bp, Homo sapien
tggatgcactattcatgtgataggc

SEQ ID NO: 1823024 - DNA, 25 bp, Homo sapien
gcattggcaaagctaggaaggctga

SEQ ID NO: 1823025 - DNA, 25 bp, Homo sapien
ggttgtacgtaacaggactcttgtg

SEQ ID NO: 1823026 - DNA, 25 bp, Homo sapien
aaaatctactcccagcaattggaag

SEQ ID NO: 1823027 - DNA, 25 bp, Homo sapien
gttactctgacacgtgcatcctttg

SEQ ID NO: 1823028 - DNA, 25 bp, Homo sapien
caagctggcccctgcattttggtta

SEQ ID NO: 1823029 - DNA, 25 bp, Homo sapien
tacagaacggaggaaatgaaagcag

SEQ ID NO: 1823030 - DNA, 25 bp, Homo sapien
gaaaataaatttatggcagcccgac

SEQ ID NO: 1823031 - DNA, 25 bp, Homo sapien
caagaggaagatacaacagggctct

SEQ ID NO: 1823032 - DNA, 25 bp, Homo sapien
ctggtaatggcgttgttacacttct

SEQ ID NO: 1823033 - DNA, 25 bp, Homo sapien
cttctttatctggaggtcctcttgc

SEQ ID NO: 1823034 - DNA, 25 bp, Homo sapien
taatggcttgggatactggtaatgg

SEQ ID NO: 1823035 - DNA, 25 bp, Homo sapien
atggactgtaatggcttgggatact

SEQ ID NO: 1823036 - DNA, 25 bp, Homo sapien
aggtgacgctcgacagccttctgtt

SEQ ID NO: 1823037 - DNA, 25 bp, Homo sapien
catctgcactgttggatgtagaact

SEQ ID NO: 1823038 - DNA, 25 bp, Homo sapien
cagccagagagatggactgctctca

SEQ ID NO: 1823039 - DNA, 25 bp, Homo sapien
gagagctcaacagttacacagccag

SEQ ID NO: 1823040 - DNA, 25 bp, Homo sapien
caaataagaattcatctccggggaa

SEQ ID NO: 1823041 - DNA, 25 bp, Homo sapien
gctactaccccaagaaaggagttca

SEQ ID NO: 1823042 - DNA, 25 bp, Homo sapien
tcagggctactaccccaagaaagga

SEQ ID NO: 1823043 - DNA, 25 bp, Homo sapien
tcccactttgtgggatgccaacagt

SEQ ID NO: 1823044 - DNA, 25 bp, Homo sapien
ctactaccccaagaaaggagttcat

SEQ ID NO: 1823045 - DNA, 25 bp, Homo sapien
tatatggaatgtgtagaaagggatg

SEQ ID NO: 1823046 - DNA, 25 bp, Homo sapien
aaaacaatttaagcgttgccaggtg

SEQ ID NO: 1823047 - DNA, 25 bp, Homo sapien
ggtctttgatctgcaggccaatttc

SEQ ID NO: 1823048 - DNA, 25 bp, Homo sapien
tggaaggcagtttccaatgtcagga

SEQ ID NO: 1823049 - DNA, 25 bp, Homo sapien
ttggttctcctttctacaacatctt

SEQ ID NO: 1823050 - DNA, 25 bp, Homo sapien
tcaattcctggttgtcttggcggct

SEQ ID NO: 1823051 - DNA, 25 bp, Homo sapien
cctgtgtactcaacatagccaggag

SEQ ID NO: 1823052 - DNA, 25 bp, Homo sapien
gggtttcattgtactcctgtgtact

SEQ ID NO: 1823053 - DNA, 25 bp, Homo sapien
tgtgtccagctcaacacctctgcaa

SEQ ID NO: 1823054 - DNA, 25 bp, Homo sapien
actaaagattatttacctgtgtcca

SEQ ID NO: 1823055 - DNA, 25 bp, Homo sapien
gctcaacacctctgcaagtaaatca

SEQ ID NO: 1823056 - DNA, 25 bp, Homo sapien
gattatttacctgtgtccagctcaa

SEQ ID NO: 1823057 - DNA, 25 bp, Homo sapien
tccgcaacggcaaatgtcatggatg

SEQ ID NO: 1823058 - DNA, 25 bp, Homo sapien
tacaggcgatgtgaatccgcaacgg

SEQ ID NO: 1823059 - DNA, 25 bp, Homo sapien
caaattttgactgatgcctgctaag

SEQ ID NO: 1823060 - DNA, 25 bp, Homo sapien
caataaacttgacttcccggactga

SEQ ID NO: 1823061 - DNA, 25 bp, Homo sapien
tactgatgcattagatatgggcagg

SEQ ID NO: 1823062 - DNA, 25 bp, Homo sapien
ggcaattctgtgctgctgataccag

SEQ ID NO: 1823063 - DNA, 25 bp, Homo sapien
gggcataggtaaagagacagttcat

SEQ ID NO: 1823064 - DNA, 25 bp, Homo sapien
aattgggctgcttagtgctttggca

SEQ ID NO: 1823065 - DNA, 25 bp, Homo sapien
taagtgctcaaatgttctctaaggt

SEQ ID NO: 1823066 - DNA, 25 bp, Homo sapien
ctttcaaggtgggttcatatccttg

SEQ ID NO: 1823067 - DNA, 25 bp, Homo sapien
ttggtaagtgctcaaatgttctcta

SEQ ID NO: 1823068 - DNA, 25 bp, Homo sapien
tttcaaggtgggttcatatccttgg

SEQ ID NO: 1823069 - DNA, 25 bp, Homo sapien
cagatccgctactctccttaagcat

SEQ ID NO: 1823070 - DNA, 25 bp, Homo sapien
cctttcaggacatcattcacaatcg

SEQ ID NO: 1823071 - DNA, 25 bp, Homo sapien
tcttcagatccgctactctccttaa

SEQ ID NO: 1823072 - DNA, 25 bp, Homo sapien
caatcgcatcacaaccatcttcaga

SEQ ID NO: 1823073 - DNA, 25 bp, Homo sapien
gatgtggtcttttaagtcgttttca

SEQ ID NO: 1823074 - DNA, 25 bp, Homo sapien
caaagttcctcccatggagttgcca

SEQ ID NO: 1823075 - DNA, 25 bp, Homo sapien
agttcctcccatggagttgccatcc

SEQ ID NO: 1823076 - DNA, 25 bp, Homo sapien
gccatccagtttgatgtggtctttt

SEQ ID NO: 1823077 - DNA, 25 bp, Homo sapien
gttttgcaaaataacgtgcatgcat

SEQ ID NO: 1823078 - DNA, 25 bp, Homo sapien
tactcagaaattcttttggacattt

SEQ ID NO: 1823079 - DNA, 25 bp, Homo sapien
ctttcatattcgaagtaatcattaa

SEQ ID NO: 1823080 - DNA, 25 bp, Homo sapien
ttcatattcgaagtaatcattaatt

SEQ ID NO: 1823081 - DNA, 25 bp, Homo sapien
tttcatattcgaagtaatcattaat

SEQ ID NO: 1823082 - DNA, 25 bp, Homo sapien
ttacacaagattggtgtgggaacag

SEQ ID NO: 1823083 - DNA, 25 bp, Homo sapien
ggtaggagtggccatagatagtttc

SEQ ID NO: 1823084 - DNA, 25 bp, Homo sapien
ggaacagcatgaccacgagaaaaat

SEQ ID NO: 1823085 - DNA, 25 bp, Homo sapien
gatagtttctggttacacaagattg

SEQ ID NO: 1823086 - DNA, 25 bp, Homo sapien
tcttgcacgattggaaagatttctc

SEQ ID NO: 1823087 - DNA, 25 bp, Homo sapien
ctccttcaagtcttgcacgattgga

SEQ ID NO: 1823088 - DNA, 25 bp, Homo sapien
ggacgggcagctgagaatggcagtt

SEQ ID NO: 1823089 - DNA, 25 bp, Homo sapien
tcaagtcttgcacgattggaaagat

SEQ ID NO: 1823090 - DNA, 25 bp, Homo sapien
cctactgccttgtatgtaccacatg

SEQ ID NO: 1823091 - DNA, 25 bp, Homo sapien
cagttttggtacagtgtattgctgg

SEQ ID NO: 1823092 - DNA, 25 bp, Homo sapien
caagctggtttgtttcctactgcct

SEQ ID NO: 1823093 - DNA, 25 bp, Homo sapien
tcatgaggtatctgctggaatccat

SEQ ID NO: 1823094 - DNA, 25 bp, Homo sapien
tgatttacagcaattgcaggtggcc

SEQ ID NO: 1823095 - DNA, 25 bp, Homo sapien
gccaagagagcttgtttcaaggcag

SEQ ID NO: 1823096 - DNA, 25 bp, Homo sapien
gcatattttgcgtagtgatttctgt

SEQ ID NO: 1823097 - DNA, 25 bp, Homo sapien
catcttggcttatgcatattttgcg

SEQ ID NO: 1823098 - DNA, 25 bp, Homo sapien
tttctagggctacatgaatcatctg

SEQ ID NO: 1823099 - DNA, 25 bp, Homo sapien
tcttccggatgctataagcagccat

SEQ ID NO: 1823100 - DNA, 25 bp, Homo sapien
tgcagatgcgaattaacttttctcc

SEQ ID NO: 1823101 - DNA, 25 bp, Homo sapien
catggatgggcggagaaaagatcct

SEQ ID NO: 1823102 - DNA, 25 bp, Homo sapien
tagagaaactaaacctgtaggtaca

SEQ ID NO: 1823103 - DNA, 25 bp, Homo sapien
agcttacctagagaaactaaacctg

SEQ ID NO: 1823104 - DNA, 25 bp, Homo sapien
tgtaggtacagcatctctatagctc

SEQ ID NO: 1823105 - DNA, 25 bp, Homo sapien
gtagagagacctggccaaagcttac

SEQ ID NO: 1823106 - DNA, 25 bp, Homo sapien
gctttaatagcttttgtgtcatggt

SEQ ID NO: 1823107 - DNA, 25 bp, Homo sapien
taatctggatcacaaagagccttca

SEQ ID NO: 1823108 - DNA, 25 bp, Homo sapien
aatctctgggcgtctgagtgattca

SEQ ID NO: 1823109 - DNA, 25 bp, Homo sapien
gagccttcataatgtctccttctag

SEQ ID NO: 1823110 - DNA, 25 bp, Homo sapien
tactcatcagacatagagaagaaag

SEQ ID NO: 1823111 - DNA, 25 bp, Homo sapien
taacagccctttggaattgatctca

SEQ ID NO: 1823112 - DNA, 25 bp, Homo sapien
tagagaagaaagttcggatctcaca

SEQ ID NO: 1823113 - DNA, 25 bp, Homo sapien
gatctcaatgaccaaagcatacaca

SEQ ID NO: 1823114 - DNA, 25 bp, Homo sapien
gcatagccagcttacattaacttga

SEQ ID NO: 1823115 - DNA, 25 bp, Homo sapien
taagggctcgcatgcagagaatacc

SEQ ID NO: 1823116 - DNA, 25 bp, Homo sapien
cattaacttgaaagagagttccagg

SEQ ID NO: 1823117 - DNA, 25 bp, Homo sapien
tgccagctttcatcaccgctttgca

SEQ ID NO: 1823118 - DNA, 25 bp, Homo sapien
acatctttgctgttgcatgggacca

SEQ ID NO: 1823119 - DNA, 25 bp, Homo sapien
tgcactgttcccctgacgctcctca

SEQ ID NO: 1823120 - DNA, 25 bp, Homo sapien
ctgacgctcctcattcacatctttg

SEQ ID NO: 1823121 - DNA, 25 bp, Homo sapien
cattaaggtgtcctgtgcactgttc

SEQ ID NO: 1823122 - DNA, 25 bp, Homo sapien
gaaggcttggttgatctcttgaata

SEQ ID NO: 1823123 - DNA, 25 bp, Homo sapien
agcagtgatgcatggctctgagctc

SEQ ID NO: 1823124 - DNA, 25 bp, Homo sapien
ggaagcatggttgatctgtgctgaa

SEQ ID NO: 1823125 - DNA, 25 bp, Homo sapien
tagtcagagcagtgtggcactgctg

SEQ ID NO: 1823126 - DNA, 25 bp, Homo sapien
gaaaaggcgagcttcaataagccag

SEQ ID NO: 1823127 - DNA, 25 bp, Homo sapien
tccttgctatcgtcaacctctttag

SEQ ID NO: 1823128 - DNA, 25 bp, Homo sapien
ggcccctggaaaaggcgagcttcaa

SEQ ID NO: 1823129 - DNA, 25 bp, Homo sapien
acctctttagaggaggagctctgcc

SEQ ID NO: 1823130 - DNA, 25 bp, Homo sapien
ggactgtttgttcatcaaagcctga

SEQ ID NO: 1823131 - DNA, 25 bp, Homo sapien
tgaatcttcggtatagtcaacaggc

SEQ ID NO: 1823132 - DNA, 25 bp, Homo sapien
catctttgaatcttcggtatagtca

SEQ ID NO: 1823133 - DNA, 25 bp, Homo sapien
tgcaacaaattttgaaagtctggac

SEQ ID NO: 1823134 - DNA, 25 bp, Homo sapien
tgagcaatgttcctatgctgcctgt

SEQ ID NO: 1823135 - DNA, 25 bp, Homo sapien
gatgattttaactcaaccttcccat

SEQ ID NO: 1823136 - DNA, 25 bp, Homo sapien
tgaaggtctctacctggaacagatg

SEQ ID NO: 1823137 - DNA, 25 bp, Homo sapien
tgactttgtacaccgatcccactgg

SEQ ID NO: 1823138 - DNA, 25 bp, Homo sapien
cactttcttgctctgaataatccga

SEQ ID NO: 1823139 - DNA, 25 bp, Homo sapien
tcatcagcatccgaggaatgaacag

SEQ ID NO: 1823140 - DNA, 25 bp, Homo sapien
gctctgaataatccgaaattgtaat

SEQ ID NO: 1823141 - DNA, 25 bp, Homo sapien
tgcttctttctcgatcatctccaaa

SEQ ID NO: 1823142 - DNA, 25 bp, Homo sapien
gacagtggtaactacttatggcagt

SEQ ID NO: 1823143 - DNA, 25 bp, Homo sapien
cagtattcatttctatgccatcgag

SEQ ID NO: 1823144 - DNA, 25 bp, Homo sapien
gttctggccacgggattcaagctgc

SEQ ID NO: 1823145 - DNA, 25 bp, Homo sapien
ccgcatttagtgactgacagtggta

SEQ ID NO: 1823146 - DNA, 25 bp, Homo sapien
atgtaaaaagcacagtggaacccac

SEQ ID NO: 1823147 - DNA, 25 bp, Homo sapien
caaatgtaaaaagcacagtggaacc

SEQ ID NO: 1823148 - DNA, 25 bp, Homo sapien
accccaaatgtaaaaagcacagtgg

SEQ ID NO: 1823149 - DNA, 25 bp, Homo sapien
tcaccccaaatgtaaaaagcacagt

SEQ ID NO: 1823150 - DNA, 25 bp, Homo sapien
gatccatggagtagctggcctagct

SEQ ID NO: 1823151 - DNA, 25 bp, Homo sapien
ttttgctcccaaaagccaggtgttc

SEQ ID NO: 1823152 - DNA, 25 bp, Homo sapien
gctgacacctgacaaagtgcttctg

SEQ ID NO: 1823153 - DNA, 25 bp, Homo sapien
tgcagcatcccatagcccttgagtt

SEQ ID NO: 1823154 - DNA, 25 bp, Homo sapien
acttcctgcatccagtgtagaattg

SEQ ID NO: 1823155 - DNA, 25 bp, Homo sapien
catccagtgtagaattggcagagtg

SEQ ID NO: 1823156 - DNA, 25 bp, Homo sapien
tcctgcatccagtgtagaattggca

SEQ ID NO: 1823157 - DNA, 25 bp, Homo sapien
gtttttggaactcttggtgtgtgga

SEQ ID NO: 1823158 - DNA, 25 bp, Homo sapien
ttccttcttggcaggagttgttgct

SEQ ID NO: 1823159 - DNA, 25 bp, Homo sapien
gctgttaaatttatgagtagtgaaa

SEQ ID NO: 1823160 - DNA, 25 bp, Homo sapien
tatgagtagtgaaagctgttggatt

SEQ ID NO: 1823161 - DNA, 25 bp, Homo sapien
ccttcttggcaggagttgttgcttg

SEQ ID NO: 1823162 - DNA, 25 bp, Homo sapien
gaggaggcttcttatgactagcacc

SEQ ID NO: 1823163 - DNA, 25 bp, Homo sapien
ggaactgaccaagaaaacgctcact

SEQ ID NO: 1823164 - DNA, 25 bp, Homo sapien
tagcacccctgtggtggcggaactg

SEQ ID NO: 1823165 - DNA, 25 bp, Homo sapien
gaagccttctggctggaaccatgga

SEQ ID NO: 1823166 - DNA, 25 bp, Homo sapien
cctggctcgtccctggagctttaaa

SEQ ID NO: 1823167 - DNA, 25 bp, Homo sapien
tccagtaaagggctggtacagaccg

SEQ ID NO: 1823168 - DNA, 25 bp, Homo sapien
agtggaacaagcacaggacggccca

SEQ ID NO: 1823169 - DNA, 25 bp, Homo sapien
ggtacagaccgcagtggaacaagca

SEQ ID NO: 1823170 - DNA, 25 bp, Homo sapien
ccacaacagcctgagaacgcaatct

SEQ ID NO: 1823171 - DNA, 25 bp, Homo sapien
gagaacgcaatctatacttcacaga

SEQ ID NO: 1823172 - DNA, 25 bp, Homo sapien
tatttgctttcggtcagtttggcag

SEQ ID NO: 1823173 - DNA, 25 bp, Homo sapien
tttcggtcagtttggcagctgcccc

SEQ ID NO: 1823174 - DNA, 25 bp, Homo sapien
gggtaggtccagattttgatcttta

SEQ ID NO: 1823175 - DNA, 25 bp, Homo sapien
cgggtaggtccagattttgatcttt

SEQ ID NO: 1823176 - DNA, 25 bp, Homo sapien
gtaggtccagattttgatctttaac

SEQ ID NO: 1823177 - DNA, 25 bp, Homo sapien
ggtaggtccagattttgatctttaa

SEQ ID NO: 1823178 - DNA, 25 bp, Homo sapien
tcagaactaaggtatgtaacagccc

SEQ ID NO: 1823179 - DNA, 25 bp, Homo sapien
tcccgtttgactaggatgatcctga

SEQ ID NO: 1823180 - DNA, 25 bp, Homo sapien
ttttgtgtacccacgggcaaggcca

SEQ ID NO: 1823181 - DNA, 25 bp, Homo sapien
cagggccttcgtgggctgtcctgta

SEQ ID NO: 1823182 - DNA, 25 bp, Homo sapien
ctctgttttgagctgttaagtccac

SEQ ID NO: 1823183 - DNA, 25 bp, Homo sapien
tgttttgagctgttaagtccaccac

SEQ ID NO: 1823184 - DNA, 25 bp, Homo sapien
ttttgagctgttaagtccaccacag

SEQ ID NO: 1823185 - DNA, 25 bp, Homo sapien
gagctgttaagtccaccacagccat

SEQ ID NO: 1823186 - DNA, 25 bp, Homo sapien
ctgtagctcggagccacaaactcat

SEQ ID NO: 1823187 - DNA, 25 bp, Homo sapien
ctttagactctatcttatcccacat

SEQ ID NO: 1823188 - DNA, 25 bp, Homo sapien
tttctgagcctttagactctatctt

SEQ ID NO: 1823189 - DNA, 25 bp, Homo sapien
gagcctttagactctatcttatccc

SEQ ID NO: 1823190 - DNA, 25 bp, Homo sapien
tctgagcctttagactctatcttat

SEQ ID NO: 1823191 - DNA, 25 bp, Homo sapien
ctgttttcactttcacgcacgattg

SEQ ID NO: 1823192 - DNA, 25 bp, Homo sapien
ctttcacgcacgattgagtctttgc

SEQ ID NO: 1823193 - DNA, 25 bp, Homo sapien
ttgagtctttgctgtcacacagttg

SEQ ID NO: 1823194 - DNA, 25 bp, Homo sapien
tgctgtcacacagttgccgaatgtt

SEQ ID NO: 1823195 - DNA, 25 bp, Homo sapien
aaatattctgaacctgtaaggccat

SEQ ID NO: 1823196 - DNA, 25 bp, Homo sapien
tattgccttgtaaacatgtttcttt

SEQ ID NO: 1823197 - DNA, 25 bp, Homo sapien
ctgccgagtttattgccttgtaaac

SEQ ID NO: 1823198 - DNA, 25 bp, Homo sapien
taaaatattctgaacctgtaaggcc

SEQ ID NO: 1823199 - DNA, 25 bp, Homo sapien
tttttgaatcagttcacttaggatc

SEQ ID NO: 1823200 - DNA, 25 bp, Homo sapien
ttatccagttaaccattgatggcta

SEQ ID NO: 1823201 - DNA, 25 bp, Homo sapien
tgatggctatttaggttggttctgt

SEQ ID NO: 1823202 - DNA, 25 bp, Homo sapien
tcttttatccagttaaccattgatg

SEQ ID NO: 1823203 - DNA, 25 bp, Homo sapien
tcctttccgtagacacccagtagtg

SEQ ID NO: 1823204 - DNA, 25 bp, Homo sapien
tccttggtctcccaatggcatcttt

SEQ ID NO: 1823205 - DNA, 25 bp, Homo sapien
cgtagacacccagtagtgggagtgc

SEQ ID NO: 1823206 - DNA, 25 bp, Homo sapien
tggtctcccaatggcatctttttaa

SEQ ID NO: 1823207 - DNA, 25 bp, Homo sapien
tgcttggctccattccccatgcaag

SEQ ID NO: 1823208 - DNA, 25 bp, Homo sapien
tggctttgcttggctccattcccca

SEQ ID NO: 1823209 - DNA, 25 bp, Homo sapien
gctttgcttggctccattccccatg

SEQ ID NO: 1823210 - DNA, 25 bp, Homo sapien
tttgcttggctccattccccatgca

SEQ ID NO: 1823211 - DNA, 25 bp, Homo sapien
tcagagcctggcgtggaccttccca

SEQ ID NO: 1823212 - DNA, 25 bp, Homo sapien
gcattgccctgatgctatgggccat

SEQ ID NO: 1823213 - DNA, 25 bp, Homo sapien
gagcctggcgtggaccttcccacat

SEQ ID NO: 1823214 - DNA, 25 bp, Homo sapien
ttcattgtctggcattgccctgatg

SEQ ID NO: 1823215 - DNA, 25 bp, Homo sapien
tcccagtcaccagacatgcagttgg

SEQ ID NO: 1823216 - DNA, 25 bp, Homo sapien
catctaacagatcataagtggttct

SEQ ID NO: 1823217 - DNA, 25 bp, Homo sapien
tgtgtcgactccttcctggtttgca

SEQ ID NO: 1823218 - DNA, 25 bp, Homo sapien
tctccagggatctagagccagtgtc

SEQ ID NO: 1823219 - DNA, 25 bp, Homo sapien
cagctccttgtgtgaacccacaggt

SEQ ID NO: 1823220 - DNA, 25 bp, Homo sapien
ccagctccttgtgtgaacccacagg

SEQ ID NO: 1823221 - DNA, 25 bp, Homo sapien
cccacaggtctccccgtcaaggctg

SEQ ID NO: 1823222 - DNA, 25 bp, Homo sapien
tctgattattcaaactgccactcat

SEQ ID NO: 1823223 - DNA, 25 bp, Homo sapien
atctgattattcaaactgccactca

SEQ ID NO: 1823224 - DNA, 25 bp, Homo sapien
caatggtgctcctatactgaaactc

SEQ ID NO: 1823225 - DNA, 25 bp, Homo sapien
tatttcctgcagttgtcaatggtgc

SEQ ID NO: 1823226 - DNA, 25 bp, Homo sapien
gcggcataatgactgggacaaagat

SEQ ID NO: 1823227 - DNA, 25 bp, Homo sapien
tcctaggaacttggccaaatcttcc

SEQ ID NO: 1823228 - DNA, 25 bp, Homo sapien
ccacttttatggaagtgtatttaga

SEQ ID NO: 1823229 - DNA, 25 bp, Homo sapien
cacagtgagtctggttcttttacca

SEQ ID NO: 1823230 - DNA, 25 bp, Homo sapien
tggtttcgctaggatctgccttctc

SEQ ID NO: 1823231 - DNA, 25 bp, Homo sapien
tctctaactccacttttatggaagt

SEQ ID NO: 1823232 - DNA, 25 bp, Homo sapien
tcaggaactttgggctacgttgcat

SEQ ID NO: 1823233 - DNA, 25 bp, Homo sapien
gaactttgggctacgttgcatgaca

SEQ ID NO: 1823234 - DNA, 25 bp, Homo sapien
gctacgttgcatgacattttgagtt

SEQ ID NO: 1823235 - DNA, 25 bp, Homo sapien
tgggctacgttgcatgacattttga

SEQ ID NO: 1823236 - DNA, 25 bp, Homo sapien
agcatcagcattgcttaaggcctgg

SEQ ID NO: 1823237 - DNA, 25 bp, Homo sapien
ggagccccacggcaatgagcatgtc

SEQ ID NO: 1823238 - DNA, 25 bp, Homo sapien
cagcattgcttaaggcctggagccc

SEQ ID NO: 1823239 - DNA, 25 bp, Homo sapien
agtctgccatccagttgtctccggg

SEQ ID NO: 1823240 - DNA, 25 bp, Homo sapien
tcaaacaaccgcttccagtcctgtt

SEQ ID NO: 1823241 - DNA, 25 bp, Homo sapien
taaaacgtaaatattcttagacgca

SEQ ID NO: 1823242 - DNA, 25 bp, Homo sapien
cttagacgcaacatttcccccaggg

SEQ ID NO: 1823243 - DNA, 25 bp, Homo sapien
gaagtgctctgtctataaccgaggc

SEQ ID NO: 1823244 - DNA, 25 bp, Homo sapien
tcgcaggcatatgggaaggactcct

SEQ ID NO: 1823245 - DNA, 25 bp, Homo sapien
taagaggacccatgtcctgtttttc

SEQ ID NO: 1823246 - DNA, 25 bp, Homo sapien
tgtcgcaggcatatgggaaggactc

SEQ ID NO: 1823247 - DNA, 25 bp, Homo sapien
ttttcaatattaacaccaaatactg

SEQ ID NO: 1823248 - DNA, 25 bp, Homo sapien
gtagttgtagtcctgatgttccacc

SEQ ID NO: 1823249 - DNA, 25 bp, Homo sapien
ccttctgttcgttagtgtgggagca

SEQ ID NO: 1823250 - DNA, 25 bp, Homo sapien
tcaccaaactagagaagacactagc

SEQ ID NO: 1823251 - DNA, 25 bp, Homo sapien
gagataacttctttcctcaggacac

SEQ ID NO: 1823252 - DNA, 25 bp, Homo sapien
ttcttctgctcagacgttttgtctg

SEQ ID NO: 1823253 - DNA, 25 bp, Homo sapien
gaatgtcctcagagttctgtccatt

SEQ ID NO: 1823254 - DNA, 25 bp, Homo sapien
gctcagacgttttgtctgaaagtat

SEQ ID NO: 1823255 - DNA, 25 bp, Homo sapien
atgctctcgtcttcctgcagaggtt

SEQ ID NO: 1823256 - DNA, 25 bp, Homo sapien
gcagatggggccctaaaaccagttc

SEQ ID NO: 1823257 - DNA, 25 bp, Homo sapien
aaccagttcccggattgtcacattt

SEQ ID NO: 1823258 - DNA, 25 bp, Homo sapien
ttcaccctttgatgacaaaaaagcc

SEQ ID NO: 1823259 - DNA, 25 bp, Homo sapien
tgacaaaaaagcctgttgtcagttt

SEQ ID NO: 1823260 - DNA, 25 bp, Homo sapien
tcctctgatgtactttttactcatt

SEQ ID NO: 1823261 - DNA, 25 bp, Homo sapien
catgagactctaggttagtatagaa

SEQ ID NO: 1823262 - DNA, 25 bp, Homo sapien
tctgatgtactttttactcattcct

SEQ ID NO: 1823263 - DNA, 25 bp, Homo sapien
ttcttggcatgagactctaggttag

SEQ ID NO: 1823264 - DNA, 25 bp, Homo sapien
ggtgaagatattccaggaccatctc

SEQ ID NO: 1823265 - DNA, 25 bp, Homo sapien
gagatgctccgagttttcaagccat

SEQ ID NO: 1823266 - DNA, 25 bp, Homo sapien
taagagacagtgaaggcctttcaga

SEQ ID NO: 1823267 - DNA, 25 bp, Homo sapien
tgcagtgaatacaaaggcagtcatt

SEQ ID NO: 1823268 - DNA, 25 bp, Homo sapien
catagaaagatgttgcccctctgca

SEQ ID NO: 1823269 - DNA, 25 bp, Homo sapien
cacaaatcatagaaagatgttgccc

SEQ ID NO: 1823270 - DNA, 25 bp, Homo sapien
agatgttgcccctctgcataaaaga

SEQ ID NO: 1823271 - DNA, 25 bp, Homo sapien
gctgtccttcccacaaatcatagaa

SEQ ID NO: 1823272 - DNA, 25 bp, Homo sapien
caggcggtggcatagtccctctcat

SEQ ID NO: 1823273 - DNA, 25 bp, Homo sapien
gccaggcggtggcatagtccctctc

SEQ ID NO: 1823274 - DNA, 25 bp, Homo sapien
ccaggcggtggcatagtccctctca

SEQ ID NO: 1823275 - DNA, 25 bp, Homo sapien
aatttcacctggaatggtatgcggg

SEQ ID NO: 1823276 - DNA, 25 bp, Homo sapien
agaccagctgtgtattagaaatatc

SEQ ID NO: 1823277 - DNA, 25 bp, Homo sapien
tatgcgggtgtatgaaaaattacac

SEQ ID NO: 1823278 - DNA, 25 bp, Homo sapien
agagaccagctgtgtattagaaata

SEQ ID NO: 1823279 - DNA, 25 bp, Homo sapien
tcaaatactgccattttcaacagag

SEQ ID NO: 1823280 - DNA, 25 bp, Homo sapien
tttcaacagagtgctctaaacactt

SEQ ID NO: 1823281 - DNA, 25 bp, Homo sapien
tgccattttcaacagagtgctctaa

SEQ ID NO: 1823282 - DNA, 25 bp, Homo sapien
gtgatgtttatccaaggatcatatt

SEQ ID NO: 1823283 - DNA, 25 bp, Homo sapien
tgttattctcttgtatctattattg

SEQ ID NO: 1823284 - DNA, 25 bp, Homo sapien
ttctcttgtatctattattggcatt

SEQ ID NO: 1823285 - DNA, 25 bp, Homo sapien
tattctcttgtatctattattggca

SEQ ID NO: 1823286 - DNA, 25 bp, Homo sapien
ctcttgtatctattattggcatttt

SEQ ID NO: 1823287 - DNA, 25 bp, Homo sapien
aggatgatgctattcaacagttaag

SEQ ID NO: 1823288 - DNA, 25 bp, Homo sapien
gatgatgctattcaacagttaagtc

SEQ ID NO: 1823289 - DNA, 25 bp, Homo sapien
gaggatgatgctattcaacagttaa

SEQ ID NO: 1823290 - DNA, 25 bp, Homo sapien
ggatgatgctattcaacagttaagt

SEQ ID NO: 1823291 - DNA, 25 bp, Homo sapien
tcttcagttctgtcatagacacctt

SEQ ID NO: 1823292 - DNA, 25 bp, Homo sapien
tcttcttattactttcaagcacaac

SEQ ID NO: 1823293 - DNA, 25 bp, Homo sapien
catcgaggtaacatctggtattttg

SEQ ID NO: 1823294 - DNA, 25 bp, Homo sapien
tatagaacaacatcgaggtaacatc

SEQ ID NO: 1823295 - DNA, 25 bp, Homo sapien
tagaaatgcagcattcacactgtaa

SEQ ID NO: 1823296 - DNA, 25 bp, Homo sapien
cttcacaaatgacttctctttagaa

SEQ ID NO: 1823297 - DNA, 25 bp, Homo sapien
ctctttagaaatgcagcattcacac

SEQ ID NO: 1823298 - DNA, 25 bp, Homo sapien
tgcagcattcacactgtaaagtcat

SEQ ID NO: 1823299 - DNA, 25 bp, Homo sapien
gcatgattcccctgctacagcatca

SEQ ID NO: 1823300 - DNA, 25 bp, Homo sapien
ccaaaaagctgattgtcatagtcat

SEQ ID NO: 1823301 - DNA, 25 bp, Homo sapien
tcacttcccttgtgcatgcatgagt

SEQ ID NO: 1823302 - DNA, 25 bp, Homo sapien
tgctcaggattgctccatgggccat

SEQ ID NO: 1823303 - DNA, 25 bp, Homo sapien
caaaagcagcggtgttatctgctgc

SEQ ID NO: 1823304 - DNA, 25 bp, Homo sapien
gaaaatagacttgtgtgaaagtact

SEQ ID NO: 1823305 - DNA, 25 bp, Homo sapien
cactgagaacatgatgtcatgacac

SEQ ID NO: 1823306 - DNA, 25 bp, Homo sapien
ggactacgaatgttcatcaatacaa

SEQ ID NO: 1823307 - DNA, 25 bp, Homo sapien
tcagttgtaaacctgaatgtgctct

SEQ ID NO: 1823308 - DNA, 25 bp, Homo sapien
taaggtggctacacccatggtcttt

SEQ ID NO: 1823309 - DNA, 25 bp, Homo sapien
gcttgtactggtttgggtccaactc

SEQ ID NO: 1823310 - DNA, 25 bp, Homo sapien
gaagctattccacaaatggcttgta

SEQ ID NO: 1823311 - DNA, 25 bp, Homo sapien
agccccattccacgtagtctgcagt

SEQ ID NO: 1823312 - DNA, 25 bp, Homo sapien
aaagacttcagatcataagtgcgaa

SEQ ID NO: 1823313 - DNA, 25 bp, Homo sapien
cagttcctcactgaccactgattga

SEQ ID NO: 1823314 - DNA, 25 bp, Homo sapien
aacgtgcaaactctcagacagaaga

SEQ ID NO: 1823315 - DNA, 25 bp, Homo sapien
tatgtctttctgtccataaaataaa

SEQ ID NO: 1823316 - DNA, 25 bp, Homo sapien
ctatgtctttctgtccataaaataa

SEQ ID NO: 1823317 - DNA, 25 bp, Homo sapien
tttccattccaaaattataccgctc

SEQ ID NO: 1823318 - DNA, 25 bp, Homo sapien
aattataccgctcaatgccagcaat

SEQ ID NO: 1823319 - DNA, 25 bp, Homo sapien
gcagtgtcatattacttatagatgt

SEQ ID NO: 1823320 - DNA, 25 bp, Homo sapien
taaaatcctgtagcagtgtcatatt

SEQ ID NO: 1823321 - DNA, 25 bp, Homo sapien
tgctcaggattgctccatgggccat

SEQ ID NO: 1823322 - DNA, 25 bp, Homo sapien
ccaaaaagctgattgtcatagtcat

SEQ ID NO: 1823323 - DNA, 25 bp, Homo sapien
tcacttcccttgtgcatgcatgagt

SEQ ID NO: 1823324 - DNA, 25 bp, Homo sapien
gcatgattcccctgctacagcatca

SEQ ID NO: 1823325 - DNA, 25 bp, Homo sapien
caaaagcagcggtgttatctgctgc

SEQ ID NO: 1823326 - DNA, 25 bp, Homo sapien
gaaaatagacttgtgtgaaagtact

SEQ ID NO: 1823327 - DNA, 25 bp, Homo sapien
ggactacgaatgttcatcaatacaa

SEQ ID NO: 1823328 - DNA, 25 bp, Homo sapien
cactgagaacatgatgtcatgacac

SEQ ID NO: 1823329 - DNA, 25 bp, Homo sapien
tcagttgtaaacctgaatgtgctct

SEQ ID NO: 1823330 - DNA, 25 bp, Homo sapien
gcttgtactggtttgggtccaactc

SEQ ID NO: 1823331 - DNA, 25 bp, Homo sapien
taaggtggctacacccatggtcttt

SEQ ID NO: 1823332 - DNA, 25 bp, Homo sapien
gaagctattccacaaatggcttgta

SEQ ID NO: 1823333 - DNA, 25 bp, Homo sapien
aacgtgcaaactctcagacagaaga

SEQ ID NO: 1823334 - DNA, 25 bp, Homo sapien
agccccattccacgtagtctgcagt

SEQ ID NO: 1823335 - DNA, 25 bp, Homo sapien
aaagacttcagatcataagtgcgaa

SEQ ID NO: 1823336 - DNA, 25 bp, Homo sapien
cagttcctcactgaccactgattga

SEQ ID NO: 1823337 - DNA, 25 bp, Homo sapien
tgggaccatctgatgcgagtctggc

SEQ ID NO: 1823338 - DNA, 25 bp, Homo sapien
tcagcgaggaacactccaatctggg

SEQ ID NO: 1823339 - DNA, 25 bp, Homo sapien
tcctgagccaaagcatgggaccatc

SEQ ID NO: 1823340 - DNA, 25 bp, Homo sapien
gccctggcatctgtcagcgaggaac

SEQ ID NO: 1823341 - DNA, 25 bp, Homo sapien
cccatttgcgtggagaggttccaca

SEQ ID NO: 1823342 - DNA, 25 bp, Homo sapien
cgcggtcagtgatatgatctaaatg

SEQ ID NO: 1823343 - DNA, 25 bp, Homo sapien
gaatgaacccatttgcgtggagagg

SEQ ID NO: 1823344 - DNA, 25 bp, Homo sapien
ccgtgtcggccacgcggtcagtgat

SEQ ID NO: 1823345 - DNA, 25 bp, Homo sapien
taacactgacatccagctgtccctg

SEQ ID NO: 1823346 - DNA, 25 bp, Homo sapien
aataggctcggtaatgcctcttatc

SEQ ID NO: 1823347 - DNA, 25 bp, Homo sapien
cagttgctgcctgatacctcataga

SEQ ID NO: 1823348 - DNA, 25 bp, Homo sapien
gaaggtttgatttgctgacaatagg

SEQ ID NO: 1823349 - DNA, 25 bp, Homo sapien
tgaagggcattcttagagcctcagt

SEQ ID NO: 1823350 - DNA, 25 bp, Homo sapien
gaagggcattcttagagcctcagtg

SEQ ID NO: 1823351 - DNA, 25 bp, Homo sapien
agggcattcttagagcctcagtgtg

SEQ ID NO: 1823352 - DNA, 25 bp, Homo sapien
aagggcattcttagagcctcagtgt

SEQ ID NO: 1823353 - DNA, 25 bp, Homo sapien
tggtgtgcaaggaggcacaattccc

SEQ ID NO: 1823354 - DNA, 25 bp, Homo sapien
gattagcactccgattgtaagatcc

SEQ ID NO: 1823355 - DNA, 25 bp, Homo sapien
tatgatactatacccttctatacga

SEQ ID NO: 1823356 - DNA, 25 bp, Homo sapien
tacccttctatacgatgaatgatga

SEQ ID NO: 1823357 - DNA, 25 bp, Homo sapien
aatagagagccaggtattcatctga

SEQ ID NO: 1823358 - DNA, 25 bp, Homo sapien
ctgaaaactgaagtcggttgacgta

SEQ ID NO: 1823359 - DNA, 25 bp, Homo sapien
gacgtagaagttctttttatgagaa

SEQ ID NO: 1823360 - DNA, 25 bp, Homo sapien
caaagtagtcggaacacaagaagga

SEQ ID NO: 1823361 - DNA, 25 bp, Homo sapien
gaggcatctaagtagtcacaggcca

SEQ ID NO: 1823362 - DNA, 25 bp, Homo sapien
acagagcaggaggatagctgtctca

SEQ ID NO: 1823363 - DNA, 25 bp, Homo sapien
aggaggatagctgtctcagtttctc

SEQ ID NO: 1823364 - DNA, 25 bp, Homo sapien
attaaatcctcccaatcaccagaat

SEQ ID NO: 1823365 - DNA, 25 bp, Homo sapien
taaatcctcccaatcaccagaattc

SEQ ID NO: 1823366 - DNA, 25 bp, Homo sapien
aaatgggtaactagaacttgtgtgc

SEQ ID NO: 1823367 - DNA, 25 bp, Homo sapien
agcttccatttgatgctgagtgcag

SEQ ID NO: 1823368 - DNA, 25 bp, Homo sapien
cttcagaaatgggtaactagaactt

SEQ ID NO: 1823369 - DNA, 25 bp, Homo sapien
tctgaggcttatagacatcccagat

SEQ ID NO: 1823370 - DNA, 25 bp, Homo sapien
tgactacaagggaactggttggtgt

SEQ ID NO: 1823371 - DNA, 25 bp, Homo sapien
gtccatgtggtcagtaggtgttggg

SEQ ID NO: 1823372 - DNA, 25 bp, Homo sapien
ccagaaacctctcagtaaaagggat

SEQ ID NO: 1823373 - DNA, 25 bp, Homo sapien
cctctcagtaaaagggatgactaca

SEQ ID NO: 1823374 - DNA, 25 bp, Homo sapien
agcacccggccttgccattcgctgc

SEQ ID NO: 1823375 - DNA, 25 bp, Homo sapien
cacccggccttgccattcgctgcat

SEQ ID NO: 1823376 - DNA, 25 bp, Homo sapien
gcacccggccttgccattcgctgca

SEQ ID NO: 1823377 - DNA, 25 bp, Homo sapien
gccctctgaacaaatacacggtgta

SEQ ID NO: 1823378 - DNA, 25 bp, Homo sapien
ccactatgggatcttcattgagcag

SEQ ID NO: 1823379 - DNA, 25 bp, Homo sapien
tagacaacgcaacgtagagatggag

SEQ ID NO: 1823380 - DNA, 25 bp, Homo sapien
gagctgccaacctaagcaagatgga

SEQ ID NO: 1823381 - DNA, 25 bp, Homo sapien
tgggtgaggcgtgccctgtggaagc

SEQ ID NO: 1823382 - DNA, 25 bp, Homo sapien
gatatcttcacccattactctgaga

SEQ ID NO: 1823383 - DNA, 25 bp, Homo sapien
ggcttgttaagcagccgggcctgat

SEQ ID NO: 1823384 - DNA, 25 bp, Homo sapien
gaggcatattcttaagctggctgta

SEQ ID NO: 1823385 - DNA, 25 bp, Homo sapien
ctcctccttttccaatcagcctgcc

SEQ ID NO: 1823386 - DNA, 25 bp, Homo sapien
atcagcctgcctggtgacatccgag

SEQ ID NO: 1823387 - DNA, 25 bp, Homo sapien
cttttccaatcagcctgcctggtga

SEQ ID NO: 1823388 - DNA, 25 bp, Homo sapien
tcaccttcgcccctcttcggctcct

SEQ ID NO: 1823389 - DNA, 25 bp, Homo sapien
agggatgaatagtcagcaaggagtt

SEQ ID NO: 1823390 - DNA, 25 bp, Homo sapien
gggccttgcggttcctctgccggct

SEQ ID NO: 1823391 - DNA, 25 bp, Homo sapien
taatgagctcaaggtgagccgcggc

SEQ ID NO: 1823392 - DNA, 25 bp, Homo sapien
ctggaaagtcgcctgcgtgcgctaa

SEQ ID NO: 1823393 - DNA, 25 bp, Homo sapien
ctggggctccatttgccgcgcggct

SEQ ID NO: 1823394 - DNA, 25 bp, Homo sapien
ccttgccaggaagcacgagtgccac

SEQ ID NO: 1823395 - DNA, 25 bp, Homo sapien
ttgccaggaagcacgagtgccaccg

SEQ ID NO: 1823396 - DNA, 25 bp, Homo sapien
caacagcggagaaagacgccggcat

SEQ ID NO: 1823397 - DNA, 25 bp, Homo sapien
tctttgtagtcaggcgaccaacagc

SEQ ID NO: 1823398 - DNA, 25 bp, Homo sapien
ttaatgaagcttgccctgagcaatt

SEQ ID NO: 1823399 - DNA, 25 bp, Homo sapien
gccctgagcaattgttctatgtgtt

SEQ ID NO: 1823400 - DNA, 25 bp, Homo sapien
tgatttcttaatgaagcttgccctg

SEQ ID NO: 1823401 - DNA, 25 bp, Homo sapien
tttcttaatgaagcttgccctgagc

SEQ ID NO: 1823402 - DNA, 25 bp, Homo sapien
ttaaaccatcctattagcaccaaag

SEQ ID NO: 1823403 - DNA, 25 bp, Homo sapien
caatatctaaggcagttcctcgaca

SEQ ID NO: 1823404 - DNA, 25 bp, Homo sapien
accatcctattagcaccaaagcagt

SEQ ID NO: 1823405 - DNA, 25 bp, Homo sapien
taaggcagttcctcgacaatcattt

SEQ ID NO: 1823406 - DNA, 25 bp, Homo sapien
gatggcgtccctaaatagcccattt

SEQ ID NO: 1823407 - DNA, 25 bp, Homo sapien
ctctccatttggtacaccagatgtt

SEQ ID NO: 1823408 - DNA, 25 bp, Homo sapien
catttggtacaccagatgtttgggt

SEQ ID NO: 1823409 - DNA, 25 bp, Homo sapien
ctgttaaaagatggcgtccctaaat

SEQ ID NO: 1823410 - DNA, 25 bp, Homo sapien
agtgaaaccaccacgatgaccaatg

SEQ ID NO: 1823411 - DNA, 25 bp, Homo sapien
caccacgatgaccaatgtttgactc

SEQ ID NO: 1823412 - DNA, 25 bp, Homo sapien
caaatgctacccatagaaaaacagc

SEQ ID NO: 1823413 - DNA, 25 bp, Homo sapien
aaatgctacccatagaaaaacagcc

SEQ ID NO: 1823414 - DNA, 25 bp, Homo sapien
tatccaatccccagtagtcatcagt

SEQ ID NO: 1823415 - DNA, 25 bp, Homo sapien
aatccccagtagtcatcagttttgc

SEQ ID NO: 1823416 - DNA, 25 bp, Homo sapien
ggatgcttatccaatccccagtagt

SEQ ID NO: 1823417 - DNA, 25 bp, Homo sapien
tccccagtagtcatcagttttgcaa

SEQ ID NO: 1823418 - DNA, 25 bp, Homo sapien
ggttgctgtcatttggaattctagg

SEQ ID NO: 1823419 - DNA, 25 bp, Homo sapien
agacctagtggtggctcagcaataa

SEQ ID NO: 1823420 - DNA, 25 bp, Homo sapien
aaacctttgtctccatgtaactgca

SEQ ID NO: 1823421 - DNA, 25 bp, Homo sapien
gctctgacctcctccgttcatttaa

SEQ ID NO: 1823422 - DNA, 25 bp, Homo sapien
acaccacctcgacaaggaagtcctt

SEQ ID NO: 1823423 - DNA, 25 bp, Homo sapien
aggatgaggcaaaccaggcacacca

SEQ ID NO: 1823424 - DNA, 25 bp, Homo sapien
tcgacaaggaagtccttcggcactc

SEQ ID NO: 1823425 - DNA, 25 bp, Homo sapien
ggccaaaaccccaatcaacaggatg

SEQ ID NO: 1823426 - DNA, 25 bp, Homo sapien
gtttcctgtcagctttagtaccatt

SEQ ID NO: 1823427 - DNA, 25 bp, Homo sapien
tagagcatccctgataaatgtacag

SEQ ID NO: 1823428 - DNA, 25 bp, Homo sapien
taatcagctgtaactggagtgaagc

SEQ ID NO: 1823429 - DNA, 25 bp, Homo sapien
gtaccatttagagcatccctgataa

SEQ ID NO: 1823430 - DNA, 25 bp, Homo sapien
tagtcacaactatccacctgagaat

SEQ ID NO: 1823431 - DNA, 25 bp, Homo sapien
cacttatagccacaatagtcacaac

SEQ ID NO: 1823432 - DNA, 25 bp, Homo sapien
ggccaagtgagcatcattgccacag

SEQ ID NO: 1823433 - DNA, 25 bp, Homo sapien
tagatggcatcaccacttatagcca

SEQ ID NO: 1823434 - DNA, 25 bp, Homo sapien
ttgactacaaaggggccagctcttc

SEQ ID NO: 1823435 - DNA, 25 bp, Homo sapien
cagttgactacaaaggggccagctc

SEQ ID NO: 1823436 - DNA, 25 bp, Homo sapien
gttgactacaaaggggccagctctt

SEQ ID NO: 1823437 - DNA, 25 bp, Homo sapien
agttgactacaaaggggccagctct

SEQ ID NO: 1823438 - DNA, 25 bp, Homo sapien
tcttgtggctaatgggaggacacca

SEQ ID NO: 1823439 - DNA, 25 bp, Homo sapien
gtaatctggttaatcttgtggctaa

SEQ ID NO: 1823440 - DNA, 25 bp, Homo sapien
tagcagcttcccgtgtaatctggtt

SEQ ID NO: 1823441 - DNA, 25 bp, Homo sapien
gtgctccacaatgagggctcattca

SEQ ID NO: 1823442 - DNA, 25 bp, Homo sapien
ccaaaaagctgaaatccacattgta

SEQ ID NO: 1823443 - DNA, 25 bp, Homo sapien
aaaagctgaaatccacattgtatac

SEQ ID NO: 1823444 - DNA, 25 bp, Homo sapien
tcagtgtccaaaaagctgaaatcca

SEQ ID NO: 1823445 - DNA, 25 bp, Homo sapien
agtgtccaaaaagctgaaatccaca

SEQ ID NO: 1823446 - DNA, 25 bp, Homo sapien
tgcagctcctcaattaattgttctt

SEQ ID NO: 1823447 - DNA, 25 bp, Homo sapien
gcagctcctcaattaattgttcttc

SEQ ID NO: 1823448 - DNA, 25 bp, Homo sapien
ttcttcctggatatggtcctccctc

SEQ ID NO: 1823449 - DNA, 25 bp, Homo sapien
ttgttcttcctggatatggtcctcc

SEQ ID NO: 1823450 - DNA, 25 bp, Homo sapien
cagacaccatataattgctgagaaa

SEQ ID NO: 1823451 - DNA, 25 bp, Homo sapien
gttgctcagacaccatataattgct

SEQ ID NO: 1823452 - DNA, 25 bp, Homo sapien
atggtctgttgctcagacaccatat

SEQ ID NO: 1823453 - DNA, 25 bp, Homo sapien
caggatgtgacgatggtctgttgct

SEQ ID NO: 1823454 - DNA, 25 bp, Homo sapien
cactgggtcccagaagtgtcaccac

SEQ ID NO: 1823455 - DNA, 25 bp, Homo sapien
ttgccacataatgagttgcagtccc

SEQ ID NO: 1823456 - DNA, 25 bp, Homo sapien
catgtaaagggagtgatcgtgcagt

SEQ ID NO: 1823457 - DNA, 25 bp, Homo sapien
gtgtcaccactaacaaattcgccag

SEQ ID NO: 1823458 - DNA, 25 bp, Homo sapien
cagagatgtgaaaaaatccccttgc

SEQ ID NO: 1823459 - DNA, 25 bp, Homo sapien
tgaaaaaatccccttgcctatagaa

SEQ ID NO: 1823460 - DNA, 25 bp, Homo sapien
cccttgcctatagaaccgccatggg

SEQ ID NO: 1823461 - DNA, 25 bp, Homo sapien
ttgcctatagaaccgccatgggaag

SEQ ID NO: 1823462 - DNA, 25 bp, Homo sapien
ttcctcttgttctgcgtaaaggaac

SEQ ID NO: 1823463 - DNA, 25 bp, Homo sapien
cccagaggatcaaaagcaaacacat

SEQ ID NO: 1823464 - DNA, 25 bp, Homo sapien
ggcagtagaataattcccagaggat

SEQ ID NO: 1823465 - DNA, 25 bp, Homo sapien
aggcaccttttgcttcagtaggcag

SEQ ID NO: 1823466 - DNA, 25 bp, Homo sapien
cgaatgtgtattcactgccaggcat

SEQ ID NO: 1823467 - DNA, 25 bp, Homo sapien
tagcactagcttggacttttttggc

SEQ ID NO: 1823468 - DNA, 25 bp, Homo sapien
gatagcactagcttggacttttttg

SEQ ID NO: 1823469 - DNA, 25 bp, Homo sapien
tgatagcactagcttggactttttt

SEQ ID NO: 1823470 - DNA, 25 bp, Homo sapien
gcactagcttggacttttttggcat

SEQ ID NO: 1823471 - DNA, 25 bp, Homo sapien
aggcagaatgaatacttggctccat

SEQ ID NO: 1823472 - DNA, 25 bp, Homo sapien
tcatccatcaattctactatagaat

SEQ ID NO: 1823473 - DNA, 25 bp, Homo sapien
catcaattctactatagaatttgtc

SEQ ID NO: 1823474 - DNA, 25 bp, Homo sapien
agatcatccatcaattctactatag

SEQ ID NO: 1823475 - DNA, 25 bp, Homo sapien
tccatcaattctactatagaatttg

SEQ ID NO: 1823476 - DNA, 25 bp, Homo sapien
tcctggatggttcagagaagcctga

SEQ ID NO: 1823477 - DNA, 25 bp, Homo sapien
tggatggttcagagaagcctgacac

SEQ ID NO: 1823478 - DNA, 25 bp, Homo sapien
ttcctggatggttcagagaagcctg

SEQ ID NO: 1823479 - DNA, 25 bp, Homo sapien
cctggatggttcagagaagcctgac

SEQ ID NO: 1823480 - DNA, 25 bp, Homo sapien
gctgtagtaacgactccattgccca

SEQ ID NO: 1823481 - DNA, 25 bp, Homo sapien
tgacgctgagatctttggcatggct

SEQ ID NO: 1823482 - DNA, 25 bp, Homo sapien
gcatggctttccgtccagagtgacg

SEQ ID NO: 1823483 - DNA, 25 bp, Homo sapien
tggctgtgccgctgttgtcttctgc

SEQ ID NO: 1823484 - DNA, 25 bp, Homo sapien
gaagaattattaagttcctgactgt

SEQ ID NO: 1823485 - DNA, 25 bp, Homo sapien
tgttagtcgagtacctacagtctgt

SEQ ID NO: 1823486 - DNA, 25 bp, Homo sapien
aatctaagagaattagacttaacca

SEQ ID NO: 1823487 - DNA, 25 bp, Homo sapien
tgtagtcgttaatggttctggtgct

SEQ ID NO: 1823488 - DNA, 25 bp, Homo sapien
ttccttactaaagtcataccatgga

SEQ ID NO: 1823489 - DNA, 25 bp, Homo sapien
catggaaaattatgacccaaatccc

SEQ ID NO: 1823490 - DNA, 25 bp, Homo sapien
cagtgatttagaccaccataggtac

SEQ ID NO: 1823491 - DNA, 25 bp, Homo sapien
cattaatccgacagaggtttgcaac

SEQ ID NO: 1823492 - DNA, 25 bp, Homo sapien
caccaactgagtggcataagcagca

SEQ ID NO: 1823493 - DNA, 25 bp, Homo sapien
cagtcagtcacttgtgagagaagca

SEQ ID NO: 1823494 - DNA, 25 bp, Homo sapien
gaagagggcctaaatggagccaaga

SEQ ID NO: 1823495 - DNA, 25 bp, Homo sapien
accttggaagagggcctaaatggag

SEQ ID NO: 1823496 - DNA, 25 bp, Homo sapien
gaaggtgagaggctttgctccctgc

SEQ ID NO: 1823497 - DNA, 25 bp, Homo sapien
ggtgagaggctttgctccctgcaag

SEQ ID NO: 1823498 - DNA, 25 bp, Homo sapien
gagcttcaatgcgaagactccagaa

SEQ ID NO: 1823499 - DNA, 25 bp, Homo sapien
tattgatgggagttagtaaactgag

SEQ ID NO: 1823500 - DNA, 25 bp, Homo sapien
taaactgaggagcttcaatgcgaag

SEQ ID NO: 1823501 - DNA, 25 bp, Homo sapien
gactccagaaacgttctgtgtcaaa

SEQ ID NO: 1823502 - DNA, 25 bp, Homo sapien
gtagtgtgaggcacacagaagacat

SEQ ID NO: 1823503 - DNA, 25 bp, Homo sapien
ctgtagtgtgaggcacacagaagac

SEQ ID NO: 1823504 - DNA, 25 bp, Homo sapien
tgtagtgtgaggcacacagaagaca

SEQ ID NO: 1823505 - DNA, 25 bp, Homo sapien
tgtcataaacccatagagggcagcc

SEQ ID NO: 1823506 - DNA, 25 bp, Homo sapien
tttattgtcataaacccatagaggg

SEQ ID NO: 1823507 - DNA, 25 bp, Homo sapien
acagaattaatggtctggggagaac

SEQ ID NO: 1823508 - DNA, 25 bp, Homo sapien
cataaacccatagagggcagccctg

SEQ ID NO: 1823509 - DNA, 25 bp, Homo sapien
cgtgtaagtgcttggttctccagtg

SEQ ID NO: 1823510 - DNA, 25 bp, Homo sapien
ttctagctgctgatataagaatttc

SEQ ID NO: 1823511 - DNA, 25 bp, Homo sapien
aaaaggcgtgtaagtgcttggttct

SEQ ID NO: 1823512 - DNA, 25 bp, Homo sapien
gctgatataagaatttctcctcagg

SEQ ID NO: 1823513 - DNA, 25 bp, Homo sapien
attacttcggtccagtgttcctctt

SEQ ID NO: 1823514 - DNA, 25 bp, Homo sapien
tccattacttcggtccagtgttcct

SEQ ID NO: 1823515 - DNA, 25 bp, Homo sapien
ttatccattacttcggtccagtgtt

SEQ ID NO: 1823516 - DNA, 25 bp, Homo sapien
cattacttcggtccagtgttcctct

SEQ ID NO: 1823517 - DNA, 25 bp, Homo sapien
ttcactgtggacaagctttaagcca

SEQ ID NO: 1823518 - DNA, 25 bp, Homo sapien
aaacgagcctcccaggatgctgtcc

SEQ ID NO: 1823519 - DNA, 25 bp, Homo sapien
gctgtgatcacttcactgtggacaa

SEQ ID NO: 1823520 - DNA, 25 bp, Homo sapien
tccgttttgcttatatgctcctgaa

SEQ ID NO: 1823521 - DNA, 25 bp, Homo sapien
tcttttttgggggttgcagaagcca

SEQ ID NO: 1823522 - DNA, 25 bp, Homo sapien
cttttttgggggttgcagaagccat

SEQ ID NO: 1823523 - DNA, 25 bp, Homo sapien
cagaaaatggcggtacagctcttgc

SEQ ID NO: 1823524 - DNA, 25 bp, Homo sapien
cattttgatgttggaggtcacagct

SEQ ID NO: 1823525 - DNA, 25 bp, Homo sapien
tatctcctggaccaagtgcagacac

SEQ ID NO: 1823526 - DNA, 25 bp, Homo sapien
cactgggataaatggtatatacaga

SEQ ID NO: 1823527 - DNA, 25 bp, Homo sapien
gaaaagtggataatgagaccctgca

SEQ ID NO: 1823528 - DNA, 25 bp, Homo sapien
ggtactgcgaagaccctggatgctg

SEQ ID NO: 1823529 - DNA, 25 bp, Homo sapien
gggcaaccagcatgagacaccaatg

SEQ ID NO: 1823530 - DNA, 25 bp, Homo sapien
tagaatcagcagagttaaggacgct

SEQ ID NO: 1823531 - DNA, 25 bp, Homo sapien
atattctttgcctatctctaatgtc

SEQ ID NO: 1823532 - DNA, 25 bp, Homo sapien
tattctttgcctatctctaatgtca

SEQ ID NO: 1823533 - DNA, 25 bp, Homo sapien
attctttgcctatctctaatgtcat

SEQ ID NO: 1823534 - DNA, 25 bp, Homo sapien
agaaagcagaggagctttccttgtc

SEQ ID NO: 1823535 - DNA, 25 bp, Homo sapien
acgctggtgcaatgggttgatatac

SEQ ID NO: 1823536 - DNA, 25 bp, Homo sapien
gatatactggtagcttggcctcaca

SEQ ID NO: 1823537 - DNA, 25 bp, Homo sapien
gcatgctaagttggccctagtttca

SEQ ID NO: 1823538 - DNA, 25 bp, Homo sapien
gaaattgcatctttgatgacgctgg

SEQ ID NO: 1823539 - DNA, 25 bp, Homo sapien
aggcaaaaaggttctcattcaggag

SEQ ID NO: 1823540 - DNA, 25 bp, Homo sapien
ccatgcaagtaaaggcaaaaaggtt

SEQ ID NO: 1823541 - DNA, 25 bp, Homo sapien
ttctcattcaggaggttttcatcca

SEQ ID NO: 1823542 - DNA, 25 bp, Homo sapien
taacaaccatgcaagtaaaggcaaa

SEQ ID NO: 1823543 - DNA, 25 bp, Homo sapien
ctttcttctttcaccattgattcct

SEQ ID NO: 1823544 - DNA, 25 bp, Homo sapien
tttcttctttcaccattgattcctc

SEQ ID NO: 1823545 - DNA, 25 bp, Homo sapien
ttctttcaccattgattcctctcca

SEQ ID NO: 1823546 - DNA, 25 bp, Homo sapien
tcttctttcaccattgattcctctc

SEQ ID NO: 1823547 - DNA, 25 bp, Homo sapien
gcgctgaaaagcatctaatatccaa

SEQ ID NO: 1823548 - DNA, 25 bp, Homo sapien
gctcctgattggaaatctccaagtc

SEQ ID NO: 1823549 - DNA, 25 bp, Homo sapien
taatatccaagagtcattgtgcaac

SEQ ID NO: 1823550 - DNA, 25 bp, Homo sapien
catacggtatgaagaacttggtttc

SEQ ID NO: 1823551 - DNA, 25 bp, Homo sapien
tgatcaccacgccaagaatgcctgg

SEQ ID NO: 1823552 - DNA, 25 bp, Homo sapien
tgcctggctgcacggttcttacaaa

SEQ ID NO: 1823553 - DNA, 25 bp, Homo sapien
gaaatgacgaacaggaggatgtaaa

SEQ ID NO: 1823554 - DNA, 25 bp, Homo sapien
aaacatccagtagagcttcgcggca

SEQ ID NO: 1823555 - DNA, 25 bp, Homo sapien
atctcctgctcatcaatcctcgatg

SEQ ID NO: 1823556 - DNA, 25 bp, Homo sapien
gctcatcaatcctcgatgccacagt

SEQ ID NO: 1823557 - DNA, 25 bp, Homo sapien
tacatctcctgctcatcaatcctcg

SEQ ID NO: 1823558 - DNA, 25 bp, Homo sapien
tcatcaatcctcgatgccacagtca

SEQ ID NO: 1823559 - DNA, 25 bp, Homo sapien
agtataaacactgccaatgggtcca

SEQ ID NO: 1823560 - DNA, 25 bp, Homo sapien
gattgcattcagcattaaaggcccc

SEQ ID NO: 1823561 - DNA, 25 bp, Homo sapien
tcaaaaccaaaagaagcaggattgc

SEQ ID NO: 1823562 - DNA, 25 bp, Homo sapien
cccaggagagtatccagtataaaca

SEQ ID NO: 1823563 - DNA, 25 bp, Homo sapien
caacgatgtgaagagaaaaatggaa

SEQ ID NO: 1823564 - DNA, 25 bp, Homo sapien
aacgatgtgaagagaaaaatggaat

SEQ ID NO: 1823565 - DNA, 25 bp, Homo sapien
ctcaacgatgtgaagagaaaaatgg

SEQ ID NO: 1823566 - DNA, 25 bp, Homo sapien
tcaacgatgtgaagagaaaaatgga

SEQ ID NO: 1823567 - DNA, 25 bp, Homo sapien
tcagcagtataatgtaccagaagcc

SEQ ID NO: 1823568 - DNA, 25 bp, Homo sapien
cctggctttgccattgagataactg

SEQ ID NO: 1823569 - DNA, 25 bp, Homo sapien
taacaggagttgaaatggcctggag

SEQ ID NO: 1823570 - DNA, 25 bp, Homo sapien
tggcccaagtaatgcaggtagagcc

SEQ ID NO: 1823571 - DNA, 25 bp, Homo sapien
gaagacgctgataccagcacaaaat

SEQ ID NO: 1823572 - DNA, 25 bp, Homo sapien
cgctgataccagcacaaaatggaga

SEQ ID NO: 1823573 - DNA, 25 bp, Homo sapien
gacgctgataccagcacaaaatgga

SEQ ID NO: 1823574 - DNA, 25 bp, Homo sapien
gctgataccagcacaaaatggagat

SEQ ID NO: 1823575 - DNA, 25 bp, Homo sapien
ctttttgttgttcttctgtgtgttt

SEQ ID NO: 1823576 - DNA, 25 bp, Homo sapien
tgatactgacaattcctttttgttg

SEQ ID NO: 1823577 - DNA, 25 bp, Homo sapien
ttgttgttcttctgtgtgtttctcc

SEQ ID NO: 1823578 - DNA, 25 bp, Homo sapien
ctgatactgacaattcctttttgtt

SEQ ID NO: 1823579 - DNA, 25 bp, Homo sapien
ttcgggaagtgacttagctttgcag

SEQ ID NO: 1823580 - DNA, 25 bp, Homo sapien
gaagtgacttagctttgcagctagt

SEQ ID NO: 1823581 - DNA, 25 bp, Homo sapien
cttctggcttcgggaagtgacttag

SEQ ID NO: 1823582 - DNA, 25 bp, Homo sapien
ttctggcttcgggaagtgacttagc

SEQ ID NO: 1823583 - DNA, 25 bp, Homo sapien
gccaaatatgagactagggatgtcc

SEQ ID NO: 1823584 - DNA, 25 bp, Homo sapien
ggtaaagagccacatagacgaatag

SEQ ID NO: 1823585 - DNA, 25 bp, Homo sapien
ttgaactcaagtcctatgaagccag

SEQ ID NO: 1823586 - DNA, 25 bp, Homo sapien
tgtcctgaagtcatgagcaaagctt

SEQ ID NO: 1823587 - DNA, 25 bp, Homo sapien
ctgcgattaaatccaacatgatttc

SEQ ID NO: 1823588 - DNA, 25 bp, Homo sapien
cattaacggagtgtccacaagatat

SEQ ID NO: 1823589 - DNA, 25 bp, Homo sapien
cggagtgtccacaagatataaagaa

SEQ ID NO: 1823590 - DNA, 25 bp, Homo sapien
taaacattaacggagtgtccacaag

SEQ ID NO: 1823591 - DNA, 25 bp, Homo sapien
ttaataaacattaacggagtgtcca

SEQ ID NO: 1823592 - DNA, 25 bp, Homo sapien
tgaagccccaatagaacatccattc

SEQ ID NO: 1823593 - DNA, 25 bp, Homo sapien
gtgaagccccaatagaacatccatt

SEQ ID NO: 1823594 - DNA, 25 bp, Homo sapien
agtgaagccccaatagaacatccat

SEQ ID NO: 1823595 - DNA, 25 bp, Homo sapien
gagtgaagccccaatagaacatcca

SEQ ID NO: 1823596 - DNA, 25 bp, Homo sapien
ccattctcattgagtgaggccccat

SEQ ID NO: 1823597 - DNA, 25 bp, Homo sapien
agcacccatggaacatccattcttg

SEQ ID NO: 1823598 - DNA, 25 bp, Homo sapien
gagtgacgatcccatagaacatcca

SEQ ID NO: 1823599 - DNA, 25 bp, Homo sapien
ctcattgagtgaggccccatagaac

SEQ ID NO: 1823600 - DNA, 25 bp, Homo sapien
ccattcctgttgagtgaagccttca

SEQ ID NO: 1823601 - DNA, 25 bp, Homo sapien
gagtgaaggcctcatagaataccca

SEQ ID NO: 1823602 - DNA, 25 bp, Homo sapien
cattcccattgagagaagcctgcct

SEQ ID NO: 1823603 - DNA, 25 bp, Homo sapien
gccattgccattgagtgaagccctc

SEQ ID NO: 1823604 - DNA, 25 bp, Homo sapien
cttgtggttgcaaatgtttggttgg

SEQ ID NO: 1823605 - DNA, 25 bp, Homo sapien
ttgtggttgcaaatgtttggttggt

SEQ ID NO: 1823606 - DNA, 25 bp, Homo sapien
ggcaaatgctgatggttgtactgaa

SEQ ID NO: 1823607 - DNA, 25 bp, Homo sapien
gggctgatggtttccttactagagc

SEQ ID NO: 1823608 - DNA, 25 bp, Homo sapien
aagttaggtcagatacagccaatac

SEQ ID NO: 1823609 - DNA, 25 bp, Homo sapien
gctgatggtttccttactagagcca

SEQ ID NO: 1823610 - DNA, 25 bp, Homo sapien
cattgcattatgagttggcagaaag

SEQ ID NO: 1823611 - DNA, 25 bp, Homo sapien
aaacatgacagtgcacaacctttgc

SEQ ID NO: 1823612 - DNA, 25 bp, Homo sapien
gccttcaaggagactgcaacataga

SEQ ID NO: 1823613 - DNA, 25 bp, Homo sapien
tgttctcagcgatactgggcttcaa

SEQ ID NO: 1823614 - DNA, 25 bp, Homo sapien
atgtgtctgtcattgttctcagcga

SEQ ID NO: 1823615 - DNA, 25 bp, Homo sapien
gggaactggcgttgtcatgcccctt

SEQ ID NO: 1823616 - DNA, 25 bp, Homo sapien
tactacaaaccattgatatgcccag

SEQ ID NO: 1823617 - DNA, 25 bp, Homo sapien
tggcgttgtcatgccccttactaca

SEQ ID NO: 1823618 - DNA, 25 bp, Homo sapien
ccagtactgcaaaccactagtatac

SEQ ID NO: 1823619 - DNA, 25 bp, Homo sapien
atatgagagtgaaagaatttacaat

SEQ ID NO: 1823620 - DNA, 25 bp, Homo sapien
aagtatatgagagtgaaagaattta

SEQ ID NO: 1823621 - DNA, 25 bp, Homo sapien
gcctgaagctcaaaatacacccatt

SEQ ID NO: 1823622 - DNA, 25 bp, Homo sapien
gtatatgagagtgaaagaatttaca

SEQ ID NO: 1823623 - DNA, 25 bp, Homo sapien
gatcaaagccttaattgccctagtg

SEQ ID NO: 1823624 - DNA, 25 bp, Homo sapien
aattgccctagtgatgtccgtgata

SEQ ID NO: 1823625 - DNA, 25 bp, Homo sapien
taagggaagttacagggatcaaagc

SEQ ID NO: 1823626 - DNA, 25 bp, Homo sapien
tgtccgtgataactacattcttcat

SEQ ID NO: 1823627 - DNA, 25 bp, Homo sapien
tcattcccaaagggcaacagggagc

SEQ ID NO: 1823628 - DNA, 25 bp, Homo sapien
attcccaaagggcaacagggagctg

SEQ ID NO: 1823629 - DNA, 25 bp, Homo sapien
tcccaaagggcaacagggagctgag

SEQ ID NO: 1823630 - DNA, 25 bp, Homo sapien
acagggagctgagtcatcagagaag

SEQ ID NO: 1823631 - DNA, 25 bp, Homo sapien
aacagaaaatcggtgttcctccagt

SEQ ID NO: 1823632 - DNA, 25 bp, Homo sapien
cagttcctccaagtaagatatgtcc

SEQ ID NO: 1823633 - DNA, 25 bp, Homo sapien
acagaaaatcggtgttcctccagtt

SEQ ID NO: 1823634 - DNA, 25 bp, Homo sapien
cctccaagtaagatatgtcctgtga

SEQ ID NO: 1823635 - DNA, 25 bp, Homo sapien
tgtcccatggtttccatatcctaga

SEQ ID NO: 1823636 - DNA, 25 bp, Homo sapien
aaagaatgtaatgttgcttcaccca

SEQ ID NO: 1823637 - DNA, 25 bp, Homo sapien
ttcacttgctagaggattgtcccat

SEQ ID NO: 1823638 - DNA, 25 bp, Homo sapien
acccatttttcacttgctagaggat

SEQ ID NO: 1823639 - DNA, 25 bp, Homo sapien
aaacgtcagccgctttaccacatcc

SEQ ID NO: 1823640 - DNA, 25 bp, Homo sapien
gtcagccgctttaccacatcccaca

SEQ ID NO: 1823641 - DNA, 25 bp, Homo sapien
ttctcaaacgtcagccgctttacca

SEQ ID NO: 1823642 - DNA, 25 bp, Homo sapien
gatttctcaaacgtcagccgcttta

SEQ ID NO: 1823643 - DNA, 25 bp, Homo sapien
agattgggatcatagtccatagaac

SEQ ID NO: 1823644 - DNA, 25 bp, Homo sapien
ctaagagattgggatcatagtccat

SEQ ID NO: 1823645 - DNA, 25 bp, Homo sapien
tagtccatagaacagggaccgattt

SEQ ID NO: 1823646 - DNA, 25 bp, Homo sapien
ctgagagtgtagttcatcgtcttct

SEQ ID NO: 1823647 - DNA, 25 bp, Homo sapien
agtgtactgcgcgaagataaaggca

SEQ ID NO: 1823648 - DNA, 25 bp, Homo sapien
cagtcacatagatccctggaagaac

SEQ ID NO: 1823649 - DNA, 25 bp, Homo sapien
ctccagtgtactgcgcgaagataaa

SEQ ID NO: 1823650 - DNA, 25 bp, Homo sapien
tcttctttgaaacacctaatacttc

SEQ ID NO: 1823651 - DNA, 25 bp, Homo sapien
tagaagttctggaggcacacagcat

SEQ ID NO: 1823652 - DNA, 25 bp, Homo sapien
gtcaaaggtgtcaactctgtccaaa

SEQ ID NO: 1823653 - DNA, 25 bp, Homo sapien
taaatcatacccttaaatacagtta

SEQ ID NO: 1823654 - DNA, 25 bp, Homo sapien
tgtccaaatataccgcttaacagtg

SEQ ID NO: 1823655 - DNA, 25 bp, Homo sapien
ttttcttagcgtcaaactggttctc

SEQ ID NO: 1823656 - DNA, 25 bp, Homo sapien
tcagaatctctcagaggggtcaggg

SEQ ID NO: 1823657 - DNA, 25 bp, Homo sapien
gcgtcaaactggttctctacttcct

SEQ ID NO: 1823658 - DNA, 25 bp, Homo sapien
ggtgtcagaatctctcagaggggtc

SEQ ID NO: 1823659 - DNA, 25 bp, Homo sapien
aatgaggctaaatctgacagtggct

SEQ ID NO: 1823660 - DNA, 25 bp, Homo sapien
aaggaattcggaatgaggctaaatc

SEQ ID NO: 1823661 - DNA, 25 bp, Homo sapien
cataactgccccacaaaggaattcg

SEQ ID NO: 1823662 - DNA, 25 bp, Homo sapien
ggctggtctgtgctttgggaaccca

SEQ ID NO: 1823663 - DNA, 25 bp, Homo sapien
ttctctggccgcaaatcctagttct

SEQ ID NO: 1823664 - DNA, 25 bp, Homo sapien
cttctctggccgcaaatcctagttc

SEQ ID NO: 1823665 - DNA, 25 bp, Homo sapien
gaaaggccagctgtattatccactc

SEQ ID NO: 1823666 - DNA, 25 bp, Homo sapien
gctgcggatttaacgtctgcctcat

SEQ ID NO: 1823667 - DNA, 25 bp, Homo sapien
tctgcctcatccattggtgcacgag

SEQ ID NO: 1823668 - DNA, 25 bp, Homo sapien
cattggtgcacgaggattcttctgt

SEQ ID NO: 1823669 - DNA, 25 bp, Homo sapien
caggggaaagtcgagtatagctttc

SEQ ID NO: 1823670 - DNA, 25 bp, Homo sapien
gggaaagtcgagtatagctttcatg

SEQ ID NO: 1823671 - DNA, 25 bp, Homo sapien
aattcaggggaaagtcgagtatagc

SEQ ID NO: 1823672 - DNA, 25 bp, Homo sapien
ctggaaattcaggggaaagtcgagt

SEQ ID NO: 1823673 - DNA, 25 bp, Homo sapien
gactgatccaggagacaaatgttca

SEQ ID NO: 1823674 - DNA, 25 bp, Homo sapien
gagtactatccctaatgacaccgtg

SEQ ID NO: 1823675 - DNA, 25 bp, Homo sapien
caccgtgagagaatacgtgaggtca

SEQ ID NO: 1823676 - DNA, 25 bp, Homo sapien
tgccagcccctcgttgacaatggct

SEQ ID NO: 1823677 - DNA, 25 bp, Homo sapien
cgagacagaaagtcaacaaggatac

SEQ ID NO: 1823678 - DNA, 25 bp, Homo sapien
cagatcaacgagacagaaagtcaac

SEQ ID NO: 1823679 - DNA, 25 bp, Homo sapien
tcaacgagacagaaagtcaacaagg

SEQ ID NO: 1823680 - DNA, 25 bp, Homo sapien
cagaaagtcaacaaggatacccagg

SEQ ID NO: 1823681 - DNA, 25 bp, Homo sapien
gaaaatagagattgcacagccagtg

SEQ ID NO: 1823682 - DNA, 25 bp, Homo sapien
gagtttctggtcataatgtcctcat

SEQ ID NO: 1823683 - DNA, 25 bp, Homo sapien
gcaagtgtatgttccacgaagaaga

SEQ ID NO: 1823684 - DNA, 25 bp, Homo sapien
cacagcccggtccaggcaagtgtat

SEQ ID NO: 1823685 - DNA, 25 bp, Homo sapien
gatggcatttctgaacatctgcagc

SEQ ID NO: 1823686 - DNA, 25 bp, Homo sapien
tacaaactccagtgagtgagcctca

SEQ ID NO: 1823687 - DNA, 25 bp, Homo sapien
tgcagcctgattagatcaaagacca

SEQ ID NO: 1823688 - DNA, 25 bp, Homo sapien
caaattaaccacaaatggctttaca

SEQ ID NO: 1823689 - DNA, 25 bp, Homo sapien
tttcgtggaaatacacccccacatc

SEQ ID NO: 1823690 - DNA, 25 bp, Homo sapien
tgcctgacggagtgttttctggtct

SEQ ID NO: 1823691 - DNA, 25 bp, Homo sapien
ttccattgtgcctgacggagtgttt

SEQ ID NO: 1823692 - DNA, 25 bp, Homo sapien
acccccacatcataaaagtttccat

SEQ ID NO: 1823693 - DNA, 25 bp, Homo sapien
ttagttgctccgtttgccaccactg

SEQ ID NO: 1823694 - DNA, 25 bp, Homo sapien
agcctcccagtcgaccaagcaggga

SEQ ID NO: 1823695 - DNA, 25 bp, Homo sapien
taaggcccctcaggcatctgatctg

SEQ ID NO: 1823696 - DNA, 25 bp, Homo sapien
aagcagggacacttggacactttga

SEQ ID NO: 1823697 - DNA, 25 bp, Homo sapien
tcaagtcagcaagccataaaaaatc

SEQ ID NO: 1823698 - DNA, 25 bp, Homo sapien
gccatctcttcactggttctcgtgg

SEQ ID NO: 1823699 - DNA, 25 bp, Homo sapien
cactggttctcgtggttgtttcaag

SEQ ID NO: 1823700 - DNA, 25 bp, Homo sapien
gaattactatgcatggccgcttagc

SEQ ID NO: 1823701 - DNA, 25 bp, Homo sapien
gctgctccctttgagtcattagtta

SEQ ID NO: 1823702 - DNA, 25 bp, Homo sapien
aatatttaggtctgcaatgaatggt

SEQ ID NO: 1823703 - DNA, 25 bp, Homo sapien
acttctgtgagggtaccaagctggg

SEQ ID NO: 1823704 - DNA, 25 bp, Homo sapien
tctgcaatgaatggttgacttggag

SEQ ID NO: 1823705 - DNA, 25 bp, Homo sapien
gaggttcttctttattgttgactcc

SEQ ID NO: 1823706 - DNA, 25 bp, Homo sapien
tcatttgaattaagaaggatccaca

SEQ ID NO: 1823707 - DNA, 25 bp, Homo sapien
ccaatcctgagagtgttcttctgcc

SEQ ID NO: 1823708 - DNA, 25 bp, Homo sapien
taagcttaattccatcagtagggcc

SEQ ID NO: 1823709 - DNA, 25 bp, Homo sapien
aatgtattcgttgaggccttcccct

SEQ ID NO: 1823710 - DNA, 25 bp, Homo sapien
cataggaatgtattcgttgaggcct

SEQ ID NO: 1823711 - DNA, 25 bp, Homo sapien
tgaggccttccccttcgaatttcaa

SEQ ID NO: 1823712 - DNA, 25 bp, Homo sapien
tttaaaagtgacataggaatgtatt

SEQ ID NO: 1823713 - DNA, 25 bp, Homo sapien
tcaggacacttatgcccatgggcat

SEQ ID NO: 1823714 - DNA, 25 bp, Homo sapien
ttttcattcctagatgtttggagtc

SEQ ID NO: 1823715 - DNA, 25 bp, Homo sapien
ttcattcctagatgtttggagtctg

SEQ ID NO: 1823716 - DNA, 25 bp, Homo sapien
ccaaatccataagaatgttcaggac

SEQ ID NO: 1823717 - DNA, 25 bp, Homo sapien
aggaggagaggtatgcggtccccat

SEQ ID NO: 1823718 - DNA, 25 bp, Homo sapien
agactgcctgtctggtcattcccag

SEQ ID NO: 1823719 - DNA, 25 bp, Homo sapien
tatgcggtccccatggcatagcctc

SEQ ID NO: 1823720 - DNA, 25 bp, Homo sapien
tctccaaatcacagccaatgtttga

SEQ ID NO: 1823721 - DNA, 25 bp, Homo sapien
ctgaggagccaaaggacaaactact

SEQ ID NO: 1823722 - DNA, 25 bp, Homo sapien
ggagccaaaggacaaactactggca

SEQ ID NO: 1823723 - DNA, 25 bp, Homo sapien
aggacaaactactggcacagtccca

SEQ ID NO: 1823724 - DNA, 25 bp, Homo sapien
caaaggacaaactactggcacagtc

SEQ ID NO: 1823725 - DNA, 25 bp, Homo sapien
catcacgcagtctcaatatctgaag

SEQ ID NO: 1823726 - DNA, 25 bp, Homo sapien
gtggcatcacgcagtctcaatatct

SEQ ID NO: 1823727 - DNA, 25 bp, Homo sapien
ggcatcacgcagtctcaatatctga

SEQ ID NO: 1823728 - DNA, 25 bp, Homo sapien
cacgcagtctcaatatctgaagtaa

SEQ ID NO: 1823729 - DNA, 25 bp, Homo sapien
atttggatggcccttgaagtgggat

SEQ ID NO: 1823730 - DNA, 25 bp, Homo sapien
tgctgtcagttgactctgagagtgt

SEQ ID NO: 1823731 - DNA, 25 bp, Homo sapien
cccttgaagtgggatgctgtcagtt

SEQ ID NO: 1823732 - DNA, 25 bp, Homo sapien
gactctgagagtgttacctccccac

SEQ ID NO: 1823733 - DNA, 25 bp, Homo sapien
tgtgtgttcatggaacttcccgaca

SEQ ID NO: 1823734 - DNA, 25 bp, Homo sapien
aatatctgaatcaaggatgacagct

SEQ ID NO: 1823735 - DNA, 25 bp, Homo sapien
gaacataagaacattgcgagcactg

SEQ ID NO: 1823736 - DNA, 25 bp, Homo sapien
gacagctctgagttctaacaccaaa

SEQ ID NO: 1823737 - DNA, 25 bp, Homo sapien
ttgagcaagagtatccatggatgac

SEQ ID NO: 1823738 - DNA, 25 bp, Homo sapien
tcctccatacaatgcaatgaagtag

SEQ ID NO: 1823739 - DNA, 25 bp, Homo sapien
tctttgctctctatagtacctcctg

SEQ ID NO: 1823740 - DNA, 25 bp, Homo sapien
tacctcctgcttctgattacagcag

SEQ ID NO: 1823741 - DNA, 25 bp, Homo sapien
ttctcaatatactcttaatgctgac

SEQ ID NO: 1823742 - DNA, 25 bp, Homo sapien
ctaatggagaacttccaagcagaat

SEQ ID NO: 1823743 - DNA, 25 bp, Homo sapien
ttctttgtggatttcgtgactctta

SEQ ID NO: 1823744 - DNA, 25 bp, Homo sapien
ctttggaactcctcaaggtgagcag

SEQ ID NO: 1823745 - DNA, 25 bp, Homo sapien
ctcttattggaactcccaggtgctt

SEQ ID NO: 1823746 - DNA, 25 bp, Homo sapien
tctccttgtctgctctcatcaaaaa

SEQ ID NO: 1823747 - DNA, 25 bp, Homo sapien
tcgttaatcgattatagaaaattct

SEQ ID NO: 1823748 - DNA, 25 bp, Homo sapien
atcgattatagaaaattctatcgtc

SEQ ID NO: 1823749 - DNA, 25 bp, Homo sapien
cttcgttaatcgattatagaaaatt

SEQ ID NO: 1823750 - DNA, 25 bp, Homo sapien
cgattatagaaaattctatcgtcat

SEQ ID NO: 1823751 - DNA, 25 bp, Homo sapien
ctgctctgaaacaggggaccccatg

SEQ ID NO: 1823752 - DNA, 25 bp, Homo sapien
tgctctgaaacaggggaccccatgt

SEQ ID NO: 1823753 - DNA, 25 bp, Homo sapien
gagctggctgcgggtaaatacacag

SEQ ID NO: 1823754 - DNA, 25 bp, Homo sapien
agctggctgcgggtaaatacacaga

SEQ ID NO: 1823755 - DNA, 25 bp, Homo sapien
cttctctgctgacctccgtcgcaca

SEQ ID NO: 1823756 - DNA, 25 bp, Homo sapien
gccttgggtttatttcctcatccat

SEQ ID NO: 1823757 - DNA, 25 bp, Homo sapien
ctcatccatcagtgggtcaaagtaa

SEQ ID NO: 1823758 - DNA, 25 bp, Homo sapien
ggtcaaagtaatttctgccgtattc

SEQ ID NO: 1823759 - DNA, 25 bp, Homo sapien
attgcaggccatgccacattctctc

SEQ ID NO: 1823760 - DNA, 25 bp, Homo sapien
tcctggttctgatcaaaccttgcac

SEQ ID NO: 1823761 - DNA, 25 bp, Homo sapien
gcaggccatgccacattctctccaa

SEQ ID NO: 1823762 - DNA, 25 bp, Homo sapien
cattgcaggccatgccacattctct

SEQ ID NO: 1823763 - DNA, 25 bp, Homo sapien
tccgtccatccgatgttccatcagc

SEQ ID NO: 1823764 - DNA, 25 bp, Homo sapien
agtgaaggggttcggtatatgtcat

SEQ ID NO: 1823765 - DNA, 25 bp, Homo sapien
atgttccatcagcaatgctaagtga

SEQ ID NO: 1823766 - DNA, 25 bp, Homo sapien
tccatcagcaatgctaagtgaaggg

SEQ ID NO: 1823767 - DNA, 25 bp, Homo sapien
cttccagctcctacccaccacatgc

SEQ ID NO: 1823768 - DNA, 25 bp, Homo sapien
ctacccaccacatgctgctcctcca

SEQ ID NO: 1823769 - DNA, 25 bp, Homo sapien
cagctcctacccaccacatgctgct

SEQ ID NO: 1823770 - DNA, 25 bp, Homo sapien
ttccagctcctacccaccacatgct

SEQ ID NO: 1823771 - DNA, 25 bp, Homo sapien
cacaggtgtctaaacctatagagaa

SEQ ID NO: 1823772 - DNA, 25 bp, Homo sapien
cttgcacaggtgtctaaacctatag

SEQ ID NO: 1823773 - DNA, 25 bp, Homo sapien
tgcacaggtgtctaaacctatagag

SEQ ID NO: 1823774 - DNA, 25 bp, Homo sapien
aaacctatagagaaattatatcttc

SEQ ID NO: 1823775 - DNA, 25 bp, Homo sapien
ctaaaggagggaagcattagggtct

SEQ ID NO: 1823776 - DNA, 25 bp, Homo sapien
tacaagtatattggcaggatggcat

SEQ ID NO: 1823777 - DNA, 25 bp, Homo sapien
ccagcatagtctacaagtatattgg

SEQ ID NO: 1823778 - DNA, 25 bp, Homo sapien
gaagcattagggtctaagccccaaa

SEQ ID NO: 1823779 - DNA, 25 bp, Homo sapien
ggtgtgacgccctgacagactgaac

SEQ ID NO: 1823780 - DNA, 25 bp, Homo sapien
cgccagactggaatgcctgatgcca

SEQ ID NO: 1823781 - DNA, 25 bp, Homo sapien
gaaacctgtgtagacacgccagact

SEQ ID NO: 1823782 - DNA, 25 bp, Homo sapien
taagtgtgtcctgccgagttacatc

SEQ ID NO: 1823783 - DNA, 25 bp, Homo sapien
cagcaactgtcactgagtgtgaaga

SEQ ID NO: 1823784 - DNA, 25 bp, Homo sapien
caactgtcactgagtgtgaagataa

SEQ ID NO: 1823785 - DNA, 25 bp, Homo sapien
taggatgcccaggttagatgaggag

SEQ ID NO: 1823786 - DNA, 25 bp, Homo sapien
aggacagcaactgtcactgagtgtg

SEQ ID NO: 1823787 - DNA, 25 bp, Homo sapien
tctggactgctcatgttaaaagctg

SEQ ID NO: 1823788 - DNA, 25 bp, Homo sapien
ggcatgtcgtgtctaataactttct

SEQ ID NO: 1823789 - DNA, 25 bp, Homo sapien
tgcagtctgacatgctgagagatct

SEQ ID NO: 1823790 - DNA, 25 bp, Homo sapien
ctgcaagggtgcgatccggcatgtc

SEQ ID NO: 1823791 - DNA, 25 bp, Homo sapien
gaaattcagccgacttggatttctt

SEQ ID NO: 1823792 - DNA, 25 bp, Homo sapien
tcagccgacttggatttcttctgct

SEQ ID NO: 1823793 - DNA, 25 bp, Homo sapien
catcagaaattcagccgacttggat

SEQ ID NO: 1823794 - DNA, 25 bp, Homo sapien
ccatcagaaattcagccgacttgga

SEQ ID NO: 1823795 - DNA, 25 bp, Homo sapien
gcttcagagccttctgctgaaactt

SEQ ID NO: 1823796 - DNA, 25 bp, Homo sapien
ttgcttcagagccttctgctgaaac

SEQ ID NO: 1823797 - DNA, 25 bp, Homo sapien
tgcttcagagccttctgctgaaact

SEQ ID NO: 1823798 - DNA, 25 bp, Homo sapien
aacatctttatccaactcatcatca

SEQ ID NO: 1823799 - DNA, 25 bp, Homo sapien
catcatcatgtgcatcacagaatga

SEQ ID NO: 1823800 - DNA, 25 bp, Homo sapien
gtcagcacctatgattctcccaaat

SEQ ID NO: 1823801 - DNA, 25 bp, Homo sapien
gatagacataaacatctttatccaa

SEQ ID NO: 1823802 - DNA, 25 bp, Homo sapien
ttggcaatgcacagatttcaatcca

SEQ ID NO: 1823803 - DNA, 25 bp, Homo sapien
ggcaatgcacagatttcaatccagt

SEQ ID NO: 1823804 - DNA, 25 bp, Homo sapien
gcaatgcacagatttcaatccagtc

SEQ ID NO: 1823805 - DNA, 25 bp, Homo sapien
aatgcacagatttcaatccagtctc

SEQ ID NO: 1823806 - DNA, 25 bp, Homo sapien
gaaagaaattcctaacacatccgaa

SEQ ID NO: 1823807 - DNA, 25 bp, Homo sapien
ctgactagatgtggaatttcagcag

SEQ ID NO: 1823808 - DNA, 25 bp, Homo sapien
tggaatttcagcagagagatggaaa

SEQ ID NO: 1823809 - DNA, 25 bp, Homo sapien
gactagatgtggaatttcagcagag

SEQ ID NO: 1823810 - DNA, 25 bp, Homo sapien
tgtggaatttcagcagagagatgga

SEQ ID NO: 1823811 - DNA, 25 bp, Homo sapien
acataattaatataagctcacacag

SEQ ID NO: 1823812 - DNA, 25 bp, Homo sapien
gccaaatcaaatatatcttcatcct

SEQ ID NO: 1823813 - DNA, 25 bp, Homo sapien
gagactggtgatccacataattaat

SEQ ID NO: 1823814 - DNA, 25 bp, Homo sapien
aagcctcattacaaactgggttttg

SEQ ID NO: 1823815 - DNA, 25 bp, Homo sapien
tgcctccaactcaaatcgatgaaag

SEQ ID NO: 1823816 - DNA, 25 bp, Homo sapien
tgaaagtacacattagctcttagcc

SEQ ID NO: 1823817 - DNA, 25 bp, Homo sapien
ctcacgggccggagttcttgaaggt

SEQ ID NO: 1823818 - DNA, 25 bp, Homo sapien
aggtcaaaatagccatcagcatcac

SEQ ID NO: 1823819 - DNA, 25 bp, Homo sapien
tacaacatctgctgggcagataaca

SEQ ID NO: 1823820 - DNA, 25 bp, Homo sapien
tgagaacgatgaggtctctgtaggt

SEQ ID NO: 1823821 - DNA, 25 bp, Homo sapien
tctgtaggttacaacatctgctggg

SEQ ID NO: 1823822 - DNA, 25 bp, Homo sapien
tgcctcagtgctccctttcaaaggg

SEQ ID NO: 1823823 - DNA, 25 bp, Homo sapien
acctgtgtggatcgcagagcggcat

SEQ ID NO: 1823824 - DNA, 25 bp, Homo sapien
tgcaatgacactggatgtttgcgct

SEQ ID NO: 1823825 - DNA, 25 bp, Homo sapien
gatgtttgcgctgtttgataagtga

SEQ ID NO: 1823826 - DNA, 25 bp, Homo sapien
gatgactaacacgtctactactttt

SEQ ID NO: 1823827 - DNA, 25 bp, Homo sapien
tcctctcctaactggagctatgtgg

SEQ ID NO: 1823828 - DNA, 25 bp, Homo sapien
gccttcgtggagtgatcgaattgtc

SEQ ID NO: 1823829 - DNA, 25 bp, Homo sapien
gatcgaattgtctgaacaatccagg

SEQ ID NO: 1823830 - DNA, 25 bp, Homo sapien
tggagtgatcgaattgtctgaacaa

SEQ ID NO: 1823831 - DNA, 25 bp, Homo sapien
cgaattgtctgaacaatccaggaaa

SEQ ID NO: 1823832 - DNA, 25 bp, Homo sapien
tctggttgtagacaccaggctgggt

SEQ ID NO: 1823833 - DNA, 25 bp, Homo sapien
tgccccatgtcaccaggatcttcca

SEQ ID NO: 1823834 - DNA, 25 bp, Homo sapien
taatacaaagacaacagactcacac

SEQ ID NO: 1823835 - DNA, 25 bp, Homo sapien
catctaatacaaagacaacagactc

SEQ ID NO: 1823836 - DNA, 25 bp, Homo sapien
atacaaagacaacagactcacacat

SEQ ID NO: 1823837 - DNA, 25 bp, Homo sapien
tctaatacaaagacaacagactcac

SEQ ID NO: 1823838 - DNA, 25 bp, Homo sapien
agacttgtctcttccccctgctaca

SEQ ID NO: 1823839 - DNA, 25 bp, Homo sapien
ccaagggcagggttctttccagact

SEQ ID NO: 1823840 - DNA, 25 bp, Homo sapien
caagggcagggttctttccagactt

SEQ ID NO: 1823841 - DNA, 25 bp, Homo sapien
tccagacttgtctcttccccctgct

SEQ ID NO: 1823842 - DNA, 25 bp, Homo sapien
aaggccacgataaacagagtaggga

SEQ ID NO: 1823843 - DNA, 25 bp, Homo sapien
ggattctgggtgagacgaagatgat

SEQ ID NO: 1823844 - DNA, 25 bp, Homo sapien
caaggccacgataaacagagtaggg

SEQ ID NO: 1823845 - DNA, 25 bp, Homo sapien
ccaaggccacgataaacagagtagg

SEQ ID NO: 1823846 - DNA, 25 bp, Homo sapien
gcggaattcactaactgcctctcca

SEQ ID NO: 1823847 - DNA, 25 bp, Homo sapien
ccacagcagcgagcaagcggctctg

SEQ ID NO: 1823848 - DNA, 25 bp, Homo sapien
tccacctgccgtcacctccttgggt

SEQ ID NO: 1823849 - DNA, 25 bp, Homo sapien
gctgccactgacgaggccacagcag

SEQ ID NO: 1823850 - DNA, 25 bp, Homo sapien
tccttgtggctgatagtcatggtga

SEQ ID NO: 1823851 - DNA, 25 bp, Homo sapien
tcaaggttctccttgtggctgatag

SEQ ID NO: 1823852 - DNA, 25 bp, Homo sapien
tagtcatggtgattgcttgacctcg

SEQ ID NO: 1823853 - DNA, 25 bp, Homo sapien
gattgcttgacctcgggccttgcag

SEQ ID NO: 1823854 - DNA, 25 bp, Homo sapien
aaattatgcaggcttctgtctcgcg

SEQ ID NO: 1823855 - DNA, 25 bp, Homo sapien
tgtgttcacgggcacggcattcagg

SEQ ID NO: 1823856 - DNA, 25 bp, Homo sapien
tccctttacccagcgccttgtatgt

SEQ ID NO: 1823857 - DNA, 25 bp, Homo sapien
cattcaggcgcagagcgtgggatgc

SEQ ID NO: 1823858 - DNA, 25 bp, Homo sapien
tcatctctgaaagtcttcctaaaac

SEQ ID NO: 1823859 - DNA, 25 bp, Homo sapien
ttccatgactaaggcagagagaccg

SEQ ID NO: 1823860 - DNA, 25 bp, Homo sapien
ggagctgcacccatttgcacaacag

SEQ ID NO: 1823861 - DNA, 25 bp, Homo sapien
ttgcacgcctttgcaccttcatctc

SEQ ID NO: 1823862 - DNA, 25 bp, Homo sapien
tcccttcagtttcctgcttgacaca

SEQ ID NO: 1823863 - DNA, 25 bp, Homo sapien
gctcccttcagtttcctgcttgaca

SEQ ID NO: 1823864 - DNA, 25 bp, Homo sapien
cagctcccttcagtttcctgcttga

SEQ ID NO: 1823865 - DNA, 25 bp, Homo sapien
ttcagtttcctgcttgacacactcc

SEQ ID NO: 1823866 - DNA, 25 bp, Homo sapien
gggctgaggcctaaagatcacccta

SEQ ID NO: 1823867 - DNA, 25 bp, Homo sapien
caaagaacaagtcttgggcccgtct

SEQ ID NO: 1823868 - DNA, 25 bp, Homo sapien
ttttactaacgtgtgtgagggtgcc

SEQ ID NO: 1823869 - DNA, 25 bp, Homo sapien
tagtcctctgacgtctacttggaag

SEQ ID NO: 1823870 - DNA, 25 bp, Homo sapien
tccaagatgtcacgttaatttttaa

SEQ ID NO: 1823871 - DNA, 25 bp, Homo sapien
tcttataagatccaagatgtcacgt

SEQ ID NO: 1823872 - DNA, 25 bp, Homo sapien
tttcctgaagggcttgactcttata

SEQ ID NO: 1823873 - DNA, 25 bp, Homo sapien
gaagggcttgactcttataagatcc

SEQ ID NO: 1823874 - DNA, 25 bp, Homo sapien
agtgagcttgtgagtaaatcctgct

SEQ ID NO: 1823875 - DNA, 25 bp, Homo sapien
taatctgtaagggacgaaagtcgat

SEQ ID NO: 1823876 - DNA, 25 bp, Homo sapien
tcgggaattatctctgccaatgact

SEQ ID NO: 1823877 - DNA, 25 bp, Homo sapien
ggacgaaagtcgatcgggaattatc

SEQ ID NO: 1823878 - DNA, 25 bp, Homo sapien
ttgaggtaagaaagtcaactgcttt

SEQ ID NO: 1823879 - DNA, 25 bp, Homo sapien
tttaacacccgcttttgcaaatgtc

SEQ ID NO: 1823880 - DNA, 25 bp, Homo sapien
ctggcaaagggcctatgattttatg

SEQ ID NO: 1823881 - DNA, 25 bp, Homo sapien
gcaaatgtctgctgtacggtgagtt

SEQ ID NO: 1823882 - DNA, 25 bp, Homo sapien
ccacaccaagaccaccttggtctct

SEQ ID NO: 1823883 - DNA, 25 bp, Homo sapien
aagaccaccttggtctctgatcttt

SEQ ID NO: 1823884 - DNA, 25 bp, Homo sapien
ccaagaccaccttggtctctgatct

SEQ ID NO: 1823885 - DNA, 25 bp, Homo sapien
acaccaagaccaccttggtctctga

SEQ ID NO: 1823886 - DNA, 25 bp, Homo sapien
tccatacaagtatgggaagactgca

SEQ ID NO: 1823887 - DNA, 25 bp, Homo sapien
ggatatcatactgtacagatggcag

SEQ ID NO: 1823888 - DNA, 25 bp, Homo sapien
aacttgcgataacactccagtagga

SEQ ID NO: 1823889 - DNA, 25 bp, Homo sapien
caatcaatggctgctaatctcagcc

SEQ ID NO: 1823890 - DNA, 25 bp, Homo sapien
ttcgacaggtaaccctcctcaaagc

SEQ ID NO: 1823891 - DNA, 25 bp, Homo sapien
cagagcttggcagaaccttccctgc

SEQ ID NO: 1823892 - DNA, 25 bp, Homo sapien
cagagacgcttcgacaggtaaccct

SEQ ID NO: 1823893 - DNA, 25 bp, Homo sapien
tccctgcttctagccagagacgctt

SEQ ID NO: 1823894 - DNA, 25 bp, Homo sapien
ggtaaggcggttctcctgtgcagtc

SEQ ID NO: 1823895 - DNA, 25 bp, Homo sapien
tgtgcagtcaccacaactggactgt

SEQ ID NO: 1823896 - DNA, 25 bp, Homo sapien
ctgtaggtaaggcggttctcctgtg

SEQ ID NO: 1823897 - DNA, 25 bp, Homo sapien
taggtaaggcggttctcctgtgcag

SEQ ID NO: 1823898 - DNA, 25 bp, Homo sapien
ttaccaccaatggactgtaggtaaa

SEQ ID NO: 1823899 - DNA, 25 bp, Homo sapien
agttaccaccaatggactgtaggta

SEQ ID NO: 1823900 - DNA, 25 bp, Homo sapien
gttaccaccaatggactgtaggtaa

SEQ ID NO: 1823901 - DNA, 25 bp, Homo sapien
tcaccatcactggactgtaggtaaa

SEQ ID NO: 1823902 - DNA, 25 bp, Homo sapien
ggcagttctcctgtacagtcaccac

SEQ ID NO: 1823903 - DNA, 25 bp, Homo sapien
agacaaggcagttctcctgtacagt

SEQ ID NO: 1823904 - DNA, 25 bp, Homo sapien
tgtagacaaggcagttctcctgtac

SEQ ID NO: 1823905 - DNA, 25 bp, Homo sapien
aggcagttctcctgtacagtcacca

SEQ ID NO: 1823906 - DNA, 25 bp, Homo sapien
tgtccccgttattttaatgcccatg

SEQ ID NO: 1823907 - DNA, 25 bp, Homo sapien
taatgcccatgtcagattccaggtg

SEQ ID NO: 1823908 - DNA, 25 bp, Homo sapien
ctaatagcccatagtataggttttc

SEQ ID NO: 1823909 - DNA, 25 bp, Homo sapien
tccaggtgaacgtctatcttgtcta

SEQ ID NO: 1823910 - DNA, 25 bp, Homo sapien
caaatgtcccgtctttagttcctgg

SEQ ID NO: 1823911 - DNA, 25 bp, Homo sapien
tacttaagctcttgtcaacatcggc

SEQ ID NO: 1823912 - DNA, 25 bp, Homo sapien
gggagccacttcaagttttgaacca

SEQ ID NO: 1823913 - DNA, 25 bp, Homo sapien
ttggcgtctccaaagtacttgatgt

SEQ ID NO: 1823914 - DNA, 25 bp, Homo sapien
ctccttcccacgggctctcataaag

SEQ ID NO: 1823915 - DNA, 25 bp, Homo sapien
ccttcccacgggctctcataaagtg

SEQ ID NO: 1823916 - DNA, 25 bp, Homo sapien
ttcccacgggctctcataaagtgtg

SEQ ID NO: 1823917 - DNA, 25 bp, Homo sapien
tcccacgggctctcataaagtgtgc

SEQ ID NO: 1823918 - DNA, 25 bp, Homo sapien
aagctagctcggctcttagagtgtt

SEQ ID NO: 1823919 - DNA, 25 bp, Homo sapien
tcacgcgtttcaggaagctagctcg

SEQ ID NO: 1823920 - DNA, 25 bp, Homo sapien
gaagctagctcggctcttagagtgt

SEQ ID NO: 1823921 - DNA, 25 bp, Homo sapien
cgcgtttcaggaagctagctcggct

SEQ ID NO: 1823922 - DNA, 25 bp, Homo sapien
agaacatacattgggtgcctcttct

SEQ ID NO: 1823923 - DNA, 25 bp, Homo sapien
cacttggggcattcttttttgaaca

SEQ ID NO: 1823924 - DNA, 25 bp, Homo sapien
taacacttggggcattcttttttga

SEQ ID NO: 1823925 - DNA, 25 bp, Homo sapien
catacattgggtgcctcttctcttt

SEQ ID NO: 1823926 - DNA, 25 bp, Homo sapien
cagaacacaagacagatgggcttga

SEQ ID NO: 1823927 - DNA, 25 bp, Homo sapien
ggaccaggtatttccacaaaccaga

SEQ ID NO: 1823928 - DNA, 25 bp, Homo sapien
actgagggcagttggacttgctgct

SEQ ID NO: 1823929 - DNA, 25 bp, Homo sapien
ccaggtatttccacaaaccagaggg

SEQ ID NO: 1823930 - DNA, 25 bp, Homo sapien
tcccgcttcccatgagggagcaaaa

SEQ ID NO: 1823931 - DNA, 25 bp, Homo sapien
tggcgactaaagaagtgaagtggca

SEQ ID NO: 1823932 - DNA, 25 bp, Homo sapien
cttagccagcttgaagtggcgacta

SEQ ID NO: 1823933 - DNA, 25 bp, Homo sapien
tctctgccccggagaggagcgggaa

SEQ ID NO: 1823934 - DNA, 25 bp, Homo sapien
ctgggagtctcacacttccattatt

SEQ ID NO: 1823935 - DNA, 25 bp, Homo sapien
gactgtgaagtggtctgaatcctgg

SEQ ID NO: 1823936 - DNA, 25 bp, Homo sapien
gaagagcttgctagactgtgaagtg

SEQ ID NO: 1823937 - DNA, 25 bp, Homo sapien
tatactgtccgaaaaattcctccac

SEQ ID NO: 1823938 - DNA, 25 bp, Homo sapien
ctgaagcccggttgaaaacaggcat

SEQ ID NO: 1823939 - DNA, 25 bp, Homo sapien
tcctgaagcccggttgaaaacaggc

SEQ ID NO: 1823940 - DNA, 25 bp, Homo sapien
cctgaagcccggttgaaaacaggca

SEQ ID NO: 1823941 - DNA, 25 bp, Homo sapien
ccctagagagtactggaaatccatt

SEQ ID NO: 1823942 - DNA, 25 bp, Homo sapien
agttgtgtacgggagccccatgtga

SEQ ID NO: 1823943 - DNA, 25 bp, Homo sapien
aagctagtcatccacgggcttccca

SEQ ID NO: 1823944 - DNA, 25 bp, Homo sapien
gaaatccattggcaccagagcccaa

SEQ ID NO: 1823945 - DNA, 25 bp, Homo sapien
ggaaacactgtgagttgtgtccact

SEQ ID NO: 1823946 - DNA, 25 bp, Homo sapien
tcacccccatctagatgactctgtg

SEQ ID NO: 1823947 - DNA, 25 bp, Homo sapien
catctagatgactctgtgcacagcc

SEQ ID NO: 1823948 - DNA, 25 bp, Homo sapien
gggaaacactgtgagttgtgtccac

SEQ ID NO: 1823949 - DNA, 25 bp, Homo sapien
ctttggtcacaaacataagaagctg

SEQ ID NO: 1823950 - DNA, 25 bp, Homo sapien
ctgcatgtgctcagaaagagcacca

SEQ ID NO: 1823951 - DNA, 25 bp, Homo sapien
cataagaagctgcatgtgctcagaa

SEQ ID NO: 1823952 - DNA, 25 bp, Homo sapien
ttggtcacaaacataagaagctgca

SEQ ID NO: 1823953 - DNA, 25 bp, Homo sapien
tgtctagaatgctcactttcttttc

SEQ ID NO: 1823954 - DNA, 25 bp, Homo sapien
cttcctgccgatatttgtctagaat

SEQ ID NO: 1823955 - DNA, 25 bp, Homo sapien
tcctgccgatatttgtctagaatgc

SEQ ID NO: 1823956 - DNA, 25 bp, Homo sapien
ctgccgatatttgtctagaatgctc

SEQ ID NO: 1823957 - DNA, 25 bp, Homo sapien
aagacattgtgctagctgccatgag

SEQ ID NO: 1823958 - DNA, 25 bp, Homo sapien
cattgtgctagctgccatgagggaa

SEQ ID NO: 1823959 - DNA, 25 bp, Homo sapien
gacattgtgctagctgccatgaggg

SEQ ID NO: 1823960 - DNA, 25 bp, Homo sapien
attgtgctagctgccatgagggaag

SEQ ID NO: 1823961 - DNA, 25 bp, Homo sapien
gcactgagctctatgacgttgtcaa

SEQ ID NO: 1823962 - DNA, 25 bp, Homo sapien
cattctaagaatctgggagggctga

SEQ ID NO: 1823963 - DNA, 25 bp, Homo sapien
gagcctctgcgaatatcctgctgtg

SEQ ID NO: 1823964 - DNA, 25 bp, Homo sapien
gaccttttgggtcaccaccagaata

SEQ ID NO: 1823965 - DNA, 25 bp, Homo sapien
ttcccagaactacatgagcatctgc

SEQ ID NO: 1823966 - DNA, 25 bp, Homo sapien
gaagaatttcccagaactacatgag

SEQ ID NO: 1823967 - DNA, 25 bp, Homo sapien
agaagaatttcccagaactacatga

SEQ ID NO: 1823968 - DNA, 25 bp, Homo sapien
gaatttcccagaactacatgagcat

SEQ ID NO: 1823969 - DNA, 25 bp, Homo sapien
gacagcgcaccccaaggttgtgaac

SEQ ID NO: 1823970 - DNA, 25 bp, Homo sapien
tcccagacacttctgaatgaggagg

SEQ ID NO: 1823971 - DNA, 25 bp, Homo sapien
ggttgtgaacccctcagacatgtcc

SEQ ID NO: 1823972 - DNA, 25 bp, Homo sapien
cttacaaccaaacctgtcttcccag

SEQ ID NO: 1823973 - DNA, 25 bp, Homo sapien
caaaatccggcttccacggaggaca

SEQ ID NO: 1823974 - DNA, 25 bp, Homo sapien
gcaagtttcccgtgctccggttcag

SEQ ID NO: 1823975 - DNA, 25 bp, Homo sapien
ccatgtaacagatgcaagtttcccg

SEQ ID NO: 1823976 - DNA, 25 bp, Homo sapien
accaagagatacaaggctgcccatg

SEQ ID NO: 1823977 - DNA, 25 bp, Homo sapien
ttctgcgctcgcatctggccagtgc

SEQ ID NO: 1823978 - DNA, 25 bp, Homo sapien
ctttgtgggttctgcgctcgcatct

SEQ ID NO: 1823979 - DNA, 25 bp, Homo sapien
gtgggttctgcgctcgcatctggcc

SEQ ID NO: 1823980 - DNA, 25 bp, Homo sapien
gggttctgcgctcgcatctggccag

SEQ ID NO: 1823981 - DNA, 25 bp, Homo sapien
cctgtaactgacaggctaaacagaa

SEQ ID NO: 1823982 - DNA, 25 bp, Homo sapien
taaacagaagcttgttccaaacaca

SEQ ID NO: 1823983 - DNA, 25 bp, Homo sapien
gggatgattataataggctgctgct

SEQ ID NO: 1823984 - DNA, 25 bp, Homo sapien
gacaggctaaacagaagcttgttcc

SEQ ID NO: 1823985 - DNA, 25 bp, Homo sapien
cggtgcgggacttctcccaaggcat

SEQ ID NO: 1823986 - DNA, 25 bp, Homo sapien
agagaagggtctgcggtgcgggact

SEQ ID NO: 1823987 - DNA, 25 bp, Homo sapien
agaagggtctgcggtgcgggacttc

SEQ ID NO: 1823988 - DNA, 25 bp, Homo sapien
tctgcggtgcgggacttctcccaag

SEQ ID NO: 1823989 - DNA, 25 bp, Homo sapien
cactgtagggtaaataatgtttgag

SEQ ID NO: 1823990 - DNA, 25 bp, Homo sapien
actgtagggtaaataatgtttgagt

SEQ ID NO: 1823991 - DNA, 25 bp, Homo sapien
tcactgtagggtaaataatgtttga

SEQ ID NO: 1823992 - DNA, 25 bp, Homo sapien
tatcccaaaataagggcaaaacatg

SEQ ID NO: 1823993 - DNA, 25 bp, Homo sapien
gcagttccacgaataagtatcccaa

SEQ ID NO: 1823994 - DNA, 25 bp, Homo sapien
cattggacacgcactctgactgagc

SEQ ID NO: 1823995 - DNA, 25 bp, Homo sapien
ttgttttccaacctgccggctgcat

SEQ ID NO: 1823996 - DNA, 25 bp, Homo sapien
tttgacgtcagtgggagcttggcct

SEQ ID NO: 1823997 - DNA, 25 bp, Homo sapien
tgcctttgacgtcagtgggagcttg

SEQ ID NO: 1823998 - DNA, 25 bp, Homo sapien
caggccaactgcctttgacgtcagt

SEQ ID NO: 1823999 - DNA, 25 bp, Homo sapien
caactgcctttgacgtcagtgggag

SEQ ID NO: 1824000 - DNA, 25 bp, Homo sapien
tttctccgctttgctgcagattgaa

SEQ ID NO: 1824001 - DNA, 25 bp, Homo sapien
ttttctccgctttgctgcagattga

SEQ ID NO: 1824002 - DNA, 25 bp, Homo sapien
ttgaatggtcaatgggtttactact

SEQ ID NO: 1824003 - DNA, 25 bp, Homo sapien
atgggtttactactgaggcggcgct

SEQ ID NO: 1824004 - DNA, 25 bp, Homo sapien
agccactgctctgattgaatggtca

SEQ ID NO: 1824005 - DNA, 25 bp, Homo sapien
tgctctgattgaatggtcaatgggt

SEQ ID NO: 1824006 - DNA, 25 bp, Homo sapien
gtcaaagcctatgctgcctgtgtca

SEQ ID NO: 1824007 - DNA, 25 bp, Homo sapien
cacaggctgttgaaattacttttgt

SEQ ID NO: 1824008 - DNA, 25 bp, Homo sapien
tgtcatagcacacgtcacaggctgt

SEQ ID NO: 1824009 - DNA, 25 bp, Homo sapien
tgtgagatgcgtcttttctgcactc

SEQ ID NO: 1824010 - DNA, 25 bp, Homo sapien
tgagaggagggatcgtggtgctcat

SEQ ID NO: 1824011 - DNA, 25 bp, Homo sapien
tgtgagaggagggatcgtggtgctc

SEQ ID NO: 1824012 - DNA, 25 bp, Homo sapien
ctgtgagaggagggatcgtggtgct

SEQ ID NO: 1824013 - DNA, 25 bp, Homo sapien
gtgagaggagggatcgtggtgctca

SEQ ID NO: 1824014 - DNA, 25 bp, Homo sapien
tggagggacgtggagtgttttccat

SEQ ID NO: 1824015 - DNA, 25 bp, Homo sapien
ggtttcgaggcattcagaaggtgtt

SEQ ID NO: 1824016 - DNA, 25 bp, Homo sapien
gatggtgggacgtgggtgagttttc

SEQ ID NO: 1824017 - DNA, 25 bp, Homo sapien
gatggagggatgtggcgggttttcc

SEQ ID NO: 1824018 - DNA, 25 bp, Homo sapien
ctggttcagggaggaacatgatgtg

SEQ ID NO: 1824019 - DNA, 25 bp, Homo sapien
tggttcagggaggaacatgatgtgc

SEQ ID NO: 1824020 - DNA, 25 bp, Homo sapien
ggttcagggaggaacatgatgtgct

SEQ ID NO: 1824021 - DNA, 25 bp, Homo sapien
gacgacaatgactgatggtggcctt

SEQ ID NO: 1824022 - DNA, 25 bp, Homo sapien
tggtggccttgcctatttgccatct

SEQ ID NO: 1824023 - DNA, 25 bp, Homo sapien
tctgtgcaggcaggattgtggctga

SEQ ID NO: 1824024 - DNA, 25 bp, Homo sapien
gctgatctgcaagacgatggtgaca

SEQ ID NO: 1824025 - DNA, 25 bp, Homo sapien
cttcctgctgtcacatcacgtctct

SEQ ID NO: 1824026 - DNA, 25 bp, Homo sapien
ctgctgtcacatcacgtctctgctt

SEQ ID NO: 1824027 - DNA, 25 bp, Homo sapien
ttcctgctgtcacatcacgtctctg

SEQ ID NO: 1824028 - DNA, 25 bp, Homo sapien
cctgctgtcacatcacgtctctgct

SEQ ID NO: 1824029 - DNA, 25 bp, Homo sapien
tcggccttttgtcaagtacttctag

SEQ ID NO: 1824030 - DNA, 25 bp, Homo sapien
caagctcggccttttgtcaagtact

SEQ ID NO: 1824031 - DNA, 25 bp, Homo sapien
ccaagctcggccttttgtcaagtac

SEQ ID NO: 1824032 - DNA, 25 bp, Homo sapien
gctcggccttttgtcaagtacttct

SEQ ID NO: 1824033 - DNA, 25 bp, Homo sapien
actttgctggtgaagtgacagctgc

SEQ ID NO: 1824034 - DNA, 25 bp, Homo sapien
agtcccggtgtccagactgtgcttc

SEQ ID NO: 1824035 - DNA, 25 bp, Homo sapien
gctccccagtgaccagtcccggtgt

SEQ ID NO: 1824036 - DNA, 25 bp, Homo sapien
gactgtgcttcccagaatcacttcc

SEQ ID NO: 1824037 - DNA, 25 bp, Homo sapien
ctgttcatatggcggatggaaaatg

SEQ ID NO: 1824038 - DNA, 25 bp, Homo sapien
caatttgctgactaggagagcaagg

SEQ ID NO: 1824039 - DNA, 25 bp, Homo sapien
atacaatttgctgactaggagagca

SEQ ID NO: 1824040 - DNA, 25 bp, Homo sapien
aatacaatttgctgactaggagagc

SEQ ID NO: 1824041 - DNA, 25 bp, Homo sapien
tacaatttgctgactaggagagcaa

SEQ ID NO: 1824042 - DNA, 25 bp, Homo sapien
gctggtggatgagctgattgatgca

SEQ ID NO: 1824043 - DNA, 25 bp, Homo sapien
ctggtggatgagctgattgatgcat

SEQ ID NO: 1824044 - DNA, 25 bp, Homo sapien
ggtggatgagctgattgatgcattc

SEQ ID NO: 1824045 - DNA, 25 bp, Homo sapien
tggatgagctgattgatgcattcac

SEQ ID NO: 1824046 - DNA, 25 bp, Homo sapien
cattctattcttggcagtggacagg

SEQ ID NO: 1824047 - DNA, 25 bp, Homo sapien
cccattctattcttggcagtggaca

SEQ ID NO: 1824048 - DNA, 25 bp, Homo sapien
ttctattcttggcagtggacaggcc

SEQ ID NO: 1824049 - DNA, 25 bp, Homo sapien
gaagcccattctattcttggcagtg

SEQ ID NO: 1824050 - DNA, 25 bp, Homo sapien
catttcagaatgagatcccggacaa

SEQ ID NO: 1824051 - DNA, 25 bp, Homo sapien
cttgactgtggcttgtcgacatttc

SEQ ID NO: 1824052 - DNA, 25 bp, Homo sapien
tgtggcttgtcgacatttcagaatg

SEQ ID NO: 1824053 - DNA, 25 bp, Homo sapien
aatgagatcccggacaaacttcaca

SEQ ID NO: 1824054 - DNA, 25 bp, Homo sapien
tcctttcaaggagtataacaaaggc

SEQ ID NO: 1824055 - DNA, 25 bp, Homo sapien
tttcaaggagtataacaaaggccaa

SEQ ID NO: 1824056 - DNA, 25 bp, Homo sapien
gttctctgcacaggtaactcacacc

SEQ ID NO: 1824057 - DNA, 25 bp, Homo sapien
taatcctttcaaggagtataacaaa

SEQ ID NO: 1824058 - DNA, 25 bp, Homo sapien
aaaagtgcctgagttgcctgaatgg

SEQ ID NO: 1824059 - DNA, 25 bp, Homo sapien
gagagtctgtgaacagttgttggaa

SEQ ID NO: 1824060 - DNA, 25 bp, Homo sapien
cagacaaataaaacattgcttgtgc

SEQ ID NO: 1824061 - DNA, 25 bp, Homo sapien
aatatctgaatttcgaggagggctc

SEQ ID NO: 1824062 - DNA, 25 bp, Homo sapien
tagctgtcgttgagatgcctggcac

SEQ ID NO: 1824063 - DNA, 25 bp, Homo sapien
gcccaagccctgatatttttattac

SEQ ID NO: 1824064 - DNA, 25 bp, Homo sapien
ggcccaagccctgatatttttatta

SEQ ID NO: 1824065 - DNA, 25 bp, Homo sapien
ctggcccaagccctgatatttttat

SEQ ID NO: 1824066 - DNA, 25 bp, Homo sapien
tagtgggatcccacggacacagtca

SEQ ID NO: 1824067 - DNA, 25 bp, Homo sapien
ctttaacacaactggcacaaagcat

SEQ ID NO: 1824068 - DNA, 25 bp, Homo sapien
gacacagtcactttaacacaactgg

SEQ ID NO: 1824069 - DNA, 25 bp, Homo sapien
ttgggacagtcatagtgggatccca

SEQ ID NO: 1824070 - DNA, 25 bp, Homo sapien
tttagatgcaagatcccctgccagt

SEQ ID NO: 1824071 - DNA, 25 bp, Homo sapien
ggagcaaatacttatcacccaggat

SEQ ID NO: 1824072 - DNA, 25 bp, Homo sapien
tttcagggcgaaaaagccatcatcc

SEQ ID NO: 1824073 - DNA, 25 bp, Homo sapien
gatgacacccattcacttagaaagc

SEQ ID NO: 1824074 - DNA, 25 bp, Homo sapien
actttttggaggataacaggtgcag

SEQ ID NO: 1824075 - DNA, 25 bp, Homo sapien
tgattggcacaatccagaagccagt

SEQ ID NO: 1824076 - DNA, 25 bp, Homo sapien
aaatgagtaaccagtccagccctac

SEQ ID NO: 1824077 - DNA, 25 bp, Homo sapien
gcatgctgtggcctaattccgtata

SEQ ID NO: 1824078 - DNA, 25 bp, Homo sapien
agaggcccgaatagaggttccggct

SEQ ID NO: 1824079 - DNA, 25 bp, Homo sapien
agaggttccggctcaatctttccca

SEQ ID NO: 1824080 - DNA, 25 bp, Homo sapien
ggctcaatctttcccagacggaggc

SEQ ID NO: 1824081 - DNA, 25 bp, Homo sapien
ggaagcgagaggagaggcccgaata

SEQ ID NO: 1824082 - DNA, 25 bp, Homo sapien
cgcacggtgggtaagtcctttatcg

SEQ ID NO: 1824083 - DNA, 25 bp, Homo sapien
tgaccctttgtgatggcgccgatag

SEQ ID NO: 1824084 - DNA, 25 bp, Homo sapien
gtaatgacccgggttcgccgcagct

SEQ ID NO: 1824085 - DNA, 25 bp, Homo sapien
gattactccccgtctgaaagcggct

SEQ ID NO: 1824086 - DNA, 25 bp, Homo sapien
tcagggcaaatgattctccgacaga

SEQ ID NO: 1824087 - DNA, 25 bp, Homo sapien
aagcttgctaggtttccacgccgga

SEQ ID NO: 1824088 - DNA, 25 bp, Homo sapien
acgtcccgggcagttcaggaaagct

SEQ ID NO: 1824089 - DNA, 25 bp, Homo sapien
ccgtgaaaatttgcgattcagggca

SEQ ID NO: 1824090 - DNA, 25 bp, Homo sapien
gatttcccgagaaacaagcgtgtcc

SEQ ID NO: 1824091 - DNA, 25 bp, Homo sapien
ctgggattggattactgggactgcc

SEQ ID NO: 1824092 - DNA, 25 bp, Homo sapien
gggtgggctctcaattcaactggac

SEQ ID NO: 1824093 - DNA, 25 bp, Homo sapien
ttggtctccgcattagggaaactga

SEQ ID NO: 1824094 - DNA, 25 bp, Homo sapien
aagatcattctgacttgaagcaaca

SEQ ID NO: 1824095 - DNA, 25 bp, Homo sapien
ctttttggaaccattatcttgggtg

SEQ ID NO: 1824096 - DNA, 25 bp, Homo sapien
ggttaagactcaacacgcccatgct

SEQ ID NO: 1824097 - DNA, 25 bp, Homo sapien
ttatcttgggtgcttccattcaact

SEQ ID NO: 1824098 - DNA, 25 bp, Homo sapien
ccatttgagcaggaaacaactgatc

SEQ ID NO: 1824099 - DNA, 25 bp, Homo sapien
catttagttaatccgggagactgca

SEQ ID NO: 1824100 - DNA, 25 bp, Homo sapien
tctgaaagtggaccaaggccggtag

SEQ ID NO: 1824101 - DNA, 25 bp, Homo sapien
tagggttggcactgaagggtccatt

SEQ ID NO: 1824102 - DNA, 25 bp, Homo sapien
tgaagctaggaattcagccaaaata

SEQ ID NO: 1824103 - DNA, 25 bp, Homo sapien
tgagacttccacattaaccgaggca

SEQ ID NO: 1824104 - DNA, 25 bp, Homo sapien
aaaatcaaacctcacgcccagtctt

SEQ ID NO: 1824105 - DNA, 25 bp, Homo sapien
caaatcaggagtgcgtgagacttcc

SEQ ID NO: 1824106 - DNA, 25 bp, Homo sapien
gacaaagcgccgagaatccatggac

SEQ ID NO: 1824107 - DNA, 25 bp, Homo sapien
ttaaatgctcccgtcgttcgcaggg

SEQ ID NO: 1824108 - DNA, 25 bp, Homo sapien
gaaagaagcatatgtttggcccggg

SEQ ID NO: 1824109 - DNA, 25 bp, Homo sapien
gagcaattatgcctccacgctgaag

SEQ ID NO: 1824110 - DNA, 25 bp, Homo sapien
tttaatatagaaaagaatcgttcac

SEQ ID NO: 1824111 - DNA, 25 bp, Homo sapien
cacaaggaaaaatatcccggagcat

SEQ ID NO: 1824112 - DNA, 25 bp, Homo sapien
aaagaatcgttcactgaaattcaca

SEQ ID NO: 1824113 - DNA, 25 bp, Homo sapien
aatatcccggagcatcctaaaaggg

SEQ ID NO: 1824114 - DNA, 25 bp, Homo sapien
gcttttctgaggtatgcgtgggttt

SEQ ID NO: 1824115 - DNA, 25 bp, Homo sapien
taagcactacggaaacatggatgtg

SEQ ID NO: 1824116 - DNA, 25 bp, Homo sapien
tctttcacccatagcactaagcact

SEQ ID NO: 1824117 - DNA, 25 bp, Homo sapien
ttcttcaaatgcacaacttggataa

SEQ ID NO: 1824118 - DNA, 25 bp, Homo sapien
cattcctttagcagtacaaacaatc

SEQ ID NO: 1824119 - DNA, 25 bp, Homo sapien
tgtcattcctttagcagtacaaaca

SEQ ID NO: 1824120 - DNA, 25 bp, Homo sapien
cctttagcagtacaaacaatctttt

SEQ ID NO: 1824121 - DNA, 25 bp, Homo sapien
gtatgtcattcctttagcagtacaa

SEQ ID NO: 1824122 - DNA, 25 bp, Homo sapien
ggttcagctgcttattgcaaggagc

SEQ ID NO: 1824123 - DNA, 25 bp, Homo sapien
tattgcaaggagcaattgccaaggg

SEQ ID NO: 1824124 - DNA, 25 bp, Homo sapien
aaacaatgggttcagctgcttattg

SEQ ID NO: 1824125 - DNA, 25 bp, Homo sapien
ggagagttaaactcaattactgtaa

SEQ ID NO: 1824126 - DNA, 25 bp, Homo sapien
tgccaagaacaaaaatacgcctggg

SEQ ID NO: 1824127 - DNA, 25 bp, Homo sapien
aatactgccaagaacaaaaatacgc

SEQ ID NO: 1824128 - DNA, 25 bp, Homo sapien
actgccaagaacaaaaatacgcctg

SEQ ID NO: 1824129 - DNA, 25 bp, Homo sapien
tactgccaagaacaaaaatacgcct

SEQ ID NO: 1824130 - DNA, 25 bp, Homo sapien
gcaactagaactgcttccaatatgg

SEQ ID NO: 1824131 - DNA, 25 bp, Homo sapien
tctgggcaacaaaggactatgatac

SEQ ID NO: 1824132 - DNA, 25 bp, Homo sapien
ggaaactactgccagcacaactcaa

SEQ ID NO: 1824133 - DNA, 25 bp, Homo sapien
tgaaaatacagaataccaggtggtc

SEQ ID NO: 1824134 - DNA, 25 bp, Homo sapien
cactgattcccttatataactgcga

SEQ ID NO: 1824135 - DNA, 25 bp, Homo sapien
tcaaatgatgcttttaagggaggac

SEQ ID NO: 1824136 - DNA, 25 bp, Homo sapien
ctttaacatgctacaacagggctaa

SEQ ID NO: 1824137 - DNA, 25 bp, Homo sapien
tgcgaatcgtgttgccagagaaagt

SEQ ID NO: 1824138 - DNA, 25 bp, Homo sapien
tgttctgttctcttaggctccacat

SEQ ID NO: 1824139 - DNA, 25 bp, Homo sapien
gttctgttctcttaggctccacatg

SEQ ID NO: 1824140 - DNA, 25 bp, Homo sapien
tctgttctcttaggctccacatgag

SEQ ID NO: 1824141 - DNA, 25 bp, Homo sapien
ctgttctcttaggctccacatgagg

SEQ ID NO: 1824142 - DNA, 25 bp, Homo sapien
aggtcgaggcgggtgcagagtcgga

SEQ ID NO: 1824143 - DNA, 25 bp, Homo sapien
cgggtgcagagtcggagaggctgcc

SEQ ID NO: 1824144 - DNA, 25 bp, Homo sapien
tgtcacccgccggagggtgggcgcg

SEQ ID NO: 1824145 - DNA, 25 bp, Homo sapien
actgacagtcgagagggcagtcccg

SEQ ID NO: 1824146 - DNA, 25 bp, Homo sapien
tgaagtgggtcaagcagctctggat

SEQ ID NO: 1824147 - DNA, 25 bp, Homo sapien
cttttggcgttgttgtccgtgtggc

SEQ ID NO: 1824148 - DNA, 25 bp, Homo sapien
tgctgaggtacattttgtccatggc

SEQ ID NO: 1824149 - DNA, 25 bp, Homo sapien
tcctgagccagcaggtcggtgaact

SEQ ID NO: 1824150 - DNA, 25 bp, Homo sapien
gatcggaatgttgtcggttgagaaa

SEQ ID NO: 1824151 - DNA, 25 bp, Homo sapien
gaaattcagctactgctttggcagg

SEQ ID NO: 1824152 - DNA, 25 bp, Homo sapien
ttcttgtcacttgctcattgggatc

SEQ ID NO: 1824153 - DNA, 25 bp, Homo sapien
cccaaagtccctggctaggtggaca

SEQ ID NO: 1824154 - DNA, 25 bp, Homo sapien
ctctgtaggatctggtggatgcatt

SEQ ID NO: 1824155 - DNA, 25 bp, Homo sapien
taggatctggtggatgcatttatca

SEQ ID NO: 1824156 - DNA, 25 bp, Homo sapien
ccttctctgtaggatctggtggatg

SEQ ID NO: 1824157 - DNA, 25 bp, Homo sapien
tttatcaggaaaaatgaccacttct

SEQ ID NO: 1824158 - DNA, 25 bp, Homo sapien
cctgaaccagttggtttttactgca

SEQ ID NO: 1824159 - DNA, 25 bp, Homo sapien
tcatccaaaccgattaaccaagagg

SEQ ID NO: 1824160 - DNA, 25 bp, Homo sapien
caagaggatttgagggtcactccac

SEQ ID NO: 1824161 - DNA, 25 bp, Homo sapien
ttttctgcaagggaacaactgaggg

SEQ ID NO: 1824162 - DNA, 25 bp, Homo sapien
tcaggacgcaggtcaaagattccca

SEQ ID NO: 1824163 - DNA, 25 bp, Homo sapien
caggatggtcttaaatcaggacgca

SEQ ID NO: 1824164 - DNA, 25 bp, Homo sapien
tggtcacgcatttctcaaacgcaga

SEQ ID NO: 1824165 - DNA, 25 bp, Homo sapien
ggcttccggtggcagttatctagag

SEQ ID NO: 1824166 - DNA, 25 bp, Homo sapien
atgaaactgcccaactgacataaaa

SEQ ID NO: 1824167 - DNA, 25 bp, Homo sapien
ggaggtataggagtacatgcaaatg

SEQ ID NO: 1824168 - DNA, 25 bp, Homo sapien
taaaatacgaccaaacatctggcca

SEQ ID NO: 1824169 - DNA, 25 bp, Homo sapien
tccattcacatctggctatattctc

SEQ ID NO: 1824170 - DNA, 25 bp, Homo sapien
gatgtgagcagggtaacgttggcag

SEQ ID NO: 1824171 - DNA, 25 bp, Homo sapien
gcagatttaatcctattttgtccag

SEQ ID NO: 1824172 - DNA, 25 bp, Homo sapien
cctgcaggcagatttaatcctattt

SEQ ID NO: 1824173 - DNA, 25 bp, Homo sapien
taacgttggcagctttacgtctccc

SEQ ID NO: 1824174 - DNA, 25 bp, Homo sapien
cacgccgccgaagaggttgtccttg

SEQ ID NO: 1824175 - DNA, 25 bp, Homo sapien
ccttgtacttcgaggtggagctgag

SEQ ID NO: 1824176 - DNA, 25 bp, Homo sapien
gcgacccggaactgaacagaagact

SEQ ID NO: 1824177 - DNA, 25 bp, Homo sapien
cagcgacgcgttgagacactcgggt

SEQ ID NO: 1824178 - DNA, 25 bp, Homo sapien
ggagggaattacatttgcaaaccga

SEQ ID NO: 1824179 - DNA, 25 bp, Homo sapien
cttcgccgtcaagggtgctctctag

SEQ ID NO: 1824180 - DNA, 25 bp, Homo sapien
gatgaggtccaggaccacgggttca

SEQ ID NO: 1824181 - DNA, 25 bp, Homo sapien
tgaaattggtgacccctgaggcgct

SEQ ID NO: 1824182 - DNA, 25 bp, Homo sapien
caaagctagcctgttggcattacca

SEQ ID NO: 1824183 - DNA, 25 bp, Homo sapien
taagcattgctgttctgtgcctatc

SEQ ID NO: 1824184 - DNA, 25 bp, Homo sapien
tagcactctgcctgtaaggacatgc

SEQ ID NO: 1824185 - DNA, 25 bp, Homo sapien
ggcattaccaacatactgaaggctg

SEQ ID NO: 1824186 - DNA, 25 bp, Homo sapien
tgttaatacccgggtcttctacatg

SEQ ID NO: 1824187 - DNA, 25 bp, Homo sapien
agtttgatctgggatgttaataccc

SEQ ID NO: 1824188 - DNA, 25 bp, Homo sapien
tcttaattacagtttgatctgggat

SEQ ID NO: 1824189 - DNA, 25 bp, Homo sapien
gatctgggatgttaatacccgggtc

SEQ ID NO: 1824190 - DNA, 25 bp, Homo sapien
tggatgtaagtgtatcatcaaaaca

SEQ ID NO: 1824191 - DNA, 25 bp, Homo sapien
aacaaaaggatacacatggatgtaa

SEQ ID NO: 1824192 - DNA, 25 bp, Homo sapien
ggatacacatggatgtaagtgtatc

SEQ ID NO: 1824193 - DNA, 25 bp, Homo sapien
cacatggatgtaagtgtatcatcaa

SEQ ID NO: 1824194 - DNA, 25 bp, Homo sapien
tagattggcgcctcagcggcttctg

SEQ ID NO: 1824195 - DNA, 25 bp, Homo sapien
aacatctcatcttggcttattggaa

SEQ ID NO: 1824196 - DNA, 25 bp, Homo sapien
aaattaaatcaagtgttggagcacc

SEQ ID NO: 1824197 - DNA, 25 bp, Homo sapien
ctaatcattctcagtcagttcaaca

SEQ ID NO: 1824198 - DNA, 25 bp, Homo sapien
tgttcagaaatgactactgctgcag

SEQ ID NO: 1824199 - DNA, 25 bp, Homo sapien
ttccgggtggatggtactaagttgc

SEQ ID NO: 1824200 - DNA, 25 bp, Homo sapien
tgcctgatcgcaatgattccgggtg

SEQ ID NO: 1824201 - DNA, 25 bp, Homo sapien
tagaccttgtccatacagggaagac

SEQ ID NO: 1824202 - DNA, 25 bp, Homo sapien
cgttgggaacctagctaatgattta

SEQ ID NO: 1824203 - DNA, 25 bp, Homo sapien
ttaatatggagtgtagcaggttctg

SEQ ID NO: 1824204 - DNA, 25 bp, Homo sapien
ggtcaccacttagcacccctagtaa

SEQ ID NO: 1824205 - DNA, 25 bp, Homo sapien
gcattttaatgtccctctgcttgga

SEQ ID NO: 1824206 - DNA, 25 bp, Homo sapien
gccagactcagcgatggaagtagat

SEQ ID NO: 1824207 - DNA, 25 bp, Homo sapien
gggcccaccgactgtatgttccagg

SEQ ID NO: 1824208 - DNA, 25 bp, Homo sapien
tagaactcgcaactactttgtgtgg

SEQ ID NO: 1824209 - DNA, 25 bp, Homo sapien
gcaggcattgtttgagggagctcca

SEQ ID NO: 1824210 - DNA, 25 bp, Homo sapien
aggaggtcctcgtgccgcctgtagt

SEQ ID NO: 1824211 - DNA, 25 bp, Homo sapien
gcctgtagtccctgcgaggatccag

SEQ ID NO: 1824212 - DNA, 25 bp, Homo sapien
ggacctcctcgatggcgtgaggtaa

SEQ ID NO: 1824213 - DNA, 25 bp, Homo sapien
gatcgagaggtctccgagtcctgag

SEQ ID NO: 1824214 - DNA, 25 bp, Homo sapien
acgtgggagtaaggatcttgcgact

SEQ ID NO: 1824215 - DNA, 25 bp, Homo sapien
gcggcggggcgctcgtgtagggaga

SEQ ID NO: 1824216 - DNA, 25 bp, Homo sapien
cgactgggggtagataggctggtag

SEQ ID NO: 1824217 - DNA, 25 bp, Homo sapien
cgctcgtgtagggagattgacctac

SEQ ID NO: 1824218 - DNA, 25 bp, Homo sapien
caaccgtgccgtcccgttgctggtg

SEQ ID NO: 1824219 - DNA, 25 bp, Homo sapien
tcccgttgctggtgccgtcgtgacg

SEQ ID NO: 1824220 - DNA, 25 bp, Homo sapien
gtgccgtcccgttgctggtgccgtc

SEQ ID NO: 1824221 - DNA, 25 bp, Homo sapien
ctggggcaaccgtgccgtcccgttg

SEQ ID NO: 1824222 - DNA, 25 bp, Homo sapien
ccacacaaaatccacttgacaagtc

SEQ ID NO: 1824223 - DNA, 25 bp, Homo sapien
gtaaagaacaaggaatcaggcgtcg

SEQ ID NO: 1824224 - DNA, 25 bp, Homo sapien
ggaatcaggcgtcgagctacaacta

SEQ ID NO: 1824225 - DNA, 25 bp, Homo sapien
gcgtcgagctacaactatccacaca

SEQ ID NO: 1824226 - DNA, 25 bp, Homo sapien
ggccgccgggaaaaaatcagctcta

SEQ ID NO: 1824227 - DNA, 25 bp, Homo sapien
cgacagagtcgatttatggtttgga

SEQ ID NO: 1824228 - DNA, 25 bp, Homo sapien
gcttcctctgttaggagcctttttc

SEQ ID NO: 1824229 - DNA, 25 bp, Homo sapien
agaaggttttaactgcaggatcggg

SEQ ID NO: 1824230 - DNA, 25 bp, Homo sapien
gggtctgtctttttcgcttcctctg

SEQ ID NO: 1824231 - DNA, 25 bp, Homo sapien
cagagaccgcgaaccctcggcggtt

SEQ ID NO: 1824232 - DNA, 25 bp, Homo sapien
gtagggggcacaccgcgctgcactt

SEQ ID NO: 1824233 - DNA, 25 bp, Homo sapien
cgaagagagttgattccagagaccg

SEQ ID NO: 1824234 - DNA, 25 bp, Homo sapien
ttcccttgcaaaacaagcgaagaga

SEQ ID NO: 1824235 - DNA, 25 bp, Homo sapien
tggctgaaaaactgtgaactaacat

SEQ ID NO: 1824236 - DNA, 25 bp, Homo sapien
catggctgaaaaactgtgaactaac

SEQ ID NO: 1824237 - DNA, 25 bp, Homo sapien
atggctgaaaaactgtgaactaaca

SEQ ID NO: 1824238 - DNA, 25 bp, Homo sapien
gagcttctaataaccgcgctgggca

SEQ ID NO: 1824239 - DNA, 25 bp, Homo sapien
cattgacgggagtctcagtgtagca

SEQ ID NO: 1824240 - DNA, 25 bp, Homo sapien
gaatgcctggaaatcgagcgtgaag

SEQ ID NO: 1824241 - DNA, 25 bp, Homo sapien
tgccgcgactggttatgattcaaag

SEQ ID NO: 1824242 - DNA, 25 bp, Homo sapien
ggaagcgagcgaggacaatcagacc

SEQ ID NO: 1824243 - DNA, 25 bp, Homo sapien
ggacaatcagacctaaaaggctggg

SEQ ID NO: 1824244 - DNA, 25 bp, Homo sapien
gcgagcgaggacaatcagacctaaa

SEQ ID NO: 1824245 - DNA, 25 bp, Homo sapien
gcgaggacaatcagacctaaaaggc

SEQ ID NO: 1824246 - DNA, 25 bp, Homo sapien
cgtgcgtagcgggtaggagctgctt

SEQ ID NO: 1824247 - DNA, 25 bp, Homo sapien
actcgggactcggctgcccgctgct

SEQ ID NO: 1824248 - DNA, 25 bp, Homo sapien
ggagctgcttgggaccgcgtccggg

SEQ ID NO: 1824249 - DNA, 25 bp, Homo sapien
ggctcctccatgacccggcgccctg

SEQ ID NO: 1824250 - DNA, 25 bp, Homo sapien
ctcggacaggggcaccgtgcgctcc

SEQ ID NO: 1824251 - DNA, 25 bp, Homo sapien
ggcctcctcttgagctttcctcgga

SEQ ID NO: 1824252 - DNA, 25 bp, Homo sapien
tccccggccaccgtcgctctgccct

SEQ ID NO: 1824253 - DNA, 25 bp, Homo sapien
ggccaccgtcgctctgccctcggct

SEQ ID NO: 1824254 - DNA, 25 bp, Homo sapien
tccggatcgggagccgggatgcggg

SEQ ID NO: 1824255 - DNA, 25 bp, Homo sapien
ggattccggatcgggagccgggatg

SEQ ID NO: 1824256 - DNA, 25 bp, Homo sapien
cgggatgcgggccggggcgcgcaca

SEQ ID NO: 1824257 - DNA, 25 bp, Homo sapien
attccggatcgggagccgggatgcg

SEQ ID NO: 1824258 - DNA, 25 bp, Homo sapien
aaacaaagcgactggtctgacgtgg

SEQ ID NO: 1824259 - DNA, 25 bp, Homo sapien
gcgcccctcctctagcgcgacagga

SEQ ID NO: 1824260 - DNA, 25 bp, Homo sapien
gaagagccagtacccgtgggatgtc

SEQ ID NO: 1824261 - DNA, 25 bp, Homo sapien
cccagcctcgaaaacaaagcgactg

SEQ ID NO: 1824262 - DNA, 25 bp, Homo sapien
tgtgaccgcacggatgatcgagccg

SEQ ID NO: 1824263 - DNA, 25 bp, Homo sapien
cgtttcgcagctggttgcaaggaga

SEQ ID NO: 1824264 - DNA, 25 bp, Homo sapien
ccgcgtttcgcagctggttgcaagg

SEQ ID NO: 1824265 - DNA, 25 bp, Homo sapien
agagggagggtcaagctcggagcct

SEQ ID NO: 1824266 - DNA, 25 bp, Homo sapien
gcagtcctcgtacttgatattatcc

SEQ ID NO: 1824267 - DNA, 25 bp, Homo sapien
ttgatattatccgtcaatttccaaa

SEQ ID NO: 1824268 - DNA, 25 bp, Homo sapien
tcgcagtcctcgtacttgatattat

SEQ ID NO: 1824269 - DNA, 25 bp, Homo sapien
gatattatccgtcaatttccaaagc

SEQ ID NO: 1824270 - DNA, 25 bp, Homo sapien
gtgaacggatatgcccctctcggtc

SEQ ID NO: 1824271 - DNA, 25 bp, Homo sapien
tctcgcacccaagtggagctactct

SEQ ID NO: 1824272 - DNA, 25 bp, Homo sapien
ctctcggtctcgcacccaagtggag

SEQ ID NO: 1824273 - DNA, 25 bp, Homo sapien
ggatcggcgtgaacggatatgcccc

SEQ ID NO: 1824274 - DNA, 25 bp, Homo sapien
tggctgccggcggtgagcgcaggag

SEQ ID NO: 1824275 - DNA, 25 bp, Homo sapien
aaagtgctggctgccggcggtgagc

SEQ ID NO: 1824276 - DNA, 25 bp, Homo sapien
ctgggtgagcgcaaagtgctggctg

SEQ ID NO: 1824277 - DNA, 25 bp, Homo sapien
tgagcgcaaagtgctggctgccggc

SEQ ID NO: 1824278 - DNA, 25 bp, Homo sapien
gcagcgccttgggagttttattggc

SEQ ID NO: 1824279 - DNA, 25 bp, Homo sapien
tgcaaagcccggcactgctcaaggt

SEQ ID NO: 1824280 - DNA, 25 bp, Homo sapien
accacgatccgagctgcccttttgg

SEQ ID NO: 1824281 - DNA, 25 bp, Homo sapien
tggagattctgccaagcggctccgg

SEQ ID NO: 1824282 - DNA, 25 bp, Homo sapien
gataccgtctcgtgcgtgcatcaaa

SEQ ID NO: 1824283 - DNA, 25 bp, Homo sapien
tgtgcctgcaagtctagataccgtc

SEQ ID NO: 1824284 - DNA, 25 bp, Homo sapien
tgtgtgaagctagggccaactgaca

SEQ ID NO: 1824285 - DNA, 25 bp, Homo sapien
tttcctgggtgcaacgtggacacga

SEQ ID NO: 1824286 - DNA, 25 bp, Homo sapien
aattcctcggctgaaccgggctgga

SEQ ID NO: 1824287 - DNA, 25 bp, Homo sapien
cgccctccgtccagaaaatggtcga

SEQ ID NO: 1824288 - DNA, 25 bp, Homo sapien
gtcgactttccagggctagaccctg

SEQ ID NO: 1824289 - DNA, 25 bp, Homo sapien
tgaactgagcacaattcctcggctg

SEQ ID NO: 1824290 - DNA, 25 bp, Homo sapien
aggccaaaccctaggcctgagagca

SEQ ID NO: 1824291 - DNA, 25 bp, Homo sapien
ggcctgagagcatgggtttttacac

SEQ ID NO: 1824292 - DNA, 25 bp, Homo sapien
ctccgtagacgtcgccgcggtgtgc

SEQ ID NO: 1824293 - DNA, 25 bp, Homo sapien
catgggtttttacactccgtagacg

SEQ ID NO: 1824294 - DNA, 25 bp, Homo sapien
gggctgctaaactgttgttgtattc

SEQ ID NO: 1824295 - DNA, 25 bp, Homo sapien
gtgcagattgggacctgccggctct

SEQ ID NO: 1824296 - DNA, 25 bp, Homo sapien
cgccgagggcgccattgaggtgcag

SEQ ID NO: 1824297 - DNA, 25 bp, Homo sapien
cggtgtaggcgctgatgaaaggccc

SEQ ID NO: 1824298 - DNA, 25 bp, Homo sapien
cgctctgtttcccgaagggaaagtg

SEQ ID NO: 1824299 - DNA, 25 bp, Homo sapien
gaaaacagggcctcgcggttctgat

SEQ ID NO: 1824300 - DNA, 25 bp, Homo sapien
cagagccttttaccgccaccatcct

SEQ ID NO: 1824301 - DNA, 25 bp, Homo sapien
gatgaaatcggcgacaggcagagcc

SEQ ID NO: 1824302 - DNA, 25 bp, Homo sapien
tgtatctcctacagaaacacgctgc

SEQ ID NO: 1824303 - DNA, 25 bp, Homo sapien
tgctagctaaacttcgggcaaactt

SEQ ID NO: 1824304 - DNA, 25 bp, Homo sapien
gacaggtgcaccagaacctgtccaa

SEQ ID NO: 1824305 - DNA, 25 bp, Homo sapien
tcatccgtagcccaggcggcaaaaa

SEQ ID NO: 1824306 - DNA, 25 bp, Homo sapien
gtcccccattttggcaagtatggac

SEQ ID NO: 1824307 - DNA, 25 bp, Homo sapien
ctgccagtcccccattttggcaagt

SEQ ID NO: 1824308 - DNA, 25 bp, Homo sapien
cccccattttggcaagtatggacat

SEQ ID NO: 1824309 - DNA, 25 bp, Homo sapien
ccagtcccccattttggcaagtatg

SEQ ID NO: 1824310 - DNA, 25 bp, Homo sapien
gaatcgcttaggcaaatcctccttt

SEQ ID NO: 1824311 - DNA, 25 bp, Homo sapien
ggccagctccctggaatcgcttagg

SEQ ID NO: 1824312 - DNA, 25 bp, Homo sapien
gctccctggaatcgcttaggcaaat

SEQ ID NO: 1824313 - DNA, 25 bp, Homo sapien
ggctctgcgctcctggcgactggtc

SEQ ID NO: 1824314 - DNA, 25 bp, Homo sapien
gaaccgaagctgactgactgctgga

SEQ ID NO: 1824315 - DNA, 25 bp, Homo sapien
tgtgttttcgcactccagtggtggg

SEQ ID NO: 1824316 - DNA, 25 bp, Homo sapien
aagagctgggttgctacctgccgac

SEQ ID NO: 1824317 - DNA, 25 bp, Homo sapien
gaagtgatggatttatagccgcggc

SEQ ID NO: 1824318 - DNA, 25 bp, Homo sapien
aagggtgtgcattagggatgtccca

SEQ ID NO: 1824319 - DNA, 25 bp, Homo sapien
cactggtgcggaaccactatcggaa

SEQ ID NO: 1824320 - DNA, 25 bp, Homo sapien
gaagctaaagatgccctggagactg

SEQ ID NO: 1824321 - DNA, 25 bp, Homo sapien
tatcggaacgagtttgcacttctgt

SEQ ID NO: 1824322 - DNA, 25 bp, Homo sapien
ttcctgtatgtctgatgccagtgga

SEQ ID NO: 1824323 - DNA, 25 bp, Homo sapien
ggtttcatccttcataattcctgta

SEQ ID NO: 1824324 - DNA, 25 bp, Homo sapien
ggagagtcaatgttttgctgtgtca

SEQ ID NO: 1824325 - DNA, 25 bp, Homo sapien
gggagatggtttcatccttcataat

SEQ ID NO: 1824326 - DNA, 25 bp, Homo sapien
ggactcagccagttcccgggtggcc

SEQ ID NO: 1824327 - DNA, 25 bp, Homo sapien
gccgcccctttgctctgcggactca

SEQ ID NO: 1824328 - DNA, 25 bp, Homo sapien
tgagcaaacaggtgggcgtcgcttc

SEQ ID NO: 1824329 - DNA, 25 bp, Homo sapien
tcgcagcgcgctccagctttcggcg

SEQ ID NO: 1824330 - DNA, 25 bp, Homo sapien
gcctggctcaaactgcccaaagaga

SEQ ID NO: 1824331 - DNA, 25 bp, Homo sapien
ccactgccaacactaggtaggaaaa

SEQ ID NO: 1824332 - DNA, 25 bp, Homo sapien
cagttctggtgtgttccactgccaa

SEQ ID NO: 1824333 - DNA, 25 bp, Homo sapien
tgtgattaaatagcggcctggctca

SEQ ID NO: 1824334 - DNA, 25 bp, Homo sapien
caacaggtgatagtaggaaagcagg

SEQ ID NO: 1824335 - DNA, 25 bp, Homo sapien
aaaaaatactagtgccaggactcca

SEQ ID NO: 1824336 - DNA, 25 bp, Homo sapien
tatctttcaatgtattagtgaagct

SEQ ID NO: 1824337 - DNA, 25 bp, Homo sapien
gaagcttctacggtattgttctgtc

SEQ ID NO: 1824338 - DNA, 25 bp, Homo sapien
agtggaaacattaaatcaaggtggg

SEQ ID NO: 1824339 - DNA, 25 bp, Homo sapien
tattttattgagagttattagggag

SEQ ID NO: 1824340 - DNA, 25 bp, Homo sapien
tgagagttattagggagtaataaga

SEQ ID NO: 1824341 - DNA, 25 bp, Homo sapien
taagaaacttgacaataagagtgga

SEQ ID NO: 1824342 - DNA, 25 bp, Homo sapien
aatggattatgaaaacagctaaagg

SEQ ID NO: 1824343 - DNA, 25 bp, Homo sapien
tggaaatggattatgaaaacagcta

SEQ ID NO: 1824344 - DNA, 25 bp, Homo sapien
caatggaaatggattatgaaaacag

SEQ ID NO: 1824345 - DNA, 25 bp, Homo sapien
tggattatgaaaacagctaaaggaa

SEQ ID NO: 1824346 - DNA, 25 bp, Homo sapien
cacatatgtagacagtagaggctag

SEQ ID NO: 1824347 - DNA, 25 bp, Homo sapien
tctgaaatccccaatccgatgttga

SEQ ID NO: 1824348 - DNA, 25 bp, Homo sapien
ccgatgttgaagcacatggctcaga

SEQ ID NO: 1824349 - DNA, 25 bp, Homo sapien
tacagcattcgcaggttaggtacgc

SEQ ID NO: 1824350 - DNA, 25 bp, Homo sapien
tagctctaatatttggtcactctca

SEQ ID NO: 1824351 - DNA, 25 bp, Homo sapien
gacgggacgagtagccagattttca

SEQ ID NO: 1824352 - DNA, 25 bp, Homo sapien
aagtcgtcactttggaggtgtggcc

SEQ ID NO: 1824353 - DNA, 25 bp, Homo sapien
cagcccagtgttggtagaaagtacc

SEQ ID NO: 1824354 - DNA, 25 bp, Homo sapien
acttgcttcccaatgtctgagtggc

SEQ ID NO: 1824355 - DNA, 25 bp, Homo sapien
tacctcggttctctgtcatcttgac

SEQ ID NO: 1824356 - DNA, 25 bp, Homo sapien
tgcttcccaatgtctgagtggctct

SEQ ID NO: 1824357 - DNA, 25 bp, Homo sapien
ctgtcatcttgacaaacttgcttcc

SEQ ID NO: 1824358 - DNA, 25 bp, Homo sapien
aaattctcacatcttccgtgtgcca

SEQ ID NO: 1824359 - DNA, 25 bp, Homo sapien
ccatgcattgttacaggttttgagc

SEQ ID NO: 1824360 - DNA, 25 bp, Homo sapien
tcctttgtgcaatggtttacatcta

SEQ ID NO: 1824361 - DNA, 25 bp, Homo sapien
tagtcattatccttaggtgaggcaa

SEQ ID NO: 1824362 - DNA, 25 bp, Homo sapien
tgaacagctctgtcaaacgctgctg

SEQ ID NO: 1824363 - DNA, 25 bp, Homo sapien
ctgtcaaacgctgctgctgggtgga

SEQ ID NO: 1824364 - DNA, 25 bp, Homo sapien
aagtgaacagctctgtcaaacgctg

SEQ ID NO: 1824365 - DNA, 25 bp, Homo sapien
gaagaaggaggggaactgctgagca

SEQ ID NO: 1824366 - DNA, 25 bp, Homo sapien
gttttcgccatgtagaggtgagtgg

SEQ ID NO: 1824367 - DNA, 25 bp, Homo sapien
tttcgccatgtagaggtgagtggat

SEQ ID NO: 1824368 - DNA, 25 bp, Homo sapien
gagtgaacccttggttttcgccatg

SEQ ID NO: 1824369 - DNA, 25 bp, Homo sapien
gtgaacccttggttttcgccatgta

SEQ ID NO: 1824370 - DNA, 25 bp, Homo sapien
atttgctaggatggccttcacaaaa

SEQ ID NO: 1824371 - DNA, 25 bp, Homo sapien
cagatggaatgattcctacctcagg

SEQ ID NO: 1824372 - DNA, 25 bp, Homo sapien
cggtctcattagtaacacagatgga

SEQ ID NO: 1824373 - DNA, 25 bp, Homo sapien
tcaggctggtgagctcttaaagaga

SEQ ID NO: 1824374 - DNA, 25 bp, Homo sapien
tccatgccgagagagaggactctct

SEQ ID NO: 1824375 - DNA, 25 bp, Homo sapien
ctttcttcctagctcgtagacagcc

SEQ ID NO: 1824376 - DNA, 25 bp, Homo sapien
tttcttcctagctcgtagacagcca

SEQ ID NO: 1824377 - DNA, 25 bp, Homo sapien
ttttgtgtccatgccgagagagagg

SEQ ID NO: 1824378 - DNA, 25 bp, Homo sapien
taatccgtgaaccaagagggttgct

SEQ ID NO: 1824379 - DNA, 25 bp, Homo sapien
gagggttgctttcggaagcctacta

SEQ ID NO: 1824380 - DNA, 25 bp, Homo sapien
aagtttcagatctgaagctagcaaa

SEQ ID NO: 1824381 - DNA, 25 bp, Homo sapien
tataagttatttggcgttctggctc

SEQ ID NO: 1824382 - DNA, 25 bp, Homo sapien
aatctaagggtcaggtctcctgacg

SEQ ID NO: 1824383 - DNA, 25 bp, Homo sapien
taggtaagcagtaacaaatggcaag

SEQ ID NO: 1824384 - DNA, 25 bp, Homo sapien
tccttggcacgcaatatgaccagtg

SEQ ID NO: 1824385 - DNA, 25 bp, Homo sapien
tagcagcagatttgtattagatgga

SEQ ID NO: 1824386 - DNA, 25 bp, Homo sapien
gtacttagtagaatgccacctacag

SEQ ID NO: 1824387 - DNA, 25 bp, Homo sapien
catgtcatatgcaggcaggtgaatg

SEQ ID NO: 1824388 - DNA, 25 bp, Homo sapien
gtgtgctccttcaacgacaatctga

SEQ ID NO: 1824389 - DNA, 25 bp, Homo sapien
actgctgatgtgaaccactcgctca

SEQ ID NO: 1824390 - DNA, 25 bp, Homo sapien
tattctggcggagatttgaaggcag

SEQ ID NO: 1824391 - DNA, 25 bp, Homo sapien
gagggcaggactgcctttttctggt

SEQ ID NO: 1824392 - DNA, 25 bp, Homo sapien
ttgccggctggcttgggttctattc

SEQ ID NO: 1824393 - DNA, 25 bp, Homo sapien
tttgctctgcgacattgcacctggg

SEQ ID NO: 1824394 - DNA, 25 bp, Homo sapien
ggatttcatgtgtccactcaggcat

SEQ ID NO: 1824395 - DNA, 25 bp, Homo sapien
agcttacctcctggcttatccagtg

SEQ ID NO: 1824396 - DNA, 25 bp, Homo sapien
gcagcttacctcctggcttatccag

SEQ ID NO: 1824397 - DNA, 25 bp, Homo sapien
cagcttacctcctggcttatccagt

SEQ ID NO: 1824398 - DNA, 25 bp, Homo sapien
atctgggtcctggtaatactccttc

SEQ ID NO: 1824399 - DNA, 25 bp, Homo sapien
tctgggtcctggtaatactccttcc

SEQ ID NO: 1824400 - DNA, 25 bp, Homo sapien
gcacaactaattcaatgtttgaact

SEQ ID NO: 1824401 - DNA, 25 bp, Homo sapien
tgggtcctggtaatactccttccat

SEQ ID NO: 1824402 - DNA, 25 bp, Homo sapien
gatccagagtaacagtgcctaggac

SEQ ID NO: 1824403 - DNA, 25 bp, Homo sapien
ctgacatgggatccagagtaacagt

SEQ ID NO: 1824404 - DNA, 25 bp, Homo sapien
ctaagggtcactgagtacccgattt

SEQ ID NO: 1824405 - DNA, 25 bp, Homo sapien
ctgagtacccgatttactgacatgg

SEQ ID NO: 1824406 - DNA, 25 bp, Homo sapien
caggcactgtccttcaacatgtgga

SEQ ID NO: 1824407 - DNA, 25 bp, Homo sapien
gtactttgccctttatatggttcca

SEQ ID NO: 1824408 - DNA, 25 bp, Homo sapien
gggttgccactatgcctacagcttg

SEQ ID NO: 1824409 - DNA, 25 bp, Homo sapien
tgatgggagttgagatgaacccctg

SEQ ID NO: 1824410 - DNA, 25 bp, Homo sapien
ctgctgtggcgtagtgactttaatc

SEQ ID NO: 1824411 - DNA, 25 bp, Homo sapien
gctgtggcgtagtgactttaatcta

SEQ ID NO: 1824412 - DNA, 25 bp, Homo sapien
tgctgtggcgtagtgactttaatct

SEQ ID NO: 1824413 - DNA, 25 bp, Homo sapien
gaatcctacttccagtctgtggtct

SEQ ID NO: 1824414 - DNA, 25 bp, Homo sapien
tcctacttccagtctgtggtctcat

SEQ ID NO: 1824415 - DNA, 25 bp, Homo sapien
tgacccctcagtgccagctgtgtga

SEQ ID NO: 1824416 - DNA, 25 bp, Homo sapien
agtgccagctgtgtgactgtttcct

SEQ ID NO: 1824417 - DNA, 25 bp, Homo sapien
aaatagtccttgcaaacccatgctt

SEQ ID NO: 1824418 - DNA, 25 bp, Homo sapien
ccatgctttgctagtgcaggaaaga

SEQ ID NO: 1824419 - DNA, 25 bp, Homo sapien
ccagccttacgctcttgagatagga

SEQ ID NO: 1824420 - DNA, 25 bp, Homo sapien
tgagctctcacagtccagccttacg

SEQ ID NO: 1824421 - DNA, 25 bp, Homo sapien
gatcccggagcattaggaccttggt

SEQ ID NO: 1824422 - DNA, 25 bp, Homo sapien
gagcattaggaccttggtttcctac

SEQ ID NO: 1824423 - DNA, 25 bp, Homo sapien
acattgatcccggagcattaggacc

SEQ ID NO: 1824424 - DNA, 25 bp, Homo sapien
cattaggaccttggtttcctactgc

SEQ ID NO: 1824425 - DNA, 25 bp, Homo sapien
tccgcgggactcagtggtgcccgct

SEQ ID NO: 1824426 - DNA, 25 bp, Homo sapien
gccgactccgacgtggaaaaagcat

SEQ ID NO: 1824427 - DNA, 25 bp, Homo sapien
aaagttccgcagacatttgcgtcag

SEQ ID NO: 1824428 - DNA, 25 bp, Homo sapien
taaagcaaagagactgggcctggct

SEQ ID NO: 1824429 - DNA, 25 bp, Homo sapien
gaacgcaaaaaggtggcgtcaagga

SEQ ID NO: 1824430 - DNA, 25 bp, Homo sapien
caaggattacggtcccccttgcagt

SEQ ID NO: 1824431 - DNA, 25 bp, Homo sapien
tcaaggattacggtcccccttgcag

SEQ ID NO: 1824432 - DNA, 25 bp, Homo sapien
caaaaaggtggcgtcaaggattacg

SEQ ID NO: 1824433 - DNA, 25 bp, Homo sapien
aggcgacaaaggtactgcggctccg

SEQ ID NO: 1824434 - DNA, 25 bp, Homo sapien
gacaaaggtactgcggctccgaacc

SEQ ID NO: 1824435 - DNA, 25 bp, Homo sapien
gcgacaaaggtactgcggctccgaa

SEQ ID NO: 1824436 - DNA, 25 bp, Homo sapien
gaaggcgacaaaggtactgcggctc

SEQ ID NO: 1824437 - DNA, 25 bp, Homo sapien
acagcagttggtccataacctgccc

SEQ ID NO: 1824438 - DNA, 25 bp, Homo sapien
agttggtccataacctgcccccaag

SEQ ID NO: 1824439 - DNA, 25 bp, Homo sapien
cagcagttggtccataacctgcccc

SEQ ID NO: 1824440 - DNA, 25 bp, Homo sapien
gcagttggtccataacctgccccca

SEQ ID NO: 1824441 - DNA, 25 bp, Homo sapien
tgatgaatgagatgacctctaagcc

SEQ ID NO: 1824442 - DNA, 25 bp, Homo sapien
tcaaaggagtactgaatacgcctgt

SEQ ID NO: 1824443 - DNA, 25 bp, Homo sapien
tacgcctgttggttttggtcacaaa

SEQ ID NO: 1824444 - DNA, 25 bp, Homo sapien
tcttgtgtccgacccgctgtgatca

SEQ ID NO: 1824445 - DNA, 25 bp, Homo sapien
gctatgatggcgtgaaaattctccc

SEQ ID NO: 1824446 - DNA, 25 bp, Homo sapien
tgcgcctcgaatgccacgttgaata

SEQ ID NO: 1824447 - DNA, 25 bp, Homo sapien
gctgctcccagtcaggtgaggaata

SEQ ID NO: 1824448 - DNA, 25 bp, Homo sapien
gagacatgtccttcccttcgagctg

SEQ ID NO: 1824449 - DNA, 25 bp, Homo sapien
caagggacatccgtagatacagagg

SEQ ID NO: 1824450 - DNA, 25 bp, Homo sapien
caatcgctgtcttgatgtagtgcaa

SEQ ID NO: 1824451 - DNA, 25 bp, Homo sapien
caagcacagtggtatacaagggaca

SEQ ID NO: 1824452 - DNA, 25 bp, Homo sapien
aacattttaagcttcggtggtcaga

SEQ ID NO: 1824453 - DNA, 25 bp, Homo sapien
tgggtgctgtccacgtaaatggtga

SEQ ID NO: 1824454 - DNA, 25 bp, Homo sapien
tccacatgggaaaaacaccctgagc

SEQ ID NO: 1824455 - DNA, 25 bp, Homo sapien
tgtggttgacctagacagaggtgcc

SEQ ID NO: 1824456 - DNA, 25 bp, Homo sapien
gtaaagagaccccactatcgaggag

SEQ ID NO: 1824457 - DNA, 25 bp, Homo sapien
tcatgtggatcagaaggccccagtc

SEQ ID NO: 1824458 - DNA, 25 bp, Homo sapien
taacctgccagcgatacttgatccg

SEQ ID NO: 1824459 - DNA, 25 bp, Homo sapien
gaaagactcttgagggccatctaca

SEQ ID NO: 1824460 - DNA, 25 bp, Homo sapien
tgtccaaagacgaagccgagttccc

SEQ ID NO: 1824461 - DNA, 25 bp, Homo sapien
cttaaacaggcttactgtgttcact

SEQ ID NO: 1824462 - DNA, 25 bp, Homo sapien
acaggcttactgtgttcactgctgg

SEQ ID NO: 1824463 - DNA, 25 bp, Homo sapien
gcttactgtgttcactgctggacgc

SEQ ID NO: 1824464 - DNA, 25 bp, Homo sapien
ttactgtgttcactgctggacgcct

SEQ ID NO: 1824465 - DNA, 25 bp, Homo sapien
aacgggcagcttcctcaatggtgag

SEQ ID NO: 1824466 - DNA, 25 bp, Homo sapien
tcagagtctgtgatcctaatcaggg

SEQ ID NO: 1824467 - DNA, 25 bp, Homo sapien
tgaggaaacctcaaggattggaccg

SEQ ID NO: 1824468 - DNA, 25 bp, Homo sapien
gattggaccggatggcctccgagtc

SEQ ID NO: 1824469 - DNA, 25 bp, Homo sapien
gaagagaaatcgtctgcatgtctaa

SEQ ID NO: 1824470 - DNA, 25 bp, Homo sapien
tggaagagaaatcgtctgcatgtct

SEQ ID NO: 1824471 - DNA, 25 bp, Homo sapien
tttgcatgaggaacggagaaatgga

SEQ ID NO: 1824472 - DNA, 25 bp, Homo sapien
tgggcttccaatatcactttgcatg

SEQ ID NO: 1824473 - DNA, 25 bp, Homo sapien
tacaacagatcgacagagttacagc

SEQ ID NO: 1824474 - DNA, 25 bp, Homo sapien
gccccagttttaggcaccataaaga

SEQ ID NO: 1824475 - DNA, 25 bp, Homo sapien
taccgtccaagtcactgatagaatc

SEQ ID NO: 1824476 - DNA, 25 bp, Homo sapien
tatccaacaggtttctaccgtccaa

SEQ ID NO: 1824477 - DNA, 25 bp, Homo sapien
cagctgagcctctcaacgcgacttt

SEQ ID NO: 1824478 - DNA, 25 bp, Homo sapien
tcaacgcgactttaacaaactctct

SEQ ID NO: 1824479 - DNA, 25 bp, Homo sapien
gcctctcaacgcgactttaacaaac

SEQ ID NO: 1824480 - DNA, 25 bp, Homo sapien
tctctctgagccagtcttctcagtg

SEQ ID NO: 1824481 - DNA, 25 bp, Homo sapien
ctggctctcataaagtgtgctactc

SEQ ID NO: 1824482 - DNA, 25 bp, Homo sapien
tgatgccatgaattcgtagggaaga

SEQ ID NO: 1824483 - DNA, 25 bp, Homo sapien
gatgccatgaattcgtagggaagag

SEQ ID NO: 1824484 - DNA, 25 bp, Homo sapien
ccactggctctcataaagtgtgcta

SEQ ID NO: 1824485 - DNA, 25 bp, Homo sapien
tcgtttttcttcaagcgtttcagga

SEQ ID NO: 1824486 - DNA, 25 bp, Homo sapien
atcgtttttcttcaagcgtttcagg

SEQ ID NO: 1824487 - DNA, 25 bp, Homo sapien
gcttagagaacatacattgggtgcc

SEQ ID NO: 1824488 - DNA, 25 bp, Homo sapien
catggtaacacttgggggtgttcct

SEQ ID NO: 1824489 - DNA, 25 bp, Homo sapien
gcctgcaatgtcacctttcttatag

SEQ ID NO: 1824490 - DNA, 25 bp, Homo sapien
cccattcccttgatgcctgcaatgt

SEQ ID NO: 1824491 - DNA, 25 bp, Homo sapien
ggcatcacatgctagtctcagtctg

SEQ ID NO: 1824492 - DNA, 25 bp, Homo sapien
gaagttaatagctttgcctgcccaa

SEQ ID NO: 1824493 - DNA, 25 bp, Homo sapien
gcctgcccaattatttactggaagg

SEQ ID NO: 1824494 - DNA, 25 bp, Homo sapien
gaaataatgccctggttggaagtta

SEQ ID NO: 1824495 - DNA, 25 bp, Homo sapien
tatgccaaatgcatcctggactgga

SEQ ID NO: 1824496 - DNA, 25 bp, Homo sapien
gccacggtgaggctctcgttccatg

SEQ ID NO: 1824497 - DNA, 25 bp, Homo sapien
tagcaggaaggtagctgtggaatcc

SEQ ID NO: 1824498 - DNA, 25 bp, Homo sapien
taggccactgcctgttggtgttagc

SEQ ID NO: 1824499 - DNA, 25 bp, Homo sapien
gaagtgatgtcatgttggcaccgca

SEQ ID NO: 1824500 - DNA, 25 bp, Homo sapien
tacactagcaagaagggttcccctc

SEQ ID NO: 1824501 - DNA, 25 bp, Homo sapien
gagtttttatcagtcctggcacaca

SEQ ID NO: 1824502 - DNA, 25 bp, Homo sapien
tgttcagaggcgaaagccatcagga

SEQ ID NO: 1824503 - DNA, 25 bp, Homo sapien
cattggctatagatgggactgtgtc

SEQ ID NO: 1824504 - DNA, 25 bp, Homo sapien
cactaaggtgaccagagtgggctcc

SEQ ID NO: 1824505 - DNA, 25 bp, Homo sapien
tcatgtgttggagccttaaccctca

SEQ ID NO: 1824506 - DNA, 25 bp, Homo sapien
tgagtccccttacaagacctctggc

SEQ ID NO: 1824507 - DNA, 25 bp, Homo sapien
atatacagtgggcatactaaaaaca

SEQ ID NO: 1824508 - DNA, 25 bp, Homo sapien
cttgctgttttagttcgacctttct

SEQ ID NO: 1824509 - DNA, 25 bp, Homo sapien
cagtgggcatactaaaaacagatat

SEQ ID NO: 1824510 - DNA, 25 bp, Homo sapien
tgggagtctcacgatattttccagg

SEQ ID NO: 1824511 - DNA, 25 bp, Homo sapien
gcacttgtttgctaatggaccctga

SEQ ID NO: 1824512 - DNA, 25 bp, Homo sapien
tcataccctaggctttttgtcttca

SEQ ID NO: 1824513 - DNA, 25 bp, Homo sapien
cattggtctcgatgttgtttgattc

SEQ ID NO: 1824514 - DNA, 25 bp, Homo sapien
caaatagcccctgtgtctaatttct

SEQ ID NO: 1824515 - DNA, 25 bp, Homo sapien
ctgaccaaagtgttgtctgagagct

SEQ ID NO: 1824516 - DNA, 25 bp, Homo sapien
ctggtcagaggtctgggcaatctct

SEQ ID NO: 1824517 - DNA, 25 bp, Homo sapien
agctggtcagaggtctgggcaatct

SEQ ID NO: 1824518 - DNA, 25 bp, Homo sapien
tttttagcagagtccgagactgacc

SEQ ID NO: 1824519 - DNA, 25 bp, Homo sapien
attgcggagtttaatgaacaccttg

SEQ ID NO: 1824520 - DNA, 25 bp, Homo sapien
taattgcggagtttaatgaacacct

SEQ ID NO: 1824521 - DNA, 25 bp, Homo sapien
tgcggagtttaatgaacaccttgct

SEQ ID NO: 1824522 - DNA, 25 bp, Homo sapien
atgataattgcggagtttaatgaac

SEQ ID NO: 1824523 - DNA, 25 bp, Homo sapien
gccagtggcaattcatgagggagtc

SEQ ID NO: 1824524 - DNA, 25 bp, Homo sapien
ccataaactcttggtttgattcctc

SEQ ID NO: 1824525 - DNA, 25 bp, Homo sapien
ttcggagtgaactgtgtccagaggc

SEQ ID NO: 1824526 - DNA, 25 bp, Homo sapien
tgagggagtcgtagagttcttcact

SEQ ID NO: 1824527 - DNA, 25 bp, Homo sapien
aagctgagaccagtgaattgcttaa

SEQ ID NO: 1824528 - DNA, 25 bp, Homo sapien
gtcaaatgcagcagtaagaagcaag

SEQ ID NO: 1824529 - DNA, 25 bp, Homo sapien
taactgactgaacaaccaattgcga

SEQ ID NO: 1824530 - DNA, 25 bp, Homo sapien
tagtcaaatgcagcagtaagaagca

SEQ ID NO: 1824531 - DNA, 25 bp, Homo sapien
ctgactgaacaaccaattgcgataa

SEQ ID NO: 1824532 - DNA, 25 bp, Homo sapien
tggttttcagctagaggtgtggttt

SEQ ID NO: 1824533 - DNA, 25 bp, Homo sapien
cttggttttcagctagaggtgtggt

SEQ ID NO: 1824534 - DNA, 25 bp, Homo sapien
ggttttcagctagaggtgtggtttc

SEQ ID NO: 1824535 - DNA, 25 bp, Homo sapien
atcttggttttcagctagaggtgtg

SEQ ID NO: 1824536 - DNA, 25 bp, Homo sapien
cagcagcttcccaacaggggacacc

SEQ ID NO: 1824537 - DNA, 25 bp, Homo sapien
actcagcagcttcccaacaggggac

SEQ ID NO: 1824538 - DNA, 25 bp, Homo sapien
gcagcttcccaacaggggacaccca

SEQ ID NO: 1824539 - DNA, 25 bp, Homo sapien
tcagcagcttcccaacaggggacac

SEQ ID NO: 1824540 - DNA, 25 bp, Homo sapien
caggggtctcatgcgcagaaaaaca

SEQ ID NO: 1824541 - DNA, 25 bp, Homo sapien
ttcaggggtctcatgcgcagaaaaa

SEQ ID NO: 1824542 - DNA, 25 bp, Homo sapien
tgttcaggggtctcatgcgcagaaa

SEQ ID NO: 1824543 - DNA, 25 bp, Homo sapien
tgtgtgttcaggggtctcatgcgca

SEQ ID NO: 1824544 - DNA, 25 bp, Homo sapien
tgctgtcgcgcataccagttgccat

SEQ ID NO: 1824545 - DNA, 25 bp, Homo sapien
catagcggtaactctggctgggctg

SEQ ID NO: 1824546 - DNA, 25 bp, Homo sapien
ccagaaagaaggtaagagccgtgct

SEQ ID NO: 1824547 - DNA, 25 bp, Homo sapien
ccagttgccatagcggtaactctgg

SEQ ID NO: 1824548 - DNA, 25 bp, Homo sapien
tattttgttgagctatgccaaaatc

SEQ ID NO: 1824549 - DNA, 25 bp, Homo sapien
aatagttattttgttgagctatgcc

SEQ ID NO: 1824550 - DNA, 25 bp, Homo sapien
agcagtaatagttattttgttgagc

SEQ ID NO: 1824551 - DNA, 25 bp, Homo sapien
ttgttgagctatgccaaaatctgca

SEQ ID NO: 1824552 - DNA, 25 bp, Homo sapien
cccagagtgtggtgccgagctgtct

SEQ ID NO: 1824553 - DNA, 25 bp, Homo sapien
ggcccagagtgtggtgccgagctgt

SEQ ID NO: 1824554 - DNA, 25 bp, Homo sapien
agtgtggtgccgagctgtctgcttg

SEQ ID NO: 1824555 - DNA, 25 bp, Homo sapien
cgtgattgactgagcaagcgggggt

SEQ ID NO: 1824556 - DNA, 25 bp, Homo sapien
ggtttccattctagaaccaactata

SEQ ID NO: 1824557 - DNA, 25 bp, Homo sapien
taagcaagtaaaagtgtgacagtct

SEQ ID NO: 1824558 - DNA, 25 bp, Homo sapien
tgcttactaataccttgtctcacgt

SEQ ID NO: 1824559 - DNA, 25 bp, Homo sapien
ccactttgagttatgttcatggtgc

SEQ ID NO: 1824560 - DNA, 25 bp, Homo sapien
tcgttccgctggtccctgaacaaaa

SEQ ID NO: 1824561 - DNA, 25 bp, Homo sapien
tattaacgacagaaagcctcgttcc

SEQ ID NO: 1824562 - DNA, 25 bp, Homo sapien
tactagtacacagcccacaacaatg

SEQ ID NO: 1824563 - DNA, 25 bp, Homo sapien
acaatgcacgctgccggcgctacag

SEQ ID NO: 1824564 - DNA, 25 bp, Homo sapien
tgagatatgcctgcttgcccccgat

SEQ ID NO: 1824565 - DNA, 25 bp, Homo sapien
cctgagatatgcctgcttgcccccg

SEQ ID NO: 1824566 - DNA, 25 bp, Homo sapien
gatatgcctgcttgcccccgatttt

SEQ ID NO: 1824567 - DNA, 25 bp, Homo sapien
agatatgcctgcttgcccccgattt

SEQ ID NO: 1824568 - DNA, 25 bp, Homo sapien
caccaaagagaagctccatacccat

SEQ ID NO: 1824569 - DNA, 25 bp, Homo sapien
gcatgttcatggagttgtacaatca

SEQ ID NO: 1824570 - DNA, 25 bp, Homo sapien
tgacgggcgtttttcacttcgtgta

SEQ ID NO: 1824571 - DNA, 25 bp, Homo sapien
tatgactgaatactacgccgttgtg

SEQ ID NO: 1824572 - DNA, 25 bp, Homo sapien
tttggcagacagtgttttatgaatt

SEQ ID NO: 1824573 - DNA, 25 bp, Homo sapien
attacttttggcagacagtgtttta

SEQ ID NO: 1824574 - DNA, 25 bp, Homo sapien
tacttttggcagacagtgttttatg

SEQ ID NO: 1824575 - DNA, 25 bp, Homo sapien
cttttggcagacagtgttttatgaa

SEQ ID NO: 1824576 - DNA, 25 bp, Homo sapien
gggactgatactggtcggccctgca

SEQ ID NO: 1824577 - DNA, 25 bp, Homo sapien
cactcaggattggacctgggactga

SEQ ID NO: 1824578 - DNA, 25 bp, Homo sapien
ttgtgcaagtcccaggtccaactcc

SEQ ID NO: 1824579 - DNA, 25 bp, Homo sapien
gagctcacgtggtccggcttgtgca

SEQ ID NO: 1824580 - DNA, 25 bp, Homo sapien
gggaagcacagagattccccgccgc

SEQ ID NO: 1824581 - DNA, 25 bp, Homo sapien
gccgcgttccctggactcaggagct

SEQ ID NO: 1824582 - DNA, 25 bp, Homo sapien
aatgcagggcgcatgctgctacttg

SEQ ID NO: 1824583 - DNA, 25 bp, Homo sapien
tccacccgctgaatgcagggcgcat

SEQ ID NO: 1824584 - DNA, 25 bp, Homo sapien
gcccctctcccggtacactgcgcag

SEQ ID NO: 1824585 - DNA, 25 bp, Homo sapien
ctcgccccgccaccgggacggagag

SEQ ID NO: 1824586 - DNA, 25 bp, Homo sapien
tctcccggtacactgcgcaggcaca

SEQ ID NO: 1824587 - DNA, 25 bp, Homo sapien
ggacggagagcgcccgccgctgcat

SEQ ID NO: 1824588 - DNA, 25 bp, Homo sapien
catagtgttgcctcgtttcttggtg

SEQ ID NO: 1824589 - DNA, 25 bp, Homo sapien
tagcatagtgttgcctcgtttcttg

SEQ ID NO: 1824590 - DNA, 25 bp, Homo sapien
ccatgtagcatagtgttgcctcgtt

SEQ ID NO: 1824591 - DNA, 25 bp, Homo sapien
tagtgttgcctcgtttcttggtgat

SEQ ID NO: 1824592 - DNA, 25 bp, Homo sapien
catgttggccctttcatgtgtcatg

SEQ ID NO: 1824593 - DNA, 25 bp, Homo sapien
tgcataagccccttgaaagtggtcc

SEQ ID NO: 1824594 - DNA, 25 bp, Homo sapien
tccatagctaagagtttgaatcatg

SEQ ID NO: 1824595 - DNA, 25 bp, Homo sapien
tcagaaggccatagaccatccaaac

SEQ ID NO: 1824596 - DNA, 25 bp, Homo sapien
ttcagtcctagaggaggacctggct

SEQ ID NO: 1824597 - DNA, 25 bp, Homo sapien
ggattagtttaggtgccaagtagac

SEQ ID NO: 1824598 - DNA, 25 bp, Homo sapien
tcctgaatgacaaggttccctgaag

SEQ ID NO: 1824599 - DNA, 25 bp, Homo sapien
tagactgtaactatttggtccccag

SEQ ID NO: 1824600 - DNA, 25 bp, Homo sapien
tccctgacttaaggcgtgaagccgc

SEQ ID NO: 1824601 - DNA, 25 bp, Homo sapien
cctaaaagattgtgagtccggagtg

SEQ ID NO: 1824602 - DNA, 25 bp, Homo sapien
tcccagtgggttcgctgacttcagg

SEQ ID NO: 1824603 - DNA, 25 bp, Homo sapien
cagcttttaaatgtggcgcgaccag

SEQ ID NO: 1824604 - DNA, 25 bp, Homo sapien
taaaacccatggttgctccacaggc

SEQ ID NO: 1824605 - DNA, 25 bp, Homo sapien
ggtagtatacctggaggccatcgca

SEQ ID NO: 1824606 - DNA, 25 bp, Homo sapien
tatccgacagccatgaagtgagtgc

SEQ ID NO: 1824607 - DNA, 25 bp, Homo sapien
gatttgcaccgtctcttgacagcgt

SEQ ID NO: 1824608 - DNA, 25 bp, Homo sapien
cagggttccgataattcagtgggcc

SEQ ID NO: 1824609 - DNA, 25 bp, Homo sapien
taggcctcagtgaccaaagactaga

SEQ ID NO: 1824610 - DNA, 25 bp, Homo sapien
gacacatttgtgttccagggttccg

SEQ ID NO: 1824611 - DNA, 25 bp, Homo sapien
gatagacatgaattacctgggcaga

SEQ ID NO: 1824612 - DNA, 25 bp, Homo sapien
gactttacctacacagaagagctat

SEQ ID NO: 1824613 - DNA, 25 bp, Homo sapien
cagcatatggtagaattaaggacgc

SEQ ID NO: 1824614 - DNA, 25 bp, Homo sapien
ttgaggaacgacactgcaagaagca

SEQ ID NO: 1824615 - DNA, 25 bp, Homo sapien
aggacgcaggctttgacattagacc

SEQ ID NO: 1824616 - DNA, 25 bp, Homo sapien
tccctgctggttaagacaagtctca

SEQ ID NO: 1824617 - DNA, 25 bp, Homo sapien
cacagagctgcgtggaaatcagatt

SEQ ID NO: 1824618 - DNA, 25 bp, Homo sapien
taaacaaacaagatcgggccagagt

SEQ ID NO: 1824619 - DNA, 25 bp, Homo sapien
caaacggatatttggcattgcgcca

SEQ ID NO: 1824620 - DNA, 25 bp, Homo sapien
cactcaggattggacctgggactgg

SEQ ID NO: 1824621 - DNA, 25 bp, Homo sapien
gttccccgccaacggcgctagccgc

SEQ ID NO: 1824622 - DNA, 25 bp, Homo sapien
aggaagcacagagattccccgcccg

SEQ ID NO: 1824623 - DNA, 25 bp, Homo sapien
gccaacggcgctagccgcgatgccc

SEQ ID NO: 1824624 - DNA, 25 bp, Homo sapien
cccgccaacggcgctagccgcgatg

SEQ ID NO: 1824625 - DNA, 25 bp, Homo sapien
gctccgtagtggactccgcgggcct

SEQ ID NO: 1824626 - DNA, 25 bp, Homo sapien
tcgcgtttccggagagacctggctg

SEQ ID NO: 1824627 - DNA, 25 bp, Homo sapien
tgtgtcccgcggcttgcgctccgta

SEQ ID NO: 1824628 - DNA, 25 bp, Homo sapien
gcgcagcgcgcacgcaatcgcgttt

SEQ ID NO: 1824629 - DNA, 25 bp, Homo sapien
tagctggggcctaaaagacggctaa

SEQ ID NO: 1824630 - DNA, 25 bp, Homo sapien
ttagctggggcctaaaagacggcta

SEQ ID NO: 1824631 - DNA, 25 bp, Homo sapien
gctggggcctaaaagacggctaaca

SEQ ID NO: 1824632 - DNA, 25 bp, Homo sapien
tccaagtaccatgcaggaccggacc

SEQ ID NO: 1824633 - DNA, 25 bp, Homo sapien
aagtaccatgcaggaccggaccgac

SEQ ID NO: 1824634 - DNA, 25 bp, Homo sapien
aggaccggaccgaccctgctttgct

SEQ ID NO: 1824635 - DNA, 25 bp, Homo sapien
catccaagtaccatgcaggaccgga

SEQ ID NO: 1824636 - DNA, 25 bp, Homo sapien
attaagagaaataagtgcagcattt

SEQ ID NO: 1824637 - DNA, 25 bp, Homo sapien
aagtgcagcatttttgcatctgaca

SEQ ID NO: 1824638 - DNA, 25 bp, Homo sapien
atgtattaagagaaataagtgcagc

SEQ ID NO: 1824639 - DNA, 25 bp, Homo sapien
gagaaataagtgcagcatttttgca

SEQ ID NO: 1824640 - DNA, 25 bp, Homo sapien
tcaggatataaggtttaaaaacata

SEQ ID NO: 1824641 - DNA, 25 bp, Homo sapien
tagaattcaggatataaggtttaaa

SEQ ID NO: 1824642 - DNA, 25 bp, Homo sapien
gaacagttgactcttctatacaaaa

SEQ ID NO: 1824643 - DNA, 25 bp, Homo sapien
tcagagtttaaaagtgtcccagtaa

SEQ ID NO: 1824644 - DNA, 25 bp, Homo sapien
tgtataatgcccacaagatgacact

SEQ ID NO: 1824645 - DNA, 25 bp, Homo sapien
cattaccactaggataaattactct

SEQ ID NO: 1824646 - DNA, 25 bp, Homo sapien
gcccaaagttcgaagtgtctattta

SEQ ID NO: 1824647 - DNA, 25 bp, Homo sapien
ttaaacagagtagcccaaagttcga

SEQ ID NO: 1824648 - DNA, 25 bp, Homo sapien
atttacagtactaaggtccagtcca

SEQ ID NO: 1824649 - DNA, 25 bp, Homo sapien
gtactaaggtccagtccagaaagtg

SEQ ID NO: 1824650 - DNA, 25 bp, Homo sapien
cttcagagcaaatgtgaaggtcaga

SEQ ID NO: 1824651 - DNA, 25 bp, Homo sapien
gcttcagagcaaatgtgaaggtcag

SEQ ID NO: 1824652 - DNA, 25 bp, Homo sapien
tgcttcagagcaaatgtgaaggtca

SEQ ID NO: 1824653 - DNA, 25 bp, Homo sapien
tgaaattaccatcgctcccatagct

SEQ ID NO: 1824654 - DNA, 25 bp, Homo sapien
gaagaactactaaaccatttgggca

SEQ ID NO: 1824655 - DNA, 25 bp, Homo sapien
gacaaaatggcagcgcagagcctta

SEQ ID NO: 1824656 - DNA, 25 bp, Homo sapien
ggttggcccaactgctgtacaaaaa

SEQ ID NO: 1824657 - DNA, 25 bp, Homo sapien
tatcaacactgtgggcaatgatgct

SEQ ID NO: 1824658 - DNA, 25 bp, Homo sapien
cccagggtcaaggaacttgcacgta

SEQ ID NO: 1824659 - DNA, 25 bp, Homo sapien
ggagcaatgctgtagggtttcacac

SEQ ID NO: 1824660 - DNA, 25 bp, Homo sapien
catttgtagacatttcccagggtca

SEQ ID NO: 1824661 - DNA, 25 bp, Homo sapien
atatttaggttttttgctgtaggat

SEQ ID NO: 1824662 - DNA, 25 bp, Homo sapien
tgtcctcccatgcactgagggaatg

SEQ ID NO: 1824663 - DNA, 25 bp, Homo sapien
ggaatgggctgtgcacggttcacaa

SEQ ID NO: 1824664 - DNA, 25 bp, Homo sapien
tccatacttggccacccagtctgtc

SEQ ID NO: 1824665 - DNA, 25 bp, Homo sapien
ttttacatttagataggcaacgcca

SEQ ID NO: 1824666 - DNA, 25 bp, Homo sapien
ttagataggcaacgccaggtaagaa

SEQ ID NO: 1824667 - DNA, 25 bp, Homo sapien
ttcctggtttatagtgctgacactg

SEQ ID NO: 1824668 - DNA, 25 bp, Homo sapien
catttagataggcaacgccaggtaa

SEQ ID NO: 1824669 - DNA, 25 bp, Homo sapien
tttcctcctatcaccatctgtagaa

SEQ ID NO: 1824670 - DNA, 25 bp, Homo sapien
ctttcctcctatcaccatctgtaga

SEQ ID NO: 1824671 - DNA, 25 bp, Homo sapien
ctcctatcaccatctgtagaaaaat

SEQ ID NO: 1824672 - DNA, 25 bp, Homo sapien
tcctcctatcaccatctgtagaaaa

SEQ ID NO: 1824673 - DNA, 25 bp, Homo sapien
ctgaagccgttgcattgagaggtgc

SEQ ID NO: 1824674 - DNA, 25 bp, Homo sapien
gattgtaagtagcataacttccaag

SEQ ID NO: 1824675 - DNA, 25 bp, Homo sapien
tatatcctgactgattgtaagtagc

SEQ ID NO: 1824676 - DNA, 25 bp, Homo sapien
agaggtgctaagtggatcctctggc

SEQ ID NO: 1824677 - DNA, 25 bp, Homo sapien
ggttgttcatgcttaagaaatgagt

SEQ ID NO: 1824678 - DNA, 25 bp, Homo sapien
caggaatatagatcgcaaaattaga

SEQ ID NO: 1824679 - DNA, 25 bp, Homo sapien
attccaggaatatagatcgcaaaat

SEQ ID NO: 1824680 - DNA, 25 bp, Homo sapien
tccaggaatatagatcgcaaaatta

SEQ ID NO: 1824681 - DNA, 25 bp, Homo sapien
catgatagtttttcgattggtttaa

SEQ ID NO: 1824682 - DNA, 25 bp, Homo sapien
gtttcattgcatgatagtttttcga

SEQ ID NO: 1824683 - DNA, 25 bp, Homo sapien
cattgcatgatagtttttcgattgg

SEQ ID NO: 1824684 - DNA, 25 bp, Homo sapien
tttcgattggtttaattatgctttc

SEQ ID NO: 1824685 - DNA, 25 bp, Homo sapien
tcgaactccggaccttgtgattcgc

SEQ ID NO: 1824686 - DNA, 25 bp, Homo sapien
tgggattacaggagtgggccactgc

SEQ ID NO: 1824687 - DNA, 25 bp, Homo sapien
actccggaccttgtgattcgcccac

SEQ ID NO: 1824688 - DNA, 25 bp, Homo sapien
ggattacaggagtgggccactgcac

SEQ ID NO: 1824689 - DNA, 25 bp, Homo sapien
aaaggacctgttcctcagtcatcaa

SEQ ID NO: 1824690 - DNA, 25 bp, Homo sapien
taacaattcaagtaggtcctccttc

SEQ ID NO: 1824691 - DNA, 25 bp, Homo sapien
aagcggttttgtgatagctttgcca

SEQ ID NO: 1824692 - DNA, 25 bp, Homo sapien
tgagaactgttaagactccttgact

SEQ ID NO: 1824693 - DNA, 25 bp, Homo sapien
ctttccactggctatcaaggacacc

SEQ ID NO: 1824694 - DNA, 25 bp, Homo sapien
aaggacaccttcttgggattcacac

SEQ ID NO: 1824695 - DNA, 25 bp, Homo sapien
gttctgccccaacgggtcccagtga

SEQ ID NO: 1824696 - DNA, 25 bp, Homo sapien
ggctatcaaggacaccttcttggga

SEQ ID NO: 1824697 - DNA, 25 bp, Homo sapien
caacatctgccttctggattcaagt

SEQ ID NO: 1824698 - DNA, 25 bp, Homo sapien
gcaacatctgccttctggattcaag

SEQ ID NO: 1824699 - DNA, 25 bp, Homo sapien
tcctctgcatagttgctggttcaca

SEQ ID NO: 1824700 - DNA, 25 bp, Homo sapien
ccaataggtgacagtaaggctcaag

SEQ ID NO: 1824701 - DNA, 25 bp, Homo sapien
gtccaggtgactgaactgagcctga

SEQ ID NO: 1824702 - DNA, 25 bp, Homo sapien
tcaaaaccacgaccgccaataggtg

SEQ ID NO: 1824703 - DNA, 25 bp, Homo sapien
ttgctcctctacacgcaaacctgct

SEQ ID NO: 1824704 - DNA, 25 bp, Homo sapien
ctgtgttactagttcctcctctgta

SEQ ID NO: 1824705 - DNA, 25 bp, Homo sapien
atttctaagctcctcttcacagcca

SEQ ID NO: 1824706 - DNA, 25 bp, Homo sapien
acacgcaaacctgctcggagcactg

SEQ ID NO: 1824707 - DNA, 25 bp, Homo sapien
ctggaagatatcttgattgtttcaa

SEQ ID NO: 1824708 - DNA, 25 bp, Homo sapien
tggagcagttgacaattcggaatca

SEQ ID NO: 1824709 - DNA, 25 bp, Homo sapien
gtagtactgtttagaggttggagca

SEQ ID NO: 1824710 - DNA, 25 bp, Homo sapien
cagcaggtaagctcttgttttcccc

SEQ ID NO: 1824711 - DNA, 25 bp, Homo sapien
tgtgtgtaacatgtttctatctgtc

SEQ ID NO: 1824712 - DNA, 25 bp, Homo sapien
tttctatctgtcctgcaacggctgc

SEQ ID NO: 1824713 - DNA, 25 bp, Homo sapien
tgtttctatctgtcctgcaacggct

SEQ ID NO: 1824714 - DNA, 25 bp, Homo sapien
tatctgtcctgcaacggctgcagtt

SEQ ID NO: 1824715 - DNA, 25 bp, Homo sapien
gaaactggtgtgctgagagggaaat

SEQ ID NO: 1824716 - DNA, 25 bp, Homo sapien
ggaaactggtgtgctgagagggaaa

SEQ ID NO: 1824717 - DNA, 25 bp, Homo sapien
aaatggatactcacttgggtggccc

SEQ ID NO: 1824718 - DNA, 25 bp, Homo sapien
ttggctcccttggaaatggatactc

SEQ ID NO: 1824719 - DNA, 25 bp, Homo sapien
gcttcaatgggaacagtcccgccat

SEQ ID NO: 1824720 - DNA, 25 bp, Homo sapien
ccactgctgttatatcactaactga

SEQ ID NO: 1824721 - DNA, 25 bp, Homo sapien
cctgggcaatgaagcgacattccgt

SEQ ID NO: 1824722 - DNA, 25 bp, Homo sapien
aatgttttcaagtcgccaggtgcgg

SEQ ID NO: 1824723 - DNA, 25 bp, Homo sapien
taagtataagccaccatgaacagcc

SEQ ID NO: 1824724 - DNA, 25 bp, Homo sapien
cacacgcctgtaacaatctgagcta

SEQ ID NO: 1824725 - DNA, 25 bp, Homo sapien
tgaagatagtctgaccccaacgcct

SEQ ID NO: 1824726 - DNA, 25 bp, Homo sapien
ccaacgcctcctaccacttttatga

SEQ ID NO: 1824727 - DNA, 25 bp, Homo sapien
gaaatcatagtcctccaactcttcc

SEQ ID NO: 1824728 - DNA, 25 bp, Homo sapien
tcttggaatgggaggctccgaaatc

SEQ ID NO: 1824729 - DNA, 25 bp, Homo sapien
cacagctggcaacaagctgggcaga

SEQ ID NO: 1824730 - DNA, 25 bp, Homo sapien
gagtttgagcctcccttctgttgaa

SEQ ID NO: 1824731 - DNA, 25 bp, Homo sapien
agtagcctgcccaagatctcacggt

SEQ ID NO: 1824732 - DNA, 25 bp, Homo sapien
ggatcaacgtcaatctagagaaagg

SEQ ID NO: 1824733 - DNA, 25 bp, Homo sapien
tttttgacgatgctcgggaatagcg

SEQ ID NO: 1824734 - DNA, 25 bp, Homo sapien
gattatatccggcagaggcttaggc

SEQ ID NO: 1824735 - DNA, 25 bp, Homo sapien
gaatagcgtttgtggcggtttctcc

SEQ ID NO: 1824736 - DNA, 25 bp, Homo sapien
tccagatgatttgacgaagggccta

SEQ ID NO: 1824737 - DNA, 25 bp, Homo sapien
gaacagaaggcagcttggtacttta

SEQ ID NO: 1824738 - DNA, 25 bp, Homo sapien
cataggtgggaacatagccctgacc

SEQ ID NO: 1824739 - DNA, 25 bp, Homo sapien
tgcctttagccagtccccacatagg

SEQ ID NO: 1824740 - DNA, 25 bp, Homo sapien
ttaagatggtcaagctctgttcccc

SEQ ID NO: 1824741 - DNA, 25 bp, Homo sapien
tgtcggtcgtttctttggatcccaa

SEQ ID NO: 1824742 - DNA, 25 bp, Homo sapien
ctggcttgctgtcggtcgtttcttt

SEQ ID NO: 1824743 - DNA, 25 bp, Homo sapien
atagcttcattactggcattgggaa

SEQ ID NO: 1824744 - DNA, 25 bp, Homo sapien
catttcggtcatgagctgaatagct

SEQ ID NO: 1824745 - DNA, 25 bp, Homo sapien
gccagctggtatccttctggccagt

SEQ ID NO: 1824746 - DNA, 25 bp, Homo sapien
ggaaaacggaagttcatagaggatg

SEQ ID NO: 1824747 - DNA, 25 bp, Homo sapien
gaagttcatagaggatgccagctgg

SEQ ID NO: 1824748 - DNA, 25 bp, Homo sapien
ttcatagaggatgccagctggtatc

SEQ ID NO: 1824749 - DNA, 25 bp, Homo sapien
gcttcttgcaatccttaacccactc

SEQ ID NO: 1824750 - DNA, 25 bp, Homo sapien
tgaaaatatcagatatctaggcaaa

SEQ ID NO: 1824751 - DNA, 25 bp, Homo sapien
agttatagcaacttagggacaagag

SEQ ID NO: 1824752 - DNA, 25 bp, Homo sapien
atcaaaagttatagcaacttaggga

SEQ ID NO: 1824753 - DNA, 25 bp, Homo sapien
cctgggaaaagtggccttaacatat

SEQ ID NO: 1824754 - DNA, 25 bp, Homo sapien
caacagcccacacatcaatgggaga

SEQ ID NO: 1824755 - DNA, 25 bp, Homo sapien
taaagatttcatcgacctcacttgt

SEQ ID NO: 1824756 - DNA, 25 bp, Homo sapien
ttcagccatgatacttccaacagcc

SEQ ID NO: 1824757 - DNA, 25 bp, Homo sapien
caataaaccaatccttcgctttctt

SEQ ID NO: 1824758 - DNA, 25 bp, Homo sapien
ccataggcttatgcctcaggagggc

SEQ ID NO: 1824759 - DNA, 25 bp, Homo sapien
tatgtaacaatccatcgtaggaaaa

SEQ ID NO: 1824760 - DNA, 25 bp, Homo sapien
tcaggagggctgcataacccctact

SEQ ID NO: 1824761 - DNA, 25 bp, Homo sapien
gtgaccttaattctcttgcaagtcc

SEQ ID NO: 1824762 - DNA, 25 bp, Homo sapien
ggtagatacataatcagtgtatggt

SEQ ID NO: 1824763 - DNA, 25 bp, Homo sapien
tacataatcagtgtatggtggctgt

SEQ ID NO: 1824764 - DNA, 25 bp, Homo sapien
gctctggacccatacaaagcaagtt

SEQ ID NO: 1824765 - DNA, 25 bp, Homo sapien
gatgatatacggagaaaaaaaaata

SEQ ID NO: 1824766 - DNA, 25 bp, Homo sapien
tgatatacggagaaaaaaaaataca

SEQ ID NO: 1824767 - DNA, 25 bp, Homo sapien
cttgatgatatacggagaaaaaaaa

SEQ ID NO: 1824768 - DNA, 25 bp, Homo sapien
tgatgatatacggagaaaaaaaaat

SEQ ID NO: 1824769 - DNA, 25 bp, Homo sapien
taataattggtcatgctagatcaaa

SEQ ID NO: 1824770 - DNA, 25 bp, Homo sapien
actgctccgtgggtgctacaaacta

SEQ ID NO: 1824771 - DNA, 25 bp, Homo sapien
tgcaagatgggtatatgatgactga

SEQ ID NO: 1824772 - DNA, 25 bp, Homo sapien
taaaattagggagaatgaggttgca

SEQ ID NO: 1824773 - DNA, 25 bp, Homo sapien
catgtttatggataaaagccagccc

SEQ ID NO: 1824774 - DNA, 25 bp, Homo sapien
gactgattcagggaacaacttgttt

SEQ ID NO: 1824775 - DNA, 25 bp, Homo sapien
ttctgatgactgattcagggaacaa

SEQ ID NO: 1824776 - DNA, 25 bp, Homo sapien
gccagcccttgcaatatttgataca

SEQ ID NO: 1824777 - DNA, 25 bp, Homo sapien
tttgaaaaagagatgcgggctgggt

SEQ ID NO: 1824778 - DNA, 25 bp, Homo sapien
ttgaaaaagagatgcgggctgggtg

SEQ ID NO: 1824779 - DNA, 25 bp, Homo sapien
ttcattaattgatagaggttttctt

SEQ ID NO: 1824780 - DNA, 25 bp, Homo sapien
taataacattggcatgattaagttt

SEQ ID NO: 1824781 - DNA, 25 bp, Homo sapien
tttcattaattgatagaggttttct

SEQ ID NO: 1824782 - DNA, 25 bp, Homo sapien
atttaataacattggcatgattaag

SEQ ID NO: 1824783 - DNA, 25 bp, Homo sapien
aacttctctcaagttcatgcattca

SEQ ID NO: 1824784 - DNA, 25 bp, Homo sapien
ttcatcccaagaatagaactttctc

SEQ ID NO: 1824785 - DNA, 25 bp, Homo sapien
catcccaagaatagaactttctctt

SEQ ID NO: 1824786 - DNA, 25 bp, Homo sapien
attcatcccaagaatagaactttct

SEQ ID NO: 1824787 - DNA, 25 bp, Homo sapien
gattcattactcttgcccataagca

SEQ ID NO: 1824788 - DNA, 25 bp, Homo sapien
tgtctcatggttgtgtatcggttca

SEQ ID NO: 1824789 - DNA, 25 bp, Homo sapien
cagctccccggattcattactcttg

SEQ ID NO: 1824790 - DNA, 25 bp, Homo sapien
aagcacactcccatacgtgccgtcc

SEQ ID NO: 1824791 - DNA, 25 bp, Homo sapien
gaaatgacttccttgttgaatataa

SEQ ID NO: 1824792 - DNA, 25 bp, Homo sapien
tgttgattgaaatgacttccttgtt

SEQ ID NO: 1824793 - DNA, 25 bp, Homo sapien
gattgaaatgacttccttgttgaat

SEQ ID NO: 1824794 - DNA, 25 bp, Homo sapien
gaatataaatttgaacgcttcttaa

SEQ ID NO: 1824795 - DNA, 25 bp, Homo sapien
tcatcattaaatatagtctctcccc

SEQ ID NO: 1824796 - DNA, 25 bp, Homo sapien
tctcccccaagattacagaggttca

SEQ ID NO: 1824797 - DNA, 25 bp, Homo sapien
actgttgttgctacactggtgacag

SEQ ID NO: 1824798 - DNA, 25 bp, Homo sapien
aggaatcgggcaaggaaacaacact

SEQ ID NO: 1824799 - DNA, 25 bp, Homo sapien
ctgaagctgcaccagcactatcagc

SEQ ID NO: 1824800 - DNA, 25 bp, Homo sapien
actgatgactttcgacccaagcctg

SEQ ID NO: 1824801 - DNA, 25 bp, Homo sapien
tcagcacaatagagcattcagtcac

SEQ ID NO: 1824802 - DNA, 25 bp, Homo sapien
caagcctgcgtgcacagtctctttg

SEQ ID NO: 1824803 - DNA, 25 bp, Homo sapien
aaagggacagttttcgtcacacact

SEQ ID NO: 1824804 - DNA, 25 bp, Homo sapien
gcggaattccactttcacctgagcg

SEQ ID NO: 1824805 - DNA, 25 bp, Homo sapien
tgatccgactctgcaaaccagggct

SEQ ID NO: 1824806 - DNA, 25 bp, Homo sapien
ctcttaaaaggctccagggaccgcg

SEQ ID NO: 1824807 - DNA, 25 bp, Homo sapien
gctggagtcggacctaattcctgtt

SEQ ID NO: 1824808 - DNA, 25 bp, Homo sapien
ctttgggatgcaccagcgagggctg

SEQ ID NO: 1824809 - DNA, 25 bp, Homo sapien
gttctgaactcagttccgctgcctc

SEQ ID NO: 1824810 - DNA, 25 bp, Homo sapien
cgagggctggagtcggacctaattc

SEQ ID NO: 1824811 - DNA, 25 bp, Homo sapien
tcgggctgaccactcccgcccgctc

SEQ ID NO: 1824812 - DNA, 25 bp, Homo sapien
cgccttccctcgggctgaccactcc

SEQ ID NO: 1824813 - DNA, 25 bp, Homo sapien
ctcgggctgaccactcccgcccgct

SEQ ID NO: 1824814 - DNA, 25 bp, Homo sapien
ttccctcgggctgaccactcccgcc

SEQ ID NO: 1824815 - DNA, 25 bp, Homo sapien
gaccggtctccgggcggagattggc

SEQ ID NO: 1824816 - DNA, 25 bp, Homo sapien
gcgccgaggggacatgcccggccag

SEQ ID NO: 1824817 - DNA, 25 bp, Homo sapien
agggcgccgaggggacatgcccggc

SEQ ID NO: 1824818 - DNA, 25 bp, Homo sapien
gccgaggggacatgcccggccagcc

SEQ ID NO: 1824819 - DNA, 25 bp, Homo sapien
ggccagcctcgcaggtcgggctccg

SEQ ID NO: 1824820 - DNA, 25 bp, Homo sapien
ctggggattacctgtccgcgcctgc

SEQ ID NO: 1824821 - DNA, 25 bp, Homo sapien
ccttgtgaagctccggcgtcttgtg

SEQ ID NO: 1824822 - DNA, 25 bp, Homo sapien
gaagctccggcgtcttgtgtgtttc

SEQ ID NO: 1824823 - DNA, 25 bp, Homo sapien
tccggcgtcttgtgtgtttcatctc

SEQ ID NO: 1824824 - DNA, 25 bp, Homo sapien
tcgttcgctcccttgtgaagctccg

SEQ ID NO: 1824825 - DNA, 25 bp, Homo sapien
tcagcatttcaaccagctgacgaag

SEQ ID NO: 1824826 - DNA, 25 bp, Homo sapien
tttcaaccagctgacgaagccttgg

SEQ ID NO: 1824827 - DNA, 25 bp, Homo sapien
ccttggacccgtggcaatagggctg

SEQ ID NO: 1824828 - DNA, 25 bp, Homo sapien
agctgacgaagccttggacccgtgg

SEQ ID NO: 1824829 - DNA, 25 bp, Homo sapien
agaggacagtagcacccacagcaga

SEQ ID NO: 1824830 - DNA, 25 bp, Homo sapien
gcagaaatggatgggcatctgtcca

SEQ ID NO: 1824831 - DNA, 25 bp, Homo sapien
catgaggacagtggcatccttgcag

SEQ ID NO: 1824832 - DNA, 25 bp, Homo sapien
gacagtagcacccacagcagaaatg

SEQ ID NO: 1824833 - DNA, 25 bp, Homo sapien
atctgaagagccacaggtcgctgca

SEQ ID NO: 1824834 - DNA, 25 bp, Homo sapien
agagccacaggtcgctgcagttgga

SEQ ID NO: 1824835 - DNA, 25 bp, Homo sapien
gaagagccacaggtcgctgcagttg

SEQ ID NO: 1824836 - DNA, 25 bp, Homo sapien
agccacaggtcgctgcagttggaga

SEQ ID NO: 1824837 - DNA, 25 bp, Homo sapien
aagtagttagaaccacaggcccact

SEQ ID NO: 1824838 - DNA, 25 bp, Homo sapien
ctgtttcccaggtcataatatgaac

SEQ ID NO: 1824839 - DNA, 25 bp, Homo sapien
gttagaaccacaggcccactgccat

SEQ ID NO: 1824840 - DNA, 25 bp, Homo sapien
ccacctctctcagccaatttaataa

SEQ ID NO: 1824841 - DNA, 25 bp, Homo sapien
cagcctctagggatgtgaaattccc

SEQ ID NO: 1824842 - DNA, 25 bp, Homo sapien
taaggtgctctaatgggaaaagtcc

SEQ ID NO: 1824843 - DNA, 25 bp, Homo sapien
tacacacgttggagataaaacaatc

SEQ ID NO: 1824844 - DNA, 25 bp, Homo sapien
tgcacacaaggtgaatctcccaact

SEQ ID NO: 1824845 - DNA, 25 bp, Homo sapien
caaaaatcctcattgttgtaggtaa

SEQ ID NO: 1824846 - DNA, 25 bp, Homo sapien
tagttacagctcgaaaggctcttca

SEQ ID NO: 1824847 - DNA, 25 bp, Homo sapien
tctgagtaactgactgcggagccca

SEQ ID NO: 1824848 - DNA, 25 bp, Homo sapien
ctgtcctagaggaaactggctcgtg

SEQ ID NO: 1824849 - DNA, 25 bp, Homo sapien
ctgcaattttcataggaggtggccc

SEQ ID NO: 1824850 - DNA, 25 bp, Homo sapien
tcgcacactgtcactgtatttcata

SEQ ID NO: 1824851 - DNA, 25 bp, Homo sapien
cctggtggtggagtcgtgaggtacc

SEQ ID NO: 1824852 - DNA, 25 bp, Homo sapien
gctggtaggcctggtaggacacttt

SEQ ID NO: 1824853 - DNA, 25 bp, Homo sapien
tgggttataataagggcgagtggcc

SEQ ID NO: 1824854 - DNA, 25 bp, Homo sapien
tagctgcaaggtggcctaggcaaat

SEQ ID NO: 1824855 - DNA, 25 bp, Homo sapien
acatcagactttgggaaggaagggc

SEQ ID NO: 1824856 - DNA, 25 bp, Homo sapien
tgtcattagggatactggtggaatc

SEQ ID NO: 1824857 - DNA, 25 bp, Homo sapien
tggttagtcctttccacaaggctgg

SEQ ID NO: 1824858 - DNA, 25 bp, Homo sapien
cttgatggcgcttcttctagcttct

SEQ ID NO: 1824859 - DNA, 25 bp, Homo sapien
ttgtctcttgatggcgcttcttcta

SEQ ID NO: 1824860 - DNA, 25 bp, Homo sapien
ctcttgatggcgcttcttctagctt

SEQ ID NO: 1824861 - DNA, 25 bp, Homo sapien
gtctcttgatggcgcttcttctagc

SEQ ID NO: 1824862 - DNA, 25 bp, Homo sapien
tgtgccctcgacaaggaatcaactc

SEQ ID NO: 1824863 - DNA, 25 bp, Homo sapien
tccaaagcagaatgacagttagggc

SEQ ID NO: 1824864 - DNA, 25 bp, Homo sapien
ctgaaaaaagatcgcgttgccatca

SEQ ID NO: 1824865 - DNA, 25 bp, Homo sapien
cgttgccatcaagccgccaaaagtt

SEQ ID NO: 1824866 - DNA, 25 bp, Homo sapien
agccgtgccttgtcgcagatggccg

SEQ ID NO: 1824867 - DNA, 25 bp, Homo sapien
cttgtcgcagatggccggcctcagc

SEQ ID NO: 1824868 - DNA, 25 bp, Homo sapien
agctgcaggcgggaaccgtcgggca

SEQ ID NO: 1824869 - DNA, 25 bp, Homo sapien
aaccgtcgggcagggtgcaggcctg

SEQ ID NO: 1824870 - DNA, 25 bp, Homo sapien
cacgacttcttgaggatgtggccat

SEQ ID NO: 1824871 - DNA, 25 bp, Homo sapien
ggaattggtcaaagagggccagctc

SEQ ID NO: 1824872 - DNA, 25 bp, Homo sapien
tagatgaagcgcacatagccgtcag

SEQ ID NO: 1824873 - DNA, 25 bp, Homo sapien
tagccgtcaggccactctcggaatt

SEQ ID NO: 1824874 - DNA, 25 bp, Homo sapien
cggatcgttgatgtcccagctgagc

SEQ ID NO: 1824875 - DNA, 25 bp, Homo sapien
ccagctgagctgcatcccgtaggag

SEQ ID NO: 1824876 - DNA, 25 bp, Homo sapien
gaggcatctgcggatcgttgatgtc

SEQ ID NO: 1824877 - DNA, 25 bp, Homo sapien
tgcatcccgtaggagcacacgccga

SEQ ID NO: 1824878 - DNA, 25 bp, Homo sapien
ctgcccaactcgctcgcgctttccg

SEQ ID NO: 1824879 - DNA, 25 bp, Homo sapien
ccaactcgctcgcgctttccgccca

SEQ ID NO: 1824880 - DNA, 25 bp, Homo sapien
gcccaactcgctcgcgctttccgcc

SEQ ID NO: 1824881 - DNA, 25 bp, Homo sapien
aactcgctcgcgctttccgcccagg

SEQ ID NO: 1824882 - DNA, 25 bp, Homo sapien
agaaaaaaggacaggtgcgccaggt

SEQ ID NO: 1824883 - DNA, 25 bp, Homo sapien
gaagaaaaaaggacaggtgcgccag

SEQ ID NO: 1824884 - DNA, 25 bp, Homo sapien
taaagaagaaagtggggtgtgtgaa

SEQ ID NO: 1824885 - DNA, 25 bp, Homo sapien
aaaaaaggacaggtgcgccaggtgg

SEQ ID NO: 1824886 - DNA, 25 bp, Homo sapien
tgcaggaacggagtcctacaaagtg

SEQ ID NO: 1824887 - DNA, 25 bp, Homo sapien
cctgcaggaacggagtcctacaaag

SEQ ID NO: 1824888 - DNA, 25 bp, Homo sapien
gccctgcaggaacggagtcctacaa

SEQ ID NO: 1824889 - DNA, 25 bp, Homo sapien
caggaacggagtcctacaaagtgaa

SEQ ID NO: 1824890 - DNA, 25 bp, Homo sapien
gaggatgaaccgaatccatgaccct

SEQ ID NO: 1824891 - DNA, 25 bp, Homo sapien
cttgatagaggaggatgaaccgaat

SEQ ID NO: 1824892 - DNA, 25 bp, Homo sapien
tgatagaggaggatgaaccgaatcc

SEQ ID NO: 1824893 - DNA, 25 bp, Homo sapien
tagaggaggatgaaccgaatccatg

SEQ ID NO: 1824894 - DNA, 25 bp, Homo sapien
gggactcggccaggagggcgcccat

SEQ ID NO: 1824895 - DNA, 25 bp, Homo sapien
ttggcaccgcaaagcccgtgctgag

SEQ ID NO: 1824896 - DNA, 25 bp, Homo sapien
taggccttggcaccgcaaagcccgt

SEQ ID NO: 1824897 - DNA, 25 bp, Homo sapien
aaagcccgtgctgagcgcacggacg

SEQ ID NO: 1824898 - DNA, 25 bp, Homo sapien
agcggcgcgtcgcttcaggaacgaa

SEQ ID NO: 1824899 - DNA, 25 bp, Homo sapien
agttgcggaagaagactcgactcga

SEQ ID NO: 1824900 - DNA, 25 bp, Homo sapien
agagcggtccgccaccagggctctt

SEQ ID NO: 1824901 - DNA, 25 bp, Homo sapien
accgagcgcaacaaagctgagcggc

SEQ ID NO: 1824902 - DNA, 25 bp, Homo sapien
ccttgggtttgctcggagtgtattg

SEQ ID NO: 1824903 - DNA, 25 bp, Homo sapien
ccttgaggtgttcgctcagagaccg

SEQ ID NO: 1824904 - DNA, 25 bp, Homo sapien
gggtgctgggcatagtcccccgcca

SEQ ID NO: 1824905 - DNA, 25 bp, Homo sapien
aggttctgccgccttgaggtgttcg

SEQ ID NO: 1824906 - DNA, 25 bp, Homo sapien
aaatccatctgtcatctggcgccat

SEQ ID NO: 1824907 - DNA, 25 bp, Homo sapien
tcttgttctccataaaatccatctg

SEQ ID NO: 1824908 - DNA, 25 bp, Homo sapien
tgttctccataaaatccatctgtca

SEQ ID NO: 1824909 - DNA, 25 bp, Homo sapien
cataaaatccatctgtcatctggcg

SEQ ID NO: 1824910 - DNA, 25 bp, Homo sapien
tctgtgtactagagtggctccagaa

SEQ ID NO: 1824911 - DNA, 25 bp, Homo sapien
gtgtactagagtggctccagaaatt

SEQ ID NO: 1824912 - DNA, 25 bp, Homo sapien
agggggatacctttctgtgtactag

SEQ ID NO: 1824913 - DNA, 25 bp, Homo sapien
tcacagaagggggatacctttctgt

SEQ ID NO: 1824914 - DNA, 25 bp, Homo sapien
agtgccccgcttgctcatgcagaaa

SEQ ID NO: 1824915 - DNA, 25 bp, Homo sapien
tgtatacagtacagagcatatcagc

SEQ ID NO: 1824916 - DNA, 25 bp, Homo sapien
gcatatcagcaagttcggagcggtt

SEQ ID NO: 1824917 - DNA, 25 bp, Homo sapien
ttctgagagtatcgacagtgccccg

SEQ ID NO: 1824918 - DNA, 25 bp, Homo sapien
gaacagtttctagtaatacagcttt

SEQ ID NO: 1824919 - DNA, 25 bp, Homo sapien
tcattgaatagttcaacctgaaata

SEQ ID NO: 1824920 - DNA, 25 bp, Homo sapien
tgagttatcagttagaaatggaccc

SEQ ID NO: 1824921 - DNA, 25 bp, Homo sapien
ggtgggttaaacctatgagccagag

SEQ ID NO: 1824922 - DNA, 25 bp, Homo sapien
ccaagaattgctggtctcttctttt

SEQ ID NO: 1824923 - DNA, 25 bp, Homo sapien
atcatcttgtacccaagaattgctg

SEQ ID NO: 1824924 - DNA, 25 bp, Homo sapien
tcatcttgtacccaagaattgctgg

SEQ ID NO: 1824925 - DNA, 25 bp, Homo sapien
cagtcggctacccaagataagttca

SEQ ID NO: 1824926 - DNA, 25 bp, Homo sapien
cgagcactgccacttcgaagaaggt

SEQ ID NO: 1824927 - DNA, 25 bp, Homo sapien
cacagggtgtcacttcagagcaagg

SEQ ID NO: 1824928 - DNA, 25 bp, Homo sapien
tctggagagccatgcctttggtaaa

SEQ ID NO: 1824929 - DNA, 25 bp, Homo sapien
ctatctgccagccgcatcgccctgc

SEQ ID NO: 1824930 - DNA, 25 bp, Homo sapien
ctcactatctgccagccgcatcgcc

SEQ ID NO: 1824931 - DNA, 25 bp, Homo sapien
ctctcactatctgccagccgcatcg

SEQ ID NO: 1824932 - DNA, 25 bp, Homo sapien
cactatctgccagccgcatcgccct

SEQ ID NO: 1824933 - DNA, 25 bp, Homo sapien
tacagatttccttgtcctctcagtg

SEQ ID NO: 1824934 - DNA, 25 bp, Homo sapien
cgttagatccacaatgaccgcattt

SEQ ID NO: 1824935 - DNA, 25 bp, Homo sapien
taccaattgctcaatgagggtacgg

SEQ ID NO: 1824936 - DNA, 25 bp, Homo sapien
tcccggtgggttgctcgttagatcc

SEQ ID NO: 1824937 - DNA, 25 bp, Homo sapien
tgctatgcactgagaccttagggcc

SEQ ID NO: 1824938 - DNA, 25 bp, Homo sapien
tccagagtggcaggtatgctatgca

SEQ ID NO: 1824939 - DNA, 25 bp, Homo sapien
cctcactggcacgtaagaataagct

SEQ ID NO: 1824940 - DNA, 25 bp, Homo sapien
gatgaccagtgagcatattagacca

SEQ ID NO: 1824941 - DNA, 25 bp, Homo sapien
cagaggagccattaacagtcatgct

SEQ ID NO: 1824942 - DNA, 25 bp, Homo sapien
ctttctccttggtccaacttgtgtt

SEQ ID NO: 1824943 - DNA, 25 bp, Homo sapien
ttaacagtcatgcttgaagctagcc

SEQ ID NO: 1824944 - DNA, 25 bp, Homo sapien
acttgtgttttgtcacagaggagcc

SEQ ID NO: 1824945 - DNA, 25 bp, Homo sapien
tgtatttgatgtcagtgtcaggacc

SEQ ID NO: 1824946 - DNA, 25 bp, Homo sapien
gaaaggcactctggacgctaatgag

SEQ ID NO: 1824947 - DNA, 25 bp, Homo sapien
aacagaaatgggtcggccgcactga

SEQ ID NO: 1824948 - DNA, 25 bp, Homo sapien
gcatcaccctagagactatcctaag

SEQ ID NO: 1824949 - DNA, 25 bp, Homo sapien
taacctaggctgactggcacaagag

SEQ ID NO: 1824950 - DNA, 25 bp, Homo sapien
tagagatcgcatatacctgagcagg

SEQ ID NO: 1824951 - DNA, 25 bp, Homo sapien
ctcagaaagtaaacgggcagccaga

SEQ ID NO: 1824952 - DNA, 25 bp, Homo sapien
gagcatggcatctgtataacctagg

SEQ ID NO: 1824953 - DNA, 25 bp, Homo sapien
tgcaccagttctgaggtcctcggag

SEQ ID NO: 1824954 - DNA, 25 bp, Homo sapien
aacaatgctccacgtttcctggctg

SEQ ID NO: 1824955 - DNA, 25 bp, Homo sapien
gcgttataaggacagcttctggcga

SEQ ID NO: 1824956 - DNA, 25 bp, Homo sapien
tcctggctgtgtatgcgtataaggc

SEQ ID NO: 1824957 - DNA, 25 bp, Homo sapien
tcttcattggcttttttcggtatgt

SEQ ID NO: 1824958 - DNA, 25 bp, Homo sapien
taggctttggaaaaaccattcttca

SEQ ID NO: 1824959 - DNA, 25 bp, Homo sapien
cttgttcatcactccatttgctgca

SEQ ID NO: 1824960 - DNA, 25 bp, Homo sapien
ccatttgctgcagtgaagtaggctt

SEQ ID NO: 1824961 - DNA, 25 bp, Homo sapien
gcatgtatttcaatgactattagag

SEQ ID NO: 1824962 - DNA, 25 bp, Homo sapien
atgcatgtatttcaatgactattag

SEQ ID NO: 1824963 - DNA, 25 bp, Homo sapien
catgtatttcaatgactattagagg

SEQ ID NO: 1824964 - DNA, 25 bp, Homo sapien
tgtatttcaatgactattagaggtc

SEQ ID NO: 1824965 - DNA, 25 bp, Homo sapien
tgaagctgtcttccatttaagttgt

SEQ ID NO: 1824966 - DNA, 25 bp, Homo sapien
tatagctttcatccgttcttgtaca

SEQ ID NO: 1824967 - DNA, 25 bp, Homo sapien
ggcctcttctctgttatagctttca

SEQ ID NO: 1824968 - DNA, 25 bp, Homo sapien
ttcatccgttcttgtacaacagagt

SEQ ID NO: 1824969 - DNA, 25 bp, Homo sapien
taagaagaggatgactaacgttagc

SEQ ID NO: 1824970 - DNA, 25 bp, Homo sapien
acggtttcacgacggcgctcatggt

SEQ ID NO: 1824971 - DNA, 25 bp, Homo sapien
gcgtgatggtgagcacgaactgcac

SEQ ID NO: 1824972 - DNA, 25 bp, Homo sapien
actggaagatgagacaaccgaaggg

SEQ ID NO: 1824973 - DNA, 25 bp, Homo sapien
aactgttcagtgttggtccaaagaa

SEQ ID NO: 1824974 - DNA, 25 bp, Homo sapien
tacttgtgcatagatggaaacacag

SEQ ID NO: 1824975 - DNA, 25 bp, Homo sapien
tgagcctgtgtgagatatttcttcc

SEQ ID NO: 1824976 - DNA, 25 bp, Homo sapien
ttccaccaaagatacttgtgcatag

SEQ ID NO: 1824977 - DNA, 25 bp, Homo sapien
caagaaatggatgtctacccgtcta

SEQ ID NO: 1824978 - DNA, 25 bp, Homo sapien
atattcttaagcagaaattgtcaca

SEQ ID NO: 1824979 - DNA, 25 bp, Homo sapien
tctgtacacagtgatgatttgggtt

SEQ ID NO: 1824980 - DNA, 25 bp, Homo sapien
tagaaggacagagatcaattctttc

SEQ ID NO: 1824981 - DNA, 25 bp, Homo sapien
cacagtcactgatactccaaatatc

SEQ ID NO: 1824982 - DNA, 25 bp, Homo sapien
acagtcactgatactccaaatatct

SEQ ID NO: 1824983 - DNA, 25 bp, Homo sapien
gactgaagttttacatgttctgatt

SEQ ID NO: 1824984 - DNA, 25 bp, Homo sapien
ctctacaagatcctaaatcctggaa

SEQ ID NO: 1824985 - DNA, 25 bp, Homo sapien
tttctaaattcttgagaacaagaca

SEQ ID NO: 1824986 - DNA, 25 bp, Homo sapien
tcctggaacaaagtcattttgactg

SEQ ID NO: 1824987 - DNA, 25 bp, Homo sapien
tcagttaactaggaagatggcttga

SEQ ID NO: 1824988 - DNA, 25 bp, Homo sapien
catggtggtatatgcgggtagtcag

SEQ ID NO: 1824989 - DNA, 25 bp, Homo sapien
tagtcagttaactaggaagatggct

SEQ ID NO: 1824990 - DNA, 25 bp, Homo sapien
tatgcgggtagtcagttaactagga

SEQ ID NO: 1824991 - DNA, 25 bp, Homo sapien
aaggtatccagttcaagacacacca

SEQ ID NO: 1824992 - DNA, 25 bp, Homo sapien
tttgtccacaaggtatccagttcaa

SEQ ID NO: 1824993 - DNA, 25 bp, Homo sapien
cacaaggtatccagttcaagacaca

SEQ ID NO: 1824994 - DNA, 25 bp, Homo sapien
gtccacaaggtatccagttcaagac

SEQ ID NO: 1824995 - DNA, 25 bp, Homo sapien
gatgttaaacatagaagcatgatga

SEQ ID NO: 1824996 - DNA, 25 bp, Homo sapien
tccgcaaaacgaagaaaattgtgtc

SEQ ID NO: 1824997 - DNA, 25 bp, Homo sapien
gaaatagtaccaccaaagcaccttg

SEQ ID NO: 1824998 - DNA, 25 bp, Homo sapien
tgtgtccaggaactctactgatttg

SEQ ID NO: 1824999 - DNA, 25 bp, Homo sapien
tcactccacttggtagaggcatctg

SEQ ID NO: 1825000 - DNA, 25 bp, Homo sapien
tgttcatgtaactatatcccagaga

SEQ ID NO: 1825001 - DNA, 25 bp, Homo sapien
attctgtagcggtatagagctcttc

SEQ ID NO: 1825002 - DNA, 25 bp, Homo sapien
ggtgctatcctataaacacggtctg

SEQ ID NO: 1825003 - DNA, 25 bp, Homo sapien
ggatgtcagcttcccctgcgctggt

SEQ ID NO: 1825004 - DNA, 25 bp, Homo sapien
cctgcgctggtaagatcttgacact

SEQ ID NO: 1825005 - DNA, 25 bp, Homo sapien
agatcttgacactgtaagttgtagc

SEQ ID NO: 1825006 - DNA, 25 bp, Homo sapien
agttgtagcctccttcccaagtgga

SEQ ID NO: 1825007 - DNA, 25 bp, Homo sapien
ttctgactccattacaccaaagctc

SEQ ID NO: 1825008 - DNA, 25 bp, Homo sapien
ctggtgtggttggacatgcaggctg

SEQ ID NO: 1825009 - DNA, 25 bp, Homo sapien
tgctggtgtggttggacatgcaggc

SEQ ID NO: 1825010 - DNA, 25 bp, Homo sapien
aagctccacccaaacaggtactaga

SEQ ID NO: 1825011 - DNA, 25 bp, Homo sapien
tctgccagcatgtacgcggagagaa

SEQ ID NO: 1825012 - DNA, 25 bp, Homo sapien
gattatacaaggtgaggatacccct

SEQ ID NO: 1825013 - DNA, 25 bp, Homo sapien
gaggatacccctgagagaaagagca

SEQ ID NO: 1825014 - DNA, 25 bp, Homo sapien
gaagtgtgattccaagattatacaa

SEQ ID NO: 1825015 - DNA, 25 bp, Homo sapien
ccagccatattgagagcagatacat

SEQ ID NO: 1825016 - DNA, 25 bp, Homo sapien
atacttgttacccagccatattgag

SEQ ID NO: 1825017 - DNA, 25 bp, Homo sapien
ttacccagccatattgagagcagat

SEQ ID NO: 1825018 - DNA, 25 bp, Homo sapien
tgttacccagccatattgagagcag

SEQ ID NO: 1825019 - DNA, 25 bp, Homo sapien
taagagtccaacatgaaccaccctc

SEQ ID NO: 1825020 - DNA, 25 bp, Homo sapien
gtaagagtccaacatgaaccaccct

SEQ ID NO: 1825021 - DNA, 25 bp, Homo sapien
aggtaagagtccaacatgaaccacc

SEQ ID NO: 1825022 - DNA, 25 bp, Homo sapien
gagtccaacatgaaccaccctctga

SEQ ID NO: 1825023 - DNA, 25 bp, Homo sapien
tcgcggtccaaacatattgtccaaa

SEQ ID NO: 1825024 - DNA, 25 bp, Homo sapien
gcggtccaaacatattgtccaaaaa

SEQ ID NO: 1825025 - DNA, 25 bp, Homo sapien
aacatattgtccaaaaaagcattga

SEQ ID NO: 1825026 - DNA, 25 bp, Homo sapien
ctcgcggtccaaacatattgtccaa

SEQ ID NO: 1825027 - DNA, 25 bp, Homo sapien
gtgagtcctctccattgttcccatg

SEQ ID NO: 1825028 - DNA, 25 bp, Homo sapien
gaaactaggtttacaggatggataa

SEQ ID NO: 1825029 - DNA, 25 bp, Homo sapien
caacttcccaggaacctcaaggtca

SEQ ID NO: 1825030 - DNA, 25 bp, Homo sapien
caaggctgagctgtacagaactgag

SEQ ID NO: 1825031 - DNA, 25 bp, Homo sapien
tatcataaggctgaaactgtctacc

SEQ ID NO: 1825032 - DNA, 25 bp, Homo sapien
aactactattctctggagggagtaa

SEQ ID NO: 1825033 - DNA, 25 bp, Homo sapien
ttttcagggcctatccactctcatc

SEQ ID NO: 1825034 - DNA, 25 bp, Homo sapien
gctgtcgtgcagctgacttcacaca

SEQ ID NO: 1825035 - DNA, 25 bp, Homo sapien
caggacagtcccattcaattaaggt

SEQ ID NO: 1825036 - DNA, 25 bp, Homo sapien
tatttgcatcctaggtagccctgag

SEQ ID NO: 1825037 - DNA, 25 bp, Homo sapien
tgatctctgcggatctcaagcccct

SEQ ID NO: 1825038 - DNA, 25 bp, Homo sapien
caagagtggtgctatcaggtgagac

SEQ ID NO: 1825039 - DNA, 25 bp, Homo sapien
atctaactcctcagtgtaatggtca

SEQ ID NO: 1825040 - DNA, 25 bp, Homo sapien
agagagagacggcatgagttaactt

SEQ ID NO: 1825041 - DNA, 25 bp, Homo sapien
gacggcatgagttaacttttaatct

SEQ ID NO: 1825042 - DNA, 25 bp, Homo sapien
taacttttaatctaactcctcagtg

SEQ ID NO: 1825043 - DNA, 25 bp, Homo sapien
tacatatggatgttgttcacaatca

SEQ ID NO: 1825044 - DNA, 25 bp, Homo sapien
gggaaaagtactactgcctttctca

SEQ ID NO: 1825045 - DNA, 25 bp, Homo sapien
tatatggaatagcagaagaggtggt

SEQ ID NO: 1825046 - DNA, 25 bp, Homo sapien
aatatttagagctggttttgctacc

SEQ ID NO: 1825047 - DNA, 25 bp, Homo sapien
gcgatgcgctgtccagggtagccgg

SEQ ID NO: 1825048 - DNA, 25 bp, Homo sapien
gcggctgtggcgcggcgacccgggc

SEQ ID NO: 1825049 - DNA, 25 bp, Homo sapien
gcgctgtccagggtagccgggtccc

SEQ ID NO: 1825050 - DNA, 25 bp, Homo sapien
ggcggcgatgcgctgtccagggtag

SEQ ID NO: 1825051 - DNA, 25 bp, Homo sapien
agagccgcccgagaatgaaagcagc

SEQ ID NO: 1825052 - DNA, 25 bp, Homo sapien
gccgggcgacgctgacatctggcat

SEQ ID NO: 1825053 - DNA, 25 bp, Homo sapien
cttgtggccgccgtgtgtacccgtg

SEQ ID NO: 1825054 - DNA, 25 bp, Homo sapien
gagttgtagtccctgcgagacaacg

SEQ ID NO: 1825055 - DNA, 25 bp, Homo sapien
gcggtagccgcgaggcagttccaca

SEQ ID NO: 1825056 - DNA, 25 bp, Homo sapien
tggccacgctgctgatcgtcctgct

SEQ ID NO: 1825057 - DNA, 25 bp, Homo sapien
actctgcttgtgttcgtggccacgc

SEQ ID NO: 1825058 - DNA, 25 bp, Homo sapien
tgtggcacagcgtcgggctgactct

SEQ ID NO: 1825059 - DNA, 25 bp, Homo sapien
tcacccacataacttatctgctccc

SEQ ID NO: 1825060 - DNA, 25 bp, Homo sapien
acataacttatctgctccctgctcg

SEQ ID NO: 1825061 - DNA, 25 bp, Homo sapien
tttctgagatttcatggactcctct

SEQ ID NO: 1825062 - DNA, 25 bp, Homo sapien
cacccaatttctgagatttcatgga

SEQ ID NO: 1825063 - DNA, 25 bp, Homo sapien
agcaagggtgattcatgaacaggca

SEQ ID NO: 1825064 - DNA, 25 bp, Homo sapien
tcatgaacaggcagggccaaactgc

SEQ ID NO: 1825065 - DNA, 25 bp, Homo sapien
attcatgaacaggcagggccaaact

SEQ ID NO: 1825066 - DNA, 25 bp, Homo sapien
tgagcaagggtgattcatgaacagg

SEQ ID NO: 1825067 - DNA, 25 bp, Homo sapien
cttgaagagagccaagcgggtgact

SEQ ID NO: 1825068 - DNA, 25 bp, Homo sapien
tagtccaaggcaagttttatagcag

SEQ ID NO: 1825069 - DNA, 25 bp, Homo sapien
cagcaaatccaatgggtctgcagca

SEQ ID NO: 1825070 - DNA, 25 bp, Homo sapien
tatctattgggaggccatcgttccc

SEQ ID NO: 1825071 - DNA, 25 bp, Homo sapien
tgttccactagcgagcagtctaggg

SEQ ID NO: 1825072 - DNA, 25 bp, Homo sapien
tcgcctctgtcgtgttccactagcg

SEQ ID NO: 1825073 - DNA, 25 bp, Homo sapien
caggatggctctgtggattggcaaa

SEQ ID NO: 1825074 - DNA, 25 bp, Homo sapien
ggcaaaaaccatatccagccaggtc

SEQ ID NO: 1825075 - DNA, 25 bp, Homo sapien
gaatattgcgaggatggcgtcctgc

SEQ ID NO: 1825076 - DNA, 25 bp, Homo sapien
cttgaatattgcgaggatggcgtcc

SEQ ID NO: 1825077 - DNA, 25 bp, Homo sapien
ctgagattcgtctggagctttatgg

SEQ ID NO: 1825078 - DNA, 25 bp, Homo sapien
gatggcgtcctgcactgagattcgt

SEQ ID NO: 1825079 - DNA, 25 bp, Homo sapien
gcattggtgaatcgactggccacaa

SEQ ID NO: 1825080 - DNA, 25 bp, Homo sapien
tcagcaggccggaaccagaagtttc

SEQ ID NO: 1825081 - DNA, 25 bp, Homo sapien
gattccagcaattccggttcccgta

SEQ ID NO: 1825082 - DNA, 25 bp, Homo sapien
tgagtggctcgttcccgtaaactgg

SEQ ID NO: 1825083 - DNA, 25 bp, Homo sapien
tgttggttagaatctacagtgaaag

SEQ ID NO: 1825084 - DNA, 25 bp, Homo sapien
ttgtgggtgtatgtttggtaagtct

SEQ ID NO: 1825085 - DNA, 25 bp, Homo sapien
taagtctgttggttagaatctacag

SEQ ID NO: 1825086 - DNA, 25 bp, Homo sapien
tggttgatggcggaattggttgtgg

SEQ ID NO: 1825087 - DNA, 25 bp, Homo sapien
gggctattcccattaggttgatatt

SEQ ID NO: 1825088 - DNA, 25 bp, Homo sapien
gattagggtcccatcgataggaaat

SEQ ID NO: 1825089 - DNA, 25 bp, Homo sapien
aaatgggaggtttctggcggatatc

SEQ ID NO: 1825090 - DNA, 25 bp, Homo sapien
caataacgggaaatcaggatggcgg

SEQ ID NO: 1825091 - DNA, 25 bp, Homo sapien
ggcgtgagaatgagaaccagcagga

SEQ ID NO: 1825092 - DNA, 25 bp, Homo sapien
gcgtgagaatgagaaccagcaggag

SEQ ID NO: 1825093 - DNA, 25 bp, Homo sapien
aggcgtgagaatgagaaccagcagg

SEQ ID NO: 1825094 - DNA, 25 bp, Homo sapien
aaggcgtgagaatgagaaccagcag

SEQ ID NO: 1825095 - DNA, 25 bp, Homo sapien
taaaatttctagtattgggatcacc

SEQ ID NO: 1825096 - DNA, 25 bp, Homo sapien
ccttgcaagtgtattccggagctga

SEQ ID NO: 1825097 - DNA, 25 bp, Homo sapien
tggtcacaaaacgagctgccaatgg

SEQ ID NO: 1825098 - DNA, 25 bp, Homo sapien
ttcacttgggtgtgatggatctagc

SEQ ID NO: 1825099 - DNA, 25 bp, Homo sapien
atccaagtgccctgttcagcccttg

SEQ ID NO: 1825100 - DNA, 25 bp, Homo sapien
gagagatccaagtgccctgttcagc

SEQ ID NO: 1825101 - DNA, 25 bp, Homo sapien
tagggaaggtatccgagtcactgca

SEQ ID NO: 1825102 - DNA, 25 bp, Homo sapien
agatccaagtgccctgttcagccct

SEQ ID NO: 1825103 - DNA, 25 bp, Homo sapien
aaaggattgcctatcacacgccaag

SEQ ID NO: 1825104 - DNA, 25 bp, Homo sapien
tgaccgattcatgcgtcgagcagga

SEQ ID NO: 1825105 - DNA, 25 bp, Homo sapien
cacaagaggctggtgtgaccgattc

SEQ ID NO: 1825106 - DNA, 25 bp, Homo sapien
tcgtcgctggagaaatgatcgcaat

SEQ ID NO: 1825107 - DNA, 25 bp, Homo sapien
acctttttgctatattgtagctctt

SEQ ID NO: 1825108 - DNA, 25 bp, Homo sapien
tgctatattgtagctcttggagata

SEQ ID NO: 1825109 - DNA, 25 bp, Homo sapien
ttgctatattgtagctcttggagat

SEQ ID NO: 1825110 - DNA, 25 bp, Homo sapien
tttttgctatattgtagctcttgga

SEQ ID NO: 1825111 - DNA, 25 bp, Homo sapien
tgtattgtctgcttctaaagtgtcc

SEQ ID NO: 1825112 - DNA, 25 bp, Homo sapien
tatggactctcaagcgactaatgga

SEQ ID NO: 1825113 - DNA, 25 bp, Homo sapien
ggtcagtactatgaagcttctgtgg

SEQ ID NO: 1825114 - DNA, 25 bp, Homo sapien
tgtttaacacgatcctccaagttgg

SEQ ID NO: 1825115 - DNA, 25 bp, Homo sapien
cactcagacatccccaccctactca

SEQ ID NO: 1825116 - DNA, 25 bp, Homo sapien
tcactcagacatccccaccctactc

SEQ ID NO: 1825117 - DNA, 25 bp, Homo sapien
actcagacatccccaccctactcac

SEQ ID NO: 1825118 - DNA, 25 bp, Homo sapien
ctttcaatttcagcacacaaatcac

SEQ ID NO: 1825119 - DNA, 25 bp, Homo sapien
ccttccactggccgtgcccctcact

SEQ ID NO: 1825120 - DNA, 25 bp, Homo sapien
tttcaatttcagcacacaaatcact

SEQ ID NO: 1825121 - DNA, 25 bp, Homo sapien
tccactggccgtgcccctcactcac

SEQ ID NO: 1825122 - DNA, 25 bp, Homo sapien
acccagggagtgatgctttgagcag

SEQ ID NO: 1825123 - DNA, 25 bp, Homo sapien
gagcatctcagtgacagcgctgaca

SEQ ID NO: 1825124 - DNA, 25 bp, Homo sapien
ggtggcttgcggatactcggtatct

SEQ ID NO: 1825125 - DNA, 25 bp, Homo sapien
cagtaaggtggaccccatagggccg

SEQ ID NO: 1825126 - DNA, 25 bp, Homo sapien
gatttattggccaagatctgggaga

SEQ ID NO: 1825127 - DNA, 25 bp, Homo sapien
agtaccctacaccttgggagtagag

SEQ ID NO: 1825128 - DNA, 25 bp, Homo sapien
taaaaaaccccttgagccagagaga

SEQ ID NO: 1825129 - DNA, 25 bp, Homo sapien
ggaggactaggtaattcggaccaga

SEQ ID NO: 1825130 - DNA, 25 bp, Homo sapien
ggttaggcagaatcttccttttcac

SEQ ID NO: 1825131 - DNA, 25 bp, Homo sapien
tcacattgaggccatctgcatactc

SEQ ID NO: 1825132 - DNA, 25 bp, Homo sapien
tttcctggcagtcaccttccagttc

SEQ ID NO: 1825133 - DNA, 25 bp, Homo sapien
ttctggaattctagcacactgtagg

SEQ ID NO: 1825134 - DNA, 25 bp, Homo sapien
cacagcgtaaggtcttgtgcaagta

SEQ ID NO: 1825135 - DNA, 25 bp, Homo sapien
gaaacatcaggccagagctgcgatg

SEQ ID NO: 1825136 - DNA, 25 bp, Homo sapien
tgagcaaatcggtacaagaggaaca

SEQ ID NO: 1825137 - DNA, 25 bp, Homo sapien
atgggtccctccaatgcacagcgta

SEQ ID NO: 1825138 - DNA, 25 bp, Homo sapien
caatggttgaaaggcctatagatgc

SEQ ID NO: 1825139 - DNA, 25 bp, Homo sapien
tttgctcattgatcataaaactttt

SEQ ID NO: 1825140 - DNA, 25 bp, Homo sapien
aaaggcctatagatgctgtaagtgc

SEQ ID NO: 1825141 - DNA, 25 bp, Homo sapien
ttgcttgctggtgcaatggttgaaa

SEQ ID NO: 1825142 - DNA, 25 bp, Homo sapien
tgattaacgtcacagtcatcccaaa

SEQ ID NO: 1825143 - DNA, 25 bp, Homo sapien
taacgtcacagtcatcccaaaccat

SEQ ID NO: 1825144 - DNA, 25 bp, Homo sapien
gggtgattaacgtcacagtcatccc

SEQ ID NO: 1825145 - DNA, 25 bp, Homo sapien
gagcatggggtgattaacgtcacag

SEQ ID NO: 1825146 - DNA, 25 bp, Homo sapien
tacccctggccttaggaaatcacag

SEQ ID NO: 1825147 - DNA, 25 bp, Homo sapien
gtatgtttcaaatcctcagtagcca

SEQ ID NO: 1825148 - DNA, 25 bp, Homo sapien
aagatatagataccgtgctgtccag

SEQ ID NO: 1825149 - DNA, 25 bp, Homo sapien
aggctccttcgtgctctttcccaaa

SEQ ID NO: 1825150 - DNA, 25 bp, Homo sapien
catgtttctgaggttgatctgctca

SEQ ID NO: 1825151 - DNA, 25 bp, Homo sapien
gagacttcgtgattggtacatacac

SEQ ID NO: 1825152 - DNA, 25 bp, Homo sapien
tacactcctatcagcaacggaagag

SEQ ID NO: 1825153 - DNA, 25 bp, Homo sapien
cggaagagagttccattcttaccaa

SEQ ID NO: 1825154 - DNA, 25 bp, Homo sapien
tcatagggtagacataggtttaact

SEQ ID NO: 1825155 - DNA, 25 bp, Homo sapien
aactttttaggaaatcgccaatctg

SEQ ID NO: 1825156 - DNA, 25 bp, Homo sapien
ctttcttgcaccaacacagggtatc

SEQ ID NO: 1825157 - DNA, 25 bp, Homo sapien
ttaccagtgatatacaagagcaatg

SEQ ID NO: 1825158 - DNA, 25 bp, Homo sapien
tctgtgacagaggagtatgaaaaag

SEQ ID NO: 1825159 - DNA, 25 bp, Homo sapien
tgtgacagaggagtatgaaaaagaa

SEQ ID NO: 1825160 - DNA, 25 bp, Homo sapien
gtgacagaggagtatgaaaaagaaa

SEQ ID NO: 1825161 - DNA, 25 bp, Homo sapien
ctgtgacagaggagtatgaaaaaga

SEQ ID NO: 1825162 - DNA, 25 bp, Homo sapien
tagttccatgatcaaggacctggcc

SEQ ID NO: 1825163 - DNA, 25 bp, Homo sapien
tctgaaatttgctccgcaagagggc

SEQ ID NO: 1825164 - DNA, 25 bp, Homo sapien
gaaaggcctctacttgcaactggcg

SEQ ID NO: 1825165 - DNA, 25 bp, Homo sapien
cccagatttgggagtgccaggctca

SEQ ID NO: 1825166 - DNA, 25 bp, Homo sapien
tacatgggcatacaaaagcacgtgg

SEQ ID NO: 1825167 - DNA, 25 bp, Homo sapien
ttctgaaagttgactgacccataaa

SEQ ID NO: 1825168 - DNA, 25 bp, Homo sapien
aagcacgtggacaagttttctgtac

SEQ ID NO: 1825169 - DNA, 25 bp, Homo sapien
atgtatacataagaaccactcaggg

SEQ ID NO: 1825170 - DNA, 25 bp, Homo sapien
gcttgaacagctgggcatttctaga

SEQ ID NO: 1825171 - DNA, 25 bp, Homo sapien
gggcatttctagaaaggtctgtcac

SEQ ID NO: 1825172 - DNA, 25 bp, Homo sapien
tcagaacgttgccatctccagcaaa

SEQ ID NO: 1825173 - DNA, 25 bp, Homo sapien
tctccagcaaagagcgcttgaacag

SEQ ID NO: 1825174 - DNA, 25 bp, Homo sapien
agagggcttccacttcgagatgtca

SEQ ID NO: 1825175 - DNA, 25 bp, Homo sapien
tgctgtgtgccacgaagattcgcgg

SEQ ID NO: 1825176 - DNA, 25 bp, Homo sapien
tgactatggtcttgagctgctcgca

SEQ ID NO: 1825177 - DNA, 25 bp, Homo sapien
caactgaagagtgcgtcaatggcgt

SEQ ID NO: 1825178 - DNA, 25 bp, Homo sapien
ggaaagatgatcctcaagctcagac

SEQ ID NO: 1825179 - DNA, 25 bp, Homo sapien
gacgaaagcagatctcattagagca

SEQ ID NO: 1825180 - DNA, 25 bp, Homo sapien
tactggtctcttgtaccctctggct

SEQ ID NO: 1825181 - DNA, 25 bp, Homo sapien
catgtgagctgtaaagcctgggtca

SEQ ID NO: 1825182 - DNA, 25 bp, Homo sapien
caatagctctttctgttgcctctca

SEQ ID NO: 1825183 - DNA, 25 bp, Homo sapien
gatgttccagctgcatcttgttctg

SEQ ID NO: 1825184 - DNA, 25 bp, Homo sapien
ctgatgatgttccagctgcatcttg

SEQ ID NO: 1825185 - DNA, 25 bp, Homo sapien
aatagctctttctgttgcctctcaa

SEQ ID NO: 1825186 - DNA, 25 bp, Homo sapien
aatgcccagtggtcctctaggtaag

SEQ ID NO: 1825187 - DNA, 25 bp, Homo sapien
tcctaggacagctagctaatgccca

SEQ ID NO: 1825188 - DNA, 25 bp, Homo sapien
gaaagctgtcggaatcccaggtcaa

SEQ ID NO: 1825189 - DNA, 25 bp, Homo sapien
ccaattgtaggaggccaactgtgac

SEQ ID NO: 1825190 - DNA, 25 bp, Homo sapien
ttccgggaggcaggcagcatttgca

SEQ ID NO: 1825191 - DNA, 25 bp, Homo sapien
tcatatgcgtcgttctgagagccca

SEQ ID NO: 1825192 - DNA, 25 bp, Homo sapien
tgagagcccactgactgtccgagtt

SEQ ID NO: 1825193 - DNA, 25 bp, Homo sapien
tcggtagtgaccagtgccattaggc

SEQ ID NO: 1825194 - DNA, 25 bp, Homo sapien
ctatttattgagttggctcatggga

SEQ ID NO: 1825195 - DNA, 25 bp, Homo sapien
gctatttattgagttggctcatggg

SEQ ID NO: 1825196 - DNA, 25 bp, Homo sapien
taggcgggatgtcatacaccccttg

SEQ ID NO: 1825197 - DNA, 25 bp, Homo sapien
tgctgatgagggagggatgtcgtat

SEQ ID NO: 1825198 - DNA, 25 bp, Homo sapien
ttttgtaggcgggatgtcatacacc

SEQ ID NO: 1825199 - DNA, 25 bp, Homo sapien
cccttttgtaggcgggatgtcatac

SEQ ID NO: 1825200 - DNA, 25 bp, Homo sapien
cccgtgagttacccagaatggaaat

SEQ ID NO: 1825201 - DNA, 25 bp, Homo sapien
atggaaatgtcttatacttggtcat

SEQ ID NO: 1825202 - DNA, 25 bp, Homo sapien
tggaaatgtcttatacttggtcatt

SEQ ID NO: 1825203 - DNA, 25 bp, Homo sapien
tgaagagaaacccgtgagttaccca

SEQ ID NO: 1825204 - DNA, 25 bp, Homo sapien
tggatgggtactcgtatacgtagcc

SEQ ID NO: 1825205 - DNA, 25 bp, Homo sapien
ggagggatatcatagacgtcctttt

SEQ ID NO: 1825206 - DNA, 25 bp, Homo sapien
ccttttggtatctggatgggtactc

SEQ ID NO: 1825207 - DNA, 25 bp, Homo sapien
tactcgtatacgtagccatggcctg

SEQ ID NO: 1825208 - DNA, 25 bp, Homo sapien
attacaggtgtgagccactgcatct

SEQ ID NO: 1825209 - DNA, 25 bp, Homo sapien
cacctcagcccccaaaagtgcaggg

SEQ ID NO: 1825210 - DNA, 25 bp, Homo sapien
tgagccactgcatctggcccaggtt

SEQ ID NO: 1825211 - DNA, 25 bp, Homo sapien
ccacctcagcccccaaaagtgcagg

SEQ ID NO: 1825212 - DNA, 25 bp, Homo sapien
cctctacttagagcgctgtcttggc

SEQ ID NO: 1825213 - DNA, 25 bp, Homo sapien
gaaaaccaaggctaagtccagctta

SEQ ID NO: 1825214 - DNA, 25 bp, Homo sapien
tttaaaaaacagaagcgggcatgtc

SEQ ID NO: 1825215 - DNA, 25 bp, Homo sapien
gagtggattttatccaaggttgcca

SEQ ID NO: 1825216 - DNA, 25 bp, Homo sapien
gacattctctgcctcgacctgttgc

SEQ ID NO: 1825217 - DNA, 25 bp, Homo sapien
gatcagggagctcgaagtcttctac

SEQ ID NO: 1825218 - DNA, 25 bp, Homo sapien
cctgttgcttgggtcactttcatgc

SEQ ID NO: 1825219 - DNA, 25 bp, Homo sapien
tctcctcggaggaaaagtgctgact

SEQ ID NO: 1825220 - DNA, 25 bp, Homo sapien
tgcaactgctttcgtgattacccgg

SEQ ID NO: 1825221 - DNA, 25 bp, Homo sapien
ggctctatgatccaatgctactgca

SEQ ID NO: 1825222 - DNA, 25 bp, Homo sapien
ggaggaatccaacctttctcagatg

SEQ ID NO: 1825223 - DNA, 25 bp, Homo sapien
tctcagtaactaacgggagggtcca

SEQ ID NO: 1825224 - DNA, 25 bp, Homo sapien
ctattaagcaagatggcgtgaggtc

SEQ ID NO: 1825225 - DNA, 25 bp, Homo sapien
taattgattttcaaggcccggctga

SEQ ID NO: 1825226 - DNA, 25 bp, Homo sapien
ctccctcggcgagaactgagctgtc

SEQ ID NO: 1825227 - DNA, 25 bp, Homo sapien
agaacagtgccctatcagccatgca

SEQ ID NO: 1825228 - DNA, 25 bp, Homo sapien
ggatgtgtgataggctcgtttatga

SEQ ID NO: 1825229 - DNA, 25 bp, Homo sapien
tttatgagaagctgtgtgccagagg

SEQ ID NO: 1825230 - DNA, 25 bp, Homo sapien
tttctgttgcttattggaagaatta

SEQ ID NO: 1825231 - DNA, 25 bp, Homo sapien
taggctcgtttatgagaagctgtgt

SEQ ID NO: 1825232 - DNA, 25 bp, Homo sapien
tggaaattatacttccctcataggc

SEQ ID NO: 1825233 - DNA, 25 bp, Homo sapien
cactcacaagctatgagaacaaagg

SEQ ID NO: 1825234 - DNA, 25 bp, Homo sapien
ccggttctaccactcacaagctatg

SEQ ID NO: 1825235 - DNA, 25 bp, Homo sapien
tgagatcaagtgcataaagtacctg

SEQ ID NO: 1825236 - DNA, 25 bp, Homo sapien
ttttcaagcctgggggcatttgcta

SEQ ID NO: 1825237 - DNA, 25 bp, Homo sapien
cttcttaatagtgtcaagagttcaa

SEQ ID NO: 1825238 - DNA, 25 bp, Homo sapien
taatagtgtcaagagttcaaggata

SEQ ID NO: 1825239 - DNA, 25 bp, Homo sapien
tgtcaagagttcaaggataataaag

SEQ ID NO: 1825240 - DNA, 25 bp, Homo sapien
ggaatcagatgtatgcttgcctatg

SEQ ID NO: 1825241 - DNA, 25 bp, Homo sapien
catggaatcagatgtatgcttgcct

SEQ ID NO: 1825242 - DNA, 25 bp, Homo sapien
agcatggaatcagatgtatgcttgc

SEQ ID NO: 1825243 - DNA, 25 bp, Homo sapien
cagatgtatgcttgcctatgaggct

SEQ ID NO: 1825244 - DNA, 25 bp, Homo sapien
gcagctcaagacacgccaatgggaa

SEQ ID NO: 1825245 - DNA, 25 bp, Homo sapien
tcaaaatgagatctacgaggcagtg

SEQ ID NO: 1825246 - DNA, 25 bp, Homo sapien
cagcaaatggtaagagacagtggtc

SEQ ID NO: 1825247 - DNA, 25 bp, Homo sapien
cattattacggttatcaccagagca

SEQ ID NO: 1825248 - DNA, 25 bp, Homo sapien
tcatcagatgagatcttttcagtgg

SEQ ID NO: 1825249 - DNA, 25 bp, Homo sapien
ctcatcagatgagatcttttcagtg

SEQ ID NO: 1825250 - DNA, 25 bp, Homo sapien
cacaagctggtttgtttagaggctc

SEQ ID NO: 1825251 - DNA, 25 bp, Homo sapien
gctggtttgtttagaggctctcact

SEQ ID NO: 1825252 - DNA, 25 bp, Homo sapien
tgtttagaggctctcactaagaaat

SEQ ID NO: 1825253 - DNA, 25 bp, Homo sapien
agaggctctcactaagaaataggac

SEQ ID NO: 1825254 - DNA, 25 bp, Homo sapien
ttttctgtcaagacaagttctgctc

SEQ ID NO: 1825255 - DNA, 25 bp, Homo sapien
ctcacattgtgtcacttgttcaagg

SEQ ID NO: 1825256 - DNA, 25 bp, Homo sapien
ttgttcaaggtctcagcaagtctcc

SEQ ID NO: 1825257 - DNA, 25 bp, Homo sapien
gggcacttctttccttgggcatcca

SEQ ID NO: 1825258 - DNA, 25 bp, Homo sapien
ctcaatggagcactaagggaagcgg

SEQ ID NO: 1825259 - DNA, 25 bp, Homo sapien
gctgcatgctgctagctcaatggag

SEQ ID NO: 1825260 - DNA, 25 bp, Homo sapien
ggccatgtggtcagaacttcaactt

SEQ ID NO: 1825261 - DNA, 25 bp, Homo sapien
tgtgcttccagcaaccctaagtaag

SEQ ID NO: 1825262 - DNA, 25 bp, Homo sapien
cactgcctgcccattagaactggga

SEQ ID NO: 1825263 - DNA, 25 bp, Homo sapien
gcctgttggaaagggcttctttcac

SEQ ID NO: 1825264 - DNA, 25 bp, Homo sapien
tagactttataataacctctttgtc

SEQ ID NO: 1825265 - DNA, 25 bp, Homo sapien
gcattaacagagctaccacagtatt

SEQ ID NO: 1825266 - DNA, 25 bp, Homo sapien
ctgaaggtggttgtcgtgtccagag

SEQ ID NO: 1825267 - DNA, 25 bp, Homo sapien
tccagagacaacaggcctaaaacgt

SEQ ID NO: 1825268 - DNA, 25 bp, Homo sapien
gcagaactcggtgccagctctgaag

SEQ ID NO: 1825269 - DNA, 25 bp, Homo sapien
ggtggttgtcgtgtccagagacaac

SEQ ID NO: 1825270 - DNA, 25 bp, Homo sapien
gattacataggggaaaatgggcaga

SEQ ID NO: 1825271 - DNA, 25 bp, Homo sapien
aatgggcagaaaacaatgagttcca

SEQ ID NO: 1825272 - DNA, 25 bp, Homo sapien
gaaaatgggcagaaaacaatgagtt

SEQ ID NO: 1825273 - DNA, 25 bp, Homo sapien
aaaatccaagaggattacatagggg

SEQ ID NO: 1825274 - DNA, 25 bp, Homo sapien
ggcactgtggttctggatgggatgg

SEQ ID NO: 1825275 - DNA, 25 bp, Homo sapien
caaaacccatgtatcgaggcaaaca

SEQ ID NO: 1825276 - DNA, 25 bp, Homo sapien
tagtatctgagtgtcgctctgggca

SEQ ID NO: 1825277 - DNA, 25 bp, Homo sapien
gaatgacctccagttttgtgtaata

SEQ ID NO: 1825278 - DNA, 25 bp, Homo sapien
tgggcaaccagattgcacaatgcct

SEQ ID NO: 1825279 - DNA, 25 bp, Homo sapien
tcctgccaacatttggccgtgaccc

SEQ ID NO: 1825280 - DNA, 25 bp, Homo sapien
cctgccaacatttggccgtgaccca

SEQ ID NO: 1825281 - DNA, 25 bp, Homo sapien
tcaggaatgggcctggaagacctgg

SEQ ID NO: 1825282 - DNA, 25 bp, Homo sapien
ctgccaacatttggccgtgacccat

SEQ ID NO: 1825283 - DNA, 25 bp, Homo sapien
gggctgatgctctaccaagtgctca

SEQ ID NO: 1825284 - DNA, 25 bp, Homo sapien
gccatggcccctgtgctgatggagc

SEQ ID NO: 1825285 - DNA, 25 bp, Homo sapien
ccagcagttagaataaaagcgacac

SEQ ID NO: 1825286 - DNA, 25 bp, Homo sapien
gaggtacaacaaatagttccagcag

SEQ ID NO: 1825287 - DNA, 25 bp, Homo sapien
cttcggtgtgtcgtaagaaacacaa

SEQ ID NO: 1825288 - DNA, 25 bp, Homo sapien
aaacacaacagggctgatgtagtag

SEQ ID NO: 1825289 - DNA, 25 bp, Homo sapien
cacaacagggctgatgtagtaggaa

SEQ ID NO: 1825290 - DNA, 25 bp, Homo sapien
ttcggtgtgtcgtaagaaacacaac

SEQ ID NO: 1825291 - DNA, 25 bp, Homo sapien
gaattttgaactatggaaagtccca

SEQ ID NO: 1825292 - DNA, 25 bp, Homo sapien
cacagtctgtagcaatatcaaggga

SEQ ID NO: 1825293 - DNA, 25 bp, Homo sapien
taaaacttcggaagcccacagtctg

SEQ ID NO: 1825294 - DNA, 25 bp, Homo sapien
cataatcagattggagcatgtccca

SEQ ID NO: 1825295 - DNA, 25 bp, Homo sapien
caccccggtggctcagaataagatt

SEQ ID NO: 1825296 - DNA, 25 bp, Homo sapien
taaaatcacctcctagcagctaagc

SEQ ID NO: 1825297 - DNA, 25 bp, Homo sapien
tgggattatctcttagggcctaggc

SEQ ID NO: 1825298 - DNA, 25 bp, Homo sapien
cctatacccaggaagatgttgacag

SEQ ID NO: 1825299 - DNA, 25 bp, Homo sapien
caagggaagatgagtccgtatctct

SEQ ID NO: 1825300 - DNA, 25 bp, Homo sapien
aagggaagatgagtccgtatctctg

SEQ ID NO: 1825301 - DNA, 25 bp, Homo sapien
tgcaaacatgatgcctgagctaagg

SEQ ID NO: 1825302 - DNA, 25 bp, Homo sapien
gataggaaacgatctgagcacagag

SEQ ID NO: 1825303 - DNA, 25 bp, Homo sapien
cacaggaacttaggagggctggaaa

SEQ ID NO: 1825304 - DNA, 25 bp, Homo sapien
tgttgcatcatcaggcttgtacgag

SEQ ID NO: 1825305 - DNA, 25 bp, Homo sapien
tctctgcactgatggtggcacctga

SEQ ID NO: 1825306 - DNA, 25 bp, Homo sapien
tcttgttcttgggtgccgtggccag

SEQ ID NO: 1825307 - DNA, 25 bp, Homo sapien
tgattttggtaggaaggtggcactt

SEQ ID NO: 1825308 - DNA, 25 bp, Homo sapien
cagtggggacttggtaaattccctg

SEQ ID NO: 1825309 - DNA, 25 bp, Homo sapien
gatgtctcccttgcgaaaggccagt

SEQ ID NO: 1825310 - DNA, 25 bp, Homo sapien
gaggcagtctcctgcatgggaccaa

SEQ ID NO: 1825311 - DNA, 25 bp, Homo sapien
caatgccttgccgaccgtgtaatga

SEQ ID NO: 1825312 - DNA, 25 bp, Homo sapien
gacattgtcatataaggcccttgcc

SEQ ID NO: 1825313 - DNA, 25 bp, Homo sapien
gaaggcctgtctggcacattcagta

SEQ ID NO: 1825314 - DNA, 25 bp, Homo sapien
tcaccattcacatcagaaaagctgt

SEQ ID NO: 1825315 - DNA, 25 bp, Homo sapien
actaagcagacagccaaagtaggca

SEQ ID NO: 1825316 - DNA, 25 bp, Homo sapien
tctccgtctttgtatgaaggcctgt

SEQ ID NO: 1825317 - DNA, 25 bp, Homo sapien
tctctagcaacgtggacttgatcat

SEQ ID NO: 1825318 - DNA, 25 bp, Homo sapien
tcgtgggattttcggctgtcattgt

SEQ ID NO: 1825319 - DNA, 25 bp, Homo sapien
catgacatattcgtgggattttcgg

SEQ ID NO: 1825320 - DNA, 25 bp, Homo sapien
ttcttctctagcaacgtggacttga

SEQ ID NO: 1825321 - DNA, 25 bp, Homo sapien
gataatgacgcagatcgggagcctg

SEQ ID NO: 1825322 - DNA, 25 bp, Homo sapien
cagagagctctaggacacatgacgg

SEQ ID NO: 1825323 - DNA, 25 bp, Homo sapien
caactacggagcaaacaggaaggcc

SEQ ID NO: 1825324 - DNA, 25 bp, Homo sapien
tgatagcatcatcaatggcccggct

SEQ ID NO: 1825325 - DNA, 25 bp, Homo sapien
aaactttagcctggactcttgtggg

SEQ ID NO: 1825326 - DNA, 25 bp, Homo sapien
aatgcatgcatgcagaggacagacc

SEQ ID NO: 1825327 - DNA, 25 bp, Homo sapien
cagggttgccccattctcaatgaca

SEQ ID NO: 1825328 - DNA, 25 bp, Homo sapien
gcatgcctgcatgcgcaaatgcatg

SEQ ID NO: 1825329 - DNA, 25 bp, Homo sapien
tcatcaaggaagtcagtcctaaggc

SEQ ID NO: 1825330 - DNA, 25 bp, Homo sapien
tcaaggaagtcagtcctaaggcagg

SEQ ID NO: 1825331 - DNA, 25 bp, Homo sapien
acattcaaggaaatggccatcatca

SEQ ID NO: 1825332 - DNA, 25 bp, Homo sapien
atggccatcatcaaggaagtcagtc

SEQ ID NO: 1825333 - DNA, 25 bp, Homo sapien
ctgagggatgaacattgtcaaggtc

SEQ ID NO: 1825334 - DNA, 25 bp, Homo sapien
catactgacgaaaaccggctttggt

SEQ ID NO: 1825335 - DNA, 25 bp, Homo sapien
gtgcatactgacgaaaaccggcttt

SEQ ID NO: 1825336 - DNA, 25 bp, Homo sapien
tgacgaaaaccggctttggtctgag

SEQ ID NO: 1825337 - DNA, 25 bp, Homo sapien
gacgaaaaccggctttggtctgaga

SEQ ID NO: 1825338 - DNA, 25 bp, Homo sapien
tttctcctttccttcccaccatcac

SEQ ID NO: 1825339 - DNA, 25 bp, Homo sapien
tacatttctcctttccttcccacca

SEQ ID NO: 1825340 - DNA, 25 bp, Homo sapien
tttggctacatttctcctttccttc

SEQ ID NO: 1825341 - DNA, 25 bp, Homo sapien
catttctcctttccttcccaccatc

SEQ ID NO: 1825342 - DNA, 25 bp, Homo sapien
ctttgggatagagggggatgtgggc

SEQ ID NO: 1825343 - DNA, 25 bp, Homo sapien
tagagggggatgtgggctttcccca

SEQ ID NO: 1825344 - DNA, 25 bp, Homo sapien
gatagagggggatgtgggctttccc

SEQ ID NO: 1825345 - DNA, 25 bp, Homo sapien
gggatagagggggatgtgggctttc

SEQ ID NO: 1825346 - DNA, 25 bp, Homo sapien
gaggtgttcaacatttcccacaagg

SEQ ID NO: 1825347 - DNA, 25 bp, Homo sapien
agcttataggagtatcttggacccc

SEQ ID NO: 1825348 - DNA, 25 bp, Homo sapien
tgacgtcattcactttgccccgagt

SEQ ID NO: 1825349 - DNA, 25 bp, Homo sapien
gaagtgcttcttctagacccctatg

SEQ ID NO: 1825350 - DNA, 25 bp, Homo sapien
caatgctgctgtggtagtgcgactg

SEQ ID NO: 1825351 - DNA, 25 bp, Homo sapien
tttgggagaaaaagagctaggcact

SEQ ID NO: 1825352 - DNA, 25 bp, Homo sapien
gagatagcctagaagtccagctcca

SEQ ID NO: 1825353 - DNA, 25 bp, Homo sapien
catgcaagggaaagagggctcaaca

SEQ ID NO: 1825354 - DNA, 25 bp, Homo sapien
ggaaaccgtcagttactctctggca

SEQ ID NO: 1825355 - DNA, 25 bp, Homo sapien
cgagaagtcctggtaattcagccta

SEQ ID NO: 1825356 - DNA, 25 bp, Homo sapien
tgtggaatcctcattagccagcagg

SEQ ID NO: 1825357 - DNA, 25 bp, Homo sapien
gcaattggataagagagttcaccct

SEQ ID NO: 1825358 - DNA, 25 bp, Homo sapien
taaggtagtgctaacagagtagggc

SEQ ID NO: 1825359 - DNA, 25 bp, Homo sapien
taaaactaaacaggcccagtaggca

SEQ ID NO: 1825360 - DNA, 25 bp, Homo sapien
ctttactagcgggactgacaggcca

SEQ ID NO: 1825361 - DNA, 25 bp, Homo sapien
ggccactcaagtcatgtaaacgcaa

SEQ ID NO: 1825362 - DNA, 25 bp, Homo sapien
cggcagcggtgggttgagccgtttt

SEQ ID NO: 1825363 - DNA, 25 bp, Homo sapien
ttcggcagcggtgggttgagccgtt

SEQ ID NO: 1825364 - DNA, 25 bp, Homo sapien
tcggcagcggtgggttgagccgttt

SEQ ID NO: 1825365 - DNA, 25 bp, Homo sapien
ggcagcggtgggttgagccgttttc

SEQ ID NO: 1825366 - DNA, 25 bp, Homo sapien
agcattaagcactgcggtgcccgcc

SEQ ID NO: 1825367 - DNA, 25 bp, Homo sapien
ctagatgaaagcgagaaggtcccgg

SEQ ID NO: 1825368 - DNA, 25 bp, Homo sapien
ccattgagtgcagcgctagatgaaa

SEQ ID NO: 1825369 - DNA, 25 bp, Homo sapien
tacactagttaagacagcattaagc

SEQ ID NO: 1825370 - DNA, 25 bp, Homo sapien
caaaaataagcctgagtgattgtgc

SEQ ID NO: 1825371 - DNA, 25 bp, Homo sapien
ccggagagtcgttagtttgcaggaa

SEQ ID NO: 1825372 - DNA, 25 bp, Homo sapien
cacaaattaagcacgcagcatattg

SEQ ID NO: 1825373 - DNA, 25 bp, Homo sapien
aacgatctccttaagaatcctgcag

SEQ ID NO: 1825374 - DNA, 25 bp, Homo sapien
cctctgcagtgttttgaccagggag

SEQ ID NO: 1825375 - DNA, 25 bp, Homo sapien
tcttccttccagatgcttgtgcagg

SEQ ID NO: 1825376 - DNA, 25 bp, Homo sapien
gagaccctcctgaaattggctagaa

SEQ ID NO: 1825377 - DNA, 25 bp, Homo sapien
tattgagctctggtcttaatgcagc

SEQ ID NO: 1825378 - DNA, 25 bp, Homo sapien
ggaggcactgcccaaacacaatcat

SEQ ID NO: 1825379 - DNA, 25 bp, Homo sapien
ataaacaggaatggactctcatggc

SEQ ID NO: 1825380 - DNA, 25 bp, Homo sapien
tggccgtctcctctttccggaggca

SEQ ID NO: 1825381 - DNA, 25 bp, Homo sapien
ccaaacacaatcatcttggtgcata

SEQ ID NO: 1825382 - DNA, 25 bp, Homo sapien
ccaccagttacctggcagggcagta

SEQ ID NO: 1825383 - DNA, 25 bp, Homo sapien
ctcaggttgagagagttcctgggct

SEQ ID NO: 1825384 - DNA, 25 bp, Homo sapien
cctgacaggctcagtccactgctgt

SEQ ID NO: 1825385 - DNA, 25 bp, Homo sapien
caggaatgaaccatcacgacgtggt

SEQ ID NO: 1825386 - DNA, 25 bp, Homo sapien
gcctttgaacaaaattgcagttcta

SEQ ID NO: 1825387 - DNA, 25 bp, Homo sapien
tcacagcaaggatctaaccaaggcc

SEQ ID NO: 1825388 - DNA, 25 bp, Homo sapien
tgttgtacagaaaacggcaataggc

SEQ ID NO: 1825389 - DNA, 25 bp, Homo sapien
tatcctaataagaaaattgatgttg

SEQ ID NO: 1825390 - DNA, 25 bp, Homo sapien
agcagattgcccttcataatgttgg

SEQ ID NO: 1825391 - DNA, 25 bp, Homo sapien
tgcccacgtatttggtcagacatta

SEQ ID NO: 1825392 - DNA, 25 bp, Homo sapien
cacagtcatgccagctattcatatg

SEQ ID NO: 1825393 - DNA, 25 bp, Homo sapien
tgtcaacgtgactgggctgcaatgc

SEQ ID NO: 1825394 - DNA, 25 bp, Homo sapien
ggggcccagagattcctgccacagg

SEQ ID NO: 1825395 - DNA, 25 bp, Homo sapien
ggtcaaggggcccagagattcctgc

SEQ ID NO: 1825396 - DNA, 25 bp, Homo sapien
gtcctgaagtgggcggtgagctccc

SEQ ID NO: 1825397 - DNA, 25 bp, Homo sapien
cacaggaacagatgtgcaaatggct

SEQ ID NO: 1825398 - DNA, 25 bp, Homo sapien
ccgtcctacgaccagagagttctct

SEQ ID NO: 1825399 - DNA, 25 bp, Homo sapien
gagacacctgtaagctgagtccaga

SEQ ID NO: 1825400 - DNA, 25 bp, Homo sapien
ctgctgacattcacccagtgggaat

SEQ ID NO: 1825401 - DNA, 25 bp, Homo sapien
tgtcctgaatctaccgaagcagtct

SEQ ID NO: 1825402 - DNA, 25 bp, Homo sapien
aattatgaactttgagccaatgttc

SEQ ID NO: 1825403 - DNA, 25 bp, Homo sapien
taattatgaactttgagccaatgtt

SEQ ID NO: 1825404 - DNA, 25 bp, Homo sapien
taaacagatagggatactggagtcc

SEQ ID NO: 1825405 - DNA, 25 bp, Homo sapien
ctggttaggtgaggagcataaatcc

SEQ ID NO: 1825406 - DNA, 25 bp, Homo sapien
tctactaatgagatacctatggtgg

SEQ ID NO: 1825407 - DNA, 25 bp, Homo sapien
tcctctctaaggtgagcgggactca

SEQ ID NO: 1825408 - DNA, 25 bp, Homo sapien
gacacagtgttcaaccacttcaggg

SEQ ID NO: 1825409 - DNA, 25 bp, Homo sapien
taggctcttttctagtgacccacga

SEQ ID NO: 1825410 - DNA, 25 bp, Homo sapien
gggcaggtcagacccgattccagct

SEQ ID NO: 1825411 - DNA, 25 bp, Homo sapien
cagctttccacgttccagtccagtt

SEQ ID NO: 1825412 - DNA, 25 bp, Homo sapien
cagactgtgcaatcaagagcatgcg

SEQ ID NO: 1825413 - DNA, 25 bp, Homo sapien
aattttggcagctgcgttagtgaca

SEQ ID NO: 1825414 - DNA, 25 bp, Homo sapien
gagcatgcggtctaaattcccttcc

SEQ ID NO: 1825415 - DNA, 25 bp, Homo sapien
tactggcctagctgaacatttgctc

SEQ ID NO: 1825416 - DNA, 25 bp, Homo sapien
tcaaagaggttcaagagtctggcct

SEQ ID NO: 1825417 - DNA, 25 bp, Homo sapien
taaatgtgaaacaactcaaagaggt

SEQ ID NO: 1825418 - DNA, 25 bp, Homo sapien
gacagactgtattctaacctccaag

SEQ ID NO: 1825419 - DNA, 25 bp, Homo sapien
ggccttcatgattaatagtctgcag

SEQ ID NO: 1825420 - DNA, 25 bp, Homo sapien
catcccaggaataatagcaacactt

SEQ ID NO: 1825421 - DNA, 25 bp, Homo sapien
gacacttttatgacagctggagacc

SEQ ID NO: 1825422 - DNA, 25 bp, Homo sapien
gggatctcaatatatcttcacagag

SEQ ID NO: 1825423 - DNA, 25 bp, Homo sapien
gaccttgaacacacttggccatggc

SEQ ID NO: 1825424 - DNA, 25 bp, Homo sapien
tcactaatagcaacatccccagcag

SEQ ID NO: 1825425 - DNA, 25 bp, Homo sapien
tcacgtccgcatacaggagctggca

SEQ ID NO: 1825426 - DNA, 25 bp, Homo sapien
gacgtagtcgtgaagcaaagaacct

SEQ ID NO: 1825427 - DNA, 25 bp, Homo sapien
ggagctggcaaaaccctagaaagca

SEQ ID NO: 1825428 - DNA, 25 bp, Homo sapien
gaaagatctggtagcctggccaagt

SEQ ID NO: 1825429 - DNA, 25 bp, Homo sapien
tcagtctaagcagctacaagggccc

SEQ ID NO: 1825430 - DNA, 25 bp, Homo sapien
ggcaaagaggaaccgcagtcaagta

SEQ ID NO: 1825431 - DNA, 25 bp, Homo sapien
gatcctcccgatttagtgtctcaag

SEQ ID NO: 1825432 - DNA, 25 bp, Homo sapien
ttttctccagctgttgttggtaaag

SEQ ID NO: 1825433 - DNA, 25 bp, Homo sapien
ggtaaagaaatgataaacacgcaca

SEQ ID NO: 1825434 - DNA, 25 bp, Homo sapien
agctgttgttggtaaagaaatgata

SEQ ID NO: 1825435 - DNA, 25 bp, Homo sapien
aaagaaatgataaacacgcacatag

SEQ ID NO: 1825436 - DNA, 25 bp, Homo sapien
tttgggcccctgctatgtaaactag

SEQ ID NO: 1825437 - DNA, 25 bp, Homo sapien
gcccggtgcagaactcgtgtgccaa

SEQ ID NO: 1825438 - DNA, 25 bp, Homo sapien
tcatatcaaaggacagcccggtgca

SEQ ID NO: 1825439 - DNA, 25 bp, Homo sapien
cgtgtgccaactcagaggactctct

SEQ ID NO: 1825440 - DNA, 25 bp, Homo sapien
ttttctctcgtgctgcagatgagga

SEQ ID NO: 1825441 - DNA, 25 bp, Homo sapien
cttttctctcgtgctgcagatgagg

SEQ ID NO: 1825442 - DNA, 25 bp, Homo sapien
tctctcgtgctgcagatgaggatct

SEQ ID NO: 1825443 - DNA, 25 bp, Homo sapien
ttctctcgtgctgcagatgaggatc

SEQ ID NO: 1825444 - DNA, 25 bp, Homo sapien
ccagtcttcgtgattaacagggaca

SEQ ID NO: 1825445 - DNA, 25 bp, Homo sapien
cattctccagtgtgcaaacggagcg

SEQ ID NO: 1825446 - DNA, 25 bp, Homo sapien
gagccgcagttggaagcatcatttc

SEQ ID NO: 1825447 - DNA, 25 bp, Homo sapien
cacatttgaacgcagcttggtctag

SEQ ID NO: 1825448 - DNA, 25 bp, Homo sapien
cctaatgcgggtgcttggacaaaca

SEQ ID NO: 1825449 - DNA, 25 bp, Homo sapien
ttcatatttcttggccctaatgcgg

SEQ ID NO: 1825450 - DNA, 25 bp, Homo sapien
gttctcctggaaacggtccgcggca

SEQ ID NO: 1825451 - DNA, 25 bp, Homo sapien
cgaaggcttcgtgtgtctcagcgtg

SEQ ID NO: 1825452 - DNA, 25 bp, Homo sapien
tggctggtcttcttgtttacatgct

SEQ ID NO: 1825453 - DNA, 25 bp, Homo sapien
tctcgtggctggtcttcttgtttac

SEQ ID NO: 1825454 - DNA, 25 bp, Homo sapien
tgtttctcgtggctggtcttcttgt

SEQ ID NO: 1825455 - DNA, 25 bp, Homo sapien
tttcttatgtttctcgtggctggtc

SEQ ID NO: 1825456 - DNA, 25 bp, Homo sapien
ctgcgaaagctgatgttgtgatgtg

SEQ ID NO: 1825457 - DNA, 25 bp, Homo sapien
gcgaaagctgatgttgtgatgtgag

SEQ ID NO: 1825458 - DNA, 25 bp, Homo sapien
cgaaagctgatgttgtgatgtgagg

SEQ ID NO: 1825459 - DNA, 25 bp, Homo sapien
tgcgaaagctgatgttgtgatgtga

SEQ ID NO: 1825460 - DNA, 25 bp, Homo sapien
gttggctactggcacttgctccttg

SEQ ID NO: 1825461 - DNA, 25 bp, Homo sapien
tggcacttgctccttgaggtattca

SEQ ID NO: 1825462 - DNA, 25 bp, Homo sapien
cagaccaagaggcattgccctggaa

SEQ ID NO: 1825463 - DNA, 25 bp, Homo sapien
ggttttgcagcagagtggtcgtcct

SEQ ID NO: 1825464 - DNA, 25 bp, Homo sapien
gaaagccttcagcaatcccatctgg

SEQ ID NO: 1825465 - DNA, 25 bp, Homo sapien
taagcttcgaggtcactttctgcat

SEQ ID NO: 1825466 - DNA, 25 bp, Homo sapien
tgcagctggactttgtgacccataa

SEQ ID NO: 1825467 - DNA, 25 bp, Homo sapien
tccacagaactcatgacaaggaggg

SEQ ID NO: 1825468 - DNA, 25 bp, Homo sapien
tctactgtggtagcaagtttcaagt

SEQ ID NO: 1825469 - DNA, 25 bp, Homo sapien
ctaacccatgttagcagcccaggat

SEQ ID NO: 1825470 - DNA, 25 bp, Homo sapien
tacccttagatctactgagagacat

SEQ ID NO: 1825471 - DNA, 25 bp, Homo sapien
gcaacagtccaataagatgggtatt

SEQ ID NO: 1825472 - DNA, 25 bp, Homo sapien
gatattagtgcagttccctcagggc

SEQ ID NO: 1825473 - DNA, 25 bp, Homo sapien
gagtatttatgagtttagcacaggc

SEQ ID NO: 1825474 - DNA, 25 bp, Homo sapien
tgagggcttagtacgtgccaaacac

SEQ ID NO: 1825475 - DNA, 25 bp, Homo sapien
aaatcacagcttaaggaagttcagg

SEQ ID NO: 1825476 - DNA, 25 bp, Homo sapien
cagaaaggagattgggctgttcttg

SEQ ID NO: 1825477 - DNA, 25 bp, Homo sapien
tgggctgttcttggcttgatacggt

SEQ ID NO: 1825478 - DNA, 25 bp, Homo sapien
ggcttgatacggtgcccagagcttt

SEQ ID NO: 1825479 - DNA, 25 bp, Homo sapien
cttggaacgtttgcccagaaaggag

SEQ ID NO: 1825480 - DNA, 25 bp, Homo sapien
gttgatcgatctcaatagataaggg

SEQ ID NO: 1825481 - DNA, 25 bp, Homo sapien
ttgagcatgagttactctatgtgca

SEQ ID NO: 1825482 - DNA, 25 bp, Homo sapien
gaaacagagattcaaaagggtcagg

SEQ ID NO: 1825483 - DNA, 25 bp, Homo sapien
tacagaaaacagttgatcgatctca

SEQ ID NO: 1825484 - DNA, 25 bp, Homo sapien
gcagagaatttaggctgagcaaact

SEQ ID NO: 1825485 - DNA, 25 bp, Homo sapien
aaaaggggaatcacaaattgtctgt

SEQ ID NO: 1825486 - DNA, 25 bp, Homo sapien
agttgcaggcccgtatgacaaaaaa

SEQ ID NO: 1825487 - DNA, 25 bp, Homo sapien
ctggaaaaaggggaatcacaaattg

SEQ ID NO: 1825488 - DNA, 25 bp, Homo sapien
tcttcgttttcataactctacttga

SEQ ID NO: 1825489 - DNA, 25 bp, Homo sapien
gtttgccagtgtctgacattacgga

SEQ ID NO: 1825490 - DNA, 25 bp, Homo sapien
aactctacttgaagaacatatgatg

SEQ ID NO: 1825491 - DNA, 25 bp, Homo sapien
ttacggacctcacagcttactgaat

SEQ ID NO: 1825492 - DNA, 25 bp, Homo sapien
gacgtaggatgaagaagactctcag

SEQ ID NO: 1825493 - DNA, 25 bp, Homo sapien
gaaggaaggcgtactcttggaccaa

SEQ ID NO: 1825494 - DNA, 25 bp, Homo sapien
tcactgtccacatggtgcaagcaag

SEQ ID NO: 1825495 - DNA, 25 bp, Homo sapien
cactctacataaacaggacctttgg

SEQ ID NO: 1825496 - DNA, 25 bp, Homo sapien
cagcaaggtattccaaactactgcc

SEQ ID NO: 1825497 - DNA, 25 bp, Homo sapien
caaacagcaaggtattccaaactac

SEQ ID NO: 1825498 - DNA, 25 bp, Homo sapien
aggtattccaaactactgccaacca

SEQ ID NO: 1825499 - DNA, 25 bp, Homo sapien
gttctacaaacagcaaggtattcca

SEQ ID NO: 1825500 - DNA, 25 bp, Homo sapien
tactctcactcccacgtctgatcgt

SEQ ID NO: 1825501 - DNA, 25 bp, Homo sapien
tcactcccacgtctgatcgtctcat

SEQ ID NO: 1825502 - DNA, 25 bp, Homo sapien
cctttactctcactcccacgtctga

SEQ ID NO: 1825503 - DNA, 25 bp, Homo sapien
tccctttactctcactcccacgtct

SEQ ID NO: 1825504 - DNA, 25 bp, Homo sapien
tggagttttggacacggtattgcca

SEQ ID NO: 1825505 - DNA, 25 bp, Homo sapien
tggacacggtattgccattgtcaga

SEQ ID NO: 1825506 - DNA, 25 bp, Homo sapien
tcaaggggcatctcgtgggtgtgga

SEQ ID NO: 1825507 - DNA, 25 bp, Homo sapien
gagttttggacacggtattgccatt

SEQ ID NO: 1825508 - DNA, 25 bp, Homo sapien
ggcttccgtgattcccttgccttca

SEQ ID NO: 1825509 - DNA, 25 bp, Homo sapien
tcagagccacgtggccactggtttc

SEQ ID NO: 1825510 - DNA, 25 bp, Homo sapien
tgggatcagagccacgtggccactg

SEQ ID NO: 1825511 - DNA, 25 bp, Homo sapien
cgatgcccctttgctagtatctggc

SEQ ID NO: 1825512 - DNA, 25 bp, Homo sapien
ccagttctagtcttctctgatcacc

SEQ ID NO: 1825513 - DNA, 25 bp, Homo sapien
cgatgatctgttggtttatatccag

SEQ ID NO: 1825514 - DNA, 25 bp, Homo sapien
tctgatcacctgataacttcagtgc

SEQ ID NO: 1825515 - DNA, 25 bp, Homo sapien
cacctgataacttcagtgcctcatg

SEQ ID NO: 1825516 - DNA, 25 bp, Homo sapien
agctgtgcaacagctatctctttgc

SEQ ID NO: 1825517 - DNA, 25 bp, Homo sapien
gaaaatggacagtcaaaagccttcc

SEQ ID NO: 1825518 - DNA, 25 bp, Homo sapien
atggacagtcaaaagccttccacag

SEQ ID NO: 1825519 - DNA, 25 bp, Homo sapien
ggaaaatggacagtcaaaagccttc

SEQ ID NO: 1825520 - DNA, 25 bp, Homo sapien
aaatggacagtcaaaagccttccac

SEQ ID NO: 1825521 - DNA, 25 bp, Homo sapien
tgcagcagccgggtgaccctttgtc

SEQ ID NO: 1825522 - DNA, 25 bp, Homo sapien
tttgccttccgtgctaagtgttgac

SEQ ID NO: 1825523 - DNA, 25 bp, Homo sapien
gctaaagctaaaggccggtgtgcag

SEQ ID NO: 1825524 - DNA, 25 bp, Homo sapien
catttcagctagacatgtctggtga

SEQ ID NO: 1825525 - DNA, 25 bp, Homo sapien
cctggaatggttgagtcagctctgg

SEQ ID NO: 1825526 - DNA, 25 bp, Homo sapien
aagacgccctctccatgagatacct

SEQ ID NO: 1825527 - DNA, 25 bp, Homo sapien
aatcttcccctggaatggttgagtc

SEQ ID NO: 1825528 - DNA, 25 bp, Homo sapien
gctctggtgtgagttagtggcccca

SEQ ID NO: 1825529 - DNA, 25 bp, Homo sapien
tccgtaatccgttgtttatctagtc

SEQ ID NO: 1825530 - DNA, 25 bp, Homo sapien
tggcaccccaagcaagtaagcacct

SEQ ID NO: 1825531 - DNA, 25 bp, Homo sapien
aagcaccttgttgttaacctagcac

SEQ ID NO: 1825532 - DNA, 25 bp, Homo sapien
gatactctactctacagactctaga

SEQ ID NO: 1825533 - DNA, 25 bp, Homo sapien
gaagctgggtgagtgtgctctggaa

SEQ ID NO: 1825534 - DNA, 25 bp, Homo sapien
ggtagatctgtgcttgatgattgaa

SEQ ID NO: 1825535 - DNA, 25 bp, Homo sapien
gatgattgaatggatgagtttcagt

SEQ ID NO: 1825536 - DNA, 25 bp, Homo sapien
tggcacgttctcagcatctagcacc

SEQ ID NO: 1825537 - DNA, 25 bp, Homo sapien
cagctgtgtttaggagggcatttgc

SEQ ID NO: 1825538 - DNA, 25 bp, Homo sapien
tcattgcaggccattttatccactt

SEQ ID NO: 1825539 - DNA, 25 bp, Homo sapien
tctggcagcttgtgaacctggggct

SEQ ID NO: 1825540 - DNA, 25 bp, Homo sapien
ttgaggatttcattgcaggccattt

SEQ ID NO: 1825541 - DNA, 25 bp, Homo sapien
cttcagtttctttccccattattca

SEQ ID NO: 1825542 - DNA, 25 bp, Homo sapien
gtttctttccccattattcattctc

SEQ ID NO: 1825543 - DNA, 25 bp, Homo sapien
gcaaatatctccttgcctgttactt

SEQ ID NO: 1825544 - DNA, 25 bp, Homo sapien
ctgcaaatatctccttgcctgttac

SEQ ID NO: 1825545 - DNA, 25 bp, Homo sapien
cagcaatagaagagatggagcatcg

SEQ ID NO: 1825546 - DNA, 25 bp, Homo sapien
tggagcatcgagcaagacagcaggt

SEQ ID NO: 1825547 - DNA, 25 bp, Homo sapien
caggtgtggaaaagagtcgaagtac

SEQ ID NO: 1825548 - DNA, 25 bp, Homo sapien
aaactgagtgacaaggaactgtgac

SEQ ID NO: 1825549 - DNA, 25 bp, Homo sapien
gatgcataagccctcagcaaaatac

SEQ ID NO: 1825550 - DNA, 25 bp, Homo sapien
ttatccctgggactcaaggcttgtt

SEQ ID NO: 1825551 - DNA, 25 bp, Homo sapien
aagagctggtactgaaactgttccc

SEQ ID NO: 1825552 - DNA, 25 bp, Homo sapien
tgaacattgatgcataagccctcag

SEQ ID NO: 1825553 - DNA, 25 bp, Homo sapien
ggtgatttctcaaaggcctaaagac

SEQ ID NO: 1825554 - DNA, 25 bp, Homo sapien
taaagacagacataccctttgaccc

SEQ ID NO: 1825555 - DNA, 25 bp, Homo sapien
aatgcttatataccattggtgggag

SEQ ID NO: 1825556 - DNA, 25 bp, Homo sapien
acagacataccctttgacccagcaa

SEQ ID NO: 1825557 - DNA, 25 bp, Homo sapien
caggatcttagaggtcggcgagctt

SEQ ID NO: 1825558 - DNA, 25 bp, Homo sapien
caagtggtcgggatgccctgataca

SEQ ID NO: 1825559 - DNA, 25 bp, Homo sapien
cacatagcgtaggtaaacactcggg

SEQ ID NO: 1825560 - DNA, 25 bp, Homo sapien
aacttcctccgtgactaactgtggg

SEQ ID NO: 1825561 - DNA, 25 bp, Homo sapien
tctccatttctctagaaaagtgagt

SEQ ID NO: 1825562 - DNA, 25 bp, Homo sapien
cttctccatttctctagaaaagtga

SEQ ID NO: 1825563 - DNA, 25 bp, Homo sapien
tccatttctctagaaaagtgagttg

SEQ ID NO: 1825564 - DNA, 25 bp, Homo sapien
ccatttctctagaaaagtgagttgt

SEQ ID NO: 1825565 - DNA, 25 bp, Homo sapien
gatggagcatacagatcttgtcctc

SEQ ID NO: 1825566 - DNA, 25 bp, Homo sapien
cctcatgggcagtgtagatgtttac

SEQ ID NO: 1825567 - DNA, 25 bp, Homo sapien
gacactgagcccacttgatctgctg

SEQ ID NO: 1825568 - DNA, 25 bp, Homo sapien
gcctctgggtgtagatggagcatac

SEQ ID NO: 1825569 - DNA, 25 bp, Homo sapien
tctataaggccatcaatatctagct

SEQ ID NO: 1825570 - DNA, 25 bp, Homo sapien
tatgtaatacttgtgtgacttcagg

SEQ ID NO: 1825571 - DNA, 25 bp, Homo sapien
catggcatcatggtaaggaatggtc

SEQ ID NO: 1825572 - DNA, 25 bp, Homo sapien
tatagtagcacaagagatccaatgc

SEQ ID NO: 1825573 - DNA, 25 bp, Homo sapien
ttttcttctccgttggtgctgccac

SEQ ID NO: 1825574 - DNA, 25 bp, Homo sapien
tttcttctccgttggtgctgccaca

SEQ ID NO: 1825575 - DNA, 25 bp, Homo sapien
tttttcttctccgttggtgctgcca

SEQ ID NO: 1825576 - DNA, 25 bp, Homo sapien
cttctccgttggtgctgccacagcg

SEQ ID NO: 1825577 - DNA, 25 bp, Homo sapien
tgccagtgcagaacgctcctccagt

SEQ ID NO: 1825578 - DNA, 25 bp, Homo sapien
gccagtgcagaacgctcctccagtg

SEQ ID NO: 1825579 - DNA, 25 bp, Homo sapien
gaaacgcctgccagtgcagaacgct

SEQ ID NO: 1825580 - DNA, 25 bp, Homo sapien
ctgcagaaacgcctgccagtgcaga

SEQ ID NO: 1825581 - DNA, 25 bp, Homo sapien
taagagcggtgagggtcagtgtagc

SEQ ID NO: 1825582 - DNA, 25 bp, Homo sapien
gggtaagagcggtgagggtcagtgt

SEQ ID NO: 1825583 - DNA, 25 bp, Homo sapien
gagcggtgagggtcagtgtagcagg

SEQ ID NO: 1825584 - DNA, 25 bp, Homo sapien
cctggcaccggggtaagagcggtga

SEQ ID NO: 1825585 - DNA, 25 bp, Homo sapien
ctttgaggtacatcaacgtgtgcta

SEQ ID NO: 1825586 - DNA, 25 bp, Homo sapien
tgaaggttgtagataacaggtgaga

SEQ ID NO: 1825587 - DNA, 25 bp, Homo sapien
ttattagccctagcctgtgacatgc

SEQ ID NO: 1825588 - DNA, 25 bp, Homo sapien
aacaggtgagaaatcgtgatgacgc

SEQ ID NO: 1825589 - DNA, 25 bp, Homo sapien
ttgatgtcccctagctaaaacctgc

SEQ ID NO: 1825590 - DNA, 25 bp, Homo sapien
tgttgaccctagagcaagtcttgga

SEQ ID NO: 1825591 - DNA, 25 bp, Homo sapien
tcaacatctcttggcatcaacatgg

SEQ ID NO: 1825592 - DNA, 25 bp, Homo sapien
tagcactgccaactgatagaaatga

SEQ ID NO: 1825593 - DNA, 25 bp, Homo sapien
tgtcaagcctaaggtgctctccatg

SEQ ID NO: 1825594 - DNA, 25 bp, Homo sapien
ggtgacagataagcaggacaaagtg

SEQ ID NO: 1825595 - DNA, 25 bp, Homo sapien
tcatttgcagtaggacgcatcttcg

SEQ ID NO: 1825596 - DNA, 25 bp, Homo sapien
ttttcatcaaatgagttgtgaaggt

SEQ ID NO: 1825597 - DNA, 25 bp, Homo sapien
gaaccgctggtggatcatcttgcct

SEQ ID NO: 1825598 - DNA, 25 bp, Homo sapien
ccaagtgtaggatggaaccgctggt

SEQ ID NO: 1825599 - DNA, 25 bp, Homo sapien
ggtggatcatcttgcctccccgacg

SEQ ID NO: 1825600 - DNA, 25 bp, Homo sapien
ggatggaaccgctggtggatcatct

SEQ ID NO: 1825601 - DNA, 25 bp, Homo sapien
aaccacacacgtcggatgtgagtgg

SEQ ID NO: 1825602 - DNA, 25 bp, Homo sapien
ctccatgcagcgagcggacttgctt

SEQ ID NO: 1825603 - DNA, 25 bp, Homo sapien
cttctagaggcagctgtaagcattt

SEQ ID NO: 1825604 - DNA, 25 bp, Homo sapien
tgagcaaccacacacgtcggatgtg

SEQ ID NO: 1825605 - DNA, 25 bp, Homo sapien
attctcgatacctcgctccacagga

SEQ ID NO: 1825606 - DNA, 25 bp, Homo sapien
accctccagaaacctgtagctcagt

SEQ ID NO: 1825607 - DNA, 25 bp, Homo sapien
gctttcctgggcattctcgatacct

SEQ ID NO: 1825608 - DNA, 25 bp, Homo sapien
cctgtagctcagtgggagataagcc

SEQ ID NO: 1825609 - DNA, 25 bp, Homo sapien
gcatatgtagtgttagccatcagaa

SEQ ID NO: 1825610 - DNA, 25 bp, Homo sapien
tcttgaaagccagtagtgcagcatc

SEQ ID NO: 1825611 - DNA, 25 bp, Homo sapien
cacaggtttaacagggctaaagctg

SEQ ID NO: 1825612 - DNA, 25 bp, Homo sapien
cctctttaggttgggaagaatctgc

SEQ ID NO: 1825613 - DNA, 25 bp, Homo sapien
agactgggcccacatgtataacata

SEQ ID NO: 1825614 - DNA, 25 bp, Homo sapien
tatgattagactgggcccacatgta

SEQ ID NO: 1825615 - DNA, 25 bp, Homo sapien
tataacataggaccctatctcaatg

SEQ ID NO: 1825616 - DNA, 25 bp, Homo sapien
tgtataacataggaccctatctcaa

SEQ ID NO: 1825617 - DNA, 25 bp, Homo sapien
ctcaaaagcaggcattggcacagga

SEQ ID NO: 1825618 - DNA, 25 bp, Homo sapien
gagtctctcggtttctggatcctat

SEQ ID NO: 1825619 - DNA, 25 bp, Homo sapien
tgccactcttgacatctctcagatg

SEQ ID NO: 1825620 - DNA, 25 bp, Homo sapien
caggaggtgcctgtctgtttctgct

SEQ ID NO: 1825621 - DNA, 25 bp, Homo sapien
tcctggtttcatcagccaggatcat

SEQ ID NO: 1825622 - DNA, 25 bp, Homo sapien
cctggtttcatcagccaggatcata

SEQ ID NO: 1825623 - DNA, 25 bp, Homo sapien
ctggtttcatcagccaggatcatag

SEQ ID NO: 1825624 - DNA, 25 bp, Homo sapien
tcatcagccaggatcatagggtcaa

SEQ ID NO: 1825625 - DNA, 25 bp, Homo sapien
gggccgtagctctaatgaacgccca

SEQ ID NO: 1825626 - DNA, 25 bp, Homo sapien
ccgtagctctaatgaacgcccacat

SEQ ID NO: 1825627 - DNA, 25 bp, Homo sapien
ctgtcaggggccgtagctctaatga

SEQ ID NO: 1825628 - DNA, 25 bp, Homo sapien
aatgggggaagtcagtaagtctgca

SEQ ID NO: 1825629 - DNA, 25 bp, Homo sapien
tgactgagtaatggggaagaatttt

SEQ ID NO: 1825630 - DNA, 25 bp, Homo sapien
cacctcgtatatttgtgacgattga

SEQ ID NO: 1825631 - DNA, 25 bp, Homo sapien
tattcttgttcacctcgtatatttg

SEQ ID NO: 1825632 - DNA, 25 bp, Homo sapien
gacgattgagtaatggggaagaata

SEQ ID NO: 1825633 - DNA, 25 bp, Homo sapien
aacatgccatactcaattcctgctg

SEQ ID NO: 1825634 - DNA, 25 bp, Homo sapien
ttcaaacatgccatactcaattcct

SEQ ID NO: 1825635 - DNA, 25 bp, Homo sapien
ctgtaagactgaactgttttcaaac

SEQ ID NO: 1825636 - DNA, 25 bp, Homo sapien
tgccatactcaattcctgctgtcat

SEQ ID NO: 1825637 - DNA, 25 bp, Homo sapien
cactgggtaaaccacgttcatggtc

SEQ ID NO: 1825638 - DNA, 25 bp, Homo sapien
catagtcaggttttccacatgtggg

SEQ ID NO: 1825639 - DNA, 25 bp, Homo sapien
cgttcatggtcatggaatctcattt

SEQ ID NO: 1825640 - DNA, 25 bp, Homo sapien
tccaacgtgcaatggacaagccttg

SEQ ID NO: 1825641 - DNA, 25 bp, Homo sapien
caagaatttctaaattaagtccaag

SEQ ID NO: 1825642 - DNA, 25 bp, Homo sapien
tccaagagtaaagtttgtctcttca

SEQ ID NO: 1825643 - DNA, 25 bp, Homo sapien
taagtccaagagtaaagtttgtctc

SEQ ID NO: 1825644 - DNA, 25 bp, Homo sapien
agaatttctaaattaagtccaagag

SEQ ID NO: 1825645 - DNA, 25 bp, Homo sapien
gaactacttagaccatttctgctct

SEQ ID NO: 1825646 - DNA, 25 bp, Homo sapien
ctctcataaaagttcagtgtcaaac

SEQ ID NO: 1825647 - DNA, 25 bp, Homo sapien
caaagtgctgaacctagaactactt

SEQ ID NO: 1825648 - DNA, 25 bp, Homo sapien
aagttcagtgtcaaacttttatgta

SEQ ID NO: 1825649 - DNA, 25 bp, Homo sapien
agaagagtttcaatggcaatctggg

SEQ ID NO: 1825650 - DNA, 25 bp, Homo sapien
aagggagcagagtgctaaggaggag

SEQ ID NO: 1825651 - DNA, 25 bp, Homo sapien
gaggaggatgtcaccactagggcag

SEQ ID NO: 1825652 - DNA, 25 bp, Homo sapien
gaagagtttcaatggcaatctggga

SEQ ID NO: 1825653 - DNA, 25 bp, Homo sapien
caaaattcgtaaagcgcaaactaca

SEQ ID NO: 1825654 - DNA, 25 bp, Homo sapien
gaccttaacatcagacaagattcac

SEQ ID NO: 1825655 - DNA, 25 bp, Homo sapien
cagaaagcaggacttaagaccttaa

SEQ ID NO: 1825656 - DNA, 25 bp, Homo sapien
tattggaatacgatgtcaaactcct

SEQ ID NO: 1825657 - DNA, 25 bp, Homo sapien
gctggactgagctgaatcaagctga

SEQ ID NO: 1825658 - DNA, 25 bp, Homo sapien
caagggtctccacttttgcgtcttc

SEQ ID NO: 1825659 - DNA, 25 bp, Homo sapien
gaggacatgagagttggcagggacc

SEQ ID NO: 1825660 - DNA, 25 bp, Homo sapien
caagctgaatcagtctagattttgg

SEQ ID NO: 1825661 - DNA, 25 bp, Homo sapien
tggtttatgaattacgtttgtgaat

SEQ ID NO: 1825662 - DNA, 25 bp, Homo sapien
gtttatgaattacgtttgtgaattg

SEQ ID NO: 1825663 - DNA, 25 bp, Homo sapien
tatgaattacgtttgtgaattgttt

SEQ ID NO: 1825664 - DNA, 25 bp, Homo sapien
gaattacgtttgtgaattgtttcat

SEQ ID NO: 1825665 - DNA, 25 bp, Homo sapien
aggtctcccggtctctcagggcgcg

SEQ ID NO: 1825666 - DNA, 25 bp, Homo sapien
aatcagcagtaaggcccggcggtgg

SEQ ID NO: 1825667 - DNA, 25 bp, Homo sapien
gaggcggttcccttggagcgcccaa

SEQ ID NO: 1825668 - DNA, 25 bp, Homo sapien
tggcgccagtgacgtagaccgcgct

SEQ ID NO: 1825669 - DNA, 25 bp, Homo sapien
ggagagcgagaaggagggctttggg

SEQ ID NO: 1825670 - DNA, 25 bp, Homo sapien
tgcagcgcgaggggagagcgagaag

SEQ ID NO: 1825671 - DNA, 25 bp, Homo sapien
aggggagagcgagaaggagggcttt

SEQ ID NO: 1825672 - DNA, 25 bp, Homo sapien
ctgcagcgcgaggggagagcgagaa

SEQ ID NO: 1825673 - DNA, 25 bp, Homo sapien
tccgtcctccggcggcgatgagctg

SEQ ID NO: 1825674 - DNA, 25 bp, Homo sapien
gttcctcgagtgtcggcgacccgag

SEQ ID NO: 1825675 - DNA, 25 bp, Homo sapien
cctctggctggtcccgcgtctccgt

SEQ ID NO: 1825676 - DNA, 25 bp, Homo sapien
ggccggcgctgagaggcgcgcgcgt

SEQ ID NO: 1825677 - DNA, 25 bp, Homo sapien
aataactcattaagggacttgattc

SEQ ID NO: 1825678 - DNA, 25 bp, Homo sapien
tggctttcatcatgcgacgatgaag

SEQ ID NO: 1825679 - DNA, 25 bp, Homo sapien
aactcattaagggacttgattctct

SEQ ID NO: 1825680 - DNA, 25 bp, Homo sapien
tgaagtagcttcacaaatcttgagc

SEQ ID NO: 1825681 - DNA, 25 bp, Homo sapien
ctgcaggagtgttgatgtttgtgat

SEQ ID NO: 1825682 - DNA, 25 bp, Homo sapien
ttctgtaactggagcgatgattacc

SEQ ID NO: 1825683 - DNA, 25 bp, Homo sapien
ctgtcattgcagtcagcattggatt

SEQ ID NO: 1825684 - DNA, 25 bp, Homo sapien
gatgattaccagtaagttgattttc

SEQ ID NO: 1825685 - DNA, 25 bp, Homo sapien
tgtctttatgatgcaagggattccc

SEQ ID NO: 1825686 - DNA, 25 bp, Homo sapien
gttgtgccaggaaccgggtgcctct

SEQ ID NO: 1825687 - DNA, 25 bp, Homo sapien
tggatctgttttgggactctctgac

SEQ ID NO: 1825688 - DNA, 25 bp, Homo sapien
tgttgattctgtgactgccaatgca

SEQ ID NO: 1825689 - DNA, 25 bp, Homo sapien
cagatcatcttggcagtattgcttt

SEQ ID NO: 1825690 - DNA, 25 bp, Homo sapien
tcagatcatcttggcagtattgctt

SEQ ID NO: 1825691 - DNA, 25 bp, Homo sapien
ttcagatcatcttggcagtattgct

SEQ ID NO: 1825692 - DNA, 25 bp, Homo sapien
agatcatcttggcagtattgctttc

SEQ ID NO: 1825693 - DNA, 25 bp, Homo sapien
tacatagtatatggtaagtacacta

SEQ ID NO: 1825694 - DNA, 25 bp, Homo sapien
tatttgtaaagttcctgcaaaatac

SEQ ID NO: 1825695 - DNA, 25 bp, Homo sapien
tatgaaagtccttggcttaggttag

SEQ ID NO: 1825696 - DNA, 25 bp, Homo sapien
tcttacagagcaatacaataacttt

SEQ ID NO: 1825697 - DNA, 25 bp, Homo sapien
tgacaaagcgccctacatcctgtgt

SEQ ID NO: 1825698 - DNA, 25 bp, Homo sapien
tgtgtggtgacaggtttgctcttct

SEQ ID NO: 1825699 - DNA, 25 bp, Homo sapien
gagctctggtctgtgtaggcagtac

SEQ ID NO: 1825700 - DNA, 25 bp, Homo sapien
ggcttcactgaccaccgtgcatttt

SEQ ID NO: 1825701 - DNA, 25 bp, Homo sapien
cagacttgagctgcacgcatttaga

SEQ ID NO: 1825702 - DNA, 25 bp, Homo sapien
aaatgaagccttagtgccttgaaag

SEQ ID NO: 1825703 - DNA, 25 bp, Homo sapien
caaaatggatttagcaagattcagg

SEQ ID NO: 1825704 - DNA, 25 bp, Homo sapien
tggctagatacacatcaccagtgac

SEQ ID NO: 1825705 - DNA, 25 bp, Homo sapien
cagtaagcatcagtttagcctagag

SEQ ID NO: 1825706 - DNA, 25 bp, Homo sapien
gcatatttgatgaagtaccctgtgt

SEQ ID NO: 1825707 - DNA, 25 bp, Homo sapien
tttcctggagaacacaaattttgca

SEQ ID NO: 1825708 - DNA, 25 bp, Homo sapien
gtagtacagggcacacactttaacc

SEQ ID NO: 1825709 - DNA, 25 bp, Homo sapien
ctgtgcatgggtaagaacgacgtca

SEQ ID NO: 1825710 - DNA, 25 bp, Homo sapien
ccttgtcaggaaatgcgggagcctt

SEQ ID NO: 1825711 - DNA, 25 bp, Homo sapien
gggagctgaagtttggttcctgcct

SEQ ID NO: 1825712 - DNA, 25 bp, Homo sapien
tgcaaaatgcaagctaaagcagctt

SEQ ID NO: 1825713 - DNA, 25 bp, Homo sapien
cagaatttgtgctttgggcaagtca

SEQ ID NO: 1825714 - DNA, 25 bp, Homo sapien
tcagaatttgtgctttgggcaagtc

SEQ ID NO: 1825715 - DNA, 25 bp, Homo sapien
gagggccgtgatcagcaggttttca

SEQ ID NO: 1825716 - DNA, 25 bp, Homo sapien
gattttgtcatggttagaggcagga

SEQ ID NO: 1825717 - DNA, 25 bp, Homo sapien
tgtggattttgtcatggttagaggc

SEQ ID NO: 1825718 - DNA, 25 bp, Homo sapien
actattacgcgggtccctagacaca

SEQ ID NO: 1825719 - DNA, 25 bp, Homo sapien
tacttcgtatagagagacataaaca

SEQ ID NO: 1825720 - DNA, 25 bp, Homo sapien
cagccaactaggctgcagggagtaa

SEQ ID NO: 1825721 - DNA, 25 bp, Homo sapien
gatgcccagagctgtacacattcct

SEQ ID NO: 1825722 - DNA, 25 bp, Homo sapien
tgcagggagtaaaccctgttactaa

SEQ ID NO: 1825723 - DNA, 25 bp, Homo sapien
tagttttggcatgcacagttcaggg

SEQ ID NO: 1825724 - DNA, 25 bp, Homo sapien
taaacgacgacgattgcattgttcg

SEQ ID NO: 1825725 - DNA, 25 bp, Homo sapien
cattgttcgcatgccggtaatagaa

SEQ ID NO: 1825726 - DNA, 25 bp, Homo sapien
taagggtgacaccatatctccagca

SEQ ID NO: 1825727 - DNA, 25 bp, Homo sapien
cgcaacaagagcccatgtcaggtcc

SEQ ID NO: 1825728 - DNA, 25 bp, Homo sapien
taacagcagtaaccgcaacaagagc

SEQ ID NO: 1825729 - DNA, 25 bp, Homo sapien
cccatgtcaggtccctggggatctc

SEQ ID NO: 1825730 - DNA, 25 bp, Homo sapien
tgtaatatcagcgataacagcagta

SEQ ID NO: 1825731 - DNA, 25 bp, Homo sapien
tagagaggatggtgtttatccttcc

SEQ ID NO: 1825732 - DNA, 25 bp, Homo sapien
tctggccattgttagagaggatggt

SEQ ID NO: 1825733 - DNA, 25 bp, Homo sapien
ggatggtgtttatccttccggacat

SEQ ID NO: 1825734 - DNA, 25 bp, Homo sapien
cagcagaatgagtctggccattgtt

SEQ ID NO: 1825735 - DNA, 25 bp, Homo sapien
ggccaccacagcagttaggcggtca

SEQ ID NO: 1825736 - DNA, 25 bp, Homo sapien
gagagcttaaaggtctgcttaccac

SEQ ID NO: 1825737 - DNA, 25 bp, Homo sapien
ctgggtaactggcatatagctcagt

SEQ ID NO: 1825738 - DNA, 25 bp, Homo sapien
cagttaggcggtcaagtggcttgta

SEQ ID NO: 1825739 - DNA, 25 bp, Homo sapien
tctccactgataggagttgagtctc

SEQ ID NO: 1825740 - DNA, 25 bp, Homo sapien
caaaatatgtgtcagactaggtctt

SEQ ID NO: 1825741 - DNA, 25 bp, Homo sapien
gaagtgattttactgcttactctcc

SEQ ID NO: 1825742 - DNA, 25 bp, Homo sapien
ctccactgataggagttgagtctca

SEQ ID NO: 1825743 - DNA, 25 bp, Homo sapien
ttcttcttggatgaaccgatccaga

SEQ ID NO: 1825744 - DNA, 25 bp, Homo sapien
cctgaatcagaagagctccgtatcc

SEQ ID NO: 1825745 - DNA, 25 bp, Homo sapien
ggatgaaccgatccagatccctttg

SEQ ID NO: 1825746 - DNA, 25 bp, Homo sapien
agagctccgtatccttcttcttgga

SEQ ID NO: 1825747 - DNA, 25 bp, Homo sapien
gcgtctcaggattctgttcatggaa

SEQ ID NO: 1825748 - DNA, 25 bp, Homo sapien
cgtctcaggattctgttcatggaat

SEQ ID NO: 1825749 - DNA, 25 bp, Homo sapien
tgaaccgaagcccagaggcgtctca

SEQ ID NO: 1825750 - DNA, 25 bp, Homo sapien
ccgaagcccagaggcgtctcaggat

SEQ ID NO: 1825751 - DNA, 25 bp, Homo sapien
ctgctgcgggacagtgtgtagacac

SEQ ID NO: 1825752 - DNA, 25 bp, Homo sapien
tgtagacacggggaacattttcctc

SEQ ID NO: 1825753 - DNA, 25 bp, Homo sapien
cgcatctgctgcgggacagtgtgta

SEQ ID NO: 1825754 - DNA, 25 bp, Homo sapien
ttgtagaagggtgagcgcatctgct

SEQ ID NO: 1825755 - DNA, 25 bp, Homo sapien
cagtcagaattgtgtctcgtggagg

SEQ ID NO: 1825756 - DNA, 25 bp, Homo sapien
tcaccagtcagaattgtgtctcgtg

SEQ ID NO: 1825757 - DNA, 25 bp, Homo sapien
ttgtgtctcgtggagggttgcttcc

SEQ ID NO: 1825758 - DNA, 25 bp, Homo sapien
tcagaattgtgtctcgtggagggtt

SEQ ID NO: 1825759 - DNA, 25 bp, Homo sapien
catggccgattttgaggtgctttca

SEQ ID NO: 1825760 - DNA, 25 bp, Homo sapien
tggcgtctacacctctggactagaa

SEQ ID NO: 1825761 - DNA, 25 bp, Homo sapien
ccctccatggccgattttgaggtgc

SEQ ID NO: 1825762 - DNA, 25 bp, Homo sapien
ttttctccccatggcgtctacacct

SEQ ID NO: 1825763 - DNA, 25 bp, Homo sapien
cagcaggagcagcgtagcgtgcgca

SEQ ID NO: 1825764 - DNA, 25 bp, Homo sapien
caggagcagcgtagcgtgcgcacac

SEQ ID NO: 1825765 - DNA, 25 bp, Homo sapien
ggagcagcgtagcgtgcgcacacgc

SEQ ID NO: 1825766 - DNA, 25 bp, Homo sapien
agcaggagcagcgtagcgtgcgcac

SEQ ID NO: 1825767 - DNA, 25 bp, Homo sapien
tgaggctgcgataactgggacttcc

SEQ ID NO: 1825768 - DNA, 25 bp, Homo sapien
tggtttaggcaaaaggctactgaca

SEQ ID NO: 1825769 - DNA, 25 bp, Homo sapien
gaagtgaggcgaggattcctgccct

SEQ ID NO: 1825770 - DNA, 25 bp, Homo sapien
cacgcccttcttctaaaacaggtgg

SEQ ID NO: 1825771 - DNA, 25 bp, Homo sapien
ggcaacctgagccaggaagagtgct

SEQ ID NO: 1825772 - DNA, 25 bp, Homo sapien
aggattgggcaacctgagccaggaa

SEQ ID NO: 1825773 - DNA, 25 bp, Homo sapien
cctgagccaggaagagtgctgcttt

SEQ ID NO: 1825774 - DNA, 25 bp, Homo sapien
ttgggcaacctgagccaggaagagt

SEQ ID NO: 1825775 - DNA, 25 bp, Homo sapien
tgggagcaatatcctctgaacctgt

SEQ ID NO: 1825776 - DNA, 25 bp, Homo sapien
tcccaaaaggtgtgccatgaccaca

SEQ ID NO: 1825777 - DNA, 25 bp, Homo sapien
tccctctagaactggtgaaaatggg

SEQ ID NO: 1825778 - DNA, 25 bp, Homo sapien
caggaaggctccctctagaactggt

SEQ ID NO: 1825779 - DNA, 25 bp, Homo sapien
catcattaggggtacattctttagc

SEQ ID NO: 1825780 - DNA, 25 bp, Homo sapien
agcatccactgtagcccgaacactg

SEQ ID NO: 1825781 - DNA, 25 bp, Homo sapien
ctggtacaacagttactggaatccc

SEQ ID NO: 1825782 - DNA, 25 bp, Homo sapien
ggtacaacagttactggaatcccat

SEQ ID NO: 1825783 - DNA, 25 bp, Homo sapien
cagaaatctgtttgagaattgtcag

SEQ ID NO: 1825784 - DNA, 25 bp, Homo sapien
gaaatctgtttgagaattgtcagca

SEQ ID NO: 1825785 - DNA, 25 bp, Homo sapien
agaaatctgtttgagaattgtcagc

SEQ ID NO: 1825786 - DNA, 25 bp, Homo sapien
aaatctgtttgagaattgtcagcat

SEQ ID NO: 1825787 - DNA, 25 bp, Homo sapien
ccatttggatggaattccaggctca

SEQ ID NO: 1825788 - DNA, 25 bp, Homo sapien
gatagcttgttgaaagaggcggccc

SEQ ID NO: 1825789 - DNA, 25 bp, Homo sapien
gaatgctgcgattgttccagacaca

SEQ ID NO: 1825790 - DNA, 25 bp, Homo sapien
gctcagcaggctaacaatggcagga

SEQ ID NO: 1825791 - DNA, 25 bp, Homo sapien
ggatgatggggcagattgaaggcag

SEQ ID NO: 1825792 - DNA, 25 bp, Homo sapien
gatgatggggcagattgaaggcagg

SEQ ID NO: 1825793 - DNA, 25 bp, Homo sapien
tgtttaggcaacaagacgaatcttc

SEQ ID NO: 1825794 - DNA, 25 bp, Homo sapien
tagcttaagaaatgtaggacccttc

SEQ ID NO: 1825795 - DNA, 25 bp, Homo sapien
gaacagaagcatgagtataggccag

SEQ ID NO: 1825796 - DNA, 25 bp, Homo sapien
tgtgagacagcaacactggaacaga

SEQ ID NO: 1825797 - DNA, 25 bp, Homo sapien
tcagcaacgtgctgccagcttgaaa

SEQ ID NO: 1825798 - DNA, 25 bp, Homo sapien
caggctctcgaggactaagtggttg

SEQ ID NO: 1825799 - DNA, 25 bp, Homo sapien
tgggctcaggagtcaactatccatg

SEQ ID NO: 1825800 - DNA, 25 bp, Homo sapien
gagcacacattatcaatcagagcct

SEQ ID NO: 1825801 - DNA, 25 bp, Homo sapien
gtggaacatttgggtgatcccccga

SEQ ID NO: 1825802 - DNA, 25 bp, Homo sapien
tgtggaacatttgggtgatcccccg

SEQ ID NO: 1825803 - DNA, 25 bp, Homo sapien
tggaacatttgggtgatcccccgag

SEQ ID NO: 1825804 - DNA, 25 bp, Homo sapien
acatttgggtgatcccccgagggct

SEQ ID NO: 1825805 - DNA, 25 bp, Homo sapien
gggaaagaggtggtattcccagctc

SEQ ID NO: 1825806 - DNA, 25 bp, Homo sapien
aaagaggtggtattcccagctccaa

SEQ ID NO: 1825807 - DNA, 25 bp, Homo sapien
cttggagcagtgaagaggcagcagt

SEQ ID NO: 1825808 - DNA, 25 bp, Homo sapien
gagcagtgaagaggcagcagtagat

SEQ ID NO: 1825809 - DNA, 25 bp, Homo sapien
gatgtttatacctgccctgaatgct

SEQ ID NO: 1825810 - DNA, 25 bp, Homo sapien
ggcatgtgcagtcaacctttcaaaa

SEQ ID NO: 1825811 - DNA, 25 bp, Homo sapien
ggtaacttctcatctaggtcctcag

SEQ ID NO: 1825812 - DNA, 25 bp, Homo sapien
ccaggaccagtagctaggagatctg

SEQ ID NO: 1825813 - DNA, 25 bp, Homo sapien
tcctcttcttccgtggctgcctcat

SEQ ID NO: 1825814 - DNA, 25 bp, Homo sapien
tcttcttccgtggctgcctcatgtc

SEQ ID NO: 1825815 - DNA, 25 bp, Homo sapien
ctcttcttccgtggctgcctcatgt

SEQ ID NO: 1825816 - DNA, 25 bp, Homo sapien
cttcctcttcttccgtggctgcctc

SEQ ID NO: 1825817 - DNA, 25 bp, Homo sapien
tactctgggcctttaatgaattctt

SEQ ID NO: 1825818 - DNA, 25 bp, Homo sapien
cattaggtctataagtacaagcaca

SEQ ID NO: 1825819 - DNA, 25 bp, Homo sapien
gctcacatacaagagggacaatata

SEQ ID NO: 1825820 - DNA, 25 bp, Homo sapien
agttagggcttctctacattaggtc

SEQ ID NO: 1825821 - DNA, 25 bp, Homo sapien
aggaagttagattcaccccgacttg

SEQ ID NO: 1825822 - DNA, 25 bp, Homo sapien
aaagtatcctagttggcagatagga

SEQ ID NO: 1825823 - DNA, 25 bp, Homo sapien
actgctgtcagatagtagcaagggc

SEQ ID NO: 1825824 - DNA, 25 bp, Homo sapien
tttaactgctgtcagatagtagcaa

SEQ ID NO: 1825825 - DNA, 25 bp, Homo sapien
gattccaacagattctagcctccat

SEQ ID NO: 1825826 - DNA, 25 bp, Homo sapien
ggaagcagattccaacagattctag

SEQ ID NO: 1825827 - DNA, 25 bp, Homo sapien
ctgatattcttgaccagttggtgct

SEQ ID NO: 1825828 - DNA, 25 bp, Homo sapien
tggtgacttccaatcgggccactgg

SEQ ID NO: 1825829 - DNA, 25 bp, Homo sapien
atagattgggcggaagatggcactt

SEQ ID NO: 1825830 - DNA, 25 bp, Homo sapien
ctttgccatccttatatacagaatc

SEQ ID NO: 1825831 - DNA, 25 bp, Homo sapien
tcagggtagagttcctgcgcttctc

SEQ ID NO: 1825832 - DNA, 25 bp, Homo sapien
atagaacagaatggcatgtgggcga

SEQ ID NO: 1825833 - DNA, 25 bp, Homo sapien
ccccaacgctgtcctcttgccttgg

SEQ ID NO: 1825834 - DNA, 25 bp, Homo sapien
ccttggcaggacctcttggcaggac

SEQ ID NO: 1825835 - DNA, 25 bp, Homo sapien
tcttgccttggcaggacctcttggc

SEQ ID NO: 1825836 - DNA, 25 bp, Homo sapien
cctcttgccttggcaggacctcttg

SEQ ID NO: 1825837 - DNA, 25 bp, Homo sapien
tctgtttgcggctagtttttctttc

SEQ ID NO: 1825838 - DNA, 25 bp, Homo sapien
aaagacagtaagcatcattgcttct

SEQ ID NO: 1825839 - DNA, 25 bp, Homo sapien
gcgcatctgtagctaagaaagaaat

SEQ ID NO: 1825840 - DNA, 25 bp, Homo sapien
aggcagacacggaagaagcgcatct

SEQ ID NO: 1825841 - DNA, 25 bp, Homo sapien
caagaggctgagtttggcaaacaca

SEQ ID NO: 1825842 - DNA, 25 bp, Homo sapien
caggtacccgtctcaaagtagagcc

SEQ ID NO: 1825843 - DNA, 25 bp, Homo sapien
gaaagctgctagacccaagaggctg

SEQ ID NO: 1825844 - DNA, 25 bp, Homo sapien
tctctccaagtaggtagatgctggc

SEQ ID NO: 1825845 - DNA, 25 bp, Homo sapien
aactgcaaggctagagtgttagtca

SEQ ID NO: 1825846 - DNA, 25 bp, Homo sapien
gaaataccgacgtctgtgggtggca

SEQ ID NO: 1825847 - DNA, 25 bp, Homo sapien
tgggtggcagataaacagataacgg

SEQ ID NO: 1825848 - DNA, 25 bp, Homo sapien
tctttcggtgttaaccctcaggtca

SEQ ID NO: 1825849 - DNA, 25 bp, Homo sapien
tgaggtgtcggcagtgatgagagtc

SEQ ID NO: 1825850 - DNA, 25 bp, Homo sapien
ttgaggtgtcggcagtgatgagagt

SEQ ID NO: 1825851 - DNA, 25 bp, Homo sapien
gaggtgtcggcagtgatgagagtca

SEQ ID NO: 1825852 - DNA, 25 bp, Homo sapien
aggtgtcggcagtgatgagagtcat

SEQ ID NO: 1825853 - DNA, 25 bp, Homo sapien
gcatttagagctgttgcccaacccc

SEQ ID NO: 1825854 - DNA, 25 bp, Homo sapien
gggtggcaacctcatcacggcattt

SEQ ID NO: 1825855 - DNA, 25 bp, Homo sapien
taattccttgctacctttgctgctc

SEQ ID NO: 1825856 - DNA, 25 bp, Homo sapien
cttccagtttgaagcctctctgcct

SEQ ID NO: 1825857 - DNA, 25 bp, Homo sapien
aatcttgtcactccacgagggttca

SEQ ID NO: 1825858 - DNA, 25 bp, Homo sapien
ggttcaactagctgcatctcctcag

SEQ ID NO: 1825859 - DNA, 25 bp, Homo sapien
ccacgagggttcaactagctgcatc

SEQ ID NO: 1825860 - DNA, 25 bp, Homo sapien
tctcaatcttgtctcaaaattagaa

SEQ ID NO: 1825861 - DNA, 25 bp, Homo sapien
acctccatccctcttcagtttggat

SEQ ID NO: 1825862 - DNA, 25 bp, Homo sapien
ctctcctctcctagtcctccacctc

SEQ ID NO: 1825863 - DNA, 25 bp, Homo sapien
ccatccctcttcagtttggatcctg

SEQ ID NO: 1825864 - DNA, 25 bp, Homo sapien
ccacctccatccctcttcagtttgg

SEQ ID NO: 1825865 - DNA, 25 bp, Homo sapien
caagccttcatgagtgggtagttcc

SEQ ID NO: 1825866 - DNA, 25 bp, Homo sapien
caccgctcagctggatgcaaactct

SEQ ID NO: 1825867 - DNA, 25 bp, Homo sapien
tgctggccaagttacaaatactgct

SEQ ID NO: 1825868 - DNA, 25 bp, Homo sapien
ttttttctagctccaatcctgccgg

SEQ ID NO: 1825869 - DNA, 25 bp, Homo sapien
gactgtccaaactggcacatctgac

SEQ ID NO: 1825870 - DNA, 25 bp, Homo sapien
cacttccctaaaacgtctccatggg

SEQ ID NO: 1825871 - DNA, 25 bp, Homo sapien
ttccccatttgactgtccaaactgg

SEQ ID NO: 1825872 - DNA, 25 bp, Homo sapien
tgacagtgggcccatagccacttcc

SEQ ID NO: 1825873 - DNA, 25 bp, Homo sapien
gctggtcgagtccataaaacaggca

SEQ ID NO: 1825874 - DNA, 25 bp, Homo sapien
cactgattagcttccaatctgcagg

SEQ ID NO: 1825875 - DNA, 25 bp, Homo sapien
taaacttccccgcatatagggatcg

SEQ ID NO: 1825876 - DNA, 25 bp, Homo sapien
ggagggttgtccagattgtcacaca

SEQ ID NO: 1825877 - DNA, 25 bp, Homo sapien
tcctgtcttctttgatggataggag

SEQ ID NO: 1825878 - DNA, 25 bp, Homo sapien
cagccagcaaggtgagtcctgtctt

SEQ ID NO: 1825879 - DNA, 25 bp, Homo sapien
ggcctgaggacgacttcagccaatg

SEQ ID NO: 1825880 - DNA, 25 bp, Homo sapien
tcttctttgatggataggagtgagg

SEQ ID NO: 1825881 - DNA, 25 bp, Homo sapien
tacacttcggcatattctcacacac

SEQ ID NO: 1825882 - DNA, 25 bp, Homo sapien
ggcttggcgtaagtcaccgtgcctg

SEQ ID NO: 1825883 - DNA, 25 bp, Homo sapien
ttcaccctccgttgtgctcagcatg

SEQ ID NO: 1825884 - DNA, 25 bp, Homo sapien
aatcctctatgttctttgcagccag

SEQ ID NO: 1825885 - DNA, 25 bp, Homo sapien
tacattaacgatcatttggaacaga

SEQ ID NO: 1825886 - DNA, 25 bp, Homo sapien
agctcccgtcctctacattaacgat

SEQ ID NO: 1825887 - DNA, 25 bp, Homo sapien
gatgaattttattaaccctgcccac

SEQ ID NO: 1825888 - DNA, 25 bp, Homo sapien
tactggccattgatctgatgaattt

SEQ ID NO: 1825889 - DNA, 25 bp, Homo sapien
tagttcctgatattggctcttccca

SEQ ID NO: 1825890 - DNA, 25 bp, Homo sapien
tccgatctgcgaattagttcctgat

SEQ ID NO: 1825891 - DNA, 25 bp, Homo sapien
gcatatttgccttaatactctctcc

SEQ ID NO: 1825892 - DNA, 25 bp, Homo sapien
ctctattcaggccacattccgatct

SEQ ID NO: 1825893 - DNA, 25 bp, Homo sapien
acttcctgtgctacaatttctgcct

SEQ ID NO: 1825894 - DNA, 25 bp, Homo sapien
ctaacttcctgtgctacaatttctg

SEQ ID NO: 1825895 - DNA, 25 bp, Homo sapien
ttcctgtgctacaatttctgcctct

SEQ ID NO: 1825896 - DNA, 25 bp, Homo sapien
tcactaacttcctgtgctacaattt

SEQ ID NO: 1825897 - DNA, 25 bp, Homo sapien
ttcatcaatctgtaattcaccctcc

SEQ ID NO: 1825898 - DNA, 25 bp, Homo sapien
gcccccaggttttgcttggtatctc

SEQ ID NO: 1825899 - DNA, 25 bp, Homo sapien
caggttttgcttggtatctcctcca

SEQ ID NO: 1825900 - DNA, 25 bp, Homo sapien
ccccaggttttgcttggtatctcct

SEQ ID NO: 1825901 - DNA, 25 bp, Homo sapien
atcagtaggcctgttatcatcaggg

SEQ ID NO: 1825902 - DNA, 25 bp, Homo sapien
ccaacataattacattgctggttct

SEQ ID NO: 1825903 - DNA, 25 bp, Homo sapien
gctcctgatcagtaggcctgttatc

SEQ ID NO: 1825904 - DNA, 25 bp, Homo sapien
ttcaatgccaacataattacattgc

SEQ ID NO: 1825905 - DNA, 25 bp, Homo sapien
cccaatactatttgctggtcattgt

SEQ ID NO: 1825906 - DNA, 25 bp, Homo sapien
tgagaagttatttcccaatactatt

SEQ ID NO: 1825907 - DNA, 25 bp, Homo sapien
ggatgacagtatctaggaccttggg

SEQ ID NO: 1825908 - DNA, 25 bp, Homo sapien
cattgcatgattcagccacacgggg

SEQ ID NO: 1825909 - DNA, 25 bp, Homo sapien
gagatctcgattgtagagaaagagg

SEQ ID NO: 1825910 - DNA, 25 bp, Homo sapien
gaggatccagaatgccaaaaataca

SEQ ID NO: 1825911 - DNA, 25 bp, Homo sapien
aatgaggcacccactgtgtacccca

SEQ ID NO: 1825912 - DNA, 25 bp, Homo sapien
tgtctttctctcctcggttgtcttt

SEQ ID NO: 1825913 - DNA, 25 bp, Homo sapien
tctctcctcggttgtcttttccatg

SEQ ID NO: 1825914 - DNA, 25 bp, Homo sapien
catgaatgaggcacccactgtgtac

SEQ ID NO: 1825915 - DNA, 25 bp, Homo sapien
ggtgaccccgtagaaaatggtctgc

SEQ ID NO: 1825916 - DNA, 25 bp, Homo sapien
tctctgaaggcagttaggaacttaa

SEQ ID NO: 1825917 - DNA, 25 bp, Homo sapien
aagcaggtctctgaaggcagttagg

SEQ ID NO: 1825918 - DNA, 25 bp, Homo sapien
tcttttcagcacatcatccaggcag

SEQ ID NO: 1825919 - DNA, 25 bp, Homo sapien
ctggctggtagatgtcaaacccagc

SEQ ID NO: 1825920 - DNA, 25 bp, Homo sapien
ggctggtagatgtcaaacccagcag

SEQ ID NO: 1825921 - DNA, 25 bp, Homo sapien
cctggctggtagatgtcaaacccag

SEQ ID NO: 1825922 - DNA, 25 bp, Homo sapien
tggctggtagatgtcaaacccagca

SEQ ID NO: 1825923 - DNA, 25 bp, Homo sapien
gagcctgcagactctaccaccagga

SEQ ID NO: 1825924 - DNA, 25 bp, Homo sapien
ggcctggtgcctgcgggcagctaca

SEQ ID NO: 1825925 - DNA, 25 bp, Homo sapien
tggggttccccattctgcatggctg

SEQ ID NO: 1825926 - DNA, 25 bp, Homo sapien
gagcagtggctcgacagtggtcctt

SEQ ID NO: 1825927 - DNA, 25 bp, Homo sapien
tttccaccttgcaccatttgccaag

SEQ ID NO: 1825928 - DNA, 25 bp, Homo sapien
caagattttgggtttcacctcgtct

SEQ ID NO: 1825929 - DNA, 25 bp, Homo sapien
gcaccatttgccaagattttgggtt

SEQ ID NO: 1825930 - DNA, 25 bp, Homo sapien
caccttgcaccatttgccaagattt

SEQ ID NO: 1825931 - DNA, 25 bp, Homo sapien
gtgagatgtaataattgaggaaagt

SEQ ID NO: 1825932 - DNA, 25 bp, Homo sapien
ctgtgagatgtaataattgaggaaa

SEQ ID NO: 1825933 - DNA, 25 bp, Homo sapien
tgtgagatgtaataattgaggaaag

SEQ ID NO: 1825934 - DNA, 25 bp, Homo sapien
gtatatgcatgtagaagtcttcgtc

SEQ ID NO: 1825935 - DNA, 25 bp, Homo sapien
tatatgcatgtagaagtcttcgtca

SEQ ID NO: 1825936 - DNA, 25 bp, Homo sapien
ggtatatgcatgtagaagtcttcgt

SEQ ID NO: 1825937 - DNA, 25 bp, Homo sapien
gggcaccgtgaatgtcttgagtact

SEQ ID NO: 1825938 - DNA, 25 bp, Homo sapien
tgctgaccggggcaccgtgaatgtc

SEQ ID NO: 1825939 - DNA, 25 bp, Homo sapien
gtcttgagtactttctggcgtcctt

SEQ ID NO: 1825940 - DNA, 25 bp, Homo sapien
tgaatgtcttgagtactttctggcg

SEQ ID NO: 1825941 - DNA, 25 bp, Homo sapien
aacagcaggccggagagctacaaac

SEQ ID NO: 1825942 - DNA, 25 bp, Homo sapien
cccctctgggactgagagttccaac

SEQ ID NO: 1825943 - DNA, 25 bp, Homo sapien
ctaagtccaacagcaggccggagag

SEQ ID NO: 1825944 - DNA, 25 bp, Homo sapien
agtccaacagcaggccggagagcta

SEQ ID NO: 1825945 - DNA, 25 bp, Homo sapien
tcctagacactccatttgcataggc

SEQ ID NO: 1825946 - DNA, 25 bp, Homo sapien
caagagtaacccagggctgtcctag

SEQ ID NO: 1825947 - DNA, 25 bp, Homo sapien
ccctagagaaccaagagtaacccag

SEQ ID NO: 1825948 - DNA, 25 bp, Homo sapien
cagggctgtcctagacactccattt

SEQ ID NO: 1825949 - DNA, 25 bp, Homo sapien
ctgactttagacattgctgggagag

SEQ ID NO: 1825950 - DNA, 25 bp, Homo sapien
gccatgaataggatgagacgtggct

SEQ ID NO: 1825951 - DNA, 25 bp, Homo sapien
tgagagtccccgctctgccatgaat

SEQ ID NO: 1825952 - DNA, 25 bp, Homo sapien
tgactttagacattgctgggagagg

SEQ ID NO: 1825953 - DNA, 25 bp, Homo sapien
atcagcatcacccacagcattacat

SEQ ID NO: 1825954 - DNA, 25 bp, Homo sapien
cagctcatgtcgttttactacatca

SEQ ID NO: 1825955 - DNA, 25 bp, Homo sapien
tcctcgtgtggcatcccacattgga

SEQ ID NO: 1825956 - DNA, 25 bp, Homo sapien
tttcatagcttttaataacctgccc

SEQ ID NO: 1825957 - DNA, 25 bp, Homo sapien
ggcacctttactcctactgtctcct

SEQ ID NO: 1825958 - DNA, 25 bp, Homo sapien
gactggttacgtcataaccctcatt

SEQ ID NO: 1825959 - DNA, 25 bp, Homo sapien
tgatgcctcctctcaacatatcttt

SEQ ID NO: 1825960 - DNA, 25 bp, Homo sapien
caacatatctttgactggttacgtc

SEQ ID NO: 1825961 - DNA, 25 bp, Homo sapien
ctggatggccaccacaacctggcca

SEQ ID NO: 1825962 - DNA, 25 bp, Homo sapien
tggatggccaccacaacctggccat

SEQ ID NO: 1825963 - DNA, 25 bp, Homo sapien
cagcgatgagcaggaaatagggaca

SEQ ID NO: 1825964 - DNA, 25 bp, Homo sapien
ctaggtgacgtctgcaggttgagca

SEQ ID NO: 1825965 - DNA, 25 bp, Homo sapien
cgatgagcaggaaatagggacacag

SEQ ID NO: 1825966 - DNA, 25 bp, Homo sapien
gggttggacgacactcctaggtgac

SEQ ID NO: 1825967 - DNA, 25 bp, Homo sapien
cgatgtcgaaatttctttccaccat

SEQ ID NO: 1825968 - DNA, 25 bp, Homo sapien
tggttgaacgatgtcgaaatttctt

SEQ ID NO: 1825969 - DNA, 25 bp, Homo sapien
tgtatactttggttgaacgatgtcg

SEQ ID NO: 1825970 - DNA, 25 bp, Homo sapien
tactttggttgaacgatgtcgaaat

SEQ ID NO: 1825971 - DNA, 25 bp, Homo sapien
aggagcttgaaactgcagtgagctg

SEQ ID NO: 1825972 - DNA, 25 bp, Homo sapien
agctgagataacaccacagcactcc

SEQ ID NO: 1825973 - DNA, 25 bp, Homo sapien
tgagataacaccacagcactccagc

SEQ ID NO: 1825974 - DNA, 25 bp, Homo sapien
ggagcttgaaactgcagtgagctga

SEQ ID NO: 1825975 - DNA, 25 bp, Homo sapien
actggcacctcagacgcctgcaata

SEQ ID NO: 1825976 - DNA, 25 bp, Homo sapien
gaacttgtcggacagccctaatctc

SEQ ID NO: 1825977 - DNA, 25 bp, Homo sapien
caataacctccgacgaacttgtcgg

SEQ ID NO: 1825978 - DNA, 25 bp, Homo sapien
agacgcctgcaataacctccgacga

SEQ ID NO: 1825979 - DNA, 25 bp, Homo sapien
gtaagctatttagacgtggcctcac

SEQ ID NO: 1825980 - DNA, 25 bp, Homo sapien
catgactggcgatgatgaggagcta

SEQ ID NO: 1825981 - DNA, 25 bp, Homo sapien
cacttcgcaagaatggtggctctgg

SEQ ID NO: 1825982 - DNA, 25 bp, Homo sapien
gagctaaggatctccctctcgggtg

SEQ ID NO: 1825983 - DNA, 25 bp, Homo sapien
ggcagcatcatacctgaccaatgaa

SEQ ID NO: 1825984 - DNA, 25 bp, Homo sapien
ctttcttaaaactgctgcgtgtctc

SEQ ID NO: 1825985 - DNA, 25 bp, Homo sapien
tttcttaaaactgctgcgtgtctca

SEQ ID NO: 1825986 - DNA, 25 bp, Homo sapien
aactctacaaggtccaactttctct

SEQ ID NO: 1825987 - DNA, 25 bp, Homo sapien
gagtcccctcctaatcagaaaagga

SEQ ID NO: 1825988 - DNA, 25 bp, Homo sapien
tgaaaagaaactttcgcaaactctc

SEQ ID NO: 1825989 - DNA, 25 bp, Homo sapien
gaaactttcgcaaactctcagagcc

SEQ ID NO: 1825990 - DNA, 25 bp, Homo sapien
tgaaaaggcatgacctgtgcgatga

SEQ ID NO: 1825991 - DNA, 25 bp, Homo sapien
gatttaaattcgatctgccaggttc

SEQ ID NO: 1825992 - DNA, 25 bp, Homo sapien
caagggccggcatcttggatttaaa

SEQ ID NO: 1825993 - DNA, 25 bp, Homo sapien
cagtgaatttgggtcaggccgatcc

SEQ ID NO: 1825994 - DNA, 25 bp, Homo sapien
tacattcgtaggagggaatttccag

SEQ ID NO: 1825995 - DNA, 25 bp, Homo sapien
gctgacccacatgtgtagctgttct

SEQ ID NO: 1825996 - DNA, 25 bp, Homo sapien
tttccagactaatcgcagatgaatt

SEQ ID NO: 1825997 - DNA, 25 bp, Homo sapien
gatgaatttgtgtggccctttacag

SEQ ID NO: 1825998 - DNA, 25 bp, Homo sapien
ctgcagagtacgtgaaaacagtttt

SEQ ID NO: 1825999 - DNA, 25 bp, Homo sapien
ttttaaagttgactgcaatctccat

SEQ ID NO: 1826000 - DNA, 25 bp, Homo sapien
tgcagagtacgtgaaaacagttttt

SEQ ID NO: 1826001 - DNA, 25 bp, Homo sapien
taatttccatatgcgtttctctgag

SEQ ID NO: 1826002 - DNA, 25 bp, Homo sapien
caagcaaggaagacgtatactccag

SEQ ID NO: 1826003 - DNA, 25 bp, Homo sapien
tctttctgtcaatccagtaatttct

SEQ ID NO: 1826004 - DNA, 25 bp, Homo sapien
ttctgaagtgttaaaagtgcctgcc

SEQ ID NO: 1826005 - DNA, 25 bp, Homo sapien
cgctagccttagcagaaagcactgg

SEQ ID NO: 1826006 - DNA, 25 bp, Homo sapien
ttcaggagctccattcagcaacagg

SEQ ID NO: 1826007 - DNA, 25 bp, Homo sapien
ttagccaagaaacgctagccttagc

SEQ ID NO: 1826008 - DNA, 25 bp, Homo sapien
ctgggcaattctaacaccactgatg

SEQ ID NO: 1826009 - DNA, 25 bp, Homo sapien
gactcctgcagaaacccaacaacat

SEQ ID NO: 1826010 - DNA, 25 bp, Homo sapien
cctgcagaaacccaacaacatatgt

SEQ ID NO: 1826011 - DNA, 25 bp, Homo sapien
cagtccctccttgggagctctcctc

SEQ ID NO: 1826012 - DNA, 25 bp, Homo sapien
tgcagaaacccaacaacatatgtgt

SEQ ID NO: 1826013 - DNA, 25 bp, Homo sapien
gaaacattaggaagaacaagaccag

SEQ ID NO: 1826014 - DNA, 25 bp, Homo sapien
ggaagaaacattaggaagaacaaga

SEQ ID NO: 1826015 - DNA, 25 bp, Homo sapien
ttaggaagaacaagaccaggaacat

SEQ ID NO: 1826016 - DNA, 25 bp, Homo sapien
acattaggaagaacaagaccaggaa

SEQ ID NO: 1826017 - DNA, 25 bp, Homo sapien
ggtgctcagttccatgatatatatt

SEQ ID NO: 1826018 - DNA, 25 bp, Homo sapien
gagcatctcaggttggttatcagcc

SEQ ID NO: 1826019 - DNA, 25 bp, Homo sapien
cctgatacaataagatgtctattga

SEQ ID NO: 1826020 - DNA, 25 bp, Homo sapien
ccatgtgcaatggatctaaggattc

SEQ ID NO: 1826021 - DNA, 25 bp, Homo sapien
ggttcattaaatttgccatgtgcaa

SEQ ID NO: 1826022 - DNA, 25 bp, Homo sapien
cggtagaggcagattgaaacttttc

SEQ ID NO: 1826023 - DNA, 25 bp, Homo sapien
tgacggctgaatgagaacagtcgcc

SEQ ID NO: 1826024 - DNA, 25 bp, Homo sapien
ggctgcagctttcggtttctccact

SEQ ID NO: 1826025 - DNA, 25 bp, Homo sapien
gccatgagccgacagacaatatggg

SEQ ID NO: 1826026 - DNA, 25 bp, Homo sapien
cttgatattaataactccactttgt

SEQ ID NO: 1826027 - DNA, 25 bp, Homo sapien
tcttgatattaataactccactttg

SEQ ID NO: 1826028 - DNA, 25 bp, Homo sapien
ttgatattaataactccactttgta

SEQ ID NO: 1826029 - DNA, 25 bp, Homo sapien
aagcactgtgtagaactctgattaa

SEQ ID NO: 1826030 - DNA, 25 bp, Homo sapien
tttcctggcttgagaacttccacaa

SEQ ID NO: 1826031 - DNA, 25 bp, Homo sapien
caggtcatcactggaggtctgattt

SEQ ID NO: 1826032 - DNA, 25 bp, Homo sapien
cataagtgctatccgatttcgttcc

SEQ ID NO: 1826033 - DNA, 25 bp, Homo sapien
tcccaggtacctttagtgagaaggc

SEQ ID NO: 1826034 - DNA, 25 bp, Homo sapien
tggtatgaaacaccccagatccttg

SEQ ID NO: 1826035 - DNA, 25 bp, Homo sapien
taactgctaggtcaaactctctcat

SEQ ID NO: 1826036 - DNA, 25 bp, Homo sapien
aatgaaatgtctcgaccgggcacgg

SEQ ID NO: 1826037 - DNA, 25 bp, Homo sapien
tccaaaggagtaagataacatgagc

SEQ ID NO: 1826038 - DNA, 25 bp, Homo sapien
gctgcattatatgcttcagcctgcc

SEQ ID NO: 1826039 - DNA, 25 bp, Homo sapien
tcagcctgccaataagcatgtccgg

SEQ ID NO: 1826040 - DNA, 25 bp, Homo sapien
tcactatgagtaaagacattcacac

SEQ ID NO: 1826041 - DNA, 25 bp, Homo sapien
tcattattcataacatcatgcacca

SEQ ID NO: 1826042 - DNA, 25 bp, Homo sapien
tgttcattattcataacatcatgca

SEQ ID NO: 1826043 - DNA, 25 bp, Homo sapien
ggaaatcataatgttcattattcat

SEQ ID NO: 1826044 - DNA, 25 bp, Homo sapien
cattattcataacatcatgcaccat

SEQ ID NO: 1826045 - DNA, 25 bp, Homo sapien
ggaaaaatctgtggtagttcttgct

SEQ ID NO: 1826046 - DNA, 25 bp, Homo sapien
ttcttgctctttcagtgttcagaag

SEQ ID NO: 1826047 - DNA, 25 bp, Homo sapien
aatatgttctaaagcacactcattg

SEQ ID NO: 1826048 - DNA, 25 bp, Homo sapien
gtgtttcaatatgttctaaagcaca

SEQ ID NO: 1826049 - DNA, 25 bp, Homo sapien
gcaggggagcctgattctgaggctg

SEQ ID NO: 1826050 - DNA, 25 bp, Homo sapien
ttaaggcaggagtggggtgcagggg

SEQ ID NO: 1826051 - DNA, 25 bp, Homo sapien
gggagcctgattctgaggctggaag

SEQ ID NO: 1826052 - DNA, 25 bp, Homo sapien
gcagggggctccttgcaggggagcc

SEQ ID NO: 1826053 - DNA, 25 bp, Homo sapien
gagtccctcgatattagatgcaaaa

SEQ ID NO: 1826054 - DNA, 25 bp, Homo sapien
tctgtgagtccctcgatattagatg

SEQ ID NO: 1826055 - DNA, 25 bp, Homo sapien
cctcgatattagatgcaaaattgcc

SEQ ID NO: 1826056 - DNA, 25 bp, Homo sapien
ttaggagatctgtgagtccctcgat

SEQ ID NO: 1826057 - DNA, 25 bp, Homo sapien
ggaaccaggaaatccatagctttta

SEQ ID NO: 1826058 - DNA, 25 bp, Homo sapien
tctcaaagggctctatggttaaaga

SEQ ID NO: 1826059 - DNA, 25 bp, Homo sapien
tcatgggaacagctacctggaacca

SEQ ID NO: 1826060 - DNA, 25 bp, Homo sapien
ttcaggtatggtgggtttgcaaggg

SEQ ID NO: 1826061 - DNA, 25 bp, Homo sapien
tatttgccccgtgtaacgtccactg

SEQ ID NO: 1826062 - DNA, 25 bp, Homo sapien
gatatttgccccgtgtaacgtccac

SEQ ID NO: 1826063 - DNA, 25 bp, Homo sapien
ttgccccgtgtaacgtccactgctt

SEQ ID NO: 1826064 - DNA, 25 bp, Homo sapien
ttgctgatatttgccccgtgtaacg

SEQ ID NO: 1826065 - DNA, 25 bp, Homo sapien
cactcccacgcagaacacgtggctc

SEQ ID NO: 1826066 - DNA, 25 bp, Homo sapien
cctgaggacaggaacaacgtccaag

SEQ ID NO: 1826067 - DNA, 25 bp, Homo sapien
ggacaggaacaacgtccaagggcat

SEQ ID NO: 1826068 - DNA, 25 bp, Homo sapien
ctctctactggacctgcactccctg

SEQ ID NO: 1826069 - DNA, 25 bp, Homo sapien
tgtccctcctctctactggacctgc

SEQ ID NO: 1826070 - DNA, 25 bp, Homo sapien
cagatatgaactaaggaaggaggaa

SEQ ID NO: 1826071 - DNA, 25 bp, Homo sapien
tcacattgtcctggactttcttccc

SEQ ID NO: 1826072 - DNA, 25 bp, Homo sapien
ttggcattttgacatcacattgtcc

SEQ ID NO: 1826073 - DNA, 25 bp, Homo sapien
tgtttgaaatcttggcattttgaca

SEQ ID NO: 1826074 - DNA, 25 bp, Homo sapien
caattgtggccagcaacccattgaa

SEQ ID NO: 1826075 - DNA, 25 bp, Homo sapien
aacaattgtggccagcaacccattg

SEQ ID NO: 1826076 - DNA, 25 bp, Homo sapien
atctcctttgtggaccgggtgcagg

SEQ ID NO: 1826077 - DNA, 25 bp, Homo sapien
cagtgctgcagatttgctgatctcc

SEQ ID NO: 1826078 - DNA, 25 bp, Homo sapien
agaatccagacctcaatgtcagctt

SEQ ID NO: 1826079 - DNA, 25 bp, Homo sapien
ttgggttacacaagttctctggcca

SEQ ID NO: 1826080 - DNA, 25 bp, Homo sapien
catcaaatgttagccctccaggcct

SEQ ID NO: 1826081 - DNA, 25 bp, Homo sapien
aatccagacctcaatgtcagcttca

SEQ ID NO: 1826082 - DNA, 25 bp, Homo sapien
cagggccaggatgatatttcctgaa

SEQ ID NO: 1826083 - DNA, 25 bp, Homo sapien
tctggatccagcacactgggttccc

SEQ ID NO: 1826084 - DNA, 25 bp, Homo sapien
tcctgaactctgaatcccagtctgg

SEQ ID NO: 1826085 - DNA, 25 bp, Homo sapien
aactctgaatcccagtctggatcca

SEQ ID NO: 1826086 - DNA, 25 bp, Homo sapien
gaagtagcagcagacgttactacct

SEQ ID NO: 1826087 - DNA, 25 bp, Homo sapien
cagctgagaagtagcagcagacgtt

SEQ ID NO: 1826088 - DNA, 25 bp, Homo sapien
tactacctcatcaggataacagctc

SEQ ID NO: 1826089 - DNA, 25 bp, Homo sapien
gcagacgttactacctcatcaggat

SEQ ID NO: 1826090 - DNA, 25 bp, Homo sapien
tatgtccgctgcacctgagctcact

SEQ ID NO: 1826091 - DNA, 25 bp, Homo sapien
tcaatttctgagcacccgacaactt

SEQ ID NO: 1826092 - DNA, 25 bp, Homo sapien
tctgcaaggaagcttcatgcattag

SEQ ID NO: 1826093 - DNA, 25 bp, Homo sapien
catgcattagcgtagcagatgctct

SEQ ID NO: 1826094 - DNA, 25 bp, Homo sapien
aaatgaggggtgttgtcctggctct

SEQ ID NO: 1826095 - DNA, 25 bp, Homo sapien
ctgcacttggcatgtttagagttag

SEQ ID NO: 1826096 - DNA, 25 bp, Homo sapien
catgtttagagttaggagttcccac

SEQ ID NO: 1826097 - DNA, 25 bp, Homo sapien
cacttggcatgtttagagttaggag

SEQ ID NO: 1826098 - DNA, 25 bp, Homo sapien
tgggggcccttttgctttgtccaca

SEQ ID NO: 1826099 - DNA, 25 bp, Homo sapien
gagaaagaccactccagaggacagt

SEQ ID NO: 1826100 - DNA, 25 bp, Homo sapien
ctaggagttgagagaaagaccactc

SEQ ID NO: 1826101 - DNA, 25 bp, Homo sapien
gacagtgagattagccccgaatggg

SEQ ID NO: 1826102 - DNA, 25 bp, Homo sapien
tccatccctgagtgcactgtgatca

SEQ ID NO: 1826103 - DNA, 25 bp, Homo sapien
ccatataattgatcagatatctcca

SEQ ID NO: 1826104 - DNA, 25 bp, Homo sapien
gctcaactgtgtccctttggggaga

SEQ ID NO: 1826105 - DNA, 25 bp, Homo sapien
cccacagtggacatatgatgtctta

SEQ ID NO: 1826106 - DNA, 25 bp, Homo sapien
caaagaaaaggtccattctggaagg

SEQ ID NO: 1826107 - DNA, 25 bp, Homo sapien
tctggaaggcagtgaagataacaaa

SEQ ID NO: 1826108 - DNA, 25 bp, Homo sapien
ttggagcaggacaagtcagcccctg

SEQ ID NO: 1826109 - DNA, 25 bp, Homo sapien
aaattcacagtaccacagtcagcaa

SEQ ID NO: 1826110 - DNA, 25 bp, Homo sapien
ctccctgtgcgtgcccggctgttcc

SEQ ID NO: 1826111 - DNA, 25 bp, Homo sapien
cctgtgcgtgcccggctgttccgtt

SEQ ID NO: 1826112 - DNA, 25 bp, Homo sapien
gtgcgtgcccggctgttccgttttg

SEQ ID NO: 1826113 - DNA, 25 bp, Homo sapien
tgtgcgtgcccggctgttccgtttt

SEQ ID NO: 1826114 - DNA, 25 bp, Homo sapien
tctttttgaggcatgccctatctgg

SEQ ID NO: 1826115 - DNA, 25 bp, Homo sapien
tgaggcatgccctatctggtatgca

SEQ ID NO: 1826116 - DNA, 25 bp, Homo sapien
ctggagggaaagcgcattggctcac

SEQ ID NO: 1826117 - DNA, 25 bp, Homo sapien
tatctggtatgcagctggagggaaa

SEQ ID NO: 1826118 - DNA, 25 bp, Homo sapien
gcataaccgatgtaaataatcagtg

SEQ ID NO: 1826119 - DNA, 25 bp, Homo sapien
ccaaggaacgaagtttttcttcatg

SEQ ID NO: 1826120 - DNA, 25 bp, Homo sapien
gctggtggcccgatgtgcataaccg

SEQ ID NO: 1826121 - DNA, 25 bp, Homo sapien
tctgcaggtgccaggaaagtaggtc

SEQ ID NO: 1826122 - DNA, 25 bp, Homo sapien
gtttctgttactgcctgcttgatgt

SEQ ID NO: 1826123 - DNA, 25 bp, Homo sapien
ccaagaaagttctccagtcagggtc

SEQ ID NO: 1826124 - DNA, 25 bp, Homo sapien
gaccaagctgaaagtggataactag

SEQ ID NO: 1826125 - DNA, 25 bp, Homo sapien
tgtgaaatccagtgttaagttctca

SEQ ID NO: 1826126 - DNA, 25 bp, Homo sapien
cagggtctccatttctcacctgtga

SEQ ID NO: 1826127 - DNA, 25 bp, Homo sapien
cctgggaagtctgttgttaaacatg

SEQ ID NO: 1826128 - DNA, 25 bp, Homo sapien
ttcccacactgtcattgacccatat

SEQ ID NO: 1826129 - DNA, 25 bp, Homo sapien
tgttgttaaacatgttgtcatttca

SEQ ID NO: 1826130 - DNA, 25 bp, Homo sapien
ttctctcctgaagcatgcctgggaa

SEQ ID NO: 1826131 - DNA, 25 bp, Homo sapien
ggtggactatggaactttctgagag

SEQ ID NO: 1826132 - DNA, 25 bp, Homo sapien
gatgggtggactatggaactttctg

SEQ ID NO: 1826133 - DNA, 25 bp, Homo sapien
tccagatgggtggactatggaactt

SEQ ID NO: 1826134 - DNA, 25 bp, Homo sapien
cagatgggtggactatggaactttc

SEQ ID NO: 1826135 - DNA, 25 bp, Homo sapien
tctcacttgtgaaatcatgtccctt

SEQ ID NO: 1826136 - DNA, 25 bp, Homo sapien
caagttggactttgactctagactc

SEQ ID NO: 1826137 - DNA, 25 bp, Homo sapien
gactctagactcgtgggttcctttg

SEQ ID NO: 1826138 - DNA, 25 bp, Homo sapien
tcctttgtattgatgtccacagaca

SEQ ID NO: 1826139 - DNA, 25 bp, Homo sapien
ctgttggtgtaaagtggaggcacag

SEQ ID NO: 1826140 - DNA, 25 bp, Homo sapien
tctgttggtgtaaagtggaggcaca

SEQ ID NO: 1826141 - DNA, 25 bp, Homo sapien
catacggtgcaagtctccaggatca

SEQ ID NO: 1826142 - DNA, 25 bp, Homo sapien
gattgttcatttcagtccaggtagc

SEQ ID NO: 1826143 - DNA, 25 bp, Homo sapien
gaatctaatgtaggaggcctcccgc

SEQ ID NO: 1826144 - DNA, 25 bp, Homo sapien
tcccgctgtgcgtctagcaggaaag

SEQ ID NO: 1826145 - DNA, 25 bp, Homo sapien
tctcagaacctgcaagtgaagtgcg

SEQ ID NO: 1826146 - DNA, 25 bp, Homo sapien
gagtgtgggtcctttcccgcgacta

SEQ ID NO: 1826147 - DNA, 25 bp, Homo sapien
cagagcccaaggtagaaaccgatgg

SEQ ID NO: 1826148 - DNA, 25 bp, Homo sapien
gatctgtctatcttctcggcggcgc

SEQ ID NO: 1826149 - DNA, 25 bp, Homo sapien
ttctttccgggttgggagtgcgcgc

SEQ ID NO: 1826150 - DNA, 25 bp, Homo sapien
ggtgcgggtcggctcgggctcgcct

SEQ ID NO: 1826151 - DNA, 25 bp, Homo sapien
gagtgcgcgccagctgcagttggga

SEQ ID NO: 1826152 - DNA, 25 bp, Homo sapien
gctcgccttggggtcgggctcggga

SEQ ID NO: 1826153 - DNA, 25 bp, Homo sapien
cgtcctagtcgctacaatgctgctg

SEQ ID NO: 1826154 - DNA, 25 bp, Homo sapien
tcctcctggcatgcgaagcgctttg

SEQ ID NO: 1826155 - DNA, 25 bp, Homo sapien
gaacggtttatcactcgtcctagtc

SEQ ID NO: 1826156 - DNA, 25 bp, Homo sapien
gctttgttcagtgcagcgttgcaga

SEQ ID NO: 1826157 - DNA, 25 bp, Homo sapien
tgaagctctaggtccccatgggaaa

SEQ ID NO: 1826158 - DNA, 25 bp, Homo sapien
ggtgacacctagaaacttccgcgct

SEQ ID NO: 1826159 - DNA, 25 bp, Homo sapien
catgggaaaccctgagtaagcaaag

SEQ ID NO: 1826160 - DNA, 25 bp, Homo sapien
tggtgctcggcggtgacacctagaa

SEQ ID NO: 1826161 - DNA, 25 bp, Homo sapien
aaagatagggtgagcatacaactgc

SEQ ID NO: 1826162 - DNA, 25 bp, Homo sapien
gttggttaagccacgccaggagtga

SEQ ID NO: 1826163 - DNA, 25 bp, Homo sapien
tgtaatgagatagcagtccctaagc

SEQ ID NO: 1826164 - DNA, 25 bp, Homo sapien
tctaaggctgtgctgtgatgcaaac

SEQ ID NO: 1826165 - DNA, 25 bp, Homo sapien
caggaagagcccatagtggtcatga

SEQ ID NO: 1826166 - DNA, 25 bp, Homo sapien
catgctggtgttagcacgtggctca

SEQ ID NO: 1826167 - DNA, 25 bp, Homo sapien
tgttggacatgttgtggagttcacc

SEQ ID NO: 1826168 - DNA, 25 bp, Homo sapien
gctgtcacttataagcccgtctgga

SEQ ID NO: 1826169 - DNA, 25 bp, Homo sapien
ctttgggtgattgccagagcgctga

SEQ ID NO: 1826170 - DNA, 25 bp, Homo sapien
gaagaaatgcccctccacgtgtata

SEQ ID NO: 1826171 - DNA, 25 bp, Homo sapien
atgtgtaccattctgtcctcctgtg

SEQ ID NO: 1826172 - DNA, 25 bp, Homo sapien
tcctgtggaccgtgaatgtggacca

SEQ ID NO: 1826173 - DNA, 25 bp, Homo sapien
gactcttcagttaattcatcaatct

SEQ ID NO: 1826174 - DNA, 25 bp, Homo sapien
tgtgactcttcagttaattcatcaa

SEQ ID NO: 1826175 - DNA, 25 bp, Homo sapien
cctgtgactcttcagttaattcatc

SEQ ID NO: 1826176 - DNA, 25 bp, Homo sapien
gtgactcttcagttaattcatcaat

SEQ ID NO: 1826177 - DNA, 25 bp, Homo sapien
tcctggcagaggcttataatcaagt

SEQ ID NO: 1826178 - DNA, 25 bp, Homo sapien
taatcaagtagaagcgtaaagccag

SEQ ID NO: 1826179 - DNA, 25 bp, Homo sapien
tgattgcaaagagtagaagtagcct

SEQ ID NO: 1826180 - DNA, 25 bp, Homo sapien
gactcagggaacgacctcattggaa

SEQ ID NO: 1826181 - DNA, 25 bp, Homo sapien
tacagctgagggctcactgtgcccc

SEQ ID NO: 1826182 - DNA, 25 bp, Homo sapien
agggcttgctgtcccccactcaaag

SEQ ID NO: 1826183 - DNA, 25 bp, Homo sapien
aagccagtgcacctgtgtacagctg

SEQ ID NO: 1826184 - DNA, 25 bp, Homo sapien
tgtgtacagctgagggcttgctgtc

SEQ ID NO: 1826185 - DNA, 25 bp, Homo sapien
tgtgcccccctcaaagccagcgcac

SEQ ID NO: 1826186 - DNA, 25 bp, Homo sapien
ccattcaaagccagcacacctgtgt

SEQ ID NO: 1826187 - DNA, 25 bp, Homo sapien
gcacctgtgtgcagctgagggcttt

SEQ ID NO: 1826188 - DNA, 25 bp, Homo sapien
tgtttacagctgagggcttgctgtc

SEQ ID NO: 1826189 - DNA, 25 bp, Homo sapien
tgtcctccactaaaagccagtgcac

SEQ ID NO: 1826190 - DNA, 25 bp, Homo sapien
tgtgcccccctcaaagccagcgcac

SEQ ID NO: 1826191 - DNA, 25 bp, Homo sapien
ttgcagtgaagtgcctcagccagtt

SEQ ID NO: 1826192 - DNA, 25 bp, Homo sapien
tttgcagtgaagtgcctcagccagt

SEQ ID NO: 1826193 - DNA, 25 bp, Homo sapien
gcagtgaagtgcctcagccagttcc

SEQ ID NO: 1826194 - DNA, 25 bp, Homo sapien
gtgaagtgcctcagccagttcctcc

SEQ ID NO: 1826195 - DNA, 25 bp, Homo sapien
ttggagcctccgctgtgatgcttgc

SEQ ID NO: 1826196 - DNA, 25 bp, Homo sapien
tttggagcctccgctgtgatgcttg

SEQ ID NO: 1826197 - DNA, 25 bp, Homo sapien
gagcctccgctgtgatgcttgcctg

SEQ ID NO: 1826198 - DNA, 25 bp, Homo sapien
tggagcctccgctgtgatgcttgcc

SEQ ID NO: 1826199 - DNA, 25 bp, Homo sapien
aatcaggaagttggacggttggcca

SEQ ID NO: 1826200 - DNA, 25 bp, Homo sapien
gtgaaatggtgttttcggaaggcat

SEQ ID NO: 1826201 - DNA, 25 bp, Homo sapien
aagggaggaagctgatttgcctgca

SEQ ID NO: 1826202 - DNA, 25 bp, Homo sapien
tggtgttttcggaaggcataactgg

SEQ ID NO: 1826203 - DNA, 25 bp, Homo sapien
taagagtttggcctttccctcactc

SEQ ID NO: 1826204 - DNA, 25 bp, Homo sapien
tcttaggcacttctaagggcacctt

SEQ ID NO: 1826205 - DNA, 25 bp, Homo sapien
gccactggagcagaggtgctactca

SEQ ID NO: 1826206 - DNA, 25 bp, Homo sapien
cacactgctgattgctgttaagagt

SEQ ID NO: 1826207 - DNA, 25 bp, Homo sapien
ccagcaattcttggccttccaacca

SEQ ID NO: 1826208 - DNA, 25 bp, Homo sapien
cagcaattcttggccttccaaccaa

SEQ ID NO: 1826209 - DNA, 25 bp, Homo sapien
gcaattcttggccttccaaccaata

SEQ ID NO: 1826210 - DNA, 25 bp, Homo sapien
caattcttggccttccaaccaatat

SEQ ID NO: 1826211 - DNA, 25 bp, Homo sapien
cctggaatactcagctgggatgggt

SEQ ID NO: 1826212 - DNA, 25 bp, Homo sapien
tctgagtggccctccatgaaaatgc

SEQ ID NO: 1826213 - DNA, 25 bp, Homo sapien
gaaacttgatcctgagattcacctc

SEQ ID NO: 1826214 - DNA, 25 bp, Homo sapien
ggttctcctcgcctactgtgctgtt

SEQ ID NO: 1826215 - DNA, 25 bp, Homo sapien
tatgcacgtgggatattagttgaaa

SEQ ID NO: 1826216 - DNA, 25 bp, Homo sapien
gctttagagtctagcaggcagccct

SEQ ID NO: 1826217 - DNA, 25 bp, Homo sapien
cagttaagagcgtgtagtaaatgac

SEQ ID NO: 1826218 - DNA, 25 bp, Homo sapien
ttggaaactgcctcttatattgatg

SEQ ID NO: 1826219 - DNA, 25 bp, Homo sapien
caagggatatagacactttctgcca

SEQ ID NO: 1826220 - DNA, 25 bp, Homo sapien
tgtcagctctatgctgccagcaagg

SEQ ID NO: 1826221 - DNA, 25 bp, Homo sapien
gcaagggatatagacactttctgcc

SEQ ID NO: 1826222 - DNA, 25 bp, Homo sapien
cagtactctgtcctcatacttcata

SEQ ID NO: 1826223 - DNA, 25 bp, Homo sapien
tatatctgaccctctaatgacattc

SEQ ID NO: 1826224 - DNA, 25 bp, Homo sapien
tgaagggttgactgacttaaacgca

SEQ ID NO: 1826225 - DNA, 25 bp, Homo sapien
tggaagggccatgtatatctgaccc

SEQ ID NO: 1826226 - DNA, 25 bp, Homo sapien
cttccatgggagctctggaagggcc

SEQ ID NO: 1826227 - DNA, 25 bp, Homo sapien
tactgcaagcccgaaatttggacca

SEQ ID NO: 1826228 - DNA, 25 bp, Homo sapien
gatagccaagtgttaatccaggtgt

SEQ ID NO: 1826229 - DNA, 25 bp, Homo sapien
gaatcagcttgtacagggatgacca

SEQ ID NO: 1826230 - DNA, 25 bp, Homo sapien
tcctgcgtggttggctgagacaaga

SEQ ID NO: 1826231 - DNA, 25 bp, Homo sapien
tagctcagaatatggtatgtactgg

SEQ ID NO: 1826232 - DNA, 25 bp, Homo sapien
tgtgtcccattaattaccgagagtg

SEQ ID NO: 1826233 - DNA, 25 bp, Homo sapien
aggtcttgatagtgttttgcgggtc

SEQ ID NO: 1826234 - DNA, 25 bp, Homo sapien
tgatggtttttcagatatcctccaa

SEQ ID NO: 1826235 - DNA, 25 bp, Homo sapien
cagatgtctgtggactaccctgagt

SEQ ID NO: 1826236 - DNA, 25 bp, Homo sapien
acaataggaagacactctctccggg

SEQ ID NO: 1826237 - DNA, 25 bp, Homo sapien
gatgaaaacgacacaattccgtctg

SEQ ID NO: 1826238 - DNA, 25 bp, Homo sapien
caggtccccgtgtcatcagatgtct

SEQ ID NO: 1826239 - DNA, 25 bp, Homo sapien
acctccaagagctcggactctgaca

SEQ ID NO: 1826240 - DNA, 25 bp, Homo sapien
tcggactctgacaactagatctgct

SEQ ID NO: 1826241 - DNA, 25 bp, Homo sapien
tcaagcgagttctgaatggacacca

SEQ ID NO: 1826242 - DNA, 25 bp, Homo sapien
aagcgagttctgaatggacaccacc

SEQ ID NO: 1826243 - DNA, 25 bp, Homo sapien
gtaaaggatcttttattgtaggtgc

SEQ ID NO: 1826244 - DNA, 25 bp, Homo sapien
gttacaaatccacacgagattaata

SEQ ID NO: 1826245 - DNA, 25 bp, Homo sapien
tcaaatccgtgaacatatctttgtt

SEQ ID NO: 1826246 - DNA, 25 bp, Homo sapien
gcttaatgctgaataggcttgaaaa

SEQ ID NO: 1826247 - DNA, 25 bp, Homo sapien
tcatcatttgcgaccccagttacag

SEQ ID NO: 1826248 - DNA, 25 bp, Homo sapien
gttgttgacataacttcctgcttca

SEQ ID NO: 1826249 - DNA, 25 bp, Homo sapien
ttgtgacatattgcccccgaagaga

SEQ ID NO: 1826250 - DNA, 25 bp, Homo sapien
gaagaggaaccttcatccgccatcc

SEQ ID NO: 1826251 - DNA, 25 bp, Homo sapien
tgggtcacctgatactggagtctca

SEQ ID NO: 1826252 - DNA, 25 bp, Homo sapien
cagggcggttccaccacagtatgag

SEQ ID NO: 1826253 - DNA, 25 bp, Homo sapien
taagcaattcccatagaagggaagt

SEQ ID NO: 1826254 - DNA, 25 bp, Homo sapien
tcgcgaagtaggaaggaagcctcct

SEQ ID NO: 1826255 - DNA, 25 bp, Homo sapien
gaaagccacgctttctcggcactgg

SEQ ID NO: 1826256 - DNA, 25 bp, Homo sapien
tctgggtgttttccgaggctgtgct

SEQ ID NO: 1826257 - DNA, 25 bp, Homo sapien
gcactggttgcctcccactgtagaa

SEQ ID NO: 1826258 - DNA, 25 bp, Homo sapien
tcgagggagcacgtgatacttggca

SEQ ID NO: 1826259 - DNA, 25 bp, Homo sapien
agcagcaccaaggaccacgaagagg

SEQ ID NO: 1826260 - DNA, 25 bp, Homo sapien
ttataagacttctcccacacgtgca

SEQ ID NO: 1826261 - DNA, 25 bp, Homo sapien
cacaggtgagaaagtacacagcttt

SEQ ID NO: 1826262 - DNA, 25 bp, Homo sapien
caaggcataaatggtggcagccagt

SEQ ID NO: 1826263 - DNA, 25 bp, Homo sapien
acaagttggtatgaatgagcttcag

SEQ ID NO: 1826264 - DNA, 25 bp, Homo sapien
tgatgtcccaagaacacccttcttc

SEQ ID NO: 1826265 - DNA, 25 bp, Homo sapien
tccttgaactgctgctcatgggagc

SEQ ID NO: 1826266 - DNA, 25 bp, Homo sapien
tccctgtactccttgaactgctgct

SEQ ID NO: 1826267 - DNA, 25 bp, Homo sapien
ttggggttgatgtcccaagaacacc

SEQ ID NO: 1826268 - DNA, 25 bp, Homo sapien
agaaattggaggacaaccacacagc

SEQ ID NO: 1826269 - DNA, 25 bp, Homo sapien
acacagcacaagtgtaggtttgaca

SEQ ID NO: 1826270 - DNA, 25 bp, Homo sapien
ctgagtaatacagaaattggaggac

SEQ ID NO: 1826271 - DNA, 25 bp, Homo sapien
aggtttgacaggagtttacataatg

SEQ ID NO: 1826272 - DNA, 25 bp, Homo sapien
agaacccccaaggtgtctttctgct

SEQ ID NO: 1826273 - DNA, 25 bp, Homo sapien
cagttaacaatgacatcccctttca

SEQ ID NO: 1826274 - DNA, 25 bp, Homo sapien
agaccagttaacaatgacatcccct

SEQ ID NO: 1826275 - DNA, 25 bp, Homo sapien
tggaagcaagaacccccaaggtgtc

SEQ ID NO: 1826276 - DNA, 25 bp, Homo sapien
ttgcattcagagatggggacttcat

SEQ ID NO: 1826277 - DNA, 25 bp, Homo sapien
caggaaggtttgcattcagagatgg

SEQ ID NO: 1826278 - DNA, 25 bp, Homo sapien
gtttgcattcagagatggggacttc

SEQ ID NO: 1826279 - DNA, 25 bp, Homo sapien
aggtttgcattcagagatggggact

SEQ ID NO: 1826280 - DNA, 25 bp, Homo sapien
tagtaggtggtttatcttcagtaac

SEQ ID NO: 1826281 - DNA, 25 bp, Homo sapien
caatcattgtttccagtctcttgca

SEQ ID NO: 1826282 - DNA, 25 bp, Homo sapien
tcatgttcatagaagatgatcctat

SEQ ID NO: 1826283 - DNA, 25 bp, Homo sapien
gatgatcctatgagtaacacttttt

SEQ ID NO: 1826284 - DNA, 25 bp, Homo sapien
cagagactgccagaaccacgctcac

SEQ ID NO: 1826285 - DNA, 25 bp, Homo sapien
ctctccagacaccagagactgccag

SEQ ID NO: 1826286 - DNA, 25 bp, Homo sapien
gctgttgttacactttaccctctga

SEQ ID NO: 1826287 - DNA, 25 bp, Homo sapien
tgtgcccagtggaataggtgtgtcc

SEQ ID NO: 1826288 - DNA, 25 bp, Homo sapien
tctttggataataggcacgttgttc

SEQ ID NO: 1826289 - DNA, 25 bp, Homo sapien
tcccaagtgctatgtgatgagctcc

SEQ ID NO: 1826290 - DNA, 25 bp, Homo sapien
aggccagtaatgctccccacgagat

SEQ ID NO: 1826291 - DNA, 25 bp, Homo sapien
ccatatttatggtcgcaggccagta

SEQ ID NO: 1826292 - DNA, 25 bp, Homo sapien
gaagggatctggattaggcaacatc

SEQ ID NO: 1826293 - DNA, 25 bp, Homo sapien
gattaaagtgttctgagctcaggcc

SEQ ID NO: 1826294 - DNA, 25 bp, Homo sapien
gagcacattggtgacagaccttcgg

SEQ ID NO: 1826295 - DNA, 25 bp, Homo sapien
gggatgacaatggacctctcagcag

SEQ ID NO: 1826296 - DNA, 25 bp, Homo sapien
tccagagagcgttatgtgacccaca

SEQ ID NO: 1826297 - DNA, 25 bp, Homo sapien
cagtcacattcgaattcgggtggca

SEQ ID NO: 1826298 - DNA, 25 bp, Homo sapien
cataaactgtttctcagtgcgtgac

SEQ ID NO: 1826299 - DNA, 25 bp, Homo sapien
actgtttctcagtgcgtgactctga

SEQ ID NO: 1826300 - DNA, 25 bp, Homo sapien
ttctcagtgcgtgactctgaagaaa

SEQ ID NO: 1826301 - DNA, 25 bp, Homo sapien
tatccataaactgtttctcagtgcg

SEQ ID NO: 1826302 - DNA, 25 bp, Homo sapien
tcacatttaagttctcaatgtgtaa

SEQ ID NO: 1826303 - DNA, 25 bp, Homo sapien
tcttttactctacaatgcaaggcag

SEQ ID NO: 1826304 - DNA, 25 bp, Homo sapien
caatgcaaggcagtggtctgctttt

SEQ ID NO: 1826305 - DNA, 25 bp, Homo sapien
tggcccggtcagttctcttttactc

SEQ ID NO: 1826306 - DNA, 25 bp, Homo sapien
tcaaatcttgggcagtaatcagaga

SEQ ID NO: 1826307 - DNA, 25 bp, Homo sapien
caatacatcggaggaaatagagtga

SEQ ID NO: 1826308 - DNA, 25 bp, Homo sapien
cacagagccaatacatcggaggaaa

SEQ ID NO: 1826309 - DNA, 25 bp, Homo sapien
cattgacaactactggccacagagc

SEQ ID NO: 1826310 - DNA, 25 bp, Homo sapien
aatgatggaaatgttgggtcccagg

SEQ ID NO: 1826311 - DNA, 25 bp, Homo sapien
gaaatgttgggtcccagggatgaca

SEQ ID NO: 1826312 - DNA, 25 bp, Homo sapien
gggatgacaggctgcccgtagctca

SEQ ID NO: 1826313 - DNA, 25 bp, Homo sapien
agaaaggcagcacatcgggagtccg

SEQ ID NO: 1826314 - DNA, 25 bp, Homo sapien
aacctcctgatgttggcctgtaggg

SEQ ID NO: 1826315 - DNA, 25 bp, Homo sapien
catgcctgcggaggtttggcaccaa

SEQ ID NO: 1826316 - DNA, 25 bp, Homo sapien
gcacctttggtgtcctgctgcacag

SEQ ID NO: 1826317 - DNA, 25 bp, Homo sapien
tctggctgggctaggtcttcaacct

SEQ ID NO: 1826318 - DNA, 25 bp, Homo sapien
tctgtagtccggaacacagagggct

SEQ ID NO: 1826319 - DNA, 25 bp, Homo sapien
cccgaatctgtagtccggaacacag

SEQ ID NO: 1826320 - DNA, 25 bp, Homo sapien
tgggtccccgaatctgtagtccgga

SEQ ID NO: 1826321 - DNA, 25 bp, Homo sapien
gtagtccggaacacagagggctcca

SEQ ID NO: 1826322 - DNA, 25 bp, Homo sapien
taaagtcatctacaagcctgaactg

SEQ ID NO: 1826323 - DNA, 25 bp, Homo sapien
tagagactttcaggccagaaggtac

SEQ ID NO: 1826324 - DNA, 25 bp, Homo sapien
tcagaaaaacggtgcctggtaactc

SEQ ID NO: 1826325 - DNA, 25 bp, Homo sapien
tatctgataaaagactgggcatctc

SEQ ID NO: 1826326 - DNA, 25 bp, Homo sapien
ccagccacttgacaatcattcgaag

SEQ ID NO: 1826327 - DNA, 25 bp, Homo sapien
cattcgaagtcagcaggaacagacg

SEQ ID NO: 1826328 - DNA, 25 bp, Homo sapien
gcagcaatgacagacggctaacatc

SEQ ID NO: 1826329 - DNA, 25 bp, Homo sapien
ctctgttgtttttgtacatgaatat

SEQ ID NO: 1826330 - DNA, 25 bp, Homo sapien
tgaggacattacttgggcacaagcc

SEQ ID NO: 1826331 - DNA, 25 bp, Homo sapien
tctcatggcacaccttgaggacatt

SEQ ID NO: 1826332 - DNA, 25 bp, Homo sapien
agtttccttgtacgtgttgcctggc

SEQ ID NO: 1826333 - DNA, 25 bp, Homo sapien
catcctgaagctggtaaaatgagcc

SEQ ID NO: 1826334 - DNA, 25 bp, Homo sapien
taaatatttgttcgtggatacccag

SEQ ID NO: 1826335 - DNA, 25 bp, Homo sapien
taagagagcaagtcaggaataggcc

SEQ ID NO: 1826336 - DNA, 25 bp, Homo sapien
aagaggttcctgaaccgcagcaggt

SEQ ID NO: 1826337 - DNA, 25 bp, Homo sapien
tttctgaggcgtgtacatagatcct

SEQ ID NO: 1826338 - DNA, 25 bp, Homo sapien
cagtctggctcctgatctaacacca

SEQ ID NO: 1826339 - DNA, 25 bp, Homo sapien
caagtagccaaaatcctttaggaga

SEQ ID NO: 1826340 - DNA, 25 bp, Homo sapien
ttaggagacaaggttcaggtttcac

SEQ ID NO: 1826341 - DNA, 25 bp, Homo sapien
taacaccaggaacctcaagtagcca

SEQ ID NO: 1826342 - DNA, 25 bp, Homo sapien
ctcccaacccaacgaatgcatttca

SEQ ID NO: 1826343 - DNA, 25 bp, Homo sapien
aatgcatttcaattgtgtttatctt

SEQ ID NO: 1826344 - DNA, 25 bp, Homo sapien
tcagctcccaacccaacgaatgcat

SEQ ID NO: 1826345 - DNA, 25 bp, Homo sapien
agctcccaacccaacgaatgcattt

SEQ ID NO: 1826346 - DNA, 25 bp, Homo sapien
ctccgttgaggctttaatctctgct

SEQ ID NO: 1826347 - DNA, 25 bp, Homo sapien
gctgaagacctgaacaatctacttt

SEQ ID NO: 1826348 - DNA, 25 bp, Homo sapien
ccgttgaggctttaatctctgctga

SEQ ID NO: 1826349 - DNA, 25 bp, Homo sapien
ctgctgaagacctgaacaatctact

SEQ ID NO: 1826350 - DNA, 25 bp, Homo sapien
tgctcttccggacacttgttgtctg

SEQ ID NO: 1826351 - DNA, 25 bp, Homo sapien
tcaccatgactgttaagtaggaacg

SEQ ID NO: 1826352 - DNA, 25 bp, Homo sapien
ggtggaatctcaaagcaaaaatgcc

SEQ ID NO: 1826353 - DNA, 25 bp, Homo sapien
gaacggaatggaggcactctgctcc

SEQ ID NO: 1826354 - DNA, 25 bp, Homo sapien
tggaaggggtgagcggcctccttgc

SEQ ID NO: 1826355 - DNA, 25 bp, Homo sapien
ctggaaggggtgagcggcctccttg

SEQ ID NO: 1826356 - DNA, 25 bp, Homo sapien
aaggggtgagcggcctccttgcttt

SEQ ID NO: 1826357 - DNA, 25 bp, Homo sapien
gggtgagcggcctccttgcttttgt

SEQ ID NO: 1826358 - DNA, 25 bp, Homo sapien
ctggtatagcagtatttggaagagg

SEQ ID NO: 1826359 - DNA, 25 bp, Homo sapien
tatagcagtatttggaagaggcctt

SEQ ID NO: 1826360 - DNA, 25 bp, Homo sapien
gaagaggccttaaaagctgagggcc

SEQ ID NO: 1826361 - DNA, 25 bp, Homo sapien
ggtatagcagtatttggaagaggcc

SEQ ID NO: 1826362 - DNA, 25 bp, Homo sapien
taagactgtctggaaagagagtggc

SEQ ID NO: 1826363 - DNA, 25 bp, Homo sapien
tctccaaatacagtttaagactgtc

SEQ ID NO: 1826364 - DNA, 25 bp, Homo sapien
tagatccaatagtaactgctggaaa

SEQ ID NO: 1826365 - DNA, 25 bp, Homo sapien
gcaacaggcagtggattgtgcttcg

SEQ ID NO: 1826366 - DNA, 25 bp, Homo sapien
tattcagatcagagtcatttctcag

SEQ ID NO: 1826367 - DNA, 25 bp, Homo sapien
ccttttaccggtttattcagatcag

SEQ ID NO: 1826368 - DNA, 25 bp, Homo sapien
ggtcatcagtgtcaccgtcctgtct

SEQ ID NO: 1826369 - DNA, 25 bp, Homo sapien
gtcaccctgggagttagggctcagt

SEQ ID NO: 1826370 - DNA, 25 bp, Homo sapien
aaaccaggtagcatgaagcgtggtg

SEQ ID NO: 1826371 - DNA, 25 bp, Homo sapien
aggtagcatgaagcgtggtgtggcc

SEQ ID NO: 1826372 - DNA, 25 bp, Homo sapien
gtagcatgaagcgtggtgtggccat

SEQ ID NO: 1826373 - DNA, 25 bp, Homo sapien
ccaggtagcatgaagcgtggtgtgg

SEQ ID NO: 1826374 - DNA, 25 bp, Homo sapien
gtccactagcctatcttccagaata

SEQ ID NO: 1826375 - DNA, 25 bp, Homo sapien
gatatatttagtctagaagtttcct

SEQ ID NO: 1826376 - DNA, 25 bp, Homo sapien
cacagcaaccccctgaacagatata

SEQ ID NO: 1826377 - DNA, 25 bp, Homo sapien
tgtttattaagtttgtccactagcc

SEQ ID NO: 1826378 - DNA, 25 bp, Homo sapien
ctgaggtgcaatgggatcatgataa

SEQ ID NO: 1826379 - DNA, 25 bp, Homo sapien
tgggatcatgataaataacagcaat

SEQ ID NO: 1826380 - DNA, 25 bp, Homo sapien
tgcaatgggatcatgataaataaca

SEQ ID NO: 1826381 - DNA, 25 bp, Homo sapien
gaggtgcaatgggatcatgataaat

SEQ ID NO: 1826382 - DNA, 25 bp, Homo sapien
ttcttctgcttccgggaggggtctg

SEQ ID NO: 1826383 - DNA, 25 bp, Homo sapien
gccatcttccaccccgagttggcat

SEQ ID NO: 1826384 - DNA, 25 bp, Homo sapien
cttcttctgcttccgggaggggtct

SEQ ID NO: 1826385 - DNA, 25 bp, Homo sapien
ccccagcgctccctgccatcttcca

SEQ ID NO: 1826386 - DNA, 25 bp, Homo sapien
gaagttctagcaggagctacttgta

SEQ ID NO: 1826387 - DNA, 25 bp, Homo sapien
cacctgtgaacaaggaaaggtcctc

SEQ ID NO: 1826388 - DNA, 25 bp, Homo sapien
tgtggaatccgggagtcttgactgc

SEQ ID NO: 1826389 - DNA, 25 bp, Homo sapien
tctcctacaaatgaaccttgtttgg

SEQ ID NO: 1826390 - DNA, 25 bp, Homo sapien
ccttgtaaattctgggccagttgat

SEQ ID NO: 1826391 - DNA, 25 bp, Homo sapien
gggcccttcagactactgacaactt

SEQ ID NO: 1826392 - DNA, 25 bp, Homo sapien
gactactgacaactttagatcttct

SEQ ID NO: 1826393 - DNA, 25 bp, Homo sapien
gggccagttgatgggcccttcagac

SEQ ID NO: 1826394 - DNA, 25 bp, Homo sapien
aatctcactagagaggctgtctaca

SEQ ID NO: 1826395 - DNA, 25 bp, Homo sapien
tcactagagaggctgtctacattgc

SEQ ID NO: 1826396 - DNA, 25 bp, Homo sapien
tagagaggctgtctacattgccaaa

SEQ ID NO: 1826397 - DNA, 25 bp, Homo sapien
gagaggattttggctgtctgaagcc

SEQ ID NO: 1826398 - DNA, 25 bp, Homo sapien
caattgcttattcaataggccactc

SEQ ID NO: 1826399 - DNA, 25 bp, Homo sapien
caataggccactcaaatccatagct

SEQ ID NO: 1826400 - DNA, 25 bp, Homo sapien
tgcttattcaataggccactcaaat

SEQ ID NO: 1826401 - DNA, 25 bp, Homo sapien
tattcaataggccactcaaatccat

SEQ ID NO: 1826402 - DNA, 25 bp, Homo sapien
ggaccgtttatcttgtcctgtggtg

SEQ ID NO: 1826403 - DNA, 25 bp, Homo sapien
caggcttggaggaccgtttatcttg

SEQ ID NO: 1826404 - DNA, 25 bp, Homo sapien
tggaggaccgtttatcttgtcctgt

SEQ ID NO: 1826405 - DNA, 25 bp, Homo sapien
aggcttggaggaccgtttatcttgt

SEQ ID NO: 1826406 - DNA, 25 bp, Homo sapien
tggcagaaaaccaccttctgggtaa

SEQ ID NO: 1826407 - DNA, 25 bp, Homo sapien
tttctgctgtcgttcgctgacctca

SEQ ID NO: 1826408 - DNA, 25 bp, Homo sapien
taagtctgtattcaccgctgaagtg

SEQ ID NO: 1826409 - DNA, 25 bp, Homo sapien
ataggtctggtatctggaggattcc

SEQ ID NO: 1826410 - DNA, 25 bp, Homo sapien
gaacatgcccctgggtaagcccaag

SEQ ID NO: 1826411 - DNA, 25 bp, Homo sapien
gagagtccgcctctgaagactgaac

SEQ ID NO: 1826412 - DNA, 25 bp, Homo sapien
cagagacggccataggtgatgtgaa

SEQ ID NO: 1826413 - DNA, 25 bp, Homo sapien
tcggttggcactcggactgaaggca

SEQ ID NO: 1826414 - DNA, 25 bp, Homo sapien
ttgcggcttctatttctggtggggg

SEQ ID NO: 1826415 - DNA, 25 bp, Homo sapien
gaagttgttgctaacaatgtggcca

SEQ ID NO: 1826416 - DNA, 25 bp, Homo sapien
gaagaagttgttgctaacaatgtgg

SEQ ID NO: 1826417 - DNA, 25 bp, Homo sapien
aattggcagagaagaagttgttgct

SEQ ID NO: 1826418 - DNA, 25 bp, Homo sapien
gcagagaagaagttgttgctaacaa

SEQ ID NO: 1826419 - DNA, 25 bp, Homo sapien
cgcatgccaccacatcccactaatt

SEQ ID NO: 1826420 - DNA, 25 bp, Homo sapien
gcgcatgccaccacatcccactaat

SEQ ID NO: 1826421 - DNA, 25 bp, Homo sapien
accttgtgattcgccctcctcggac

SEQ ID NO: 1826422 - DNA, 25 bp, Homo sapien
ttgtgattcgccctcctcggactcc

SEQ ID NO: 1826423 - DNA, 25 bp, Homo sapien
gtccatcatggtgttaaccagctaa

SEQ ID NO: 1826424 - DNA, 25 bp, Homo sapien
tcacggagcccggaaagtctttcag

SEQ ID NO: 1826425 - DNA, 25 bp, Homo sapien
tgcaataacttcttgtcacaaacag

SEQ ID NO: 1826426 - DNA, 25 bp, Homo sapien
cagccaatgtagtgatgtatggaaa

SEQ ID NO: 1826427 - DNA, 25 bp, Homo sapien
tggtttgttctcttgcataggaaac

SEQ ID NO: 1826428 - DNA, 25 bp, Homo sapien
tgaaggtcatttcggtgctgcccaa

SEQ ID NO: 1826429 - DNA, 25 bp, Homo sapien
cacgcagccccgtggctggttccaa

SEQ ID NO: 1826430 - DNA, 25 bp, Homo sapien
catttcggtgctgcccaatttccag

SEQ ID NO: 1826431 - DNA, 25 bp, Homo sapien
aacacactgcaacggtctccagggc

SEQ ID NO: 1826432 - DNA, 25 bp, Homo sapien
ctggataagtagcaaccaaaggaag

SEQ ID NO: 1826433 - DNA, 25 bp, Homo sapien
cacccatctggataagtagcaacca

SEQ ID NO: 1826434 - DNA, 25 bp, Homo sapien
catctggataagtagcaaccaaagg

SEQ ID NO: 1826435 - DNA, 25 bp, Homo sapien
cccatctggataagtagcaaccaaa

SEQ ID NO: 1826436 - DNA, 25 bp, Homo sapien
tcttgggcaccaggtaacctgcaaa

SEQ ID NO: 1826437 - DNA, 25 bp, Homo sapien
tccttaacctggtacaatccttcat

SEQ ID NO: 1826438 - DNA, 25 bp, Homo sapien
taacctgcaaagatccttaacctgg

SEQ ID NO: 1826439 - DNA, 25 bp, Homo sapien
tgtgatggccttgaagggatgatct

SEQ ID NO: 1826440 - DNA, 25 bp, Homo sapien
aaattaggtattgataggatgtatc

SEQ ID NO: 1826441 - DNA, 25 bp, Homo sapien
tttgacagaattcaacaacccttca

SEQ ID NO: 1826442 - DNA, 25 bp, Homo sapien
tgacagaattcaacaacccttcatg

SEQ ID NO: 1826443 - DNA, 25 bp, Homo sapien
ttaggtattgataggatgtatctca

SEQ ID NO: 1826444 - DNA, 25 bp, Homo sapien
ggaattactaagctcccatgaggaa

SEQ ID NO: 1826445 - DNA, 25 bp, Homo sapien
aaaataactgctcatggtggcgtgc

SEQ ID NO: 1826446 - DNA, 25 bp, Homo sapien
tgcggccacatttcaagctagacaa

SEQ ID NO: 1826447 - DNA, 25 bp, Homo sapien
agttagccacttgacatgactgcgg

SEQ ID NO: 1826448 - DNA, 25 bp, Homo sapien
tttaaggtcaagtcctatcacggcg

SEQ ID NO: 1826449 - DNA, 25 bp, Homo sapien
tgaaaccgtctgtgctccgctagat

SEQ ID NO: 1826450 - DNA, 25 bp, Homo sapien
tgtattgtttatcagcccaggcagt

SEQ ID NO: 1826451 - DNA, 25 bp, Homo sapien
aaaacaggatttgcacggctccgac

SEQ ID NO: 1826452 - DNA, 25 bp, Homo sapien
cattagtgaaggtgatatcttggta

SEQ ID NO: 1826453 - DNA, 25 bp, Homo sapien
tcttggtagtgttcagacttgacat

SEQ ID NO: 1826454 - DNA, 25 bp, Homo sapien
cagacttgacatcattcctagatgc

SEQ ID NO: 1826455 - DNA, 25 bp, Homo sapien
tctctcaccacatcataggcatcat

SEQ ID NO: 1826456 - DNA, 25 bp, Homo sapien
tgtagagtatgatttgagggatgcc

SEQ ID NO: 1826457 - DNA, 25 bp, Homo sapien
tatgcattccgaaacttttctcctg

SEQ ID NO: 1826458 - DNA, 25 bp, Homo sapien
tgatttgagggatgccaaagtgctt

SEQ ID NO: 1826459 - DNA, 25 bp, Homo sapien
ttcctgttgccacatatatgcattc

SEQ ID NO: 1826460 - DNA, 25 bp, Homo sapien
tgagacaataatgctccgtagcggg

SEQ ID NO: 1826461 - DNA, 25 bp, Homo sapien
ggggtcatcccgctgaaccgcatag

SEQ ID NO: 1826462 - DNA, 25 bp, Homo sapien
gtgattggtccattcgactggaatg

SEQ ID NO: 1826463 - DNA, 25 bp, Homo sapien
tcgactggaatgagacaataatgct

SEQ ID NO: 1826464 - DNA, 25 bp, Homo sapien
ctagatccccagcacacaggaccta

SEQ ID NO: 1826465 - DNA, 25 bp, Homo sapien
atccccagcacacaggacctatcac

SEQ ID NO: 1826466 - DNA, 25 bp, Homo sapien
tagatccccagcacacaggacctat

SEQ ID NO: 1826467 - DNA, 25 bp, Homo sapien
agatccccagcacacaggacctatc

SEQ ID NO: 1826468 - DNA, 25 bp, Homo sapien
caaggctccgaggaccagtgaagga

SEQ ID NO: 1826469 - DNA, 25 bp, Homo sapien
ttgtatcgaaccaacggcaaggctc

SEQ ID NO: 1826470 - DNA, 25 bp, Homo sapien
cattggccggattcaagcttgtatc

SEQ ID NO: 1826471 - DNA, 25 bp, Homo sapien
caaaccagatgcacacattggccgg

SEQ ID NO: 1826472 - DNA, 25 bp, Homo sapien
tagcatcttcttggtgcttaatatc

SEQ ID NO: 1826473 - DNA, 25 bp, Homo sapien
tcaatcacagtgatctccttaaata

SEQ ID NO: 1826474 - DNA, 25 bp, Homo sapien
agtgatctccttaaatagcatcttc

SEQ ID NO: 1826475 - DNA, 25 bp, Homo sapien
gcatcttcttggtgcttaatatcat

SEQ ID NO: 1826476 - DNA, 25 bp, Homo sapien
tgaagacttcgggtcctcttgccct

SEQ ID NO: 1826477 - DNA, 25 bp, Homo sapien
tgggatgctgatgcgatttgaaatg

SEQ ID NO: 1826478 - DNA, 25 bp, Homo sapien
tgtttgggatgctgatgcgatttga

SEQ ID NO: 1826479 - DNA, 25 bp, Homo sapien
gatgctgatgcgatttgaaatgtca

SEQ ID NO: 1826480 - DNA, 25 bp, Homo sapien
tcgtgggaccaaggacatgcaaagg

SEQ ID NO: 1826481 - DNA, 25 bp, Homo sapien
cctgcgatagaaatgcagagcctgg

SEQ ID NO: 1826482 - DNA, 25 bp, Homo sapien
tgtaaaggcatgagtgcaaatcgca

SEQ ID NO: 1826483 - DNA, 25 bp, Homo sapien
gaaagctggtaggactggaacctgt

SEQ ID NO: 1826484 - DNA, 25 bp, Homo sapien
gctccaaaaagctcatgataacaac

SEQ ID NO: 1826485 - DNA, 25 bp, Homo sapien
ggtgacatcgttgtgaaggattcaa

SEQ ID NO: 1826486 - DNA, 25 bp, Homo sapien
catggattgggaactcaggagaaat

SEQ ID NO: 1826487 - DNA, 25 bp, Homo sapien
caagcaggcagtgaatacatggatt

SEQ ID NO: 1826488 - DNA, 25 bp, Homo sapien
gttaatgagctcacacttacacagg

SEQ ID NO: 1826489 - DNA, 25 bp, Homo sapien
tccgtggcagccgacacagggctca

SEQ ID NO: 1826490 - DNA, 25 bp, Homo sapien
aggcaccatactcggtttcctttat

SEQ ID NO: 1826491 - DNA, 25 bp, Homo sapien
tcagctcgtggtaagatttcattaa

SEQ ID NO: 1826492 - DNA, 25 bp, Homo sapien
acagggctcagctcgtggtaagatt

SEQ ID NO: 1826493 - DNA, 25 bp, Homo sapien
tctgttggaaagtacagcagttctg

SEQ ID NO: 1826494 - DNA, 25 bp, Homo sapien
tccaaggtaattgtagcccaaacag

SEQ ID NO: 1826495 - DNA, 25 bp, Homo sapien
tgtagcccaaacagattggtccaga

SEQ ID NO: 1826496 - DNA, 25 bp, Homo sapien
tggtccagaactctccatacaagtc

SEQ ID NO: 1826497 - DNA, 25 bp, Homo sapien
gaaggaagggtatcagcacataact

SEQ ID NO: 1826498 - DNA, 25 bp, Homo sapien
tagatgtagctatggccaggtgcac

SEQ ID NO: 1826499 - DNA, 25 bp, Homo sapien
ggtatatgcaaaatgtgcacccgtg

SEQ ID NO: 1826500 - DNA, 25 bp, Homo sapien
caagtccagataactatagcagtgg

SEQ ID NO: 1826501 - DNA, 25 bp, Homo sapien
actttagctccggaggtttggacag

SEQ ID NO: 1826502 - DNA, 25 bp, Homo sapien
ctgtagctccaataaggactttagc

SEQ ID NO: 1826503 - DNA, 25 bp, Homo sapien
caataaggactttagctccggaggt

SEQ ID NO: 1826504 - DNA, 25 bp, Homo sapien
ttagctccggaggtttggacagcag

SEQ ID NO: 1826505 - DNA, 25 bp, Homo sapien
tagaaaagctagactcaacacccga

SEQ ID NO: 1826506 - DNA, 25 bp, Homo sapien
gagtttcatgcaccgacactaaggc

SEQ ID NO: 1826507 - DNA, 25 bp, Homo sapien
taatttcctgatctggcgtagagtg

SEQ ID NO: 1826508 - DNA, 25 bp, Homo sapien
ctaaggcattgtgaatctggtacca

SEQ ID NO: 1826509 - DNA, 25 bp, Homo sapien
tgcgttgtgcccagtaaggcccatg

SEQ ID NO: 1826510 - DNA, 25 bp, Homo sapien
tccacagggttcttcgtgctccatg

SEQ ID NO: 1826511 - DNA, 25 bp, Homo sapien
tattactcatcgtgactccacaggg

SEQ ID NO: 1826512 - DNA, 25 bp, Homo sapien
caagtcacttaaactcgtcacctcg

SEQ ID NO: 1826513 - DNA, 25 bp, Homo sapien
ctgggggaagtaatcagaggctgcc

SEQ ID NO: 1826514 - DNA, 25 bp, Homo sapien
gaggaggtgttaggccagcaggaag

SEQ ID NO: 1826515 - DNA, 25 bp, Homo sapien
tgtttggaggaggtgttaggccagc

SEQ ID NO: 1826516 - DNA, 25 bp, Homo sapien
ctgccctgggggaagtaatcagagg

SEQ ID NO: 1826517 - DNA, 25 bp, Homo sapien
gaagaatggagggactttcatgcta

SEQ ID NO: 1826518 - DNA, 25 bp, Homo sapien
tgctcctttgaacatgcaccaaaag

SEQ ID NO: 1826519 - DNA, 25 bp, Homo sapien
gactttcatgctaaaatgccaggca

SEQ ID NO: 1826520 - DNA, 25 bp, Homo sapien
ggttccactccaattgttcttctcc

SEQ ID NO: 1826521 - DNA, 25 bp, Homo sapien
cttctgagctatcccgtctgaactg

SEQ ID NO: 1826522 - DNA, 25 bp, Homo sapien
tctgagctatcccgtctgaactgag

SEQ ID NO: 1826523 - DNA, 25 bp, Homo sapien
tgagctatcccgtctgaactgagca

SEQ ID NO: 1826524 - DNA, 25 bp, Homo sapien
acttctgagctatcccgtctgaact

SEQ ID NO: 1826525 - DNA, 25 bp, Homo sapien
gctgcaggcagaacactctttctct

SEQ ID NO: 1826526 - DNA, 25 bp, Homo sapien
attgactcgcactgggaccaccttg

SEQ ID NO: 1826527 - DNA, 25 bp, Homo sapien
ttctctctctgtcggccgcaatctg

SEQ ID NO: 1826528 - DNA, 25 bp, Homo sapien
cattctttcggatccagtctcgtgc

SEQ ID NO: 1826529 - DNA, 25 bp, Homo sapien
tgtgctcatggaactgcaggtcagc

SEQ ID NO: 1826530 - DNA, 25 bp, Homo sapien
tgctggatgcccaagcggtaggagg

SEQ ID NO: 1826531 - DNA, 25 bp, Homo sapien
catgcaaaggttaagaacagtgtgc

SEQ ID NO: 1826532 - DNA, 25 bp, Homo sapien
taggtttgcttgacaacatgagaac

SEQ ID NO: 1826533 - DNA, 25 bp, Homo sapien
gccccacattcgaagatcccagttg

SEQ ID NO: 1826534 - DNA, 25 bp, Homo sapien
gaacagagctgcttaatctcccttg

SEQ ID NO: 1826535 - DNA, 25 bp, Homo sapien
cagttgccttcagtatctgtccagc

SEQ ID NO: 1826536 - DNA, 25 bp, Homo sapien
actccgcagccttcgcctggtggtg

SEQ ID NO: 1826537 - DNA, 25 bp, Homo sapien
ctgcctagccatagatctcatggcc

SEQ ID NO: 1826538 - DNA, 25 bp, Homo sapien
tgcctagccatagatctcatggcca

SEQ ID NO: 1826539 - DNA, 25 bp, Homo sapien
agtttctgcagaaatcgacattggg

SEQ ID NO: 1826540 - DNA, 25 bp, Homo sapien
tctagtttctgcagaaatcgacatt

SEQ ID NO: 1826541 - DNA, 25 bp, Homo sapien
tcccaacaggatttatagagtgact

SEQ ID NO: 1826542 - DNA, 25 bp, Homo sapien
agaaagctgcccatcaagtcctgaa

SEQ ID NO: 1826543 - DNA, 25 bp, Homo sapien
caatctggtatggaccctcattcct

SEQ ID NO: 1826544 - DNA, 25 bp, Homo sapien
gattctctgtttacaaatccgtctt

SEQ ID NO: 1826545 - DNA, 25 bp, Homo sapien
tttctctctcacctgttttgaatgg

SEQ ID NO: 1826546 - DNA, 25 bp, Homo sapien
ctctcacctgttttgaatggcagcc

SEQ ID NO: 1826547 - DNA, 25 bp, Homo sapien
gtcagctcacattcaatttctggca

SEQ ID NO: 1826548 - DNA, 25 bp, Homo sapien
tgccaccagcattgtttctctctca

SEQ ID NO: 1826549 - DNA, 25 bp, Homo sapien
agccactctgaataagccatggagc

SEQ ID NO: 1826550 - DNA, 25 bp, Homo sapien
cactctgaataagccatggagcccc

SEQ ID NO: 1826551 - DNA, 25 bp, Homo sapien
catggagcccctctgtcgactcaga

SEQ ID NO: 1826552 - DNA, 25 bp, Homo sapien
tctgaataagccatggagcccctct

SEQ ID NO: 1826553 - DNA, 25 bp, Homo sapien
gaattgtgtacagcgttgccagcca

SEQ ID NO: 1826554 - DNA, 25 bp, Homo sapien
agtcatcgcatcttatcctaggtgg

SEQ ID NO: 1826555 - DNA, 25 bp, Homo sapien
tccaagactctaactggttggaagg

SEQ ID NO: 1826556 - DNA, 25 bp, Homo sapien
tggtgagtcactgcagaagagagca

SEQ ID NO: 1826557 - DNA, 25 bp, Homo sapien
cagtaagtaggagccaaacgtcctt

SEQ ID NO: 1826558 - DNA, 25 bp, Homo sapien
gagccaaacgtccttgaagtgtagc

SEQ ID NO: 1826559 - DNA, 25 bp, Homo sapien
taggagccaaacgtccttgaagtgt

SEQ ID NO: 1826560 - DNA, 25 bp, Homo sapien
aagtaggagccaaacgtccttgaag

SEQ ID NO: 1826561 - DNA, 25 bp, Homo sapien
attatgggtgtacgtcaggacaggc

SEQ ID NO: 1826562 - DNA, 25 bp, Homo sapien
ggacaggcgagcctcgaagcagcat

SEQ ID NO: 1826563 - DNA, 25 bp, Homo sapien
gaagctgcagagttgtgaattatgg

SEQ ID NO: 1826564 - DNA, 25 bp, Homo sapien
tgaattatgggtgtacgtcaggaca

SEQ ID NO: 1826565 - DNA, 25 bp, Homo sapien
gcaagtgtggttttccgatcagcga

SEQ ID NO: 1826566 - DNA, 25 bp, Homo sapien
aatcaggaaagctgctaccgtccca

SEQ ID NO: 1826567 - DNA, 25 bp, Homo sapien
gaagcttttcaactgacgacgcact

SEQ ID NO: 1826568 - DNA, 25 bp, Homo sapien
ctcaagaattgaaccgaagggaact

SEQ ID NO: 1826569 - DNA, 25 bp, Homo sapien
gaatcctcacgaccctataagagag

SEQ ID NO: 1826570 - DNA, 25 bp, Homo sapien
gaaacttgtcggaagctgcacagct

SEQ ID NO: 1826571 - DNA, 25 bp, Homo sapien
aaagacattaaagggcccggacatg

SEQ ID NO: 1826572 - DNA, 25 bp, Homo sapien
cagacgggccagctgttacttcctg

SEQ ID NO: 1826573 - DNA, 25 bp, Homo sapien
agcagaggtttgataggcaaaacaa

SEQ ID NO: 1826574 - DNA, 25 bp, Homo sapien
tttatagacgagcttgagaaggcag

SEQ ID NO: 1826575 - DNA, 25 bp, Homo sapien
cttccggttctgtggtgaaatgccc

SEQ ID NO: 1826576 - DNA, 25 bp, Homo sapien
ctcccgagtgggtcttccggttctg

SEQ ID NO: 1826577 - DNA, 25 bp, Homo sapien
attgagtccaagatgagagcaccca

SEQ ID NO: 1826578 - DNA, 25 bp, Homo sapien
taaacttccttggattgagtccaag

SEQ ID NO: 1826579 - DNA, 25 bp, Homo sapien
tctgtaattaaacttccttggattg

SEQ ID NO: 1826580 - DNA, 25 bp, Homo sapien
gagagcacccacttcttctctatat

SEQ ID NO: 1826581 - DNA, 25 bp, Homo sapien
tgatgatgttcaatgtggtactgct

SEQ ID NO: 1826582 - DNA, 25 bp, Homo sapien
ttaggagccaccattgatgatgttc

SEQ ID NO: 1826583 - DNA, 25 bp, Homo sapien
taggagccaccattgatgatgttca

SEQ ID NO: 1826584 - DNA, 25 bp, Homo sapien
tcaatgtggtactgctggtggacag

SEQ ID NO: 1826585 - DNA, 25 bp, Homo sapien
gcacaggagaccttacttcacccca

SEQ ID NO: 1826586 - DNA, 25 bp, Homo sapien
aggagaccttacttcaccccacagg

SEQ ID NO: 1826587 - DNA, 25 bp, Homo sapien
acaggagaccttacttcaccccaca

SEQ ID NO: 1826588 - DNA, 25 bp, Homo sapien
ggcacaggagaccttacttcacccc

SEQ ID NO: 1826589 - DNA, 25 bp, Homo sapien
gctgtgacaggcagactcaggatgt

SEQ ID NO: 1826590 - DNA, 25 bp, Homo sapien
tcaggatgtcatggacacgtaggtg

SEQ ID NO: 1826591 - DNA, 25 bp, Homo sapien
gtacttgggctgaattgagtaggat

SEQ ID NO: 1826592 - DNA, 25 bp, Homo sapien
tccagcgagggacgttgctgtgaca

SEQ ID NO: 1826593 - DNA, 25 bp, Homo sapien
ggataccacactaaggagctgggac

SEQ ID NO: 1826594 - DNA, 25 bp, Homo sapien
aagggcctgggataccacactaagg

SEQ ID NO: 1826595 - DNA, 25 bp, Homo sapien
gctgggacttgctccatgacgggtt

SEQ ID NO: 1826596 - DNA, 25 bp, Homo sapien
gctccatgacgggttgtagtatttc

SEQ ID NO: 1826597 - DNA, 25 bp, Homo sapien
tctccttgaaacagtagcactgctc

SEQ ID NO: 1826598 - DNA, 25 bp, Homo sapien
gtacaatagcaacctgtagtgaagc

SEQ ID NO: 1826599 - DNA, 25 bp, Homo sapien
tttcaagtacaatagcaacctgtag

SEQ ID NO: 1826600 - DNA, 25 bp, Homo sapien
agtctccttgaaacagtagcactgc

SEQ ID NO: 1826601 - DNA, 25 bp, Homo sapien
gttaaccaatccctaaccagagatc

SEQ ID NO: 1826602 - DNA, 25 bp, Homo sapien
cagagatccacccactagagcttgg

SEQ ID NO: 1826603 - DNA, 25 bp, Homo sapien
ccactagagcttgggtgggatcaac

SEQ ID NO: 1826604 - DNA, 25 bp, Homo sapien
tgggatcaacctctaggaagctcat

SEQ ID NO: 1826605 - DNA, 25 bp, Homo sapien
agtgtccacagcttggtgctaatac

SEQ ID NO: 1826606 - DNA, 25 bp, Homo sapien
tacataaattggatccctctttgac

SEQ ID NO: 1826607 - DNA, 25 bp, Homo sapien
gatccctctttgactggatgctaag

SEQ ID NO: 1826608 - DNA, 25 bp, Homo sapien
ggtgctaatacataaattggatccc

SEQ ID NO: 1826609 - DNA, 25 bp, Homo sapien
tcttatttgagaaattgccggacca

SEQ ID NO: 1826610 - DNA, 25 bp, Homo sapien
cggtagtccctgacttgtccagaga

SEQ ID NO: 1826611 - DNA, 25 bp, Homo sapien
tgctgtagtgattgcgtctgccaag

SEQ ID NO: 1826612 - DNA, 25 bp, Homo sapien
gccaggtagtaggaagtagacagca

SEQ ID NO: 1826613 - DNA, 25 bp, Homo sapien
gaagttgagcaaatttggttgggat

SEQ ID NO: 1826614 - DNA, 25 bp, Homo sapien
taaatagaagttgagcaaatttggt

SEQ ID NO: 1826615 - DNA, 25 bp, Homo sapien
gttgagcaaatttggttgggatgtt

SEQ ID NO: 1826616 - DNA, 25 bp, Homo sapien
tagaagttgagcaaatttggttggg

SEQ ID NO: 1826617 - DNA, 25 bp, Homo sapien
tgactctgcattctccactctctca

SEQ ID NO: 1826618 - DNA, 25 bp, Homo sapien
tctgactctgcattctccactctct

SEQ ID NO: 1826619 - DNA, 25 bp, Homo sapien
actctgactctgcattctccactct

SEQ ID NO: 1826620 - DNA, 25 bp, Homo sapien
cactctgactctgcattctccactc

SEQ ID NO: 1826621 - DNA, 25 bp, Homo sapien
caacgattacatggatgttttggac

SEQ ID NO: 1826622 - DNA, 25 bp, Homo sapien
ttttggacgtagacctccacttcga

SEQ ID NO: 1826623 - DNA, 25 bp, Homo sapien
tacatggatgttttggacgtagacc

SEQ ID NO: 1826624 - DNA, 25 bp, Homo sapien
gacctccacttcgaatgctactctt

SEQ ID NO: 1826625 - DNA, 25 bp, Homo sapien
aaggccctgagcattaagacccagg

SEQ ID NO: 1826626 - DNA, 25 bp, Homo sapien
cctgttctaagctgaaggctgccat

SEQ ID NO: 1826627 - DNA, 25 bp, Homo sapien
gttctaagctgaaggctgccatcct

SEQ ID NO: 1826628 - DNA, 25 bp, Homo sapien
ttcctgttctaagctgaaggctgcc

SEQ ID NO: 1826629 - DNA, 25 bp, Homo sapien
taagaagtccataccattgcaacag

SEQ ID NO: 1826630 - DNA, 25 bp, Homo sapien
taccattgcaacagtgaggacggac

SEQ ID NO: 1826631 - DNA, 25 bp, Homo sapien
ccattgcaacagtgaggacggacat

SEQ ID NO: 1826632 - DNA, 25 bp, Homo sapien
ttcataagaagtccataccattgca

SEQ ID NO: 1826633 - DNA, 25 bp, Homo sapien
cgttgtacaattccacaaagctgga

SEQ ID NO: 1826634 - DNA, 25 bp, Homo sapien
gcaagtttcttcactaaagtatttc

SEQ ID NO: 1826635 - DNA, 25 bp, Homo sapien
tgttccgtagtttcctgggtatcag

SEQ ID NO: 1826636 - DNA, 25 bp, Homo sapien
caaagctggagttttgttccgtagt

SEQ ID NO: 1826637 - DNA, 25 bp, Homo sapien
tatggttttatgggcccttgctttc

SEQ ID NO: 1826638 - DNA, 25 bp, Homo sapien
ggaatcaagtagggaagtaggatgt

SEQ ID NO: 1826639 - DNA, 25 bp, Homo sapien
aagtaggatgttccggcattagaca

SEQ ID NO: 1826640 - DNA, 25 bp, Homo sapien
tataatggtgtgaagttaaggtggt

SEQ ID NO: 1826641 - DNA, 25 bp, Homo sapien
atggagatgtataatggtgtgaagt

SEQ ID NO: 1826642 - DNA, 25 bp, Homo sapien
tgaagacaacgagtccaatacataa

SEQ ID NO: 1826643 - DNA, 25 bp, Homo sapien
tctgaagacaacgagtccaatacat

SEQ ID NO: 1826644 - DNA, 25 bp, Homo sapien
aaggccacaggtgccccttgcggcc

SEQ ID NO: 1826645 - DNA, 25 bp, Homo sapien
ctttcatctgaagacaacgagtcca

SEQ ID NO: 1826646 - DNA, 25 bp, Homo sapien
tgggaaatacgaatgccttgggtta

SEQ ID NO: 1826647 - DNA, 25 bp, Homo sapien
cactgagcacacactaatggaagaa

SEQ ID NO: 1826648 - DNA, 25 bp, Homo sapien
taagatctccttaatgccaggtaca

SEQ ID NO: 1826649 - DNA, 25 bp, Homo sapien
tacagggctgcaagataagtgatta

SEQ ID NO: 1826650 - DNA, 25 bp, Homo sapien
tgaagagcccttctaaggtcagctt

SEQ ID NO: 1826651 - DNA, 25 bp, Homo sapien
cccatagtcaccttgaagagccctt

SEQ ID NO: 1826652 - DNA, 25 bp, Homo sapien
gtcaccttgaagagcccttctaagg

SEQ ID NO: 1826653 - DNA, 25 bp, Homo sapien
agcccttctaaggtcagctttgaca

SEQ ID NO: 1826654 - DNA, 25 bp, Homo sapien
ttttagagccactgatggtgggaca

SEQ ID NO: 1826655 - DNA, 25 bp, Homo sapien
attctctggtcactcagactggctc

SEQ ID NO: 1826656 - DNA, 25 bp, Homo sapien
tctctggtcactcagactggctctt

SEQ ID NO: 1826657 - DNA, 25 bp, Homo sapien
tcagactggctcttttagagccact

SEQ ID NO: 1826658 - DNA, 25 bp, Homo sapien
gcagcttgcttgtgaggtagagtgt

SEQ ID NO: 1826659 - DNA, 25 bp, Homo sapien
cagcttgcttgtgaggtagagtgtt

SEQ ID NO: 1826660 - DNA, 25 bp, Homo sapien
agcttgcttgtgaggtagagtgttc

SEQ ID NO: 1826661 - DNA, 25 bp, Homo sapien
cccaaattgtaagctagctggatgg

SEQ ID NO: 1826662 - DNA, 25 bp, Homo sapien
ctagctggatggttgtgttttagca

SEQ ID NO: 1826663 - DNA, 25 bp, Homo sapien
catctcttggcttcttaaattccca

SEQ ID NO: 1826664 - DNA, 25 bp, Homo sapien
ttaaattcccaaattgtaagctagc

SEQ ID NO: 1826665 - DNA, 25 bp, Homo sapien
tcatcccctggcgattgtaatctcc

SEQ ID NO: 1826666 - DNA, 25 bp, Homo sapien
ttttatcccacctaacgcagagctc

SEQ ID NO: 1826667 - DNA, 25 bp, Homo sapien
taattttagcctgcacagatcacat

SEQ ID NO: 1826668 - DNA, 25 bp, Homo sapien
catcagtgagagtagcgccatatcc

SEQ ID NO: 1826669 - DNA, 25 bp, Homo sapien
ccaggaatccaaacttgtagagaca

SEQ ID NO: 1826670 - DNA, 25 bp, Homo sapien
agatgtttccatgagaagccgacgg

SEQ ID NO: 1826671 - DNA, 25 bp, Homo sapien
catgagaagccgacgggtgttcttt

SEQ ID NO: 1826672 - DNA, 25 bp, Homo sapien
tttccatgagaagccgacgggtgtt

SEQ ID NO: 1826673 - DNA, 25 bp, Homo sapien
tattcagaaagtcggcttgggcctc

SEQ ID NO: 1826674 - DNA, 25 bp, Homo sapien
ccatgcatttgtgcgctgggaatgg

SEQ ID NO: 1826675 - DNA, 25 bp, Homo sapien
aatatgtctgttgggctcacctgta

SEQ ID NO: 1826676 - DNA, 25 bp, Homo sapien
cattgctggcatcattcactaggga

SEQ ID NO: 1826677 - DNA, 25 bp, Homo sapien
ggaatgcaggtctctactgactgaa

SEQ ID NO: 1826678 - DNA, 25 bp, Homo sapien
cagccaagggagctcattggaatgc

SEQ ID NO: 1826679 - DNA, 25 bp, Homo sapien
tgtagtactgggctgcttgagcttc

SEQ ID NO: 1826680 - DNA, 25 bp, Homo sapien
tcttcaggaagtctatagctttctt

SEQ ID NO: 1826681 - DNA, 25 bp, Homo sapien
catatttcaggcaagtgagatatgc

SEQ ID NO: 1826682 - DNA, 25 bp, Homo sapien
tttttggctatgtttggcactctaa

SEQ ID NO: 1826683 - DNA, 25 bp, Homo sapien
gtttggcactctaattgagaaatca

SEQ ID NO: 1826684 - DNA, 25 bp, Homo sapien
ggcaagtgagatatgcgaaatctct

SEQ ID NO: 1826685 - DNA, 25 bp, Homo sapien
gcatgcatattgcttggagttccat

SEQ ID NO: 1826686 - DNA, 25 bp, Homo sapien
catgcgtggaatctgcatgcatatt

SEQ ID NO: 1826687 - DNA, 25 bp, Homo sapien
gcatcaccagatatcaggatttgaa

SEQ ID NO: 1826688 - DNA, 25 bp, Homo sapien
tcaaagagtcatgcgtggaatctgc

SEQ ID NO: 1826689 - DNA, 25 bp, Homo sapien
ggccttcgtgtcagtgtccaccgag

SEQ ID NO: 1826690 - DNA, 25 bp, Homo sapien
ctgtatccgaattcggttccacctg

SEQ ID NO: 1826691 - DNA, 25 bp, Homo sapien
tcctcttagcctctaagcaagtcat

SEQ ID NO: 1826692 - DNA, 25 bp, Homo sapien
gagaacccggtcttctgtatccgaa

SEQ ID NO: 1826693 - DNA, 25 bp, Homo sapien
acaggcctgatagaggaagtctggc

SEQ ID NO: 1826694 - DNA, 25 bp, Homo sapien
tttccatatcaaagggctgctcctg

SEQ ID NO: 1826695 - DNA, 25 bp, Homo sapien
taactctgagaattggtcagcccca

SEQ ID NO: 1826696 - DNA, 25 bp, Homo sapien
gacagagcactttaggactggctag

SEQ ID NO: 1826697 - DNA, 25 bp, Homo sapien
agaggaaagcgggtcttcatttgcc

SEQ ID NO: 1826698 - DNA, 25 bp, Homo sapien
cgggtcttcatttgccgcttgaggg

SEQ ID NO: 1826699 - DNA, 25 bp, Homo sapien
tgaccaccagggttgtaggagttaa

SEQ ID NO: 1826700 - DNA, 25 bp, Homo sapien
gaaggcatttcaggaggtgagtaca

SEQ ID NO: 1826701 - DNA, 25 bp, Homo sapien
tgccagtgaaactgtcgcctccgct

SEQ ID NO: 1826702 - DNA, 25 bp, Homo sapien
taagaggctcaactcattggccaca

SEQ ID NO: 1826703 - DNA, 25 bp, Homo sapien
gcgcccctgtgaaattgccttgtct

SEQ ID NO: 1826704 - DNA, 25 bp, Homo sapien
acagtctccaggtgagcgcatctgg

SEQ ID NO: 1826705 - DNA, 25 bp, Homo sapien
cccagaagagtggccagcagggtgt

SEQ ID NO: 1826706 - DNA, 25 bp, Homo sapien
agaagagtggccagcagggtgtggc

SEQ ID NO: 1826707 - DNA, 25 bp, Homo sapien
acagcccagaagagtggccagcagg

SEQ ID NO: 1826708 - DNA, 25 bp, Homo sapien
agcccagaagagtggccagcagggt

SEQ ID NO: 1826709 - DNA, 25 bp, Homo sapien
accagctgcagtacggcagccacgg

SEQ ID NO: 1826710 - DNA, 25 bp, Homo sapien
tcgggctgcagaatgatagacgagc

SEQ ID NO: 1826711 - DNA, 25 bp, Homo sapien
aaaacgctggccatgaccatgcaga

SEQ ID NO: 1826712 - DNA, 25 bp, Homo sapien
tagacgagctcaacaaaacgctggc

SEQ ID NO: 1826713 - DNA, 25 bp, Homo sapien
tctgattatgtgcacttgtgaggct

SEQ ID NO: 1826714 - DNA, 25 bp, Homo sapien
ttcaccagaatatgcctccagtcgc

SEQ ID NO: 1826715 - DNA, 25 bp, Homo sapien
taatatttggccactaccaaggcag

SEQ ID NO: 1826716 - DNA, 25 bp, Homo sapien
aatatgcctccagtcgctcttcggg

SEQ ID NO: 1826717 - DNA, 25 bp, Homo sapien
tgcaaagatgaccccacaggcaggc

SEQ ID NO: 1826718 - DNA, 25 bp, Homo sapien
ctgcaaagatgaccccacaggcagg

SEQ ID NO: 1826719 - DNA, 25 bp, Homo sapien
ctggtgtaacaaggagaaagtatga

SEQ ID NO: 1826720 - DNA, 25 bp, Homo sapien
aaagggtatctctgactgtgagctg

SEQ ID NO: 1826721 - DNA, 25 bp, Homo sapien
tgccctggtgtaacaaggagaaagt

SEQ ID NO: 1826722 - DNA, 25 bp, Homo sapien
gaaagtatgattatgaggtgcaaag

SEQ ID NO: 1826723 - DNA, 25 bp, Homo sapien
agtagtggctgctggtcattgggtc

SEQ ID NO: 1826724 - DNA, 25 bp, Homo sapien
acatggataagccagtccaatctgg

SEQ ID NO: 1826725 - DNA, 25 bp, Homo sapien
ctctgctggcatagtcaatgtacat

SEQ ID NO: 1826726 - DNA, 25 bp, Homo sapien
aagccagtccaatctggatgatcaa

SEQ ID NO: 1826727 - DNA, 25 bp, Homo sapien
tgctggcatagtcaatgtacatctg

SEQ ID NO: 1826728 - DNA, 25 bp, Homo sapien
ttccagagtcgtcttgaactcttag

SEQ ID NO: 1826729 - DNA, 25 bp, Homo sapien
tcttgaactcttagcaacacccatt

SEQ ID NO: 1826730 - DNA, 25 bp, Homo sapien
gcaggaaagttccagagtcgtcttg

SEQ ID NO: 1826731 - DNA, 25 bp, Homo sapien
gaactcttagcaacacccattgatc

SEQ ID NO: 1826732 - DNA, 25 bp, Homo sapien
gaatgtgtaatgtgatgtcgggcag

SEQ ID NO: 1826733 - DNA, 25 bp, Homo sapien
gcgacaggtaataagcctgtgaatg

SEQ ID NO: 1826734 - DNA, 25 bp, Homo sapien
tgtaatgtgatgtcgggcagggacg

SEQ ID NO: 1826735 - DNA, 25 bp, Homo sapien
tcgttagtgggagcgacaggtaata

SEQ ID NO: 1826736 - DNA, 25 bp, Homo sapien
tctctaggtcatcgctaacaatgtc

SEQ ID NO: 1826737 - DNA, 25 bp, Homo sapien
taggtcatcgctaacaatgtcatgc

SEQ ID NO: 1826738 - DNA, 25 bp, Homo sapien
ggtcatcgctaacaatgtcatgcat

SEQ ID NO: 1826739 - DNA, 25 bp, Homo sapien
ctttctctaggtcatcgctaacaat

SEQ ID NO: 1826740 - DNA, 25 bp, Homo sapien
gggagactccccacttctagttgga

SEQ ID NO: 1826741 - DNA, 25 bp, Homo sapien
gacatagccaataatgcagaccact

SEQ ID NO: 1826742 - DNA, 25 bp, Homo sapien
tcatcacctgagctggagcagggag

SEQ ID NO: 1826743 - DNA, 25 bp, Homo sapien
tcaagtggcatacacaacagaaatg

SEQ ID NO: 1826744 - DNA, 25 bp, Homo sapien
tctaggcctttcagactggctcaga

SEQ ID NO: 1826745 - DNA, 25 bp, Homo sapien
cacttgtgaacttaccaggaggcaa

SEQ ID NO: 1826746 - DNA, 25 bp, Homo sapien
tgagtcagggctctgatcatgtaaa

SEQ ID NO: 1826747 - DNA, 25 bp, Homo sapien
gcatccaaataatggcctaaacctt

SEQ ID NO: 1826748 - DNA, 25 bp, Homo sapien
tgtggtggttctctgtcaagtttcc

SEQ ID NO: 1826749 - DNA, 25 bp, Homo sapien
tgaagcctgccatatcagtacagca

SEQ ID NO: 1826750 - DNA, 25 bp, Homo sapien
gagccactgggatatgctcaggcag

SEQ ID NO: 1826751 - DNA, 25 bp, Homo sapien
cagccttggccctcgttgtggtggt

SEQ ID NO: 1826752 - DNA, 25 bp, Homo sapien
ttcagcatcaagaaactgcctgccc

SEQ ID NO: 1826753 - DNA, 25 bp, Homo sapien
cagcatcaagaaactgcctgcccat

SEQ ID NO: 1826754 - DNA, 25 bp, Homo sapien
tcagcatcaagaaactgcctgccca

SEQ ID NO: 1826755 - DNA, 25 bp, Homo sapien
tgtagaacctgacacagcactggca

SEQ ID NO: 1826756 - DNA, 25 bp, Homo sapien
tgtgagccgcttaagaatgtgtctg

SEQ ID NO: 1826757 - DNA, 25 bp, Homo sapien
tgcaccaagtgcctcaccatggaag

SEQ ID NO: 1826758 - DNA, 25 bp, Homo sapien
tacatgggcagtgaaagtctaagtc

SEQ ID NO: 1826759 - DNA, 25 bp, Homo sapien
tccgtcagcagttggtagaaccgaa

SEQ ID NO: 1826760 - DNA, 25 bp, Homo sapien
gacaccagtttctaatacccaagga

SEQ ID NO: 1826761 - DNA, 25 bp, Homo sapien
gggactgcaacttcctcaactagga

SEQ ID NO: 1826762 - DNA, 25 bp, Homo sapien
gatgtgaacatcttgccgactatag

SEQ ID NO: 1826763 - DNA, 25 bp, Homo sapien
ccttttagtgagttgtaaagtcaga

SEQ ID NO: 1826764 - DNA, 25 bp, Homo sapien
tctttagaagctcacgggcggcagg

SEQ ID NO: 1826765 - DNA, 25 bp, Homo sapien
caggcagaaccttccttttagtgag

SEQ ID NO: 1826766 - DNA, 25 bp, Homo sapien
acgggcggcaggcagaaccttcctt

SEQ ID NO: 1826767 - DNA, 25 bp, Homo sapien
tgatttttaagagcagggtcacctt

SEQ ID NO: 1826768 - DNA, 25 bp, Homo sapien
tgctctcattcgaggaaaactgcct

SEQ ID NO: 1826769 - DNA, 25 bp, Homo sapien
aatggagactgtgatatgcacggct

SEQ ID NO: 1826770 - DNA, 25 bp, Homo sapien
tggtcccgggcatgcctgtctgatg

SEQ ID NO: 1826771 - DNA, 25 bp, Homo sapien
tcagaattggttgctggatccccaa

SEQ ID NO: 1826772 - DNA, 25 bp, Homo sapien
ttaaaaaagacatgcctgcggccag

SEQ ID NO: 1826773 - DNA, 25 bp, Homo sapien
tcaccctggtggagactagagcaag

SEQ ID NO: 1826774 - DNA, 25 bp, Homo sapien
tgttcaggcataagaaacagcccct

SEQ ID NO: 1826775 - DNA, 25 bp, Homo sapien
ggacattagtaaaatccaggtcagt

SEQ ID NO: 1826776 - DNA, 25 bp, Homo sapien
acatcatgggtgcactcagaaaata

SEQ ID NO: 1826777 - DNA, 25 bp, Homo sapien
catagataggacattagtaaaatcc

SEQ ID NO: 1826778 - DNA, 25 bp, Homo sapien
agtcagggcttaacaacttttctca

SEQ ID NO: 1826779 - DNA, 25 bp, Homo sapien
aggagagttacttgcacccaagagg

SEQ ID NO: 1826780 - DNA, 25 bp, Homo sapien
ccgagatcattgcaccattgaactc

SEQ ID NO: 1826781 - DNA, 25 bp, Homo sapien
gagagttacttgcacccaagaggcg

SEQ ID NO: 1826782 - DNA, 25 bp, Homo sapien
gagttacttgcacccaagaggcgga

SEQ ID NO: 1826783 - DNA, 25 bp, Homo sapien
caagtgccatggtcaacccttctgg

SEQ ID NO: 1826784 - DNA, 25 bp, Homo sapien
tgcatccatcgcctcactgaacctt

SEQ ID NO: 1826785 - DNA, 25 bp, Homo sapien
ccttctggctgactgggtccatctc

SEQ ID NO: 1826786 - DNA, 25 bp, Homo sapien
ctggctgactgggtccatctctctc

SEQ ID NO: 1826787 - DNA, 25 bp, Homo sapien
gcaggcatgcggttccactttaggt

SEQ ID NO: 1826788 - DNA, 25 bp, Homo sapien
tactgaaacgaggaagtggaacaca

SEQ ID NO: 1826789 - DNA, 25 bp, Homo sapien
taacagtcgaattcctcttgagtgc

SEQ ID NO: 1826790 - DNA, 25 bp, Homo sapien
caaataaagctctcccacttgtggg

SEQ ID NO: 1826791 - DNA, 25 bp, Homo sapien
ctgtctggcaggtggaacggtcctt

SEQ ID NO: 1826792 - DNA, 25 bp, Homo sapien
cgcaaaagtgatggctcggcggtcc

SEQ ID NO: 1826793 - DNA, 25 bp, Homo sapien
agcaggcactaccttcatgaagtct

SEQ ID NO: 1826794 - DNA, 25 bp, Homo sapien
gcagggccctgactgaagactgtct

SEQ ID NO: 1826795 - DNA, 25 bp, Homo sapien
gatctggttggacttctacacttgg

SEQ ID NO: 1826796 - DNA, 25 bp, Homo sapien
gaacacttctcagttgcccctggct

SEQ ID NO: 1826797 - DNA, 25 bp, Homo sapien
gatgccaagaaggagtgaacacttc

SEQ ID NO: 1826798 - DNA, 25 bp, Homo sapien
tactggctccagacatgacatttgg

SEQ ID NO: 1826799 - DNA, 25 bp, Homo sapien
gatttccttcataacagagctcgca

SEQ ID NO: 1826800 - DNA, 25 bp, Homo sapien
tgaacggctcccatctaggcactaa

SEQ ID NO: 1826801 - DNA, 25 bp, Homo sapien
gccatttagaaagacgccagcttgg

SEQ ID NO: 1826802 - DNA, 25 bp, Homo sapien
cctcatgatgccagggagcgtgact

SEQ ID NO: 1826803 - DNA, 25 bp, Homo sapien
gattccctggggatataaggcccaa

SEQ ID NO: 1826804 - DNA, 25 bp, Homo sapien
gcagacagcccagggtttccgccca

SEQ ID NO: 1826805 - DNA, 25 bp, Homo sapien
aaggcccaagcggatctccctgcag

SEQ ID NO: 1826806 - DNA, 25 bp, Homo sapien
tctgctggccttagttcttggccct

SEQ ID NO: 1826807 - DNA, 25 bp, Homo sapien
gctgtagctggcaagtcaaagttta

SEQ ID NO: 1826808 - DNA, 25 bp, Homo sapien
gagaccgccatcagccaactagctt

SEQ ID NO: 1826809 - DNA, 25 bp, Homo sapien
tattcatctctaaaggccctcaaag

SEQ ID NO: 1826810 - DNA, 25 bp, Homo sapien
taagtggctcttacacaggctcagc

SEQ ID NO: 1826811 - DNA, 25 bp, Homo sapien
ggacaaccgcatgtctcctctggta

SEQ ID NO: 1826812 - DNA, 25 bp, Homo sapien
tgttaatccccagaccggttgcatt

SEQ ID NO: 1826813 - DNA, 25 bp, Homo sapien
caggaatgggagaggtcagctcatc

SEQ ID NO: 1826814 - DNA, 25 bp, Homo sapien
tatttgccgaatgaaaatcgtggtg

SEQ ID NO: 1826815 - DNA, 25 bp, Homo sapien
cataaccttctggttactacttgtc

SEQ ID NO: 1826816 - DNA, 25 bp, Homo sapien
cttgagaagcctgagtatttgatgt

SEQ ID NO: 1826817 - DNA, 25 bp, Homo sapien
ggcctctatctccgttcttgagaag

SEQ ID NO: 1826818 - DNA, 25 bp, Homo sapien
tgcataaccttctggttactacttg

SEQ ID NO: 1826819 - DNA, 25 bp, Homo sapien
tatccttcgtccagcagcgtagaaa

SEQ ID NO: 1826820 - DNA, 25 bp, Homo sapien
ggacgttgctgggtagcatatcctt

SEQ ID NO: 1826821 - DNA, 25 bp, Homo sapien
tgctgggtagcatatccttcgtcca

SEQ ID NO: 1826822 - DNA, 25 bp, Homo sapien
tagcatatccttcgtccagcagcgt

SEQ ID NO: 1826823 - DNA, 25 bp, Homo sapien
taagtgatctcctccacgggtgtgg

SEQ ID NO: 1826824 - DNA, 25 bp, Homo sapien
tttaaagcaagtccggctgaggcct

SEQ ID NO: 1826825 - DNA, 25 bp, Homo sapien
cataatcctgctacggagggagccc

SEQ ID NO: 1826826 - DNA, 25 bp, Homo sapien
tgcccttgggcaaaacaccctggag

SEQ ID NO: 1826827 - DNA, 25 bp, Homo sapien
ctggatgacggcagccatgatcttt

SEQ ID NO: 1826828 - DNA, 25 bp, Homo sapien
tggatgacggcagccatgatctttc

SEQ ID NO: 1826829 - DNA, 25 bp, Homo sapien
tccactgtcttacccatcaagcccc

SEQ ID NO: 1826830 - DNA, 25 bp, Homo sapien
actctgcagtgtggcatccgtagtg

SEQ ID NO: 1826831 - DNA, 25 bp, Homo sapien
gcctccactgtcttacccatcaagc

SEQ ID NO: 1826832 - DNA, 25 bp, Homo sapien
ggcatccgtagtgacagtgtggccc

SEQ ID NO: 1826833 - DNA, 25 bp, Homo sapien
tgtcccctgctacatcactctgctc

SEQ ID NO: 1826834 - DNA, 25 bp, Homo sapien
ggagtcctgtgagggatgctattga

SEQ ID NO: 1826835 - DNA, 25 bp, Homo sapien
cgtgtgacctgggagtcctgtgagg

SEQ ID NO: 1826836 - DNA, 25 bp, Homo sapien
tgagggatgctattgatgtggccat

SEQ ID NO: 1826837 - DNA, 25 bp, Homo sapien
caaacaacaacgtgggcaaagtcac

SEQ ID NO: 1826838 - DNA, 25 bp, Homo sapien
tacgacaccttggtcaccgatgagg

SEQ ID NO: 1826839 - DNA, 25 bp, Homo sapien
caagagaggtctcatgtaggcaacc

SEQ ID NO: 1826840 - DNA, 25 bp, Homo sapien
tacgctgacgtgtcgtggctttccc

SEQ ID NO: 1826841 - DNA, 25 bp, Homo sapien
catgcacaactttgtctgtgattaa

SEQ ID NO: 1826842 - DNA, 25 bp, Homo sapien
tttgtctgtgattaagctgagtctc

SEQ ID NO: 1826843 - DNA, 25 bp, Homo sapien
ctctcatgcacaactttgtctgtga

SEQ ID NO: 1826844 - DNA, 25 bp, Homo sapien
ttaagctgagtctcccgcttctcca

SEQ ID NO: 1826845 - DNA, 25 bp, Homo sapien
attccagaactggttcccctcctca

SEQ ID NO: 1826846 - DNA, 25 bp, Homo sapien
cagaattccagaactggttcccctc

SEQ ID NO: 1826847 - DNA, 25 bp, Homo sapien
cctgagccagaattccagaactggt

SEQ ID NO: 1826848 - DNA, 25 bp, Homo sapien
agccagaattccagaactggttccc

SEQ ID NO: 1826849 - DNA, 25 bp, Homo sapien
acgctgcggctcatgtggtcacaaa

SEQ ID NO: 1826850 - DNA, 25 bp, Homo sapien
tgtggagataccattgctgttctac

SEQ ID NO: 1826851 - DNA, 25 bp, Homo sapien
ttggtgtttcctatgtggagatacc

SEQ ID NO: 1826852 - DNA, 25 bp, Homo sapien
ccatgatgaagacgctgcggctcat

SEQ ID NO: 1826853 - DNA, 25 bp, Homo sapien
tgttccttaatcaccaatcaccaac

SEQ ID NO: 1826854 - DNA, 25 bp, Homo sapien
ctgttccttaatcaccaatcaccaa

SEQ ID NO: 1826855 - DNA, 25 bp, Homo sapien
gtctgttccttaatcaccaatcacc

SEQ ID NO: 1826856 - DNA, 25 bp, Homo sapien
tctgttccttaatcaccaatcacca

SEQ ID NO: 1826857 - DNA, 25 bp, Homo sapien
taaaggctttggtctcacgcagcaa

SEQ ID NO: 1826858 - DNA, 25 bp, Homo sapien
caggcatgtttcaggctgtccagca

SEQ ID NO: 1826859 - DNA, 25 bp, Homo sapien
ccagggacggcatcagagtaaaggc

SEQ ID NO: 1826860 - DNA, 25 bp, Homo sapien
tatgcatgagcggaaaccctgcagg

SEQ ID NO: 1826861 - DNA, 25 bp, Homo sapien
tgttccaacgcaatgccctaaagag

SEQ ID NO: 1826862 - DNA, 25 bp, Homo sapien
ctgggcccttgctactcaaactgtg

SEQ ID NO: 1826863 - DNA, 25 bp, Homo sapien
atctgcagttcaccaagaccccagg

SEQ ID NO: 1826864 - DNA, 25 bp, Homo sapien
taggtgaaatctacattccctgggc

SEQ ID NO: 1826865 - DNA, 25 bp, Homo sapien
gctggctgcccacctgcctggctgg

SEQ ID NO: 1826866 - DNA, 25 bp, Homo sapien
ctggctgcccacctgcctggctggc

SEQ ID NO: 1826867 - DNA, 25 bp, Homo sapien
tggctgcccacctgcctggctggca

SEQ ID NO: 1826868 - DNA, 25 bp, Homo sapien
ggctgcccacctgcctggctggcag

SEQ ID NO: 1826869 - DNA, 25 bp, Homo sapien
tctaccagagtgatccagactgcag

SEQ ID NO: 1826870 - DNA, 25 bp, Homo sapien
caatggaggcgtcttaatgctgaac

SEQ ID NO: 1826871 - DNA, 25 bp, Homo sapien
cccatggatttaggaattgcgtcac

SEQ ID NO: 1826872 - DNA, 25 bp, Homo sapien
tcatagataagaggacgagagggtc

SEQ ID NO: 1826873 - DNA, 25 bp, Homo sapien
aaaaccttgagtcaccatagggacg

SEQ ID NO: 1826874 - DNA, 25 bp, Homo sapien
cccagagctacagtgcaagaaggtc

SEQ ID NO: 1826875 - DNA, 25 bp, Homo sapien
tgcaattcaagacagggcaagtgcc

SEQ ID NO: 1826876 - DNA, 25 bp, Homo sapien
ggagctccttcagcgcatcatatga

SEQ ID NO: 1826877 - DNA, 25 bp, Homo sapien
actgcaagatgctgctcgccaacac

SEQ ID NO: 1826878 - DNA, 25 bp, Homo sapien
gtgtattattcaatcagtttcccag

SEQ ID NO: 1826879 - DNA, 25 bp, Homo sapien
aaccactttgagcaccaaagcaaga

SEQ ID NO: 1826880 - DNA, 25 bp, Homo sapien
ccactttgagcaccaaagcaagaaa

SEQ ID NO: 1826881 - DNA, 25 bp, Homo sapien
gtttcccagatcacatgccaagaac

SEQ ID NO: 1826882 - DNA, 25 bp, Homo sapien
ggcagacggtccacaaccagcgggt

SEQ ID NO: 1826883 - DNA, 25 bp, Homo sapien
gtgcctggcagacggtccacaacca

SEQ ID NO: 1826884 - DNA, 25 bp, Homo sapien
gacggtccacaaccagcgggtgcgt

SEQ ID NO: 1826885 - DNA, 25 bp, Homo sapien
gtggtgcctggcagacggtccacaa

SEQ ID NO: 1826886 - DNA, 25 bp, Homo sapien
ggccttgctcacgatcgcgtctgag

SEQ ID NO: 1826887 - DNA, 25 bp, Homo sapien
ccacaagtcaatggccttgctcacg

SEQ ID NO: 1826888 - DNA, 25 bp, Homo sapien
tgtttgtgccacaagtcaatggcct

SEQ ID NO: 1826889 - DNA, 25 bp, Homo sapien
tcagcttgaatggaccggggtccca

SEQ ID NO: 1826890 - DNA, 25 bp, Homo sapien
tacaaaaactaggatcttacaggat

SEQ ID NO: 1826891 - DNA, 25 bp, Homo sapien
tcttacaggatccactcacaacttt

SEQ ID NO: 1826892 - DNA, 25 bp, Homo sapien
ttaataaaatttcgacagctacaaa

SEQ ID NO: 1826893 - DNA, 25 bp, Homo sapien
tctgcactgttcagtgccataactt

SEQ ID NO: 1826894 - DNA, 25 bp, Homo sapien
taatgggtggcacctggactccgaa

SEQ ID NO: 1826895 - DNA, 25 bp, Homo sapien
atgggtggcacctggactccgaaat

SEQ ID NO: 1826896 - DNA, 25 bp, Homo sapien
cttaatgggtggcacctggactccg

SEQ ID NO: 1826897 - DNA, 25 bp, Homo sapien
gggtggcacctggactccgaaatac

SEQ ID NO: 1826898 - DNA, 25 bp, Homo sapien
tttctactggaggaagatttgtcac

SEQ ID NO: 1826899 - DNA, 25 bp, Homo sapien
gaagaacttagtcaaatctttgact

SEQ ID NO: 1826900 - DNA, 25 bp, Homo sapien
tactggaggaagatttgtcacattt

SEQ ID NO: 1826901 - DNA, 25 bp, Homo sapien
tatcatgatgaaactaacactaaga

SEQ ID NO: 1826902 - DNA, 25 bp, Homo sapien
gattcaggcaaacatcccgcaaagc

SEQ ID NO: 1826903 - DNA, 25 bp, Homo sapien
tggattcaggcaaacatcccgcaaa

SEQ ID NO: 1826904 - DNA, 25 bp, Homo sapien
ttcaggcaaacatcccgcaaagcac

SEQ ID NO: 1826905 - DNA, 25 bp, Homo sapien
ggattcaggcaaacatcccgcaaag

SEQ ID NO: 1826906 - DNA, 25 bp, Homo sapien
ttgggcgccgcggaacacatcctca

SEQ ID NO: 1826907 - DNA, 25 bp, Homo sapien
catcttccagattcaagtattgttc

SEQ ID NO: 1826908 - DNA, 25 bp, Homo sapien
tcttgaaccagagatcataaggaag

SEQ ID NO: 1826909 - DNA, 25 bp, Homo sapien
tcaagtattgttcaaacgcttttgg

SEQ ID NO: 1826910 - DNA, 25 bp, Homo sapien
gagcatctgctcgtaggtaccaagc

SEQ ID NO: 1826911 - DNA, 25 bp, Homo sapien
tgagcatctgctcgtaggtaccaag

SEQ ID NO: 1826912 - DNA, 25 bp, Homo sapien
tcctccatggctttagctatggcaa

SEQ ID NO: 1826913 - DNA, 25 bp, Homo sapien
cagtaacagtcgacactatcttcca

SEQ ID NO: 1826914 - DNA, 25 bp, Homo sapien
tatggcaagaaacacttcatcatct

SEQ ID NO: 1826915 - DNA, 25 bp, Homo sapien
caaagcgtcgggtgatccagtaaca

SEQ ID NO: 1826916 - DNA, 25 bp, Homo sapien
tcaggaccctgcagagagtcatcag

SEQ ID NO: 1826917 - DNA, 25 bp, Homo sapien
gattaaagactaagacgtggcagct

SEQ ID NO: 1826918 - DNA, 25 bp, Homo sapien
gttagcagcacagtaatgagtccca

SEQ ID NO: 1826919 - DNA, 25 bp, Homo sapien
cactatgtgcctcctgataagagac

SEQ ID NO: 1826920 - DNA, 25 bp, Homo sapien
catgatgtaatcaaaggccggcaag

SEQ ID NO: 1826921 - DNA, 25 bp, Homo sapien
gaggtgtggcatcactaacaaagcg

SEQ ID NO: 1826922 - DNA, 25 bp, Homo sapien
tacatcatcaccttggcatgggact

SEQ ID NO: 1826923 - DNA, 25 bp, Homo sapien
taacaaagcgaacgactttcagggc

SEQ ID NO: 1826924 - DNA, 25 bp, Homo sapien
tacatgcggagatagacttcagcct

SEQ ID NO: 1826925 - DNA, 25 bp, Homo sapien
taggaattatatgctccagcaggct

SEQ ID NO: 1826926 - DNA, 25 bp, Homo sapien
ggaagttatacctctatagctgaga

SEQ ID NO: 1826927 - DNA, 25 bp, Homo sapien
tctagggagtagtaagtctccaatt

SEQ ID NO: 1826928 - DNA, 25 bp, Homo sapien
tttagtcattcacacttctagggag

SEQ ID NO: 1826929 - DNA, 25 bp, Homo sapien
cttccataccaatgcacggtacatg

SEQ ID NO: 1826930 - DNA, 25 bp, Homo sapien
caatgcacggtacatggacgggaga

SEQ ID NO: 1826931 - DNA, 25 bp, Homo sapien
gagggaacctctgactaaaagtaca

SEQ ID NO: 1826932 - DNA, 25 bp, Homo sapien
gtacatggacgggagagggaacctc

SEQ ID NO: 1826933 - DNA, 25 bp, Homo sapien
tgaacgaaagtttctctgagagtcc

SEQ ID NO: 1826934 - DNA, 25 bp, Homo sapien
ggagaatttctaatgatttcttttc

SEQ ID NO: 1826935 - DNA, 25 bp, Homo sapien
cactttctcataatatactgaacga

SEQ ID NO: 1826936 - DNA, 25 bp, Homo sapien
ccagacggtcatcttttaggagaat

SEQ ID NO: 1826937 - DNA, 25 bp, Homo sapien
cttggaggagacacagaaagacaga

SEQ ID NO: 1826938 - DNA, 25 bp, Homo sapien
cagaaagggagagaaagacgaaggg

SEQ ID NO: 1826939 - DNA, 25 bp, Homo sapien
gacagaaagggagagaaagacgaag

SEQ ID NO: 1826940 - DNA, 25 bp, Homo sapien
aagacagaaagggagagaaagacga

SEQ ID NO: 1826941 - DNA, 25 bp, Homo sapien
caagaactcaaaaagttcagtggtc

SEQ ID NO: 1826942 - DNA, 25 bp, Homo sapien
taatactggcggtaattcatccaaa

SEQ ID NO: 1826943 - DNA, 25 bp, Homo sapien
tagatttggcgtttcaagaacagaa

SEQ ID NO: 1826944 - DNA, 25 bp, Homo sapien
agaccaagttagatttggcgtttca

SEQ ID NO: 1826945 - DNA, 25 bp, Homo sapien
aaacagctgcatgacgatttggtcg

SEQ ID NO: 1826946 - DNA, 25 bp, Homo sapien
gcataaaacgcgtaatgagtgtggg

SEQ ID NO: 1826947 - DNA, 25 bp, Homo sapien
caaatgcttccagcgtctgtgcaca

SEQ ID NO: 1826948 - DNA, 25 bp, Homo sapien
gagctttcgggagcagatgtcttaa

SEQ ID NO: 1826949 - DNA, 25 bp, Homo sapien
aagccgtgccctgtgcgctgaccga

SEQ ID NO: 1826950 - DNA, 25 bp, Homo sapien
gagactaagtggtccgggagaagca

SEQ ID NO: 1826951 - DNA, 25 bp, Homo sapien
aggaagccgtgccctgtgcgctgac

SEQ ID NO: 1826952 - DNA, 25 bp, Homo sapien
ggttgagactaagtggtccgggaga

SEQ ID NO: 1826953 - DNA, 25 bp, Homo sapien
ctgcgggaaggagggaggcggcggg

SEQ ID NO: 1826954 - DNA, 25 bp, Homo sapien
cgccggacgtgacatcaactccagg

SEQ ID NO: 1826955 - DNA, 25 bp, Homo sapien
ccggacgtgacatcaactccaggtc

SEQ ID NO: 1826956 - DNA, 25 bp, Homo sapien
gggagacaaaactcagcgccgctgc

SEQ ID NO: 1826957 - DNA, 25 bp, Homo sapien
cagacggcccgggagacaaaactca

SEQ ID NO: 1826958 - DNA, 25 bp, Homo sapien
cagcagcagtagacggttgggatac

SEQ ID NO: 1826959 - DNA, 25 bp, Homo sapien
gaaactcggcttggtgtaattctca

SEQ ID NO: 1826960 - DNA, 25 bp, Homo sapien
gtaattctcaatggcagcagcagag

SEQ ID NO: 1826961 - DNA, 25 bp, Homo sapien
tcacaccgagttaagggaaacttca

SEQ ID NO: 1826962 - DNA, 25 bp, Homo sapien
ttgccaagtaaaccgcagtttcatc

SEQ ID NO: 1826963 - DNA, 25 bp, Homo sapien
ggggaagagacgactggccctggct

SEQ ID NO: 1826964 - DNA, 25 bp, Homo sapien
ggcttgccaagtaaaccgcagtttc

SEQ ID NO: 1826965 - DNA, 25 bp, Homo sapien
gcttgccaagtaaaccgcagtttca

SEQ ID NO: 1826966 - DNA, 25 bp, Homo sapien
ttgttattcgagtgtgtatacgtgc

SEQ ID NO: 1826967 - DNA, 25 bp, Homo sapien
gttattcgagtgtgtatacgtgcac

SEQ ID NO: 1826968 - DNA, 25 bp, Homo sapien
caaagttttgttattcgagtgtgta

SEQ ID NO: 1826969 - DNA, 25 bp, Homo sapien
attcgagtgtgtatacgtgcacaca

SEQ ID NO: 1826970 - DNA, 25 bp, Homo sapien
cagagggacggaacaaaggtgctcc

SEQ ID NO: 1826971 - DNA, 25 bp, Homo sapien
tctcactgcgcataagaagggctgg

SEQ ID NO: 1826972 - DNA, 25 bp, Homo sapien
aaggtgctcccagatcagaagcagg

SEQ ID NO: 1826973 - DNA, 25 bp, Homo sapien
aatccacggccgatggtttgatgac

SEQ ID NO: 1826974 - DNA, 25 bp, Homo sapien
ttgggaaacttccacatggcatgag

SEQ ID NO: 1826975 - DNA, 25 bp, Homo sapien
tactgtgtctgctcacggtgtaaca

SEQ ID NO: 1826976 - DNA, 25 bp, Homo sapien
aaaatccctttagtcataatggccg

SEQ ID NO: 1826977 - DNA, 25 bp, Homo sapien
cagacctgggatccggaatatgcat

SEQ ID NO: 1826978 - DNA, 25 bp, Homo sapien
gccttctaatcccattacttcctcc

SEQ ID NO: 1826979 - DNA, 25 bp, Homo sapien
cttctaatcccattacttcctccgg

SEQ ID NO: 1826980 - DNA, 25 bp, Homo sapien
ctaatcccattacttcctccggtgg

SEQ ID NO: 1826981 - DNA, 25 bp, Homo sapien
catcttctcttagccttctaatccc

SEQ ID NO: 1826982 - DNA, 25 bp, Homo sapien
cttttaggcttggcccatatttgtg

SEQ ID NO: 1826983 - DNA, 25 bp, Homo sapien
taggcttggcccatatttgtgaata

SEQ ID NO: 1826984 - DNA, 25 bp, Homo sapien
ttaggcttggcccatatttgtgaat

SEQ ID NO: 1826985 - DNA, 25 bp, Homo sapien
tttaggcttggcccatatttgtgaa

SEQ ID NO: 1826986 - DNA, 25 bp, Homo sapien
atcctctttgtgaagtgtctgcctg

SEQ ID NO: 1826987 - DNA, 25 bp, Homo sapien
tgtgacacagagttcccgaggtgct

SEQ ID NO: 1826988 - DNA, 25 bp, Homo sapien
ccaagtctgtggatcaatggaacga

SEQ ID NO: 1826989 - DNA, 25 bp, Homo sapien
tgtagccagggcaatacttccatgg

SEQ ID NO: 1826990 - DNA, 25 bp, Homo sapien
ctggggactttcttcagaaattctg

SEQ ID NO: 1826991 - DNA, 25 bp, Homo sapien
ggggactttcttcagaaattctgtg

SEQ ID NO: 1826992 - DNA, 25 bp, Homo sapien
tggggactttcttcagaaattctgt

SEQ ID NO: 1826993 - DNA, 25 bp, Homo sapien
tggtccattaatgccagctccttcc

SEQ ID NO: 1826994 - DNA, 25 bp, Homo sapien
cctacgtgaactaccgcttttcctg

SEQ ID NO: 1826995 - DNA, 25 bp, Homo sapien
tcccttgctggtccattaatgccag

SEQ ID NO: 1826996 - DNA, 25 bp, Homo sapien
ctacgtgaactaccgcttttcctgc

SEQ ID NO: 1826997 - DNA, 25 bp, Homo sapien
ccggagtgatacagagctgctcttt

SEQ ID NO: 1826998 - DNA, 25 bp, Homo sapien
tcagggagatgtcgagttttagcac

SEQ ID NO: 1826999 - DNA, 25 bp, Homo sapien
tagcacttcacagccggagtgatac

SEQ ID NO: 1827000 - DNA, 25 bp, Homo sapien
tccaggctagctctgtcttttgctt

SEQ ID NO: 1827001 - DNA, 25 bp, Homo sapien
aaagggagcctcaacttgaatgcac

SEQ ID NO: 1827002 - DNA, 25 bp, Homo sapien
taacactgcgcttctggcggtgact

SEQ ID NO: 1827003 - DNA, 25 bp, Homo sapien
tgtagcagtcttggcttaagtaaat

SEQ ID NO: 1827004 - DNA, 25 bp, Homo sapien
gcaaaggattttgaatagcttccat

SEQ ID NO: 1827005 - DNA, 25 bp, Homo sapien
tcaggcgcctatattgagagcagca

SEQ ID NO: 1827006 - DNA, 25 bp, Homo sapien
gatcccacaaactgatcaggcgcct

SEQ ID NO: 1827007 - DNA, 25 bp, Homo sapien
cacaaactgatcaggcgcctatatt

SEQ ID NO: 1827008 - DNA, 25 bp, Homo sapien
ctgatcaggcgcctatattgagagc

SEQ ID NO: 1827009 - DNA, 25 bp, Homo sapien
ttatccttttcattcctttatccca

SEQ ID NO: 1827010 - DNA, 25 bp, Homo sapien
tatccttttcattcctttatcccac

SEQ ID NO: 1827011 - DNA, 25 bp, Homo sapien
atctttatttatccttttcattcct

SEQ ID NO: 1827012 - DNA, 25 bp, Homo sapien
tatttatccttttcattcctttatc

SEQ ID NO: 1827013 - DNA, 25 bp, Homo sapien
tgcaaattgcggagaacagctggaa

SEQ ID NO: 1827014 - DNA, 25 bp, Homo sapien
gaagccacgtcagagcggcacaggc

SEQ ID NO: 1827015 - DNA, 25 bp, Homo sapien
gcatcgcagagatcacaacgggcat

SEQ ID NO: 1827016 - DNA, 25 bp, Homo sapien
tgatgctgaccgctggctccgagca

SEQ ID NO: 1827017 - DNA, 25 bp, Homo sapien
aaaacactaagaacagttgcattca

SEQ ID NO: 1827018 - DNA, 25 bp, Homo sapien
gggccgcctcccagcttccacagta

SEQ ID NO: 1827019 - DNA, 25 bp, Homo sapien
tcccagcttccacagtagtttggcc

SEQ ID NO: 1827020 - DNA, 25 bp, Homo sapien
gcttccacagtagtttggccttaaa

SEQ ID NO: 1827021 - DNA, 25 bp, Homo sapien
tctgatggccaaaaacgtaggcggt

SEQ ID NO: 1827022 - DNA, 25 bp, Homo sapien
tactaaatacgtccaggtgcctgaa

SEQ ID NO: 1827023 - DNA, 25 bp, Homo sapien
tagtcctaggtcaaagtcagctgtg

SEQ ID NO: 1827024 - DNA, 25 bp, Homo sapien
cactaaagatgtgggtggccttgac

SEQ ID NO: 1827025 - DNA, 25 bp, Homo sapien
cagtgctgtagcaaagcctcgggaa

SEQ ID NO: 1827026 - DNA, 25 bp, Homo sapien
tgcacctatgagtagcctgggcttc

SEQ ID NO: 1827027 - DNA, 25 bp, Homo sapien
ccagcattcccctcgtgtttggaca

SEQ ID NO: 1827028 - DNA, 25 bp, Homo sapien
gaagcagggcgactctttccaggaa

SEQ ID NO: 1827029 - DNA, 25 bp, Homo sapien
cagggctaccttaacaccgcagtaa

SEQ ID NO: 1827030 - DNA, 25 bp, Homo sapien
cgtagacttatgaggaatggcttcc

SEQ ID NO: 1827031 - DNA, 25 bp, Homo sapien
tctcgtgcaaatacccagcagggat

SEQ ID NO: 1827032 - DNA, 25 bp, Homo sapien
cttgaccttgcagaaccacttggct

SEQ ID NO: 1827033 - DNA, 25 bp, Homo sapien
catcatcttgatggtgccgcgcagg

SEQ ID NO: 1827034 - DNA, 25 bp, Homo sapien
tgaaggccttctccggaagcaggga

SEQ ID NO: 1827035 - DNA, 25 bp, Homo sapien
tgcttcatgcgcacgaaagccggca

SEQ ID NO: 1827036 - DNA, 25 bp, Homo sapien
caagtcgtcgcagctccagttgtac

SEQ ID NO: 1827037 - DNA, 25 bp, Homo sapien
gcggaaagcgtccagcggcgtggcc

SEQ ID NO: 1827038 - DNA, 25 bp, Homo sapien
gccgtgcggtcgcagatgacgttct

SEQ ID NO: 1827039 - DNA, 25 bp, Homo sapien
cggtcgcagatgacgttcttgccga

SEQ ID NO: 1827040 - DNA, 25 bp, Homo sapien
cggcgtggccgtgcggtcgcagatg

SEQ ID NO: 1827041 - DNA, 25 bp, Homo sapien
gcccacagtcttttgcaacattcat

SEQ ID NO: 1827042 - DNA, 25 bp, Homo sapien
ctttgtgcccacagtcttttgcaac

SEQ ID NO: 1827043 - DNA, 25 bp, Homo sapien
ttgtgcccacagtcttttgcaacat

SEQ ID NO: 1827044 - DNA, 25 bp, Homo sapien
gtgcccacagtcttttgcaacattc

SEQ ID NO: 1827045 - DNA, 25 bp, Homo sapien
gaatcttgaaagcttcagaagcccg

SEQ ID NO: 1827046 - DNA, 25 bp, Homo sapien
tcatgggcccatcccagttcctgag

SEQ ID NO: 1827047 - DNA, 25 bp, Homo sapien
ccagagagctggtagaaggttctgc

SEQ ID NO: 1827048 - DNA, 25 bp, Homo sapien
tcctccaaagtctaggggagctggc

SEQ ID NO: 1827049 - DNA, 25 bp, Homo sapien
tgggcaaggggcttcccattcacac

SEQ ID NO: 1827050 - DNA, 25 bp, Homo sapien
gctctgttgtcccacagagcaggta

SEQ ID NO: 1827051 - DNA, 25 bp, Homo sapien
gggcaaggggcttcccattcacacc

SEQ ID NO: 1827052 - DNA, 25 bp, Homo sapien
acagagcaggtacccgttgctgccc

SEQ ID NO: 1827053 - DNA, 25 bp, Homo sapien
caaaacggatgctagttctgcaggc

SEQ ID NO: 1827054 - DNA, 25 bp, Homo sapien
catttgcagaaggtagagacggctt

SEQ ID NO: 1827055 - DNA, 25 bp, Homo sapien
tagaggagaccaatcaggaaaggcg

SEQ ID NO: 1827056 - DNA, 25 bp, Homo sapien
cagaggcaatgctactttccacgag

SEQ ID NO: 1827057 - DNA, 25 bp, Homo sapien
tttagtctacacaaccaggtacttg

SEQ ID NO: 1827058 - DNA, 25 bp, Homo sapien
tgcctctgattccacaactcgatag

SEQ ID NO: 1827059 - DNA, 25 bp, Homo sapien
gatctgctcatagcacaaatggtac

SEQ ID NO: 1827060 - DNA, 25 bp, Homo sapien
taaaagaggccatttgaagagacta

SEQ ID NO: 1827061 - DNA, 25 bp, Homo sapien
gcacctgtaatgcacctggctcatt

SEQ ID NO: 1827062 - DNA, 25 bp, Homo sapien
tatacatattgctggggtatagtga

SEQ ID NO: 1827063 - DNA, 25 bp, Homo sapien
cactgcacccatgccaaagaaatca

SEQ ID NO: 1827064 - DNA, 25 bp, Homo sapien
gaaccactgcacccatgccaaagaa

SEQ ID NO: 1827065 - DNA, 25 bp, Homo sapien
ggattcacagtgcaccccctggatc

SEQ ID NO: 1827066 - DNA, 25 bp, Homo sapien
ctccacgcttggacaagccaggatt

SEQ ID NO: 1827067 - DNA, 25 bp, Homo sapien
acagagccagagtctcataagccac

SEQ ID NO: 1827068 - DNA, 25 bp, Homo sapien
cactacccccatagaaagagccaat

SEQ ID NO: 1827069 - DNA, 25 bp, Homo sapien
ggcagatgctcttatgaatgaaaac

SEQ ID NO: 1827070 - DNA, 25 bp, Homo sapien
tgggcagatgctcttatgaatgaaa

SEQ ID NO: 1827071 - DNA, 25 bp, Homo sapien
ccagatctgcccacgtgaatatcat

SEQ ID NO: 1827072 - DNA, 25 bp, Homo sapien
ccccagatctgcccacgtgaatatc

SEQ ID NO: 1827073 - DNA, 25 bp, Homo sapien
ccgtgtaggtatctcaagacaggac

SEQ ID NO: 1827074 - DNA, 25 bp, Homo sapien
gacagtctaatctcgggcgtgtgcc

SEQ ID NO: 1827075 - DNA, 25 bp, Homo sapien
tgtatctgctcagtaaccgggagag

SEQ ID NO: 1827076 - DNA, 25 bp, Homo sapien
cagataacctggttgcttggcaacc

SEQ ID NO: 1827077 - DNA, 25 bp, Homo sapien
taaggagcctcctatccgtcaggtc

SEQ ID NO: 1827078 - DNA, 25 bp, Homo sapien
tcagtgttcagaatcctcggttccc

SEQ ID NO: 1827079 - DNA, 25 bp, Homo sapien
catgatgtcgagttgttctaaggag

SEQ ID NO: 1827080 - DNA, 25 bp, Homo sapien
cttgtatttccagatcctaaaggat

SEQ ID NO: 1827081 - DNA, 25 bp, Homo sapien
aaggaatctcgcgtacttcggagga

SEQ ID NO: 1827082 - DNA, 25 bp, Homo sapien
gccagcgtcagcagaagtgccactt

SEQ ID NO: 1827083 - DNA, 25 bp, Homo sapien
gaggacatgcggctgtccctgccag

SEQ ID NO: 1827084 - DNA, 25 bp, Homo sapien
gcgtaggtgaaagctgactccaggt

SEQ ID NO: 1827085 - DNA, 25 bp, Homo sapien
tgctccccaacgatcctcattctgc

SEQ ID NO: 1827086 - DNA, 25 bp, Homo sapien
ctctgctccccaacgatcctcattc

SEQ ID NO: 1827087 - DNA, 25 bp, Homo sapien
ctccccaacgatcctcattctgcca

SEQ ID NO: 1827088 - DNA, 25 bp, Homo sapien
tctgctccccaacgatcctcattct

SEQ ID NO: 1827089 - DNA, 25 bp, Homo sapien
taatcagcatatatgggcatgtggc

SEQ ID NO: 1827090 - DNA, 25 bp, Homo sapien
accatttcctcattggcaaagcgag

SEQ ID NO: 1827091 - DNA, 25 bp, Homo sapien
gcgagatgggactacaacagctgtt

SEQ ID NO: 1827092 - DNA, 25 bp, Homo sapien
tcatgtgcacccctggtctcgtgtc

SEQ ID NO: 1827093 - DNA, 25 bp, Homo sapien
tcctttgctacctgcctctccagtc

SEQ ID NO: 1827094 - DNA, 25 bp, Homo sapien
ccctcctttgctacctgcctctcca

SEQ ID NO: 1827095 - DNA, 25 bp, Homo sapien
cttccctcctttgctacctgcctct

SEQ ID NO: 1827096 - DNA, 25 bp, Homo sapien
cctttgctacctgcctctccagtcc

SEQ ID NO: 1827097 - DNA, 25 bp, Homo sapien
ctccatctgaggactcgggcctgcc

SEQ ID NO: 1827098 - DNA, 25 bp, Homo sapien
gaggactcgggcctgccgtgagaaa

SEQ ID NO: 1827099 - DNA, 25 bp, Homo sapien
tgaggactcgggcctgccgtgagaa

SEQ ID NO: 1827100 - DNA, 25 bp, Homo sapien
catctgaggactcgggcctgccgtg

SEQ ID NO: 1827101 - DNA, 25 bp, Homo sapien
cccgggcctcaaagactacatcttc

SEQ ID NO: 1827102 - DNA, 25 bp, Homo sapien
cagctcccgggcctcaaagactaca

SEQ ID NO: 1827103 - DNA, 25 bp, Homo sapien
ctcccgggcctcaaagactacatct

SEQ ID NO: 1827104 - DNA, 25 bp, Homo sapien
agctcccgggcctcaaagactacat

SEQ ID NO: 1827105 - DNA, 25 bp, Homo sapien
gaatatctcttcttgggtcagcacc

SEQ ID NO: 1827106 - DNA, 25 bp, Homo sapien
cccaaaggtgggagcacttggcttt

SEQ ID NO: 1827107 - DNA, 25 bp, Homo sapien
tcggagattgcccaaccaaagagca

SEQ ID NO: 1827108 - DNA, 25 bp, Homo sapien
gaaaactataatctggtgaaggcat

SEQ ID NO: 1827109 - DNA, 25 bp, Homo sapien
gaggctctacctaatgcttggtaaa

SEQ ID NO: 1827110 - DNA, 25 bp, Homo sapien
gaacaatttgcaagctcagagtcag

SEQ ID NO: 1827111 - DNA, 25 bp, Homo sapien
gaccagactaaccaacataacgaaa

SEQ ID NO: 1827112 - DNA, 25 bp, Homo sapien
catctttataggaaggaggctctac

SEQ ID NO: 1827113 - DNA, 25 bp, Homo sapien
tacagtggctgcactgatgaaggcc

SEQ ID NO: 1827114 - DNA, 25 bp, Homo sapien
agcccggtttcctcagacgcagtaa

SEQ ID NO: 1827115 - DNA, 25 bp, Homo sapien
gtaacactgtgtcaccagaaaggcc

SEQ ID NO: 1827116 - DNA, 25 bp, Homo sapien
atccagtctgtgataggagccagtc

SEQ ID NO: 1827117 - DNA, 25 bp, Homo sapien
gaaaaaccaacgtgatcctctctaa

SEQ ID NO: 1827118 - DNA, 25 bp, Homo sapien
tctctaatgaatggtccccacagtg

SEQ ID NO: 1827119 - DNA, 25 bp, Homo sapien
cggaggtgacctgccagtcttaaaa

SEQ ID NO: 1827120 - DNA, 25 bp, Homo sapien
tcaaaagaagaggtccgatccaaga

SEQ ID NO: 1827121 - DNA, 25 bp, Homo sapien
gcaggagaataattcccggaatatg

SEQ ID NO: 1827122 - DNA, 25 bp, Homo sapien
gattctttcaaccatagcatgagta

SEQ ID NO: 1827123 - DNA, 25 bp, Homo sapien
tgagtaacaatatcagttgccatgt

SEQ ID NO: 1827124 - DNA, 25 bp, Homo sapien
gaatggcttctcgtaagtgcagcag

SEQ ID NO: 1827125 - DNA, 25 bp, Homo sapien
ggagagcacgtacactcctgcaggc

SEQ ID NO: 1827126 - DNA, 25 bp, Homo sapien
gagagcacgtacactcctgcaggca

SEQ ID NO: 1827127 - DNA, 25 bp, Homo sapien
agagcacgtacactcctgcaggcat

SEQ ID NO: 1827128 - DNA, 25 bp, Homo sapien
cattcagtgagtcggtagcagaacc

SEQ ID NO: 1827129 - DNA, 25 bp, Homo sapien
ccatgagtgtcgcaggttgccctga

SEQ ID NO: 1827130 - DNA, 25 bp, Homo sapien
gaggcaagcggctctccatgagtgt

SEQ ID NO: 1827131 - DNA, 25 bp, Homo sapien
tgtcatgcgcaaagctcgaggcaag

SEQ ID NO: 1827132 - DNA, 25 bp, Homo sapien
ggaaagcaggttagtcaggctatga

SEQ ID NO: 1827133 - DNA, 25 bp, Homo sapien
gctttctaggcagccagcagacgtg

SEQ ID NO: 1827134 - DNA, 25 bp, Homo sapien
caggctatgattcagtctccagctc

SEQ ID NO: 1827135 - DNA, 25 bp, Homo sapien
cacacgatgcgagatgcaaatatca

SEQ ID NO: 1827136 - DNA, 25 bp, Homo sapien
aatcagaggcctagagaatttgcta

SEQ ID NO: 1827137 - DNA, 25 bp, Homo sapien
ggttctcagaagagcaggctacagg

SEQ ID NO: 1827138 - DNA, 25 bp, Homo sapien
tacatgggagcacagaagtcaagca

SEQ ID NO: 1827139 - DNA, 25 bp, Homo sapien
caaaagttaagtgcagggtacatgg

SEQ ID NO: 1827140 - DNA, 25 bp, Homo sapien
gcatttactatgtcctggcagtgga

SEQ ID NO: 1827141 - DNA, 25 bp, Homo sapien
gaaactgagctcaccgggcacagta

SEQ ID NO: 1827142 - DNA, 25 bp, Homo sapien
ccttctagcatatgtgggaaccacc

SEQ ID NO: 1827143 - DNA, 25 bp, Homo sapien
cataggcttagagtatctgactgtc

SEQ ID NO: 1827144 - DNA, 25 bp, Homo sapien
cacggccctcatccatgacccacag

SEQ ID NO: 1827145 - DNA, 25 bp, Homo sapien
catccacggccctcatccatgaccc

SEQ ID NO: 1827146 - DNA, 25 bp, Homo sapien
atccacggccctcatccatgaccca

SEQ ID NO: 1827147 - DNA, 25 bp, Homo sapien
tccacggccctcatccatgacccac

SEQ ID NO: 1827148 - DNA, 25 bp, Homo sapien
agacagtgcatgagtcacagacagc

SEQ ID NO: 1827149 - DNA, 25 bp, Homo sapien
cacagacagtgcatgagtcacagac

SEQ ID NO: 1827150 - DNA, 25 bp, Homo sapien
tctctgccccgcaacccactgatga

SEQ ID NO: 1827151 - DNA, 25 bp, Homo sapien
tgccccgcaacccactgatgatatt

SEQ ID NO: 1827152 - DNA, 25 bp, Homo sapien
cagtgagcaatacacccagagaggt

SEQ ID NO: 1827153 - DNA, 25 bp, Homo sapien
gtccctgtaagaacatagcctcctg

SEQ ID NO: 1827154 - DNA, 25 bp, Homo sapien
tataaaaacacctgggatgcgaaca

SEQ ID NO: 1827155 - DNA, 25 bp, Homo sapien
taccacgaatgggaaagccaccttg

SEQ ID NO: 1827156 - DNA, 25 bp, Homo sapien
cctcagtaagtgtgctgctctcttg

SEQ ID NO: 1827157 - DNA, 25 bp, Homo sapien
cagccctcggccctctttgtagtgt

SEQ ID NO: 1827158 - DNA, 25 bp, Homo sapien
ctctcttgatcaggagcagccctcg

SEQ ID NO: 1827159 - DNA, 25 bp, Homo sapien
tcttgtgcatggtgggtcctcagta

SEQ ID NO: 1827160 - DNA, 25 bp, Homo sapien
ctctccctcacatgaactccttgcc

SEQ ID NO: 1827161 - DNA, 25 bp, Homo sapien
gcacaaatcaatgggctgtgtgagc

SEQ ID NO: 1827162 - DNA, 25 bp, Homo sapien
tgtgtgagcctcacacccaattcat

SEQ ID NO: 1827163 - DNA, 25 bp, Homo sapien
tcttcagtccggtcaactgtgagca

SEQ ID NO: 1827164 - DNA, 25 bp, Homo sapien
cagcacaaatcaatgggctgtgtga

SEQ ID NO: 1827165 - DNA, 25 bp, Homo sapien
cttccaagaagtcaaccgcctcgtt

SEQ ID NO: 1827166 - DNA, 25 bp, Homo sapien
aagtacctgcagctgggaacagcca

SEQ ID NO: 1827167 - DNA, 25 bp, Homo sapien
tacctaactgttctcctactgtgga

SEQ ID NO: 1827168 - DNA, 25 bp, Homo sapien
gctgtgacaacctggataagccact

SEQ ID NO: 1827169 - DNA, 25 bp, Homo sapien
ctgaatccaggtcattcgtggaatt

SEQ ID NO: 1827170 - DNA, 25 bp, Homo sapien
caggtcattcgtggaattcaacaga

SEQ ID NO: 1827171 - DNA, 25 bp, Homo sapien
ccctatggagcccttgctactgctg

SEQ ID NO: 1827172 - DNA, 25 bp, Homo sapien
ctatggagcccttgctactgctgtc

SEQ ID NO: 1827173 - DNA, 25 bp, Homo sapien
agttggcctgtgtctcctattatgg

SEQ ID NO: 1827174 - DNA, 25 bp, Homo sapien
agaatccctgttggtaacagcacca

SEQ ID NO: 1827175 - DNA, 25 bp, Homo sapien
tgtgtctcctattatggccctccag

SEQ ID NO: 1827176 - DNA, 25 bp, Homo sapien
gtaaagaggccactggtcacatccc

SEQ ID NO: 1827177 - DNA, 25 bp, Homo sapien
catcctgtgggatacatgcagtccc

SEQ ID NO: 1827178 - DNA, 25 bp, Homo sapien
gttcttagccatgtacacttgccaa

SEQ ID NO: 1827179 - DNA, 25 bp, Homo sapien
acattggaggttggccatgagacgt

SEQ ID NO: 1827180 - DNA, 25 bp, Homo sapien
gatatggcctttgttcatacagacc

SEQ ID NO: 1827181 - DNA, 25 bp, Homo sapien
ttccaaaagtgatgagtaggttctg

SEQ ID NO: 1827182 - DNA, 25 bp, Homo sapien
catggtaagtactccatagaatgct

SEQ ID NO: 1827183 - DNA, 25 bp, Homo sapien
cacaccaaatctggcacatggtaag

SEQ ID NO: 1827184 - DNA, 25 bp, Homo sapien
ttctggatagatgatgagttctctc

SEQ ID NO: 1827185 - DNA, 25 bp, Homo sapien
tctaactccccatgactgagaatat

SEQ ID NO: 1827186 - DNA, 25 bp, Homo sapien
taactccccatgactgagaatattt

SEQ ID NO: 1827187 - DNA, 25 bp, Homo sapien
ctccccatgactgagaatatttcct

SEQ ID NO: 1827188 - DNA, 25 bp, Homo sapien
cttttctaactccccatgactgaga

SEQ ID NO: 1827189 - DNA, 25 bp, Homo sapien
ttgaaaaaccgataaatactgcagt

SEQ ID NO: 1827190 - DNA, 25 bp, Homo sapien
cactcagtaaatgggtgaggaatac

SEQ ID NO: 1827191 - DNA, 25 bp, Homo sapien
gcacctgcgcgcgatgaacgcatct

SEQ ID NO: 1827192 - DNA, 25 bp, Homo sapien
tatctgtaatcttgactgggtctgg

SEQ ID NO: 1827193 - DNA, 25 bp, Homo sapien
agggcaattgccggctcatgaagca

SEQ ID NO: 1827194 - DNA, 25 bp, Homo sapien
aagaagggcaattgccggctcatga

SEQ ID NO: 1827195 - DNA, 25 bp, Homo sapien
agaagggcaattgccggctcatgaa

SEQ ID NO: 1827196 - DNA, 25 bp, Homo sapien
aagggcaattgccggctcatgaagc

SEQ ID NO: 1827197 - DNA, 25 bp, Homo sapien
gactctccaagagcagcatcgtggg

SEQ ID NO: 1827198 - DNA, 25 bp, Homo sapien
gacaggctgcatccctaagggcttg

SEQ ID NO: 1827199 - DNA, 25 bp, Homo sapien
aaatgcagcattgtggtccccgtgg

SEQ ID NO: 1827200 - DNA, 25 bp, Homo sapien
tcagctgaacagaaccacgtggcat

SEQ ID NO: 1827201 - DNA, 25 bp, Homo sapien
ggaatcatggggggaggtgaaaagc

SEQ ID NO: 1827202 - DNA, 25 bp, Homo sapien
aggcctcggaatcatggggggaggt

SEQ ID NO: 1827203 - DNA, 25 bp, Homo sapien
tcggaatcatggggggaggtgaaaa

SEQ ID NO: 1827204 - DNA, 25 bp, Homo sapien
cctcggaatcatggggggaggtgaa

SEQ ID NO: 1827205 - DNA, 25 bp, Homo sapien
cttctgaatgctgacaggtgagaaa

SEQ ID NO: 1827206 - DNA, 25 bp, Homo sapien
catttccatgagctctcacttctga

SEQ ID NO: 1827207 - DNA, 25 bp, Homo sapien
aagggatttgaaacaccagtgacac

SEQ ID NO: 1827208 - DNA, 25 bp, Homo sapien
tactctgagagagcctcacaatcat

SEQ ID NO: 1827209 - DNA, 25 bp, Homo sapien
catcggatgtaagcaccaaaccagg

SEQ ID NO: 1827210 - DNA, 25 bp, Homo sapien
ggctgggcacccttcaaggcatcct

SEQ ID NO: 1827211 - DNA, 25 bp, Homo sapien
tctagtaaattattgctgcagccag

SEQ ID NO: 1827212 - DNA, 25 bp, Homo sapien
tgtttaccatagcatgcccctgact

SEQ ID NO: 1827213 - DNA, 25 bp, Homo sapien
tttccgctggcgtggcaatgctggc

SEQ ID NO: 1827214 - DNA, 25 bp, Homo sapien
gggcttcctcggctctacgacaaat

SEQ ID NO: 1827215 - DNA, 25 bp, Homo sapien
tcaagtccaagtgcatcatgagcat

SEQ ID NO: 1827216 - DNA, 25 bp, Homo sapien
tagatccagaagagacctcaagcaa

SEQ ID NO: 1827217 - DNA, 25 bp, Homo sapien
aaaagggccaattgctccaggtcct

SEQ ID NO: 1827218 - DNA, 25 bp, Homo sapien
gaaaagggccaattgctccaggtcc

SEQ ID NO: 1827219 - DNA, 25 bp, Homo sapien
gaagcaactgctgacaccatgaaga

SEQ ID NO: 1827220 - DNA, 25 bp, Homo sapien
tgaagcaactgctgacaccatgaag

SEQ ID NO: 1827221 - DNA, 25 bp, Homo sapien
taaggtccataagaatgaatggcat

SEQ ID NO: 1827222 - DNA, 25 bp, Homo sapien
gaatggcatgctaccaactgtgtaa

SEQ ID NO: 1827223 - DNA, 25 bp, Homo sapien
tcaagctaatattgttgcatgacaa

SEQ ID NO: 1827224 - DNA, 25 bp, Homo sapien
gttgcatgacaaaagtaaggtccat

SEQ ID NO: 1827225 - DNA, 25 bp, Homo sapien
gcactgccagatactccatacctgg

SEQ ID NO: 1827226 - DNA, 25 bp, Homo sapien
gctgggcatgtcacgccaatcagct

SEQ ID NO: 1827227 - DNA, 25 bp, Homo sapien
tggactggaacctagttcagaaact

SEQ ID NO: 1827228 - DNA, 25 bp, Homo sapien
gaaacgatgacatgaccaggtctct

SEQ ID NO: 1827229 - DNA, 25 bp, Homo sapien
caggtcctctatcgcacccaagaaa

SEQ ID NO: 1827230 - DNA, 25 bp, Homo sapien
agaaacaaacgaccctagcagggcg

SEQ ID NO: 1827231 - DNA, 25 bp, Homo sapien
agaaaacccgacacacgtgtgcggc

SEQ ID NO: 1827232 - DNA, 25 bp, Homo sapien
tccagcgcagacgaaataattccag

SEQ ID NO: 1827233 - DNA, 25 bp, Homo sapien
tccccggaacacacgccttctccag

SEQ ID NO: 1827234 - DNA, 25 bp, Homo sapien
ctagttcggatccccggaacacacg

SEQ ID NO: 1827235 - DNA, 25 bp, Homo sapien
tcggatccccggaacacacgccttc

SEQ ID NO: 1827236 - DNA, 25 bp, Homo sapien
tagttcggatccccggaacacacgc

SEQ ID NO: 1827237 - DNA, 25 bp, Homo sapien
gggaagcgcgtccaagtggtgccag

SEQ ID NO: 1827238 - DNA, 25 bp, Homo sapien
ggcagcgtagatgcagggtaagctt

SEQ ID NO: 1827239 - DNA, 25 bp, Homo sapien
gctctgagtcggatctgggatctca

SEQ ID NO: 1827240 - DNA, 25 bp, Homo sapien
aggagggagctctgagtcggatctg

SEQ ID NO: 1827241 - DNA, 25 bp, Homo sapien
gaggatgcggggtaggggtcgctca

SEQ ID NO: 1827242 - DNA, 25 bp, Homo sapien
cggaggatgcggggtaggggtcgct

SEQ ID NO: 1827243 - DNA, 25 bp, Homo sapien
aggatgcggggtaggggtcgctcac

SEQ ID NO: 1827244 - DNA, 25 bp, Homo sapien
ggaggatgcggggtaggggtcgctc

SEQ ID NO: 1827245 - DNA, 25 bp, Homo sapien
tttcagcagcgggatgatgacacgg

SEQ ID NO: 1827246 - DNA, 25 bp, Homo sapien
ggcggcggcaggttaatgcacacca

SEQ ID NO: 1827247 - DNA, 25 bp, Homo sapien
aagtccacgtcctgatgcagcagca

SEQ ID NO: 1827248 - DNA, 25 bp, Homo sapien
gcacctcatcaatgcggctagtgta

SEQ ID NO: 1827249 - DNA, 25 bp, Homo sapien
gttctgcttctgctcggatctccag

SEQ ID NO: 1827250 - DNA, 25 bp, Homo sapien
gctcagagccgcctggttctgcttc

SEQ ID NO: 1827251 - DNA, 25 bp, Homo sapien
ttctgctcggatctccagtccaacg

SEQ ID NO: 1827252 - DNA, 25 bp, Homo sapien
ggctgctcagagccgcctggttctg

SEQ ID NO: 1827253 - DNA, 25 bp, Homo sapien
cgcggtgcgccagccgccgtgcacc

SEQ ID NO: 1827254 - DNA, 25 bp, Homo sapien
ctgtagccaatctagccgcggtgcg

SEQ ID NO: 1827255 - DNA, 25 bp, Homo sapien
tgcaccgggcaaggcgcccgggtgc

SEQ ID NO: 1827256 - DNA, 25 bp, Homo sapien
tgtagccaatctagccgcggtgcgc

SEQ ID NO: 1827257 - DNA, 25 bp, Homo sapien
ctggagccccggctcaggctgcgct

SEQ ID NO: 1827258 - DNA, 25 bp, Homo sapien
tgactgcggcagtgtccgccacgcg

SEQ ID NO: 1827259 - DNA, 25 bp, Homo sapien
agctcggggcgcctcagaacggtga

SEQ ID NO: 1827260 - DNA, 25 bp, Homo sapien
gccggaggcttcgaagccccctgga

SEQ ID NO: 1827261 - DNA, 25 bp, Homo sapien
tgggaatgaaataatcccgcggccg

SEQ ID NO: 1827262 - DNA, 25 bp, Homo sapien
ccggactgggatcccgagctgcagc

SEQ ID NO: 1827263 - DNA, 25 bp, Homo sapien
cggcgaatcgcacagacaaacgtct

SEQ ID NO: 1827264 - DNA, 25 bp, Homo sapien
cgtcgtttgcgcagccggcgaatcg

SEQ ID NO: 1827265 - DNA, 25 bp, Homo sapien
tgaaaggcacgtcttctagctgaag

SEQ ID NO: 1827266 - DNA, 25 bp, Homo sapien
gtcatgggtcaggtcatgttcatct

SEQ ID NO: 1827267 - DNA, 25 bp, Homo sapien
cacgtcttctagctgaaggtctctg

SEQ ID NO: 1827268 - DNA, 25 bp, Homo sapien
catgggtcaggtcatgttcatctcc

SEQ ID NO: 1827269 - DNA, 25 bp, Homo sapien
tggtataatagggtaccacagcccc

SEQ ID NO: 1827270 - DNA, 25 bp, Homo sapien
tgtggtataatagggtaccacagcc

SEQ ID NO: 1827271 - DNA, 25 bp, Homo sapien
attgtggtataatagggtaccacag

SEQ ID NO: 1827272 - DNA, 25 bp, Homo sapien
tataatagggtaccacagcccctat

SEQ ID NO: 1827273 - DNA, 25 bp, Homo sapien
caatgcataggagtttaggcatcac

SEQ ID NO: 1827274 - DNA, 25 bp, Homo sapien
gcctctgtcagcctattaaggtgtg

SEQ ID NO: 1827275 - DNA, 25 bp, Homo sapien
gcgggaatgcccttacatcaatgca

SEQ ID NO: 1827276 - DNA, 25 bp, Homo sapien
tctatggctcttggagagcgggaat

SEQ ID NO: 1827277 - DNA, 25 bp, Homo sapien
cccttaaggaactcatggctttgtg

SEQ ID NO: 1827278 - DNA, 25 bp, Homo sapien
tcactgagaatacagagctaaaagc

SEQ ID NO: 1827279 - DNA, 25 bp, Homo sapien
gaactcatggctttgtgcatcaaac

SEQ ID NO: 1827280 - DNA, 25 bp, Homo sapien
tacttgtataccagctgaccagcag

SEQ ID NO: 1827281 - DNA, 25 bp, Homo sapien
taaccatcgcatattctttataaaa

SEQ ID NO: 1827282 - DNA, 25 bp, Homo sapien
tggaagttcagatcagtccagatgt

SEQ ID NO: 1827283 - DNA, 25 bp, Homo sapien
tccctctaaccatcgcatattcttt

SEQ ID NO: 1827284 - DNA, 25 bp, Homo sapien
aataggtggtctgtagtggaagttc

SEQ ID NO: 1827285 - DNA, 25 bp, Homo sapien
gcacaagctcaacatccagggccat

SEQ ID NO: 1827286 - DNA, 25 bp, Homo sapien
ctgcacaagctcaacatccagggcc

SEQ ID NO: 1827287 - DNA, 25 bp, Homo sapien
ctcctgcacaagctcaacatccagg

SEQ ID NO: 1827288 - DNA, 25 bp, Homo sapien
tcctgcacaagctcaacatccaggg

SEQ ID NO: 1827289 - DNA, 25 bp, Homo sapien
acagccatggcttatggtcccaaga

SEQ ID NO: 1827290 - DNA, 25 bp, Homo sapien
acacagccatggcttatggtcccaa

SEQ ID NO: 1827291 - DNA, 25 bp, Homo sapien
ctaacacagccatggcttatggtcc

SEQ ID NO: 1827292 - DNA, 25 bp, Homo sapien
catctaaagcaggtagcagctccaa

SEQ ID NO: 1827293 - DNA, 25 bp, Homo sapien
cagtccccacaagttgagagagtgt

SEQ ID NO: 1827294 - DNA, 25 bp, Homo sapien
gtccccacaagttgagagagtgtct

SEQ ID NO: 1827295 - DNA, 25 bp, Homo sapien
gagagagtgtctccccctcatcact

SEQ ID NO: 1827296 - DNA, 25 bp, Homo sapien
gagagtgtctccccctcatcacttt

SEQ ID NO: 1827297 - DNA, 25 bp, Homo sapien
gcaaggtccgaactgacaaaaccta

SEQ ID NO: 1827298 - DNA, 25 bp, Homo sapien
aagatgggagagaatttttgtctga

SEQ ID NO: 1827299 - DNA, 25 bp, Homo sapien
tgtacattgtattacacctgaggaa

SEQ ID NO: 1827300 - DNA, 25 bp, Homo sapien
cattgtattacacctgaggaagcca

SEQ ID NO: 1827301 - DNA, 25 bp, Homo sapien
ttgtattacacctgaggaagccaag

SEQ ID NO: 1827302 - DNA, 25 bp, Homo sapien
tcaaggtgaatgataccattcgtat

SEQ ID NO: 1827303 - DNA, 25 bp, Homo sapien
gataccattcgtattgatttggaga

SEQ ID NO: 1827304 - DNA, 25 bp, Homo sapien
gattacttgatttcatcaagttaca

SEQ ID NO: 1827305 - DNA, 25 bp, Homo sapien
acttgatttcatcaagttacactgg

SEQ ID NO: 1827306 - DNA, 25 bp, Homo sapien
tgtgtatggtgactgaaggtgctaa

SEQ ID NO: 1827307 - DNA, 25 bp, Homo sapien
gtgtatggtgactgaaggtgctaac

SEQ ID NO: 1827308 - DNA, 25 bp, Homo sapien
ctgtgtatggtgactgaaggtgcta

SEQ ID NO: 1827309 - DNA, 25 bp, Homo sapien
tgacgtgtttcacatgaaagatgcc

SEQ ID NO: 1827310 - DNA, 25 bp, Homo sapien
tgaggaaagggtatccgcctcacca

SEQ ID NO: 1827311 - DNA, 25 bp, Homo sapien
gtgtttcacatgaaagatgccaatg

SEQ ID NO: 1827312 - DNA, 25 bp, Homo sapien
ggcaccctggatcttttgacgtgtt

SEQ ID NO: 1827313 - DNA, 25 bp, Homo sapien
gacaagagactggtggccaaacaga

SEQ ID NO: 1827314 - DNA, 25 bp, Homo sapien
caagagactggtggccaaacagagc

SEQ ID NO: 1827315 - DNA, 25 bp, Homo sapien
agacaagagactggtggccaaacag

SEQ ID NO: 1827316 - DNA, 25 bp, Homo sapien
agagactggtggccaaacagagcac

SEQ ID NO: 1827317 - DNA, 25 bp, Homo sapien
ttccctccaaaatcaccacactgcc

SEQ ID NO: 1827318 - DNA, 25 bp, Homo sapien
tccctccaaaatcaccacactgcct

SEQ ID NO: 1827319 - DNA, 25 bp, Homo sapien
tgtgcatgcccagataaggagcttg

SEQ ID NO: 1827320 - DNA, 25 bp, Homo sapien
cattaggtcctgcaaacgagaggca

SEQ ID NO: 1827321 - DNA, 25 bp, Homo sapien
ggagcttggacatctctcacaggaa

SEQ ID NO: 1827322 - DNA, 25 bp, Homo sapien
tatattgatacaaaccagggctctc

SEQ ID NO: 1827323 - DNA, 25 bp, Homo sapien
gaaggctacatatcgggcctgtgga

SEQ ID NO: 1827324 - DNA, 25 bp, Homo sapien
taaaatctcaactgggataagtgcc

SEQ ID NO: 1827325 - DNA, 25 bp, Homo sapien
gatggaatataatgccccagaagtg

SEQ ID NO: 1827326 - DNA, 25 bp, Homo sapien
gacaagggacctcatgcagttgtga

SEQ ID NO: 1827327 - DNA, 25 bp, Homo sapien
aaacctctgagttgctggtaacacc

SEQ ID NO: 1827328 - DNA, 25 bp, Homo sapien
tctgagcgatttctccaggactgcc

SEQ ID NO: 1827329 - DNA, 25 bp, Homo sapien
agaataagcaccatacacgttaggg

SEQ ID NO: 1827330 - DNA, 25 bp, Homo sapien
aaacagcagccggatgtgaggccct

SEQ ID NO: 1827331 - DNA, 25 bp, Homo sapien
gcaggagtcttcacccagggtaact

SEQ ID NO: 1827332 - DNA, 25 bp, Homo sapien
aatggtgccttgtcacccttctgac

SEQ ID NO: 1827333 - DNA, 25 bp, Homo sapien
gaaaagcagatacatgttggcacaa

SEQ ID NO: 1827334 - DNA, 25 bp, Homo sapien
tgtaaccttgtggaaactagaacca

SEQ ID NO: 1827335 - DNA, 25 bp, Homo sapien
gggcttgctgcgacctcacgtcgtg

SEQ ID NO: 1827336 - DNA, 25 bp, Homo sapien
tcagaggtgacccatctggatgtac

SEQ ID NO: 1827337 - DNA, 25 bp, Homo sapien
tatgtctagtggtgggtcatgccct

SEQ ID NO: 1827338 - DNA, 25 bp, Homo sapien
gagagctcgcccactgtgatttatg

SEQ ID NO: 1827339 - DNA, 25 bp, Homo sapien
gaggaaattagaaatcgcccatagt

SEQ ID NO: 1827340 - DNA, 25 bp, Homo sapien
tccagaaatagttaccgttagcagt

SEQ ID NO: 1827341 - DNA, 25 bp, Homo sapien
gactactttcaaactacaagtggca

SEQ ID NO: 1827342 - DNA, 25 bp, Homo sapien
gagtgagcaaacagcagcctttggg

SEQ ID NO: 1827343 - DNA, 25 bp, Homo sapien
tgtggaacgactcttcctgaagccc

SEQ ID NO: 1827344 - DNA, 25 bp, Homo sapien
caacaaggtagaacatcacgatgag

SEQ ID NO: 1827345 - DNA, 25 bp, Homo sapien
caaagaagagacctggagctagtga

SEQ ID NO: 1827346 - DNA, 25 bp, Homo sapien
gctacattacctcagtgaacaaggg

SEQ ID NO: 1827347 - DNA, 25 bp, Homo sapien
aaaatgatgcccttaggttgggcca

SEQ ID NO: 1827348 - DNA, 25 bp, Homo sapien
tgtccagcaggtgtcacaggcctga

SEQ ID NO: 1827349 - DNA, 25 bp, Homo sapien
taactcagtgcttaggggccttgga

SEQ ID NO: 1827350 - DNA, 25 bp, Homo sapien
tcagtgcttaggggccttggaatgc

SEQ ID NO: 1827351 - DNA, 25 bp, Homo sapien
gccttggaatgcctgctgtccagca

SEQ ID NO: 1827352 - DNA, 25 bp, Homo sapien
aactacacagacatttgtgcgggtt

SEQ ID NO: 1827353 - DNA, 25 bp, Homo sapien
taaaatgactagcaagacctggccc

SEQ ID NO: 1827354 - DNA, 25 bp, Homo sapien
cagaccagcgcaattagagatgggc

SEQ ID NO: 1827355 - DNA, 25 bp, Homo sapien
tggctggagcaactgtcatataagc

SEQ ID NO: 1827356 - DNA, 25 bp, Homo sapien
aaactcgggtgcattctctagggac

SEQ ID NO: 1827357 - DNA, 25 bp, Homo sapien
gttttctgagcaccggacagcgtga

SEQ ID NO: 1827358 - DNA, 25 bp, Homo sapien
cacagcgatcacaaagggccatgtt

SEQ ID NO: 1827359 - DNA, 25 bp, Homo sapien
cacggtcggtacaaatgcatggcag

SEQ ID NO: 1827360 - DNA, 25 bp, Homo sapien
cttattaaaacaactcggctcaggg

SEQ ID NO: 1827361 - DNA, 25 bp, Homo sapien
tctgatactcgacacagagagctgg

SEQ ID NO: 1827362 - DNA, 25 bp, Homo sapien
gaaacagtcaccaagattgcctctg

SEQ ID NO: 1827363 - DNA, 25 bp, Homo sapien
gaagcgacgcgaggagctgttcatc

SEQ ID NO: 1827364 - DNA, 25 bp, Homo sapien
tttgggccgggcatgtttgcttaca

SEQ ID NO: 1827365 - DNA, 25 bp, Homo sapien
ttagtagtaatttcagattgtcgtc

SEQ ID NO: 1827366 - DNA, 25 bp, Homo sapien
cgggcatgtttgcttacacttgtaa

SEQ ID NO: 1827367 - DNA, 25 bp, Homo sapien
gattgtcgtctctgtggaaaaacca

SEQ ID NO: 1827368 - DNA, 25 bp, Homo sapien
taattcattatatgggccaggaacc

SEQ ID NO: 1827369 - DNA, 25 bp, Homo sapien
tggccgtaaggctaaaagaccaaga

SEQ ID NO: 1827370 - DNA, 25 bp, Homo sapien
gatctgagagattcaaggcaacaag

SEQ ID NO: 1827371 - DNA, 25 bp, Homo sapien
gcacaagccttcatacataattcat

SEQ ID NO: 1827372 - DNA, 25 bp, Homo sapien
tttctagtaaataagttcctgtctc

SEQ ID NO: 1827373 - DNA, 25 bp, Homo sapien
ccaacaagaggttaccagtgaaaag

SEQ ID NO: 1827374 - DNA, 25 bp, Homo sapien
aaagagctgctgtccagtttttgaa

SEQ ID NO: 1827375 - DNA, 25 bp, Homo sapien
taagttcctgtctcttgccaacaag

SEQ ID NO: 1827376 - DNA, 25 bp, Homo sapien
ggatttgcttgcctggtgagtctca

SEQ ID NO: 1827377 - DNA, 25 bp, Homo sapien
gcaaaaatggcacggactaaaagga

SEQ ID NO: 1827378 - DNA, 25 bp, Homo sapien
aactgtgccttgcaatcctagagga

SEQ ID NO: 1827379 - DNA, 25 bp, Homo sapien
tatcaggtctaaccctaatccaggg

SEQ ID NO: 1827380 - DNA, 25 bp, Homo sapien
gaagtttacatcacccacatgctaa

SEQ ID NO: 1827381 - DNA, 25 bp, Homo sapien
caggtcgggattgtaagtagcaaca

SEQ ID NO: 1827382 - DNA, 25 bp, Homo sapien
caaaactactgggactaacaggtcg

SEQ ID NO: 1827383 - DNA, 25 bp, Homo sapien
gcaatgtaaagcgacaaaaacctgt

SEQ ID NO: 1827384 - DNA, 25 bp, Homo sapien
catcagtcctagacattgtgtggcc

SEQ ID NO: 1827385 - DNA, 25 bp, Homo sapien
caagtggaggttgctttggcagatt

SEQ ID NO: 1827386 - DNA, 25 bp, Homo sapien
tgtgtggcctgtcccattgctaggg

SEQ ID NO: 1827387 - DNA, 25 bp, Homo sapien
tggcaaatgcgcaggatccaattcc

SEQ ID NO: 1827388 - DNA, 25 bp, Homo sapien
taagattaagcactatttatggctg

SEQ ID NO: 1827389 - DNA, 25 bp, Homo sapien
cataacactatatagatggacctac

SEQ ID NO: 1827390 - DNA, 25 bp, Homo sapien
gtctatagataatggtgctcaacaa

SEQ ID NO: 1827391 - DNA, 25 bp, Homo sapien
ggacctacataatatagcatggtat

SEQ ID NO: 1827392 - DNA, 25 bp, Homo sapien
taagggcatgtagttgaatccggct

SEQ ID NO: 1827393 - DNA, 25 bp, Homo sapien
tgagctgctcataggaatggcaacc

SEQ ID NO: 1827394 - DNA, 25 bp, Homo sapien
taggctgctgctacccattgcaaat

SEQ ID NO: 1827395 - DNA, 25 bp, Homo sapien
tgccgggtactcacaagtcatcagg

SEQ ID NO: 1827396 - DNA, 25 bp, Homo sapien
caggttctctctgaatcgggtcaag

SEQ ID NO: 1827397 - DNA, 25 bp, Homo sapien
aatatgctagtagactgaatgcatc

SEQ ID NO: 1827398 - DNA, 25 bp, Homo sapien
cagggatctgaatatgctagtagac

SEQ ID NO: 1827399 - DNA, 25 bp, Homo sapien
gtcaagctgatttccaactgggctg

SEQ ID NO: 1827400 - DNA, 25 bp, Homo sapien
actaatggtggtttcagatactggc

SEQ ID NO: 1827401 - DNA, 25 bp, Homo sapien
tcaggacctgtttatgcattcagta

SEQ ID NO: 1827402 - DNA, 25 bp, Homo sapien
ttgtcttctttctatgggaggcaca

SEQ ID NO: 1827403 - DNA, 25 bp, Homo sapien
tgtagcctttggcaattgacaatct

SEQ ID NO: 1827404 - DNA, 25 bp, Homo sapien
gtcaggtcccagttccctaacaaga

SEQ ID NO: 1827405 - DNA, 25 bp, Homo sapien
gatcagaactgcctaacttcatcaa

SEQ ID NO: 1827406 - DNA, 25 bp, Homo sapien
actacattttagttcctctgacata

SEQ ID NO: 1827407 - DNA, 25 bp, Homo sapien
caatgctctttccagtagatcagaa

SEQ ID NO: 1827408 - DNA, 25 bp, Homo sapien
cattctttctatggcggcctgactt

SEQ ID NO: 1827409 - DNA, 25 bp, Homo sapien
tccttagctgttcactcattgcttg

SEQ ID NO: 1827410 - DNA, 25 bp, Homo sapien
aactggcgtctcaactgacttgaat

SEQ ID NO: 1827411 - DNA, 25 bp, Homo sapien
gcagctctcgtccaaagtggatcat

SEQ ID NO: 1827412 - DNA, 25 bp, Homo sapien
agtattcagcatgcagttgagaggg

SEQ ID NO: 1827413 - DNA, 25 bp, Homo sapien
ggagtataatgaggacacgaacata

SEQ ID NO: 1827414 - DNA, 25 bp, Homo sapien
gctctcaagagtctaggatccagta

SEQ ID NO: 1827415 - DNA, 25 bp, Homo sapien
cagtgttagagggtacttatgtcag

SEQ ID NO: 1827416 - DNA, 25 bp, Homo sapien
tagtgacagcgctaaacctgagcct

SEQ ID NO: 1827417 - DNA, 25 bp, Homo sapien
gcctagaggctcaacaccagtaagt

SEQ ID NO: 1827418 - DNA, 25 bp, Homo sapien
tatgcaaagtcacacacgtttacgt

SEQ ID NO: 1827419 - DNA, 25 bp, Homo sapien
tgagggaggtcatacttaagcacct

SEQ ID NO: 1827420 - DNA, 25 bp, Homo sapien
gctaccatttaggaaaccattggat

SEQ ID NO: 1827421 - DNA, 25 bp, Homo sapien
caactccattggagtagtgatctgt

SEQ ID NO: 1827422 - DNA, 25 bp, Homo sapien
ggtgtcacaatcttccatttcgtgg

SEQ ID NO: 1827423 - DNA, 25 bp, Homo sapien
tcgtggtcatgtttagagctaccat

SEQ ID NO: 1827424 - DNA, 25 bp, Homo sapien
tacgtcttcgttaatcaactgctgc

SEQ ID NO: 1827425 - DNA, 25 bp, Homo sapien
aacaaatacatctcactcctggaac

SEQ ID NO: 1827426 - DNA, 25 bp, Homo sapien
catactcaatccactcctaggctgt

SEQ ID NO: 1827427 - DNA, 25 bp, Homo sapien
gtattcaaagccaaacatgtcgctg

SEQ ID NO: 1827428 - DNA, 25 bp, Homo sapien
cctggacagaagttatactggaggt

SEQ ID NO: 1827429 - DNA, 25 bp, Homo sapien
gctaaggatattatgaaacagcctc

SEQ ID NO: 1827430 - DNA, 25 bp, Homo sapien
tatgatccctgttaggtgctaagga

SEQ ID NO: 1827431 - DNA, 25 bp, Homo sapien
gcatttcagatggtgggcggtatca

SEQ ID NO: 1827432 - DNA, 25 bp, Homo sapien
tgtgtcatcagacccttccgttaag

SEQ ID NO: 1827433 - DNA, 25 bp, Homo sapien
tgtgacagacaacccagaaattgag

SEQ ID NO: 1827434 - DNA, 25 bp, Homo sapien
ggcaagagccttgatcaatgataaa

SEQ ID NO: 1827435 - DNA, 25 bp, Homo sapien
ttaccctcaaacattggcaagagcc

SEQ ID NO: 1827436 - DNA, 25 bp, Homo sapien
gtttggtgcccaacaaatcctcaaa

SEQ ID NO: 1827437 - DNA, 25 bp, Homo sapien
gcccctctgtgggtcacataattca

SEQ ID NO: 1827438 - DNA, 25 bp, Homo sapien
gtgagacaccctacctagcagaatg

SEQ ID NO: 1827439 - DNA, 25 bp, Homo sapien
tgcatgaagccctgaatttgtcctt

SEQ ID NO: 1827440 - DNA, 25 bp, Homo sapien
ctggtgaagttattaacttgctgtg

SEQ ID NO: 1827441 - DNA, 25 bp, Homo sapien
gttggatgactggtgtttattacta

SEQ ID NO: 1827442 - DNA, 25 bp, Homo sapien
agttctggtacattcaagttggatg

SEQ ID NO: 1827443 - DNA, 25 bp, Homo sapien
tactatggcaatatgattgatgtgc

SEQ ID NO: 1827444 - DNA, 25 bp, Homo sapien
gctcatacttggactactaaaaggt

SEQ ID NO: 1827445 - DNA, 25 bp, Homo sapien
gctaaattgtggatattcattccat

SEQ ID NO: 1827446 - DNA, 25 bp, Homo sapien
aatgtgcggtgcttcctttgcctga

SEQ ID NO: 1827447 - DNA, 25 bp, Homo sapien
ctactaaaaggtcgaggactaacag

SEQ ID NO: 1827448 - DNA, 25 bp, Homo sapien
tcgtacttcactatctgtaccattc

SEQ ID NO: 1827449 - DNA, 25 bp, Homo sapien
caaacatcgtacttcactatctgta

SEQ ID NO: 1827450 - DNA, 25 bp, Homo sapien
ggcctcccaaacatcgtacttcact

SEQ ID NO: 1827451 - DNA, 25 bp, Homo sapien
tcccaaacatcgtacttcactatct

SEQ ID NO: 1827452 - DNA, 25 bp, Homo sapien
gtataactgttgtgttgtttcaatg

SEQ ID NO: 1827453 - DNA, 25 bp, Homo sapien
tcccattcttcctgctaataccaat

SEQ ID NO: 1827454 - DNA, 25 bp, Homo sapien
agtaaacttgggtataactgttgtg

SEQ ID NO: 1827455 - DNA, 25 bp, Homo sapien
ccattcttcctgctaataccaattt

SEQ ID NO: 1827456 - DNA, 25 bp, Homo sapien
acaaatgttagccatgcaccacagt

SEQ ID NO: 1827457 - DNA, 25 bp, Homo sapien
aatgttagccatgcaccacagtgtc

SEQ ID NO: 1827458 - DNA, 25 bp, Homo sapien
tgttagccatgcaccacagtgtcct

SEQ ID NO: 1827459 - DNA, 25 bp, Homo sapien
tgaaaacaaatgttagccatgcacc

SEQ ID NO: 1827460 - DNA, 25 bp, Homo sapien
ctagaacggtctggtctgtagatct

SEQ ID NO: 1827461 - DNA, 25 bp, Homo sapien
ggcctctgctgtggcacagtaccca

SEQ ID NO: 1827462 - DNA, 25 bp, Homo sapien
ggcacagtacccatggtggactaaa

SEQ ID NO: 1827463 - DNA, 25 bp, Homo sapien
tctattcttaatggaagctaattct

SEQ ID NO: 1827464 - DNA, 25 bp, Homo sapien
gttctattcatgtactattttcgaa

SEQ ID NO: 1827465 - DNA, 25 bp, Homo sapien
tattcatgtactattttcgaaaaga

SEQ ID NO: 1827466 - DNA, 25 bp, Homo sapien
gaatacatgcttcatactacaattt

SEQ ID NO: 1827467 - DNA, 25 bp, Homo sapien
tgaaacaaggcgttaagaacctcac

SEQ ID NO: 1827468 - DNA, 25 bp, Homo sapien
ttagtggattaaaaagcttctgtgg

SEQ ID NO: 1827469 - DNA, 25 bp, Homo sapien
cagattctgaatagcatcaattgaa

SEQ ID NO: 1827470 - DNA, 25 bp, Homo sapien
agatatgtcagtatataaattagtg

SEQ ID NO: 1827471 - DNA, 25 bp, Homo sapien
tgtggataccaacagaataaatgtc

SEQ ID NO: 1827472 - DNA, 25 bp, Homo sapien
ggattttggttctccactcccgcat

SEQ ID NO: 1827473 - DNA, 25 bp, Homo sapien
ttctcgatctccgataggaaatcga

SEQ ID NO: 1827474 - DNA, 25 bp, Homo sapien
ctggattttggttctccactcccgc

SEQ ID NO: 1827475 - DNA, 25 bp, Homo sapien
gataggaaatcgatctatctgtgcc

SEQ ID NO: 1827476 - DNA, 25 bp, Homo sapien
ggatgttgcccaaaattggcatcga

SEQ ID NO: 1827477 - DNA, 25 bp, Homo sapien
cctggtgtttgaagccccacagtag

SEQ ID NO: 1827478 - DNA, 25 bp, Homo sapien
agtcttctatatcaaacacgaaagg

SEQ ID NO: 1827479 - DNA, 25 bp, Homo sapien
aattggcatcgaccacttctcctgg

SEQ ID NO: 1827480 - DNA, 25 bp, Homo sapien
gattctacagtgcattctcatttca

SEQ ID NO: 1827481 - DNA, 25 bp, Homo sapien
tatgtgcaaagatatgtcttgtagc

SEQ ID NO: 1827482 - DNA, 25 bp, Homo sapien
ggtatgaccctatctttcacataaa

SEQ ID NO: 1827483 - DNA, 25 bp, Homo sapien
gaaagatgtcctatacacactaaag

SEQ ID NO: 1827484 - DNA, 25 bp, Homo sapien
cagtgcccagaattcgaaaacagca

SEQ ID NO: 1827485 - DNA, 25 bp, Homo sapien
cataacaggtgcagaacaatctagg

SEQ ID NO: 1827486 - DNA, 25 bp, Homo sapien
tcaggattcaatggtatgggtagct

SEQ ID NO: 1827487 - DNA, 25 bp, Homo sapien
gcacagctttggtctacattcgatc

SEQ ID NO: 1827488 - DNA, 25 bp, Homo sapien
tcagcagcttggagattaatcccag

SEQ ID NO: 1827489 - DNA, 25 bp, Homo sapien
gcctgcacaggagcgatttgttaaa

SEQ ID NO: 1827490 - DNA, 25 bp, Homo sapien
aaatcatgggcatcagcctcggcaa

SEQ ID NO: 1827491 - DNA, 25 bp, Homo sapien
caaacgtgcacgatgtaatcagcag

SEQ ID NO: 1827492 - DNA, 25 bp, Homo sapien
tcactcagagtaaatttccaagccc

SEQ ID NO: 1827493 - DNA, 25 bp, Homo sapien
tgctctacatatccacttggcagac

SEQ ID NO: 1827494 - DNA, 25 bp, Homo sapien
gcttgcccaggtctagatgatctat

SEQ ID NO: 1827495 - DNA, 25 bp, Homo sapien
tgcccggcctagtctacttttcaac

SEQ ID NO: 1827496 - DNA, 25 bp, Homo sapien
cacagcttgaatactataaagtcca

SEQ ID NO: 1827497 - DNA, 25 bp, Homo sapien
ttccaagcactttacctgccacata

SEQ ID NO: 1827498 - DNA, 25 bp, Homo sapien
ggcagagacctttactacctgttga

SEQ ID NO: 1827499 - DNA, 25 bp, Homo sapien
catagtaggcctctatatagcttgg

SEQ ID NO: 1827500 - DNA, 25 bp, Homo sapien
caaagcagactatactgacaagctg

SEQ ID NO: 1827501 - DNA, 25 bp, Homo sapien
ttcaaagcagactatactgacaagc

SEQ ID NO: 1827502 - DNA, 25 bp, Homo sapien
aagcagactatactgacaagctgaa

SEQ ID NO: 1827503 - DNA, 25 bp, Homo sapien
agactatactgacaagctgaatttc

SEQ ID NO: 1827504 - DNA, 25 bp, Homo sapien
ataatctccatatttggttattttg

SEQ ID NO: 1827505 - DNA, 25 bp, Homo sapien
aagtataataatctccatatttggt

SEQ ID NO: 1827506 - DNA, 25 bp, Homo sapien
ggaagtataataatctccatatttg

SEQ ID NO: 1827507 - DNA, 25 bp, Homo sapien
ctggaagtataataatctccatatt

SEQ ID NO: 1827508 - DNA, 25 bp, Homo sapien
catcaccagtagtgaaagttggtcc

SEQ ID NO: 1827509 - DNA, 25 bp, Homo sapien
tatgtccattcttggtgtaaaagca

SEQ ID NO: 1827510 - DNA, 25 bp, Homo sapien
gattaacacaacagccaatgacatc

SEQ ID NO: 1827511 - DNA, 25 bp, Homo sapien
ttccagaagaacaaaacgaatgtcc

SEQ ID NO: 1827512 - DNA, 25 bp, Homo sapien
gccaaacagggtgtggtcttaccac

SEQ ID NO: 1827513 - DNA, 25 bp, Homo sapien
cttccttctcataagtggtactggg

SEQ ID NO: 1827514 - DNA, 25 bp, Homo sapien
caaaacaaagcatgtcaaggtaaca

SEQ ID NO: 1827515 - DNA, 25 bp, Homo sapien
acaggtctggatctcaattcatctc

SEQ ID NO: 1827516 - DNA, 25 bp, Homo sapien
cttgagcagaaagaccaattcccat

SEQ ID NO: 1827517 - DNA, 25 bp, Homo sapien
tagcatgggctgagtaatctaaaca

SEQ ID NO: 1827518 - DNA, 25 bp, Homo sapien
aaaacatggacacctattatgcagc

SEQ ID NO: 1827519 - DNA, 25 bp, Homo sapien
gcttggaaagctgtagaagttacac

SEQ ID NO: 1827520 - DNA, 25 bp, Homo sapien
ttttacaaaagtgcctagacagtcc

SEQ ID NO: 1827521 - DNA, 25 bp, Homo sapien
aaccgcctcacaacctaactcctag

SEQ ID NO: 1827522 - DNA, 25 bp, Homo sapien
aggcaaccgcctcacaacctaactc

SEQ ID NO: 1827523 - DNA, 25 bp, Homo sapien
tcaggcaaccgcctcacaacctaac

SEQ ID NO: 1827524 - DNA, 25 bp, Homo sapien
cctcacaacctaactcctagcccta

SEQ ID NO: 1827525 - DNA, 25 bp, Homo sapien
ggtatcatatatcttccctactcaa

SEQ ID NO: 1827526 - DNA, 25 bp, Homo sapien
tccccactttgtattatctttctaa

SEQ ID NO: 1827527 - DNA, 25 bp, Homo sapien
tctttctaaagcaggtatcatatat

SEQ ID NO: 1827528 - DNA, 25 bp, Homo sapien
ctactcaaaaagattgaaggcagtc

SEQ ID NO: 1827529 - DNA, 25 bp, Homo sapien
tcttcctgtgagactattctggcca

SEQ ID NO: 1827530 - DNA, 25 bp, Homo sapien
taaatttgatcttcctcaagggcag

SEQ ID NO: 1827531 - DNA, 25 bp, Homo sapien
tagtcctctgttggacagaccaggt

SEQ ID NO: 1827532 - DNA, 25 bp, Homo sapien
gaacatgttccgtagttaagtgaca

SEQ ID NO: 1827533 - DNA, 25 bp, Homo sapien
cgagaatattcagccgataaaggag

SEQ ID NO: 1827534 - DNA, 25 bp, Homo sapien
tgagaaatggtgacaatcgtgtgcc

SEQ ID NO: 1827535 - DNA, 25 bp, Homo sapien
gcagccaaatatgaggtcaagttca

SEQ ID NO: 1827536 - DNA, 25 bp, Homo sapien
tgcctgtgggacattcaaatgcaaa

SEQ ID NO: 1827537 - DNA, 25 bp, Homo sapien
ccagaaaagcttagttaatatcacc

SEQ ID NO: 1827538 - DNA, 25 bp, Homo sapien
cagattccacttttccaattagcaa

SEQ ID NO: 1827539 - DNA, 25 bp, Homo sapien
tcaccaactcaagctttaacttcag

SEQ ID NO: 1827540 - DNA, 25 bp, Homo sapien
tagcagaattcacgaaaaagcagtg

SEQ ID NO: 1827541 - DNA, 25 bp, Homo sapien
ttggatgcgtggctcgaactgacgc

SEQ ID NO: 1827542 - DNA, 25 bp, Homo sapien
ggctcgaactgacgcggcatctttt

SEQ ID NO: 1827543 - DNA, 25 bp, Homo sapien
ctggtattggatgcgtggctcgaac

SEQ ID NO: 1827544 - DNA, 25 bp, Homo sapien
tgcgtggctcgaactgacgcggcat

SEQ ID NO: 1827545 - DNA, 25 bp, Homo sapien
gagctctgaacccacatgaaggatt

SEQ ID NO: 1827546 - DNA, 25 bp, Homo sapien
tgctaaaagcgaattccaaaccagg

SEQ ID NO: 1827547 - DNA, 25 bp, Homo sapien
gaagataatgaaactcgcccaaagt

SEQ ID NO: 1827548 - DNA, 25 bp, Homo sapien
gaaacctgatctagtgtgagctctg

SEQ ID NO: 1827549 - DNA, 25 bp, Homo sapien
tctttattcccgctaacttccactc

SEQ ID NO: 1827550 - DNA, 25 bp, Homo sapien
ttattcccgctaacttccactctaa

SEQ ID NO: 1827551 - DNA, 25 bp, Homo sapien
ctgcgttttaattcctgaacctctt

SEQ ID NO: 1827552 - DNA, 25 bp, Homo sapien
cctgcgttttaattcctgaacctct

SEQ ID NO: 1827553 - DNA, 25 bp, Homo sapien
attcaatgacagtatcttctccacc

SEQ ID NO: 1827554 - DNA, 25 bp, Homo sapien
tgaattcaatgacagtatcttctcc

SEQ ID NO: 1827555 - DNA, 25 bp, Homo sapien
ctctgaattcaatgacagtatcttc

SEQ ID NO: 1827556 - DNA, 25 bp, Homo sapien
tcaatgacagtatcttctccacctc

SEQ ID NO: 1827557 - DNA, 25 bp, Homo sapien
gcttcctataattcccaactttgac

SEQ ID NO: 1827558 - DNA, 25 bp, Homo sapien
tcaagtgtgtgccacttagcccggt

SEQ ID NO: 1827559 - DNA, 25 bp, Homo sapien
accacacccactgaaattgactatt

SEQ ID NO: 1827560 - DNA, 25 bp, Homo sapien
agtgtgtgccacttagcccggttaa

SEQ ID NO: 1827561 - DNA, 25 bp, Homo sapien
gtctggacttttctgaagcactgtg

SEQ ID NO: 1827562 - DNA, 25 bp, Homo sapien
gacttttctgaagcactgtgttcca

SEQ ID NO: 1827563 - DNA, 25 bp, Homo sapien
aaggtgtctggacttttctgaagca

SEQ ID NO: 1827564 - DNA, 25 bp, Homo sapien
atcaaggtgtctggacttttctgaa

SEQ ID NO: 1827565 - DNA, 25 bp, Homo sapien
catgtcactaggatctgagtagacc

SEQ ID NO: 1827566 - DNA, 25 bp, Homo sapien
tctacatacatgtcactaggatctg

SEQ ID NO: 1827567 - DNA, 25 bp, Homo sapien
ttatctcctctacatacatgtcact

SEQ ID NO: 1827568 - DNA, 25 bp, Homo sapien
catacatgtcactaggatctgagta

SEQ ID NO: 1827569 - DNA, 25 bp, Homo sapien
tatagggcacttccaatcgggaggg

SEQ ID NO: 1827570 - DNA, 25 bp, Homo sapien
gggcaagcacaagcctaaggttgtt

SEQ ID NO: 1827571 - DNA, 25 bp, Homo sapien
ctgcaagtgcaaaacataagccaat

SEQ ID NO: 1827572 - DNA, 25 bp, Homo sapien
tgtgatatcaacacctaaggacctg

SEQ ID NO: 1827573 - DNA, 25 bp, Homo sapien
ctcagaatcgtgcctctcttccccc

SEQ ID NO: 1827574 - DNA, 25 bp, Homo sapien
agaatcgtgcctctcttcccccctt

SEQ ID NO: 1827575 - DNA, 25 bp, Homo sapien
cagaatcgtgcctctcttcccccct

SEQ ID NO: 1827576 - DNA, 25 bp, Homo sapien
tcagaatcgtgcctctcttcccccc

SEQ ID NO: 1827577 - DNA, 25 bp, Homo sapien
tgacccaccacctggagaacaatgt

SEQ ID NO: 1827578 - DNA, 25 bp, Homo sapien
agaacaatgtaacccaactccgagt

SEQ ID NO: 1827579 - DNA, 25 bp, Homo sapien
gagtccatggattcctctacccaag

SEQ ID NO: 1827580 - DNA, 25 bp, Homo sapien
gattccctcaaggtgtcctgctcct

SEQ ID NO: 1827581 - DNA, 25 bp, Homo sapien
gggtagagacgcttcagccgccgct

SEQ ID NO: 1827582 - DNA, 25 bp, Homo sapien
gcagcggcgtctcttgttcgtccac

SEQ ID NO: 1827583 - DNA, 25 bp, Homo sapien
tctcctgctcgttcagggccgagtc

SEQ ID NO: 1827584 - DNA, 25 bp, Homo sapien
tgaacttgtccttcgggctccagga

SEQ ID NO: 1827585 - DNA, 25 bp, Homo sapien
gccaccagagctggggtcggggctc

SEQ ID NO: 1827586 - DNA, 25 bp, Homo sapien
tgcccgccaccagagctggggtcgg

SEQ ID NO: 1827587 - DNA, 25 bp, Homo sapien
ctgcccgccaccagagctggggtcg

SEQ ID NO: 1827588 - DNA, 25 bp, Homo sapien
cccgccaccagagctggggtcgggg

SEQ ID NO: 1827589 - DNA, 25 bp, Homo sapien
cgccgcggcccctaagccttcgccg

SEQ ID NO: 1827590 - DNA, 25 bp, Homo sapien
cgggcgagccggccggagaagagcc

SEQ ID NO: 1827591 - DNA, 25 bp, Homo sapien
ggcccgctgcaaggcccgggggagc

SEQ ID NO: 1827592 - DNA, 25 bp, Homo sapien
cgccggcaggacgactccggagact

SEQ ID NO: 1827593 - DNA, 25 bp, Homo sapien
accgcggcggttgaggagctcggag

SEQ ID NO: 1827594 - DNA, 25 bp, Homo sapien
cggccgcgactcagcctgcggccac

SEQ ID NO: 1827595 - DNA, 25 bp, Homo sapien
gcgcccagggagaccgcggcggttg

SEQ ID NO: 1827596 - DNA, 25 bp, Homo sapien
gagacgcgggagtaggcggcgggcc

SEQ ID NO: 1827597 - DNA, 25 bp, Homo sapien
gcagcctgatgccacacgaatggag

SEQ ID NO: 1827598 - DNA, 25 bp, Homo sapien
tttattacccacaatgcgtgctgca

SEQ ID NO: 1827599 - DNA, 25 bp, Homo sapien
gaagcacctgttatgttggaaccct

SEQ ID NO: 1827600 - DNA, 25 bp, Homo sapien
catatttctgcacgtagtgtggcaa

SEQ ID NO: 1827601 - DNA, 25 bp, Homo sapien
tgggtgcgggatccaccaggtgaag

SEQ ID NO: 1827602 - DNA, 25 bp, Homo sapien
tctctgagtctagctgggatttgaa

SEQ ID NO: 1827603 - DNA, 25 bp, Homo sapien
ctgcgctgggattctcaccgggcct

SEQ ID NO: 1827604 - DNA, 25 bp, Homo sapien
gactgacgggcagcttcgcctttgg

SEQ ID NO: 1827605 - DNA, 25 bp, Homo sapien
gtgggtgatctgaaataccagattt

SEQ ID NO: 1827606 - DNA, 25 bp, Homo sapien
cgtgggtgatctgaaataccagatt

SEQ ID NO: 1827607 - DNA, 25 bp, Homo sapien
tcggctgaacgtggctcctttaagg

SEQ ID NO: 1827608 - DNA, 25 bp, Homo sapien
tgctgggaggacagccgcagttcct

SEQ ID NO: 1827609 - DNA, 25 bp, Homo sapien
cacacagtacatccatttggcagct

SEQ ID NO: 1827610 - DNA, 25 bp, Homo sapien
cgcagttcctctcggctgaacgtgg

SEQ ID NO: 1827611 - DNA, 25 bp, Homo sapien
gtgctgccaaaacaacatgtgagcc

SEQ ID NO: 1827612 - DNA, 25 bp, Homo sapien
gtgagccggcgaagatgatcctgaa

SEQ ID NO: 1827613 - DNA, 25 bp, Homo sapien
aacttgagcacgtgaagagggtgat

SEQ ID NO: 1827614 - DNA, 25 bp, Homo sapien
cgtgaagagggtgatgcaaaacata

SEQ ID NO: 1827615 - DNA, 25 bp, Homo sapien
ggcaaaaacaagagacaaaagacac

SEQ ID NO: 1827616 - DNA, 25 bp, Homo sapien
tggcaaaaacaagagacaaaagaca

SEQ ID NO: 1827617 - DNA, 25 bp, Homo sapien
tttggcaaaaacaagagacaaaaga

SEQ ID NO: 1827618 - DNA, 25 bp, Homo sapien
ttggcaaaaacaagagacaaaagac

SEQ ID NO: 1827619 - DNA, 25 bp, Homo sapien
caggaactataaaaatatttgagtc

SEQ ID NO: 1827620 - DNA, 25 bp, Homo sapien
gtgatgaaagtttcgccttgaagct

SEQ ID NO: 1827621 - DNA, 25 bp, Homo sapien
cccctgtgatgaaagtttcgccttg

SEQ ID NO: 1827622 - DNA, 25 bp, Homo sapien
cctgtgatgaaagtttcgccttgaa

SEQ ID NO: 1827623 - DNA, 25 bp, Homo sapien
tgaaagtttcgccttgaagcttttc

SEQ ID NO: 1827624 - DNA, 25 bp, Homo sapien
gcaaaattgaatccgacaagacatg

SEQ ID NO: 1827625 - DNA, 25 bp, Homo sapien
ttaggagcaaaattgaatccgacaa

SEQ ID NO: 1827626 - DNA, 25 bp, Homo sapien
gaatccgacaagacatggtatctct

SEQ ID NO: 1827627 - DNA, 25 bp, Homo sapien
caagacatggtatctcttttccaca

SEQ ID NO: 1827628 - DNA, 25 bp, Homo sapien
gctgtccttgagagtatgaagtgtg

SEQ ID NO: 1827629 - DNA, 25 bp, Homo sapien
ccacggattgttcagagattcccaa

SEQ ID NO: 1827630 - DNA, 25 bp, Homo sapien
gaagtgtgtatccaagaagccaggc

SEQ ID NO: 1827631 - DNA, 25 bp, Homo sapien
gattccttcgtattcagcccacgga

SEQ ID NO: 1827632 - DNA, 25 bp, Homo sapien
cttaaattcctcaataacagataaa

SEQ ID NO: 1827633 - DNA, 25 bp, Homo sapien
cttctggctagtgcctgaaaatcct

SEQ ID NO: 1827634 - DNA, 25 bp, Homo sapien
tggctagtgcctgaaaatccttttc

SEQ ID NO: 1827635 - DNA, 25 bp, Homo sapien
taaattcctcaataacagataaagt

SEQ ID NO: 1827636 - DNA, 25 bp, Homo sapien
tccctccgtggatgccaacgtttgc

SEQ ID NO: 1827637 - DNA, 25 bp, Homo sapien
gcaagaccaacactggaagagtgga

SEQ ID NO: 1827638 - DNA, 25 bp, Homo sapien
ccggaagattccagttgtcaatgca

SEQ ID NO: 1827639 - DNA, 25 bp, Homo sapien
caatgcagcttgaattgtagcagca

SEQ ID NO: 1827640 - DNA, 25 bp, Homo sapien
gatatttgaccttactacacagggc

SEQ ID NO: 1827641 - DNA, 25 bp, Homo sapien
tacctatatgcctcagatcttaagc

SEQ ID NO: 1827642 - DNA, 25 bp, Homo sapien
aagtagaccccagttcggctcgata

SEQ ID NO: 1827643 - DNA, 25 bp, Homo sapien
agcataagctgcctgattctccttg

SEQ ID NO: 1827644 - DNA, 25 bp, Homo sapien
aatcctgttctaagagacacgcggg

SEQ ID NO: 1827645 - DNA, 25 bp, Homo sapien
ggtaaccaatgctgatgaatgccca

SEQ ID NO: 1827646 - DNA, 25 bp, Homo sapien
tcctaccagaggagcggaaaaagct

SEQ ID NO: 1827647 - DNA, 25 bp, Homo sapien
gaaccgaaattaccacatgacactg

SEQ ID NO: 1827648 - DNA, 25 bp, Homo sapien
gatttacttagaaattcaccagtgt

SEQ ID NO: 1827649 - DNA, 25 bp, Homo sapien
cagaaaagtatattagtcacacaga

SEQ ID NO: 1827650 - DNA, 25 bp, Homo sapien
cattatacaattggctggaattaac

SEQ ID NO: 1827651 - DNA, 25 bp, Homo sapien
cagttgcaatacagttattctagct

SEQ ID NO: 1827652 - DNA, 25 bp, Homo sapien
ggtgcttggcatacttaacggaaaa

SEQ ID NO: 1827653 - DNA, 25 bp, Homo sapien
tataagccagggtagctcaggaggt

SEQ ID NO: 1827654 - DNA, 25 bp, Homo sapien
taaagaaccgtacacacaagcaggt

SEQ ID NO: 1827655 - DNA, 25 bp, Homo sapien
gaagccctccaagaatgatgagtga

SEQ ID NO: 1827656 - DNA, 25 bp, Homo sapien
caaaagaagagttcactgttcccaa

SEQ ID NO: 1827657 - DNA, 25 bp, Homo sapien
gctctcaccaggaagaacgacatgt

SEQ ID NO: 1827658 - DNA, 25 bp, Homo sapien
ccaagaagaggctatgctgtactgc

SEQ ID NO: 1827659 - DNA, 25 bp, Homo sapien
aatattacgtctagtcggctcacgg

SEQ ID NO: 1827660 - DNA, 25 bp, Homo sapien
tgcattctaagaggtaagagtcccc

SEQ ID NO: 1827661 - DNA, 25 bp, Homo sapien
tgccaccagtggaggattattacag

SEQ ID NO: 1827662 - DNA, 25 bp, Homo sapien
cattgtgccctgaacatggagaccc

SEQ ID NO: 1827663 - DNA, 25 bp, Homo sapien
tgaataagatgagaatgggccaggc

SEQ ID NO: 1827664 - DNA, 25 bp, Homo sapien
cacccagccaacaatctggtattct

SEQ ID NO: 1827665 - DNA, 25 bp, Homo sapien
gcacccagccaacaatctggtattc

SEQ ID NO: 1827666 - DNA, 25 bp, Homo sapien
agccaacaatctggtattcttaagg

SEQ ID NO: 1827667 - DNA, 25 bp, Homo sapien
aacaatctggtattcttaaggcaaa

SEQ ID NO: 1827668 - DNA, 25 bp, Homo sapien
gataaaatcccagagctactgttag

SEQ ID NO: 1827669 - DNA, 25 bp, Homo sapien
actgttaggcacgtaaatatagacc

SEQ ID NO: 1827670 - DNA, 25 bp, Homo sapien
aatcccagagctactgttaggcacg

SEQ ID NO: 1827671 - DNA, 25 bp, Homo sapien
ccagagctactgttaggcacgtaaa

SEQ ID NO: 1827672 - DNA, 25 bp, Homo sapien
gaaacgcctgcctactgaaaaaaca

SEQ ID NO: 1827673 - DNA, 25 bp, Homo sapien
ttaagagttacttgagggaacatct

SEQ ID NO: 1827674 - DNA, 25 bp, Homo sapien
cctagaaacttagattgctcactga

SEQ ID NO: 1827675 - DNA, 25 bp, Homo sapien
aaacaattgagagtactattagttc

SEQ ID NO: 1827676 - DNA, 25 bp, Homo sapien
aattctgtggtcacaaggtctatgt

SEQ ID NO: 1827677 - DNA, 25 bp, Homo sapien
ctgtggtcacaaggtctatgtatat

SEQ ID NO: 1827678 - DNA, 25 bp, Homo sapien
aaaattctgtggtcacaaggtctat

SEQ ID NO: 1827679 - DNA, 25 bp, Homo sapien
ttctgtggtcacaaggtctatgtat

SEQ ID NO: 1827680 - DNA, 25 bp, Homo sapien
acctcagtttcgatcttcctgtctg

SEQ ID NO: 1827681 - DNA, 25 bp, Homo sapien
caacctcagtttcgatcttcctgtc

SEQ ID NO: 1827682 - DNA, 25 bp, Homo sapien
gcaacctcagtttcgatcttcctgt

SEQ ID NO: 1827683 - DNA, 25 bp, Homo sapien
agcaacctcagtttcgatcttcctg

SEQ ID NO: 1827684 - DNA, 25 bp, Homo sapien
aaaatcctgtgacactccacttctg

SEQ ID NO: 1827685 - DNA, 25 bp, Homo sapien
cagggatcccaacagacatctgtgc

SEQ ID NO: 1827686 - DNA, 25 bp, Homo sapien
tcttccattacgataaccaaacact

SEQ ID NO: 1827687 - DNA, 25 bp, Homo sapien
ccaacgggtggaagcaacacaagtg

SEQ ID NO: 1827688 - DNA, 25 bp, Homo sapien
tatcattacaaacaaccatgcatgg

SEQ ID NO: 1827689 - DNA, 25 bp, Homo sapien
aaattcccatgacagtaaacctgca

SEQ ID NO: 1827690 - DNA, 25 bp, Homo sapien
catggaacgaagcaaagatgagtac

SEQ ID NO: 1827691 - DNA, 25 bp, Homo sapien
cagtaaacctgcatgtaacttccta

SEQ ID NO: 1827692 - DNA, 25 bp, Homo sapien
gcagcttcttttcgttcaatgaata

SEQ ID NO: 1827693 - DNA, 25 bp, Homo sapien
cagcagcttcttttcgttcaatgaa

SEQ ID NO: 1827694 - DNA, 25 bp, Homo sapien
agcagcttcttttcgttcaatgaat

SEQ ID NO: 1827695 - DNA, 25 bp, Homo sapien
aacacgtaacatgggtcagattctg

SEQ ID NO: 1827696 - DNA, 25 bp, Homo sapien
cagattctgatctactcctctctct

SEQ ID NO: 1827697 - DNA, 25 bp, Homo sapien
gattctgatctactcctctctcttc

SEQ ID NO: 1827698 - DNA, 25 bp, Homo sapien
ataaacacgtaacatgggtcagatt

SEQ ID NO: 1827699 - DNA, 25 bp, Homo sapien
gagttaaagtatctcgccttttggc

SEQ ID NO: 1827700 - DNA, 25 bp, Homo sapien
cataatccagcgttactaaaggaac

SEQ ID NO: 1827701 - DNA, 25 bp, Homo sapien
ctaaaggaactaattctacccagag

SEQ ID NO: 1827702 - DNA, 25 bp, Homo sapien
acccacttgggcgtagccataatcc

SEQ ID NO: 1827703 - DNA, 25 bp, Homo sapien
gctggatgatgttaatgacttaaaa

SEQ ID NO: 1827704 - DNA, 25 bp, Homo sapien
taaaatctaaatgttacatgattga

SEQ ID NO: 1827705 - DNA, 25 bp, Homo sapien
ggtgggccatcacgctgggctaatt

SEQ ID NO: 1827706 - DNA, 25 bp, Homo sapien
aatgttacatgattgaaaaatgtac

SEQ ID NO: 1827707 - DNA, 25 bp, Homo sapien
tgttagtgcaagatgctctctctgc

SEQ ID NO: 1827708 - DNA, 25 bp, Homo sapien
tagaggcaacccgacacatatcttt

SEQ ID NO: 1827709 - DNA, 25 bp, Homo sapien
aataaagtctgagcaagaagacggc

SEQ ID NO: 1827710 - DNA, 25 bp, Homo sapien
ggcacctgatgttaccaaattcaaa

SEQ ID NO: 1827711 - DNA, 25 bp, Homo sapien
ctaggttgaagtctaatttggtatc

SEQ ID NO: 1827712 - DNA, 25 bp, Homo sapien
aatttggtatctgttcggactttga

SEQ ID NO: 1827713 - DNA, 25 bp, Homo sapien
ctctgctcttttctaggttgaagtc

SEQ ID NO: 1827714 - DNA, 25 bp, Homo sapien
tctgttcggactttgatcacttcat

SEQ ID NO: 1827715 - DNA, 25 bp, Homo sapien
tgttttaactgatgtagttcgagtt

SEQ ID NO: 1827716 - DNA, 25 bp, Homo sapien
taactgatgtagttcgagttttatt

SEQ ID NO: 1827717 - DNA, 25 bp, Homo sapien
ttacttgttgttttaactgatgtag

SEQ ID NO: 1827718 - DNA, 25 bp, Homo sapien
cttgttgttttaactgatgtagttc

SEQ ID NO: 1827719 - DNA, 25 bp, Homo sapien
cacattcgcaatctgagacattact

SEQ ID NO: 1827720 - DNA, 25 bp, Homo sapien
cctttttcacattcgcaatctgaga

SEQ ID NO: 1827721 - DNA, 25 bp, Homo sapien
ttcgcaatctgagacattacttgct

SEQ ID NO: 1827722 - DNA, 25 bp, Homo sapien
tcctttttcacattcgcaatctgag

SEQ ID NO: 1827723 - DNA, 25 bp, Homo sapien
gaccatatctttgtagacgatgtcc

SEQ ID NO: 1827724 - DNA, 25 bp, Homo sapien
ctgctgcatcttggtgaccatatct

SEQ ID NO: 1827725 - DNA, 25 bp, Homo sapien
ccatatctttgtagacgatgtccat

SEQ ID NO: 1827726 - DNA, 25 bp, Homo sapien
ggtgaccatatctttgtagacgatg

SEQ ID NO: 1827727 - DNA, 25 bp, Homo sapien
ctccaggatcttgaccaatgcagac

SEQ ID NO: 1827728 - DNA, 25 bp, Homo sapien
gcctccaggatcttgaccaatgcag

SEQ ID NO: 1827729 - DNA, 25 bp, Homo sapien
cctccaggatcttgaccaatgcaga

SEQ ID NO: 1827730 - DNA, 25 bp, Homo sapien
tccaggatcttgaccaatgcagaca

SEQ ID NO: 1827731 - DNA, 25 bp, Homo sapien
ttctcgtctgtcttcctagttttta

SEQ ID NO: 1827732 - DNA, 25 bp, Homo sapien
aattaggtttggcaactggacacag

SEQ ID NO: 1827733 - DNA, 25 bp, Homo sapien
ggtttggcaactggacacagtggtt

SEQ ID NO: 1827734 - DNA, 25 bp, Homo sapien
aaacataattaggtttggcaactgg

SEQ ID NO: 1827735 - DNA, 25 bp, Homo sapien
ccaagactgtgccactgcactccag

SEQ ID NO: 1827736 - DNA, 25 bp, Homo sapien
ctccagcctggatgaaagagtgaga

SEQ ID NO: 1827737 - DNA, 25 bp, Homo sapien
ccagcctggatgaaagagtgagatt

SEQ ID NO: 1827738 - DNA, 25 bp, Homo sapien
gtgggggttgcagtaggccaagact

SEQ ID NO: 1827739 - DNA, 25 bp, Homo sapien
taactttacatgctcccttctcgct

SEQ ID NO: 1827740 - DNA, 25 bp, Homo sapien
tcgcctggccttatcagcataactt

SEQ ID NO: 1827741 - DNA, 25 bp, Homo sapien
gcgaaaaaagcctactgtttgacag

SEQ ID NO: 1827742 - DNA, 25 bp, Homo sapien
aaaattattacacagcatatgacag

SEQ ID NO: 1827743 - DNA, 25 bp, Homo sapien
ttccagtaagcacactaaggcatga

SEQ ID NO: 1827744 - DNA, 25 bp, Homo sapien
catgagtgtcgaagtagagtttcct

SEQ ID NO: 1827745 - DNA, 25 bp, Homo sapien
cactaaggcatgagtgtcgaagtag

SEQ ID NO: 1827746 - DNA, 25 bp, Homo sapien
cttccagtaagcacactaaggcatg

SEQ ID NO: 1827747 - DNA, 25 bp, Homo sapien
tgaaatctctccttttgcgctccag

SEQ ID NO: 1827748 - DNA, 25 bp, Homo sapien
tcccagaagaggtgaaatctctcct

SEQ ID NO: 1827749 - DNA, 25 bp, Homo sapien
gaagaggtgaaatctctccttttgc

SEQ ID NO: 1827750 - DNA, 25 bp, Homo sapien
gaggtgaaatctctccttttgcgct

SEQ ID NO: 1827751 - DNA, 25 bp, Homo sapien
cagggatccagcagacaagcttagc

SEQ ID NO: 1827752 - DNA, 25 bp, Homo sapien
agggatccagcagacaagcttagct

SEQ ID NO: 1827753 - DNA, 25 bp, Homo sapien
gcagggatccagcagacaagcttag

SEQ ID NO: 1827754 - DNA, 25 bp, Homo sapien
ggtggaaaggacagtaagctcaaaa

SEQ ID NO: 1827755 - DNA, 25 bp, Homo sapien
gaaaggacagtaagctcaaaacaga

SEQ ID NO: 1827756 - DNA, 25 bp, Homo sapien
ctagggtggaaaggacagtaagctc

SEQ ID NO: 1827757 - DNA, 25 bp, Homo sapien
tagggtggaaaggacagtaagctca

SEQ ID NO: 1827758 - DNA, 25 bp, Homo sapien
gggtcacctgccaactcaaaggtca

SEQ ID NO: 1827759 - DNA, 25 bp, Homo sapien
tgtagaagtctggtaggagcaagaa

SEQ ID NO: 1827760 - DNA, 25 bp, Homo sapien
gaagggtcacctgccaactcaaagg

SEQ ID NO: 1827761 - DNA, 25 bp, Homo sapien
aactggcaccagtctgaggtctggt

SEQ ID NO: 1827762 - DNA, 25 bp, Homo sapien
gaaagatgctccagctgatcagctt

SEQ ID NO: 1827763 - DNA, 25 bp, Homo sapien
ctctcagtccttcaccccgattacc

SEQ ID NO: 1827764 - DNA, 25 bp, Homo sapien
cagaaagatgctccagctgatcagc

SEQ ID NO: 1827765 - DNA, 25 bp, Homo sapien
agaaagatgctccagctgatcagct

SEQ ID NO: 1827766 - DNA, 25 bp, Homo sapien
taagggagcaacctttattgagccc

SEQ ID NO: 1827767 - DNA, 25 bp, Homo sapien
cagtacagatagctcatcgtagcac

SEQ ID NO: 1827768 - DNA, 25 bp, Homo sapien
ctggcatacagcaggctaggaataa

SEQ ID NO: 1827769 - DNA, 25 bp, Homo sapien
tcatctatttgtccaagctgcccag

SEQ ID NO: 1827770 - DNA, 25 bp, Homo sapien
cggcgacgcccggtgagcacctcca

SEQ ID NO: 1827771 - DNA, 25 bp, Homo sapien
gtgaggcacgtgacacgccgccgcg

SEQ ID NO: 1827772 - DNA, 25 bp, Homo sapien
gggtgcggcatacccgaggcgcgag

SEQ ID NO: 1827773 - DNA, 25 bp, Homo sapien
cctgcaggaaacgagtgcaggcgcc

SEQ ID NO: 1827774 - DNA, 25 bp, Homo sapien
agaggcagcggcgtgctgaggtttc

SEQ ID NO: 1827775 - DNA, 25 bp, Homo sapien
tgaggtttcgctgccgcccggtctt

SEQ ID NO: 1827776 - DNA, 25 bp, Homo sapien
ttccgctgaggcccacgggcaagaa

SEQ ID NO: 1827777 - DNA, 25 bp, Homo sapien
tgccgcccggtcttccgctgaggcc

SEQ ID NO: 1827778 - DNA, 25 bp, Homo sapien
gcgcgctcatgcctctcgcttttgg

SEQ ID NO: 1827779 - DNA, 25 bp, Homo sapien
tcatgcctctcgcttttggcgccgg

SEQ ID NO: 1827780 - DNA, 25 bp, Homo sapien
ggtccaggcccagagtccgacagcg

SEQ ID NO: 1827781 - DNA, 25 bp, Homo sapien
cccgagcagttcactggcccgggcg

SEQ ID NO: 1827782 - DNA, 25 bp, Homo sapien
cttcagtattatccaataaaaaggc

SEQ ID NO: 1827783 - DNA, 25 bp, Homo sapien
tttcccctaacatcctcttcagtat

SEQ ID NO: 1827784 - DNA, 25 bp, Homo sapien
tcagtattatccaataaaaaggctt

SEQ ID NO: 1827785 - DNA, 25 bp, Homo sapien
atcctcttcagtattatccaataaa

SEQ ID NO: 1827786 - DNA, 25 bp, Homo sapien
catctgcagagcttgcagcgggctt

SEQ ID NO: 1827787 - DNA, 25 bp, Homo sapien
tgtctgcggtaagaaaacactgcac

SEQ ID NO: 1827788 - DNA, 25 bp, Homo sapien
tcagggtgcacccaatgagaaacag

SEQ ID NO: 1827789 - DNA, 25 bp, Homo sapien
gcgggcttgaagaagtaccacatgc

SEQ ID NO: 1827790 - DNA, 25 bp, Homo sapien
cactgtggggtagagggctgatggt

SEQ ID NO: 1827791 - DNA, 25 bp, Homo sapien
atagctctaggtcccccgatttcca

SEQ ID NO: 1827792 - DNA, 25 bp, Homo sapien
ccaatcttagaggaagtgcactaac

SEQ ID NO: 1827793 - DNA, 25 bp, Homo sapien
tacactgtggggtagagggctgatg

SEQ ID NO: 1827794 - DNA, 25 bp, Homo sapien
tttagtggagattagggtttgacca

SEQ ID NO: 1827795 - DNA, 25 bp, Homo sapien
agaaggatactctttaccaaggagt

SEQ ID NO: 1827796 - DNA, 25 bp, Homo sapien
aagaaggatactctttaccaaggag

SEQ ID NO: 1827797 - DNA, 25 bp, Homo sapien
agattagggtttgaccaagaggaag

SEQ ID NO: 1827798 - DNA, 25 bp, Homo sapien
aactatctgatactggtaaacctgg

SEQ ID NO: 1827799 - DNA, 25 bp, Homo sapien
tttggcagttgttcatcaaaggaga

SEQ ID NO: 1827800 - DNA, 25 bp, Homo sapien
aaaggagatccccatgaagtagcca

SEQ ID NO: 1827801 - DNA, 25 bp, Homo sapien
tcatacaactataactatctgatac

SEQ ID NO: 1827802 - DNA, 25 bp, Homo sapien
cttttccttgggcctcttgccctca

SEQ ID NO: 1827803 - DNA, 25 bp, Homo sapien
ccgcatgtcacacgacaaggccagc

SEQ ID NO: 1827804 - DNA, 25 bp, Homo sapien
tgtcacacgacaaggccagcagggc

SEQ ID NO: 1827805 - DNA, 25 bp, Homo sapien
gcatgtcacacgacaaggccagcag

SEQ ID NO: 1827806 - DNA, 25 bp, Homo sapien
atgtcacacgacaaggccagcaggg

SEQ ID NO: 1827807 - DNA, 25 bp, Homo sapien
tgattccttccctcactcaggctga

SEQ ID NO: 1827808 - DNA, 25 bp, Homo sapien
cagccttctgctgcttaatacaata

SEQ ID NO: 1827809 - DNA, 25 bp, Homo sapien
cccaagtctaattaagtgcccctca

SEQ ID NO: 1827810 - DNA, 25 bp, Homo sapien
gctgaacatctcctactcacctagg

SEQ ID NO: 1827811 - DNA, 25 bp, Homo sapien
cagtgtttgtttggatagcccagga

SEQ ID NO: 1827812 - DNA, 25 bp, Homo sapien
ccaggaagattcgtgtagggagtga

SEQ ID NO: 1827813 - DNA, 25 bp, Homo sapien
tgatggaaggttctataatagctcc

SEQ ID NO: 1827814 - DNA, 25 bp, Homo sapien
ctgctttgctccaggtgatgacttg

SEQ ID NO: 1827815 - DNA, 25 bp, Homo sapien
gcccggtggattgcaataagaaaat

SEQ ID NO: 1827816 - DNA, 25 bp, Homo sapien
tgcttgggttcttttgcccggtgga

SEQ ID NO: 1827817 - DNA, 25 bp, Homo sapien
tgcccatttgcactcttccttagtg

SEQ ID NO: 1827818 - DNA, 25 bp, Homo sapien
gaaaatggctcaaggttgactttct

SEQ ID NO: 1827819 - DNA, 25 bp, Homo sapien
tctgagaaagtagacagcagagaca

SEQ ID NO: 1827820 - DNA, 25 bp, Homo sapien
tgacaaattgggacctctgacagtg

SEQ ID NO: 1827821 - DNA, 25 bp, Homo sapien
gatgttaaagacacgtgcgagtctg

SEQ ID NO: 1827822 - DNA, 25 bp, Homo sapien
cagcctaaccctgtaggcggcagag

SEQ ID NO: 1827823 - DNA, 25 bp, Homo sapien
tttgggagaagttgaccacaatctc

SEQ ID NO: 1827824 - DNA, 25 bp, Homo sapien
gacatttgtgcgcatcagtttggga

SEQ ID NO: 1827825 - DNA, 25 bp, Homo sapien
tgctctattgccttgggaaactcac

SEQ ID NO: 1827826 - DNA, 25 bp, Homo sapien
gaagttgaccacaatctctttttcc

SEQ ID NO: 1827827 - DNA, 25 bp, Homo sapien
tgtccgttccgtgctgtggacatgg

SEQ ID NO: 1827828 - DNA, 25 bp, Homo sapien
gggatgaacagcagtgtccgttccg

SEQ ID NO: 1827829 - DNA, 25 bp, Homo sapien
ggtccactagtgagcgttccttcct

SEQ ID NO: 1827830 - DNA, 25 bp, Homo sapien
gataacatcagggagacagtggagc

SEQ ID NO: 1827831 - DNA, 25 bp, Homo sapien
gtccttgccctccttaaatctaaca

SEQ ID NO: 1827832 - DNA, 25 bp, Homo sapien
atctaacaagagtgccatatgctag

SEQ ID NO: 1827833 - DNA, 25 bp, Homo sapien
gagtgccatatgctagggcctccca

SEQ ID NO: 1827834 - DNA, 25 bp, Homo sapien
atgctagggcctcccacaagatcca

SEQ ID NO: 1827835 - DNA, 25 bp, Homo sapien
tcattcagtcgtcttagatggctct

SEQ ID NO: 1827836 - DNA, 25 bp, Homo sapien
agccacaagaaagggaaagccatgg

SEQ ID NO: 1827837 - DNA, 25 bp, Homo sapien
tctggagattgtttcattcagtcgt

SEQ ID NO: 1827838 - DNA, 25 bp, Homo sapien
gccagtctttatcaggtggatctgt

SEQ ID NO: 1827839 - DNA, 25 bp, Homo sapien
gaatcctgctgtgcaccattggccc

SEQ ID NO: 1827840 - DNA, 25 bp, Homo sapien
cctaggagtctggagttccttgctc

SEQ ID NO: 1827841 - DNA, 25 bp, Homo sapien
gtggtccctaggagtctggagttcc

SEQ ID NO: 1827842 - DNA, 25 bp, Homo sapien
tcttgggcagctcatatcttgaatc

SEQ ID NO: 1827843 - DNA, 25 bp, Homo sapien
gttagtttgccccaaggtcctctga

SEQ ID NO: 1827844 - DNA, 25 bp, Homo sapien
tgaattgctcaattgcgctgttcat

SEQ ID NO: 1827845 - DNA, 25 bp, Homo sapien
agctatctttctgttccctggcatt

SEQ ID NO: 1827846 - DNA, 25 bp, Homo sapien
tctctttacagtattggcagttagt

SEQ ID NO: 1827847 - DNA, 25 bp, Homo sapien
ctaaagccagtagggtagaccatag

SEQ ID NO: 1827848 - DNA, 25 bp, Homo sapien
agaccatagtctttgtaaaccaagg

SEQ ID NO: 1827849 - DNA, 25 bp, Homo sapien
aaccaaggcatcatacacagaacta

SEQ ID NO: 1827850 - DNA, 25 bp, Homo sapien
cacagaactaatttcaagttgggta

SEQ ID NO: 1827851 - DNA, 25 bp, Homo sapien
gatgcgaataccacttggccctggg

SEQ ID NO: 1827852 - DNA, 25 bp, Homo sapien
ctaggatgcgaataccacttggccc

SEQ ID NO: 1827853 - DNA, 25 bp, Homo sapien
gggctcgctccgctttagccttccc

SEQ ID NO: 1827854 - DNA, 25 bp, Homo sapien
ggatgcgaataccacttggccctgg

SEQ ID NO: 1827855 - DNA, 25 bp, Homo sapien
tataactggatggtaagggtagccc

SEQ ID NO: 1827856 - DNA, 25 bp, Homo sapien
aaggagatacttggcaccgaggtca

SEQ ID NO: 1827857 - DNA, 25 bp, Homo sapien
tccccgactagcaagaccagaatgt

SEQ ID NO: 1827858 - DNA, 25 bp, Homo sapien
tgaggaccacgatgcggttgccact

SEQ ID NO: 1827859 - DNA, 25 bp, Homo sapien
cacttcattagaagattgtattgga

SEQ ID NO: 1827860 - DNA, 25 bp, Homo sapien
tgattactaggtttctcagtctgtt

SEQ ID NO: 1827861 - DNA, 25 bp, Homo sapien
ctgttagcctgctgattactaggtt

SEQ ID NO: 1827862 - DNA, 25 bp, Homo sapien
tcagtctgttcatatttgccagcaa

SEQ ID NO: 1827863 - DNA, 25 bp, Homo sapien
tgtggaagattcacagatgctctgc

SEQ ID NO: 1827864 - DNA, 25 bp, Homo sapien
tgacggtaataaaatcgtacattga

SEQ ID NO: 1827865 - DNA, 25 bp, Homo sapien
cgtacattgattaaaacgaagtaga

SEQ ID NO: 1827866 - DNA, 25 bp, Homo sapien
aatactctttcatgacggtaataaa

SEQ ID NO: 1827867 - DNA, 25 bp, Homo sapien
ctgtgcacagtgggtatttgtcaga

SEQ ID NO: 1827868 - DNA, 25 bp, Homo sapien
gctgtgcacagtgggtatttgtcag

SEQ ID NO: 1827869 - DNA, 25 bp, Homo sapien
gttttgaacttgatccttgcttctg

SEQ ID NO: 1827870 - DNA, 25 bp, Homo sapien
gcttctgtatcttataatcggttga

SEQ ID NO: 1827871 - DNA, 25 bp, Homo sapien
tgaacttgatccttgcttctgtatc

SEQ ID NO: 1827872 - DNA, 25 bp, Homo sapien
tataatcggttgaagtgaaaaccaa

SEQ ID NO: 1827873 - DNA, 25 bp, Homo sapien
taaagagatcaatacatactgagag

SEQ ID NO: 1827874 - DNA, 25 bp, Homo sapien
aaggtgttaaagagatcaatacata

SEQ ID NO: 1827875 - DNA, 25 bp, Homo sapien
tcaatacatactgagagtctgctgg

SEQ ID NO: 1827876 - DNA, 25 bp, Homo sapien
gagatcaatacatactgagagtctg

SEQ ID NO: 1827877 - DNA, 25 bp, Homo sapien
tccagaggctggctagtcctacaaa

SEQ ID NO: 1827878 - DNA, 25 bp, Homo sapien
tggctagtcctacaaaagagttgct

SEQ ID NO: 1827879 - DNA, 25 bp, Homo sapien
tcctacaaaagagttgctggtgctg

SEQ ID NO: 1827880 - DNA, 25 bp, Homo sapien
gaggctggctagtcctacaaaagag

SEQ ID NO: 1827881 - DNA, 25 bp, Homo sapien
agatgttttcatttgggtcattctc

SEQ ID NO: 1827882 - DNA, 25 bp, Homo sapien
tgaagttagaagtttggaaagatgt

SEQ ID NO: 1827883 - DNA, 25 bp, Homo sapien
tgttttcatttgggtcattctcctg

SEQ ID NO: 1827884 - DNA, 25 bp, Homo sapien
atgaagttagaagtttggaaagatg

SEQ ID NO: 1827885 - DNA, 25 bp, Homo sapien
cgtcgctcacagttacgttagttgt

SEQ ID NO: 1827886 - DNA, 25 bp, Homo sapien
gctcacagttacgttagttgtttta

SEQ ID NO: 1827887 - DNA, 25 bp, Homo sapien
tttccgtcgctcacagttacgttag

SEQ ID NO: 1827888 - DNA, 25 bp, Homo sapien
tcatttccgtcgctcacagttacgt

SEQ ID NO: 1827889 - DNA, 25 bp, Homo sapien
tctgtcagaaacctgacatgtgggc

SEQ ID NO: 1827890 - DNA, 25 bp, Homo sapien
catctgtcagaaacctgacatgtgg

SEQ ID NO: 1827891 - DNA, 25 bp, Homo sapien
ctgtcagaaacctgacatgtgggca

SEQ ID NO: 1827892 - DNA, 25 bp, Homo sapien
cacatctgtcagaaacctgacatgt

SEQ ID NO: 1827893 - DNA, 25 bp, Homo sapien
tgttgtaagagccttgtgctcagca

SEQ ID NO: 1827894 - DNA, 25 bp, Homo sapien
ggcagatcaccagtgaactgcccag

SEQ ID NO: 1827895 - DNA, 25 bp, Homo sapien
gactgtcccatgaagtgagctagga

SEQ ID NO: 1827896 - DNA, 25 bp, Homo sapien
tgaccaggatagaactccttcttgt

SEQ ID NO: 1827897 - DNA, 25 bp, Homo sapien
ctacggaagatagcatgggctaatt

SEQ ID NO: 1827898 - DNA, 25 bp, Homo sapien
gggctgtcgtcagtcctactggctg

SEQ ID NO: 1827899 - DNA, 25 bp, Homo sapien
gggctaattttgagtgtgatggcct

SEQ ID NO: 1827900 - DNA, 25 bp, Homo sapien
cagggctgtcgtcagtcctactggc

SEQ ID NO: 1827901 - DNA, 25 bp, Homo sapien
agcaacatgtccaatcctaactcct

SEQ ID NO: 1827902 - DNA, 25 bp, Homo sapien
ggcttgtgtgagtttgttgtctgca

SEQ ID NO: 1827903 - DNA, 25 bp, Homo sapien
gagtttgttgtctgcaccccacaaa

SEQ ID NO: 1827904 - DNA, 25 bp, Homo sapien
aatcctaactcctcccattgctgtt

SEQ ID NO: 1827905 - DNA, 25 bp, Homo sapien
ggctgggacgctggatgaagaagat

SEQ ID NO: 1827906 - DNA, 25 bp, Homo sapien
cctgagagccagtgacggatggacg

SEQ ID NO: 1827907 - DNA, 25 bp, Homo sapien
tctcaggctcggagtcagcaggatc

SEQ ID NO: 1827908 - DNA, 25 bp, Homo sapien
cattctcaaacgcatcactgtgctg

SEQ ID NO: 1827909 - DNA, 25 bp, Homo sapien
gcattcacaatcatatctgagactg

SEQ ID NO: 1827910 - DNA, 25 bp, Homo sapien
gggaccgcattgctaacagctgtgg

SEQ ID NO: 1827911 - DNA, 25 bp, Homo sapien
aagggcattgtttggagctctgcat

SEQ ID NO: 1827912 - DNA, 25 bp, Homo sapien
tgggatggggatctgctcttccctg

SEQ ID NO: 1827913 - DNA, 25 bp, Homo sapien
tatgccactgtatcgggtacaacca

SEQ ID NO: 1827914 - DNA, 25 bp, Homo sapien
taactgtgaggtctatgccactgta

SEQ ID NO: 1827915 - DNA, 25 bp, Homo sapien
cactgtatcgggtacaaccagccac

SEQ ID NO: 1827916 - DNA, 25 bp, Homo sapien
ggtctatgccactgtatcgggtaca

SEQ ID NO: 1827917 - DNA, 25 bp, Homo sapien
gcagagagccagacggctgatgagg

SEQ ID NO: 1827918 - DNA, 25 bp, Homo sapien
agccagacggctgatgaggtgaccc

SEQ ID NO: 1827919 - DNA, 25 bp, Homo sapien
cagacggctgatgaggtgaccctca

SEQ ID NO: 1827920 - DNA, 25 bp, Homo sapien
agacggctgatgaggtgaccctcac

SEQ ID NO: 1827921 - DNA, 25 bp, Homo sapien
aggagtctgggacacctcggtgtca

SEQ ID NO: 1827922 - DNA, 25 bp, Homo sapien
agggcattattgagcatgtgagcct

SEQ ID NO: 1827923 - DNA, 25 bp, Homo sapien
acacctcggtgtcaggcagatccat

SEQ ID NO: 1827924 - DNA, 25 bp, Homo sapien
ggagtaccaggcttggaccgctgtt

SEQ ID NO: 1827925 - DNA, 25 bp, Homo sapien
tcacagaagggacttgccgagcaaa

SEQ ID NO: 1827926 - DNA, 25 bp, Homo sapien
gtctgtgcctggaatcaacagccct

SEQ ID NO: 1827927 - DNA, 25 bp, Homo sapien
cagcacagaagcccttgggctgcct

SEQ ID NO: 1827928 - DNA, 25 bp, Homo sapien
cttgccgagcaaagcctgacatttt

SEQ ID NO: 1827929 - DNA, 25 bp, Homo sapien
acttgttctccatggggagacctgc

SEQ ID NO: 1827930 - DNA, 25 bp, Homo sapien
ttctccatggggagacctgctctac

SEQ ID NO: 1827931 - DNA, 25 bp, Homo sapien
ctaagctgacttgttctccatgggg

SEQ ID NO: 1827932 - DNA, 25 bp, Homo sapien
aagctgacttgttctccatggggag

SEQ ID NO: 1827933 - DNA, 25 bp, Homo sapien
aggtgatgccccctgcatggttcat

SEQ ID NO: 1827934 - DNA, 25 bp, Homo sapien
ctgcatggttcatgggtgcaatggt

SEQ ID NO: 1827935 - DNA, 25 bp, Homo sapien
cccctgcatggttcatgggtgcaat

SEQ ID NO: 1827936 - DNA, 25 bp, Homo sapien
tgatgccccctgcatggttcatggg

SEQ ID NO: 1827937 - DNA, 25 bp, Homo sapien
ctgcatggttcatgggtgcaatggt

SEQ ID NO: 1827938 - DNA, 25 bp, Homo sapien
cgccttttgtagagtgcagatgcat

SEQ ID NO: 1827939 - DNA, 25 bp, Homo sapien
tccgtagatggtgcagcgccttttg

SEQ ID NO: 1827940 - DNA, 25 bp, Homo sapien
gacccataggcagtcctccgtagat

SEQ ID NO: 1827941 - DNA, 25 bp, Homo sapien
ggctcgaggtcacacgcttggttta

SEQ ID NO: 1827942 - DNA, 25 bp, Homo sapien
gacagcttgtgatcacctgcagagg

SEQ ID NO: 1827943 - DNA, 25 bp, Homo sapien
aatggcccctctgttgcttgacagc

SEQ ID NO: 1827944 - DNA, 25 bp, Homo sapien
ggcagagccgccctaatttgtaggg

SEQ ID NO: 1827945 - DNA, 25 bp, Homo sapien
gacagctgagccttgcgttgaagac

SEQ ID NO: 1827946 - DNA, 25 bp, Homo sapien
gaacttggcaattggcaagtctctc

SEQ ID NO: 1827947 - DNA, 25 bp, Homo sapien
aattggcaagtctctcggctgtgga

SEQ ID NO: 1827948 - DNA, 25 bp, Homo sapien
cttgtagctgaacttggcaattggc

SEQ ID NO: 1827949 - DNA, 25 bp, Homo sapien
tcagtcaccaacgtagacctccttg

SEQ ID NO: 1827950 - DNA, 25 bp, Homo sapien
tgcacaagcagaatagagaagtgca

SEQ ID NO: 1827951 - DNA, 25 bp, Homo sapien
gaatagagaagtgcaatagaattat

SEQ ID NO: 1827952 - DNA, 25 bp, Homo sapien
ctgcacaagcagaatagagaagtgc

SEQ ID NO: 1827953 - DNA, 25 bp, Homo sapien
tgggtctgaacgtccacgtgattaa

SEQ ID NO: 1827954 - DNA, 25 bp, Homo sapien
tctgaacttctatcgtattaagatg

SEQ ID NO: 1827955 - DNA, 25 bp, Homo sapien
tatcgtattaagatgggtctgaacg

SEQ ID NO: 1827956 - DNA, 25 bp, Homo sapien
taagatgggtctgaacgtccacgtg

SEQ ID NO: 1827957 - DNA, 25 bp, Homo sapien
cagaggttggggcattgttgctttt

SEQ ID NO: 1827958 - DNA, 25 bp, Homo sapien
tgttggtttgtttcagactggaaga

SEQ ID NO: 1827959 - DNA, 25 bp, Homo sapien
aaggcttatgcgtggttcccaggat

SEQ ID NO: 1827960 - DNA, 25 bp, Homo sapien
gaggaaaggcttatgcgtggttccc

SEQ ID NO: 1827961 - DNA, 25 bp, Homo sapien
aggcatgactcccttcgctgcctgg

SEQ ID NO: 1827962 - DNA, 25 bp, Homo sapien
ccttcgctgcctggtctgagaggct

SEQ ID NO: 1827963 - DNA, 25 bp, Homo sapien
gaggggaaggcatgactcccttcgc

SEQ ID NO: 1827964 - DNA, 25 bp, Homo sapien
cttcgctgcctggtctgagaggctg

SEQ ID NO: 1827965 - DNA, 25 bp, Homo sapien
gggtcaataagacttggagtacaca

SEQ ID NO: 1827966 - DNA, 25 bp, Homo sapien
tggagtgtttcaaggctcttgcaac

SEQ ID NO: 1827967 - DNA, 25 bp, Homo sapien
tgagaggaaacacaaccagaggtaa

SEQ ID NO: 1827968 - DNA, 25 bp, Homo sapien
gacttggagtacacatagtggagtg

SEQ ID NO: 1827969 - DNA, 25 bp, Homo sapien
tgacctgtctggtgctatcaggagg

SEQ ID NO: 1827970 - DNA, 25 bp, Homo sapien
aacactttcaggatgtcgaagccgg

SEQ ID NO: 1827971 - DNA, 25 bp, Homo sapien
gcatgatggctgcatgtcacattga

SEQ ID NO: 1827972 - DNA, 25 bp, Homo sapien
tcgaagccgggcttgagctgcttct

SEQ ID NO: 1827973 - DNA, 25 bp, Homo sapien
cagatttgagatatggactatgctc

SEQ ID NO: 1827974 - DNA, 25 bp, Homo sapien
cctgcagatttgagatatggactat

SEQ ID NO: 1827975 - DNA, 25 bp, Homo sapien
cataatcctgcagatttgagatatg

SEQ ID NO: 1827976 - DNA, 25 bp, Homo sapien
cttgtactcataatcctgcagattt

SEQ ID NO: 1827977 - DNA, 25 bp, Homo sapien
cacactgaacgacggaaagggagcc

SEQ ID NO: 1827978 - DNA, 25 bp, Homo sapien
tgtcccgccaccctcttcacactga

SEQ ID NO: 1827979 - DNA, 25 bp, Homo sapien
accctcttcacactgaacgacggaa

SEQ ID NO: 1827980 - DNA, 25 bp, Homo sapien
tcttcacactgaacgacggaaaggg

SEQ ID NO: 1827981 - DNA, 25 bp, Homo sapien
tgggatccaacaaagggtcctcttc

SEQ ID NO: 1827982 - DNA, 25 bp, Homo sapien
gatatcccaattcctgttggcccag

SEQ ID NO: 1827983 - DNA, 25 bp, Homo sapien
gctaaaggtgaagccaaaagtggac

SEQ ID NO: 1827984 - DNA, 25 bp, Homo sapien
gacacatgtgcaagaggctaaaggt

SEQ ID NO: 1827985 - DNA, 25 bp, Homo sapien
catctagatgagaatggtggatcac

SEQ ID NO: 1827986 - DNA, 25 bp, Homo sapien
cctggtgttggatagaatatgattc

SEQ ID NO: 1827987 - DNA, 25 bp, Homo sapien
gaggccgcctctgagtggctataga

SEQ ID NO: 1827988 - DNA, 25 bp, Homo sapien
tttggacaatagtggaacagagcac

SEQ ID NO: 1827989 - DNA, 25 bp, Homo sapien
gccaccttttcagcgatgtatgcag

SEQ ID NO: 1827990 - DNA, 25 bp, Homo sapien
ttctaaagctggcatggaacgagct

SEQ ID NO: 1827991 - DNA, 25 bp, Homo sapien
cccattttctgtgggcaggcctcga

SEQ ID NO: 1827992 - DNA, 25 bp, Homo sapien
gcctacgctgaagatggcatcctgt

SEQ ID NO: 1827993 - DNA, 25 bp, Homo sapien
tttggagcatggaagctgatgatat

SEQ ID NO: 1827994 - DNA, 25 bp, Homo sapien
catttgcttctgctcaataagtagt

SEQ ID NO: 1827995 - DNA, 25 bp, Homo sapien
aagctgatgatataggcccggcaag

SEQ ID NO: 1827996 - DNA, 25 bp, Homo sapien
gagcatggaagctgatgatataggc

SEQ ID NO: 1827997 - DNA, 25 bp, Homo sapien
gactgggatgcagcccggtaggccc

SEQ ID NO: 1827998 - DNA, 25 bp, Homo sapien
atagcagcaggtcgactgggatgca

SEQ ID NO: 1827999 - DNA, 25 bp, Homo sapien
ggtaggcccgctctcatggttgctc

SEQ ID NO: 1828000 - DNA, 25 bp, Homo sapien
cccggtaggcccgctctcatggttg

SEQ ID NO: 1828001 - DNA, 25 bp, Homo sapien
tattctcataaaaatcccgttgtcc

SEQ ID NO: 1828002 - DNA, 25 bp, Homo sapien
atcccgttgtccccagtgccagatg

SEQ ID NO: 1828003 - DNA, 25 bp, Homo sapien
cataaaaatcccgttgtccccagtg

SEQ ID NO: 1828004 - DNA, 25 bp, Homo sapien
ttattctcataaaaatcccgttgtc

SEQ ID NO: 1828005 - DNA, 25 bp, Homo sapien
gccaggtcaagcctcaaccataatg

SEQ ID NO: 1828006 - DNA, 25 bp, Homo sapien
ggtcaagcctcaaccataatgaaca

SEQ ID NO: 1828007 - DNA, 25 bp, Homo sapien
caagcctcaaccataatgaacagga

SEQ ID NO: 1828008 - DNA, 25 bp, Homo sapien
aaagccaggtcaagcctcaaccata

SEQ ID NO: 1828009 - DNA, 25 bp, Homo sapien
gaggactcaggctgcgtgaccactg

SEQ ID NO: 1828010 - DNA, 25 bp, Homo sapien
ggctgcgtgaccactggcacaggat

SEQ ID NO: 1828011 - DNA, 25 bp, Homo sapien
aggatccaggctcgtcccttgtcca

SEQ ID NO: 1828012 - DNA, 25 bp, Homo sapien
acaggatccaggctcgtcccttgtc

SEQ ID NO: 1828013 - DNA, 25 bp, Homo sapien
ggaaaggccgatttgtgcagcaagc

SEQ ID NO: 1828014 - DNA, 25 bp, Homo sapien
tagataacccagtctgacaagcgac

SEQ ID NO: 1828015 - DNA, 25 bp, Homo sapien
caagctcttgggaggtagataaccc

SEQ ID NO: 1828016 - DNA, 25 bp, Homo sapien
cgtgagcaaaatggcaaccaggcct

SEQ ID NO: 1828017 - DNA, 25 bp, Homo sapien
gatattcatagctgccgtttgagga

SEQ ID NO: 1828018 - DNA, 25 bp, Homo sapien
cgtttgaggatgtagacgggtgact

SEQ ID NO: 1828019 - DNA, 25 bp, Homo sapien
gctgcacaggtgtgatattcatagc

SEQ ID NO: 1828020 - DNA, 25 bp, Homo sapien
gatgtagacgggtgactgctggtgt

SEQ ID NO: 1828021 - DNA, 25 bp, Homo sapien
ctggacccaaccagtcattcccagt

SEQ ID NO: 1828022 - DNA, 25 bp, Homo sapien
ggacccaaccagtcattcccagtgt

SEQ ID NO: 1828023 - DNA, 25 bp, Homo sapien
gacccaaccagtcattcccagtgtt

SEQ ID NO: 1828024 - DNA, 25 bp, Homo sapien
cccaaccagtcattcccagtgttac

SEQ ID NO: 1828025 - DNA, 25 bp, Homo sapien
agagcgatcctgttccagtgctggt

SEQ ID NO: 1828026 - DNA, 25 bp, Homo sapien
tgccagagcgatcctgttccagtgc

SEQ ID NO: 1828027 - DNA, 25 bp, Homo sapien
cagagcgatcctgttccagtgctgg

SEQ ID NO: 1828028 - DNA, 25 bp, Homo sapien
tgctgccagagcgatcctgttccag

SEQ ID NO: 1828029 - DNA, 25 bp, Homo sapien
caaatgttggttgtacgtattaatc

SEQ ID NO: 1828030 - DNA, 25 bp, Homo sapien
caccctcttgtggaggcagtaacca

SEQ ID NO: 1828031 - DNA, 25 bp, Homo sapien
caaccagggattgacactagagaac

SEQ ID NO: 1828032 - DNA, 25 bp, Homo sapien
cagaaggacccacttaacaaggcgt

SEQ ID NO: 1828033 - DNA, 25 bp, Homo sapien
aggccttgaaaatgcaggggacccg

SEQ ID NO: 1828034 - DNA, 25 bp, Homo sapien
caaggccttgaaaatgcaggggacc

SEQ ID NO: 1828035 - DNA, 25 bp, Homo sapien
atgcaggggacccgtttattaactg

SEQ ID NO: 1828036 - DNA, 25 bp, Homo sapien
ttttggaatccttctggttgcccca

SEQ ID NO: 1828037 - DNA, 25 bp, Homo sapien
gccaaatgcagccttcacgggcagt

SEQ ID NO: 1828038 - DNA, 25 bp, Homo sapien
tgactgcccttactgccaaatgcag

SEQ ID NO: 1828039 - DNA, 25 bp, Homo sapien
ctgctgactgcccttactgccaaat

SEQ ID NO: 1828040 - DNA, 25 bp, Homo sapien
gttgttcagctacttggaggagttt

SEQ ID NO: 1828041 - DNA, 25 bp, Homo sapien
gtgttgttcagctacttggaggagt

SEQ ID NO: 1828042 - DNA, 25 bp, Homo sapien
tgtgttgttcagctacttggaggag

SEQ ID NO: 1828043 - DNA, 25 bp, Homo sapien
ctgtgttgttcagctacttggagga

SEQ ID NO: 1828044 - DNA, 25 bp, Homo sapien
ttcatggcattgaaatgtcatgagc

SEQ ID NO: 1828045 - DNA, 25 bp, Homo sapien
gctttgcaaacactggctgccctat

SEQ ID NO: 1828046 - DNA, 25 bp, Homo sapien
ctgccctatttcatggcattgaaat

SEQ ID NO: 1828047 - DNA, 25 bp, Homo sapien
ggcattgaaatgtcatgagccatac

SEQ ID NO: 1828048 - DNA, 25 bp, Homo sapien
tcaaagctggcttctgatgctttct

SEQ ID NO: 1828049 - DNA, 25 bp, Homo sapien
aaagctggcttctgatgctttctgc

SEQ ID NO: 1828050 - DNA, 25 bp, Homo sapien
aagctggcttctgatgctttctgca

SEQ ID NO: 1828051 - DNA, 25 bp, Homo sapien
cttcaaagctggcttctgatgcttt

SEQ ID NO: 1828052 - DNA, 25 bp, Homo sapien
aggagtacagtgttcacctcccagg

SEQ ID NO: 1828053 - DNA, 25 bp, Homo sapien
cattgtgaacgtacagcaggtgact

SEQ ID NO: 1828054 - DNA, 25 bp, Homo sapien
caacagagcccaccggctgtgagga

SEQ ID NO: 1828055 - DNA, 25 bp, Homo sapien
tcacccctgctgacaatatcaggag

SEQ ID NO: 1828056 - DNA, 25 bp, Homo sapien
actgtgccttccttgagaactcttc

SEQ ID NO: 1828057 - DNA, 25 bp, Homo sapien
ttctgaaagatgatgcattctatct

SEQ ID NO: 1828058 - DNA, 25 bp, Homo sapien
tctgaaagatgatgcattctatctt

SEQ ID NO: 1828059 - DNA, 25 bp, Homo sapien
ataggtgactgcagattgagggaag

SEQ ID NO: 1828060 - DNA, 25 bp, Homo sapien
tgagggaagaatcgaggcaattttc

SEQ ID NO: 1828061 - DNA, 25 bp, Homo sapien
gaatcgaggcaattttcttgctaat

SEQ ID NO: 1828062 - DNA, 25 bp, Homo sapien
agattgagggaagaatcgaggcaat

SEQ ID NO: 1828063 - DNA, 25 bp, Homo sapien
ttccacgtctgcatgtagagacatc

SEQ ID NO: 1828064 - DNA, 25 bp, Homo sapien
tgaagagatactgggagtgactgac

SEQ ID NO: 1828065 - DNA, 25 bp, Homo sapien
caaatgacagctttatgtttccacg

SEQ ID NO: 1828066 - DNA, 25 bp, Homo sapien
cacagcttcggccttagtcgtttga

SEQ ID NO: 1828067 - DNA, 25 bp, Homo sapien
caacaaaggtattcctgaacatgca

SEQ ID NO: 1828068 - DNA, 25 bp, Homo sapien
ccagtgagagcaacaaaggtattcc

SEQ ID NO: 1828069 - DNA, 25 bp, Homo sapien
catgcacgtgaaaagtctgcatcgc

SEQ ID NO: 1828070 - DNA, 25 bp, Homo sapien
ctgaacatgcacgtgaaaagtctgc

SEQ ID NO: 1828071 - DNA, 25 bp, Homo sapien
gagcccctccgatgctgatgcagat

SEQ ID NO: 1828072 - DNA, 25 bp, Homo sapien
taaatgccctgaacacatctctgct

SEQ ID NO: 1828073 - DNA, 25 bp, Homo sapien
gcatgtagctttccctaatacggag

SEQ ID NO: 1828074 - DNA, 25 bp, Homo sapien
tctctttcggaattcgcatgtagct

SEQ ID NO: 1828075 - DNA, 25 bp, Homo sapien
tcaagggtccttcgcacttaggagg

SEQ ID NO: 1828076 - DNA, 25 bp, Homo sapien
ccttgttaatatcagggcccgttat

SEQ ID NO: 1828077 - DNA, 25 bp, Homo sapien
tcctcagggcgaaaacatcaaggat

SEQ ID NO: 1828078 - DNA, 25 bp, Homo sapien
tgacacccatgattaagataccctt

SEQ ID NO: 1828079 - DNA, 25 bp, Homo sapien
taagggttatgagctcagtcttcgg

SEQ ID NO: 1828080 - DNA, 25 bp, Homo sapien
gaggcaggttgaaacaatgatctct

SEQ ID NO: 1828081 - DNA, 25 bp, Homo sapien
tcttcggagctggacagatctggtt

SEQ ID NO: 1828082 - DNA, 25 bp, Homo sapien
atcagactagcctagaatcacagcg

SEQ ID NO: 1828083 - DNA, 25 bp, Homo sapien
aaatggaagcgcataactgtctgcg

SEQ ID NO: 1828084 - DNA, 25 bp, Homo sapien
tgtctgcgtttgtggatggcactga

SEQ ID NO: 1828085 - DNA, 25 bp, Homo sapien
tacaataactgttcatagccaacac

SEQ ID NO: 1828086 - DNA, 25 bp, Homo sapien
ttatctgagagtaagttaacagttc

SEQ ID NO: 1828087 - DNA, 25 bp, Homo sapien
gagccctagtatgcccaatttgaaa

SEQ ID NO: 1828088 - DNA, 25 bp, Homo sapien
gcaagcctttgctgtgaacgtgagg

SEQ ID NO: 1828089 - DNA, 25 bp, Homo sapien
gtgctttgcacctagaggacactga

SEQ ID NO: 1828090 - DNA, 25 bp, Homo sapien
aactatttatggagccctgtaggca

SEQ ID NO: 1828091 - DNA, 25 bp, Homo sapien
tggagaaggcctattttatggttca

SEQ ID NO: 1828092 - DNA, 25 bp, Homo sapien
gcagattcaatatctggagaaggcc

SEQ ID NO: 1828093 - DNA, 25 bp, Homo sapien
ttaaggtactggcagattcaatatc

SEQ ID NO: 1828094 - DNA, 25 bp, Homo sapien
caatatctggagaaggcctatttta

SEQ ID NO: 1828095 - DNA, 25 bp, Homo sapien
ttagatggacctgagttgagctgag

SEQ ID NO: 1828096 - DNA, 25 bp, Homo sapien
atggacctgagttgagctgaggata

SEQ ID NO: 1828097 - DNA, 25 bp, Homo sapien
cctgagttgagctgaggatagtctt

SEQ ID NO: 1828098 - DNA, 25 bp, Homo sapien
atgatttagatggacctgagttgag

SEQ ID NO: 1828099 - DNA, 25 bp, Homo sapien
aagttcctgtttcacagggatggca

SEQ ID NO: 1828100 - DNA, 25 bp, Homo sapien
tcacagggatggcatgcagaaagcc

SEQ ID NO: 1828101 - DNA, 25 bp, Homo sapien
gagaagaacatgcaacttagcaagg

SEQ ID NO: 1828102 - DNA, 25 bp, Homo sapien
cattagtgatagtgagacacattct

SEQ ID NO: 1828103 - DNA, 25 bp, Homo sapien
ccttcttgtcccatggcactgtcag

SEQ ID NO: 1828104 - DNA, 25 bp, Homo sapien
tccttcttgtcccatggcactgtca

SEQ ID NO: 1828105 - DNA, 25 bp, Homo sapien
tgtctgaaatccatccagggaattt

SEQ ID NO: 1828106 - DNA, 25 bp, Homo sapien
caggataaaagcaggaatgtctcct

SEQ ID NO: 1828107 - DNA, 25 bp, Homo sapien
tgtctcagtccccaatgtgtgctcc

SEQ ID NO: 1828108 - DNA, 25 bp, Homo sapien
gtccccaatgtgtgctccaggataa

SEQ ID NO: 1828109 - DNA, 25 bp, Homo sapien
ctggccctgtgttgattcaacagct

SEQ ID NO: 1828110 - DNA, 25 bp, Homo sapien
ctgtgggaaattcagaagccaggct

SEQ ID NO: 1828111 - DNA, 25 bp, Homo sapien
ttcaacagctgtgggaaattcagaa

SEQ ID NO: 1828112 - DNA, 25 bp, Homo sapien
caacagctgtgggaaattcagaagc

SEQ ID NO: 1828113 - DNA, 25 bp, Homo sapien
ataggagtgggcacagtgttccctg

SEQ ID NO: 1828114 - DNA, 25 bp, Homo sapien
taggagtgggcacagtgttccctga

SEQ ID NO: 1828115 - DNA, 25 bp, Homo sapien
cttataggagtgggcacagtgttcc

SEQ ID NO: 1828116 - DNA, 25 bp, Homo sapien
tataggagtgggcacagtgttccct

SEQ ID NO: 1828117 - DNA, 25 bp, Homo sapien
tcagcatccacgtatgagagagtct

SEQ ID NO: 1828118 - DNA, 25 bp, Homo sapien
tccacgtatgagagagtctctgaag

SEQ ID NO: 1828119 - DNA, 25 bp, Homo sapien
gcatccacgtatgagagagtctctg

SEQ ID NO: 1828120 - DNA, 25 bp, Homo sapien
tatgagagagtctctgaagatccca

SEQ ID NO: 1828121 - DNA, 25 bp, Homo sapien
gacttctatttgcagctctaaggga

SEQ ID NO: 1828122 - DNA, 25 bp, Homo sapien
agccaatggagggatgacttctatt

SEQ ID NO: 1828123 - DNA, 25 bp, Homo sapien
gctctaagggagtcaaggtgaaaac

SEQ ID NO: 1828124 - DNA, 25 bp, Homo sapien
tgtgctagccaatggagggatgact

SEQ ID NO: 1828125 - DNA, 25 bp, Homo sapien
cctttgcgctggtggaagacacaag

SEQ ID NO: 1828126 - DNA, 25 bp, Homo sapien
tcccgggacaggagagataagctcg

SEQ ID NO: 1828127 - DNA, 25 bp, Homo sapien
tgcctcactgcagaagcaaccgata

SEQ ID NO: 1828128 - DNA, 25 bp, Homo sapien
caggatgcccttaattcccgggaca

SEQ ID NO: 1828129 - DNA, 25 bp, Homo sapien
tgtccccttactgctatctaaaccg

SEQ ID NO: 1828130 - DNA, 25 bp, Homo sapien
tttccttgttggcttgtagctggtc

SEQ ID NO: 1828131 - DNA, 25 bp, Homo sapien
ggcttgtagctggtctgatgtcccc

SEQ ID NO: 1828132 - DNA, 25 bp, Homo sapien
taggcacgcgtttgccactctccat

SEQ ID NO: 1828133 - DNA, 25 bp, Homo sapien
ttgtctacaccacgaagcccggatt

SEQ ID NO: 1828134 - DNA, 25 bp, Homo sapien
tagtcaggcctttcacactgggctg

SEQ ID NO: 1828135 - DNA, 25 bp, Homo sapien
aaagggactctgtgttcgtgactgc

SEQ ID NO: 1828136 - DNA, 25 bp, Homo sapien
ccggattccattccctggtagtcag

SEQ ID NO: 1828137 - DNA, 25 bp, Homo sapien
tctgccggcctctgagctcgggcag

SEQ ID NO: 1828138 - DNA, 25 bp, Homo sapien
ggtacataattccacctgttctgtg

SEQ ID NO: 1828139 - DNA, 25 bp, Homo sapien
tctgagctcgggcagtgttgtgtac

SEQ ID NO: 1828140 - DNA, 25 bp, Homo sapien
ctttctggtacataattccacctgt

SEQ ID NO: 1828141 - DNA, 25 bp, Homo sapien
tggtgactgactgcataaggtactg

SEQ ID NO: 1828142 - DNA, 25 bp, Homo sapien
tctgttgccgtgaagacaactgcaa

SEQ ID NO: 1828143 - DNA, 25 bp, Homo sapien
catgcatgagttgttccatccgagc

SEQ ID NO: 1828144 - DNA, 25 bp, Homo sapien
ccgagcttttgtgcacgtggagagc

SEQ ID NO: 1828145 - DNA, 25 bp, Homo sapien
tccttgctaaagtagagaacactgt

SEQ ID NO: 1828146 - DNA, 25 bp, Homo sapien
aagagatcccaagctgagctggcca

SEQ ID NO: 1828147 - DNA, 25 bp, Homo sapien
tagggcctggaattgttagcaaggc

SEQ ID NO: 1828148 - DNA, 25 bp, Homo sapien
gcaaggcccgtgtcacacacagagc

SEQ ID NO: 1828149 - DNA, 25 bp, Homo sapien
cggtgatccgagaataacaagagca

SEQ ID NO: 1828150 - DNA, 25 bp, Homo sapien
taatgaagggcacgctttacagagg

SEQ ID NO: 1828151 - DNA, 25 bp, Homo sapien
ggatgaaatttgcagagcctacgag

SEQ ID NO: 1828152 - DNA, 25 bp, Homo sapien
gctatctagggatggcgagacacct

SEQ ID NO: 1828153 - DNA, 25 bp, Homo sapien
gggtgcttgggacaaagccctgtaa

SEQ ID NO: 1828154 - DNA, 25 bp, Homo sapien
gcttgggacaaagccctgtaaccag

SEQ ID NO: 1828155 - DNA, 25 bp, Homo sapien
gaaagtggggtgcttgggacaaagc

SEQ ID NO: 1828156 - DNA, 25 bp, Homo sapien
ggtgcttgggacaaagccctgtaac

SEQ ID NO: 1828157 - DNA, 25 bp, Homo sapien
taactctctgccactgtttcccaca

SEQ ID NO: 1828158 - DNA, 25 bp, Homo sapien
tgctttctctaactctctgccactg

SEQ ID NO: 1828159 - DNA, 25 bp, Homo sapien
ttctctaactctctgccactgtttc

SEQ ID NO: 1828160 - DNA, 25 bp, Homo sapien
tgccactgtttcccacatcagttct

SEQ ID NO: 1828161 - DNA, 25 bp, Homo sapien
cagaacatgcctcgggtcactgggt

SEQ ID NO: 1828162 - DNA, 25 bp, Homo sapien
aagaccacacagagagccggggacc

SEQ ID NO: 1828163 - DNA, 25 bp, Homo sapien
agccggggaccagaacatgcctcgg

SEQ ID NO: 1828164 - DNA, 25 bp, Homo sapien
tccagcacactttccctgaagctca

SEQ ID NO: 1828165 - DNA, 25 bp, Homo sapien
aatatgcagtggtggctgtaggcac

SEQ ID NO: 1828166 - DNA, 25 bp, Homo sapien
tgggagccaggagcattaatgaact

SEQ ID NO: 1828167 - DNA, 25 bp, Homo sapien
ggtgaggacacagcgcttcaaggct

SEQ ID NO: 1828168 - DNA, 25 bp, Homo sapien
tgtctctagacacaggaaatgggat

SEQ ID NO: 1828169 - DNA, 25 bp, Homo sapien
ttcttggccagtccaccagacagtt

SEQ ID NO: 1828170 - DNA, 25 bp, Homo sapien
atctcacctctgtcagcattcttgg

SEQ ID NO: 1828171 - DNA, 25 bp, Homo sapien
gaagctggcatctcacctctgtcag

SEQ ID NO: 1828172 - DNA, 25 bp, Homo sapien
tctgtcagcattcttggccagtcca

SEQ ID NO: 1828173 - DNA, 25 bp, Homo sapien
gacatttaaatcaacgttctctggg

SEQ ID NO: 1828174 - DNA, 25 bp, Homo sapien
tctggttgccaatggccgtggtaat

SEQ ID NO: 1828175 - DNA, 25 bp, Homo sapien
tagctaaataaaccgcaccactgac

SEQ ID NO: 1828176 - DNA, 25 bp, Homo sapien
gctccagttcctgaaatagctaaat

SEQ ID NO: 1828177 - DNA, 25 bp, Homo sapien
tatggtcaccaacatactggttccc

SEQ ID NO: 1828178 - DNA, 25 bp, Homo sapien
tcaccaacatactggttcccatggc

SEQ ID NO: 1828179 - DNA, 25 bp, Homo sapien
tggtcaccaacatactggttcccat

SEQ ID NO: 1828180 - DNA, 25 bp, Homo sapien
gtcaccaacatactggttcccatgg

SEQ ID NO: 1828181 - DNA, 25 bp, Homo sapien
ccaggctatcaggaatgattctctg

SEQ ID NO: 1828182 - DNA, 25 bp, Homo sapien
caagcctctcaaccaggctatcagg

SEQ ID NO: 1828183 - DNA, 25 bp, Homo sapien
atcaggaatgattctctgttgggtc

SEQ ID NO: 1828184 - DNA, 25 bp, Homo sapien
tctctgttgggtccccaactgatga

SEQ ID NO: 1828185 - DNA, 25 bp, Homo sapien
gaaacagggcaattcctggtgcaac

SEQ ID NO: 1828186 - DNA, 25 bp, Homo sapien
tacacgtatatatagcctcctggac

SEQ ID NO: 1828187 - DNA, 25 bp, Homo sapien
tatagtagccagtagcctcctgtag

SEQ ID NO: 1828188 - DNA, 25 bp, Homo sapien
gcctcccaaggctataagataaaga

SEQ ID NO: 1828189 - DNA, 25 bp, Homo sapien
tttcatatccttttgtacgaggctg

SEQ ID NO: 1828190 - DNA, 25 bp, Homo sapien
agctcgtgacaacaccttctctttg

SEQ ID NO: 1828191 - DNA, 25 bp, Homo sapien
cgtgacaacaccttctctttggcct

SEQ ID NO: 1828192 - DNA, 25 bp, Homo sapien
tccttttgtacgaggctgggtgaga

SEQ ID NO: 1828193 - DNA, 25 bp, Homo sapien
ctccttcactcaggcgataagcatg

SEQ ID NO: 1828194 - DNA, 25 bp, Homo sapien
tctcgggtgactttgttcttgcatc

SEQ ID NO: 1828195 - DNA, 25 bp, Homo sapien
cactcaggcgataagcatgacatat

SEQ ID NO: 1828196 - DNA, 25 bp, Homo sapien
gataagcatgacatatcgagctact

SEQ ID NO: 1828197 - DNA, 25 bp, Homo sapien
ctcaaccagggctgctttgacttga

SEQ ID NO: 1828198 - DNA, 25 bp, Homo sapien
gctttgacttgagtatgcttgtttg

SEQ ID NO: 1828199 - DNA, 25 bp, Homo sapien
gaggacacctcaaccagggctgctt

SEQ ID NO: 1828200 - DNA, 25 bp, Homo sapien
gacttgagtatgcttgtttggccag

SEQ ID NO: 1828201 - DNA, 25 bp, Homo sapien
tgaactgcagtgtaaaacagaatcc

SEQ ID NO: 1828202 - DNA, 25 bp, Homo sapien
ctcttaaggctaaatggcaggatga

SEQ ID NO: 1828203 - DNA, 25 bp, Homo sapien
cacgaataagcgcagagtgtctctt

SEQ ID NO: 1828204 - DNA, 25 bp, Homo sapien
gaaaagcaacttcgtgtttctcaag

SEQ ID NO: 1828205 - DNA, 25 bp, Homo sapien
gaggcctgcctagcaatggatctga

SEQ ID NO: 1828206 - DNA, 25 bp, Homo sapien
tgtgtgctatcttcccgctctgagc

SEQ ID NO: 1828207 - DNA, 25 bp, Homo sapien
taggtgactaaaacaaatccaggag

SEQ ID NO: 1828208 - DNA, 25 bp, Homo sapien
cagtccctttgctacatgcctcagg

SEQ ID NO: 1828209 - DNA, 25 bp, Homo sapien
tttaggaaacggtgcccagtctgac

SEQ ID NO: 1828210 - DNA, 25 bp, Homo sapien
taatgttatttacagcggccccagt

SEQ ID NO: 1828211 - DNA, 25 bp, Homo sapien
cgattatgattgtcacgcctggcct

SEQ ID NO: 1828212 - DNA, 25 bp, Homo sapien
taatgggcaacgctcaaggaaaacc

SEQ ID NO: 1828213 - DNA, 25 bp, Homo sapien
ggcgctgcagggatgaccaagttaa

SEQ ID NO: 1828214 - DNA, 25 bp, Homo sapien
caaacttgggcgaagctgttggagc

SEQ ID NO: 1828215 - DNA, 25 bp, Homo sapien
tgaaacggtttgagcgtacactccc

SEQ ID NO: 1828216 - DNA, 25 bp, Homo sapien
tgcagactcgagcaggacaaaccgt

SEQ ID NO: 1828217 - DNA, 25 bp, Homo sapien
cattccattggtgctgattatcaca

SEQ ID NO: 1828218 - DNA, 25 bp, Homo sapien
agaaatgagaaaccgcagataagca

SEQ ID NO: 1828219 - DNA, 25 bp, Homo sapien
catcctcgagattataacaaaagtg

SEQ ID NO: 1828220 - DNA, 25 bp, Homo sapien
tgaaagtggcgatcaaagctacctt

SEQ ID NO: 1828221 - DNA, 25 bp, Homo sapien
agtaagcgcgatggtaggcccgact

SEQ ID NO: 1828222 - DNA, 25 bp, Homo sapien
cgaacagcagtaagcgcgatggtag

SEQ ID NO: 1828223 - DNA, 25 bp, Homo sapien
tggtaggcccgactctctccattgc

SEQ ID NO: 1828224 - DNA, 25 bp, Homo sapien
ctgtgacgaacagcagtaagcgcga

SEQ ID NO: 1828225 - DNA, 25 bp, Homo sapien
gaagcagcatctttgttgaggtgtg

SEQ ID NO: 1828226 - DNA, 25 bp, Homo sapien
gcatctttgttgaggtgtgaagagc

SEQ ID NO: 1828227 - DNA, 25 bp, Homo sapien
cctgctacagggactcaccagttct

SEQ ID NO: 1828228 - DNA, 25 bp, Homo sapien
gttcttggtgtcacctgctacaggg

SEQ ID NO: 1828229 - DNA, 25 bp, Homo sapien
atgatcctccggatgtaattagaaa

SEQ ID NO: 1828230 - DNA, 25 bp, Homo sapien
ttaaatgatcctccggatgtaatta

SEQ ID NO: 1828231 - DNA, 25 bp, Homo sapien
cggatgtaattagaaaaaactcgag

SEQ ID NO: 1828232 - DNA, 25 bp, Homo sapien
aaatgatcctccggatgtaattaga

SEQ ID NO: 1828233 - DNA, 25 bp, Homo sapien
aaaacagtagagttgtgagacaatc

SEQ ID NO: 1828234 - DNA, 25 bp, Homo sapien
tggtacaccacatttgagcagacat

SEQ ID NO: 1828235 - DNA, 25 bp, Homo sapien
tgtttatagccttcagcgtcccaga

SEQ ID NO: 1828236 - DNA, 25 bp, Homo sapien
cagaagcatcttgttatctcatggg

SEQ ID NO: 1828237 - DNA, 25 bp, Homo sapien
gagtgaaaggaatgctcaatcctgg

SEQ ID NO: 1828238 - DNA, 25 bp, Homo sapien
caatcctggtcttggggttttctag

SEQ ID NO: 1828239 - DNA, 25 bp, Homo sapien
atttgcctgggtagcagtgctgctg

SEQ ID NO: 1828240 - DNA, 25 bp, Homo sapien
agtgctgctgccgatggcagagaga

SEQ ID NO: 1828241 - DNA, 25 bp, Homo sapien
tgatgttttaaaacaaggcagttag

SEQ ID NO: 1828242 - DNA, 25 bp, Homo sapien
tgtgatgttttaaaacaaggcagtt

SEQ ID NO: 1828243 - DNA, 25 bp, Homo sapien
ctgtgatgttttaaaacaaggcagt

SEQ ID NO: 1828244 - DNA, 25 bp, Homo sapien
gatgttttaaaacaaggcagttaga

SEQ ID NO: 1828245 - DNA, 25 bp, Homo sapien
ttcaggtgcaagctgccccttcgga

SEQ ID NO: 1828246 - DNA, 25 bp, Homo sapien
aagctgccccttcggataatttcct

SEQ ID NO: 1828247 - DNA, 25 bp, Homo sapien
caggtgcaagctgccccttcggata

SEQ ID NO: 1828248 - DNA, 25 bp, Homo sapien
tgcaagctgccccttcggataattt

SEQ ID NO: 1828249 - DNA, 25 bp, Homo sapien
tccagcgctccacgtgggtgggcct

SEQ ID NO: 1828250 - DNA, 25 bp, Homo sapien
ttcattagtaataacagacacgctg

SEQ ID NO: 1828251 - DNA, 25 bp, Homo sapien
tacaaccattcaggatcagctacca

SEQ ID NO: 1828252 - DNA, 25 bp, Homo sapien
cgtaaggcatgaagtgtcctgggtc

SEQ ID NO: 1828253 - DNA, 25 bp, Homo sapien
gctgcttgtgttaacatgctctcta

SEQ ID NO: 1828254 - DNA, 25 bp, Homo sapien
ctgcagggctgcttgtgttaacatg

SEQ ID NO: 1828255 - DNA, 25 bp, Homo sapien
tgtgttaacatgctctctagagggc

SEQ ID NO: 1828256 - DNA, 25 bp, Homo sapien
ttaacatgctctctagagggctcat

SEQ ID NO: 1828257 - DNA, 25 bp, Homo sapien
tccagtctgtgaagcgtgacactcc

SEQ ID NO: 1828258 - DNA, 25 bp, Homo sapien
caaaggaccctctgtagtcagaaga

SEQ ID NO: 1828259 - DNA, 25 bp, Homo sapien
caaggatctatccagaagggtgggt

SEQ ID NO: 1828260 - DNA, 25 bp, Homo sapien
ctctgccaagagtaacaagtgtgtt

SEQ ID NO: 1828261 - DNA, 25 bp, Homo sapien
catctctgggtaaacctctggcttt

SEQ ID NO: 1828262 - DNA, 25 bp, Homo sapien
agccatctctgggtaaacctctggc

SEQ ID NO: 1828263 - DNA, 25 bp, Homo sapien
caagccatctctgggtaaacctctg

SEQ ID NO: 1828264 - DNA, 25 bp, Homo sapien
ctcaccaagccatctctgggtaaac

SEQ ID NO: 1828265 - DNA, 25 bp, Homo sapien
ttgtagcaagtcctgcgtggtcccc

SEQ ID NO: 1828266 - DNA, 25 bp, Homo sapien
gtcagcagggccgtaggcacaactg

SEQ ID NO: 1828267 - DNA, 25 bp, Homo sapien
caactgagataagggatgtttgcct

SEQ ID NO: 1828268 - DNA, 25 bp, Homo sapien
tgggaacacccacatcctcaaggtg

SEQ ID NO: 1828269 - DNA, 25 bp, Homo sapien
cgacttgaccttcatggccattagg

SEQ ID NO: 1828270 - DNA, 25 bp, Homo sapien
tagagaagcctttaccgacttgacc

SEQ ID NO: 1828271 - DNA, 25 bp, Homo sapien
tatgaaggtcaaattagttccaaaa

SEQ ID NO: 1828272 - DNA, 25 bp, Homo sapien
tctgatttccattaggtacagcaac

SEQ ID NO: 1828273 - DNA, 25 bp, Homo sapien
ttgtctcgggttgtcaatgggccca

SEQ ID NO: 1828274 - DNA, 25 bp, Homo sapien
cagcttcttcatgggaggttccttc

SEQ ID NO: 1828275 - DNA, 25 bp, Homo sapien
tagacagtcacctgggacgtagcca

SEQ ID NO: 1828276 - DNA, 25 bp, Homo sapien
tttgtcaccgctggccttgtctcgg

SEQ ID NO: 1828277 - DNA, 25 bp, Homo sapien
ttcttcactgagctcgcctagaacc

SEQ ID NO: 1828278 - DNA, 25 bp, Homo sapien
tcttcactgagctcgcctagaaccg

SEQ ID NO: 1828279 - DNA, 25 bp, Homo sapien
cactgagctcgcctagaaccgtgag

SEQ ID NO: 1828280 - DNA, 25 bp, Homo sapien
gagctcgcctagaaccgtgagtgag

SEQ ID NO: 1828281 - DNA, 25 bp, Homo sapien
tggtaacacctttcttcgagtctaa

SEQ ID NO: 1828282 - DNA, 25 bp, Homo sapien
tcttccttatcctcatcagattggg

SEQ ID NO: 1828283 - DNA, 25 bp, Homo sapien
cagggctaagacactgctcagggaa

SEQ ID NO: 1828284 - DNA, 25 bp, Homo sapien
tgcgtctggaaggtatggtaacacc

SEQ ID NO: 1828285 - DNA, 25 bp, Homo sapien
gatgtccaccatgctgtagggcagc

SEQ ID NO: 1828286 - DNA, 25 bp, Homo sapien
attgcacagccatttatgggactgg

SEQ ID NO: 1828287 - DNA, 25 bp, Homo sapien
aacacggatgccaggtggctggacc

SEQ ID NO: 1828288 - DNA, 25 bp, Homo sapien
gtactcatttgagcagcgagaggga

SEQ ID NO: 1828289 - DNA, 25 bp, Homo sapien
attctgtttgtggatttcctgttga

SEQ ID NO: 1828290 - DNA, 25 bp, Homo sapien
ggatttcctgttgatttcccatcca

SEQ ID NO: 1828291 - DNA, 25 bp, Homo sapien
tcctgttgatttcccatccagacag

SEQ ID NO: 1828292 - DNA, 25 bp, Homo sapien
ctgattctgtttgtggatttcctgt

SEQ ID NO: 1828293 - DNA, 25 bp, Homo sapien
gagccagtgcagaagtaatgcatca

SEQ ID NO: 1828294 - DNA, 25 bp, Homo sapien
cagtattcacgtctaataacttggg

SEQ ID NO: 1828295 - DNA, 25 bp, Homo sapien
tgtgactaacttgtcccaaagaaag

SEQ ID NO: 1828296 - DNA, 25 bp, Homo sapien
gactggctgccgattctgtttcttc

SEQ ID NO: 1828297 - DNA, 25 bp, Homo sapien
cacacttcccaactatcgacaccgg

SEQ ID NO: 1828298 - DNA, 25 bp, Homo sapien
acacacttcccaactatcgacaccg

SEQ ID NO: 1828299 - DNA, 25 bp, Homo sapien
gtctttgctcctcgagctccaggga

SEQ ID NO: 1828300 - DNA, 25 bp, Homo sapien
gattggggcaggcatctggttctcc

SEQ ID NO: 1828301 - DNA, 25 bp, Homo sapien
aatagagtgggtgatacgggtgatt

SEQ ID NO: 1828302 - DNA, 25 bp, Homo sapien
ctcccactgactgcggctcccaaat

SEQ ID NO: 1828303 - DNA, 25 bp, Homo sapien
ttattgtttgcactgtaatttggag

SEQ ID NO: 1828304 - DNA, 25 bp, Homo sapien
gaaagggtgggctgcactgataagg

SEQ ID NO: 1828305 - DNA, 25 bp, Homo sapien
aaagggtgggctgcactgataagga

SEQ ID NO: 1828306 - DNA, 25 bp, Homo sapien
aacggctcattaaaagactcagctg

SEQ ID NO: 1828307 - DNA, 25 bp, Homo sapien
attcagccctcattatgaaacggct

SEQ ID NO: 1828308 - DNA, 25 bp, Homo sapien
gactcagctgaaggaaaatcctgcc

SEQ ID NO: 1828309 - DNA, 25 bp, Homo sapien
taaaccttggctagcatgtagatac

SEQ ID NO: 1828310 - DNA, 25 bp, Homo sapien
taatgtcctataggatgacaccaga

SEQ ID NO: 1828311 - DNA, 25 bp, Homo sapien
aggtgacggcaggaaggcttgctcc

SEQ ID NO: 1828312 - DNA, 25 bp, Homo sapien
caacacaatcttgagttggttttaa

SEQ ID NO: 1828313 - DNA, 25 bp, Homo sapien
tctgggccactggtacagccaatgc

SEQ ID NO: 1828314 - DNA, 25 bp, Homo sapien
ctggagcagcagaatggatcaaaac

SEQ ID NO: 1828315 - DNA, 25 bp, Homo sapien
aaaacaaggcagacacacaatgccc

SEQ ID NO: 1828316 - DNA, 25 bp, Homo sapien
tggagcagcagaatggatcaaaaca

SEQ ID NO: 1828317 - DNA, 25 bp, Homo sapien
catgagcatgaaatgatatagaatc

SEQ ID NO: 1828318 - DNA, 25 bp, Homo sapien
tcagcaaagactgaagcaggtgggt

SEQ ID NO: 1828319 - DNA, 25 bp, Homo sapien
cataaattgtcactgtaaattctca

SEQ ID NO: 1828320 - DNA, 25 bp, Homo sapien
tgtcattctcctaaagagagtccca

SEQ ID NO: 1828321 - DNA, 25 bp, Homo sapien
ggccttgcgcaaggcacgctgtttg

SEQ ID NO: 1828322 - DNA, 25 bp, Homo sapien
ggcacgctgtttggacctcagttgt

SEQ ID NO: 1828323 - DNA, 25 bp, Homo sapien
cgcaaggcacgctgtttggacctca

SEQ ID NO: 1828324 - DNA, 25 bp, Homo sapien
gctgtttggacctcagttgttggct

SEQ ID NO: 1828325 - DNA, 25 bp, Homo sapien
gaatatatggcttgaggcaagttac

SEQ ID NO: 1828326 - DNA, 25 bp, Homo sapien
tcacatctcggtgccgaatatatgg

SEQ ID NO: 1828327 - DNA, 25 bp, Homo sapien
tctcggtgccgaatatatggcttga

SEQ ID NO: 1828328 - DNA, 25 bp, Homo sapien
cggtgccgaatatatggcttgaggc

SEQ ID NO: 1828329 - DNA, 25 bp, Homo sapien
taagacttgatatgtactcagtcaa

SEQ ID NO: 1828330 - DNA, 25 bp, Homo sapien
gaagtatacagtgtaagacttgata

SEQ ID NO: 1828331 - DNA, 25 bp, Homo sapien
cagtgtaagacttgatatgtactca

SEQ ID NO: 1828332 - DNA, 25 bp, Homo sapien
agttagtgcatgtgaagtatacagt

SEQ ID NO: 1828333 - DNA, 25 bp, Homo sapien
tggaaggctctatttgtgaccactc

SEQ ID NO: 1828334 - DNA, 25 bp, Homo sapien
tttggaaggctctatttgtgaccac

SEQ ID NO: 1828335 - DNA, 25 bp, Homo sapien
atttggaaggctctatttgtgacca

SEQ ID NO: 1828336 - DNA, 25 bp, Homo sapien
ttggaaggctctatttgtgaccact

SEQ ID NO: 1828337 - DNA, 25 bp, Homo sapien
caaagtcacaagcataaggctggat

SEQ ID NO: 1828338 - DNA, 25 bp, Homo sapien
aagtcacaagcataaggctggatgg

SEQ ID NO: 1828339 - DNA, 25 bp, Homo sapien
gtcacaagcataaggctggatggca

SEQ ID NO: 1828340 - DNA, 25 bp, Homo sapien
tcacaaagtcacaagcataaggctg

SEQ ID NO: 1828341 - DNA, 25 bp, Homo sapien
cagcgctgctatgcgaccttggcta

SEQ ID NO: 1828342 - DNA, 25 bp, Homo sapien
aaccaaattcttgcaatgcggtggg

SEQ ID NO: 1828343 - DNA, 25 bp, Homo sapien
cattaataagtgtgggcttggcaga

SEQ ID NO: 1828344 - DNA, 25 bp, Homo sapien
ccttggctatctgagcagcagcacc

SEQ ID NO: 1828345 - DNA, 25 bp, Homo sapien
tatctttctactacagggctgtttt

SEQ ID NO: 1828346 - DNA, 25 bp, Homo sapien
atctttctactacagggctgttttc

SEQ ID NO: 1828347 - DNA, 25 bp, Homo sapien
tctttctactacagggctgttttca

SEQ ID NO: 1828348 - DNA, 25 bp, Homo sapien
ttatctttctactacagggctgttt

SEQ ID NO: 1828349 - DNA, 25 bp, Homo sapien
tccgcagtgggaagtcagcctgatt

SEQ ID NO: 1828350 - DNA, 25 bp, Homo sapien
gatctaataagtggctcccattcct

SEQ ID NO: 1828351 - DNA, 25 bp, Homo sapien
caatgcagtatgtggatctgtcaac

SEQ ID NO: 1828352 - DNA, 25 bp, Homo sapien
tcctccatcggtttctcatcttcat

SEQ ID NO: 1828353 - DNA, 25 bp, Homo sapien
tcatgcacgtttgcctgcatgttga

SEQ ID NO: 1828354 - DNA, 25 bp, Homo sapien
tctggtaggaatagaacaatatggg

SEQ ID NO: 1828355 - DNA, 25 bp, Homo sapien
taggaatagaacaatatgggcttcc

SEQ ID NO: 1828356 - DNA, 25 bp, Homo sapien
cactcattttcatgcacgtttgcct

SEQ ID NO: 1828357 - DNA, 25 bp, Homo sapien
ctggagacaggatattctacagtgc

SEQ ID NO: 1828358 - DNA, 25 bp, Homo sapien
aacaatggctcatagaatccatccc

SEQ ID NO: 1828359 - DNA, 25 bp, Homo sapien
ataggccaggcggagagtcagatcc

SEQ ID NO: 1828360 - DNA, 25 bp, Homo sapien
gacaggatattctacagtgcttgct

SEQ ID NO: 1828361 - DNA, 25 bp, Homo sapien
cacagacatctttgcaaacctgcct

SEQ ID NO: 1828362 - DNA, 25 bp, Homo sapien
tctggcctcctattgctcagagatg

SEQ ID NO: 1828363 - DNA, 25 bp, Homo sapien
gaatggccaggtatccatctctctc

SEQ ID NO: 1828364 - DNA, 25 bp, Homo sapien
tcagagatgcacagaccccaggctc

SEQ ID NO: 1828365 - DNA, 25 bp, Homo sapien
cctccattgaaagatgatgcactgt

SEQ ID NO: 1828366 - DNA, 25 bp, Homo sapien
gaaaaacgggctgaattgcctccat

SEQ ID NO: 1828367 - DNA, 25 bp, Homo sapien
gcactgttcgttgtgggtgatttaa

SEQ ID NO: 1828368 - DNA, 25 bp, Homo sapien
gaaagctggtgcgtcagtgcctcta

SEQ ID NO: 1828369 - DNA, 25 bp, Homo sapien
gaaatgtaagtggagcgtgagtccc

SEQ ID NO: 1828370 - DNA, 25 bp, Homo sapien
tacttttcaggaggtgttcatcaca

SEQ ID NO: 1828371 - DNA, 25 bp, Homo sapien
cagttcagatatgccagccacagga

SEQ ID NO: 1828372 - DNA, 25 bp, Homo sapien
tatccaataaatgtcccacgcgtga

SEQ ID NO: 1828373 - DNA, 25 bp, Homo sapien
aatgttcacagaagggaggttctgc

SEQ ID NO: 1828374 - DNA, 25 bp, Homo sapien
agaagggaggttctgctcagttttt

SEQ ID NO: 1828375 - DNA, 25 bp, Homo sapien
gaaaacaacctattgaaaatgttca

SEQ ID NO: 1828376 - DNA, 25 bp, Homo sapien
gaggttctgctcagtttttggaaga

SEQ ID NO: 1828377 - DNA, 25 bp, Homo sapien
caggagactggagcttgattgcatt

SEQ ID NO: 1828378 - DNA, 25 bp, Homo sapien
tgaaggcagtcatcacagcaggaga

SEQ ID NO: 1828379 - DNA, 25 bp, Homo sapien
catagtggattagagtgtaccttca

SEQ ID NO: 1828380 - DNA, 25 bp, Homo sapien
tcagaattatctcagccgaagggca

SEQ ID NO: 1828381 - DNA, 25 bp, Homo sapien
cccgttcgtgtcagttaagaagctc

SEQ ID NO: 1828382 - DNA, 25 bp, Homo sapien
gtgtcagttaagaagctctctccgg

SEQ ID NO: 1828383 - DNA, 25 bp, Homo sapien
gagccccgttcgtgtcagttaagaa

SEQ ID NO: 1828384 - DNA, 25 bp, Homo sapien
aatggagccccgttcgtgtcagtta

SEQ ID NO: 1828385 - DNA, 25 bp, Homo sapien
atgaatgttgtccccggaagaagta

SEQ ID NO: 1828386 - DNA, 25 bp, Homo sapien
cttagaaggtacacttgtgaaatct

SEQ ID NO: 1828387 - DNA, 25 bp, Homo sapien
gaaggtacacttgtgaaatctttaa

SEQ ID NO: 1828388 - DNA, 25 bp, Homo sapien
tgaatgttgtccccggaagaagtag

SEQ ID NO: 1828389 - DNA, 25 bp, Homo sapien
caccaagctgggtttagtgcttaca

SEQ ID NO: 1828390 - DNA, 25 bp, Homo sapien
tgcttacaaggaaccatagagttgc

SEQ ID NO: 1828391 - DNA, 25 bp, Homo sapien
aagaccctaacacttaagttgctgg

SEQ ID NO: 1828392 - DNA, 25 bp, Homo sapien
gataacgttgctcagccagtgacca

SEQ ID NO: 1828393 - DNA, 25 bp, Homo sapien
tttgctttgctggtgaaatccccgc

SEQ ID NO: 1828394 - DNA, 25 bp, Homo sapien
gcttttcgcttctcaaatgggacca

SEQ ID NO: 1828395 - DNA, 25 bp, Homo sapien
tcttcagaaatgtcttcaccttttc

SEQ ID NO: 1828396 - DNA, 25 bp, Homo sapien
gccacaagtttgaccagggctgctt

SEQ ID NO: 1828397 - DNA, 25 bp, Homo sapien
tcccccatatcccaacacacagttg

SEQ ID NO: 1828398 - DNA, 25 bp, Homo sapien
tttgtctcccccatatcccaacaca

SEQ ID NO: 1828399 - DNA, 25 bp, Homo sapien
gtctcccccatatcccaacacacag

SEQ ID NO: 1828400 - DNA, 25 bp, Homo sapien
ccccatatcccaacacacagttgca

SEQ ID NO: 1828401 - DNA, 25 bp, Homo sapien
ctctctccatcggggtctgcttctg

SEQ ID NO: 1828402 - DNA, 25 bp, Homo sapien
ccatggccctccagtcaccagagcc

SEQ ID NO: 1828403 - DNA, 25 bp, Homo sapien
ctgcttctgtcaggtgggcatcagc

SEQ ID NO: 1828404 - DNA, 25 bp, Homo sapien
caccgctcagagtgggtctctctcc

SEQ ID NO: 1828405 - DNA, 25 bp, Homo sapien
tctatcaggggctcactctactcca

SEQ ID NO: 1828406 - DNA, 25 bp, Homo sapien
gatacccaatcatattctatcaggg

SEQ ID NO: 1828407 - DNA, 25 bp, Homo sapien
gataaggatacccaatcatattcta

SEQ ID NO: 1828408 - DNA, 25 bp, Homo sapien
ttcttttgataaggatacccaatca

SEQ ID NO: 1828409 - DNA, 25 bp, Homo sapien
gtccaatttatagggctccagctgg

SEQ ID NO: 1828410 - DNA, 25 bp, Homo sapien
tgtgtaatcatgatgcacatgttaa

SEQ ID NO: 1828411 - DNA, 25 bp, Homo sapien
tcttttgtcagtccaatttataggg

SEQ ID NO: 1828412 - DNA, 25 bp, Homo sapien
ctgggtacttccatgtgtaatcatg

SEQ ID NO: 1828413 - DNA, 25 bp, Homo sapien
cattacccatatacaacctcctgga

SEQ ID NO: 1828414 - DNA, 25 bp, Homo sapien
ctgtctagggcccatcttgtgtgca

SEQ ID NO: 1828415 - DNA, 25 bp, Homo sapien
gccttctgtttgtccgtctgtctag

SEQ ID NO: 1828416 - DNA, 25 bp, Homo sapien
gtttgtccgtctgtctagggcccat

SEQ ID NO: 1828417 - DNA, 25 bp, Homo sapien
gtctcaagactccaactctgggcag

SEQ ID NO: 1828418 - DNA, 25 bp, Homo sapien
tcaagactccaactctgggcaggct

SEQ ID NO: 1828419 - DNA, 25 bp, Homo sapien
cttggtctcgcctcctctctgcact

SEQ ID NO: 1828420 - DNA, 25 bp, Homo sapien
caagactccaactctgggcaggctt

SEQ ID NO: 1828421 - DNA, 25 bp, Homo sapien
gcaaagaaattaagtcaggactgaa

SEQ ID NO: 1828422 - DNA, 25 bp, Homo sapien
caaggaacctgcaatggcagaggta

SEQ ID NO: 1828423 - DNA, 25 bp, Homo sapien
ccaaagtcaaggaacctgcaatggc

SEQ ID NO: 1828424 - DNA, 25 bp, Homo sapien
agaaattaagtcaggactgaaggcc

SEQ ID NO: 1828425 - DNA, 25 bp, Homo sapien
caattgggaagccagagctctgtcc

SEQ ID NO: 1828426 - DNA, 25 bp, Homo sapien
tggttaccttggactgagcctccag

SEQ ID NO: 1828427 - DNA, 25 bp, Homo sapien
acatgcaattgggaagccagagctc

SEQ ID NO: 1828428 - DNA, 25 bp, Homo sapien
cacttcttgctggttaccttggact

SEQ ID NO: 1828429 - DNA, 25 bp, Homo sapien
tctcggtggaacggactatttgaaa

SEQ ID NO: 1828430 - DNA, 25 bp, Homo sapien
ggtggaacggactatttgaaaagca

SEQ ID NO: 1828431 - DNA, 25 bp, Homo sapien
ctctcggtggaacggactatttgaa

SEQ ID NO: 1828432 - DNA, 25 bp, Homo sapien
ccttatttgccccaatctcgtattt

SEQ ID NO: 1828433 - DNA, 25 bp, Homo sapien
cgtggaatgatgataagtgcaaaga

SEQ ID NO: 1828434 - DNA, 25 bp, Homo sapien
gataagtgcaaagaagaggtaagag

SEQ ID NO: 1828435 - DNA, 25 bp, Homo sapien
ccaatctcgtattttcgtggaatga

SEQ ID NO: 1828436 - DNA, 25 bp, Homo sapien
gaaggttcaggaaaaagcatagagg

SEQ ID NO: 1828437 - DNA, 25 bp, Homo sapien
gaaaaagcatagaggcagaagtgca

SEQ ID NO: 1828438 - DNA, 25 bp, Homo sapien
gcagaagtgcaatgaagctggcagt

SEQ ID NO: 1828439 - DNA, 25 bp, Homo sapien
ctgaagtacgttccagaggtggaga

SEQ ID NO: 1828440 - DNA, 25 bp, Homo sapien
tattggaacacaagacacgcccgtt

SEQ ID NO: 1828441 - DNA, 25 bp, Homo sapien
tttgccctacgatggcagagtcaag

SEQ ID NO: 1828442 - DNA, 25 bp, Homo sapien
catgcttctgggttaaaatctgtca

SEQ ID NO: 1828443 - DNA, 25 bp, Homo sapien
aatctgtcagggcatcctgcttgtc

SEQ ID NO: 1828444 - DNA, 25 bp, Homo sapien
ccggtgggatggttagctcctctgc

SEQ ID NO: 1828445 - DNA, 25 bp, Homo sapien
gctcccggtgggatggttagctcct

SEQ ID NO: 1828446 - DNA, 25 bp, Homo sapien
gtgggatggttagctcctctgcttg

SEQ ID NO: 1828447 - DNA, 25 bp, Homo sapien
tcccggtgggatggttagctcctct

SEQ ID NO: 1828448 - DNA, 25 bp, Homo sapien
tgaaggaaggatgaaccatagacca

SEQ ID NO: 1828449 - DNA, 25 bp, Homo sapien
tcttctgtgttctcggaggtgctgc

SEQ ID NO: 1828450 - DNA, 25 bp, Homo sapien
ctgagtaattagaagggtcgtttca

SEQ ID NO: 1828451 - DNA, 25 bp, Homo sapien
ccatagaccagagggtagttccttc

SEQ ID NO: 1828452 - DNA, 25 bp, Homo sapien
ctggagtgttttgcttcgctggcac

SEQ ID NO: 1828453 - DNA, 25 bp, Homo sapien
cttgtttgcaaagtccatatgggag

SEQ ID NO: 1828454 - DNA, 25 bp, Homo sapien
tcccgcagaggtgcatgacttggct

SEQ ID NO: 1828455 - DNA, 25 bp, Homo sapien
taacatttcacgatgagagctgagg

SEQ ID NO: 1828456 - DNA, 25 bp, Homo sapien
tcaggcctggccattgttgactcca

SEQ ID NO: 1828457 - DNA, 25 bp, Homo sapien
gtcaaaatacatcgcttcaggcctg

SEQ ID NO: 1828458 - DNA, 25 bp, Homo sapien
tctttatatggcttccctagtgtca

SEQ ID NO: 1828459 - DNA, 25 bp, Homo sapien
ccgatccaccaagcagtattcttta

SEQ ID NO: 1828460 - DNA, 25 bp, Homo sapien
cttcaggcagcaagtcttcttctgg

SEQ ID NO: 1828461 - DNA, 25 bp, Homo sapien
cctggccgagcctaggttctgaatc

SEQ ID NO: 1828462 - DNA, 25 bp, Homo sapien
ctggcaagactcctggccgagccta

SEQ ID NO: 1828463 - DNA, 25 bp, Homo sapien
cctctcacaaagagctgggttctgt

SEQ ID NO: 1828464 - DNA, 25 bp, Homo sapien
acgtggagtaagtagttgtgtcaca

SEQ ID NO: 1828465 - DNA, 25 bp, Homo sapien
aagaacgtggagtaagtagttgtgt

SEQ ID NO: 1828466 - DNA, 25 bp, Homo sapien
gaacgtggagtaagtagttgtgtca

SEQ ID NO: 1828467 - DNA, 25 bp, Homo sapien
cagaagaacgtggagtaagtagttg

SEQ ID NO: 1828468 - DNA, 25 bp, Homo sapien
agctggagttagtttgggcattgct

SEQ ID NO: 1828469 - DNA, 25 bp, Homo sapien
tctgatgagagggtgtaagctttat

SEQ ID NO: 1828470 - DNA, 25 bp, Homo sapien
agggtgtaagctttatttgtagagc

SEQ ID NO: 1828471 - DNA, 25 bp, Homo sapien
tggagttagtttgggcattgctatc

SEQ ID NO: 1828472 - DNA, 25 bp, Homo sapien
tgctttgcacatcccggaacttttt

SEQ ID NO: 1828473 - DNA, 25 bp, Homo sapien
tgttcctgacaaagcttgacaaatc

SEQ ID NO: 1828474 - DNA, 25 bp, Homo sapien
acatagcgaactaaatcctgacccg

SEQ ID NO: 1828475 - DNA, 25 bp, Homo sapien
cacatgcagcatggagagtttaaca

SEQ ID NO: 1828476 - DNA, 25 bp, Homo sapien
gatacttaaccaagccagtgaaatg

SEQ ID NO: 1828477 - DNA, 25 bp, Homo sapien
tgaaccagacaagtttcaagaacaa

SEQ ID NO: 1828478 - DNA, 25 bp, Homo sapien
ccttacaagatacttaaccaagcca

SEQ ID NO: 1828479 - DNA, 25 bp, Homo sapien
ctgaaccagacaagtttcaagaaca

SEQ ID NO: 1828480 - DNA, 25 bp, Homo sapien
tcaggataagcccagaatgagatca

SEQ ID NO: 1828481 - DNA, 25 bp, Homo sapien
ggataagcccagaatgagatcaaaa

SEQ ID NO: 1828482 - DNA, 25 bp, Homo sapien
aggataagcccagaatgagatcaaa

SEQ ID NO: 1828483 - DNA, 25 bp, Homo sapien
caggataagcccagaatgagatcaa

SEQ ID NO: 1828484 - DNA, 25 bp, Homo sapien
tgtgggaatcttttagagtgttaga

SEQ ID NO: 1828485 - DNA, 25 bp, Homo sapien
ttcttgaggacaggatgcccgtgag

SEQ ID NO: 1828486 - DNA, 25 bp, Homo sapien
tgggccaatggactgtgggaatctt

SEQ ID NO: 1828487 - DNA, 25 bp, Homo sapien
tgcccgtgaggaagacagcttgtag

SEQ ID NO: 1828488 - DNA, 25 bp, Homo sapien
gaagaaggcagtcacggcagaaaag

SEQ ID NO: 1828489 - DNA, 25 bp, Homo sapien
ttccttccaccatatagagaagccg

SEQ ID NO: 1828490 - DNA, 25 bp, Homo sapien
gacaggttgggaggtctactgccct

SEQ ID NO: 1828491 - DNA, 25 bp, Homo sapien
ccatatagagaagccgctgctgcct

SEQ ID NO: 1828492 - DNA, 25 bp, Homo sapien
agtgggtcagccgtgatgcttgttt

SEQ ID NO: 1828493 - DNA, 25 bp, Homo sapien
ccaaagtgggtcagccgtgatgctt

SEQ ID NO: 1828494 - DNA, 25 bp, Homo sapien
aaagtgggtcagccgtgatgcttgt

SEQ ID NO: 1828495 - DNA, 25 bp, Homo sapien
tccaaagtgggtcagccgtgatgct

SEQ ID NO: 1828496 - DNA, 25 bp, Homo sapien
tgtttgcagttaattatccttttgt

SEQ ID NO: 1828497 - DNA, 25 bp, Homo sapien
cttttgtttataagaatggtttcat

SEQ ID NO: 1828498 - DNA, 25 bp, Homo sapien
tatttgtttgcagttaattatcctt

SEQ ID NO: 1828499 - DNA, 25 bp, Homo sapien
tatatttgtttgcagttaattatcc

SEQ ID NO: 1828500 - DNA, 25 bp, Homo sapien
ttggagaacagtgtgggtctcccca

SEQ ID NO: 1828501 - DNA, 25 bp, Homo sapien
cctttgttggaatgcagtcttggag

SEQ ID NO: 1828502 - DNA, 25 bp, Homo sapien
agtatgcaggacagaactgtgtccc

SEQ ID NO: 1828503 - DNA, 25 bp, Homo sapien
tatacacatcattcgcctttgttgg

SEQ ID NO: 1828504 - DNA, 25 bp, Homo sapien
atactgccacccccatttaagttgg

SEQ ID NO: 1828505 - DNA, 25 bp, Homo sapien
tgggaaagagggagtagactgtagt

SEQ ID NO: 1828506 - DNA, 25 bp, Homo sapien
tctctcttatactccttaatactgc

SEQ ID NO: 1828507 - DNA, 25 bp, Homo sapien
gggagtagactgtagtagctacttc

SEQ ID NO: 1828508 - DNA, 25 bp, Homo sapien
ccatcgttgcggccagcagcgtggc

SEQ ID NO: 1828509 - DNA, 25 bp, Homo sapien
agcagcgtggcccggctccctttgt

SEQ ID NO: 1828510 - DNA, 25 bp, Homo sapien
gcgtggcccggctccctttgtccaa

SEQ ID NO: 1828511 - DNA, 25 bp, Homo sapien
tggccagagccaccatcgttgcggc

SEQ ID NO: 1828512 - DNA, 25 bp, Homo sapien
gggtcgtggccaacatccccttgct

SEQ ID NO: 1828513 - DNA, 25 bp, Homo sapien
caggagaacagggtcgtggccaaca

SEQ ID NO: 1828514 - DNA, 25 bp, Homo sapien
agaacagggtcgtggccaacatccc

SEQ ID NO: 1828515 - DNA, 25 bp, Homo sapien
cagggtcgtggccaacatccccttg

SEQ ID NO: 1828516 - DNA, 25 bp, Homo sapien
catctgtcagatgtacaggtgtgcc

SEQ ID NO: 1828517 - DNA, 25 bp, Homo sapien
aggtgtctgcactccgataagcttg

SEQ ID NO: 1828518 - DNA, 25 bp, Homo sapien
ctcatctgtcagatgtacaggtgtg

SEQ ID NO: 1828519 - DNA, 25 bp, Homo sapien
cactccgataagcttgtcagcagag

SEQ ID NO: 1828520 - DNA, 25 bp, Homo sapien
cacggttggcaagatggagtttttc

SEQ ID NO: 1828521 - DNA, 25 bp, Homo sapien
cttgaataacaacctgctgcagcct

SEQ ID NO: 1828522 - DNA, 25 bp, Homo sapien
ttgccctgcatccaaaagccaagag

SEQ ID NO: 1828523 - DNA, 25 bp, Homo sapien
gagccagtgcacattctcaagggaa

SEQ ID NO: 1828524 - DNA, 25 bp, Homo sapien
tctaattttaagtgtgactcagagg

SEQ ID NO: 1828525 - DNA, 25 bp, Homo sapien
actttctccaagctcaacaagggtg

SEQ ID NO: 1828526 - DNA, 25 bp, Homo sapien
ggtggagcgaatccagtagcattct

SEQ ID NO: 1828527 - DNA, 25 bp, Homo sapien
gctcaacaagggtgactttcaaagg

SEQ ID NO: 1828528 - DNA, 25 bp, Homo sapien
caactggttttatgtaggtttcctg

SEQ ID NO: 1828529 - DNA, 25 bp, Homo sapien
ttttcaaatccctcgctctcaattc

SEQ ID NO: 1828530 - DNA, 25 bp, Homo sapien
tgcttttcaaatccctcgctctcaa

SEQ ID NO: 1828531 - DNA, 25 bp, Homo sapien
tcgctctcaattccagttgctgcct

SEQ ID NO: 1828532 - DNA, 25 bp, Homo sapien
gattgtaactggaatcggttccttg

SEQ ID NO: 1828533 - DNA, 25 bp, Homo sapien
ctgttctcctcgttcttgaaggccc

SEQ ID NO: 1828534 - DNA, 25 bp, Homo sapien
ggccccaccctagacgggctgtgct

SEQ ID NO: 1828535 - DNA, 25 bp, Homo sapien
gttctcctcgttcttgaaggcccca

SEQ ID NO: 1828536 - DNA, 25 bp, Homo sapien
aaatccttggccacgcaatgcctga

SEQ ID NO: 1828537 - DNA, 25 bp, Homo sapien
cctgtctatgtcctatgaggatctg

SEQ ID NO: 1828538 - DNA, 25 bp, Homo sapien
aaaccatgcatttatcgctgcaacc

SEQ ID NO: 1828539 - DNA, 25 bp, Homo sapien
caaccctttgatgaatatctgcttc

SEQ ID NO: 1828540 - DNA, 25 bp, Homo sapien
agaggtctttgccagcgaccactct

SEQ ID NO: 1828541 - DNA, 25 bp, Homo sapien
tagctttaggcttcctgagaccaca

SEQ ID NO: 1828542 - DNA, 25 bp, Homo sapien
tctgagatgaacagtcagcttctcg

SEQ ID NO: 1828543 - DNA, 25 bp, Homo sapien
gcttctcgggacatttgcattagca

SEQ ID NO: 1828544 - DNA, 25 bp, Homo sapien
ctctgcacagcaatccaaaatggga

SEQ ID NO: 1828545 - DNA, 25 bp, Homo sapien
ggatggaagattgatcacagattgg

SEQ ID NO: 1828546 - DNA, 25 bp, Homo sapien
gatcacagattggtgcttctctctg

SEQ ID NO: 1828547 - DNA, 25 bp, Homo sapien
gacagtccatttgtctaccaggagg

SEQ ID NO: 1828548 - DNA, 25 bp, Homo sapien
cagactccctgcacccttaggtgaa

SEQ ID NO: 1828549 - DNA, 25 bp, Homo sapien
cttaggcttcaggtggataccagca

SEQ ID NO: 1828550 - DNA, 25 bp, Homo sapien
ttctgctgccttaggcttcaggtgg

SEQ ID NO: 1828551 - DNA, 25 bp, Homo sapien
ccttaggtgaatagagccccagaac

SEQ ID NO: 1828552 - DNA, 25 bp, Homo sapien
taggttgagggacaatggtcacagc

SEQ ID NO: 1828553 - DNA, 25 bp, Homo sapien
gcaatatccccatctatagccctgg

SEQ ID NO: 1828554 - DNA, 25 bp, Homo sapien
aatggcaaggaattgggcaaatggc

SEQ ID NO: 1828555 - DNA, 25 bp, Homo sapien
gcagccacgagaacaggagagtcaa

SEQ ID NO: 1828556 - DNA, 25 bp, Homo sapien
caatcgtgtatcttttcagggcagc

SEQ ID NO: 1828557 - DNA, 25 bp, Homo sapien
cagggcagcttctctcatgagaagc

SEQ ID NO: 1828558 - DNA, 25 bp, Homo sapien
gtggtctgctgggaaccgttgctcc

SEQ ID NO: 1828559 - DNA, 25 bp, Homo sapien
cttctctcatgagaagctcatggtg

SEQ ID NO: 1828560 - DNA, 25 bp, Homo sapien
ttcaatctcaggtcatactttagag

SEQ ID NO: 1828561 - DNA, 25 bp, Homo sapien
tcaggtcatactttagagatgccat

SEQ ID NO: 1828562 - DNA, 25 bp, Homo sapien
cgtgctttcaatctcaggtcatact

SEQ ID NO: 1828563 - DNA, 25 bp, Homo sapien
gctttctcttgacgtgctttcaatc

SEQ ID NO: 1828564 - DNA, 25 bp, Homo sapien
tagtgccactttcccctggttcttg

SEQ ID NO: 1828565 - DNA, 25 bp, Homo sapien
aagaaactgcttttagctggtgcac

SEQ ID NO: 1828566 - DNA, 25 bp, Homo sapien
gctggtgcacttaaagccagttggt

SEQ ID NO: 1828567 - DNA, 25 bp, Homo sapien
gccagttggtggcataaaaacgcca

SEQ ID NO: 1828568 - DNA, 25 bp, Homo sapien
gcatcacagatggtcaatgcatcca

SEQ ID NO: 1828569 - DNA, 25 bp, Homo sapien
cacagtctgtggtcttacacaccat

SEQ ID NO: 1828570 - DNA, 25 bp, Homo sapien
ccaggtccatccgatggcacagtct

SEQ ID NO: 1828571 - DNA, 25 bp, Homo sapien
cacaccatgttacagtgctgagtgc

SEQ ID NO: 1828572 - DNA, 25 bp, Homo sapien
gtgcaagcccaaattctcctttttc

SEQ ID NO: 1828573 - DNA, 25 bp, Homo sapien
aggtaatcctctcagtgcaagccca

SEQ ID NO: 1828574 - DNA, 25 bp, Homo sapien
tcttttctcctaacgatgtagaatc

SEQ ID NO: 1828575 - DNA, 25 bp, Homo sapien
ttccagaccaccaaaggtaatcctc

SEQ ID NO: 1828576 - DNA, 25 bp, Homo sapien
tgttgttgtcatcctgcttatcttt

SEQ ID NO: 1828577 - DNA, 25 bp, Homo sapien
ctccggtgccagaacagtgatggca

SEQ ID NO: 1828578 - DNA, 25 bp, Homo sapien
gtcctggacctgttgggagacagca

SEQ ID NO: 1828579 - DNA, 25 bp, Homo sapien
cattccaagggaagtgggtagtcct

SEQ ID NO: 1828580 - DNA, 25 bp, Homo sapien
agtgatggcaacaccattccaaggg

SEQ ID NO: 1828581 - DNA, 25 bp, Homo sapien
cctcaaggactttccagtataataa

SEQ ID NO: 1828582 - DNA, 25 bp, Homo sapien
ccctcaaggactttccagtataata

SEQ ID NO: 1828583 - DNA, 25 bp, Homo sapien
ggcggcttttccagtatccaggtgg

SEQ ID NO: 1828584 - DNA, 25 bp, Homo sapien
gggcggcttttccagtatccaggtg

SEQ ID NO: 1828585 - DNA, 25 bp, Homo sapien
tccaaagctgccttaacggggcggc

SEQ ID NO: 1828586 - DNA, 25 bp, Homo sapien
caaagctgccttaacggggcggctt

SEQ ID NO: 1828587 - DNA, 25 bp, Homo sapien
tgccggaggtctgcaacaactgggc

SEQ ID NO: 1828588 - DNA, 25 bp, Homo sapien
gcaggaggccgacgtgatgtcatca

SEQ ID NO: 1828589 - DNA, 25 bp, Homo sapien
gacacccttttcattgactctgtgg

SEQ ID NO: 1828590 - DNA, 25 bp, Homo sapien
gatgtcatcaggctccttcttaaac

SEQ ID NO: 1828591 - DNA, 25 bp, Homo sapien
tcattaaggcactgggtccttgctt

SEQ ID NO: 1828592 - DNA, 25 bp, Homo sapien
cccttagaatgctcttgtgaacttt

SEQ ID NO: 1828593 - DNA, 25 bp, Homo sapien
tctcccctggtctaaatgtactgtc

SEQ ID NO: 1828594 - DNA, 25 bp, Homo sapien
catttgcagggatcaaaccccttag

SEQ ID NO: 1828595 - DNA, 25 bp, Homo sapien
atgcagaaggaccgggcttccctca

SEQ ID NO: 1828596 - DNA, 25 bp, Homo sapien
ctacattcggtgcttgagctgcccc

SEQ ID NO: 1828597 - DNA, 25 bp, Homo sapien
aggcaaactaagatgccacaccggg

SEQ ID NO: 1828598 - DNA, 25 bp, Homo sapien
cccaccatgaatgacctccatgatg

SEQ ID NO: 1828599 - DNA, 25 bp, Homo sapien
ctctccctcagctgaggatcaagag

SEQ ID NO: 1828600 - DNA, 25 bp, Homo sapien
ctccctcagctgaggatcaagagcc

SEQ ID NO: 1828601 - DNA, 25 bp, Homo sapien
gctctccctcagctgaggatcaaga

SEQ ID NO: 1828602 - DNA, 25 bp, Homo sapien
tctccctcagctgaggatcaagagc

SEQ ID NO: 1828603 - DNA, 25 bp, Homo sapien
ctggtgtccgtcatttctgtcttgc

SEQ ID NO: 1828604 - DNA, 25 bp, Homo sapien
gacctggtgtccgtcatttctgtct

SEQ ID NO: 1828605 - DNA, 25 bp, Homo sapien
gggacctggtgtccgtcatttctgt

SEQ ID NO: 1828606 - DNA, 25 bp, Homo sapien
gagggacctggtgtccgtcatttct

SEQ ID NO: 1828607 - DNA, 25 bp, Homo sapien
aggacgataactgggcactgctgac

SEQ ID NO: 1828608 - DNA, 25 bp, Homo sapien
ggcagatccagtcgcaagtagagaa

SEQ ID NO: 1828609 - DNA, 25 bp, Homo sapien
ggagcctcaccagccgggaaattat

SEQ ID NO: 1828610 - DNA, 25 bp, Homo sapien
catttttgctacaaagggcgagagg

SEQ ID NO: 1828611 - DNA, 25 bp, Homo sapien
gtagctcgtgaactcgccgccgagg

SEQ ID NO: 1828612 - DNA, 25 bp, Homo sapien
agctcgtgaactcgccgccgaggga

SEQ ID NO: 1828613 - DNA, 25 bp, Homo sapien
cgagggagcggaggccgtagctttg

SEQ ID NO: 1828614 - DNA, 25 bp, Homo sapien
acggtagctcgtgaactcgccgccg

SEQ ID NO: 1828615 - DNA, 25 bp, Homo sapien
tgccagagagatgcggtgggaagca

SEQ ID NO: 1828616 - DNA, 25 bp, Homo sapien
tgtccccaagctgacttagatctac

SEQ ID NO: 1828617 - DNA, 25 bp, Homo sapien
catgactgtccccaagctgacttag

SEQ ID NO: 1828618 - DNA, 25 bp, Homo sapien
gccagtgaagccctccatgactgtc

SEQ ID NO: 1828619 - DNA, 25 bp, Homo sapien
caagctgacttagatctacctccat

SEQ ID NO: 1828620 - DNA, 25 bp, Homo sapien
gaaccaaactatttatagccacgca

SEQ ID NO: 1828621 - DNA, 25 bp, Homo sapien
tgcttcctggcgctggttttggcag

SEQ ID NO: 1828622 - DNA, 25 bp, Homo sapien
gagttaaaactctagactggcagct

SEQ ID NO: 1828623 - DNA, 25 bp, Homo sapien
tttataacatcgaaccttggccctg

SEQ ID NO: 1828624 - DNA, 25 bp, Homo sapien
gatatttatgatcgccatcggcccc

SEQ ID NO: 1828625 - DNA, 25 bp, Homo sapien
tggagcctgggcttttcccgctgtg

SEQ ID NO: 1828626 - DNA, 25 bp, Homo sapien
caggactccgtgtcagcaaatgata

SEQ ID NO: 1828627 - DNA, 25 bp, Homo sapien
cagccaagggtcctccggtttctct

SEQ ID NO: 1828628 - DNA, 25 bp, Homo sapien
ccccatctgtgtgcatgaggactga

SEQ ID NO: 1828629 - DNA, 25 bp, Homo sapien
tggtgctgaggacgtctctgacatc

SEQ ID NO: 1828630 - DNA, 25 bp, Homo sapien
ttggctcctcacagtgctatcagct

SEQ ID NO: 1828631 - DNA, 25 bp, Homo sapien
tctctccaacttggccctggtgctg

SEQ ID NO: 1828632 - DNA, 25 bp, Homo sapien
catggacagaagtgatggctccctg

SEQ ID NO: 1828633 - DNA, 25 bp, Homo sapien
ccttcactcttgagttgtttaagca

SEQ ID NO: 1828634 - DNA, 25 bp, Homo sapien
cgaccacttggatggacgccaagaa

SEQ ID NO: 1828635 - DNA, 25 bp, Homo sapien
catggatttgcgcacaaatcgacga

SEQ ID NO: 1828636 - DNA, 25 bp, Homo sapien
ctgagactcgaatctcaaaccttgg

SEQ ID NO: 1828637 - DNA, 25 bp, Homo sapien
tctcaaaccttggttcccgctgcag

SEQ ID NO: 1828638 - DNA, 25 bp, Homo sapien
tcagggttctttatgccaacgcagt

SEQ ID NO: 1828639 - DNA, 25 bp, Homo sapien
gaaacagcagttccgagcactgaga

SEQ ID NO: 1828640 - DNA, 25 bp, Homo sapien
cagagtgtcacaggcttactcagat

SEQ ID NO: 1828641 - DNA, 25 bp, Homo sapien
tcacaggcttactcagatgagacag

SEQ ID NO: 1828642 - DNA, 25 bp, Homo sapien
gagacaggtcgctggcaaacaaatg

SEQ ID NO: 1828643 - DNA, 25 bp, Homo sapien
ctcagatgagacaggtcgctggcaa

SEQ ID NO: 1828644 - DNA, 25 bp, Homo sapien
tctttgcttctgattcccatcactt

SEQ ID NO: 1828645 - DNA, 25 bp, Homo sapien
caatagccctatcagcattgtggga

SEQ ID NO: 1828646 - DNA, 25 bp, Homo sapien
tgggacttaactgagtagcagagcc

SEQ ID NO: 1828647 - DNA, 25 bp, Homo sapien
tcttttactttgattgactgttcca

SEQ ID NO: 1828648 - DNA, 25 bp, Homo sapien
catctgtaatttctccgtagctcgc

SEQ ID NO: 1828649 - DNA, 25 bp, Homo sapien
tagctcgcctaagctgccactgaca

SEQ ID NO: 1828650 - DNA, 25 bp, Homo sapien
gagaactggaatggcttgctggcat

SEQ ID NO: 1828651 - DNA, 25 bp, Homo sapien
tgctggcatgaatcttaacccatcc

SEQ ID NO: 1828652 - DNA, 25 bp, Homo sapien
ctggcagtgcaagatggtgacagcc

SEQ ID NO: 1828653 - DNA, 25 bp, Homo sapien
ttaggagttcaaccttcagagagga

SEQ ID NO: 1828654 - DNA, 25 bp, Homo sapien
tggaatctcagccactccgaagtcg

SEQ ID NO: 1828655 - DNA, 25 bp, Homo sapien
gaagaccatgtacactaaaaagcag

SEQ ID NO: 1828656 - DNA, 25 bp, Homo sapien
tgcagcctagtgcaatgtcaaaggg

SEQ ID NO: 1828657 - DNA, 25 bp, Homo sapien
atgtttttgatgtaatggctatgca

SEQ ID NO: 1828658 - DNA, 25 bp, Homo sapien
gtaatggctatgcatctcggccttg

SEQ ID NO: 1828659 - DNA, 25 bp, Homo sapien
gggcctagtgcagcctagtgcaatg

SEQ ID NO: 1828660 - DNA, 25 bp, Homo sapien
cctttccagcctgtttctccaggtt

SEQ ID NO: 1828661 - DNA, 25 bp, Homo sapien
cagcctgtttctccaggtttcccgc

SEQ ID NO: 1828662 - DNA, 25 bp, Homo sapien
tccttccaccttctgtacaggacac

SEQ ID NO: 1828663 - DNA, 25 bp, Homo sapien
cccgcctccttccaccttctgtaca

SEQ ID NO: 1828664 - DNA, 25 bp, Homo sapien
gcagtctgccgaaagggacaagcca

SEQ ID NO: 1828665 - DNA, 25 bp, Homo sapien
cagttccctcaagcccaaaatgtga

SEQ ID NO: 1828666 - DNA, 25 bp, Homo sapien
tgcatagccaagctcggcagtctgc

SEQ ID NO: 1828667 - DNA, 25 bp, Homo sapien
ccagtcccgcaaaggaatgatgtat

SEQ ID NO: 1828668 - DNA, 25 bp, Homo sapien
ttaaaaaccgcagcagtcaagggtg

SEQ ID NO: 1828669 - DNA, 25 bp, Homo sapien
taaaatacacaggatcggcatgagg

SEQ ID NO: 1828670 - DNA, 25 bp, Homo sapien
tcctctaatgagctggcaatgccca

SEQ ID NO: 1828671 - DNA, 25 bp, Homo sapien
gaaatcagattagcatgctccagct

SEQ ID NO: 1828672 - DNA, 25 bp, Homo sapien
gacttagcatgataggtggcttcca

SEQ ID NO: 1828673 - DNA, 25 bp, Homo sapien
caagctgtccctacccttctctaaa

SEQ ID NO: 1828674 - DNA, 25 bp, Homo sapien
tgccagtgccctgacttagcatgat

SEQ ID NO: 1828675 - DNA, 25 bp, Homo sapien
aactctactaactgggcaagggctg

SEQ ID NO: 1828676 - DNA, 25 bp, Homo sapien
tttgatgattttcgctctctggggc

SEQ ID NO: 1828677 - DNA, 25 bp, Homo sapien
taagcttcctaaattaataatgatg

SEQ ID NO: 1828678 - DNA, 25 bp, Homo sapien
tgtggaagccgtttaccattctcac

SEQ ID NO: 1828679 - DNA, 25 bp, Homo sapien
ttgtcgccagccctctttaagcttc

SEQ ID NO: 1828680 - DNA, 25 bp, Homo sapien
tatgatcactgtatgaaggcaatcc

SEQ ID NO: 1828681 - DNA, 25 bp, Homo sapien
tcaagttgcctgtagctcagcagca

SEQ ID NO: 1828682 - DNA, 25 bp, Homo sapien
ggtcagccttgggtgcaaagcaaca

SEQ ID NO: 1828683 - DNA, 25 bp, Homo sapien
caaggtctggcactaaataggtacc

SEQ ID NO: 1828684 - DNA, 25 bp, Homo sapien
ggctctaccatctctgacaggcaga

SEQ ID NO: 1828685 - DNA, 25 bp, Homo sapien
tatattagatgacaaactactgacg

SEQ ID NO: 1828686 - DNA, 25 bp, Homo sapien
ttttggcctctatttctcatgcatg

SEQ ID NO: 1828687 - DNA, 25 bp, Homo sapien
gacgtagtaactgcaagagcattca

SEQ ID NO: 1828688 - DNA, 25 bp, Homo sapien
gctccatgcaagataggtgtctatg

SEQ ID NO: 1828689 - DNA, 25 bp, Homo sapien
ccaccagaatttcatccagaatgtc

SEQ ID NO: 1828690 - DNA, 25 bp, Homo sapien
tcagagctccatgcaagataggtgt

SEQ ID NO: 1828691 - DNA, 25 bp, Homo sapien
taggtgtctatgcaccaccagaatt

SEQ ID NO: 1828692 - DNA, 25 bp, Homo sapien
ctgcaaaagggcacaagtaggatct

SEQ ID NO: 1828693 - DNA, 25 bp, Homo sapien
gctctgaagaggcaacgttttcgaa

SEQ ID NO: 1828694 - DNA, 25 bp, Homo sapien
caagtcctctttcggccttgagcag

SEQ ID NO: 1828695 - DNA, 25 bp, Homo sapien
ttcttcacatgtgggcgctatctgc

SEQ ID NO: 1828696 - DNA, 25 bp, Homo sapien
cctgcctctttccttgtggctgcat

SEQ ID NO: 1828697 - DNA, 25 bp, Homo sapien
gtctccattccctgcctctttcctt

SEQ ID NO: 1828698 - DNA, 25 bp, Homo sapien
ctcacatttgactggagtctccatt

SEQ ID NO: 1828699 - DNA, 25 bp, Homo sapien
tcacatttgactggagtctccattc

SEQ ID NO: 1828700 - DNA, 25 bp, Homo sapien
taagaaacatcctgactggcctaag

SEQ ID NO: 1828701 - DNA, 25 bp, Homo sapien
cttgggaacacgactcagagactgc

SEQ ID NO: 1828702 - DNA, 25 bp, Homo sapien
tctgacacaggcatcaggcgtgtgc

SEQ ID NO: 1828703 - DNA, 25 bp, Homo sapien
gaagaccatcgggacttgccaagtg

SEQ ID NO: 1828704 - DNA, 25 bp, Homo sapien
agagcccttctagagtcaactttgc

SEQ ID NO: 1828705 - DNA, 25 bp, Homo sapien
tggttgaataatacccttctcctcc

SEQ ID NO: 1828706 - DNA, 25 bp, Homo sapien
tcaccgaatagccagagcccttcta

SEQ ID NO: 1828707 - DNA, 25 bp, Homo sapien
cattcctggttgaataatacccttc

SEQ ID NO: 1828708 - DNA, 25 bp, Homo sapien
aatcggcagccataattgctactcg

SEQ ID NO: 1828709 - DNA, 25 bp, Homo sapien
ggaaagtctcatgtggccaagcaaa

SEQ ID NO: 1828710 - DNA, 25 bp, Homo sapien
aaggtgacccgatgaaagccagcgt

SEQ ID NO: 1828711 - DNA, 25 bp, Homo sapien
taacatggcaccaatcacaaccgtg

SEQ ID NO: 1828712 - DNA, 25 bp, Homo sapien
gactgaagagatgagtcgcagcagt

SEQ ID NO: 1828713 - DNA, 25 bp, Homo sapien
agcagtggaacccaacagctgccac

SEQ ID NO: 1828714 - DNA, 25 bp, Homo sapien
cagctgccactgtaattcagggagc

SEQ ID NO: 1828715 - DNA, 25 bp, Homo sapien
cactgtaattcagggagcgtcccca

SEQ ID NO: 1828716 - DNA, 25 bp, Homo sapien
ggcagggcagagtggaacctgtcat

SEQ ID NO: 1828717 - DNA, 25 bp, Homo sapien
tgaaaatgcgttgtggtctcccgct

SEQ ID NO: 1828718 - DNA, 25 bp, Homo sapien
aatgcgttgtggtctcccgctgagg

SEQ ID NO: 1828719 - DNA, 25 bp, Homo sapien
ttcatctgaaaatgcgttgtggtct

SEQ ID NO: 1828720 - DNA, 25 bp, Homo sapien
tctgaaaatgcgttgtggtctcccg

SEQ ID NO: 1828721 - DNA, 25 bp, Homo sapien
cagcacacgactcatgaccaaacag

SEQ ID NO: 1828722 - DNA, 25 bp, Homo sapien
cttcccagacattgccagcacacga

SEQ ID NO: 1828723 - DNA, 25 bp, Homo sapien
atgaccaaacagtgctcctccaaga

SEQ ID NO: 1828724 - DNA, 25 bp, Homo sapien
attgccagcacacgactcatgacca

SEQ ID NO: 1828725 - DNA, 25 bp, Homo sapien
taaagccagtcaggaatagtaagtc

SEQ ID NO: 1828726 - DNA, 25 bp, Homo sapien
tacaaggagatatacgacatggtcc

SEQ ID NO: 1828727 - DNA, 25 bp, Homo sapien
gtctctgccaaaacacaaacgatag

SEQ ID NO: 1828728 - DNA, 25 bp, Homo sapien
tatgctaggcccttgaatggtcagg

SEQ ID NO: 1828729 - DNA, 25 bp, Homo sapien
gtggttgatttactgagaagtcccc

SEQ ID NO: 1828730 - DNA, 25 bp, Homo sapien
tgaaagtttgcggtaacaagaagga

SEQ ID NO: 1828731 - DNA, 25 bp, Homo sapien
gaagtttgtttgttccatgactgct

SEQ ID NO: 1828732 - DNA, 25 bp, Homo sapien
aaggagccttggcaggaagtttgtt

SEQ ID NO: 1828733 - DNA, 25 bp, Homo sapien
atttcttgtgcatgtacagctctcc

SEQ ID NO: 1828734 - DNA, 25 bp, Homo sapien
cgaaccgtgctgaatgtctcaatat

SEQ ID NO: 1828735 - DNA, 25 bp, Homo sapien
tggaagccacgaaccgtgctgaatg

SEQ ID NO: 1828736 - DNA, 25 bp, Homo sapien
gcggtggcaccgatccttggatttg

SEQ ID NO: 1828737 - DNA, 25 bp, Homo sapien
cttggatttggaagccacgaaccgt

SEQ ID NO: 1828738 - DNA, 25 bp, Homo sapien
ctcagtgcttgtcacgcagagatcc

SEQ ID NO: 1828739 - DNA, 25 bp, Homo sapien
cttggtgactcagtgcttgtcacgc

SEQ ID NO: 1828740 - DNA, 25 bp, Homo sapien
ggtgactcagtgcttgtcacgcaga

SEQ ID NO: 1828741 - DNA, 25 bp, Homo sapien
gactcagtgcttgtcacgcagagat

SEQ ID NO: 1828742 - DNA, 25 bp, Homo sapien
aaatgtccccagattggcaagcact

SEQ ID NO: 1828743 - DNA, 25 bp, Homo sapien
acaaatgtccccagattggcaagca

SEQ ID NO: 1828744 - DNA, 25 bp, Homo sapien
tggctgctcagaggtaccacaaatg

SEQ ID NO: 1828745 - DNA, 25 bp, Homo sapien
tgctcagaggtaccacaaatgtccc

SEQ ID NO: 1828746 - DNA, 25 bp, Homo sapien
tggtgtaacgtattctcgtcgaatt

SEQ ID NO: 1828747 - DNA, 25 bp, Homo sapien
tcaccagtcccctgtggtgtaacgt

SEQ ID NO: 1828748 - DNA, 25 bp, Homo sapien
ctgtggtgtaacgtattctcgtcga

SEQ ID NO: 1828749 - DNA, 25 bp, Homo sapien
tcttccttcatcaccagtcccctgt

SEQ ID NO: 1828750 - DNA, 25 bp, Homo sapien
gccctcgcccagttgagaacatcgg

SEQ ID NO: 1828751 - DNA, 25 bp, Homo sapien
tctcacctccgaagttccgagggtg

SEQ ID NO: 1828752 - DNA, 25 bp, Homo sapien
cacccagcaagttagcagcgcaaag

SEQ ID NO: 1828753 - DNA, 25 bp, Homo sapien
ccgagggtgccgcaagatggaaaat

SEQ ID NO: 1828754 - DNA, 25 bp, Homo sapien
tccttttcagagctgtaccaataca

SEQ ID NO: 1828755 - DNA, 25 bp, Homo sapien
cttttcagagctgtaccaatacaca

SEQ ID NO: 1828756 - DNA, 25 bp, Homo sapien
tctccagctgacaatggcatacacc

SEQ ID NO: 1828757 - DNA, 25 bp, Homo sapien
gacaatggcatacaccagggccaca

SEQ ID NO: 1828758 - DNA, 25 bp, Homo sapien
tccaggttcgggctgcttggtctct

SEQ ID NO: 1828759 - DNA, 25 bp, Homo sapien
gcagctggtggtacatcagaaggca

SEQ ID NO: 1828760 - DNA, 25 bp, Homo sapien
agttctctactatgaggctgcccag

SEQ ID NO: 1828761 - DNA, 25 bp, Homo sapien
gcaactcgttgtaggccttccaggt

SEQ ID NO: 1828762 - DNA, 25 bp, Homo sapien
cagatgtaggcactctgcaaatgtt

SEQ ID NO: 1828763 - DNA, 25 bp, Homo sapien
gacaacacagatgtaggcactctgc

SEQ ID NO: 1828764 - DNA, 25 bp, Homo sapien
cctgtgaatctgtgacaacacagat

SEQ ID NO: 1828765 - DNA, 25 bp, Homo sapien
taggcactctgcaaatgttagtcac

SEQ ID NO: 1828766 - DNA, 25 bp, Homo sapien
caatctctatcaccaccatatcagg

SEQ ID NO: 1828767 - DNA, 25 bp, Homo sapien
tccctgaatgtagaggtaatcaagc

SEQ ID NO: 1828768 - DNA, 25 bp, Homo sapien
taatcaagctgacggtgtgatggct

SEQ ID NO: 1828769 - DNA, 25 bp, Homo sapien
tgatggctgccacagagtacaagcc

SEQ ID NO: 1828770 - DNA, 25 bp, Homo sapien
tcaatgcaacttgagagcaatatag

SEQ ID NO: 1828771 - DNA, 25 bp, Homo sapien
ccagccgagctggttcaggtttcca

SEQ ID NO: 1828772 - DNA, 25 bp, Homo sapien
aaggaaaggcttttagccagccgag

SEQ ID NO: 1828773 - DNA, 25 bp, Homo sapien
aatatagcaatctgaaaggaaaggc

SEQ ID NO: 1828774 - DNA, 25 bp, Homo sapien
tagacgagtccatttggtagtctcc

SEQ ID NO: 1828775 - DNA, 25 bp, Homo sapien
gaaggcagagccacgttgcatgtga

SEQ ID NO: 1828776 - DNA, 25 bp, Homo sapien
gttgcatgtgaaatctagacgagtc

SEQ ID NO: 1828777 - DNA, 25 bp, Homo sapien
tggaaaggcccagagtgctcaggga

SEQ ID NO: 1828778 - DNA, 25 bp, Homo sapien
tcaattagctatctggctgagacag

SEQ ID NO: 1828779 - DNA, 25 bp, Homo sapien
ttgcattgctcaccatttcaccgaa

SEQ ID NO: 1828780 - DNA, 25 bp, Homo sapien
gagtcacgtagcttaatttccaaat

SEQ ID NO: 1828781 - DNA, 25 bp, Homo sapien
tcactggttaacacagccttgtaag

SEQ ID NO: 1828782 - DNA, 25 bp, Homo sapien
cagattcctccaacctctacgtttg

SEQ ID NO: 1828783 - DNA, 25 bp, Homo sapien
tccaacctctacgtttgaccaactg

SEQ ID NO: 1828784 - DNA, 25 bp, Homo sapien
gattcctccaacctctacgtttgac

SEQ ID NO: 1828785 - DNA, 25 bp, Homo sapien
tctacgtttgaccaactggacttgt

SEQ ID NO: 1828786 - DNA, 25 bp, Homo sapien
aacacagcgggtcttcattggcagt

SEQ ID NO: 1828787 - DNA, 25 bp, Homo sapien
cattttgcaattcagaacacagcgg

SEQ ID NO: 1828788 - DNA, 25 bp, Homo sapien
tctgtcagtgggtattaaaggtccc

SEQ ID NO: 1828789 - DNA, 25 bp, Homo sapien
caacggtttaaagtgtactctgcgg

SEQ ID NO: 1828790 - DNA, 25 bp, Homo sapien
ggctctgttaatgcctgtgcttccc

SEQ ID NO: 1828791 - DNA, 25 bp, Homo sapien
ggcgggcagatggctctgttaatgc

SEQ ID NO: 1828792 - DNA, 25 bp, Homo sapien
tgccacctgaccacaagcccaggca

SEQ ID NO: 1828793 - DNA, 25 bp, Homo sapien
tgcttccctcggaccgctccaagcc

SEQ ID NO: 1828794 - DNA, 25 bp, Homo sapien
gggctgcttgttggagcagcctcac

SEQ ID NO: 1828795 - DNA, 25 bp, Homo sapien
gttgggtggaatcaaaccctgcaga

SEQ ID NO: 1828796 - DNA, 25 bp, Homo sapien
ctggttgggtggaatcaaaccctgc

SEQ ID NO: 1828797 - DNA, 25 bp, Homo sapien
tgttggagcagcctcacgaccccgg

SEQ ID NO: 1828798 - DNA, 25 bp, Homo sapien
tcacaaggggagccctgctgggccg

SEQ ID NO: 1828799 - DNA, 25 bp, Homo sapien
ggggagccctgctgggccgccccac

SEQ ID NO: 1828800 - DNA, 25 bp, Homo sapien
acaaggggagccctgctgggccgcc

SEQ ID NO: 1828801 - DNA, 25 bp, Homo sapien
caaggggagccctgctgggccgccc

SEQ ID NO: 1828802 - DNA, 25 bp, Homo sapien
gagtccttggcacggcgcccagaaa

SEQ ID NO: 1828803 - DNA, 25 bp, Homo sapien
ccagtgtgagtccttggcacggcgc

SEQ ID NO: 1828804 - DNA, 25 bp, Homo sapien
cccaaacgccgaggcaggatgcaat

SEQ ID NO: 1828805 - DNA, 25 bp, Homo sapien
cagaaagccacgcagcagcgatggg

SEQ ID NO: 1828806 - DNA, 25 bp, Homo sapien
gagcagggaacagagccggagcctt

SEQ ID NO: 1828807 - DNA, 25 bp, Homo sapien
ggaacagagccggagccttgagcct

SEQ ID NO: 1828808 - DNA, 25 bp, Homo sapien
agagccggagccttgagcctcttct

SEQ ID NO: 1828809 - DNA, 25 bp, Homo sapien
aacagagccggagccttgagcctct

SEQ ID NO: 1828810 - DNA, 25 bp, Homo sapien
gacacgtgcttctcttgacctgcct

SEQ ID NO: 1828811 - DNA, 25 bp, Homo sapien
tttcccaacagctatgctacctgca

SEQ ID NO: 1828812 - DNA, 25 bp, Homo sapien
ggttgcccagacagtcccagaaact

SEQ ID NO: 1828813 - DNA, 25 bp, Homo sapien
tgctacctgcacagtggcagccatc

SEQ ID NO: 1828814 - DNA, 25 bp, Homo sapien
cccagagctggatcttaaagacaaa

SEQ ID NO: 1828815 - DNA, 25 bp, Homo sapien
gacctgagctttgccacacaagttg

SEQ ID NO: 1828816 - DNA, 25 bp, Homo sapien
aatgagagcctcttaaagttgggaa

SEQ ID NO: 1828817 - DNA, 25 bp, Homo sapien
aggaccagtgcagacaacatcaagg

SEQ ID NO: 1828818 - DNA, 25 bp, Homo sapien
tccaggtggagaataaagcccccca

SEQ ID NO: 1828819 - DNA, 25 bp, Homo sapien
aatgaatccatttctatctggtgca

SEQ ID NO: 1828820 - DNA, 25 bp, Homo sapien
tgcaccctgtaatttccaggtggag

SEQ ID NO: 1828821 - DNA, 25 bp, Homo sapien
tgtaatacagccaaagggaccttca

SEQ ID NO: 1828822 - DNA, 25 bp, Homo sapien
gattgctgaagtagtgccatgcccc

SEQ ID NO: 1828823 - DNA, 25 bp, Homo sapien
caaagccatactgagggatgcggac

SEQ ID NO: 1828824 - DNA, 25 bp, Homo sapien
catgcccctgtgacttgaatgacct

SEQ ID NO: 1828825 - DNA, 25 bp, Homo sapien
gcaggctgcaccaattaccagggat

SEQ ID NO: 1828826 - DNA, 25 bp, Homo sapien
taagctaaaggtgtctggcagagaa

SEQ ID NO: 1828827 - DNA, 25 bp, Homo sapien
ctaagctaaaggtgtctggcagaga

SEQ ID NO: 1828828 - DNA, 25 bp, Homo sapien
cagatcctggcatacaaagcctgaa

SEQ ID NO: 1828829 - DNA, 25 bp, Homo sapien
cactcttcatctaacagatcctggc

SEQ ID NO: 1828830 - DNA, 25 bp, Homo sapien
cacttaggtattgccagaaggagtc

SEQ ID NO: 1828831 - DNA, 25 bp, Homo sapien
aatacagcatgtctttaaccccact

SEQ ID NO: 1828832 - DNA, 25 bp, Homo sapien
tgcatgtcagattcacacaccttca

SEQ ID NO: 1828833 - DNA, 25 bp, Homo sapien
tccccacgctcggtgccctttctgc

SEQ ID NO: 1828834 - DNA, 25 bp, Homo sapien
acaatcccgtggtcccgctacacgg

SEQ ID NO: 1828835 - DNA, 25 bp, Homo sapien
tcaatttcccattacttcccaacca

SEQ ID NO: 1828836 - DNA, 25 bp, Homo sapien
agacagctggattcttgtatttact

SEQ ID NO: 1828837 - DNA, 25 bp, Homo sapien
ggaaaactcactcgcgcagcctttg

SEQ ID NO: 1828838 - DNA, 25 bp, Homo sapien
tcattctatcttttgtgatatgctg

SEQ ID NO: 1828839 - DNA, 25 bp, Homo sapien
gaggaaaactcactcgcgcagcctt

SEQ ID NO: 1828840 - DNA, 25 bp, Homo sapien
tttcccttggtgtcgctgaggagca

SEQ ID NO: 1828841 - DNA, 25 bp, Homo sapien
ctccttccatcgtccatgcaggatg

SEQ ID NO: 1828842 - DNA, 25 bp, Homo sapien
cttccatcgtccatgcaggatggct

SEQ ID NO: 1828843 - DNA, 25 bp, Homo sapien
gctcctccttccatcgtccatgcag

SEQ ID NO: 1828844 - DNA, 25 bp, Homo sapien
tgaaaagcaaacacgactgcaggaa

SEQ ID NO: 1828845 - DNA, 25 bp, Homo sapien
cacaaggctgtcagattatgcacat

SEQ ID NO: 1828846 - DNA, 25 bp, Homo sapien
ggaaatcccagcgtatcagggacag

SEQ ID NO: 1828847 - DNA, 25 bp, Homo sapien
tatgcacatctttcagtggacggtg

SEQ ID NO: 1828848 - DNA, 25 bp, Homo sapien
aatgaatagtgtcctgcaatgtcgc

SEQ ID NO: 1828849 - DNA, 25 bp, Homo sapien
gcaatgtcgcttatcctggaacaaa

SEQ ID NO: 1828850 - DNA, 25 bp, Homo sapien
caatacttgcttcctccacgtggtc

SEQ ID NO: 1828851 - DNA, 25 bp, Homo sapien
gcatttgcctgtaactgatccaagg

SEQ ID NO: 1828852 - DNA, 25 bp, Homo sapien
gaagaactccatatgtcctggctcg

SEQ ID NO: 1828853 - DNA, 25 bp, Homo sapien
ttccaattccaactactgtgtcggg

SEQ ID NO: 1828854 - DNA, 25 bp, Homo sapien
cctggctcggaacagtctctctggg

SEQ ID NO: 1828855 - DNA, 25 bp, Homo sapien
caatgtctcccagtaagtgcccagt

SEQ ID NO: 1828856 - DNA, 25 bp, Homo sapien
caagtgccccagggtcaggcttcat

SEQ ID NO: 1828857 - DNA, 25 bp, Homo sapien
cgcctggtccacctgagctctccct

SEQ ID NO: 1828858 - DNA, 25 bp, Homo sapien
ctccctggtcccacaagtgccccag

SEQ ID NO: 1828859 - DNA, 25 bp, Homo sapien
agctctccctggtcccacaagtgcc

SEQ ID NO: 1828860 - DNA, 25 bp, Homo sapien
gctgggatttgagtaactcctgatc

SEQ ID NO: 1828861 - DNA, 25 bp, Homo sapien
cttaagattccttccgatggctggg

SEQ ID NO: 1828862 - DNA, 25 bp, Homo sapien
aaactttctctgaaatcatatgtgg

SEQ ID NO: 1828863 - DNA, 25 bp, Homo sapien
gaaatcatatgtggcttaagattcc

SEQ ID NO: 1828864 - DNA, 25 bp, Homo sapien
gaacttgcaggagggaaccctcagt

SEQ ID NO: 1828865 - DNA, 25 bp, Homo sapien
caggaacttgcaggagggaaccctc

SEQ ID NO: 1828866 - DNA, 25 bp, Homo sapien
ggaaccctcagtccacccaaccaga

SEQ ID NO: 1828867 - DNA, 25 bp, Homo sapien
gaaccctcagtccacccaaccagag

SEQ ID NO: 1828868 - DNA, 25 bp, Homo sapien
ggccagtaatgtccctccccaatag

SEQ ID NO: 1828869 - DNA, 25 bp, Homo sapien
gccagtaatgtccctccccaatagc

SEQ ID NO: 1828870 - DNA, 25 bp, Homo sapien
ggtggcaagagcctcttgtagccca

SEQ ID NO: 1828871 - DNA, 25 bp, Homo sapien
ctctctgaaggctataacccaaagg

SEQ ID NO: 1828872 - DNA, 25 bp, Homo sapien
gcaaaaggtggcaagagcctcttgt

SEQ ID NO: 1828873 - DNA, 25 bp, Homo sapien
ttgtagcccacgctgtacaaggtga

SEQ ID NO: 1828874 - DNA, 25 bp, Homo sapien
tccagagaatccttggagacagatt

SEQ ID NO: 1828875 - DNA, 25 bp, Homo sapien
ttccagagaatccttggagacagat

SEQ ID NO: 1828876 - DNA, 25 bp, Homo sapien
cctgttcggggcattgtttcacctt

SEQ ID NO: 1828877 - DNA, 25 bp, Homo sapien
cctcctgcctgttcggggcattgtt

SEQ ID NO: 1828878 - DNA, 25 bp, Homo sapien
atccctcctgcctgttcggggcatt

SEQ ID NO: 1828879 - DNA, 25 bp, Homo sapien
ccaggactcccagtgactggggagg

SEQ ID NO: 1828880 - DNA, 25 bp, Homo sapien
taagtgaacaccagataagtggagt

SEQ ID NO: 1828881 - DNA, 25 bp, Homo sapien
tgcatatgcttctagatatttagcc

SEQ ID NO: 1828882 - DNA, 25 bp, Homo sapien
gatagctgagctgattgaataagtg

SEQ ID NO: 1828883 - DNA, 25 bp, Homo sapien
aagtggagtttcatgtttatacctg

SEQ ID NO: 1828884 - DNA, 25 bp, Homo sapien
actcctgatttgaagccatactctc

SEQ ID NO: 1828885 - DNA, 25 bp, Homo sapien
tactggcatgcacccaccctgatag

SEQ ID NO: 1828886 - DNA, 25 bp, Homo sapien
atgagccatcgtgctggctatgaaa

SEQ ID NO: 1828887 - DNA, 25 bp, Homo sapien
atttgaagccatactctcacctcag

SEQ ID NO: 1828888 - DNA, 25 bp, Homo sapien
ggagtctcacagttcaagccactga

SEQ ID NO: 1828889 - DNA, 25 bp, Homo sapien
cttttagggttgaaccaagcgctga

SEQ ID NO: 1828890 - DNA, 25 bp, Homo sapien
caagcgctgatacctccaggagtct

SEQ ID NO: 1828891 - DNA, 25 bp, Homo sapien
cagagaatacaagcaaagcaggcca

SEQ ID NO: 1828892 - DNA, 25 bp, Homo sapien
tgcacaatccaaagagaagcgtttg

SEQ ID NO: 1828893 - DNA, 25 bp, Homo sapien
tcgccagagctgatttgctgacttg

SEQ ID NO: 1828894 - DNA, 25 bp, Homo sapien
ccagggatggtagtcttagctcttt

SEQ ID NO: 1828895 - DNA, 25 bp, Homo sapien
gaagcgtttgatgatttgtatcccc

SEQ ID NO: 1828896 - DNA, 25 bp, Homo sapien
gctgtttaaaaatacggatgtgtaa

SEQ ID NO: 1828897 - DNA, 25 bp, Homo sapien
tgtgtaaaaccagagcgtagtcatt

SEQ ID NO: 1828898 - DNA, 25 bp, Homo sapien
tgtgattttcctacacaaatcagag

SEQ ID NO: 1828899 - DNA, 25 bp, Homo sapien
tattgagaagtacaaccattttgtg

SEQ ID NO: 1828900 - DNA, 25 bp, Homo sapien
actatcagcttaaaccattggtaac

SEQ ID NO: 1828901 - DNA, 25 bp, Homo sapien
tcagcttaaaccattggtaacatgg

SEQ ID NO: 1828902 - DNA, 25 bp, Homo sapien
ctaaactatcagcttaaaccattgg

SEQ ID NO: 1828903 - DNA, 25 bp, Homo sapien
cttaaaccattggtaacatggatac

SEQ ID NO: 1828904 - DNA, 25 bp, Homo sapien
tgccctaaagtagacaccaaggtgg

SEQ ID NO: 1828905 - DNA, 25 bp, Homo sapien
gggtaggtcgaataatgtagcacat

SEQ ID NO: 1828906 - DNA, 25 bp, Homo sapien
cagcgccggatttgaaagggtgccc

SEQ ID NO: 1828907 - DNA, 25 bp, Homo sapien
aggcctgcatcgcttttctctgccg

SEQ ID NO: 1828908 - DNA, 25 bp, Homo sapien
atgcttggcagaaggaagtaagaga

SEQ ID NO: 1828909 - DNA, 25 bp, Homo sapien
cagtggccggcagaagccatttgtt

SEQ ID NO: 1828910 - DNA, 25 bp, Homo sapien
gaggtgatgcttggcagaaggaagt

SEQ ID NO: 1828911 - DNA, 25 bp, Homo sapien
agccatttgtttaaggaggtgatgc

SEQ ID NO: 1828912 - DNA, 25 bp, Homo sapien
gacctggccccatggatttatgtcc

SEQ ID NO: 1828913 - DNA, 25 bp, Homo sapien
aggagcccagacatgctgctttgtg

SEQ ID NO: 1828914 - DNA, 25 bp, Homo sapien
tctgctgaaacttggctgaaagagg

SEQ ID NO: 1828915 - DNA, 25 bp, Homo sapien
aacccaaaagagaggcgagccatgt

SEQ ID NO: 1828916 - DNA, 25 bp, Homo sapien
ccactcttggtgatgattctgcgat

SEQ ID NO: 1828917 - DNA, 25 bp, Homo sapien
gattctgcgattctgtgtgagcgca

SEQ ID NO: 1828918 - DNA, 25 bp, Homo sapien
caaatttaaacccactcttggtgat

SEQ ID NO: 1828919 - DNA, 25 bp, Homo sapien
taaacccactcttggtgatgattct

SEQ ID NO: 1828920 - DNA, 25 bp, Homo sapien
aggtccacactttagagctccatcg

SEQ ID NO: 1828921 - DNA, 25 bp, Homo sapien
tccacactttagagctccatcgtct

SEQ ID NO: 1828922 - DNA, 25 bp, Homo sapien
gaggtccacactttagagctccatc

SEQ ID NO: 1828923 - DNA, 25 bp, Homo sapien
ggtccacactttagagctccatcgt

SEQ ID NO: 1828924 - DNA, 25 bp, Homo sapien
gcctttatgaagctcctcagacagc

SEQ ID NO: 1828925 - DNA, 25 bp, Homo sapien
atgaagctcctcagacagccgtacg

SEQ ID NO: 1828926 - DNA, 25 bp, Homo sapien
cagccgtacggggtcaacacactta

SEQ ID NO: 1828927 - DNA, 25 bp, Homo sapien
ggggtcaacacacttaaagagccag

SEQ ID NO: 1828928 - DNA, 25 bp, Homo sapien
tcagtcgaagctctatcactgtccc

SEQ ID NO: 1828929 - DNA, 25 bp, Homo sapien
gctaaaaactgagtcagtcgaagct

SEQ ID NO: 1828930 - DNA, 25 bp, Homo sapien
gaaggcggagatgagctaaaaactg

SEQ ID NO: 1828931 - DNA, 25 bp, Homo sapien
aactgagtcagtcgaagctctatca

SEQ ID NO: 1828932 - DNA, 25 bp, Homo sapien
cctgtgactgggacagtttgacaca

SEQ ID NO: 1828933 - DNA, 25 bp, Homo sapien
gatggctcggagaaactcactaccc

SEQ ID NO: 1828934 - DNA, 25 bp, Homo sapien
aaagcccggcaggactagagagatc

SEQ ID NO: 1828935 - DNA, 25 bp, Homo sapien
acacagtgggaccaggatggctcgg

SEQ ID NO: 1828936 - DNA, 25 bp, Homo sapien
cctcctctgacattagttcgcctga

SEQ ID NO: 1828937 - DNA, 25 bp, Homo sapien
tctgacattagttcgcctgacttac

SEQ ID NO: 1828938 - DNA, 25 bp, Homo sapien
ctctgacattagttcgcctgactta

SEQ ID NO: 1828939 - DNA, 25 bp, Homo sapien
tcctctgacattagttcgcctgact

SEQ ID NO: 1828940 - DNA, 25 bp, Homo sapien
tcaggggacttatctcctgacaagg

SEQ ID NO: 1828941 - DNA, 25 bp, Homo sapien
ctggcctgaagtaagagcttccctc

SEQ ID NO: 1828942 - DNA, 25 bp, Homo sapien
caaggctaggtgatgacttaggaga

SEQ ID NO: 1828943 - DNA, 25 bp, Homo sapien
cctctgggataaggcaggagttgga

SEQ ID NO: 1828944 - DNA, 25 bp, Homo sapien
gagtgaggatccatttctgaaggcc

SEQ ID NO: 1828945 - DNA, 25 bp, Homo sapien
gtgaggatccatttctgaaggccac

SEQ ID NO: 1828946 - DNA, 25 bp, Homo sapien
ggagtgaggatccatttctgaaggc

SEQ ID NO: 1828947 - DNA, 25 bp, Homo sapien
ccggagtgaggatccatttctgaag

SEQ ID NO: 1828948 - DNA, 25 bp, Homo sapien
tcctagggcatctgtaacactgagc

SEQ ID NO: 1828949 - DNA, 25 bp, Homo sapien
tagggcatctgtaacactgagcagg

SEQ ID NO: 1828950 - DNA, 25 bp, Homo sapien
gcacccctgtcctagggcatctgta

SEQ ID NO: 1828951 - DNA, 25 bp, Homo sapien
cctgtcctagggcatctgtaacact

SEQ ID NO: 1828952 - DNA, 25 bp, Homo sapien
gccagttctgaacccgatgtagcgg

SEQ ID NO: 1828953 - DNA, 25 bp, Homo sapien
agaccagcagccagttctgaacccg

SEQ ID NO: 1828954 - DNA, 25 bp, Homo sapien
agaaacgctccagaccagcagccag

SEQ ID NO: 1828955 - DNA, 25 bp, Homo sapien
gaacccgatgtagcggacaagtccg

SEQ ID NO: 1828956 - DNA, 25 bp, Homo sapien
agctgtaagaagaccatcctgagga

SEQ ID NO: 1828957 - DNA, 25 bp, Homo sapien
ctatgtggtgagcaactgtcccggc

SEQ ID NO: 1828958 - DNA, 25 bp, Homo sapien
aagaccaggtaagagttgacatgcc

SEQ ID NO: 1828959 - DNA, 25 bp, Homo sapien
catctgccgtcacgggctgggaaga

SEQ ID NO: 1828960 - DNA, 25 bp, Homo sapien
caagcccagttccttcgtgccactg

SEQ ID NO: 1828961 - DNA, 25 bp, Homo sapien
cagttccttcgtgccactgggcctt

SEQ ID NO: 1828962 - DNA, 25 bp, Homo sapien
gtagccaagcccagttccttcgtgc

SEQ ID NO: 1828963 - DNA, 25 bp, Homo sapien
agtagccaagcccagttccttcgtg

SEQ ID NO: 1828964 - DNA, 25 bp, Homo sapien
cagttgtttctaccaactgtgctcc

SEQ ID NO: 1828965 - DNA, 25 bp, Homo sapien
tctaccaactgtgctcccttaggca

SEQ ID NO: 1828966 - DNA, 25 bp, Homo sapien
agttgtttctaccaactgtgctccc

SEQ ID NO: 1828967 - DNA, 25 bp, Homo sapien
taccaactgtgctcccttaggcagc

SEQ ID NO: 1828968 - DNA, 25 bp, Homo sapien
ttctccacaacacaagcaaagtatg

SEQ ID NO: 1828969 - DNA, 25 bp, Homo sapien
gatgaacagtatgatgcggtactag

SEQ ID NO: 1828970 - DNA, 25 bp, Homo sapien
tatgatgcggtactagctccacagt

SEQ ID NO: 1828971 - DNA, 25 bp, Homo sapien
ttattttacagcgaggccagtgaca

SEQ ID NO: 1828972 - DNA, 25 bp, Homo sapien
ctgctccttcatgtaaccttttggc

SEQ ID NO: 1828973 - DNA, 25 bp, Homo sapien
cttcatgtaaccttttggctttttg

SEQ ID NO: 1828974 - DNA, 25 bp, Homo sapien
ctccttcatgtaaccttttggcttt

SEQ ID NO: 1828975 - DNA, 25 bp, Homo sapien
tgctccttcatgtaaccttttggct

SEQ ID NO: 1828976 - DNA, 25 bp, Homo sapien
ggtcacaagcaggtctgtctaccct

SEQ ID NO: 1828977 - DNA, 25 bp, Homo sapien
ggacatccgagtttcacctttgaaa

SEQ ID NO: 1828978 - DNA, 25 bp, Homo sapien
aattacaatggtggatctgtcccct

SEQ ID NO: 1828979 - DNA, 25 bp, Homo sapien
gcatgcacagtttgtgatagtggat

SEQ ID NO: 1828980 - DNA, 25 bp, Homo sapien
tggacatgggggctgttacctcccc

SEQ ID NO: 1828981 - DNA, 25 bp, Homo sapien
caggcaggtggtatgtaacagaggt

SEQ ID NO: 1828982 - DNA, 25 bp, Homo sapien
cagagcggaagagagctgctacggg

SEQ ID NO: 1828983 - DNA, 25 bp, Homo sapien
tatgtaacagaggtccgcaggcatg

SEQ ID NO: 1828984 - DNA, 25 bp, Homo sapien
acactctggcaaactagagaaagag

SEQ ID NO: 1828985 - DNA, 25 bp, Homo sapien
gaacactctggcaaactagagaaag

SEQ ID NO: 1828986 - DNA, 25 bp, Homo sapien
ctgaacactctggcaaactagagaa

SEQ ID NO: 1828987 - DNA, 25 bp, Homo sapien
ctggcaaactagagaaagagtgggc

SEQ ID NO: 1828988 - DNA, 25 bp, Homo sapien
ttcagccaggcaggtgacttttatg

SEQ ID NO: 1828989 - DNA, 25 bp, Homo sapien
tgttggccaagtgaccttgagcttc

SEQ ID NO: 1828990 - DNA, 25 bp, Homo sapien
ctccttaagtgggagtgtgtcttca

SEQ ID NO: 1828991 - DNA, 25 bp, Homo sapien
aaccctctgacattctcatcctgtg

SEQ ID NO: 1828992 - DNA, 25 bp, Homo sapien
tcctcagaggatgatcacccctggg

SEQ ID NO: 1828993 - DNA, 25 bp, Homo sapien
tgggaaactggattacaagactgac

SEQ ID NO: 1828994 - DNA, 25 bp, Homo sapien
gacatccaggtttcatcaggagaag

SEQ ID NO: 1828995 - DNA, 25 bp, Homo sapien
taatcaccctgttgggagttaggca

SEQ ID NO: 1828996 - DNA, 25 bp, Homo sapien
gcatccaagagcctgctctcttgtt

SEQ ID NO: 1828997 - DNA, 25 bp, Homo sapien
atccaagagcctgctctcttgtttt

SEQ ID NO: 1828998 - DNA, 25 bp, Homo sapien
gggcatccaagagcctgctctcttg

SEQ ID NO: 1828999 - DNA, 25 bp, Homo sapien
catccaagagcctgctctcttgttt

SEQ ID NO: 1829000 - DNA, 25 bp, Homo sapien
tgataagaataaccaatagccttct

SEQ ID NO: 1829001 - DNA, 25 bp, Homo sapien
tgatttccttccacgcaggccaagt

SEQ ID NO: 1829002 - DNA, 25 bp, Homo sapien
tccccagaaacatggtgggttgaat

SEQ ID NO: 1829003 - DNA, 25 bp, Homo sapien
caagtcacagttccctttgataaga

SEQ ID NO: 1829004 - DNA, 25 bp, Homo sapien
ttgggtcatgccctgattttcatac

SEQ ID NO: 1829005 - DNA, 25 bp, Homo sapien
gggtcatgccctgattttcatacat

SEQ ID NO: 1829006 - DNA, 25 bp, Homo sapien
tgggtcatgccctgattttcataca

SEQ ID NO: 1829007 - DNA, 25 bp, Homo sapien
cttgggtcatgccctgattttcata

SEQ ID NO: 1829008 - DNA, 25 bp, Homo sapien
tttgtaagggttaatggctgcttct

SEQ ID NO: 1829009 - DNA, 25 bp, Homo sapien
ctttgaatctcagtgtagcagctgc

SEQ ID NO: 1829010 - DNA, 25 bp, Homo sapien
tcacacgatggttattgacagacag

SEQ ID NO: 1829011 - DNA, 25 bp, Homo sapien
tattggaaaggccatagtgccgtca

SEQ ID NO: 1829012 - DNA, 25 bp, Homo sapien
tttgtctcagcagtcctaccggcca

SEQ ID NO: 1829013 - DNA, 25 bp, Homo sapien
gctagcgtcatctaatgtgtcacca

SEQ ID NO: 1829014 - DNA, 25 bp, Homo sapien
cgtgttgtctatctgtgctctctgc

SEQ ID NO: 1829015 - DNA, 25 bp, Homo sapien
tgtgtcaccacatttaccctttgtc

SEQ ID NO: 1829016 - DNA, 25 bp, Homo sapien
aaagtgtgaacagcccaagggtggg

SEQ ID NO: 1829017 - DNA, 25 bp, Homo sapien
tagtcagaagccattccccaggctc

SEQ ID NO: 1829018 - DNA, 25 bp, Homo sapien
gtgtgaacagcccaagggtgggtcc

SEQ ID NO: 1829019 - DNA, 25 bp, Homo sapien
ctgtagtcagaagccattccccagg

SEQ ID NO: 1829020 - DNA, 25 bp, Homo sapien
tgtggacacattgcaccaatctcgg

SEQ ID NO: 1829021 - DNA, 25 bp, Homo sapien
tctggaggctccgaggactctgttc

SEQ ID NO: 1829022 - DNA, 25 bp, Homo sapien
gaaagtagttatgtacccacgctca

SEQ ID NO: 1829023 - DNA, 25 bp, Homo sapien
tcagtcaaggtatcaacagggttgg

SEQ ID NO: 1829024 - DNA, 25 bp, Homo sapien
gacatcaagcagtctttttaccttg

SEQ ID NO: 1829025 - DNA, 25 bp, Homo sapien
ccagccaacctcattattcttatag

SEQ ID NO: 1829026 - DNA, 25 bp, Homo sapien
taaatgtagactacaggggcactga

SEQ ID NO: 1829027 - DNA, 25 bp, Homo sapien
tacaggggcactgattacattccca

SEQ ID NO: 1829028 - DNA, 25 bp, Homo sapien
tgcctgacccatactctataataat

SEQ ID NO: 1829029 - DNA, 25 bp, Homo sapien
gttttttaactagctagatatgatg

SEQ ID NO: 1829030 - DNA, 25 bp, Homo sapien
aactagctagatatgatggtggccc

SEQ ID NO: 1829031 - DNA, 25 bp, Homo sapien
gcctgacccatactctataataatt

SEQ ID NO: 1829032 - DNA, 25 bp, Homo sapien
ctgacactttctgagcaagtgtctg

SEQ ID NO: 1829033 - DNA, 25 bp, Homo sapien
cactttctgagcaagtgtctgagga

SEQ ID NO: 1829034 - DNA, 25 bp, Homo sapien
tttctgagcaagtgtctgaggagtg

SEQ ID NO: 1829035 - DNA, 25 bp, Homo sapien
gacactttctgagcaagtgtctgag

SEQ ID NO: 1829036 - DNA, 25 bp, Homo sapien
gaaatcgactaggtatgctcaactg

SEQ ID NO: 1829037 - DNA, 25 bp, Homo sapien
ccttgagagggccacatgtacggtg

SEQ ID NO: 1829038 - DNA, 25 bp, Homo sapien
ccttagtacatatgcttgagcccac

SEQ ID NO: 1829039 - DNA, 25 bp, Homo sapien
tggcactggctgcaacccattatta

SEQ ID NO: 1829040 - DNA, 25 bp, Homo sapien
caaagcggacccttcctgagaacag

SEQ ID NO: 1829041 - DNA, 25 bp, Homo sapien
gataatgataatgacgacacccgat

SEQ ID NO: 1829042 - DNA, 25 bp, Homo sapien
atgcgcaaatccaccaccagtgctg

SEQ ID NO: 1829043 - DNA, 25 bp, Homo sapien
gacacccgatgatgatgatgcgcaa

SEQ ID NO: 1829044 - DNA, 25 bp, Homo sapien
aaagaggctggagcaggctctctct

SEQ ID NO: 1829045 - DNA, 25 bp, Homo sapien
tcaaggctgtagcaaagaggctgga

SEQ ID NO: 1829046 - DNA, 25 bp, Homo sapien
gcaggctctctctgcgggcacagat

SEQ ID NO: 1829047 - DNA, 25 bp, Homo sapien
gaagactcaaggctgtagcaaagag

SEQ ID NO: 1829048 - DNA, 25 bp, Homo sapien
gtacattccataccaaaaagatgag

SEQ ID NO: 1829049 - DNA, 25 bp, Homo sapien
tccaagcaacgctccttcagaggaa

SEQ ID NO: 1829050 - DNA, 25 bp, Homo sapien
gagatggcctcatgacaggagtaag

SEQ ID NO: 1829051 - DNA, 25 bp, Homo sapien
ctttggagtcgggtaaatgcggatt

SEQ ID NO: 1829052 - DNA, 25 bp, Homo sapien
tcttcacaacaggataactctcaat

SEQ ID NO: 1829053 - DNA, 25 bp, Homo sapien
aactctcaatttcctggattttgtg

SEQ ID NO: 1829054 - DNA, 25 bp, Homo sapien
tccaaggatatgcatgtctctatgg

SEQ ID NO: 1829055 - DNA, 25 bp, Homo sapien
gatgaagccatgttgccaatccagg

SEQ ID NO: 1829056 - DNA, 25 bp, Homo sapien
tctcgtatggcagagtaagtttgct

SEQ ID NO: 1829057 - DNA, 25 bp, Homo sapien
caaagcccagtttagaaggtcctgt

SEQ ID NO: 1829058 - DNA, 25 bp, Homo sapien
ttagaaggtcctgttctcgtatggc

SEQ ID NO: 1829059 - DNA, 25 bp, Homo sapien
gcagagtaagtttgcttttttacaa

SEQ ID NO: 1829060 - DNA, 25 bp, Homo sapien
gcaacgaccgaaaatatctcccgct

SEQ ID NO: 1829061 - DNA, 25 bp, Homo sapien
cattggcaacgaccgaaaatatctc

SEQ ID NO: 1829062 - DNA, 25 bp, Homo sapien
tgcacaagatggtgacattggcaac

SEQ ID NO: 1829063 - DNA, 25 bp, Homo sapien
gatggtgacattggcaacgaccgaa

SEQ ID NO: 1829064 - DNA, 25 bp, Homo sapien
tgcgctttcccgatttcttaccaac

SEQ ID NO: 1829065 - DNA, 25 bp, Homo sapien
tcacagtcttcgcagaggtgtaggg

SEQ ID NO: 1829066 - DNA, 25 bp, Homo sapien
tcagctgatcttttccctgcgcttt

SEQ ID NO: 1829067 - DNA, 25 bp, Homo sapien
gacacaggactttatgtgtcacagt

SEQ ID NO: 1829068 - DNA, 25 bp, Homo sapien
atcacagcacttaaaattcctccag

SEQ ID NO: 1829069 - DNA, 25 bp, Homo sapien
ttctgccactccctgaggggaagca

SEQ ID NO: 1829070 - DNA, 25 bp, Homo sapien
ccggagaggaattctgccactccct

SEQ ID NO: 1829071 - DNA, 25 bp, Homo sapien
tgccactccctgaggggaagcagct

SEQ ID NO: 1829072 - DNA, 25 bp, Homo sapien
tccggagaggaattctgccactccc

SEQ ID NO: 1829073 - DNA, 25 bp, Homo sapien
tcctgacagccaaggatctaaactc

SEQ ID NO: 1829074 - DNA, 25 bp, Homo sapien
gccaaggatctaaactctgtagacc

SEQ ID NO: 1829075 - DNA, 25 bp, Homo sapien
gatctaaactctgtagacctgccat

SEQ ID NO: 1829076 - DNA, 25 bp, Homo sapien
tgacagccaaggatctaaactctgt

SEQ ID NO: 1829077 - DNA, 25 bp, Homo sapien
taagggccaagatgctcaaaaaggc

SEQ ID NO: 1829078 - DNA, 25 bp, Homo sapien
gctggagagcagttgagtaatcccg

SEQ ID NO: 1829079 - DNA, 25 bp, Homo sapien
aaagtgccggaatgactggaatccc

SEQ ID NO: 1829080 - DNA, 25 bp, Homo sapien
tccctgacacagtgaccgaaggcct

SEQ ID NO: 1829081 - DNA, 25 bp, Homo sapien
ttttgttttgctttcgaatcaaatg

SEQ ID NO: 1829082 - DNA, 25 bp, Homo sapien
ttaatccacacgcacagttcctgtc

SEQ ID NO: 1829083 - DNA, 25 bp, Homo sapien
ctgtccatggaaggcataatttggc

SEQ ID NO: 1829084 - DNA, 25 bp, Homo sapien
cataatttggcctcatgtgtttgct

SEQ ID NO: 1829085 - DNA, 25 bp, Homo sapien
tgggctaccagtgcaagcttactaa

SEQ ID NO: 1829086 - DNA, 25 bp, Homo sapien
tctccaggagcctgttgctctgaag

SEQ ID NO: 1829087 - DNA, 25 bp, Homo sapien
gatgctccgtgacttcaggccatgc

SEQ ID NO: 1829088 - DNA, 25 bp, Homo sapien
cttactaaacgacagagcaggttct

SEQ ID NO: 1829089 - DNA, 25 bp, Homo sapien
gagaagcccgtgactctagggccag

SEQ ID NO: 1829090 - DNA, 25 bp, Homo sapien
ggaaaaagagaagcccgtgactcta

SEQ ID NO: 1829091 - DNA, 25 bp, Homo sapien
aagagaagcccgtgactctagggcc

SEQ ID NO: 1829092 - DNA, 25 bp, Homo sapien
aaaagagaagcccgtgactctaggg

SEQ ID NO: 1829093 - DNA, 25 bp, Homo sapien
ggaccagaccgatcactagatttga

SEQ ID NO: 1829094 - DNA, 25 bp, Homo sapien
agggaccagaccgatcactagattt

SEQ ID NO: 1829095 - DNA, 25 bp, Homo sapien
gggtagggaccagaccgatcactag

SEQ ID NO: 1829096 - DNA, 25 bp, Homo sapien
gtagggaccagaccgatcactagat

SEQ ID NO: 1829097 - DNA, 25 bp, Homo sapien
aggcattggctatatgtttcaccat

SEQ ID NO: 1829098 - DNA, 25 bp, Homo sapien
ggaggaggcattggctatatgtttc

SEQ ID NO: 1829099 - DNA, 25 bp, Homo sapien
aggaggcattggctatatgtttcac

SEQ ID NO: 1829100 - DNA, 25 bp, Homo sapien
ctttttataggtggccttggaggag

SEQ ID NO: 1829101 - DNA, 25 bp, Homo sapien
gatgcgtggtttttgttagacttcc

SEQ ID NO: 1829102 - DNA, 25 bp, Homo sapien
gtgttaccacacctagcaactatta

SEQ ID NO: 1829103 - DNA, 25 bp, Homo sapien
tctaagtcttcagcaagccgtaatg

SEQ ID NO: 1829104 - DNA, 25 bp, Homo sapien
ttcatgagataaccagtgttaccac

SEQ ID NO: 1829105 - DNA, 25 bp, Homo sapien
aggcagatttactctaaggaccacc

SEQ ID NO: 1829106 - DNA, 25 bp, Homo sapien
accacccctccactcataaagctct

SEQ ID NO: 1829107 - DNA, 25 bp, Homo sapien
aaaggcagatttactctaaggacca

SEQ ID NO: 1829108 - DNA, 25 bp, Homo sapien
ggcagatttactctaaggaccaccc

SEQ ID NO: 1829109 - DNA, 25 bp, Homo sapien
gaatccgccatcaagaacctgtaag

SEQ ID NO: 1829110 - DNA, 25 bp, Homo sapien
tgggaagtctgtgaggaatccgcca

SEQ ID NO: 1829111 - DNA, 25 bp, Homo sapien
cagttaaactttgaatgcggtccgt

SEQ ID NO: 1829112 - DNA, 25 bp, Homo sapien
catgcgcaatgtttctgggaagtct

SEQ ID NO: 1829113 - DNA, 25 bp, Homo sapien
gacaatcagatatcttagaccaaaa

SEQ ID NO: 1829114 - DNA, 25 bp, Homo sapien
catattagggaatcagaaagagatc

SEQ ID NO: 1829115 - DNA, 25 bp, Homo sapien
gcttcactcgtaaactgacaatcag

SEQ ID NO: 1829116 - DNA, 25 bp, Homo sapien
ctttgaaactaaaacgcttcactcg

SEQ ID NO: 1829117 - DNA, 25 bp, Homo sapien
caagtagtgccgaactgtcccaaag

SEQ ID NO: 1829118 - DNA, 25 bp, Homo sapien
ggtggtcttgtatccctatcctggg

SEQ ID NO: 1829119 - DNA, 25 bp, Homo sapien
gcagatatgcaaaaagtcagctcaa

SEQ ID NO: 1829120 - DNA, 25 bp, Homo sapien
ctgggcccttttcctcgactgatgg

SEQ ID NO: 1829121 - DNA, 25 bp, Homo sapien
ccaattaacttgtagtatttgcttc

SEQ ID NO: 1829122 - DNA, 25 bp, Homo sapien
cctcctctgccgcagtaattggttc

SEQ ID NO: 1829123 - DNA, 25 bp, Homo sapien
caaaccaattaacttgtagtatttg

SEQ ID NO: 1829124 - DNA, 25 bp, Homo sapien
ttggttcatgtatggataataatct

SEQ ID NO: 1829125 - DNA, 25 bp, Homo sapien
cctttcagggtaagccccagttgct

SEQ ID NO: 1829126 - DNA, 25 bp, Homo sapien
ccagttgctgcaggcgatgatcttg

SEQ ID NO: 1829127 - DNA, 25 bp, Homo sapien
gagagcagcgctttctcccctttca

SEQ ID NO: 1829128 - DNA, 25 bp, Homo sapien
agtacaaactgttggccgattatgg

SEQ ID NO: 1829129 - DNA, 25 bp, Homo sapien
tgggttcgactcctgcgtgtgcctg

SEQ ID NO: 1829130 - DNA, 25 bp, Homo sapien
gaattcagcacttgtaactgtgccc

SEQ ID NO: 1829131 - DNA, 25 bp, Homo sapien
agttcatcctcgcaagaattcagca

SEQ ID NO: 1829132 - DNA, 25 bp, Homo sapien
ggactttgagcttgacccatgactg

SEQ ID NO: 1829133 - DNA, 25 bp, Homo sapien
gggcactagctgcccagattgggca

SEQ ID NO: 1829134 - DNA, 25 bp, Homo sapien
ggcactagctgcccagattgggcac

SEQ ID NO: 1829135 - DNA, 25 bp, Homo sapien
gcactagctgcccagattgggcacc

SEQ ID NO: 1829136 - DNA, 25 bp, Homo sapien
ccttctccacagagagcggcaaagc

SEQ ID NO: 1829137 - DNA, 25 bp, Homo sapien
ctccacagagagcggcaaagcatgg

SEQ ID NO: 1829138 - DNA, 25 bp, Homo sapien
ttctccacagagagcggcaaagcat

SEQ ID NO: 1829139 - DNA, 25 bp, Homo sapien
tctccacagagagcggcaaagcatg

SEQ ID NO: 1829140 - DNA, 25 bp, Homo sapien
aggacaatggcccatgacatttcag

SEQ ID NO: 1829141 - DNA, 25 bp, Homo sapien
acagagatccatgtccaccactggc

SEQ ID NO: 1829142 - DNA, 25 bp, Homo sapien
catgtccaccactggctacaaaagc

SEQ ID NO: 1829143 - DNA, 25 bp, Homo sapien
ccagtggtcccggtgaacctgcgag

SEQ ID NO: 1829144 - DNA, 25 bp, Homo sapien
tacgatgactgacttagatccttgc

SEQ ID NO: 1829145 - DNA, 25 bp, Homo sapien
gactgacttagatccttgccccagc

SEQ ID NO: 1829146 - DNA, 25 bp, Homo sapien
aggccacagggcacatacgatgact

SEQ ID NO: 1829147 - DNA, 25 bp, Homo sapien
gggcacatacgatgactgacttaga

SEQ ID NO: 1829148 - DNA, 25 bp, Homo sapien
cacatgtacccaaaacatcccgtgc

SEQ ID NO: 1829149 - DNA, 25 bp, Homo sapien
acatgtacccaaaacatcccgtgct

SEQ ID NO: 1829150 - DNA, 25 bp, Homo sapien
catgtacccaaaacatcccgtgctg

SEQ ID NO: 1829151 - DNA, 25 bp, Homo sapien
cccacatgtacccaaaacatcccgt

SEQ ID NO: 1829152 - DNA, 25 bp, Homo sapien
ctccatgctcctccgtgaagccatt

SEQ ID NO: 1829153 - DNA, 25 bp, Homo sapien
tgctcctccgtgaagccattcccat

SEQ ID NO: 1829154 - DNA, 25 bp, Homo sapien
gccattcccattcatagggatgcat

SEQ ID NO: 1829155 - DNA, 25 bp, Homo sapien
cattcatagggatgcatgtcctttc

SEQ ID NO: 1829156 - DNA, 25 bp, Homo sapien
gctttgtacacccacaagtcccgag

SEQ ID NO: 1829157 - DNA, 25 bp, Homo sapien
gaggaaccacgtaagattcaggcga

SEQ ID NO: 1829158 - DNA, 25 bp, Homo sapien
tcaggcgagggcgtacaatcatccc

SEQ ID NO: 1829159 - DNA, 25 bp, Homo sapien
gctgagctgcaacgtgaagcaactt

SEQ ID NO: 1829160 - DNA, 25 bp, Homo sapien
ccatagacgatactgagtgaggagt

SEQ ID NO: 1829161 - DNA, 25 bp, Homo sapien
tctccatagacgatactgagtgagg

SEQ ID NO: 1829162 - DNA, 25 bp, Homo sapien
agacgatactgagtgaggagtccca

SEQ ID NO: 1829163 - DNA, 25 bp, Homo sapien
atagccttctccatagacgatactg

SEQ ID NO: 1829164 - DNA, 25 bp, Homo sapien
gtaagcatcagtgagctattttggg

SEQ ID NO: 1829165 - DNA, 25 bp, Homo sapien
tttaaaagataaactccattctcca

SEQ ID NO: 1829166 - DNA, 25 bp, Homo sapien
agtaagcatcagtgagctattttgg

SEQ ID NO: 1829167 - DNA, 25 bp, Homo sapien
gaagtaagcatcagtgagctatttt

SEQ ID NO: 1829168 - DNA, 25 bp, Homo sapien
agtcgcttcgggaaaaccactgtct

SEQ ID NO: 1829169 - DNA, 25 bp, Homo sapien
aaagtaacaagccagtgcccagtcg

SEQ ID NO: 1829170 - DNA, 25 bp, Homo sapien
ggctggccccgttttctcacgtgct

SEQ ID NO: 1829171 - DNA, 25 bp, Homo sapien
ccaggcttatcatcaagaggacagt

SEQ ID NO: 1829172 - DNA, 25 bp, Homo sapien
tgtcaccagcaactggtttattaac

SEQ ID NO: 1829173 - DNA, 25 bp, Homo sapien
ctggtttattaacagtgacaagaac

SEQ ID NO: 1829174 - DNA, 25 bp, Homo sapien
gcaggtaccatcatgcttgtcacca

SEQ ID NO: 1829175 - DNA, 25 bp, Homo sapien
gcaaattttaaccacgcaggtacca

SEQ ID NO: 1829176 - DNA, 25 bp, Homo sapien
cctggattgagcagttgagtacttc

SEQ ID NO: 1829177 - DNA, 25 bp, Homo sapien
ctggattgagcagttgagtacttcc

SEQ ID NO: 1829178 - DNA, 25 bp, Homo sapien
gcacagcagattgggaatacctgcc

SEQ ID NO: 1829179 - DNA, 25 bp, Homo sapien
tgtacatggtctttctggaatgcac

SEQ ID NO: 1829180 - DNA, 25 bp, Homo sapien
ttttttcagccttgagtcaggttac

SEQ ID NO: 1829181 - DNA, 25 bp, Homo sapien
tttttttcagccttgagtcaggtta

SEQ ID NO: 1829182 - DNA, 25 bp, Homo sapien
tggtttttttcagccttgagtcagg

SEQ ID NO: 1829183 - DNA, 25 bp, Homo sapien
gagagctaaggtcctggcttccagt

SEQ ID NO: 1829184 - DNA, 25 bp, Homo sapien
cctccttggtatcgggcttctcatc

SEQ ID NO: 1829185 - DNA, 25 bp, Homo sapien
gagagagagctaaggtcctggcttc

SEQ ID NO: 1829186 - DNA, 25 bp, Homo sapien
tcacctccttggtatcgggcttctc

SEQ ID NO: 1829187 - DNA, 25 bp, Homo sapien
taatcaatccagcatatttttatgt

SEQ ID NO: 1829188 - DNA, 25 bp, Homo sapien
atcaatccagcatatttttatgtac

SEQ ID NO: 1829189 - DNA, 25 bp, Homo sapien
ctataatcaatccagcatattttta

SEQ ID NO: 1829190 - DNA, 25 bp, Homo sapien
tcaatccagcatatttttatgtact

SEQ ID NO: 1829191 - DNA, 25 bp, Homo sapien
aaatctgttggtcaaggaaagggag

SEQ ID NO: 1829192 - DNA, 25 bp, Homo sapien
atctgttggtcaaggaaagggagac

SEQ ID NO: 1829193 - DNA, 25 bp, Homo sapien
gtcaaaatctgttggtcaaggaaag

SEQ ID NO: 1829194 - DNA, 25 bp, Homo sapien
caaaatctgttggtcaaggaaaggg

SEQ ID NO: 1829195 - DNA, 25 bp, Homo sapien
tgtggcacattaggccttgatcttg

SEQ ID NO: 1829196 - DNA, 25 bp, Homo sapien
gcttcctaatgggcacaaggcacct

SEQ ID NO: 1829197 - DNA, 25 bp, Homo sapien
tctctgttggaattcaaaggctctc

SEQ ID NO: 1829198 - DNA, 25 bp, Homo sapien
aaaggctctcccgtaagcaatcagc

SEQ ID NO: 1829199 - DNA, 25 bp, Homo sapien
acttttttctgaggcggttacgctg

SEQ ID NO: 1829200 - DNA, 25 bp, Homo sapien
tcagataagttatccgaggacagac

SEQ ID NO: 1829201 - DNA, 25 bp, Homo sapien
tccctatcgccaagcagcagtgaat

SEQ ID NO: 1829202 - DNA, 25 bp, Homo sapien
cagctgcatcgtggatacagttaca

SEQ ID NO: 1829203 - DNA, 25 bp, Homo sapien
tgaagacttggtcatgtgcctttag

SEQ ID NO: 1829204 - DNA, 25 bp, Homo sapien
agaactgtgacagccagaagccaga

SEQ ID NO: 1829205 - DNA, 25 bp, Homo sapien
ttagtactaaagcagggaggagttg

SEQ ID NO: 1829206 - DNA, 25 bp, Homo sapien
gttttgctggcctctcctctgactc

SEQ ID NO: 1829207 - DNA, 25 bp, Homo sapien
gctctctagtcctctgatttctcca

SEQ ID NO: 1829208 - DNA, 25 bp, Homo sapien
agctcctcacattgacttgccgtgg

SEQ ID NO: 1829209 - DNA, 25 bp, Homo sapien
agcagctcctcacattgacttgccg

SEQ ID NO: 1829210 - DNA, 25 bp, Homo sapien
tcctcacattgacttgccgtgggaa

SEQ ID NO: 1829211 - DNA, 25 bp, Homo sapien
taaacactagtgtagtcctgtttca

SEQ ID NO: 1829212 - DNA, 25 bp, Homo sapien
aatgtgttattcaacctaacaacta

SEQ ID NO: 1829213 - DNA, 25 bp, Homo sapien
gatggacacataggaagaactgagg

SEQ ID NO: 1829214 - DNA, 25 bp, Homo sapien
tcataatctggcacacagcaattcc

SEQ ID NO: 1829215 - DNA, 25 bp, Homo sapien
gggcctaacactggatgaatgaact

SEQ ID NO: 1829216 - DNA, 25 bp, Homo sapien
catcaaaagtttcacctgctggaag

SEQ ID NO: 1829217 - DNA, 25 bp, Homo sapien
gaatgaactaaagcaccatcaaaag

SEQ ID NO: 1829218 - DNA, 25 bp, Homo sapien
tgcaaccactgtccctagcacaggg

SEQ ID NO: 1829219 - DNA, 25 bp, Homo sapien
acagccaagcccctaatctctctgg

SEQ ID NO: 1829220 - DNA, 25 bp, Homo sapien
aacttgaatctggacttcctttgtc

SEQ ID NO: 1829221 - DNA, 25 bp, Homo sapien
cttgaatctggacttcctttgtcta

SEQ ID NO: 1829222 - DNA, 25 bp, Homo sapien
caagcccctaatctctctggtccag

SEQ ID NO: 1829223 - DNA, 25 bp, Homo sapien
aatgatccctgaagccctgaaaata

SEQ ID NO: 1829224 - DNA, 25 bp, Homo sapien
ccctgaagccctgaaaatatagtct

SEQ ID NO: 1829225 - DNA, 25 bp, Homo sapien
cgttcagaaaaacttgtctagtaag

SEQ ID NO: 1829226 - DNA, 25 bp, Homo sapien
aaacttgtctagtaagaaactgtag

SEQ ID NO: 1829227 - DNA, 25 bp, Homo sapien
taatttccgagtgtttactgagcct

SEQ ID NO: 1829228 - DNA, 25 bp, Homo sapien
tcaccaggggatctgttattaatga

SEQ ID NO: 1829229 - DNA, 25 bp, Homo sapien
tctgttattaatgatgtggctaact

SEQ ID NO: 1829230 - DNA, 25 bp, Homo sapien
tctgttattaatttccgagtgttta

SEQ ID NO: 1829231 - DNA, 25 bp, Homo sapien
gaattgtctttaaagccgtctcctg

SEQ ID NO: 1829232 - DNA, 25 bp, Homo sapien
ttaggcaagctattgatgagtctca

SEQ ID NO: 1829233 - DNA, 25 bp, Homo sapien
tcatcatcaagttgcaacagggaat

SEQ ID NO: 1829234 - DNA, 25 bp, Homo sapien
gctgccttcattagagtcttgatct

SEQ ID NO: 1829235 - DNA, 25 bp, Homo sapien
tctctccttagctgaagccagatct

SEQ ID NO: 1829236 - DNA, 25 bp, Homo sapien
tctccatgtagtaggccaacctggc

SEQ ID NO: 1829237 - DNA, 25 bp, Homo sapien
tctttcccctgagagaacataactt

SEQ ID NO: 1829238 - DNA, 25 bp, Homo sapien
tacagctatgaaacagcgtgcatgg

SEQ ID NO: 1829239 - DNA, 25 bp, Homo sapien
tcgtgcaactcctactaaaccagtg

SEQ ID NO: 1829240 - DNA, 25 bp, Homo sapien
agcaatgacgaagcatttcatcagc

SEQ ID NO: 1829241 - DNA, 25 bp, Homo sapien
gaaatgaggcccagttagtcaactg

SEQ ID NO: 1829242 - DNA, 25 bp, Homo sapien
cagaagagccctcacaatgtggttg

SEQ ID NO: 1829243 - DNA, 25 bp, Homo sapien
gcagccagtgattgcaagaatggaa

SEQ ID NO: 1829244 - DNA, 25 bp, Homo sapien
ctgcagccagtgattgcaagaatgg

SEQ ID NO: 1829245 - DNA, 25 bp, Homo sapien
tgcagccagtgattgcaagaatgga

SEQ ID NO: 1829246 - DNA, 25 bp, Homo sapien
cagccagtgattgcaagaatggaag

SEQ ID NO: 1829247 - DNA, 25 bp, Homo sapien
tgaaatagtcatctttcaagcccag

SEQ ID NO: 1829248 - DNA, 25 bp, Homo sapien
gaaatagtcatctttcaagcccagt

SEQ ID NO: 1829249 - DNA, 25 bp, Homo sapien
cgtaacgtgtgtccaaaaatgaaat

SEQ ID NO: 1829250 - DNA, 25 bp, Homo sapien
cagagagaaaacgtaacgtgtgtcc

SEQ ID NO: 1829251 - DNA, 25 bp, Homo sapien
taataaggcgaaggcccaaagcgct

SEQ ID NO: 1829252 - DNA, 25 bp, Homo sapien
tacaattgcgtgtctgtgcggctcg

SEQ ID NO: 1829253 - DNA, 25 bp, Homo sapien
tgaaagcttccaataacgtgcctag

SEQ ID NO: 1829254 - DNA, 25 bp, Homo sapien
tctgtacacagacgcgaggcgctgt

SEQ ID NO: 1829255 - DNA, 25 bp, Homo sapien
aaccttgtcttggagcgtggacgcc

SEQ ID NO: 1829256 - DNA, 25 bp, Homo sapien
taaactcgggctgtagaaactgcac

SEQ ID NO: 1829257 - DNA, 25 bp, Homo sapien
ttattgcgggcgttcagcggatcgt

SEQ ID NO: 1829258 - DNA, 25 bp, Homo sapien
aatacatccgcattgcagagggctg

SEQ ID NO: 1829259 - DNA, 25 bp, Homo sapien
gcacggcacgagttaatgcaccggg

SEQ ID NO: 1829260 - DNA, 25 bp, Homo sapien
ggaggcacggcacgagttaatgcac

SEQ ID NO: 1829261 - DNA, 25 bp, Homo sapien
cgagttaatgcaccgggagcagagc

SEQ ID NO: 1829262 - DNA, 25 bp, Homo sapien
cggtgttcccgacgtcctcgagccg

SEQ ID NO: 1829263 - DNA, 25 bp, Homo sapien
tcgagagcaacaggttaagccggcg

SEQ ID NO: 1829264 - DNA, 25 bp, Homo sapien
cgacgcagtctcgagagcaacaggt

SEQ ID NO: 1829265 - DNA, 25 bp, Homo sapien
ttaagccggcgagacgtcagcgcgc

SEQ ID NO: 1829266 - DNA, 25 bp, Homo sapien
tgcgggctccgacgcagtctcgaga

SEQ ID NO: 1829267 - DNA, 25 bp, Homo sapien
tgtacctactgactgttattttggg

SEQ ID NO: 1829268 - DNA, 25 bp, Homo sapien
gccggatgcctttcatgatgatgct

SEQ ID NO: 1829269 - DNA, 25 bp, Homo sapien
tctggaagctttgtggtactacggt

SEQ ID NO: 1829270 - DNA, 25 bp, Homo sapien
ttgctgtgccggctctgtacctact

SEQ ID NO: 1829271 - DNA, 25 bp, Homo sapien
ccaaaggaagacttgtcattgataa

SEQ ID NO: 1829272 - DNA, 25 bp, Homo sapien
ggaagacttgtcattgataaatgta

SEQ ID NO: 1829273 - DNA, 25 bp, Homo sapien
ctggaccaaaggaagacttgtcatt

SEQ ID NO: 1829274 - DNA, 25 bp, Homo sapien
gaccaaaggaagacttgtcattgat

SEQ ID NO: 1829275 - DNA, 25 bp, Homo sapien
tcccccaggattacagtagtagcag

SEQ ID NO: 1829276 - DNA, 25 bp, Homo sapien
gcagctctactaaccaccttttgtc

SEQ ID NO: 1829277 - DNA, 25 bp, Homo sapien
cagtagtagcagctctactaaccac

SEQ ID NO: 1829278 - DNA, 25 bp, Homo sapien
cacgtctcccccaggattacagtag

SEQ ID NO: 1829279 - DNA, 25 bp, Homo sapien
actgtgtttagccttaatccccgca

SEQ ID NO: 1829280 - DNA, 25 bp, Homo sapien
tgtcatctctgataagagtgcttcc

SEQ ID NO: 1829281 - DNA, 25 bp, Homo sapien
tgcttccaactgtgtttagccttaa

SEQ ID NO: 1829282 - DNA, 25 bp, Homo sapien
tctctgataagagtgcttccaactg

SEQ ID NO: 1829283 - DNA, 25 bp, Homo sapien
tgttttttcatgtgctcaattatct

SEQ ID NO: 1829284 - DNA, 25 bp, Homo sapien
tccatacttgcctcacccttgcagg

SEQ ID NO: 1829285 - DNA, 25 bp, Homo sapien
ctgtactctttatatcctgtgactc

SEQ ID NO: 1829286 - DNA, 25 bp, Homo sapien
taagacaagcctcaattgcttttcc

SEQ ID NO: 1829287 - DNA, 25 bp, Homo sapien
tcagccagctgttagagtgtttggt

SEQ ID NO: 1829288 - DNA, 25 bp, Homo sapien
gaagtggtagtgtattatctgttgg

SEQ ID NO: 1829289 - DNA, 25 bp, Homo sapien
ttggttctctctcggtttcagccag

SEQ ID NO: 1829290 - DNA, 25 bp, Homo sapien
ccagccaccattttggtgagagctt

SEQ ID NO: 1829291 - DNA, 25 bp, Homo sapien
gtgttgggagtttgaaaatacgaca

SEQ ID NO: 1829292 - DNA, 25 bp, Homo sapien
tgtgttgggagtttgaaaatacgac

SEQ ID NO: 1829293 - DNA, 25 bp, Homo sapien
tgttgggagtttgaaaatacgacat

SEQ ID NO: 1829294 - DNA, 25 bp, Homo sapien
tacagggtgtcgctgtgttacccaa

SEQ ID NO: 1829295 - DNA, 25 bp, Homo sapien
cgtgttccgattctgtaggagcaca

SEQ ID NO: 1829296 - DNA, 25 bp, Homo sapien
tcctgatgataagaagcctgtaaac

SEQ ID NO: 1829297 - DNA, 25 bp, Homo sapien
gctgggactagagctgcgcttcacc

SEQ ID NO: 1829298 - DNA, 25 bp, Homo sapien
cctgtgctcaggtcattagtttggc

SEQ ID NO: 1829299 - DNA, 25 bp, Homo sapien
caggagccctgacagctatattcaa

SEQ ID NO: 1829300 - DNA, 25 bp, Homo sapien
tctgttccaaattgactcctgtgct

SEQ ID NO: 1829301 - DNA, 25 bp, Homo sapien
tagtttggcttactaacaggagccc

SEQ ID NO: 1829302 - DNA, 25 bp, Homo sapien
ctgtttcaagccatggcattaactc

SEQ ID NO: 1829303 - DNA, 25 bp, Homo sapien
tgtgacgcgcgaactcaatggttgc

SEQ ID NO: 1829304 - DNA, 25 bp, Homo sapien
tgtcttcagaagtccggtgtgacgc

SEQ ID NO: 1829305 - DNA, 25 bp, Homo sapien
cccgaggaccttatggagtgcttcc

SEQ ID NO: 1829306 - DNA, 25 bp, Homo sapien
cattcagcggaggatttagtaagaa

SEQ ID NO: 1829307 - DNA, 25 bp, Homo sapien
aaaactgcattcagcggaggattta

SEQ ID NO: 1829308 - DNA, 25 bp, Homo sapien
ccatgaagtgtacatcagcagcccc

SEQ ID NO: 1829309 - DNA, 25 bp, Homo sapien
gaaagttggttccatgaagtgtaca

SEQ ID NO: 1829310 - DNA, 25 bp, Homo sapien
gtggggttgcaactcctaaggctta

SEQ ID NO: 1829311 - DNA, 25 bp, Homo sapien
tgtggggttgcaactcctaaggctt

SEQ ID NO: 1829312 - DNA, 25 bp, Homo sapien
ctgtggggttgcaactcctaaggct

SEQ ID NO: 1829313 - DNA, 25 bp, Homo sapien
tggggttgcaactcctaaggcttaa

SEQ ID NO: 1829314 - DNA, 25 bp, Homo sapien
tgacttggggtgacaacctcggacc

SEQ ID NO: 1829315 - DNA, 25 bp, Homo sapien
ggctcttggggtcagtagcaaagac

SEQ ID NO: 1829316 - DNA, 25 bp, Homo sapien
caggaatgagctggaaaactttgtc

SEQ ID NO: 1829317 - DNA, 25 bp, Homo sapien
catggaacagttggctcttggggtc

SEQ ID NO: 1829318 - DNA, 25 bp, Homo sapien
cgcgcccagccgtcagtgtacttta

SEQ ID NO: 1829319 - DNA, 25 bp, Homo sapien
cagccgtcagtgtactttaagtata

SEQ ID NO: 1829320 - DNA, 25 bp, Homo sapien
cagttaactaggttattactttgtg

SEQ ID NO: 1829321 - DNA, 25 bp, Homo sapien
aattaattacaatatgggaagtcag

SEQ ID NO: 1829322 - DNA, 25 bp, Homo sapien
ttcggtgtcatttcctcgaggagac

SEQ ID NO: 1829323 - DNA, 25 bp, Homo sapien
gtgtcatttcctcgaggagacatgt

SEQ ID NO: 1829324 - DNA, 25 bp, Homo sapien
cttggccttagcttcggtgtcattt

SEQ ID NO: 1829325 - DNA, 25 bp, Homo sapien
ccttagcttcggtgtcatttcctcg

SEQ ID NO: 1829326 - DNA, 25 bp, Homo sapien
ctcacagcctgtgccggatttctca

SEQ ID NO: 1829327 - DNA, 25 bp, Homo sapien
tcacagcctgtgccggatttctcac

SEQ ID NO: 1829328 - DNA, 25 bp, Homo sapien
ttgtcaaacttcactgacccgtgag

SEQ ID NO: 1829329 - DNA, 25 bp, Homo sapien
tgaatacaaccccttggacataggg

SEQ ID NO: 1829330 - DNA, 25 bp, Homo sapien
gacccgtgagccttaattttgaata

SEQ ID NO: 1829331 - DNA, 25 bp, Homo sapien
ctctggagcctcctttgagaaggac

SEQ ID NO: 1829332 - DNA, 25 bp, Homo sapien
cacagaatggttggtaacggttctt

SEQ ID NO: 1829333 - DNA, 25 bp, Homo sapien
tccattctaatcttgatgcacagaa

SEQ ID NO: 1829334 - DNA, 25 bp, Homo sapien
gatgcacagaatggttggtaacggt

SEQ ID NO: 1829335 - DNA, 25 bp, Homo sapien
tcaaaactttcgagtttccattcta

SEQ ID NO: 1829336 - DNA, 25 bp, Homo sapien
ccaggtccctggattgtattgccag

SEQ ID NO: 1829337 - DNA, 25 bp, Homo sapien
gatggctactttctagagaaatcaa

SEQ ID NO: 1829338 - DNA, 25 bp, Homo sapien
agtcacttttaactacgtgaaactg

SEQ ID NO: 1829339 - DNA, 25 bp, Homo sapien
tgtattgccagaggtgtggcttttg

SEQ ID NO: 1829340 - DNA, 25 bp, Homo sapien
atctttcccgcaaaccgagctgcag

SEQ ID NO: 1829341 - DNA, 25 bp, Homo sapien
gaaaacactggcgttcagcatcttt

SEQ ID NO: 1829342 - DNA, 25 bp, Homo sapien
ccttgttgttccgacgaaaacactg

SEQ ID NO: 1829343 - DNA, 25 bp, Homo sapien
ccataaaatctgtgggagttttccg

SEQ ID NO: 1829344 - DNA, 25 bp, Homo sapien
tgaacttcatccgtaaaggtgagtt

SEQ ID NO: 1829345 - DNA, 25 bp, Homo sapien
ttacttcagtagacctggagtcttg

SEQ ID NO: 1829346 - DNA, 25 bp, Homo sapien
aggttgaacttcatccgtaaaggtg

SEQ ID NO: 1829347 - DNA, 25 bp, Homo sapien
cttcagtagacctggagtcttgcct

SEQ ID NO: 1829348 - DNA, 25 bp, Homo sapien
gatgggtccatagtccactgccaga

SEQ ID NO: 1829349 - DNA, 25 bp, Homo sapien
gagagccgatccctccagggtttgt

SEQ ID NO: 1829350 - DNA, 25 bp, Homo sapien
gaaggtaccctcttgcgtctcggag

SEQ ID NO: 1829351 - DNA, 25 bp, Homo sapien
gaatgcttgccgtgtaactgatggg

SEQ ID NO: 1829352 - DNA, 25 bp, Homo sapien
tatacgggggccgtgttatcttctg

SEQ ID NO: 1829353 - DNA, 25 bp, Homo sapien
catgtcatctttatacgggggccgt

SEQ ID NO: 1829354 - DNA, 25 bp, Homo sapien
gccgtgttatcttctgtgtaatgtt

SEQ ID NO: 1829355 - DNA, 25 bp, Homo sapien
ttgcatgtcatctttatacgggggc

SEQ ID NO: 1829356 - DNA, 25 bp, Homo sapien
aaatgtgagtgatactgcattcagc

SEQ ID NO: 1829357 - DNA, 25 bp, Homo sapien
tggcatctagggcaggtataaatgt

SEQ ID NO: 1829358 - DNA, 25 bp, Homo sapien
caggtataaatgtgagtgatactgc

SEQ ID NO: 1829359 - DNA, 25 bp, Homo sapien
tgagtgatactgcattcagctgcca

SEQ ID NO: 1829360 - DNA, 25 bp, Homo sapien
catcctgcgccagcattggaatggt

SEQ ID NO: 1829361 - DNA, 25 bp, Homo sapien
ggttacattataagcctgcgcactc

SEQ ID NO: 1829362 - DNA, 25 bp, Homo sapien
tgatacaacacagtggtcacgacca

SEQ ID NO: 1829363 - DNA, 25 bp, Homo sapien
tcacgaccacattaccggaggaagt

SEQ ID NO: 1829364 - DNA, 25 bp, Homo sapien
tccattgcgctttggggtaccagct

SEQ ID NO: 1829365 - DNA, 25 bp, Homo sapien
tacaggctgttgttaccaaagggca

SEQ ID NO: 1829366 - DNA, 25 bp, Homo sapien
tgactgacagatgggccaagtcagg

SEQ ID NO: 1829367 - DNA, 25 bp, Homo sapien
tggggtaccagctttctgactgaca

SEQ ID NO: 1829368 - DNA, 25 bp, Homo sapien
tcttcaccaagttgggtaaaacatc

SEQ ID NO: 1829369 - DNA, 25 bp, Homo sapien
aacagaaacaatccccggagcagca

SEQ ID NO: 1829370 - DNA, 25 bp, Homo sapien
caatccccggagcagcattgcacat

SEQ ID NO: 1829371 - DNA, 25 bp, Homo sapien
gtaaaacatcgagaaacaaaacaga

SEQ ID NO: 1829372 - DNA, 25 bp, Homo sapien
tattgtctcccaggcagtatgcagt

SEQ ID NO: 1829373 - DNA, 25 bp, Homo sapien
cagtatgcagtgtgatccctctccc

SEQ ID NO: 1829374 - DNA, 25 bp, Homo sapien
gtctcccaggcagtatgcagtgtga

SEQ ID NO: 1829375 - DNA, 25 bp, Homo sapien
caggcagtatgcagtgtgatccctc

SEQ ID NO: 1829376 - DNA, 25 bp, Homo sapien
tatgattctgcgtcttttgctaagg

SEQ ID NO: 1829377 - DNA, 25 bp, Homo sapien
tattggttagatgaggaaagttaac

SEQ ID NO: 1829378 - DNA, 25 bp, Homo sapien
tgtggtcccgtattattggttagat

SEQ ID NO: 1829379 - DNA, 25 bp, Homo sapien
gatattctcggttcttgtggtcccg

SEQ ID NO: 1829380 - DNA, 25 bp, Homo sapien
tcttaatgttggataagtctgctgt

SEQ ID NO: 1829381 - DNA, 25 bp, Homo sapien
attgtttgttgaactctgcaagccc

SEQ ID NO: 1829382 - DNA, 25 bp, Homo sapien
tctgttttaacacgcggctggaatt

SEQ ID NO: 1829383 - DNA, 25 bp, Homo sapien
gacagccctttccatcaagcttgag

SEQ ID NO: 1829384 - DNA, 25 bp, Homo sapien
cttggttcttccaagtgctctccac

SEQ ID NO: 1829385 - DNA, 25 bp, Homo sapien
ccccgcttccctctgctgatgacat

SEQ ID NO: 1829386 - DNA, 25 bp, Homo sapien
gttcttccaagtgctctccactccc

SEQ ID NO: 1829387 - DNA, 25 bp, Homo sapien
ctccactccccgcttccctctgctg

SEQ ID NO: 1829388 - DNA, 25 bp, Homo sapien
tcagtgcagagtgaaagaccatctc

SEQ ID NO: 1829389 - DNA, 25 bp, Homo sapien
cttttgctcagtgcagagtgaaaga

SEQ ID NO: 1829390 - DNA, 25 bp, Homo sapien
ccatctctagggaacgaagccttac

SEQ ID NO: 1829391 - DNA, 25 bp, Homo sapien
accatctctagggaacgaagcctta

SEQ ID NO: 1829392 - DNA, 25 bp, Homo sapien
gggctgctgcagccagatgtccttc

SEQ ID NO: 1829393 - DNA, 25 bp, Homo sapien
gctgctgcagccagatgtccttcat

SEQ ID NO: 1829394 - DNA, 25 bp, Homo sapien
aggggctgctgcagccagatgtcct

SEQ ID NO: 1829395 - DNA, 25 bp, Homo sapien
tggcaagactaggggctgctgcagc

SEQ ID NO: 1829396 - DNA, 25 bp, Homo sapien
gattgcaaactgtaaggataggaag

SEQ ID NO: 1829397 - DNA, 25 bp, Homo sapien
ggataggaagaatcgtaactttgct

SEQ ID NO: 1829398 - DNA, 25 bp, Homo sapien
gtttcttgtatgattgcaaactgta

SEQ ID NO: 1829399 - DNA, 25 bp, Homo sapien
tcgtaactttgcttcttgatagcca

SEQ ID NO: 1829400 - DNA, 25 bp, Homo sapien
tagagttggttgacccatgacccag

SEQ ID NO: 1829401 - DNA, 25 bp, Homo sapien
taacgatggtttgccaattgtaggc

SEQ ID NO: 1829402 - DNA, 25 bp, Homo sapien
tgacttgaccactctacctgtgaag

SEQ ID NO: 1829403 - DNA, 25 bp, Homo sapien
tgtcgttactaccagtgcccttgat

SEQ ID NO: 1829404 - DNA, 25 bp, Homo sapien
ctccttgtcgcccttgaggatgcca

SEQ ID NO: 1829405 - DNA, 25 bp, Homo sapien
tctccttgtcgcccttgaggatgcc

SEQ ID NO: 1829406 - DNA, 25 bp, Homo sapien
gatctccttgtcgcccttgaggatg

SEQ ID NO: 1829407 - DNA, 25 bp, Homo sapien
atgatctccttgtcgcccttgagga

SEQ ID NO: 1829408 - DNA, 25 bp, Homo sapien
ctgctgccaaatctcatctatcctt

SEQ ID NO: 1829409 - DNA, 25 bp, Homo sapien
aatgtttctgtagagtcccagattt

SEQ ID NO: 1829410 - DNA, 25 bp, Homo sapien
gtagagtcccagatttagcttcttc

SEQ ID NO: 1829411 - DNA, 25 bp, Homo sapien
ttagcttcctctataggctttaaaa

SEQ ID NO: 1829412 - DNA, 25 bp, Homo sapien
ttcccaaggatgataaaaacagtac

SEQ ID NO: 1829413 - DNA, 25 bp, Homo sapien
ctttcccaaggatgataaaaacagt

SEQ ID NO: 1829414 - DNA, 25 bp, Homo sapien
tcccaaggatgataaaaacagtaca

SEQ ID NO: 1829415 - DNA, 25 bp, Homo sapien
ttctttcccaaggatgataaaaaca

SEQ ID NO: 1829416 - DNA, 25 bp, Homo sapien
tgccattgacatccaaggagagctg

SEQ ID NO: 1829417 - DNA, 25 bp, Homo sapien
gccattgacatccaaggagagctgt

SEQ ID NO: 1829418 - DNA, 25 bp, Homo sapien
gaagcctagatatggagaagaaccc

SEQ ID NO: 1829419 - DNA, 25 bp, Homo sapien
ggatgttgacatccctgctggccga

SEQ ID NO: 1829420 - DNA, 25 bp, Homo sapien
tcaggtcaagcagggacgtccttct

SEQ ID NO: 1829421 - DNA, 25 bp, Homo sapien
tgagaaacccaatgtgagtgcgcca

SEQ ID NO: 1829422 - DNA, 25 bp, Homo sapien
gaaggattgcctctctagttttccc

SEQ ID NO: 1829423 - DNA, 25 bp, Homo sapien
cagagagtttcagagccagcatgtg

SEQ ID NO: 1829424 - DNA, 25 bp, Homo sapien
aaagctgccctgtaggcgtagtcgg

SEQ ID NO: 1829425 - DNA, 25 bp, Homo sapien
tgctgcggccctgacaagcatggaa

SEQ ID NO: 1829426 - DNA, 25 bp, Homo sapien
tctatcatgcttttgggtcagggaa

SEQ ID NO: 1829427 - DNA, 25 bp, Homo sapien
aattcttgttctaccagtaactggg

SEQ ID NO: 1829428 - DNA, 25 bp, Homo sapien
taactgggtgtctaggagcaaggca

SEQ ID NO: 1829429 - DNA, 25 bp, Homo sapien
cactggcatcctccttatgtaaaac

SEQ ID NO: 1829430 - DNA, 25 bp, Homo sapien
aacaccagtgttgtccttatttccg

SEQ ID NO: 1829431 - DNA, 25 bp, Homo sapien
ccatgaatacatgtaggtagccctg

SEQ ID NO: 1829432 - DNA, 25 bp, Homo sapien
ccggatcaccttcaaatatgttaag

SEQ ID NO: 1829433 - DNA, 25 bp, Homo sapien
cactattcctaagtaggtaaacagc

SEQ ID NO: 1829434 - DNA, 25 bp, Homo sapien
agcactaaataagggtctgctctgg

SEQ ID NO: 1829435 - DNA, 25 bp, Homo sapien
tggcagccattggagagcacctctt

SEQ ID NO: 1829436 - DNA, 25 bp, Homo sapien
gctgtagtggggtgcattccaaaca

SEQ ID NO: 1829437 - DNA, 25 bp, Homo sapien
ctgtagagcactaaataagggtctg

SEQ ID NO: 1829438 - DNA, 25 bp, Homo sapien
ataaacagcatgtttgctttcattt

SEQ ID NO: 1829439 - DNA, 25 bp, Homo sapien
agagcttttaagactgaccatttgc

SEQ ID NO: 1829440 - DNA, 25 bp, Homo sapien
actttgtaggagaaaatactgattc

SEQ ID NO: 1829441 - DNA, 25 bp, Homo sapien
tactgattcctaaaaattcatattg

SEQ ID NO: 1829442 - DNA, 25 bp, Homo sapien
ggcagggaagagcttttaagactga

SEQ ID NO: 1829443 - DNA, 25 bp, Homo sapien
tattccgttcacgagggcagatccc

SEQ ID NO: 1829444 - DNA, 25 bp, Homo sapien
ccacgcctgtctaagcttgcattta

SEQ ID NO: 1829445 - DNA, 25 bp, Homo sapien
cacaagaaagtgctaagctcggttt

SEQ ID NO: 1829446 - DNA, 25 bp, Homo sapien
taagatctcaccctctcagcactgt

SEQ ID NO: 1829447 - DNA, 25 bp, Homo sapien
aaccagaatggatggattttggtca

SEQ ID NO: 1829448 - DNA, 25 bp, Homo sapien
gtgtatttgccccatcagtctctca

SEQ ID NO: 1829449 - DNA, 25 bp, Homo sapien
gaaccattacagagactttcatcct

SEQ ID NO: 1829450 - DNA, 25 bp, Homo sapien
tctctcagtatgtgtagaaaccaga

SEQ ID NO: 1829451 - DNA, 25 bp, Homo sapien
ggattatgtttaccatgtaggctag

SEQ ID NO: 1829452 - DNA, 25 bp, Homo sapien
gaggcattgtttccctgctactcag

SEQ ID NO: 1829453 - DNA, 25 bp, Homo sapien
tcaagcatggttaggtagggccaaa

SEQ ID NO: 1829454 - DNA, 25 bp, Homo sapien
tgctactcaggcaaaaacccttacg

SEQ ID NO: 1829455 - DNA, 25 bp, Homo sapien
atctataatgcctggactttgccac

SEQ ID NO: 1829456 - DNA, 25 bp, Homo sapien
catctataatgcctggactttgcca

SEQ ID NO: 1829457 - DNA, 25 bp, Homo sapien
acatctataatgcctggactttgcc

SEQ ID NO: 1829458 - DNA, 25 bp, Homo sapien
cacatctataatgcctggactttgc

SEQ ID NO: 1829459 - DNA, 25 bp, Homo sapien
ttttcaggtgtgtgcatctggacag

SEQ ID NO: 1829460 - DNA, 25 bp, Homo sapien
ctgaattttcaggtgtgtgcatctg

SEQ ID NO: 1829461 - DNA, 25 bp, Homo sapien
agttgtagcaaatgtaggtctgaat

SEQ ID NO: 1829462 - DNA, 25 bp, Homo sapien
aattttcaggtgtgtgcatctggac

SEQ ID NO: 1829463 - DNA, 25 bp, Homo sapien
tgctgcaagtagatctgtgattact

SEQ ID NO: 1829464 - DNA, 25 bp, Homo sapien
gagagaagcgcgtccaggagagggc

SEQ ID NO: 1829465 - DNA, 25 bp, Homo sapien
tctgtccttctggacgaatactctt

SEQ ID NO: 1829466 - DNA, 25 bp, Homo sapien
gctgctgcaagtagatctgtgatta

SEQ ID NO: 1829467 - DNA, 25 bp, Homo sapien
tcacagtgcttgcttgtgcatattc

SEQ ID NO: 1829468 - DNA, 25 bp, Homo sapien
ttcccatggaaatcttccaagtgtg

SEQ ID NO: 1829469 - DNA, 25 bp, Homo sapien
tgggagggaagtttgtatttcacgc

SEQ ID NO: 1829470 - DNA, 25 bp, Homo sapien
catggaaatcttccaagtgtgggag

SEQ ID NO: 1829471 - DNA, 25 bp, Homo sapien
ggagggaagtttgtatttcacgcac

SEQ ID NO: 1829472 - DNA, 25 bp, Homo sapien
tctgaggttggatagcacagagcta

SEQ ID NO: 1829473 - DNA, 25 bp, Homo sapien
tgcacatgctgctcatcgacattcg

SEQ ID NO: 1829474 - DNA, 25 bp, Homo sapien
cgacattcgtggtcaggttctttcc

SEQ ID NO: 1829475 - DNA, 25 bp, Homo sapien
tctcgctgggctgtgcatgctctgt

SEQ ID NO: 1829476 - DNA, 25 bp, Homo sapien
aagatggtggctgtgtctccccact

SEQ ID NO: 1829477 - DNA, 25 bp, Homo sapien
tgctctaggggtacccaagatggtg

SEQ ID NO: 1829478 - DNA, 25 bp, Homo sapien
gtggctgtgtctccccacttctgct

SEQ ID NO: 1829479 - DNA, 25 bp, Homo sapien
tctgctctaggggtacccaagatgg

SEQ ID NO: 1829480 - DNA, 25 bp, Homo sapien
tgggggttgtgggacttgtggggca

SEQ ID NO: 1829481 - DNA, 25 bp, Homo sapien
gaaacctaaggcttcctgttcagac

SEQ ID NO: 1829482 - DNA, 25 bp, Homo sapien
ggtgaatgattgagttcccaagcca

SEQ ID NO: 1829483 - DNA, 25 bp, Homo sapien
gactggttgggaatggcagtctcca

SEQ ID NO: 1829484 - DNA, 25 bp, Homo sapien
tatgtcgcacttcatgaaacctaag

SEQ ID NO: 1829485 - DNA, 25 bp, Homo sapien
tgaaaggcagaaactgtgtctcctt

SEQ ID NO: 1829486 - DNA, 25 bp, Homo sapien
aaggcagaaactgtgtctccttcat

SEQ ID NO: 1829487 - DNA, 25 bp, Homo sapien
ctgaaaggcagaaactgtgtctcct

SEQ ID NO: 1829488 - DNA, 25 bp, Homo sapien
gaaaggcagaaactgtgtctccttc

SEQ ID NO: 1829489 - DNA, 25 bp, Homo sapien
tgagggttcatttaagccgtacgca

SEQ ID NO: 1829490 - DNA, 25 bp, Homo sapien
gccgtacgcaattagatgaacatgt

SEQ ID NO: 1829491 - DNA, 25 bp, Homo sapien
atattctcgtccgaccctttgaggg

SEQ ID NO: 1829492 - DNA, 25 bp, Homo sapien
cactgccgctgtctacatatgtgac

SEQ ID NO: 1829493 - DNA, 25 bp, Homo sapien
gaactgggtggaccttgcgcttaga

SEQ ID NO: 1829494 - DNA, 25 bp, Homo sapien
caggcattctgcgtaggataactct

SEQ ID NO: 1829495 - DNA, 25 bp, Homo sapien
tctccagaagtaccataaagcaggc

SEQ ID NO: 1829496 - DNA, 25 bp, Homo sapien
gaattggtctctgctagcctctggg

SEQ ID NO: 1829497 - DNA, 25 bp, Homo sapien
aaattcctgcaatactcagagtgcg

SEQ ID NO: 1829498 - DNA, 25 bp, Homo sapien
cagagtgcgatttgcgtccattcaa

SEQ ID NO: 1829499 - DNA, 25 bp, Homo sapien
cagtgtctcgctccgttgtctgtgc

SEQ ID NO: 1829500 - DNA, 25 bp, Homo sapien
taggagcagtttatctttgaggtcc

SEQ ID NO: 1829501 - DNA, 25 bp, Homo sapien
gccgcgcttggttgtgccgtctata

SEQ ID NO: 1829502 - DNA, 25 bp, Homo sapien
ggctgacacggtggaatccttgaca

SEQ ID NO: 1829503 - DNA, 25 bp, Homo sapien
cactagactgtgaggctggtagagt

SEQ ID NO: 1829504 - DNA, 25 bp, Homo sapien
gattcaggtatatctagccgcgctt

SEQ ID NO: 1829505 - DNA, 25 bp, Homo sapien
caccataaagagctcagtcagccca

SEQ ID NO: 1829506 - DNA, 25 bp, Homo sapien
ctagttactggagtatcccttggcg

SEQ ID NO: 1829507 - DNA, 25 bp, Homo sapien
gttactggagtatcccttggcgttc

SEQ ID NO: 1829508 - DNA, 25 bp, Homo sapien
tcccttggcgttcttcaagtcaggg

SEQ ID NO: 1829509 - DNA, 25 bp, Homo sapien
ggagtatcccttggcgttcttcaag

SEQ ID NO: 1829510 - DNA, 25 bp, Homo sapien
tagtttatcagttaataatgaagaa

SEQ ID NO: 1829511 - DNA, 25 bp, Homo sapien
taatgaagaaatctgaaaccctgaa

SEQ ID NO: 1829512 - DNA, 25 bp, Homo sapien
ttcatttgttgggatagtttatcag

SEQ ID NO: 1829513 - DNA, 25 bp, Homo sapien
atctgaaaccctgaaatttttgagg

SEQ ID NO: 1829514 - DNA, 25 bp, Homo sapien
aaagtccctggtgtctgtgtcccgc

SEQ ID NO: 1829515 - DNA, 25 bp, Homo sapien
gaggaaggcctcacatgattcgcac

SEQ ID NO: 1829516 - DNA, 25 bp, Homo sapien
agcttctccattgggaactgaggaa

SEQ ID NO: 1829517 - DNA, 25 bp, Homo sapien
tcccgcagggaagttgagtattcag

SEQ ID NO: 1829518 - DNA, 25 bp, Homo sapien
tgagggtgcccgaccaaattctgga

SEQ ID NO: 1829519 - DNA, 25 bp, Homo sapien
caatggcatgtgcagcgttagactc

SEQ ID NO: 1829520 - DNA, 25 bp, Homo sapien
tagagggatttacagcaaccacgtg

SEQ ID NO: 1829521 - DNA, 25 bp, Homo sapien
tgccagttgttcatgagtgctcccc

SEQ ID NO: 1829522 - DNA, 25 bp, Homo sapien
gaggaagaacatcgcaaacagagcg

SEQ ID NO: 1829523 - DNA, 25 bp, Homo sapien
aaacagagcgatgcggaataatgcc

SEQ ID NO: 1829524 - DNA, 25 bp, Homo sapien
tgtacggatgtaatttctaaggagg

SEQ ID NO: 1829525 - DNA, 25 bp, Homo sapien
aatgcctgtttttgggactgttgcc

SEQ ID NO: 1829526 - DNA, 25 bp, Homo sapien
tcatctgtgattaggcctgccccca

SEQ ID NO: 1829527 - DNA, 25 bp, Homo sapien
agcagctggcttataattttaatta

SEQ ID NO: 1829528 - DNA, 25 bp, Homo sapien
tgtagataaccaaactgaaaggcct

SEQ ID NO: 1829529 - DNA, 25 bp, Homo sapien
gaaaggcctttctcacatccctgag

SEQ ID NO: 1829530 - DNA, 25 bp, Homo sapien
taaagcacgagagccttgcagacca

SEQ ID NO: 1829531 - DNA, 25 bp, Homo sapien
ttgccagtgataaagcacgagagcc

SEQ ID NO: 1829532 - DNA, 25 bp, Homo sapien
tgttctttacgagttaacgccatcc

SEQ ID NO: 1829533 - DNA, 25 bp, Homo sapien
cccgtaaggccatttgtccagctgt

SEQ ID NO: 1829534 - DNA, 25 bp, Homo sapien
ggctagtaatcatcaggtctgccat

SEQ ID NO: 1829535 - DNA, 25 bp, Homo sapien
cattttagagtgactgatgcccaca

SEQ ID NO: 1829536 - DNA, 25 bp, Homo sapien
cattaacgcaaacattttagagtga

SEQ ID NO: 1829537 - DNA, 25 bp, Homo sapien
tgatgcccacacaggccgcggggct

SEQ ID NO: 1829538 - DNA, 25 bp, Homo sapien
tgtaagttgagacagtacccacctg

SEQ ID NO: 1829539 - DNA, 25 bp, Homo sapien
tcactcggacggtggaggacttgtt

SEQ ID NO: 1829540 - DNA, 25 bp, Homo sapien
catttagtgtgagtggaattcaggc

SEQ ID NO: 1829541 - DNA, 25 bp, Homo sapien
gaagaactcccgattgtcagccaga

SEQ ID NO: 1829542 - DNA, 25 bp, Homo sapien
ggacctaggtctctgcttacgtgca

SEQ ID NO: 1829543 - DNA, 25 bp, Homo sapien
caattgtcagagcttaggatgtcca

SEQ ID NO: 1829544 - DNA, 25 bp, Homo sapien
ggtttgccccgtgtatacatgctga

SEQ ID NO: 1829545 - DNA, 25 bp, Homo sapien
gcctacactgtgtaccctgggtgcg

SEQ ID NO: 1829546 - DNA, 25 bp, Homo sapien
ggagcttaactggaccctatgatgc

SEQ ID NO: 1829547 - DNA, 25 bp, Homo sapien
gatttgtggagcttgactccgccag

SEQ ID NO: 1829548 - DNA, 25 bp, Homo sapien
gcttcttccctaaatgtggttccag

SEQ ID NO: 1829549 - DNA, 25 bp, Homo sapien
gcaccgctgcttgcctgtagtcaaa

SEQ ID NO: 1829550 - DNA, 25 bp, Homo sapien
caactgaaaccaggatttggcctca

SEQ ID NO: 1829551 - DNA, 25 bp, Homo sapien
gacagccaggactattccgagaggt

SEQ ID NO: 1829552 - DNA, 25 bp, Homo sapien
caaaatgtgataccctgtgtgggct

SEQ ID NO: 1829553 - DNA, 25 bp, Homo sapien
gagttacactggctgtggcatggcc

SEQ ID NO: 1829554 - DNA, 25 bp, Homo sapien
aagaagaatgtattgtgaggccggg

SEQ ID NO: 1829555 - DNA, 25 bp, Homo sapien
taagaagaatgtattgtgaggccgg

SEQ ID NO: 1829556 - DNA, 25 bp, Homo sapien
agaagaatgtattgtgaggccgggc

SEQ ID NO: 1829557 - DNA, 25 bp, Homo sapien
ttgtacctctcaccagcagcctgtt

SEQ ID NO: 1829558 - DNA, 25 bp, Homo sapien
taacgaagcctttgcggctgagcac

SEQ ID NO: 1829559 - DNA, 25 bp, Homo sapien
tctgtgaatcatgggttgtacctct

SEQ ID NO: 1829560 - DNA, 25 bp, Homo sapien
caaatgtccaggcacagttgcaaat

SEQ ID NO: 1829561 - DNA, 25 bp, Homo sapien
gctgaaggcggacgttgtttcctaa

SEQ ID NO: 1829562 - DNA, 25 bp, Homo sapien
tagaaaacctagatactgcagtcag

SEQ ID NO: 1829563 - DNA, 25 bp, Homo sapien
taaccataggtggaacgaggagacg

SEQ ID NO: 1829564 - DNA, 25 bp, Homo sapien
catgtagagagccactaggaggcct

SEQ ID NO: 1829565 - DNA, 25 bp, Homo sapien
ttgcactgagcttgccagtggtgac

SEQ ID NO: 1829566 - DNA, 25 bp, Homo sapien
tagctgttgcccttctccggttgtg

SEQ ID NO: 1829567 - DNA, 25 bp, Homo sapien
gtggtgactgccaggaacgtcctat

SEQ ID NO: 1829568 - DNA, 25 bp, Homo sapien
ccgtagctacccatattgcactgag

SEQ ID NO: 1829569 - DNA, 25 bp, Homo sapien
tctgcctatggcttacagtttgaca

SEQ ID NO: 1829570 - DNA, 25 bp, Homo sapien
aatttattagcgctgctctgcaccc

SEQ ID NO: 1829571 - DNA, 25 bp, Homo sapien
gagacttcatgtggtttattgcgag

SEQ ID NO: 1829572 - DNA, 25 bp, Homo sapien
ggttgtccggtttctatggccttgc

SEQ ID NO: 1829573 - DNA, 25 bp, Homo sapien
tggattccagtgtggccagacaacg

SEQ ID NO: 1829574 - DNA, 25 bp, Homo sapien
tcaagaacctctataaaacaacctg

SEQ ID NO: 1829575 - DNA, 25 bp, Homo sapien
ctggctttccaggtggaattccgca

SEQ ID NO: 1829576 - DNA, 25 bp, Homo sapien
gaattccgcatacagccaaaactgg

SEQ ID NO: 1829577 - DNA, 25 bp, Homo sapien
acctggagggtaatctcattctgac

SEQ ID NO: 1829578 - DNA, 25 bp, Homo sapien
aaggtggcttggctcttaattctga

SEQ ID NO: 1829579 - DNA, 25 bp, Homo sapien
tgaacttcctcctcatcggactgaa

SEQ ID NO: 1829580 - DNA, 25 bp, Homo sapien
ttctgacaggtactggattcaggcc

SEQ ID NO: 1829581 - DNA, 25 bp, Homo sapien
cagaattgccgccaacagctgtgga

SEQ ID NO: 1829582 - DNA, 25 bp, Homo sapien
tgtggaatgtgcccgtcatgaaagg

SEQ ID NO: 1829583 - DNA, 25 bp, Homo sapien
tcataaaaatattgtgaatcagaat

SEQ ID NO: 1829584 - DNA, 25 bp, Homo sapien
tgtgaatcagaattgccgccaacag

SEQ ID NO: 1829585 - DNA, 25 bp, Homo sapien
gggcctgcagaacttgggaactgcc

SEQ ID NO: 1829586 - DNA, 25 bp, Homo sapien
tggggcctgcagaacttgggaactg

SEQ ID NO: 1829587 - DNA, 25 bp, Homo sapien
ctggggcctgcagaacttgggaact

SEQ ID NO: 1829588 - DNA, 25 bp, Homo sapien
ggggcctgcagaacttgggaactgc

SEQ ID NO: 1829589 - DNA, 25 bp, Homo sapien
taagtttacaacacaggccaagagc

SEQ ID NO: 1829590 - DNA, 25 bp, Homo sapien
tagaaccttctacagatggctgagg

SEQ ID NO: 1829591 - DNA, 25 bp, Homo sapien
ttctcaggatgagggcaaatgcacc

SEQ ID NO: 1829592 - DNA, 25 bp, Homo sapien
ccactgctgagaaagtcggaattac

SEQ ID NO: 1829593 - DNA, 25 bp, Homo sapien
ggctttgcccatggcaggcacgccc

SEQ ID NO: 1829594 - DNA, 25 bp, Homo sapien
tggcaggcacgcccctaaatgcctg

SEQ ID NO: 1829595 - DNA, 25 bp, Homo sapien
tgtcgcacgaagagggaagagtttc

SEQ ID NO: 1829596 - DNA, 25 bp, Homo sapien
gcccctaaatgcctgtcgcacgaag

SEQ ID NO: 1829597 - DNA, 25 bp, Homo sapien
ccacaaggagcagactcaaatggat

SEQ ID NO: 1829598 - DNA, 25 bp, Homo sapien
accacaaggagcagactcaaatgga

SEQ ID NO: 1829599 - DNA, 25 bp, Homo sapien
acaaacaagaaagctctcaactcac

SEQ ID NO: 1829600 - DNA, 25 bp, Homo sapien
ttgagaagaattcatgacggaacca

SEQ ID NO: 1829601 - DNA, 25 bp, Homo sapien
caaagttaccggagtggagcatgtc

SEQ ID NO: 1829602 - DNA, 25 bp, Homo sapien
tggagcatgtcaaatctttgagaag

SEQ ID NO: 1829603 - DNA, 25 bp, Homo sapien
aattcatgacggaaccacaccactg

SEQ ID NO: 1829604 - DNA, 25 bp, Homo sapien
cacagccgtgtggaaccgtggggtt

SEQ ID NO: 1829605 - DNA, 25 bp, Homo sapien
ccacacagccgtgtggaaccgtggg

SEQ ID NO: 1829606 - DNA, 25 bp, Homo sapien
gccacacagccgtgtggaaccgtgg

SEQ ID NO: 1829607 - DNA, 25 bp, Homo sapien
cacacagccgtgtggaaccgtgggg

SEQ ID NO: 1829608 - DNA, 25 bp, Homo sapien
tgcgtaagtgactggcagatggttc

SEQ ID NO: 1829609 - DNA, 25 bp, Homo sapien
gtaagtgactggcagatggttctca

SEQ ID NO: 1829610 - DNA, 25 bp, Homo sapien
taagtgactggcagatggttctcac

SEQ ID NO: 1829611 - DNA, 25 bp, Homo sapien
ttatgcgtaagtgactggcagatgg

SEQ ID NO: 1829612 - DNA, 25 bp, Homo sapien
ggttcagctaatgcaagtttgtcaa

SEQ ID NO: 1829613 - DNA, 25 bp, Homo sapien
agtggcatcgatactgccctggttc

SEQ ID NO: 1829614 - DNA, 25 bp, Homo sapien
gatactgccctggttcagctaatgc

SEQ ID NO: 1829615 - DNA, 25 bp, Homo sapien
tcagctaatgcaagtttgtcaaccc

SEQ ID NO: 1829616 - DNA, 25 bp, Homo sapien
tcttctcctccagagttcaggaaga

SEQ ID NO: 1829617 - DNA, 25 bp, Homo sapien
cagcacagtgttctcttctcctcca

SEQ ID NO: 1829618 - DNA, 25 bp, Homo sapien
ctaaggcgggggacagcacagtgtt

SEQ ID NO: 1829619 - DNA, 25 bp, Homo sapien
cttctcctccagagttcaggaagac

SEQ ID NO: 1829620 - DNA, 25 bp, Homo sapien
cagcatgtccacgttcacttccatg

SEQ ID NO: 1829621 - DNA, 25 bp, Homo sapien
agggcctcctggtccgatatgtcca

SEQ ID NO: 1829622 - DNA, 25 bp, Homo sapien
ctcctggtccgatatgtccatcagg

SEQ ID NO: 1829623 - DNA, 25 bp, Homo sapien
gcatgtccacgttcacttccatgga

SEQ ID NO: 1829624 - DNA, 25 bp, Homo sapien
ggaatggaacagtcataacgaggag

SEQ ID NO: 1829625 - DNA, 25 bp, Homo sapien
ggaacagtcataacgaggagtcacc

SEQ ID NO: 1829626 - DNA, 25 bp, Homo sapien
cgaggagtcaccaaggccaaattac

SEQ ID NO: 1829627 - DNA, 25 bp, Homo sapien
tcataacgaggagtcaccaaggcca

SEQ ID NO: 1829628 - DNA, 25 bp, Homo sapien
tggagaggagggtgcttagagccac

SEQ ID NO: 1829629 - DNA, 25 bp, Homo sapien
cctcctgaacaaagacacgggggtg

SEQ ID NO: 1829630 - DNA, 25 bp, Homo sapien
agggtgcttagagccacagcgacgt

SEQ ID NO: 1829631 - DNA, 25 bp, Homo sapien
cagcgacgtgagattgcggcttcat

SEQ ID NO: 1829632 - DNA, 25 bp, Homo sapien
tctgggtaagactcatcgtaaatag

SEQ ID NO: 1829633 - DNA, 25 bp, Homo sapien
tactagagaggaacgctgaaaatca

SEQ ID NO: 1829634 - DNA, 25 bp, Homo sapien
gacatcagcagtcccaaagttagta

SEQ ID NO: 1829635 - DNA, 25 bp, Homo sapien
aggattcagctaaaatggtacccct

SEQ ID NO: 1829636 - DNA, 25 bp, Homo sapien
gttcgtcaacaaacttgaaactgta

SEQ ID NO: 1829637 - DNA, 25 bp, Homo sapien
tgcaattccgctcaaactgtagaca

SEQ ID NO: 1829638 - DNA, 25 bp, Homo sapien
tgtaacacttataccaacggacaag

SEQ ID NO: 1829639 - DNA, 25 bp, Homo sapien
caagaccccaagaagagtcatggca

SEQ ID NO: 1829640 - DNA, 25 bp, Homo sapien
aaataaatgcacacagatgtgcaga

SEQ ID NO: 1829641 - DNA, 25 bp, Homo sapien
caggaatggctccagcagactcaag

SEQ ID NO: 1829642 - DNA, 25 bp, Homo sapien
cacagatgtgcagagcaggtcagga

SEQ ID NO: 1829643 - DNA, 25 bp, Homo sapien
gagcaggtcaggaatggctccagca

SEQ ID NO: 1829644 - DNA, 25 bp, Homo sapien
tctcgggggtgcatccacggctctc

SEQ ID NO: 1829645 - DNA, 25 bp, Homo sapien
ttccaagccggccacgcgtctacta

SEQ ID NO: 1829646 - DNA, 25 bp, Homo sapien
ggccacgcgtctactacttcatcat

SEQ ID NO: 1829647 - DNA, 25 bp, Homo sapien
catcatcctctcgggggtgcatcca

SEQ ID NO: 1829648 - DNA, 25 bp, Homo sapien
cccgcacagccggtgagtccccaca

SEQ ID NO: 1829649 - DNA, 25 bp, Homo sapien
ccgcacagccggtgagtccccacac

SEQ ID NO: 1829650 - DNA, 25 bp, Homo sapien
aggtagccagtggacaggtactgct

SEQ ID NO: 1829651 - DNA, 25 bp, Homo sapien
gcaggtagccagtggacaggtactg

SEQ ID NO: 1829652 - DNA, 25 bp, Homo sapien
ggaccttctgggcgtgctctgcatc

SEQ ID NO: 1829653 - DNA, 25 bp, Homo sapien
aggaccttctgggcgtgctctgcat

SEQ ID NO: 1829654 - DNA, 25 bp, Homo sapien
gcatccaccctccaagtggatggag

SEQ ID NO: 1829655 - DNA, 25 bp, Homo sapien
gaaatgggtataaacagctgctcgc

SEQ ID NO: 1829656 - DNA, 25 bp, Homo sapien
ggtataaacagctgctcgcatccac

SEQ ID NO: 1829657 - DNA, 25 bp, Homo sapien
catgccgcgtttacagactgggctg

SEQ ID NO: 1829658 - DNA, 25 bp, Homo sapien
taacaaaccatttcacccaaggcat

SEQ ID NO: 1829659 - DNA, 25 bp, Homo sapien
tctgtcctgggatacactgtaacaa

SEQ ID NO: 1829660 - DNA, 25 bp, Homo sapien
tacactgtaacaaaccatttcaccc

SEQ ID NO: 1829661 - DNA, 25 bp, Homo sapien
cttctgtcctgggatacactgtaac

SEQ ID NO: 1829662 - DNA, 25 bp, Homo sapien
aagtagtataaaccaactgccagcg

SEQ ID NO: 1829663 - DNA, 25 bp, Homo sapien
gacgaagcagctggtacaatccata

SEQ ID NO: 1829664 - DNA, 25 bp, Homo sapien
taatgctgacactgcttgagaacca

SEQ ID NO: 1829665 - DNA, 25 bp, Homo sapien
tgccagcgtctgtgagtgaaaatta

SEQ ID NO: 1829666 - DNA, 25 bp, Homo sapien
tccagatataacagagtgggttctc

SEQ ID NO: 1829667 - DNA, 25 bp, Homo sapien
cagatctgtgctttgtcctgaactc

SEQ ID NO: 1829668 - DNA, 25 bp, Homo sapien
aaggaggcaagatcccctgtgacca

SEQ ID NO: 1829669 - DNA, 25 bp, Homo sapien
actccagatataacagagtgggttc

SEQ ID NO: 1829670 - DNA, 25 bp, Homo sapien
tgacgggaaacaccagcatgccatt

SEQ ID NO: 1829671 - DNA, 25 bp, Homo sapien
gtgcagtgatgcagaagataaacag

SEQ ID NO: 1829672 - DNA, 25 bp, Homo sapien
tcaactggctgcttgatcgcaaagc

SEQ ID NO: 1829673 - DNA, 25 bp, Homo sapien
ccagacgtttgaggtgcagtgatgc

SEQ ID NO: 1829674 - DNA, 25 bp, Homo sapien
atgatgccatgaacctttctttggg

SEQ ID NO: 1829675 - DNA, 25 bp, Homo sapien
aaaatgatgccatgaacctttcttt

SEQ ID NO: 1829676 - DNA, 25 bp, Homo sapien
tgccatgaacctttctttggggttg

SEQ ID NO: 1829677 - DNA, 25 bp, Homo sapien
gccatgaacctttctttggggttga

SEQ ID NO: 1829678 - DNA, 25 bp, Homo sapien
aaatagcatacaaaaaaggtcctgg

SEQ ID NO: 1829679 - DNA, 25 bp, Homo sapien
tatctatctttcctcacatgcagag

SEQ ID NO: 1829680 - DNA, 25 bp, Homo sapien
tttgtaaagtcaggaatactgccct

SEQ ID NO: 1829681 - DNA, 25 bp, Homo sapien
tggtgtacgatcatcaacaggagag

SEQ ID NO: 1829682 - DNA, 25 bp, Homo sapien
tgtgagagacgccaaccctacacat

SEQ ID NO: 1829683 - DNA, 25 bp, Homo sapien
tcctgaagcaggacacaagatcctc

SEQ ID NO: 1829684 - DNA, 25 bp, Homo sapien
cctaggaaggatcttctcattttct

SEQ ID NO: 1829685 - DNA, 25 bp, Homo sapien
tcctcatgtgagagacgccaaccct

SEQ ID NO: 1829686 - DNA, 25 bp, Homo sapien
tacaggaatcctaccttatggtcaa

SEQ ID NO: 1829687 - DNA, 25 bp, Homo sapien
tttacaggaatcctaccttatggtc

SEQ ID NO: 1829688 - DNA, 25 bp, Homo sapien
acaggaatcctaccttatggtcaaa

SEQ ID NO: 1829689 - DNA, 25 bp, Homo sapien
aggtttacaggaatcctaccttatg

SEQ ID NO: 1829690 - DNA, 25 bp, Homo sapien
ctgtgaggtgaagagcataaagaaa

SEQ ID NO: 1829691 - DNA, 25 bp, Homo sapien
gcgctacgtgctgctggcccatgag

SEQ ID NO: 1829692 - DNA, 25 bp, Homo sapien
tgatgcaagatgttgcgctacgtgc

SEQ ID NO: 1829693 - DNA, 25 bp, Homo sapien
caaaagctgatgcaagatgttgcgc

SEQ ID NO: 1829694 - DNA, 25 bp, Homo sapien
tgctgaaatgcttactagctgggtg

SEQ ID NO: 1829695 - DNA, 25 bp, Homo sapien
tagaatagccctgtattaaaggagc

SEQ ID NO: 1829696 - DNA, 25 bp, Homo sapien
tgagggcagacgttcctgggtttaa

SEQ ID NO: 1829697 - DNA, 25 bp, Homo sapien
tagcacgtcccaggaatgactgtgg

SEQ ID NO: 1829698 - DNA, 25 bp, Homo sapien
tgacaaggcatgatgtatataacat

SEQ ID NO: 1829699 - DNA, 25 bp, Homo sapien
cagcctctggctaacagataaggaa

SEQ ID NO: 1829700 - DNA, 25 bp, Homo sapien
gatgtcattaaaaccacagcctctg

SEQ ID NO: 1829701 - DNA, 25 bp, Homo sapien
tatataacatgccataacgtatgcc

SEQ ID NO: 1829702 - DNA, 25 bp, Homo sapien
atggagctgtaccagcctcattatt

SEQ ID NO: 1829703 - DNA, 25 bp, Homo sapien
ggagctgtaccagcctcattattca

SEQ ID NO: 1829704 - DNA, 25 bp, Homo sapien
gggatgccgaattagttttatggag

SEQ ID NO: 1829705 - DNA, 25 bp, Homo sapien
cgaattagttttatggagctgtacc

SEQ ID NO: 1829706 - DNA, 25 bp, Homo sapien
tacagcaatgtatccaggcatggaa

SEQ ID NO: 1829707 - DNA, 25 bp, Homo sapien
gtactacttgtaggttcaagtcaag

SEQ ID NO: 1829708 - DNA, 25 bp, Homo sapien
aaaagtcctacatttccatgcaaca

SEQ ID NO: 1829709 - DNA, 25 bp, Homo sapien
aatttcacctgatgcatgaaaagac

SEQ ID NO: 1829710 - DNA, 25 bp, Homo sapien
cctggagatgacatggatgtgagac

SEQ ID NO: 1829711 - DNA, 25 bp, Homo sapien
tgagtcctggagatgacatggatgt

SEQ ID NO: 1829712 - DNA, 25 bp, Homo sapien
gactattttcggtgagtcctggaga

SEQ ID NO: 1829713 - DNA, 25 bp, Homo sapien
tttcggtgagtcctggagatgacat

SEQ ID NO: 1829714 - DNA, 25 bp, Homo sapien
cacgtgcatcttctgggatgtagaa

SEQ ID NO: 1829715 - DNA, 25 bp, Homo sapien
tccaaagaaattgtagtaagcctat

SEQ ID NO: 1829716 - DNA, 25 bp, Homo sapien
gctgatggcttaagcagatatacat

SEQ ID NO: 1829717 - DNA, 25 bp, Homo sapien
gaagctcagtgctggtcaagtgaag

SEQ ID NO: 1829718 - DNA, 25 bp, Homo sapien
gtggctcatgcctgtaatcccagca

SEQ ID NO: 1829719 - DNA, 25 bp, Homo sapien
attttttcaaaaacctgtgtggctg

SEQ ID NO: 1829720 - DNA, 25 bp, Homo sapien
ttttcaaaaacctgtgtggctgggc

SEQ ID NO: 1829721 - DNA, 25 bp, Homo sapien
tcaaaaacctgtgtggctgggcgtg

SEQ ID NO: 1829722 - DNA, 25 bp, Homo sapien
gtgaagaggacaagcccagcatctt

SEQ ID NO: 1829723 - DNA, 25 bp, Homo sapien
tgaagaggacaagcccagcatcttc

SEQ ID NO: 1829724 - DNA, 25 bp, Homo sapien
actgtcagcgaaatttccaggaaac

SEQ ID NO: 1829725 - DNA, 25 bp, Homo sapien
caactccacaactgtcagcgaaatt

SEQ ID NO: 1829726 - DNA, 25 bp, Homo sapien
caactgtcagcgaaatttccaggaa

SEQ ID NO: 1829727 - DNA, 25 bp, Homo sapien
ccacaactgtcagcgaaatttccag

SEQ ID NO: 1829728 - DNA, 25 bp, Homo sapien
gagtacacaggaaactcacgttggg

SEQ ID NO: 1829729 - DNA, 25 bp, Homo sapien
aagaagactcaacagcccaaggcat

SEQ ID NO: 1829730 - DNA, 25 bp, Homo sapien
tcacaattgttagggtgtactccac

SEQ ID NO: 1829731 - DNA, 25 bp, Homo sapien
gacgacgcaggttatatttaggaaa

SEQ ID NO: 1829732 - DNA, 25 bp, Homo sapien
cagtcgacgtcatctcagttaatgg

SEQ ID NO: 1829733 - DNA, 25 bp, Homo sapien
tatgcaaaagtggagtaggctactc

SEQ ID NO: 1829734 - DNA, 25 bp, Homo sapien
cagcatttgacccaactggtggttt

SEQ ID NO: 1829735 - DNA, 25 bp, Homo sapien
gaccaccagatgctggagtgctgca

SEQ ID NO: 1829736 - DNA, 25 bp, Homo sapien
tattcctgatcaagcggcaccaggc

SEQ ID NO: 1829737 - DNA, 25 bp, Homo sapien
ggccctaaaatctcaatccatcctt

SEQ ID NO: 1829738 - DNA, 25 bp, Homo sapien
aaatatattcctgatcaagcggcac

SEQ ID NO: 1829739 - DNA, 25 bp, Homo sapien
ggcaccaggccctaaaatctcaatc

SEQ ID NO: 1829740 - DNA, 25 bp, Homo sapien
agagaagcaaggtcctttccatact

SEQ ID NO: 1829741 - DNA, 25 bp, Homo sapien
agcagtccatacacgcagagaagca

SEQ ID NO: 1829742 - DNA, 25 bp, Homo sapien
gcagtccatacacgcagagaagcaa

SEQ ID NO: 1829743 - DNA, 25 bp, Homo sapien
gaagcaaggtcctttccatactcca

SEQ ID NO: 1829744 - DNA, 25 bp, Homo sapien
ggctttgtgtggaggcagtttacta

SEQ ID NO: 1829745 - DNA, 25 bp, Homo sapien
taaaggctactgctatagtcaccat

SEQ ID NO: 1829746 - DNA, 25 bp, Homo sapien
gaagtcaggaaaacattggttctgg

SEQ ID NO: 1829747 - DNA, 25 bp, Homo sapien
tcaaatggtcattgtgagacttcca

SEQ ID NO: 1829748 - DNA, 25 bp, Homo sapien
ccattctcagctccgcaaagccagg

SEQ ID NO: 1829749 - DNA, 25 bp, Homo sapien
ttggctccttcagagaaggtgctct

SEQ ID NO: 1829750 - DNA, 25 bp, Homo sapien
tttggatctttaccctggagaatgc

SEQ ID NO: 1829751 - DNA, 25 bp, Homo sapien
ccagaagaaccaaaagagatcgttt

SEQ ID NO: 1829752 - DNA, 25 bp, Homo sapien
gaatgctccattcttccgcacaggg

SEQ ID NO: 1829753 - DNA, 25 bp, Homo sapien
tcgaagttatgcagagtgtgggctc

SEQ ID NO: 1829754 - DNA, 25 bp, Homo sapien
tagggtgatcacctggctaagcgga

SEQ ID NO: 1829755 - DNA, 25 bp, Homo sapien
gagcagacctagctgtttcaccaca

SEQ ID NO: 1829756 - DNA, 25 bp, Homo sapien
tctacctcctcaaaactcgcctcta

SEQ ID NO: 1829757 - DNA, 25 bp, Homo sapien
tacctcctcaaaactcgcctctaaa

SEQ ID NO: 1829758 - DNA, 25 bp, Homo sapien
ctcctcaaaactcgcctctaaatga

SEQ ID NO: 1829759 - DNA, 25 bp, Homo sapien
ctaattcacactgcccacataagtc

SEQ ID NO: 1829760 - DNA, 25 bp, Homo sapien
taagtctgcgattaaagctgggagc

SEQ ID NO: 1829761 - DNA, 25 bp, Homo sapien
ggattctaagtctgcgattaaagct

SEQ ID NO: 1829762 - DNA, 25 bp, Homo sapien
tctgcgattaaagctgggagctgct

SEQ ID NO: 1829763 - DNA, 25 bp, Homo sapien
gcagctccacgaggcttgtcttttt

SEQ ID NO: 1829764 - DNA, 25 bp, Homo sapien
tcttctgtgaagtgcagcccatgta

SEQ ID NO: 1829765 - DNA, 25 bp, Homo sapien
tggctcttctgtgaagtgcagccca

SEQ ID NO: 1829766 - DNA, 25 bp, Homo sapien
gaagtgcagcccatgtatcctcata

SEQ ID NO: 1829767 - DNA, 25 bp, Homo sapien
tctgtgaagtgcagcccatgtatcc

SEQ ID NO: 1829768 - DNA, 25 bp, Homo sapien
cttttctccccgttattatgtatgc

SEQ ID NO: 1829769 - DNA, 25 bp, Homo sapien
ccttttctccccgttattatgtatg

SEQ ID NO: 1829770 - DNA, 25 bp, Homo sapien
ttttctccccgttattatgtatgct

SEQ ID NO: 1829771 - DNA, 25 bp, Homo sapien
ctgctaagtaattctaatccagcag

SEQ ID NO: 1829772 - DNA, 25 bp, Homo sapien
aattctaatccagcagagtactttg

SEQ ID NO: 1829773 - DNA, 25 bp, Homo sapien
taagtaattctaatccagcagagta

SEQ ID NO: 1829774 - DNA, 25 bp, Homo sapien
aatccagcagagtactttggcaaaa

SEQ ID NO: 1829775 - DNA, 25 bp, Homo sapien
ttaaaactgttcttgatttagccaa

SEQ ID NO: 1829776 - DNA, 25 bp, Homo sapien
cacttattaaaactgttcttgattt

SEQ ID NO: 1829777 - DNA, 25 bp, Homo sapien
aacacttattaaaactgttcttgat

SEQ ID NO: 1829778 - DNA, 25 bp, Homo sapien
tattaaaactgttcttgatttagcc

SEQ ID NO: 1829779 - DNA, 25 bp, Homo sapien
cacttttgcttctcttgacttgtca

SEQ ID NO: 1829780 - DNA, 25 bp, Homo sapien
tcacttttgcttctcttgacttgtc

SEQ ID NO: 1829781 - DNA, 25 bp, Homo sapien
acttttgcttctcttgacttgtcac

SEQ ID NO: 1829782 - DNA, 25 bp, Homo sapien
tataggccacagtactactgctagc

SEQ ID NO: 1829783 - DNA, 25 bp, Homo sapien
taacgtctgattaagcaccatatgg

SEQ ID NO: 1829784 - DNA, 25 bp, Homo sapien
gcctcaactaatgcatggtacagta

SEQ ID NO: 1829785 - DNA, 25 bp, Homo sapien
caactatgcatgctggttctgaaac

SEQ ID NO: 1829786 - DNA, 25 bp, Homo sapien
gtccgggtctactgggagactgaca

SEQ ID NO: 1829787 - DNA, 25 bp, Homo sapien
tcaggcactagaggtccgggtctac

SEQ ID NO: 1829788 - DNA, 25 bp, Homo sapien
tgaacatcaggcactagaggtccgg

SEQ ID NO: 1829789 - DNA, 25 bp, Homo sapien
gaaagtgaacatcaggcactagagg

SEQ ID NO: 1829790 - DNA, 25 bp, Homo sapien
cacacactgacagtccagtggtttg

SEQ ID NO: 1829791 - DNA, 25 bp, Homo sapien
aggctaatggcacacactgacagtc

SEQ ID NO: 1829792 - DNA, 25 bp, Homo sapien
tggcacacactgacagtccagtggt

SEQ ID NO: 1829793 - DNA, 25 bp, Homo sapien
taatggcacacactgacagtccagt

SEQ ID NO: 1829794 - DNA, 25 bp, Homo sapien
ggaggtgaaatcctgctgcacgctc

SEQ ID NO: 1829795 - DNA, 25 bp, Homo sapien
tcagcagccgctcgcgaagggtctc

SEQ ID NO: 1829796 - DNA, 25 bp, Homo sapien
ccggaggtgaaatcctgctgcacgc

SEQ ID NO: 1829797 - DNA, 25 bp, Homo sapien
gccgctcgcgaagggtctccagcat

SEQ ID NO: 1829798 - DNA, 25 bp, Homo sapien
aaccccgcgctgtcaccgcgcgccc

SEQ ID NO: 1829799 - DNA, 25 bp, Homo sapien
ctgtcgccccctgggtcccacgccg

SEQ ID NO: 1829800 - DNA, 25 bp, Homo sapien
gtcccacgccgccaaccccgcgctg

SEQ ID NO: 1829801 - DNA, 25 bp, Homo sapien
ctctgtcgccccctgggtcccacgc

SEQ ID NO: 1829802 - DNA, 25 bp, Homo sapien
gcgccgcaaccccagccccttccgc

SEQ ID NO: 1829803 - DNA, 25 bp, Homo sapien
ccgccgcgccgcaaccccagcccct

SEQ ID NO: 1829804 - DNA, 25 bp, Homo sapien
ccggtctggtcctcgccgccgcgcc

SEQ ID NO: 1829805 - DNA, 25 bp, Homo sapien
ccccggtctggtcctcgccgccgcg

SEQ ID NO: 1829806 - DNA, 25 bp, Homo sapien
tttacgggagccaaaaagctcagta

SEQ ID NO: 1829807 - DNA, 25 bp, Homo sapien
gtacaggcccagatgtaaactgctc

SEQ ID NO: 1829808 - DNA, 25 bp, Homo sapien
gcaatgaaaacagtgaatggcacat

SEQ ID NO: 1829809 - DNA, 25 bp, Homo sapien
tacacaggatctgttagggctggga

SEQ ID NO: 1829810 - DNA, 25 bp, Homo sapien
cactactttaggagcacaaaagggc

SEQ ID NO: 1829811 - DNA, 25 bp, Homo sapien
ttactacaacctgtaagaattctgg

SEQ ID NO: 1829812 - DNA, 25 bp, Homo sapien
gaagctccacggacacatacgtaag

SEQ ID NO: 1829813 - DNA, 25 bp, Homo sapien
tcacaggcttaacaacagagccaat

SEQ ID NO: 1829814 - DNA, 25 bp, Homo sapien
ttagggattaactatgatgtgcatg

SEQ ID NO: 1829815 - DNA, 25 bp, Homo sapien
tagaaaaccgagagcaaagaacagg

SEQ ID NO: 1829816 - DNA, 25 bp, Homo sapien
caaaagagcataattggtatagtac

SEQ ID NO: 1829817 - DNA, 25 bp, Homo sapien
gaacgggtctgcaagctatgtttgt

SEQ ID NO: 1829818 - DNA, 25 bp, Homo sapien
cctcctttgctatgagcttattctc

SEQ ID NO: 1829819 - DNA, 25 bp, Homo sapien
attgttagtgataacagaccagcat

SEQ ID NO: 1829820 - DNA, 25 bp, Homo sapien
gtttcggtgttgtctccttaccaga

SEQ ID NO: 1829821 - DNA, 25 bp, Homo sapien
ccagagaggttagtggtaattattg

SEQ ID NO: 1829822 - DNA, 25 bp, Homo sapien
tggtcaatgtgagaccttggtctgc

SEQ ID NO: 1829823 - DNA, 25 bp, Homo sapien
gtgagaccttggtctgctgttctca

SEQ ID NO: 1829824 - DNA, 25 bp, Homo sapien
tcaagggcactctggtcaatgtgag

SEQ ID NO: 1829825 - DNA, 25 bp, Homo sapien
tctgctgttctcatcgggggtggat

SEQ ID NO: 1829826 - DNA, 25 bp, Homo sapien
taataggaaattggctctagcctgg

SEQ ID NO: 1829827 - DNA, 25 bp, Homo sapien
gactactgcttggtcctagaggcag

SEQ ID NO: 1829828 - DNA, 25 bp, Homo sapien
taagaatccaaatgggcccacaatt

SEQ ID NO: 1829829 - DNA, 25 bp, Homo sapien
ccaatgtggaagaaatgcgggtctc

SEQ ID NO: 1829830 - DNA, 25 bp, Homo sapien
cttcccaagacgcaggggccctggg

SEQ ID NO: 1829831 - DNA, 25 bp, Homo sapien
gcaagctcccttcccaagacgcagg

SEQ ID NO: 1829832 - DNA, 25 bp, Homo sapien
gggtgcagctcatcaagatattgca

SEQ ID NO: 1829833 - DNA, 25 bp, Homo sapien
cctgggtgcagctcatcaagatatt

SEQ ID NO: 1829834 - DNA, 25 bp, Homo sapien
accctggtaggctctgtcttgtacg

SEQ ID NO: 1829835 - DNA, 25 bp, Homo sapien
aatggaaaacaatagtgcaccctgg

SEQ ID NO: 1829836 - DNA, 25 bp, Homo sapien
taccctcgtggcttgacatcatgga

SEQ ID NO: 1829837 - DNA, 25 bp, Homo sapien
tcacgtctggacaatctttgctggc

SEQ ID NO: 1829838 - DNA, 25 bp, Homo sapien
tttcccattttgatggtagaaaatg

SEQ ID NO: 1829839 - DNA, 25 bp, Homo sapien
ggtagaaaatggtatctagttgcta

SEQ ID NO: 1829840 - DNA, 25 bp, Homo sapien
agaaaatggtatctagttgctattt

SEQ ID NO: 1829841 - DNA, 25 bp, Homo sapien
aaatggtatctagttgctattttaa

SEQ ID NO: 1829842 - DNA, 25 bp, Homo sapien
tttggaggcttgcagcccagactga

SEQ ID NO: 1829843 - DNA, 25 bp, Homo sapien
atgagtttctctgtggcagctatgc

SEQ ID NO: 1829844 - DNA, 25 bp, Homo sapien
cagactggaatgctgatgagtttct

SEQ ID NO: 1829845 - DNA, 25 bp, Homo sapien
gcttcctgggagttagcattggcca

SEQ ID NO: 1829846 - DNA, 25 bp, Homo sapien
gataaacagcagagggccaaactca

SEQ ID NO: 1829847 - DNA, 25 bp, Homo sapien
acagcagagggccaaactcaacgct

SEQ ID NO: 1829848 - DNA, 25 bp, Homo sapien
cagagggccaaactcaacgctggta

SEQ ID NO: 1829849 - DNA, 25 bp, Homo sapien
ctgataaacagcagagggccaaact

SEQ ID NO: 1829850 - DNA, 25 bp, Homo sapien
ggtgatgtctactatgggcgcatct

SEQ ID NO: 1829851 - DNA, 25 bp, Homo sapien
ttactggtgatgtctactatgggcg

SEQ ID NO: 1829852 - DNA, 25 bp, Homo sapien
actggtgatgtctactatgggcgca

SEQ ID NO: 1829853 - DNA, 25 bp, Homo sapien
gatgtctactatgggcgcatctaaa

SEQ ID NO: 1829854 - DNA, 25 bp, Homo sapien
gcagtttcaccttcctgttgttgat

SEQ ID NO: 1829855 - DNA, 25 bp, Homo sapien
caccttcctgttgttgatgtccaag

SEQ ID NO: 1829856 - DNA, 25 bp, Homo sapien
gcagaggatagtaattccatcttcc

SEQ ID NO: 1829857 - DNA, 25 bp, Homo sapien
ggcctctttcctcggttgttatctg

SEQ ID NO: 1829858 - DNA, 25 bp, Homo sapien
agggttggcactgtgtgtgttctct

SEQ ID NO: 1829859 - DNA, 25 bp, Homo sapien
tacagtccccatcatggtttctcat

SEQ ID NO: 1829860 - DNA, 25 bp, Homo sapien
ttttccgatcgagcatacagtcccc

SEQ ID NO: 1829861 - DNA, 25 bp, Homo sapien
gatcgagcatacagtccccatcatg

SEQ ID NO: 1829862 - DNA, 25 bp, Homo sapien
cagagattcttttccgatcgagcat

SEQ ID NO: 1829863 - DNA, 25 bp, Homo sapien
cagctgtgtatttacatctctgagc

SEQ ID NO: 1829864 - DNA, 25 bp, Homo sapien
gaacttattgaggatgtcagctgtg

SEQ ID NO: 1829865 - DNA, 25 bp, Homo sapien
gtcagctgtgtatttacatctctga

SEQ ID NO: 1829866 - DNA, 25 bp, Homo sapien
taaatatgaacttattgaggatgtc

SEQ ID NO: 1829867 - DNA, 25 bp, Homo sapien
gcagtaagaagcctcgagattgttg

SEQ ID NO: 1829868 - DNA, 25 bp, Homo sapien
tgatgctcccaattgcagggttgag

SEQ ID NO: 1829869 - DNA, 25 bp, Homo sapien
gatacattctcatgagcacaagcca

SEQ ID NO: 1829870 - DNA, 25 bp, Homo sapien
gcaatgccacagatacattctcatg

SEQ ID NO: 1829871 - DNA, 25 bp, Homo sapien
taagaagcaggcgagtggccacaga

SEQ ID NO: 1829872 - DNA, 25 bp, Homo sapien
ctgagtaagtctgttggttaagaag

SEQ ID NO: 1829873 - DNA, 25 bp, Homo sapien
gagtaagtctgttggttaagaagca

SEQ ID NO: 1829874 - DNA, 25 bp, Homo sapien
gaagcaggcgagtggccacagagaa

SEQ ID NO: 1829875 - DNA, 25 bp, Homo sapien
acagttattggttctgttcagccaa

SEQ ID NO: 1829876 - DNA, 25 bp, Homo sapien
ctgtttgtttaaccaggaactacag

SEQ ID NO: 1829877 - DNA, 25 bp, Homo sapien
caggaactacagttattggttctgt

SEQ ID NO: 1829878 - DNA, 25 bp, Homo sapien
accaggaactacagttattggttct

SEQ ID NO: 1829879 - DNA, 25 bp, Homo sapien
aatcgggtaattacaattgcaaggg

SEQ ID NO: 1829880 - DNA, 25 bp, Homo sapien
ttacaattgcaaggggcaaactcta

SEQ ID NO: 1829881 - DNA, 25 bp, Homo sapien
attacaattgcaaggggcaaactct

SEQ ID NO: 1829882 - DNA, 25 bp, Homo sapien
gaaaaatcgggtaattacaattgca

SEQ ID NO: 1829883 - DNA, 25 bp, Homo sapien
ggaaggtacaggaatcagtatatct

SEQ ID NO: 1829884 - DNA, 25 bp, Homo sapien
ggacatgcagctcgacaccactctg

SEQ ID NO: 1829885 - DNA, 25 bp, Homo sapien
gaggtagccaagcaagttcccaggt

SEQ ID NO: 1829886 - DNA, 25 bp, Homo sapien
ggagtggtgtcccaaatatgcctgc

SEQ ID NO: 1829887 - DNA, 25 bp, Homo sapien
tcccaactcccaccctctcctcctg

SEQ ID NO: 1829888 - DNA, 25 bp, Homo sapien
agctgcctttccttcccaactccca

SEQ ID NO: 1829889 - DNA, 25 bp, Homo sapien
ctcagctgcctttccttcccaactc

SEQ ID NO: 1829890 - DNA, 25 bp, Homo sapien
tcctcagctgcctttccttcccaac

SEQ ID NO: 1829891 - DNA, 25 bp, Homo sapien
tcttggttctgttgtatggggtggg

SEQ ID NO: 1829892 - DNA, 25 bp, Homo sapien
ctctcccattgagctctcacctgag

SEQ ID NO: 1829893 - DNA, 25 bp, Homo sapien
tccatttcgcattcctgcagggctt

SEQ ID NO: 1829894 - DNA, 25 bp, Homo sapien
gagttttgccatcacaccttttttc

SEQ ID NO: 1829895 - DNA, 25 bp, Homo sapien
gttgagctcctcagtgaatctcaga

SEQ ID NO: 1829896 - DNA, 25 bp, Homo sapien
gagctcctcagtgaatctcagagca

SEQ ID NO: 1829897 - DNA, 25 bp, Homo sapien
cccaggcaatgctgtccaggttgag

SEQ ID NO: 1829898 - DNA, 25 bp, Homo sapien
ccaggcaatgctgtccaggttgagc

SEQ ID NO: 1829899 - DNA, 25 bp, Homo sapien
cataaagatcaaagcgataatcttc

SEQ ID NO: 1829900 - DNA, 25 bp, Homo sapien
ctatctgactctggtcaacataaag

SEQ ID NO: 1829901 - DNA, 25 bp, Homo sapien
ttatagccatggaaggggtccctga

SEQ ID NO: 1829902 - DNA, 25 bp, Homo sapien
gataatcttccacgaatgagctaag

SEQ ID NO: 1829903 - DNA, 25 bp, Homo sapien
actggcaagtgggcatgtgactaga

SEQ ID NO: 1829904 - DNA, 25 bp, Homo sapien
tgggcatgtgactagagtctccaga

SEQ ID NO: 1829905 - DNA, 25 bp, Homo sapien
catgtgactagagtctccagaactt

SEQ ID NO: 1829906 - DNA, 25 bp, Homo sapien
agtgggcatgtgactagagtctcca

SEQ ID NO: 1829907 - DNA, 25 bp, Homo sapien
tacctgaggccatagatgacacttg

SEQ ID NO: 1829908 - DNA, 25 bp, Homo sapien
gagcctgatgcagccattaaggaga

SEQ ID NO: 1829909 - DNA, 25 bp, Homo sapien
ccaagctgacgttctgggcactgaa

SEQ ID NO: 1829910 - DNA, 25 bp, Homo sapien
ttctaattcactgcgtttggcctgg

SEQ ID NO: 1829911 - DNA, 25 bp, Homo sapien
ctggaaaagtagggctcaaagcaga

SEQ ID NO: 1829912 - DNA, 25 bp, Homo sapien
agcagagtttgaggccaggagggag

SEQ ID NO: 1829913 - DNA, 25 bp, Homo sapien
agagtttgaggccaggagggagctg

SEQ ID NO: 1829914 - DNA, 25 bp, Homo sapien
aaaagtagggctcaaagcagagttt

SEQ ID NO: 1829915 - DNA, 25 bp, Homo sapien
ctgctcggaggtattgaagagattc

SEQ ID NO: 1829916 - DNA, 25 bp, Homo sapien
ggaatccctgtgtgtacccgtgtgt

SEQ ID NO: 1829917 - DNA, 25 bp, Homo sapien
gcggcataactattaccctgaggac

SEQ ID NO: 1829918 - DNA, 25 bp, Homo sapien
cgtgtgttcttgatcagcggcataa

SEQ ID NO: 1829919 - DNA, 25 bp, Homo sapien
tgccctggccgctggtgccagctct

SEQ ID NO: 1829920 - DNA, 25 bp, Homo sapien
tcacacagtcgtgtgcatccatccc

SEQ ID NO: 1829921 - DNA, 25 bp, Homo sapien
agtcgtgtgcatccatccccagctg

SEQ ID NO: 1829922 - DNA, 25 bp, Homo sapien
acacagtcgtgtgcatccatcccca

SEQ ID NO: 1829923 - DNA, 25 bp, Homo sapien
acagtcgtgtgcatccatccccagc

SEQ ID NO: 1829924 - DNA, 25 bp, Homo sapien
tgcagatctggcggctcttggcccc

SEQ ID NO: 1829925 - DNA, 25 bp, Homo sapien
tagaaacccacctgctaggaagagc

SEQ ID NO: 1829926 - DNA, 25 bp, Homo sapien
ggacacggggaagctctttcaacca

SEQ ID NO: 1829927 - DNA, 25 bp, Homo sapien
tgaaggcgacatgtgcttagaaacc

SEQ ID NO: 1829928 - DNA, 25 bp, Homo sapien
taatcttcaatctttctaacatagc

SEQ ID NO: 1829929 - DNA, 25 bp, Homo sapien
tagcaaccctaatttcaatcttaat

SEQ ID NO: 1829930 - DNA, 25 bp, Homo sapien
agaacttcaactttgtttctcttag

SEQ ID NO: 1829931 - DNA, 25 bp, Homo sapien
ccaagtagggatgtctagtgatttt

SEQ ID NO: 1829932 - DNA, 25 bp, Homo sapien
tgtttggagcaaattggtgtgagtc

SEQ ID NO: 1829933 - DNA, 25 bp, Homo sapien
gatctcactttgttcccttcgcatt

SEQ ID NO: 1829934 - DNA, 25 bp, Homo sapien
gcatgctgttaccaaaggtgacagt

SEQ ID NO: 1829935 - DNA, 25 bp, Homo sapien
gggcatctcaggataacaacctaaa

SEQ ID NO: 1829936 - DNA, 25 bp, Homo sapien
tggagtggttcttggtgagcagctg

SEQ ID NO: 1829937 - DNA, 25 bp, Homo sapien
atggagtggttcttggtgagcagct

SEQ ID NO: 1829938 - DNA, 25 bp, Homo sapien
aatggagtggttcttggtgagcagc

SEQ ID NO: 1829939 - DNA, 25 bp, Homo sapien
cttcaaacgggggaccattatactg

SEQ ID NO: 1829940 - DNA, 25 bp, Homo sapien
gggaccattatactggtgtccatct

SEQ ID NO: 1829941 - DNA, 25 bp, Homo sapien
cgggggaccattatactggtgtcca

SEQ ID NO: 1829942 - DNA, 25 bp, Homo sapien
caaacgggggaccattatactggtg

SEQ ID NO: 1829943 - DNA, 25 bp, Homo sapien
actctgagcctccttgacgggaaag

SEQ ID NO: 1829944 - DNA, 25 bp, Homo sapien
tgagcctccttgacgggaaagattt

SEQ ID NO: 1829945 - DNA, 25 bp, Homo sapien
tctgagcctccttgacgggaaagat

SEQ ID NO: 1829946 - DNA, 25 bp, Homo sapien
ttcttcccaatagactctgagcctc

SEQ ID NO: 1829947 - DNA, 25 bp, Homo sapien
ccggttgagcggcaccagatgtgct

SEQ ID NO: 1829948 - DNA, 25 bp, Homo sapien
gagcggcaccagatgtgctttcctg

SEQ ID NO: 1829949 - DNA, 25 bp, Homo sapien
ggcatccggttgagcggcaccagat

SEQ ID NO: 1829950 - DNA, 25 bp, Homo sapien
agatgtgctttcctggccgatcgcc

SEQ ID NO: 1829951 - DNA, 25 bp, Homo sapien
gaaaaaagtgtgacaggtaggccac

SEQ ID NO: 1829952 - DNA, 25 bp, Homo sapien
gagatgcccagaccggttagactgg

SEQ ID NO: 1829953 - DNA, 25 bp, Homo sapien
gaaagtgttctcaattagaggacgg

SEQ ID NO: 1829954 - DNA, 25 bp, Homo sapien
tcttcaccttactgcgaggcaaaca

SEQ ID NO: 1829955 - DNA, 25 bp, Homo sapien
aataatgggtaggacagggagagtg

SEQ ID NO: 1829956 - DNA, 25 bp, Homo sapien
gggatgggatcccaagagattctcc

SEQ ID NO: 1829957 - DNA, 25 bp, Homo sapien
ctgctgctgcggaaaacagccaatg

SEQ ID NO: 1829958 - DNA, 25 bp, Homo sapien
cagccaatgataaaataatgggtag

SEQ ID NO: 1829959 - DNA, 25 bp, Homo sapien
gttgtagagcgaactctgacagccc

SEQ ID NO: 1829960 - DNA, 25 bp, Homo sapien
atattgtgctctcccttaccaggcc

SEQ ID NO: 1829961 - DNA, 25 bp, Homo sapien
agtgcaattcggtgacttcatagcg

SEQ ID NO: 1829962 - DNA, 25 bp, Homo sapien
tctacatgtcccgtgttcagtgcaa

SEQ ID NO: 1829963 - DNA, 25 bp, Homo sapien
tgaggcatccattctccacaggctg

SEQ ID NO: 1829964 - DNA, 25 bp, Homo sapien
aggctggtgccccacacagggaaag

SEQ ID NO: 1829965 - DNA, 25 bp, Homo sapien
acagggaaagctgggcccataggcc

SEQ ID NO: 1829966 - DNA, 25 bp, Homo sapien
gctgggcccataggccctgcccaga

SEQ ID NO: 1829967 - DNA, 25 bp, Homo sapien
gcaggaaataccaagcagagcagat

SEQ ID NO: 1829968 - DNA, 25 bp, Homo sapien
gggagatgttttgctcaggagccca

SEQ ID NO: 1829969 - DNA, 25 bp, Homo sapien
ttcacgtgacttgtttacatccagc

SEQ ID NO: 1829970 - DNA, 25 bp, Homo sapien
tcatcagccctaaccagcaggaaat

SEQ ID NO: 1829971 - DNA, 25 bp, Homo sapien
cacccaatgggttaagatagctgct

SEQ ID NO: 1829972 - DNA, 25 bp, Homo sapien
tgcaaaccagcagtacacagctagt

SEQ ID NO: 1829973 - DNA, 25 bp, Homo sapien
ggagccaacgattgtcagacctgca

SEQ ID NO: 1829974 - DNA, 25 bp, Homo sapien
tgtgacaggtactaaggacccaagg

SEQ ID NO: 1829975 - DNA, 25 bp, Homo sapien
ttgcaaaggatcaggtgcttgggtg

SEQ ID NO: 1829976 - DNA, 25 bp, Homo sapien
gtttgcaaaggatcaggtgcttggg

SEQ ID NO: 1829977 - DNA, 25 bp, Homo sapien
tttgcaaaggatcaggtgcttgggt

SEQ ID NO: 1829978 - DNA, 25 bp, Homo sapien
cggtgcttgttcctggcctgtttga

SEQ ID NO: 1829979 - DNA, 25 bp, Homo sapien
tagggttaactgacattgcccattc

SEQ ID NO: 1829980 - DNA, 25 bp, Homo sapien
tgattctgcgccacctttcttaggg

SEQ ID NO: 1829981 - DNA, 25 bp, Homo sapien
atttttccaacctaagcattccctg

SEQ ID NO: 1829982 - DNA, 25 bp, Homo sapien
ctctcactacgtgcatcgtactgca

SEQ ID NO: 1829983 - DNA, 25 bp, Homo sapien
gctgaatttcctggtctctcactac

SEQ ID NO: 1829984 - DNA, 25 bp, Homo sapien
tcctggtctctcactacgtgcatcg

SEQ ID NO: 1829985 - DNA, 25 bp, Homo sapien
tcagtgattctgttgctgaatttcc

SEQ ID NO: 1829986 - DNA, 25 bp, Homo sapien
cactgtgctcttgtccagttaggaa

SEQ ID NO: 1829987 - DNA, 25 bp, Homo sapien
taattccagatagagaaacaggcaa

SEQ ID NO: 1829988 - DNA, 25 bp, Homo sapien
aagaagagcttgaactgaggctcca

SEQ ID NO: 1829989 - DNA, 25 bp, Homo sapien
aggctccaggatagatggaacttca

SEQ ID NO: 1829990 - DNA, 25 bp, Homo sapien
taggcccagtaaaagcaacttattc

SEQ ID NO: 1829991 - DNA, 25 bp, Homo sapien
tctgccagcaccgttatctattagc

SEQ ID NO: 1829992 - DNA, 25 bp, Homo sapien
aataccgaagactctttctgtccac

SEQ ID NO: 1829993 - DNA, 25 bp, Homo sapien
tctattagcaataccgaagactctt

SEQ ID NO: 1829994 - DNA, 25 bp, Homo sapien
gggctctgagtggaactaagaacac

SEQ ID NO: 1829995 - DNA, 25 bp, Homo sapien
gagtggaactaagaacacctaatgt

SEQ ID NO: 1829996 - DNA, 25 bp, Homo sapien
cccagactggttggggattttgtgc

SEQ ID NO: 1829997 - DNA, 25 bp, Homo sapien
agaacacctaatgtctcctgctcca

SEQ ID NO: 1829998 - DNA, 25 bp, Homo sapien
tcctgttccaaacacgacatgaaca

SEQ ID NO: 1829999 - DNA, 25 bp, Homo sapien
ttctcaatctcgctaaacacctcat

SEQ ID NO: 1830000 - DNA, 25 bp, Homo sapien
gcatgacaagattctcaatctcgct

SEQ ID NO: 1830001 - DNA, 25 bp, Homo sapien
cacgacatgaacatagcatgacaag

SEQ ID NO: 1830002 - DNA, 25 bp, Homo sapien
ctcttcagtgccaacatcaggggca

SEQ ID NO: 1830003 - DNA, 25 bp, Homo sapien
caggggcatattggtgatagaaaca

SEQ ID NO: 1830004 - DNA, 25 bp, Homo sapien
caacatcaggggcatattggtgata

SEQ ID NO: 1830005 - DNA, 25 bp, Homo sapien
gcatattggtgatagaaacagggtc

SEQ ID NO: 1830006 - DNA, 25 bp, Homo sapien
ggctgccagcatcccgcagaaagag

SEQ ID NO: 1830007 - DNA, 25 bp, Homo sapien
gatgattgacaagctccagccacag

SEQ ID NO: 1830008 - DNA, 25 bp, Homo sapien
catgcccaggtctgtacagcgtgtt

SEQ ID NO: 1830009 - DNA, 25 bp, Homo sapien
tgagggatttcagttcttgcagatg

SEQ ID NO: 1830010 - DNA, 25 bp, Homo sapien
tcctgcaggtccaaaacaatccaaa

SEQ ID NO: 1830011 - DNA, 25 bp, Homo sapien
tctcctgcaggtccaaaacaatcca

SEQ ID NO: 1830012 - DNA, 25 bp, Homo sapien
tgcaggtccaaaacaatccaaaact

SEQ ID NO: 1830013 - DNA, 25 bp, Homo sapien
cctgcaggtccaaaacaatccaaaa

SEQ ID NO: 1830014 - DNA, 25 bp, Homo sapien
agggtggcaggtaatgattcccgga

SEQ ID NO: 1830015 - DNA, 25 bp, Homo sapien
gaagggtggcaggtaatgattcccg

SEQ ID NO: 1830016 - DNA, 25 bp, Homo sapien
ggtggcaggtaatgattcccggaac

SEQ ID NO: 1830017 - DNA, 25 bp, Homo sapien
gggaagggtggcaggtaatgattcc

SEQ ID NO: 1830018 - DNA, 25 bp, Homo sapien
ctcactgtcattccatgtcaaactg

SEQ ID NO: 1830019 - DNA, 25 bp, Homo sapien
tgtgcacgcatgttcctcactgtca

SEQ ID NO: 1830020 - DNA, 25 bp, Homo sapien
gtcattccatgtcaaactgtccact

SEQ ID NO: 1830021 - DNA, 25 bp, Homo sapien
ctgtgcacgcatgttcctcactgtc

SEQ ID NO: 1830022 - DNA, 25 bp, Homo sapien
tgtaacccagacatacgtaagtctg

SEQ ID NO: 1830023 - DNA, 25 bp, Homo sapien
tccgtcttgtaacccagacatacgt

SEQ ID NO: 1830024 - DNA, 25 bp, Homo sapien
gaaacacttagctccgtcttgtaac

SEQ ID NO: 1830025 - DNA, 25 bp, Homo sapien
ccagacatacgtaagtctggctcat

SEQ ID NO: 1830026 - DNA, 25 bp, Homo sapien
aagcagatttcattcagataaattt

SEQ ID NO: 1830027 - DNA, 25 bp, Homo sapien
cagtcaggtcaatcaacagattact

SEQ ID NO: 1830028 - DNA, 25 bp, Homo sapien
aaagatcaacacgtgttttggtttg

SEQ ID NO: 1830029 - DNA, 25 bp, Homo sapien
ttgtgaaaagatcaacacgtgtttt

SEQ ID NO: 1830030 - DNA, 25 bp, Homo sapien
gattctttgacagccaagacgcctt

SEQ ID NO: 1830031 - DNA, 25 bp, Homo sapien
gtgtggattctttgacagccaagac

SEQ ID NO: 1830032 - DNA, 25 bp, Homo sapien
tgacagccaagacgccttgggctct

SEQ ID NO: 1830033 - DNA, 25 bp, Homo sapien
gccaagacgccttgggctctaaagc

SEQ ID NO: 1830034 - DNA, 25 bp, Homo sapien
caggtgactcttatcatcattgcaa

SEQ ID NO: 1830035 - DNA, 25 bp, Homo sapien
gtgactcttatcatcattgcaagac

SEQ ID NO: 1830036 - DNA, 25 bp, Homo sapien
tcttatcatcattgcaagacacaaa

SEQ ID NO: 1830037 - DNA, 25 bp, Homo sapien
gactcttatcatcattgcaagacac

SEQ ID NO: 1830038 - DNA, 25 bp, Homo sapien
gaccacacccgtcaaaaaggacatg

SEQ ID NO: 1830039 - DNA, 25 bp, Homo sapien
atactcaccgctgtgccttttctca

SEQ ID NO: 1830040 - DNA, 25 bp, Homo sapien
caggactccctaaagaccacacccg

SEQ ID NO: 1830041 - DNA, 25 bp, Homo sapien
cctgtgatactcaccgctgtgcctt

SEQ ID NO: 1830042 - DNA, 25 bp, Homo sapien
gcatgtaagatagaatgtcacctcc

SEQ ID NO: 1830043 - DNA, 25 bp, Homo sapien
tgtcacctcctccataaagatttcc

SEQ ID NO: 1830044 - DNA, 25 bp, Homo sapien
tccacttatttgcatgtaagataga

SEQ ID NO: 1830045 - DNA, 25 bp, Homo sapien
ataaagatttccctgagcctttttg

SEQ ID NO: 1830046 - DNA, 25 bp, Homo sapien
tatgttaaactattctcaaagggag

SEQ ID NO: 1830047 - DNA, 25 bp, Homo sapien
gctcagctgctcgtaagtaaacaaa

SEQ ID NO: 1830048 - DNA, 25 bp, Homo sapien
tagaacagacccattctgtcatgcc

SEQ ID NO: 1830049 - DNA, 25 bp, Homo sapien
gctaatgattcagggattgagtttc

SEQ ID NO: 1830050 - DNA, 25 bp, Homo sapien
agttccctggtcatggaaactattt

SEQ ID NO: 1830051 - DNA, 25 bp, Homo sapien
tccctggtcatggaaactattttta

SEQ ID NO: 1830052 - DNA, 25 bp, Homo sapien
cgttgtgccgtactcatctgctttc

SEQ ID NO: 1830053 - DNA, 25 bp, Homo sapien
tccagctccagcgttgtgccgtact

SEQ ID NO: 1830054 - DNA, 25 bp, Homo sapien
tcagccttgttaggtgagcaccttg

SEQ ID NO: 1830055 - DNA, 25 bp, Homo sapien
gaaccactgccagaggcacaaagca

SEQ ID NO: 1830056 - DNA, 25 bp, Homo sapien
aaatatgagcaacagggcacaggac

SEQ ID NO: 1830057 - DNA, 25 bp, Homo sapien
caaagcagaggatgagccaacacag

SEQ ID NO: 1830058 - DNA, 25 bp, Homo sapien
tagcaggaaagataattgttcattt

SEQ ID NO: 1830059 - DNA, 25 bp, Homo sapien
aggaaagataattgttcattttaca

SEQ ID NO: 1830060 - DNA, 25 bp, Homo sapien
gcaggaaagataattgttcatttta

SEQ ID NO: 1830061 - DNA, 25 bp, Homo sapien
ctagcaggaaagataattgttcatt

SEQ ID NO: 1830062 - DNA, 25 bp, Homo sapien
ggtagactttcttatttgaatccta

SEQ ID NO: 1830063 - DNA, 25 bp, Homo sapien
tgaagaaggatgcatcgtccctgct

SEQ ID NO: 1830064 - DNA, 25 bp, Homo sapien
tgctttctggcaaaggtagactttc

SEQ ID NO: 1830065 - DNA, 25 bp, Homo sapien
ctcaggtctaaagagtctgcttggg

SEQ ID NO: 1830066 - DNA, 25 bp, Homo sapien
tgcaggctcctggtggtagacagaa

SEQ ID NO: 1830067 - DNA, 25 bp, Homo sapien
gaccaggtcgtgtgttcaacttgaa

SEQ ID NO: 1830068 - DNA, 25 bp, Homo sapien
acagaagaccaggtcgtgtgttcaa

SEQ ID NO: 1830069 - DNA, 25 bp, Homo sapien
aatcttggtgatagggcaggtgacc

SEQ ID NO: 1830070 - DNA, 25 bp, Homo sapien
ctgcttgctcttgggtaaaacatgg

SEQ ID NO: 1830071 - DNA, 25 bp, Homo sapien
aggactcgcttacgtgctgcttaca

SEQ ID NO: 1830072 - DNA, 25 bp, Homo sapien
taggtgcctattcccttagggctgg

SEQ ID NO: 1830073 - DNA, 25 bp, Homo sapien
cacttcattgccacagtagtcgggc

SEQ ID NO: 1830074 - DNA, 25 bp, Homo sapien
ccagaggaatcaaatagtcccagtg

SEQ ID NO: 1830075 - DNA, 25 bp, Homo sapien
ccactgaaggcttgcatagctctga

SEQ ID NO: 1830076 - DNA, 25 bp, Homo sapien
tagaaaggttatttaagccagagga

SEQ ID NO: 1830077 - DNA, 25 bp, Homo sapien
gatggaatagtgactagtgagctcc

SEQ ID NO: 1830078 - DNA, 25 bp, Homo sapien
gtggaggtggaggcgaaagccaacg

SEQ ID NO: 1830079 - DNA, 25 bp, Homo sapien
ccggacgcggtgctgatggaggtgg

SEQ ID NO: 1830080 - DNA, 25 bp, Homo sapien
aggtggaggcgaaagccaacggcga

SEQ ID NO: 1830081 - DNA, 25 bp, Homo sapien
ggacgcggtgctgatggaggtggag

SEQ ID NO: 1830082 - DNA, 25 bp, Homo sapien
gtggagctgccacctacggctagaa

SEQ ID NO: 1830083 - DNA, 25 bp, Homo sapien
ctgatgatgggcacgggctttctga

SEQ ID NO: 1830084 - DNA, 25 bp, Homo sapien
gggcatcagcccagaaatgttggcc

SEQ ID NO: 1830085 - DNA, 25 bp, Homo sapien
cagagctaataagaccaaatgaccc

SEQ ID NO: 1830086 - DNA, 25 bp, Homo sapien
gaggtaagtttcctactggcagcag

SEQ ID NO: 1830087 - DNA, 25 bp, Homo sapien
tttgtatggtcatggagctccaacc

SEQ ID NO: 1830088 - DNA, 25 bp, Homo sapien
tgggtggctccctattcctttacgc

SEQ ID NO: 1830089 - DNA, 25 bp, Homo sapien
aaagcagctcactcaatgtgggtgg

SEQ ID NO: 1830090 - DNA, 25 bp, Homo sapien
ggtaaagctagaaacctacactgtc

SEQ ID NO: 1830091 - DNA, 25 bp, Homo sapien
gttttctgggatgtcgggagaccta

SEQ ID NO: 1830092 - DNA, 25 bp, Homo sapien
gggagacctagatgaccttatcggg

SEQ ID NO: 1830093 - DNA, 25 bp, Homo sapien
tatcgggtgcaatactagctaaggt

SEQ ID NO: 1830094 - DNA, 25 bp, Homo sapien
aaactatagaaatgatccttgagag

SEQ ID NO: 1830095 - DNA, 25 bp, Homo sapien
atttcggtgctctacaaattcagag

SEQ ID NO: 1830096 - DNA, 25 bp, Homo sapien
ctatagaaatgatccttgagagtat

SEQ ID NO: 1830097 - DNA, 25 bp, Homo sapien
tcagagaaacttctttagtaacaaa

SEQ ID NO: 1830098 - DNA, 25 bp, Homo sapien
caaaggggcttcacctggttctctg

SEQ ID NO: 1830099 - DNA, 25 bp, Homo sapien
tacaaaggggcttcacctggttctc

SEQ ID NO: 1830100 - DNA, 25 bp, Homo sapien
aggggcttcacctggttctctgctg

SEQ ID NO: 1830101 - DNA, 25 bp, Homo sapien
aaaggggcttcacctggttctctgc

SEQ ID NO: 1830102 - DNA, 25 bp, Homo sapien
atcatcatcacaccggctggcaggg

SEQ ID NO: 1830103 - DNA, 25 bp, Homo sapien
acacatcctcgccggagtggagacg

SEQ ID NO: 1830104 - DNA, 25 bp, Homo sapien
gagccgattatgcaccagggcctgg

SEQ ID NO: 1830105 - DNA, 25 bp, Homo sapien
gggctggttgcaggcgagtgaccac

SEQ ID NO: 1830106 - DNA, 25 bp, Homo sapien
ctcccacaagtgtggccaccagggt

SEQ ID NO: 1830107 - DNA, 25 bp, Homo sapien
taggagtgactagagcctctcgctc

SEQ ID NO: 1830108 - DNA, 25 bp, Homo sapien
tatggatcccaagcgcttgtcttcg

SEQ ID NO: 1830109 - DNA, 25 bp, Homo sapien
ctcaagatctattccatcctctgct

SEQ ID NO: 1830110 - DNA, 25 bp, Homo sapien
gagcctctcgctctggttgctgtgt

SEQ ID NO: 1830111 - DNA, 25 bp, Homo sapien
tatcctgatcggctgtgccttctcc

SEQ ID NO: 1830112 - DNA, 25 bp, Homo sapien
tgcccacaattatcctgatcggctg

SEQ ID NO: 1830113 - DNA, 25 bp, Homo sapien
ccggacaacctcagaccaagtactt

SEQ ID NO: 1830114 - DNA, 25 bp, Homo sapien
aaactgcgaagatgacctcccggac

SEQ ID NO: 1830115 - DNA, 25 bp, Homo sapien
gggccttcccatgacttgtttgttg

SEQ ID NO: 1830116 - DNA, 25 bp, Homo sapien
gcttttgctacccatagagctactt

SEQ ID NO: 1830117 - DNA, 25 bp, Homo sapien
ttcctgctggatgcgaaacactcaa

SEQ ID NO: 1830118 - DNA, 25 bp, Homo sapien
tcatgtgtgtagtctccctcactga

SEQ ID NO: 1830119 - DNA, 25 bp, Homo sapien
caagatgcagcatcaaagcctttga

SEQ ID NO: 1830120 - DNA, 25 bp, Homo sapien
gcatcaaagcctttgatgggacaca

SEQ ID NO: 1830121 - DNA, 25 bp, Homo sapien
gatgcagcatcaaagcctttgatgg

SEQ ID NO: 1830122 - DNA, 25 bp, Homo sapien
cagcatcaaagcctttgatgggaca

SEQ ID NO: 1830123 - DNA, 25 bp, Homo sapien
tcataggcattcacgagttgacagc

SEQ ID NO: 1830124 - DNA, 25 bp, Homo sapien
ggagatcaagcctgcaaattaagac

SEQ ID NO: 1830125 - DNA, 25 bp, Homo sapien
tcggtgctccgggttgtgacacgct

SEQ ID NO: 1830126 - DNA, 25 bp, Homo sapien
gaaacttctttagcagcggtcctcg

SEQ ID NO: 1830127 - DNA, 25 bp, Homo sapien
aaatatataacgcatatggttgttg

SEQ ID NO: 1830128 - DNA, 25 bp, Homo sapien
tgggaggtgactgggagtctaccca

SEQ ID NO: 1830129 - DNA, 25 bp, Homo sapien
tacccacatgatggtagacatctcc

SEQ ID NO: 1830130 - DNA, 25 bp, Homo sapien
tgggagtctacccacatgatggtag

SEQ ID NO: 1830131 - DNA, 25 bp, Homo sapien
tgcttgcatgcttttagttgcttac

SEQ ID NO: 1830132 - DNA, 25 bp, Homo sapien
gttgcttacttctaattgaccttaa

SEQ ID NO: 1830133 - DNA, 25 bp, Homo sapien
ccaaattgaacctgcttgcatgctt

SEQ ID NO: 1830134 - DNA, 25 bp, Homo sapien
ctgattaagctcaccaaattgaacc

SEQ ID NO: 1830135 - DNA, 25 bp, Homo sapien
tcaagaatatcccttccttgagcta

SEQ ID NO: 1830136 - DNA, 25 bp, Homo sapien
caagaatatcccttccttgagctaa

SEQ ID NO: 1830137 - DNA, 25 bp, Homo sapien
tccttgagctaaaactgccacttcc

SEQ ID NO: 1830138 - DNA, 25 bp, Homo sapien
acattcaacacctgctccagagagg

SEQ ID NO: 1830139 - DNA, 25 bp, Homo sapien
cagcaactagatttcgaagatgcac

SEQ ID NO: 1830140 - DNA, 25 bp, Homo sapien
caactagatttcgaagatgcacatt

SEQ ID NO: 1830141 - DNA, 25 bp, Homo sapien
attcaacacctgctccagagaggca

SEQ ID NO: 1830142 - DNA, 25 bp, Homo sapien
gttgggcacggattttgctcggaac

SEQ ID NO: 1830143 - DNA, 25 bp, Homo sapien
cacggattttgctcggaactggatc

SEQ ID NO: 1830144 - DNA, 25 bp, Homo sapien
tttgctcggaactggatcgtgtcca

SEQ ID NO: 1830145 - DNA, 25 bp, Homo sapien
gattttgctcggaactggatcgtgt

SEQ ID NO: 1830146 - DNA, 25 bp, Homo sapien
gtgaaggagcggtactggagaagga

SEQ ID NO: 1830147 - DNA, 25 bp, Homo sapien
aaggagcggtactggagaaggaaca

SEQ ID NO: 1830148 - DNA, 25 bp, Homo sapien
gaaggagcggtactggagaaggaac

SEQ ID NO: 1830149 - DNA, 25 bp, Homo sapien
tgaaggagcggtactggagaaggaa

SEQ ID NO: 1830150 - DNA, 25 bp, Homo sapien
ttcgtgaacgcgtctgaaaaaccag

SEQ ID NO: 1830151 - DNA, 25 bp, Homo sapien
ggctgcgtctcctagtgctgataat

SEQ ID NO: 1830152 - DNA, 25 bp, Homo sapien
tgctgctgctttcgcttcgggtcca

SEQ ID NO: 1830153 - DNA, 25 bp, Homo sapien
cctttctgagtttggcggccttgct

SEQ ID NO: 1830154 - DNA, 25 bp, Homo sapien
tcagtgctgcttttggcctaataca

SEQ ID NO: 1830155 - DNA, 25 bp, Homo sapien
ggttcttcagggtcggctaagcaga

SEQ ID NO: 1830156 - DNA, 25 bp, Homo sapien
caaattaagcatggatggcaggaac

SEQ ID NO: 1830157 - DNA, 25 bp, Homo sapien
agagcctccctagtcctgaatgcgg

SEQ ID NO: 1830158 - DNA, 25 bp, Homo sapien
acagagactagagagggaccgatgt

SEQ ID NO: 1830159 - DNA, 25 bp, Homo sapien
gaacagagactagagagggaccgat

SEQ ID NO: 1830160 - DNA, 25 bp, Homo sapien
aacagagactagagagggaccgatg

SEQ ID NO: 1830161 - DNA, 25 bp, Homo sapien
ctaagatgggccttgccacataggg

SEQ ID NO: 1830162 - DNA, 25 bp, Homo sapien
cacataggggtaggagaacagggat

SEQ ID NO: 1830163 - DNA, 25 bp, Homo sapien
ctgacacctttcacctaagatgggc

SEQ ID NO: 1830164 - DNA, 25 bp, Homo sapien
cctttcacctaagatgggccttgcc

SEQ ID NO: 1830165 - DNA, 25 bp, Homo sapien
aatttttgctgttgtcccccacatg

SEQ ID NO: 1830166 - DNA, 25 bp, Homo sapien
actctgtaaaaatagcaccaagcag

SEQ ID NO: 1830167 - DNA, 25 bp, Homo sapien
tgtctagctaaagcagcgctgtgtc

SEQ ID NO: 1830168 - DNA, 25 bp, Homo sapien
tgtgtctagctaaagcagcgctgtg

SEQ ID NO: 1830169 - DNA, 25 bp, Homo sapien
gggggagcttgacggcactccggcc

SEQ ID NO: 1830170 - DNA, 25 bp, Homo sapien
gggagcttgacggcactccggccta

SEQ ID NO: 1830171 - DNA, 25 bp, Homo sapien
gagcttgacggcactccggcctagg

SEQ ID NO: 1830172 - DNA, 25 bp, Homo sapien
gagggggagcttgacggcactccgg

SEQ ID NO: 1830173 - DNA, 25 bp, Homo sapien
cagagaggcggacacattgaatgtt

SEQ ID NO: 1830174 - DNA, 25 bp, Homo sapien
cgtgtcagctgctgcgggcagatct

SEQ ID NO: 1830175 - DNA, 25 bp, Homo sapien
gatgtttccgctgtacgcctcttca

SEQ ID NO: 1830176 - DNA, 25 bp, Homo sapien
tgatggctcattggcctgcccacat

SEQ ID NO: 1830177 - DNA, 25 bp, Homo sapien
ccccagctgagtgccgtcattgagt

SEQ ID NO: 1830178 - DNA, 25 bp, Homo sapien
accacccgcaccaagacgggagtgg

SEQ ID NO: 1830179 - DNA, 25 bp, Homo sapien
tgcccatggcctgaagggccacatc

SEQ ID NO: 1830180 - DNA, 25 bp, Homo sapien
gtcattgagtgtgccgactctgccc

SEQ ID NO: 1830181 - DNA, 25 bp, Homo sapien
gaattaaacaagtgtcggcaatgga

SEQ ID NO: 1830182 - DNA, 25 bp, Homo sapien
ttaaacaagtgtcggcaatggagta

SEQ ID NO: 1830183 - DNA, 25 bp, Homo sapien
ggcagaattaaacaagtgtcggcaa

SEQ ID NO: 1830184 - DNA, 25 bp, Homo sapien
aacaagtgtcggcaatggagtaggt

SEQ ID NO: 1830185 - DNA, 25 bp, Homo sapien
aattagcacactggtgccattgaag

SEQ ID NO: 1830186 - DNA, 25 bp, Homo sapien
tttatttgctgaattagcacactgg

SEQ ID NO: 1830187 - DNA, 25 bp, Homo sapien
ggatcctgccacttggtccaatttc

SEQ ID NO: 1830188 - DNA, 25 bp, Homo sapien
tttgctgaattagcacactggtgcc

SEQ ID NO: 1830189 - DNA, 25 bp, Homo sapien
gagcatgtactgatacccaagaggc

SEQ ID NO: 1830190 - DNA, 25 bp, Homo sapien
agcggatgacgccataaatatgatt

SEQ ID NO: 1830191 - DNA, 25 bp, Homo sapien
gcaatacgccatacagttgtattaa

SEQ ID NO: 1830192 - DNA, 25 bp, Homo sapien
aaagcaccctgtgagcggatgacgc

SEQ ID NO: 1830193 - DNA, 25 bp, Homo sapien
tgatttcctctttgcaatacgccat

SEQ ID NO: 1830194 - DNA, 25 bp, Homo sapien
tgtcactgtcacgtgagccctgaca

SEQ ID NO: 1830195 - DNA, 25 bp, Homo sapien
ttttgccccttgaattgcgcccagg

SEQ ID NO: 1830196 - DNA, 25 bp, Homo sapien
tggctttcgtgactgtccccgtgtg

SEQ ID NO: 1830197 - DNA, 25 bp, Homo sapien
tctgcggacaggtgcttccctctga

SEQ ID NO: 1830198 - DNA, 25 bp, Homo sapien
tcagacaacaacagccgtggtaggg

SEQ ID NO: 1830199 - DNA, 25 bp, Homo sapien
gggagtacactcgatcagacaacaa

SEQ ID NO: 1830200 - DNA, 25 bp, Homo sapien
ggtctgaacccccagtcactaggtc

SEQ ID NO: 1830201 - DNA, 25 bp, Homo sapien
ccacagaggaagcctggatgggcct

SEQ ID NO: 1830202 - DNA, 25 bp, Homo sapien
ctctccagctggcaacctgaatgag

SEQ ID NO: 1830203 - DNA, 25 bp, Homo sapien
ctggcaacctgaatgaggaggggga

SEQ ID NO: 1830204 - DNA, 25 bp, Homo sapien
tctccagctggcaacctgaatgagg

SEQ ID NO: 1830205 - DNA, 25 bp, Homo sapien
ccagctggcaacctgaatgaggagg

SEQ ID NO: 1830206 - DNA, 25 bp, Homo sapien
agccccaattggcccaaatcctgga

SEQ ID NO: 1830207 - DNA, 25 bp, Homo sapien
cagccccaattggcccaaatcctgg

SEQ ID NO: 1830208 - DNA, 25 bp, Homo sapien
gccccaattggcccaaatcctggac

SEQ ID NO: 1830209 - DNA, 25 bp, Homo sapien
tcagccccaattggcccaaatcctg

SEQ ID NO: 1830210 - DNA, 25 bp, Homo sapien
tcctgaattgtcaagaatcctggct

SEQ ID NO: 1830211 - DNA, 25 bp, Homo sapien
gaccagggagtcagcattcgtgtta

SEQ ID NO: 1830212 - DNA, 25 bp, Homo sapien
caagggtgtcccgaaatgaaaatgg

SEQ ID NO: 1830213 - DNA, 25 bp, Homo sapien
agctgccgcagaggtgctgtgctcc

SEQ ID NO: 1830214 - DNA, 25 bp, Homo sapien
tcatcagggttagcgccgatgacaa

SEQ ID NO: 1830215 - DNA, 25 bp, Homo sapien
ttactctcatcagggttagcgccga

SEQ ID NO: 1830216 - DNA, 25 bp, Homo sapien
tactgttactctcatcagggttagc

SEQ ID NO: 1830217 - DNA, 25 bp, Homo sapien
tagagcctactgttactctcatcag

SEQ ID NO: 1830218 - DNA, 25 bp, Homo sapien
tacaaaatgggtacaggagcaaagg

SEQ ID NO: 1830219 - DNA, 25 bp, Homo sapien
tatacaaaatgggtacaggagcaaa

SEQ ID NO: 1830220 - DNA, 25 bp, Homo sapien
acaaaatgggtacaggagcaaaggt

SEQ ID NO: 1830221 - DNA, 25 bp, Homo sapien
ctatacaaaatgggtacaggagcaa

SEQ ID NO: 1830222 - DNA, 25 bp, Homo sapien
ctgtgaatcggctggttgccttttt

SEQ ID NO: 1830223 - DNA, 25 bp, Homo sapien
cagagggaagttgcctgtgaatcgg

SEQ ID NO: 1830224 - DNA, 25 bp, Homo sapien
gaagttgcctgtgaatcggctggtt

SEQ ID NO: 1830225 - DNA, 25 bp, Homo sapien
tgcctttttccaggaaagttcaggc

SEQ ID NO: 1830226 - DNA, 25 bp, Homo sapien
ctaagacaggtcttggttctcctct

SEQ ID NO: 1830227 - DNA, 25 bp, Homo sapien
tggaagcctctggtgctaagacagg

SEQ ID NO: 1830228 - DNA, 25 bp, Homo sapien
aaatgtgaacgttgctatccaaagc

SEQ ID NO: 1830229 - DNA, 25 bp, Homo sapien
tagtgttcatgccataggccagact

SEQ ID NO: 1830230 - DNA, 25 bp, Homo sapien
taagctggtaggacctgcgctatcc

SEQ ID NO: 1830231 - DNA, 25 bp, Homo sapien
ggtgaagctctggacttttcctgtt

SEQ ID NO: 1830232 - DNA, 25 bp, Homo sapien
tgatcttagaccagacaggcgggag

SEQ ID NO: 1830233 - DNA, 25 bp, Homo sapien
tcctgttgttgacgtaggaggacag

SEQ ID NO: 1830234 - DNA, 25 bp, Homo sapien
gggcagccagcaatgagcccgtgcc

SEQ ID NO: 1830235 - DNA, 25 bp, Homo sapien
caggactttcctctccgcaacatgc

SEQ ID NO: 1830236 - DNA, 25 bp, Homo sapien
ggactttcctctccgcaacatgcag

SEQ ID NO: 1830237 - DNA, 25 bp, Homo sapien
tttcctctccgcaacatgcagggca

SEQ ID NO: 1830238 - DNA, 25 bp, Homo sapien
tcagcaggagggcaacattcatccg

SEQ ID NO: 1830239 - DNA, 25 bp, Homo sapien
aaaggagatgtggaaaacactatcc

SEQ ID NO: 1830240 - DNA, 25 bp, Homo sapien
gactgaggtccacgtgcacctacgt

SEQ ID NO: 1830241 - DNA, 25 bp, Homo sapien
cagcagcacaacaccgtgttcagct

SEQ ID NO: 1830242 - DNA, 25 bp, Homo sapien
tcgagtggaagcgtccaaacctgct

SEQ ID NO: 1830243 - DNA, 25 bp, Homo sapien
gtggaagcgtccaaacctgcttttc

SEQ ID NO: 1830244 - DNA, 25 bp, Homo sapien
cgtctggctcgagtggaagcgtcca

SEQ ID NO: 1830245 - DNA, 25 bp, Homo sapien
ggctcgagtggaagcgtccaaacct

SEQ ID NO: 1830246 - DNA, 25 bp, Homo sapien
tctgttccgtcagagcttctggctg

SEQ ID NO: 1830247 - DNA, 25 bp, Homo sapien
tcctgaatggtggaatgctgtgtcc

SEQ ID NO: 1830248 - DNA, 25 bp, Homo sapien
cctgaatggtggaatgctgtgtcct

SEQ ID NO: 1830249 - DNA, 25 bp, Homo sapien
ccccaagtctgttccgtcagagctt

SEQ ID NO: 1830250 - DNA, 25 bp, Homo sapien
aaggcaccgattgggccaacatcag

SEQ ID NO: 1830251 - DNA, 25 bp, Homo sapien
gggcccagacgcaaggcaccgattg

SEQ ID NO: 1830252 - DNA, 25 bp, Homo sapien
agacgcaaggcaccgattgggccaa

SEQ ID NO: 1830253 - DNA, 25 bp, Homo sapien
acctcattgttcaaaccaacacttg

SEQ ID NO: 1830254 - DNA, 25 bp, Homo sapien
tatttccaggagtcaagttgaatgg

SEQ ID NO: 1830255 - DNA, 25 bp, Homo sapien
tagcagacaagtcaccttaggaggg

SEQ ID NO: 1830256 - DNA, 25 bp, Homo sapien
tgttttgctaccttcctagacaggc

SEQ ID NO: 1830257 - DNA, 25 bp, Homo sapien
tgatggcaagcctctcccggcgatt

SEQ ID NO: 1830258 - DNA, 25 bp, Homo sapien
aatcctttctcggaaggaccacatg

SEQ ID NO: 1830259 - DNA, 25 bp, Homo sapien
cactactgtataagggtcagttaac

SEQ ID NO: 1830260 - DNA, 25 bp, Homo sapien
gtcttggagaattggcctctgcagc

SEQ ID NO: 1830261 - DNA, 25 bp, Homo sapien
taacgggttgggaacaatgacattg

SEQ ID NO: 1830262 - DNA, 25 bp, Homo sapien
gatgaccggccgctaaactttgaag

SEQ ID NO: 1830263 - DNA, 25 bp, Homo sapien
gcagcagtccaccaggatgcttgtt

SEQ ID NO: 1830264 - DNA, 25 bp, Homo sapien
ttaaacagtgaacgcagaagaagtg

SEQ ID NO: 1830265 - DNA, 25 bp, Homo sapien
aactttgaagtattgagttccaggc

SEQ ID NO: 1830266 - DNA, 25 bp, Homo sapien
caatgaccctggagtagagaagatc

SEQ ID NO: 1830267 - DNA, 25 bp, Homo sapien
cacagtgaccgatggcatgagaagg

SEQ ID NO: 1830268 - DNA, 25 bp, Homo sapien
tgagaagggtccaaccagagctgtc

SEQ ID NO: 1830269 - DNA, 25 bp, Homo sapien
tcacactctgggataatacaggccc

SEQ ID NO: 1830270 - DNA, 25 bp, Homo sapien
gtttgccttagcaggttcatctctg

SEQ ID NO: 1830271 - DNA, 25 bp, Homo sapien
catctctgcctctgataggagtggg

SEQ ID NO: 1830272 - DNA, 25 bp, Homo sapien
cgtttgccttagcaggttcatctct

SEQ ID NO: 1830273 - DNA, 25 bp, Homo sapien
tgccttagcaggttcatctctgcct

SEQ ID NO: 1830274 - DNA, 25 bp, Homo sapien
ttgctgctgacccactgggcttcct

SEQ ID NO: 1830275 - DNA, 25 bp, Homo sapien
tggagatgaagcatgcagctttgct

SEQ ID NO: 1830276 - DNA, 25 bp, Homo sapien
cagagtgtcccttggaccgggtgtc

SEQ ID NO: 1830277 - DNA, 25 bp, Homo sapien
tcccacaggacctggagatgaagca

SEQ ID NO: 1830278 - DNA, 25 bp, Homo sapien
cagccagtgaactcgacgccatttg

SEQ ID NO: 1830279 - DNA, 25 bp, Homo sapien
ggaggacagccagtgaactcgacgc

SEQ ID NO: 1830280 - DNA, 25 bp, Homo sapien
tgaactcgacgccatttgccttggg

SEQ ID NO: 1830281 - DNA, 25 bp, Homo sapien
cagtgaactcgacgccatttgcctt

SEQ ID NO: 1830282 - DNA, 25 bp, Homo sapien
tttgatggtttcaagtcctgccccg

SEQ ID NO: 1830283 - DNA, 25 bp, Homo sapien
tgatggtttcaagtcctgccccgct

SEQ ID NO: 1830284 - DNA, 25 bp, Homo sapien
gcagcacctgaaggtatggttcccc

SEQ ID NO: 1830285 - DNA, 25 bp, Homo sapien
ggtttcaagtcctgccccgctgcag

SEQ ID NO: 1830286 - DNA, 25 bp, Homo sapien
aatgtggtactcttgaggtaaacgg

SEQ ID NO: 1830287 - DNA, 25 bp, Homo sapien
gaggaattactttttctggcacaac

SEQ ID NO: 1830288 - DNA, 25 bp, Homo sapien
gctatgggttcttgaggaattactt

SEQ ID NO: 1830289 - DNA, 25 bp, Homo sapien
tgctaagccatatctttccaagact

SEQ ID NO: 1830290 - DNA, 25 bp, Homo sapien
taaacttgtactggtatacagacaa

SEQ ID NO: 1830291 - DNA, 25 bp, Homo sapien
ttcaataaacagactcgagtgtatc

SEQ ID NO: 1830292 - DNA, 25 bp, Homo sapien
tgcaagcaccatcaaagaaagggac

SEQ ID NO: 1830293 - DNA, 25 bp, Homo sapien
tctacctagaaaacctgcaagcacc

SEQ ID NO: 1830294 - DNA, 25 bp, Homo sapien
catgtcagtctggtagtgccctcaa

SEQ ID NO: 1830295 - DNA, 25 bp, Homo sapien
tctcagctccggagtagaggtgtgc

SEQ ID NO: 1830296 - DNA, 25 bp, Homo sapien
gaagaaaccgaattgggccatggag

SEQ ID NO: 1830297 - DNA, 25 bp, Homo sapien
tgaagcctccaatgtatctgcagtg

SEQ ID NO: 1830298 - DNA, 25 bp, Homo sapien
tcaaaagcattggagatttttctct

SEQ ID NO: 1830299 - DNA, 25 bp, Homo sapien
gacaaccaacacagctcaagaagcc

SEQ ID NO: 1830300 - DNA, 25 bp, Homo sapien
gccttcggtaccgagagctctgctt

SEQ ID NO: 1830301 - DNA, 25 bp, Homo sapien
aatagcacggtattagtgtcttcaa

SEQ ID NO: 1830302 - DNA, 25 bp, Homo sapien
caatctatgcggtatctaaggagta

SEQ ID NO: 1830303 - DNA, 25 bp, Homo sapien
ctactccagagcagtcaaagtgctg

SEQ ID NO: 1830304 - DNA, 25 bp, Homo sapien
tctggacacgtcagtgtaccacaca

SEQ ID NO: 1830305 - DNA, 25 bp, Homo sapien
tactaggagctactgttcatcttga

SEQ ID NO: 1830306 - DNA, 25 bp, Homo sapien
gtgtgaaaggttccgcagagtccct

SEQ ID NO: 1830307 - DNA, 25 bp, Homo sapien
aggtgtgaaaggttccgcagagtcc

SEQ ID NO: 1830308 - DNA, 25 bp, Homo sapien
gaaagaggtgtgaaaggttccgcag

SEQ ID NO: 1830309 - DNA, 25 bp, Homo sapien
tgaaaggttccgcagagtcccttta

SEQ ID NO: 1830310 - DNA, 25 bp, Homo sapien
ccattgtaaacgcaaaaggcctgct

SEQ ID NO: 1830311 - DNA, 25 bp, Homo sapien
tacacagaagcggtgacagaggctg

SEQ ID NO: 1830312 - DNA, 25 bp, Homo sapien
cagtatgactgcaagaatgagccca

SEQ ID NO: 1830313 - DNA, 25 bp, Homo sapien
gatccttgtaagctgaacggcaccg

SEQ ID NO: 1830314 - DNA, 25 bp, Homo sapien
gcatatgccttgaactgattctcag

SEQ ID NO: 1830315 - DNA, 25 bp, Homo sapien
catttatttatgctcgttcagtccc

SEQ ID NO: 1830316 - DNA, 25 bp, Homo sapien
tataaactcaatatgtgcaaatcgc

SEQ ID NO: 1830317 - DNA, 25 bp, Homo sapien
tgcaaatcgcaaggttctttaaaag

SEQ ID NO: 1830318 - DNA, 25 bp, Homo sapien
cagaaatgaaatcccgcatgtggca

SEQ ID NO: 1830319 - DNA, 25 bp, Homo sapien
tgattttgcacgtgggaaccccagg

SEQ ID NO: 1830320 - DNA, 25 bp, Homo sapien
tacaaatgataagggagagccacgt

SEQ ID NO: 1830321 - DNA, 25 bp, Homo sapien
aatatatatcagtgcagtcaggccc

SEQ ID NO: 1830322 - DNA, 25 bp, Homo sapien
caactgagagtttggaacacggcaa

SEQ ID NO: 1830323 - DNA, 25 bp, Homo sapien
cacgggctggccctttttaacagag

SEQ ID NO: 1830324 - DNA, 25 bp, Homo sapien
ttcagttcgccattctcagagagca

SEQ ID NO: 1830325 - DNA, 25 bp, Homo sapien
tggttctctccggacagcaggatga

SEQ ID NO: 1830326 - DNA, 25 bp, Homo sapien
ccacgaccagatatcagctgggtcc

SEQ ID NO: 1830327 - DNA, 25 bp, Homo sapien
cctgcgaaaagatgccacgaccaga

SEQ ID NO: 1830328 - DNA, 25 bp, Homo sapien
aaagatgccacgaccagatatcagc

SEQ ID NO: 1830329 - DNA, 25 bp, Homo sapien
gctgtgtcaccctgcgaaaagatgc

SEQ ID NO: 1830330 - DNA, 25 bp, Homo sapien
aatcgactcctctagaactgtcacc

SEQ ID NO: 1830331 - DNA, 25 bp, Homo sapien
taaatcgactcctctagaactgtca

SEQ ID NO: 1830332 - DNA, 25 bp, Homo sapien
gaactgtcacctccaactcccattt

SEQ ID NO: 1830333 - DNA, 25 bp, Homo sapien
ccctaaatcgactcctctagaactg

SEQ ID NO: 1830334 - DNA, 25 bp, Homo sapien
caaagggactgactctacaggctca

SEQ ID NO: 1830335 - DNA, 25 bp, Homo sapien
ggaaagccatcggtagacagccagt

SEQ ID NO: 1830336 - DNA, 25 bp, Homo sapien
gtgtgtattaccaacaactgcggca

SEQ ID NO: 1830337 - DNA, 25 bp, Homo sapien
aactgcggcacaaatccagggctgg

SEQ ID NO: 1830338 - DNA, 25 bp, Homo sapien
gggaggcgctgggaagcgacagacg

SEQ ID NO: 1830339 - DNA, 25 bp, Homo sapien
aggcgctgggaagcgacagacggcc

SEQ ID NO: 1830340 - DNA, 25 bp, Homo sapien
tcgggaggcgctgggaagcgacaga

SEQ ID NO: 1830341 - DNA, 25 bp, Homo sapien
ctcgggaggcgctgggaagcgacag

SEQ ID NO: 1830342 - DNA, 25 bp, Homo sapien
gatttggtcctttcctcacttgggc

SEQ ID NO: 1830343 - DNA, 25 bp, Homo sapien
aaaaagccagacatagggactcgtg

SEQ ID NO: 1830344 - DNA, 25 bp, Homo sapien
tattcagggctaaaagctctcggca

SEQ ID NO: 1830345 - DNA, 25 bp, Homo sapien
tcttgggcccttccaaagactgtaa

SEQ ID NO: 1830346 - DNA, 25 bp, Homo sapien
gagcgttaaccatacttccagtgac

SEQ ID NO: 1830347 - DNA, 25 bp, Homo sapien
gctcgatagccaggaaagctctcag

SEQ ID NO: 1830348 - DNA, 25 bp, Homo sapien
gcatgtaatcgatctaagaacctgg

SEQ ID NO: 1830349 - DNA, 25 bp, Homo sapien
gtgactcatcttggctacagctgac

SEQ ID NO: 1830350 - DNA, 25 bp, Homo sapien
tgaagttctcgctcttgggaagggc

SEQ ID NO: 1830351 - DNA, 25 bp, Homo sapien
ttgagtccctgcgtagaaggccgtg

SEQ ID NO: 1830352 - DNA, 25 bp, Homo sapien
ggtggccaggcttccctaaatgcag

SEQ ID NO: 1830353 - DNA, 25 bp, Homo sapien
tctacggtgctggagtcgatcttca

SEQ ID NO: 1830354 - DNA, 25 bp, Homo sapien
ccggtgttctgcggagaactggaaa

SEQ ID NO: 1830355 - DNA, 25 bp, Homo sapien
gcggccggtgttctgcggagaactg

SEQ ID NO: 1830356 - DNA, 25 bp, Homo sapien
cggtgttctgcggagaactggaaat

SEQ ID NO: 1830357 - DNA, 25 bp, Homo sapien
ggccggtgttctgcggagaactgga

SEQ ID NO: 1830358 - DNA, 25 bp, Homo sapien
gccttgtgtcccggcgtctggctca

SEQ ID NO: 1830359 - DNA, 25 bp, Homo sapien
cttgtgtcccggcgtctggctcaga

SEQ ID NO: 1830360 - DNA, 25 bp, Homo sapien
agccttgtgtcccggcgtctggctc

SEQ ID NO: 1830361 - DNA, 25 bp, Homo sapien
ccttgtgtcccggcgtctggctcag

SEQ ID NO: 1830362 - DNA, 25 bp, Homo sapien
gcgctgggatggagtggtggcccct

SEQ ID NO: 1830363 - DNA, 25 bp, Homo sapien
agcagagtggaataggcctccagct

SEQ ID NO: 1830364 - DNA, 25 bp, Homo sapien
gcagagtggaataggcctccagctg

SEQ ID NO: 1830365 - DNA, 25 bp, Homo sapien
gcccctgcggccgaggccactgcac

SEQ ID NO: 1830366 - DNA, 25 bp, Homo sapien
tgcggcaggtgagcgtactgcacgg

SEQ ID NO: 1830367 - DNA, 25 bp, Homo sapien
gttccactgtattgggaggacccaa

SEQ ID NO: 1830368 - DNA, 25 bp, Homo sapien
ggatgaagctggcataggttccact

SEQ ID NO: 1830369 - DNA, 25 bp, Homo sapien
tggcgtacgcggcaggcagcgtggt

SEQ ID NO: 1830370 - DNA, 25 bp, Homo sapien
gccaccagggttgcccgggagccat

SEQ ID NO: 1830371 - DNA, 25 bp, Homo sapien
gaggcaggcattcgttgctccgctc

SEQ ID NO: 1830372 - DNA, 25 bp, Homo sapien
cttctcctcggaggaccggctggtg

SEQ ID NO: 1830373 - DNA, 25 bp, Homo sapien
tgttgtaaaccaagctccaccgagg

SEQ ID NO: 1830374 - DNA, 25 bp, Homo sapien
cgccgtcccccctccacggtgactg

SEQ ID NO: 1830375 - DNA, 25 bp, Homo sapien
tcccccctccacggtgactgtttca

SEQ ID NO: 1830376 - DNA, 25 bp, Homo sapien
tacaatccgccaacagcagctctgg

SEQ ID NO: 1830377 - DNA, 25 bp, Homo sapien
tccaggctcttcatgaggaatcatc

SEQ ID NO: 1830378 - DNA, 25 bp, Homo sapien
ttttagtctgataaacggaaagtca

SEQ ID NO: 1830379 - DNA, 25 bp, Homo sapien
ttcatgaggaatcatctccccgtgg

SEQ ID NO: 1830380 - DNA, 25 bp, Homo sapien
accatctggatccaagctggtccca

SEQ ID NO: 1830381 - DNA, 25 bp, Homo sapien
gcccatgccggaattcctggaaagg

SEQ ID NO: 1830382 - DNA, 25 bp, Homo sapien
gcgctgcagtggctgtgtagccagt

SEQ ID NO: 1830383 - DNA, 25 bp, Homo sapien
tgtagccagtgtctctggcggcctg

SEQ ID NO: 1830384 - DNA, 25 bp, Homo sapien
gcacccggctggtatagaggatctt

SEQ ID NO: 1830385 - DNA, 25 bp, Homo sapien
tctttaagccccctaactccatctg

SEQ ID NO: 1830386 - DNA, 25 bp, Homo sapien
aactccatctgtccttggcagtatg

SEQ ID NO: 1830387 - DNA, 25 bp, Homo sapien
accgcacccggctggtatagaggat

SEQ ID NO: 1830388 - DNA, 25 bp, Homo sapien
gctgtgtcctgatcaagcctcaaat

SEQ ID NO: 1830389 - DNA, 25 bp, Homo sapien
gtgcgcatcacattcacccggagtt

SEQ ID NO: 1830390 - DNA, 25 bp, Homo sapien
cagataatttgtaaccagtgggtgt

SEQ ID NO: 1830391 - DNA, 25 bp, Homo sapien
tggttcttatactcgagcgtgcgca

SEQ ID NO: 1830392 - DNA, 25 bp, Homo sapien
tcagtgtcatgttagaccgggctaa

SEQ ID NO: 1830393 - DNA, 25 bp, Homo sapien
cctgagcaggaagcacatagttgat

SEQ ID NO: 1830394 - DNA, 25 bp, Homo sapien
ggttatagtgagcagctgctggtca

SEQ ID NO: 1830395 - DNA, 25 bp, Homo sapien
aactggcatttgataactcgtgact

SEQ ID NO: 1830396 - DNA, 25 bp, Homo sapien
ccctgatttcagaacgtaggctaca

SEQ ID NO: 1830397 - DNA, 25 bp, Homo sapien
ggcctcctttcagtatcgcagcttg

SEQ ID NO: 1830398 - DNA, 25 bp, Homo sapien
cccagatgtgtgctgacggtactac

SEQ ID NO: 1830399 - DNA, 25 bp, Homo sapien
tctccttgtaatgtaattccaacag

SEQ ID NO: 1830400 - DNA, 25 bp, Homo sapien
tcctgcttattcctgtaactgcaaa

SEQ ID NO: 1830401 - DNA, 25 bp, Homo sapien
ccttttgatgggcaacttgagctgc

SEQ ID NO: 1830402 - DNA, 25 bp, Homo sapien
catgccattggttgggctcgttcct

SEQ ID NO: 1830403 - DNA, 25 bp, Homo sapien
taactgcaaacacgtcttgctccaa

SEQ ID NO: 1830404 - DNA, 25 bp, Homo sapien
accagttgcagagaggagtaccctc

SEQ ID NO: 1830405 - DNA, 25 bp, Homo sapien
gcttaaaaggcgttgcggccacaga

SEQ ID NO: 1830406 - DNA, 25 bp, Homo sapien
gatagctggagacgatgggacaacc

SEQ ID NO: 1830407 - DNA, 25 bp, Homo sapien
gaaaaattgacaccccagagatcct

SEQ ID NO: 1830408 - DNA, 25 bp, Homo sapien
gggccatgccactaggtgaaatctt

SEQ ID NO: 1830409 - DNA, 25 bp, Homo sapien
taaaggtagaccctgaatgatgcct

SEQ ID NO: 1830410 - DNA, 25 bp, Homo sapien
catttcgtttcatccccagtaaagg

SEQ ID NO: 1830411 - DNA, 25 bp, Homo sapien
tccgctggctctagaaatgattttg

SEQ ID NO: 1830412 - DNA, 25 bp, Homo sapien
tgtctcaatcgggaagcagagttgg

SEQ ID NO: 1830413 - DNA, 25 bp, Homo sapien
tatgcctatcagtatctgctaaatg

SEQ ID NO: 1830414 - DNA, 25 bp, Homo sapien
tgatgaaggttctattttatatgcc

SEQ ID NO: 1830415 - DNA, 25 bp, Homo sapien
cagagttggcaaattaattacactt

SEQ ID NO: 1830416 - DNA, 25 bp, Homo sapien
tgacctgaattgatacaagtgtttt

SEQ ID NO: 1830417 - DNA, 25 bp, Homo sapien
tgtaccatgcaaaaacttaggatct

SEQ ID NO: 1830418 - DNA, 25 bp, Homo sapien
agcaaaagatatgcaagatgttaat

SEQ ID NO: 1830419 - DNA, 25 bp, Homo sapien
aatgagtgaggatttattgtaccat

SEQ ID NO: 1830420 - DNA, 25 bp, Homo sapien
aaatgccaagaaggagattgtgcct

SEQ ID NO: 1830421 - DNA, 25 bp, Homo sapien
ggcactttgcaaatccaatctattt

SEQ ID NO: 1830422 - DNA, 25 bp, Homo sapien
tgtatgtgatattgttgatacacat

SEQ ID NO: 1830423 - DNA, 25 bp, Homo sapien
gaaacacaggaagttgaacatctca

SEQ ID NO: 1830424 - DNA, 25 bp, Homo sapien
atgtctatagtccttgctactaggg

SEQ ID NO: 1830425 - DNA, 25 bp, Homo sapien
gctatagggagctgtgattgcacac

SEQ ID NO: 1830426 - DNA, 25 bp, Homo sapien
acatgtctatagtccttgctactag

SEQ ID NO: 1830427 - DNA, 25 bp, Homo sapien
cctgggagacagaggctatagggag

SEQ ID NO: 1830428 - DNA, 25 bp, Homo sapien
cagggaaagcggcatcatgatcacc

SEQ ID NO: 1830429 - DNA, 25 bp, Homo sapien
tcataagaggtcacatggctcccct

SEQ ID NO: 1830430 - DNA, 25 bp, Homo sapien
tgcccatgcacttgaaatttgacag

SEQ ID NO: 1830431 - DNA, 25 bp, Homo sapien
tgtgtttgaacaagtcctccaggca

SEQ ID NO: 1830432 - DNA, 25 bp, Homo sapien
gaacccttaaggatagatagccaga

SEQ ID NO: 1830433 - DNA, 25 bp, Homo sapien
gataagcccgatgcctaacacacat

SEQ ID NO: 1830434 - DNA, 25 bp, Homo sapien
tcccggtcacgtgcatcatgaatga

SEQ ID NO: 1830435 - DNA, 25 bp, Homo sapien
cctcaacctgtgattatggaaggaa

SEQ ID NO: 1830436 - DNA, 25 bp, Homo sapien
gaccaagagtagacagccagtccaa

SEQ ID NO: 1830437 - DNA, 25 bp, Homo sapien
taaaaactcctgaggcgaggcggat

SEQ ID NO: 1830438 - DNA, 25 bp, Homo sapien
gatatgcagtagagaatgtgagacc

SEQ ID NO: 1830439 - DNA, 25 bp, Homo sapien
tgacagccaagcgttcaacatagcc

SEQ ID NO: 1830440 - DNA, 25 bp, Homo sapien
gtacctattctatgtctagatgcac

SEQ ID NO: 1830441 - DNA, 25 bp, Homo sapien
cctattctatgtctagatgcacaaa

SEQ ID NO: 1830442 - DNA, 25 bp, Homo sapien
agtgatacagtgatgtcctaggcct

SEQ ID NO: 1830443 - DNA, 25 bp, Homo sapien
gccctatataggtgtgcccttttaa

SEQ ID NO: 1830444 - DNA, 25 bp, Homo sapien
aataatgttgacttttagctcttca

SEQ ID NO: 1830445 - DNA, 25 bp, Homo sapien
aggacttttagttggggcagatgaa

SEQ ID NO: 1830446 - DNA, 25 bp, Homo sapien
ttggcagattttgcctccattggga

SEQ ID NO: 1830447 - DNA, 25 bp, Homo sapien
ggtctaaggttagacagcaacaaaa

SEQ ID NO: 1830448 - DNA, 25 bp, Homo sapien
taaccatatcaacgtgtgtgcatgc

SEQ ID NO: 1830449 - DNA, 25 bp, Homo sapien
ggtccagaacctgactaagcacaag

SEQ ID NO: 1830450 - DNA, 25 bp, Homo sapien
cacagggcctctgaaaagtatactc

SEQ ID NO: 1830451 - DNA, 25 bp, Homo sapien
tcctgatgggactcaagagatgctg

SEQ ID NO: 1830452 - DNA, 25 bp, Homo sapien
tgggcatctctggatacgtctgggt

SEQ ID NO: 1830453 - DNA, 25 bp, Homo sapien
gcatctctggatacgtctgggtggc

SEQ ID NO: 1830454 - DNA, 25 bp, Homo sapien
tctctggatacgtctgggtggcctg

SEQ ID NO: 1830455 - DNA, 25 bp, Homo sapien
tgtgtggaggcctgtttgatgagcc

SEQ ID NO: 1830456 - DNA, 25 bp, Homo sapien
ttaaatactttccttcatcaagtga

SEQ ID NO: 1830457 - DNA, 25 bp, Homo sapien
caggagatggttaccccgagaagct

SEQ ID NO: 1830458 - DNA, 25 bp, Homo sapien
tttgccccgatatttatacatcagc

SEQ ID NO: 1830459 - DNA, 25 bp, Homo sapien
tctgttccacacaattgccttagcg

SEQ ID NO: 1830460 - DNA, 25 bp, Homo sapien
ccttagcgtctgtcctctttatgaa

SEQ ID NO: 1830461 - DNA, 25 bp, Homo sapien
ctggttgcgggttgagcgaaaacaa

SEQ ID NO: 1830462 - DNA, 25 bp, Homo sapien
caaagcatgcttggtacttgaaaat

SEQ ID NO: 1830463 - DNA, 25 bp, Homo sapien
aaattaacccttcaagactgggcat

SEQ ID NO: 1830464 - DNA, 25 bp, Homo sapien
tttgcggcttttaaacagcgagttc

SEQ ID NO: 1830465 - DNA, 25 bp, Homo sapien
atgcctaattccttcaccctctgaa

SEQ ID NO: 1830466 - DNA, 25 bp, Homo sapien
ttatttaattgataagatatgccac

SEQ ID NO: 1830467 - DNA, 25 bp, Homo sapien
tttaattgataagatatgccacata

SEQ ID NO: 1830468 - DNA, 25 bp, Homo sapien
cttcatgcctaattccttcaccctc

SEQ ID NO: 1830469 - DNA, 25 bp, Homo sapien
aatttccaagttatggcttttaatg

SEQ ID NO: 1830470 - DNA, 25 bp, Homo sapien
tagagagagggagttacaagtttct

SEQ ID NO: 1830471 - DNA, 25 bp, Homo sapien
atttccaagttatggcttttaatgg

SEQ ID NO: 1830472 - DNA, 25 bp, Homo sapien
agtagagagagggagttacaagttt

SEQ ID NO: 1830473 - DNA, 25 bp, Homo sapien
gcttgaagaagaaatccatgaccag

SEQ ID NO: 1830474 - DNA, 25 bp, Homo sapien
tcaaaagttagcctctcaaaggccc

SEQ ID NO: 1830475 - DNA, 25 bp, Homo sapien
tcccaacgctctggtgtagcaaaag

SEQ ID NO: 1830476 - DNA, 25 bp, Homo sapien
catgaccaggtaccaaagaaggcta

SEQ ID NO: 1830477 - DNA, 25 bp, Homo sapien
cgctcatcctatcatctacagggtt

SEQ ID NO: 1830478 - DNA, 25 bp, Homo sapien
gggacggatgaggaccgctcatcct

SEQ ID NO: 1830479 - DNA, 25 bp, Homo sapien
cgagggcattttgttctggtgcaca

SEQ ID NO: 1830480 - DNA, 25 bp, Homo sapien
ggtggccatgatccgagggcatttt

SEQ ID NO: 1830481 - DNA, 25 bp, Homo sapien
caatggtttcctctactggtccggg

SEQ ID NO: 1830482 - DNA, 25 bp, Homo sapien
catgggctcgaagacttgtaacatg

SEQ ID NO: 1830483 - DNA, 25 bp, Homo sapien
taacatgtgatattagggcagcaat

SEQ ID NO: 1830484 - DNA, 25 bp, Homo sapien
tgcaatgacgctccccagtgaggtg

SEQ ID NO: 1830485 - DNA, 25 bp, Homo sapien
gctagtttcagagctatggctgtgc

SEQ ID NO: 1830486 - DNA, 25 bp, Homo sapien
gcctatagcagtttgtaggaattta

SEQ ID NO: 1830487 - DNA, 25 bp, Homo sapien
tccttcgcatcacatgatcctccag

SEQ ID NO: 1830488 - DNA, 25 bp, Homo sapien
cagagctatggctgtgcctatagca

SEQ ID NO: 1830489 - DNA, 25 bp, Homo sapien
gggcttggttccctcctatgcccat

SEQ ID NO: 1830490 - DNA, 25 bp, Homo sapien
ttaagaataagaagtcatctgggag

SEQ ID NO: 1830491 - DNA, 25 bp, Homo sapien
gagaaaggggatgggaccgagcatc

SEQ ID NO: 1830492 - DNA, 25 bp, Homo sapien
gaccgagcatccctgaaacacggct

SEQ ID NO: 1830493 - DNA, 25 bp, Homo sapien
tagttattaacagcccagcctgtgg

SEQ ID NO: 1830494 - DNA, 25 bp, Homo sapien
catgtacggtatcagagagcagccc

SEQ ID NO: 1830495 - DNA, 25 bp, Homo sapien
gagttttaggcccattcgatccaca

SEQ ID NO: 1830496 - DNA, 25 bp, Homo sapien
gtacacgtgcctgaaaagcttgcca

SEQ ID NO: 1830497 - DNA, 25 bp, Homo sapien
ccaccacaaaatttgcttaacctat

SEQ ID NO: 1830498 - DNA, 25 bp, Homo sapien
cacaaaatttgcttaacctatttct

SEQ ID NO: 1830499 - DNA, 25 bp, Homo sapien
ttggaagatgcggaggcctcatgca

SEQ ID NO: 1830500 - DNA, 25 bp, Homo sapien
tggaagatgcggaggcctcatgcat

SEQ ID NO: 1830501 - DNA, 25 bp, Homo sapien
tttactcacaatgaaatctgcatgg

SEQ ID NO: 1830502 - DNA, 25 bp, Homo sapien
gcatggaagcctgccaatgtctggg

SEQ ID NO: 1830503 - DNA, 25 bp, Homo sapien
actatgaagggcttgaacccagcca

SEQ ID NO: 1830504 - DNA, 25 bp, Homo sapien
tgggctgacattcaaacattccaag

SEQ ID NO: 1830505 - DNA, 25 bp, Homo sapien
ttgctgtgcagcatgtagctcgatc

SEQ ID NO: 1830506 - DNA, 25 bp, Homo sapien
tctcagttcagagtgaatatacagc

SEQ ID NO: 1830507 - DNA, 25 bp, Homo sapien
caataattctgcttgaaagaagtgc

SEQ ID NO: 1830508 - DNA, 25 bp, Homo sapien
tcgatctaccgcaacaatacaatga

SEQ ID NO: 1830509 - DNA, 25 bp, Homo sapien
agcatagaatcttttgcatttcatg

SEQ ID NO: 1830510 - DNA, 25 bp, Homo sapien
taaatattagttacatagtagacaa

SEQ ID NO: 1830511 - DNA, 25 bp, Homo sapien
tgtcctatagccatgctttatggaa

SEQ ID NO: 1830512 - DNA, 25 bp, Homo sapien
tgcatttcatgtggcatctgagtac

SEQ ID NO: 1830513 - DNA, 25 bp, Homo sapien
tcaaggacaacgtcaacaactgtgg

SEQ ID NO: 1830514 - DNA, 25 bp, Homo sapien
accgtggaccagcagaattgtgtag

SEQ ID NO: 1830515 - DNA, 25 bp, Homo sapien
tctgaggtccttactctgagtgagc

SEQ ID NO: 1830516 - DNA, 25 bp, Homo sapien
tcaagagttcatcccactgaaggca

SEQ ID NO: 1830517 - DNA, 25 bp, Homo sapien
tgcataagttggctcagcataaagt

SEQ ID NO: 1830518 - DNA, 25 bp, Homo sapien
ccatggaagctaggtagcagagagt

SEQ ID NO: 1830519 - DNA, 25 bp, Homo sapien
gcagagagtgtaaggagagcttcct

SEQ ID NO: 1830520 - DNA, 25 bp, Homo sapien
taattctggccttggctactatggg

SEQ ID NO: 1830521 - DNA, 25 bp, Homo sapien
tgaataggatcccaatgctcagaca

SEQ ID NO: 1830522 - DNA, 25 bp, Homo sapien
gaactagctgtatcgtgcaaattgg

SEQ ID NO: 1830523 - DNA, 25 bp, Homo sapien
tattcaacccagtgagaacagttcc

SEQ ID NO: 1830524 - DNA, 25 bp, Homo sapien
tcccagagctaaggcaagaaatgta

SEQ ID NO: 1830525 - DNA, 25 bp, Homo sapien
tgacagacaatcagaaacagacatc

SEQ ID NO: 1830526 - DNA, 25 bp, Homo sapien
taaatatagtgtaccgggatgacag

SEQ ID NO: 1830527 - DNA, 25 bp, Homo sapien
tacaactattcctagactcacaagc

SEQ ID NO: 1830528 - DNA, 25 bp, Homo sapien
gcttatcactagaagccagaggctt

SEQ ID NO: 1830529 - DNA, 25 bp, Homo sapien
tgccttagagctcggcattcctgag

SEQ ID NO: 1830530 - DNA, 25 bp, Homo sapien
gaaatgcaaagcagccatgtgccct

SEQ ID NO: 1830531 - DNA, 25 bp, Homo sapien
gattcgcacctctctgtagctgggc

SEQ ID NO: 1830532 - DNA, 25 bp, Homo sapien
cagctttcagtagagcatgtcagga

SEQ ID NO: 1830533 - DNA, 25 bp, Homo sapien
tttggatccaaatcggaaaatggca

SEQ ID NO: 1830534 - DNA, 25 bp, Homo sapien
tttcatctaggcaaggccactttgg

SEQ ID NO: 1830535 - DNA, 25 bp, Homo sapien
tcatttagtgccaattcaatgtggc

SEQ ID NO: 1830536 - DNA, 25 bp, Homo sapien
gacagggactttaagatacaatcca

SEQ ID NO: 1830537 - DNA, 25 bp, Homo sapien
tctcgttacactggatggctttcag

SEQ ID NO: 1830538 - DNA, 25 bp, Homo sapien
cagagctcagtaagaaggctctcgt

SEQ ID NO: 1830539 - DNA, 25 bp, Homo sapien
ggctctcgttacactggatggcttt

SEQ ID NO: 1830540 - DNA, 25 bp, Homo sapien
agaaggctctcgttacactggatgg

SEQ ID NO: 1830541 - DNA, 25 bp, Homo sapien
ccaagagggactgtcatggtgtttc

SEQ ID NO: 1830542 - DNA, 25 bp, Homo sapien
gattcctcccaaacatctactcatg

SEQ ID NO: 1830543 - DNA, 25 bp, Homo sapien
tgcatgccagtgctgataaacaagc

SEQ ID NO: 1830544 - DNA, 25 bp, Homo sapien
ctctgcatgccagtgctgataaaca

SEQ ID NO: 1830545 - DNA, 25 bp, Homo sapien
tgaccgagtaacactacccagtggg

SEQ ID NO: 1830546 - DNA, 25 bp, Homo sapien
tagagccattgaggttgccaaacag

SEQ ID NO: 1830547 - DNA, 25 bp, Homo sapien
cacaagccgaagtatgacagccaga

SEQ ID NO: 1830548 - DNA, 25 bp, Homo sapien
tgtcccctatagcaagtgaccgagt

SEQ ID NO: 1830549 - DNA, 25 bp, Homo sapien
caggtagcctcagcctatacttcac

SEQ ID NO: 1830550 - DNA, 25 bp, Homo sapien
cattcactgcgtactgttcacaggt

SEQ ID NO: 1830551 - DNA, 25 bp, Homo sapien
aacattcactgcgtactgttcacag

SEQ ID NO: 1830552 - DNA, 25 bp, Homo sapien
tacttcaccatggagacttcccaca

SEQ ID NO: 1830553 - DNA, 25 bp, Homo sapien
ccgggagcatccaaacgtctgcatg

SEQ ID NO: 1830554 - DNA, 25 bp, Homo sapien
gaaggcatcacgcaggaagctagga

SEQ ID NO: 1830555 - DNA, 25 bp, Homo sapien
ggttatttggtacacggctccctca

SEQ ID NO: 1830556 - DNA, 25 bp, Homo sapien
ggcaccaatcatcaactatcccggg

SEQ ID NO: 1830557 - DNA, 25 bp, Homo sapien
gccccatgctagctcagactgaatt

SEQ ID NO: 1830558 - DNA, 25 bp, Homo sapien
tcctacaataggtgtcatctcccca

SEQ ID NO: 1830559 - DNA, 25 bp, Homo sapien
gtagatataacacaacttccccgtg

SEQ ID NO: 1830560 - DNA, 25 bp, Homo sapien
tactccacgtgtcaaaatgtaagcc

SEQ ID NO: 1830561 - DNA, 25 bp, Homo sapien
taggagccagctttcactcctggga

SEQ ID NO: 1830562 - DNA, 25 bp, Homo sapien
tgccttgtaaagaacagggcctgtg

SEQ ID NO: 1830563 - DNA, 25 bp, Homo sapien
tactcgcatgtattgctaggagcca

SEQ ID NO: 1830564 - DNA, 25 bp, Homo sapien
catgtggtcaatgaaactcctgcct

SEQ ID NO: 1830565 - DNA, 25 bp, Homo sapien
ggattcaaacagcagacaccatgca

SEQ ID NO: 1830566 - DNA, 25 bp, Homo sapien
tactcaactactgtaaagtgggtgc

SEQ ID NO: 1830567 - DNA, 25 bp, Homo sapien
taaatgtccagagagctaacaactg

SEQ ID NO: 1830568 - DNA, 25 bp, Homo sapien
aaagtcctgcttagagggcacctca

SEQ ID NO: 1830569 - DNA, 25 bp, Homo sapien
cacagccgtagcgtctctcattaga

SEQ ID NO: 1830570 - DNA, 25 bp, Homo sapien
tagcgtctctcattagactctcttc

SEQ ID NO: 1830571 - DNA, 25 bp, Homo sapien
tgcacacagccgtagcgtctctcat

SEQ ID NO: 1830572 - DNA, 25 bp, Homo sapien
cattagactctcttctaccactaga

SEQ ID NO: 1830573 - DNA, 25 bp, Homo sapien
ctgcgtctgagagcgaggcacacca

SEQ ID NO: 1830574 - DNA, 25 bp, Homo sapien
tgtgagcctcgcaagcagtagctgc

SEQ ID NO: 1830575 - DNA, 25 bp, Homo sapien
tccccaaaatttagttgtgagcctc

SEQ ID NO: 1830576 - DNA, 25 bp, Homo sapien
cagtagctgcttaactcataactga

SEQ ID NO: 1830577 - DNA, 25 bp, Homo sapien
aatttagttgtgagcctcgcaagca

SEQ ID NO: 1830578 - DNA, 25 bp, Homo sapien
ttctcacgaagaaaatggtctaatt

SEQ ID NO: 1830579 - DNA, 25 bp, Homo sapien
gcacgtcgatttctttctcacgaag

SEQ ID NO: 1830580 - DNA, 25 bp, Homo sapien
cctatgaaaacagcacgtcgatttc

SEQ ID NO: 1830581 - DNA, 25 bp, Homo sapien
ctcacgaagaaaatggtctaatttc

SEQ ID NO: 1830582 - DNA, 25 bp, Homo sapien
tttcatcagaggacgtggacggcat

SEQ ID NO: 1830583 - DNA, 25 bp, Homo sapien
agctttcccgcccttttcatcagag

SEQ ID NO: 1830584 - DNA, 25 bp, Homo sapien
cagggcaggatagagctttttcagg

SEQ ID NO: 1830585 - DNA, 25 bp, Homo sapien
tggacggcatgtggccggccaccag

SEQ ID NO: 1830586 - DNA, 25 bp, Homo sapien
cagtggcaacgacacaaaatgtagc

SEQ ID NO: 1830587 - DNA, 25 bp, Homo sapien
tagccttggcaagtcagtctaacaa

SEQ ID NO: 1830588 - DNA, 25 bp, Homo sapien
gaaagttgtgtattagtgcccaaca

SEQ ID NO: 1830589 - DNA, 25 bp, Homo sapien
ccaggcaagcgttcttcaggcagca

SEQ ID NO: 1830590 - DNA, 25 bp, Homo sapien
ttttgtcgtactcatcttctccact

SEQ ID NO: 1830591 - DNA, 25 bp, Homo sapien
catgtctctatgaggagcacttttc

SEQ ID NO: 1830592 - DNA, 25 bp, Homo sapien
ccctaaacttactatggcatgatgt

SEQ ID NO: 1830593 - DNA, 25 bp, Homo sapien
tgtgacccagctctgatagcctgga

SEQ ID NO: 1830594 - DNA, 25 bp, Homo sapien
tgacctcagaggaatgtgacaacgg

SEQ ID NO: 1830595 - DNA, 25 bp, Homo sapien
tggcgcaggatcacacacaagttgg

SEQ ID NO: 1830596 - DNA, 25 bp, Homo sapien
tgcattgttcccacagtaaccagag

SEQ ID NO: 1830597 - DNA, 25 bp, Homo sapien
tctaggtctttatccgcaggtcggg

SEQ ID NO: 1830598 - DNA, 25 bp, Homo sapien
ttcaaatgccatctagaccataagg

SEQ ID NO: 1830599 - DNA, 25 bp, Homo sapien
tgtattcttcaattcagggtcctgg

SEQ ID NO: 1830600 - DNA, 25 bp, Homo sapien
gacatggaccgagagctaacaagag

SEQ ID NO: 1830601 - DNA, 25 bp, Homo sapien
aataggacctaaaggagtttgcgct

SEQ ID NO: 1830602 - DNA, 25 bp, Homo sapien
caaaccatggctgattgtgtcttca

SEQ ID NO: 1830603 - DNA, 25 bp, Homo sapien
tcctgaggtcctcaaaagtcaaatg

SEQ ID NO: 1830604 - DNA, 25 bp, Homo sapien
tgtgtcttcaagcaaatcccagaac

SEQ ID NO: 1830605 - DNA, 25 bp, Homo sapien
ccttcagagtagtgagtctgctgct

SEQ ID NO: 1830606 - DNA, 25 bp, Homo sapien
aactataagtagagatatgaaattg

SEQ ID NO: 1830607 - DNA, 25 bp, Homo sapien
caactataagtagagatatgaaatt

SEQ ID NO: 1830608 - DNA, 25 bp, Homo sapien
actataagtagagatatgaaattgc

SEQ ID NO: 1830609 - DNA, 25 bp, Homo sapien
ccaactataagtagagatatgaaat

SEQ ID NO: 1830610 - DNA, 25 bp, Homo sapien
aactgcaaatattctcacgaaagtg

SEQ ID NO: 1830611 - DNA, 25 bp, Homo sapien
gcaaatattctcacgaaagtgtcca

SEQ ID NO: 1830612 - DNA, 25 bp, Homo sapien
aatattctcacgaaagtgtccaagc

SEQ ID NO: 1830613 - DNA, 25 bp, Homo sapien
agaactgcaaatattctcacgaaag

SEQ ID NO: 1830614 - DNA, 25 bp, Homo sapien
ctgctggtccatgtcaatgatgttc

SEQ ID NO: 1830615 - DNA, 25 bp, Homo sapien
tgtctgttaccgcatgggccctcac

SEQ ID NO: 1830616 - DNA, 25 bp, Homo sapien
taccactgtctgttaccgcatgggc

SEQ ID NO: 1830617 - DNA, 25 bp, Homo sapien
gcatgcataccactgtctgttaccg

SEQ ID NO: 1830618 - DNA, 25 bp, Homo sapien
gcataccactgtctgttaccgcatg

SEQ ID NO: 1830619 - DNA, 25 bp, Homo sapien
tcatcgtgactatagtctgaacagg

SEQ ID NO: 1830620 - DNA, 25 bp, Homo sapien
tgaacaggatacacgagtccccact

SEQ ID NO: 1830621 - DNA, 25 bp, Homo sapien
ctcaatcccacgctggctcatctgt

SEQ ID NO: 1830622 - DNA, 25 bp, Homo sapien
tgtctacagcctttaacgactctcc

SEQ ID NO: 1830623 - DNA, 25 bp, Homo sapien
ggggatgagtcagggctcacaataa

SEQ ID NO: 1830624 - DNA, 25 bp, Homo sapien
gccatgaggtctaggctggttaggg

SEQ ID NO: 1830625 - DNA, 25 bp, Homo sapien
aagtggctatagtgaccaagagtgg

SEQ ID NO: 1830626 - DNA, 25 bp, Homo sapien
caggaatacggagcctgaagaaagt

SEQ ID NO: 1830627 - DNA, 25 bp, Homo sapien
gagcgcctgggcattcatacttagc

SEQ ID NO: 1830628 - DNA, 25 bp, Homo sapien
tacatgatgcttagcagagcgcctg

SEQ ID NO: 1830629 - DNA, 25 bp, Homo sapien
caagggcttaggacggagcatctga

SEQ ID NO: 1830630 - DNA, 25 bp, Homo sapien
tgaatgacctccaggcttagcagcc

SEQ ID NO: 1830631 - DNA, 25 bp, Homo sapien
gctaggaacagagtagggcaatctt

SEQ ID NO: 1830632 - DNA, 25 bp, Homo sapien
taacactgttcatggctactgctag

SEQ ID NO: 1830633 - DNA, 25 bp, Homo sapien
cagggactccttaagtaggctgacc

SEQ ID NO: 1830634 - DNA, 25 bp, Homo sapien
ttggtaccttgggaacacagcatcc

SEQ ID NO: 1830635 - DNA, 25 bp, Homo sapien
cctggtccggctgtcaacaatcaca

SEQ ID NO: 1830636 - DNA, 25 bp, Homo sapien
cgatgatctttactggccctagcaa

SEQ ID NO: 1830637 - DNA, 25 bp, Homo sapien
gggtgttagacagtacgcttctctc

SEQ ID NO: 1830638 - DNA, 25 bp, Homo sapien
tctatgccttccagatcaacaggtc

SEQ ID NO: 1830639 - DNA, 25 bp, Homo sapien
ccagccaggtgatccagacagccat

SEQ ID NO: 1830640 - DNA, 25 bp, Homo sapien
cccccagccaggtgatccagacagc

SEQ ID NO: 1830641 - DNA, 25 bp, Homo sapien
ccaacggctgctccaagggtgcccc

SEQ ID NO: 1830642 - DNA, 25 bp, Homo sapien
gtgcccccagccaggtgatccagac

SEQ ID NO: 1830643 - DNA, 25 bp, Homo sapien
ccataagctatcagttccttgcagc

SEQ ID NO: 1830644 - DNA, 25 bp, Homo sapien
gctttcatcacaatggagaaccata

SEQ ID NO: 1830645 - DNA, 25 bp, Homo sapien
tccttgcagcagatcttttcacgaa

SEQ ID NO: 1830646 - DNA, 25 bp, Homo sapien
gaatctcagtgtaaaacgcctagac

SEQ ID NO: 1830647 - DNA, 25 bp, Homo sapien
tcaaagggtgagctacgaatcggcc

SEQ ID NO: 1830648 - DNA, 25 bp, Homo sapien
catatacctatagatctgtctgggc

SEQ ID NO: 1830649 - DNA, 25 bp, Homo sapien
cgataaaacggacagaatgtggtac

SEQ ID NO: 1830650 - DNA, 25 bp, Homo sapien
tctgggcatgagtacagaattggca

SEQ ID NO: 1830651 - DNA, 25 bp, Homo sapien
ccacagctgacgctgaagttaatct

SEQ ID NO: 1830652 - DNA, 25 bp, Homo sapien
ctgacgctgaagttaatctggaggg

SEQ ID NO: 1830653 - DNA, 25 bp, Homo sapien
agcaccacagctgacgctgaagtta

SEQ ID NO: 1830654 - DNA, 25 bp, Homo sapien
agctgacgctgaagttaatctggag

SEQ ID NO: 1830655 - DNA, 25 bp, Homo sapien
gagggcaacagtctgtgaaacacag

SEQ ID NO: 1830656 - DNA, 25 bp, Homo sapien
caacagtctgtgaaacacagtcagt

SEQ ID NO: 1830657 - DNA, 25 bp, Homo sapien
agatgagggcaacagtctgtgaaac

SEQ ID NO: 1830658 - DNA, 25 bp, Homo sapien
cttctttaacacaagtggagatgag

SEQ ID NO: 1830659 - DNA, 25 bp, Homo sapien
caaggaaatggctgaaaggcaggca

SEQ ID NO: 1830660 - DNA, 25 bp, Homo sapien
aagcaaggaaatggctgaaaggcag

SEQ ID NO: 1830661 - DNA, 25 bp, Homo sapien
aaggaaatggctgaaaggcaggcag

SEQ ID NO: 1830662 - DNA, 25 bp, Homo sapien
caaaaagcaaggaaatggctgaaag

SEQ ID NO: 1830663 - DNA, 25 bp, Homo sapien
tccctgattgggtgtctcgctggct

SEQ ID NO: 1830664 - DNA, 25 bp, Homo sapien
cttcctgctccctgattgggtgtct

SEQ ID NO: 1830665 - DNA, 25 bp, Homo sapien
cctgattgggtgtctcgctggctgt

SEQ ID NO: 1830666 - DNA, 25 bp, Homo sapien
tgctccctgattgggtgtctcgctg

SEQ ID NO: 1830667 - DNA, 25 bp, Homo sapien
gcagccactcggacactggttttcc

SEQ ID NO: 1830668 - DNA, 25 bp, Homo sapien
cctggtgtggaatgataaggcggcc

SEQ ID NO: 1830669 - DNA, 25 bp, Homo sapien
taaggacaactcaaggatgctggct

SEQ ID NO: 1830670 - DNA, 25 bp, Homo sapien
taagaagtaaggacaactcaaggat

SEQ ID NO: 1830671 - DNA, 25 bp, Homo sapien
gtgcatctggacagctttaccccaa

SEQ ID NO: 1830672 - DNA, 25 bp, Homo sapien
ctggacagctttaccccaagggcac

SEQ ID NO: 1830673 - DNA, 25 bp, Homo sapien
tctggacagctttaccccaagggca

SEQ ID NO: 1830674 - DNA, 25 bp, Homo sapien
catctggacagctttaccccaaggg

SEQ ID NO: 1830675 - DNA, 25 bp, Homo sapien
tgcaaggtagtaggagcagatgagg

SEQ ID NO: 1830676 - DNA, 25 bp, Homo sapien
ctcactgggacctgggacagcatga

SEQ ID NO: 1830677 - DNA, 25 bp, Homo sapien
actgggacctgggacagcatgattc

SEQ ID NO: 1830678 - DNA, 25 bp, Homo sapien
ggacctgggacagcatgattcttac

SEQ ID NO: 1830679 - DNA, 25 bp, Homo sapien
tgggacctgggacagcatgattctt

SEQ ID NO: 1830680 - DNA, 25 bp, Homo sapien
tcgagccaggcgtccgctaaaggca

SEQ ID NO: 1830681 - DNA, 25 bp, Homo sapien
gtcttgggccctcgagccaggcgtc

SEQ ID NO: 1830682 - DNA, 25 bp, Homo sapien
gtccgctaaaggcaggtctgaggtt

SEQ ID NO: 1830683 - DNA, 25 bp, Homo sapien
agtttctgagagcttgaggtcttgg

SEQ ID NO: 1830684 - DNA, 25 bp, Homo sapien
ccttatcttgtcctctcatggataa

SEQ ID NO: 1830685 - DNA, 25 bp, Homo sapien
tatcttgtcctctcatggataaggc

SEQ ID NO: 1830686 - DNA, 25 bp, Homo sapien
ctccttatcttgtcctctcatggat

SEQ ID NO: 1830687 - DNA, 25 bp, Homo sapien
tcatggataaggcttcgtaaagggg

SEQ ID NO: 1830688 - DNA, 25 bp, Homo sapien
gaggaaaacggaagtctgactgtta

SEQ ID NO: 1830689 - DNA, 25 bp, Homo sapien
tggaaatacacactcaagccactgc

SEQ ID NO: 1830690 - DNA, 25 bp, Homo sapien
ttagatgtgggaatcagatgttttc

SEQ ID NO: 1830691 - DNA, 25 bp, Homo sapien
cacatgtatggtgcatatcataaca

SEQ ID NO: 1830692 - DNA, 25 bp, Homo sapien
ctcactgtgacctccgactcctggg

SEQ ID NO: 1830693 - DNA, 25 bp, Homo sapien
ctgggattacaagcatgagccatca

SEQ ID NO: 1830694 - DNA, 25 bp, Homo sapien
tcactgtgacctccgactcctgggt

SEQ ID NO: 1830695 - DNA, 25 bp, Homo sapien
actcctgggttcaagtgattctcct

SEQ ID NO: 1830696 - DNA, 25 bp, Homo sapien
cagcatcaccattcaatagacaaaa

SEQ ID NO: 1830697 - DNA, 25 bp, Homo sapien
taccagtttccatgatacatacatc

SEQ ID NO: 1830698 - DNA, 25 bp, Homo sapien
tttctctaccagtttccatgataca

SEQ ID NO: 1830699 - DNA, 25 bp, Homo sapien
aaattatcattatcaaagcggccaa

SEQ ID NO: 1830700 - DNA, 25 bp, Homo sapien
ttggtgacaattggtgcactcagct

SEQ ID NO: 1830701 - DNA, 25 bp, Homo sapien
caattggtgcactcagctctacctc

SEQ ID NO: 1830702 - DNA, 25 bp, Homo sapien
ggtgacaattggtgcactcagctct

SEQ ID NO: 1830703 - DNA, 25 bp, Homo sapien
gacaattggtgcactcagctctacc

SEQ ID NO: 1830704 - DNA, 25 bp, Homo sapien
cacggcaagggcgttagctgcaaga

SEQ ID NO: 1830705 - DNA, 25 bp, Homo sapien
ctcagagcccagacaatagcactaa

SEQ ID NO: 1830706 - DNA, 25 bp, Homo sapien
tcacagacctgcttcagtctcagag

SEQ ID NO: 1830707 - DNA, 25 bp, Homo sapien
taggagataacgcagctcagtgggt

SEQ ID NO: 1830708 - DNA, 25 bp, Homo sapien
tgagtaaagtctttgtatatgcaaa

SEQ ID NO: 1830709 - DNA, 25 bp, Homo sapien
gaaatatgagtaaagtctttgtata

SEQ ID NO: 1830710 - DNA, 25 bp, Homo sapien
tatgagtaaagtctttgtatatgca

SEQ ID NO: 1830711 - DNA, 25 bp, Homo sapien
ctgaaatatgagtaaagtctttgta

SEQ ID NO: 1830712 - DNA, 25 bp, Homo sapien
cacagtccgtgcaagggaaacgcgg

SEQ ID NO: 1830713 - DNA, 25 bp, Homo sapien
gtccgtgcaagggaaacgcggctcc

SEQ ID NO: 1830714 - DNA, 25 bp, Homo sapien
gcagcacagtccgtgcaagggaaac

SEQ ID NO: 1830715 - DNA, 25 bp, Homo sapien
cgtgcaagggaaacgcggctcccta

SEQ ID NO: 1830716 - DNA, 25 bp, Homo sapien
aataaaagtcactcgcccgtggaga

SEQ ID NO: 1830717 - DNA, 25 bp, Homo sapien
actcgcccgtggagatcaccgaaca

SEQ ID NO: 1830718 - DNA, 25 bp, Homo sapien
tgaattgacaccacgggcacttcca

SEQ ID NO: 1830719 - DNA, 25 bp, Homo sapien
ggagatcaccgaacacctgaattga

SEQ ID NO: 1830720 - DNA, 25 bp, Homo sapien
tatggagtattcaccatactgacag

SEQ ID NO: 1830721 - DNA, 25 bp, Homo sapien
tctccaaggctatgtgtggtggcac

SEQ ID NO: 1830722 - DNA, 25 bp, Homo sapien
gaagctttgaaaacagactccacca

SEQ ID NO: 1830723 - DNA, 25 bp, Homo sapien
catactgacagtctaataccactcc

SEQ ID NO: 1830724 - DNA, 25 bp, Homo sapien
gtgcaccagaagcagcaacgccctg

SEQ ID NO: 1830725 - DNA, 25 bp, Homo sapien
ctcctggatcatccaagaccaggca

SEQ ID NO: 1830726 - DNA, 25 bp, Homo sapien
ggcattcaggaggtgcaccagaagc

SEQ ID NO: 1830727 - DNA, 25 bp, Homo sapien
cagcaacgccctgcaaatctctcct

SEQ ID NO: 1830728 - DNA, 25 bp, Homo sapien
gaatctacttcctctcgtgcgatta

SEQ ID NO: 1830729 - DNA, 25 bp, Homo sapien
taaatgcggttgctctctcagtgct

SEQ ID NO: 1830730 - DNA, 25 bp, Homo sapien
accagtgaagtgatgcccgatgaca

SEQ ID NO: 1830731 - DNA, 25 bp, Homo sapien
caatacgcttgaagaagaagttctg

SEQ ID NO: 1830732 - DNA, 25 bp, Homo sapien
gactctttcactatgctccagtatg

SEQ ID NO: 1830733 - DNA, 25 bp, Homo sapien
tgtgtttcaagaccatccgtgcagg

SEQ ID NO: 1830734 - DNA, 25 bp, Homo sapien
cagcagcactaagtttgaagcttca

SEQ ID NO: 1830735 - DNA, 25 bp, Homo sapien
tccgtgcaggctgaaatccactctt

SEQ ID NO: 1830736 - DNA, 25 bp, Homo sapien
ccacaagtgacagattgaggactcc

SEQ ID NO: 1830737 - DNA, 25 bp, Homo sapien
aaagcagaccggttatcacatggaa

SEQ ID NO: 1830738 - DNA, 25 bp, Homo sapien
gagcccatcctaaaatatgtacgtg

SEQ ID NO: 1830739 - DNA, 25 bp, Homo sapien
tctggcaggtattccacaatcatga

SEQ ID NO: 1830740 - DNA, 25 bp, Homo sapien
ggtaagccaacacagagaagccagg

SEQ ID NO: 1830741 - DNA, 25 bp, Homo sapien
caaatggaactcagcagtcagcaaa

SEQ ID NO: 1830742 - DNA, 25 bp, Homo sapien
tggtaccccaatatcactaagtggc

SEQ ID NO: 1830743 - DNA, 25 bp, Homo sapien
tgtatcacggtggtttgttgtaccc

SEQ ID NO: 1830744 - DNA, 25 bp, Homo sapien
tactgaacattagtaagccaaaggc

SEQ ID NO: 1830745 - DNA, 25 bp, Homo sapien
gacagcctggttacaaatgattaaa

SEQ ID NO: 1830746 - DNA, 25 bp, Homo sapien
cagagtctattaacattcccaagag

SEQ ID NO: 1830747 - DNA, 25 bp, Homo sapien
cagtcttaattcgaacaatcaaggg

SEQ ID NO: 1830748 - DNA, 25 bp, Homo sapien
tgtgaaattcagaggcacacaactc

SEQ ID NO: 1830749 - DNA, 25 bp, Homo sapien
gaaaggctggctctgatggcaaaac

SEQ ID NO: 1830750 - DNA, 25 bp, Homo sapien
tgtagaccaaagagatcattcactg

SEQ ID NO: 1830751 - DNA, 25 bp, Homo sapien
ttttggtagaaagctgcagcccagc

SEQ ID NO: 1830752 - DNA, 25 bp, Homo sapien
cattgcatggcaaaaatgcacatta

SEQ ID NO: 1830753 - DNA, 25 bp, Homo sapien
agtctcttcattttgccattgcatg

SEQ ID NO: 1830754 - DNA, 25 bp, Homo sapien
cattaacttaactcttctatggcag

SEQ ID NO: 1830755 - DNA, 25 bp, Homo sapien
aattcttactaacaatgccacatag

SEQ ID NO: 1830756 - DNA, 25 bp, Homo sapien
gacttacatgtttgaggatttccca

SEQ ID NO: 1830757 - DNA, 25 bp, Homo sapien
cattgcccatgataagccagtgaca

SEQ ID NO: 1830758 - DNA, 25 bp, Homo sapien
taatttatcaggacccttagtcaca

SEQ ID NO: 1830759 - DNA, 25 bp, Homo sapien
ggatcagctacttgaaacctcccag

SEQ ID NO: 1830760 - DNA, 25 bp, Homo sapien
ttgtctaactgaaacgtctgtaccg

SEQ ID NO: 1830761 - DNA, 25 bp, Homo sapien
taccgtttgatcaaccaaagatggc

SEQ ID NO: 1830762 - DNA, 25 bp, Homo sapien
taataatcctgtacaatgggtctca

SEQ ID NO: 1830763 - DNA, 25 bp, Homo sapien
ccattacaagagaggaagatgacac

SEQ ID NO: 1830764 - DNA, 25 bp, Homo sapien
cattgtaagtgtcgcagaaatatcc

SEQ ID NO: 1830765 - DNA, 25 bp, Homo sapien
catcgtgtatcatggcaaagctccc

SEQ ID NO: 1830766 - DNA, 25 bp, Homo sapien
tacggcatccatgggacaagctaag

SEQ ID NO: 1830767 - DNA, 25 bp, Homo sapien
gagcgagacctgaccatactgtggg

SEQ ID NO: 1830768 - DNA, 25 bp, Homo sapien
atctgtatgattactttgggttctc

SEQ ID NO: 1830769 - DNA, 25 bp, Homo sapien
cacagtcacaaattaactatatggc

SEQ ID NO: 1830770 - DNA, 25 bp, Homo sapien
tctaccttagcagccatatcacagt

SEQ ID NO: 1830771 - DNA, 25 bp, Homo sapien
tcaagtcagatataggtaggtacaa

SEQ ID NO: 1830772 - DNA, 25 bp, Homo sapien
ggctcttgggcaccatggctcttgg

SEQ ID NO: 1830773 - DNA, 25 bp, Homo sapien
tggtggctcttgggcaccatggctc

SEQ ID NO: 1830774 - DNA, 25 bp, Homo sapien
cacccactgaagtggtggctcttgg

SEQ ID NO: 1830775 - DNA, 25 bp, Homo sapien
gaagtggtggctcttgggcaccatg

SEQ ID NO: 1830776 - DNA, 25 bp, Homo sapien
gctctatggagactatgatgggcat

SEQ ID NO: 1830777 - DNA, 25 bp, Homo sapien
ggctctatggagactatgatgggca

SEQ ID NO: 1830778 - DNA, 25 bp, Homo sapien
cacactggctaggtggagagagcta

SEQ ID NO: 1830779 - DNA, 25 bp, Homo sapien
cagaggctgtggcatcgagaagaat

SEQ ID NO: 1830780 - DNA, 25 bp, Homo sapien
cttttgaggcatcaggacgctacta

SEQ ID NO: 1830781 - DNA, 25 bp, Homo sapien
caagacaagtagataggacagaggc

SEQ ID NO: 1830782 - DNA, 25 bp, Homo sapien
tcaaataatgctttcccaattaaaa

SEQ ID NO: 1830783 - DNA, 25 bp, Homo sapien
caaactggcgatctggacaggctct

SEQ ID NO: 1830784 - DNA, 25 bp, Homo sapien
ggacttggggatgtacttctctgca

SEQ ID NO: 1830785 - DNA, 25 bp, Homo sapien
caactcttgaagaatagtattggca

SEQ ID NO: 1830786 - DNA, 25 bp, Homo sapien
tctttggagcaaggtgctcaactct

SEQ ID NO: 1830787 - DNA, 25 bp, Homo sapien
gagatagctgctgaatcctggccat

SEQ ID NO: 1830788 - DNA, 25 bp, Homo sapien
gcagaagtcctgagatagctgctga

SEQ ID NO: 1830789 - DNA, 25 bp, Homo sapien
caggagatcagattgtctggggcca

SEQ ID NO: 1830790 - DNA, 25 bp, Homo sapien
ggggccaagcagaagtcctgagata

SEQ ID NO: 1830791 - DNA, 25 bp, Homo sapien
gcgctcaggcgatggagcacctatg

SEQ ID NO: 1830792 - DNA, 25 bp, Homo sapien
gcacctatgctctgggacaagcatg

SEQ ID NO: 1830793 - DNA, 25 bp, Homo sapien
catggccactgtccagctaagcaag

SEQ ID NO: 1830794 - DNA, 25 bp, Homo sapien
taacaacagactagcccagggaatg

SEQ ID NO: 1830795 - DNA, 25 bp, Homo sapien
ggactatggtctctttcaccatgac

SEQ ID NO: 1830796 - DNA, 25 bp, Homo sapien
ggtgcaaaaggagggcttctagttc

SEQ ID NO: 1830797 - DNA, 25 bp, Homo sapien
caattctctgacgtgcaaaggtata

SEQ ID NO: 1830798 - DNA, 25 bp, Homo sapien
caaaggtatagactacagttggcaa

SEQ ID NO: 1830799 - DNA, 25 bp, Homo sapien
gagccaagcagcttcactaaatgtt

SEQ ID NO: 1830800 - DNA, 25 bp, Homo sapien
caagcatgatgacttcacgttcaaa

SEQ ID NO: 1830801 - DNA, 25 bp, Homo sapien
cacatgcctcagactggaagttcag

SEQ ID NO: 1830802 - DNA, 25 bp, Homo sapien
tcagctctcccaactgattggtgag

SEQ ID NO: 1830803 - DNA, 25 bp, Homo sapien
tattactccgatactgcgtgttttc

SEQ ID NO: 1830804 - DNA, 25 bp, Homo sapien
gatactgcgtgttttcattccagag

SEQ ID NO: 1830805 - DNA, 25 bp, Homo sapien
atttattactccgatactgcgtgtt

SEQ ID NO: 1830806 - DNA, 25 bp, Homo sapien
gtgattgttaatttgttattgcgag

SEQ ID NO: 1830807 - DNA, 25 bp, Homo sapien
atctgggatgtaggacagaaaccag

SEQ ID NO: 1830808 - DNA, 25 bp, Homo sapien
catatgcctggtattttgccctaaa

SEQ ID NO: 1830809 - DNA, 25 bp, Homo sapien
actccaaaggagaatggtaatatca

SEQ ID NO: 1830810 - DNA, 25 bp, Homo sapien
aacaaacaggatatgtatgggcaac

SEQ ID NO: 1830811 - DNA, 25 bp, Homo sapien
aaatggcttaaccagggagatgtgg

SEQ ID NO: 1830812 - DNA, 25 bp, Homo sapien
gcaatgcaacttaaatgaggcaata

SEQ ID NO: 1830813 - DNA, 25 bp, Homo sapien
agcaatgcaacttaaatgaggcaat

SEQ ID NO: 1830814 - DNA, 25 bp, Homo sapien
ataaaccagagcgaccaagggctgc

SEQ ID NO: 1830815 - DNA, 25 bp, Homo sapien
tactttagagtactcaaacacggct

SEQ ID NO: 1830816 - DNA, 25 bp, Homo sapien
tgagacaatggactaactgcaacaa

SEQ ID NO: 1830817 - DNA, 25 bp, Homo sapien
tagcaggaggaacctaatcccagga

SEQ ID NO: 1830818 - DNA, 25 bp, Homo sapien
gaagaacaggctccctgcattgtgg

SEQ ID NO: 1830819 - DNA, 25 bp, Homo sapien
gacacaggtggtaggcaatagagta

SEQ ID NO: 1830820 - DNA, 25 bp, Homo sapien
tgcaagttctacaatgacacaggtg

SEQ ID NO: 1830821 - DNA, 25 bp, Homo sapien
gtgactgacacatcctaaatcctca

SEQ ID NO: 1830822 - DNA, 25 bp, Homo sapien
ttcatcagcatttcgggtacatacg

SEQ ID NO: 1830823 - DNA, 25 bp, Homo sapien
tgcatattccaggtataaatcccct

SEQ ID NO: 1830824 - DNA, 25 bp, Homo sapien
catgtgtctgcacgtatatcgcaaa

SEQ ID NO: 1830825 - DNA, 25 bp, Homo sapien
gtacatacgaacagctccccaaagc

SEQ ID NO: 1830826 - DNA, 25 bp, Homo sapien
tacatttgcagcgaatccaggacca

SEQ ID NO: 1830827 - DNA, 25 bp, Homo sapien
tgacatggcaagacccttagaaggg

SEQ ID NO: 1830828 - DNA, 25 bp, Homo sapien
ggaatgccagcagccttaagcacag

SEQ ID NO: 1830829 - DNA, 25 bp, Homo sapien
gaagtaaagttcctgacccacagca

SEQ ID NO: 1830830 - DNA, 25 bp, Homo sapien
caaaagcggtcggaaacagacgtca

SEQ ID NO: 1830831 - DNA, 25 bp, Homo sapien
gactatgcctgtgagctaatgccaa

SEQ ID NO: 1830832 - DNA, 25 bp, Homo sapien
cattaatgactaagcctgcgccagc

SEQ ID NO: 1830833 - DNA, 25 bp, Homo sapien
agtattattactgcaggcactggcc

SEQ ID NO: 1830834 - DNA, 25 bp, Homo sapien
agctactccatcaccaagcaaaagt

SEQ ID NO: 1830835 - DNA, 25 bp, Homo sapien
ctccatcaccaagcaaaagtccctg

SEQ ID NO: 1830836 - DNA, 25 bp, Homo sapien
gctactccatcaccaagcaaaagtc

SEQ ID NO: 1830837 - DNA, 25 bp, Homo sapien
ggaattgcacatacccaagggattg

SEQ ID NO: 1830838 - DNA, 25 bp, Homo sapien
cttcggaaacgcaaataatttctgg

SEQ ID NO: 1830839 - DNA, 25 bp, Homo sapien
tggagaagagagctgaactacaagt

SEQ ID NO: 1830840 - DNA, 25 bp, Homo sapien
tgtcttttcatcctacaacttcgga

SEQ ID NO: 1830841 - DNA, 25 bp, Homo sapien
cttgcatcctcttctcgatttccgt

SEQ ID NO: 1830842 - DNA, 25 bp, Homo sapien
gccaggctagggcacgaatagtaaa

SEQ ID NO: 1830843 - DNA, 25 bp, Homo sapien
gcatcctcttctcgatttccgtggg

SEQ ID NO: 1830844 - DNA, 25 bp, Homo sapien
cgaatagtaaatcttgcatcctctt

SEQ ID NO: 1830845 - DNA, 25 bp, Homo sapien
cagaaatgcaatctagtcagcagag

SEQ ID NO: 1830846 - DNA, 25 bp, Homo sapien
ctagtcagcagagctcaactcaagt

SEQ ID NO: 1830847 - DNA, 25 bp, Homo sapien
gtcagcagagctcaactcaagtgat

SEQ ID NO: 1830848 - DNA, 25 bp, Homo sapien
cgtgcattggcttgttatgtcccag

SEQ ID NO: 1830849 - DNA, 25 bp, Homo sapien
cctggtgacttgatgcacgatgctc

SEQ ID NO: 1830850 - DNA, 25 bp, Homo sapien
gcttgaatggaccaccctggtgact

SEQ ID NO: 1830851 - DNA, 25 bp, Homo sapien
gaggagattgctgtacaaggatgac

SEQ ID NO: 1830852 - DNA, 25 bp, Homo sapien
catgtgatgcacttccctgtagtgg

SEQ ID NO: 1830853 - DNA, 25 bp, Homo sapien
tggtcgagggagtgcaggagaggaa

SEQ ID NO: 1830854 - DNA, 25 bp, Homo sapien
gtcgagggagtgcaggagaggaaat

SEQ ID NO: 1830855 - DNA, 25 bp, Homo sapien
ctgcaatggtcgagggagtgcagga

SEQ ID NO: 1830856 - DNA, 25 bp, Homo sapien
caatggtcgagggagtgcaggagag

SEQ ID NO: 1830857 - DNA, 25 bp, Homo sapien
catcagggagcttggtgcttgtagt

SEQ ID NO: 1830858 - DNA, 25 bp, Homo sapien
atcagggagcttggtgcttgtagta

SEQ ID NO: 1830859 - DNA, 25 bp, Homo sapien
ggagcttggtgcttgtagtagtttt

SEQ ID NO: 1830860 - DNA, 25 bp, Homo sapien
cttggtgcttgtagtagtttttgtg

SEQ ID NO: 1830861 - DNA, 25 bp, Homo sapien
ggcaacacatctcggtactcatgat

SEQ ID NO: 1830862 - DNA, 25 bp, Homo sapien
ttatccttgggtacatggcaacaca

SEQ ID NO: 1830863 - DNA, 25 bp, Homo sapien
tctccaatgtgaataatccgtaaac

SEQ ID NO: 1830864 - DNA, 25 bp, Homo sapien
taaacaggtaagtgagccaattatc

SEQ ID NO: 1830865 - DNA, 25 bp, Homo sapien
tcctcctagtttgctgaagtgcaga

SEQ ID NO: 1830866 - DNA, 25 bp, Homo sapien
tcctagtttgctgaagtgcagagga

SEQ ID NO: 1830867 - DNA, 25 bp, Homo sapien
agtccaagttacaacctcctcctag

SEQ ID NO: 1830868 - DNA, 25 bp, Homo sapien
tttatagagtccaagttacaacctc

SEQ ID NO: 1830869 - DNA, 25 bp, Homo sapien
tccaaaagcaccatgcactatcagt

SEQ ID NO: 1830870 - DNA, 25 bp, Homo sapien
tttgcttagccagctttatcagtgg

SEQ ID NO: 1830871 - DNA, 25 bp, Homo sapien
gctttatcagtggtgccctaatgca

SEQ ID NO: 1830872 - DNA, 25 bp, Homo sapien
attgtccaaaagcaccatgcactat

SEQ ID NO: 1830873 - DNA, 25 bp, Homo sapien
ctagctataggcctctatcgtttct

SEQ ID NO: 1830874 - DNA, 25 bp, Homo sapien
gctataggcctctatcgtttctcgc

SEQ ID NO: 1830875 - DNA, 25 bp, Homo sapien
tataggcctctatcgtttctcgctt

SEQ ID NO: 1830876 - DNA, 25 bp, Homo sapien
taggcctctatcgtttctcgcttag

SEQ ID NO: 1830877 - DNA, 25 bp, Homo sapien
tcaaatcacagccaatagatccaaa

SEQ ID NO: 1830878 - DNA, 25 bp, Homo sapien
gaatgtctgcctactgtcagtacca

SEQ ID NO: 1830879 - DNA, 25 bp, Homo sapien
ccagtttttgttatgatggctgtca

SEQ ID NO: 1830880 - DNA, 25 bp, Homo sapien
tttagaaatccagccatcgctatgg

SEQ ID NO: 1830881 - DNA, 25 bp, Homo sapien
cgctagccgttatggtgcaatccct

SEQ ID NO: 1830882 - DNA, 25 bp, Homo sapien
gattaaatgccacagcgctagccgt

SEQ ID NO: 1830883 - DNA, 25 bp, Homo sapien
caagtccatttatttgcggagctgc

SEQ ID NO: 1830884 - DNA, 25 bp, Homo sapien
gcggagctgctaaaatattgactga

SEQ ID NO: 1830885 - DNA, 25 bp, Homo sapien
tgtgactactagattgccaaaggag

SEQ ID NO: 1830886 - DNA, 25 bp, Homo sapien
tgtggatctcgcagggaagctaaga

SEQ ID NO: 1830887 - DNA, 25 bp, Homo sapien
ggagtccctactgcacagcatacgg

SEQ ID NO: 1830888 - DNA, 25 bp, Homo sapien
cagaaccagtttggaggagtcccta

SEQ ID NO: 1830889 - DNA, 25 bp, Homo sapien
gctgcagagtcagccaagtagccaa

SEQ ID NO: 1830890 - DNA, 25 bp, Homo sapien
gaaagcacaagccacggagtttaag

SEQ ID NO: 1830891 - DNA, 25 bp, Homo sapien
ttctggcagagtctcgatcaccacc

SEQ ID NO: 1830892 - DNA, 25 bp, Homo sapien
ccctacgtggtctgaaacaaaatga

SEQ ID NO: 1830893 - DNA, 25 bp, Homo sapien
ctagcccggcgggcgcccacccagc

SEQ ID NO: 1830894 - DNA, 25 bp, Homo sapien
gcgcgccccctagcccggcgggcgc

SEQ ID NO: 1830895 - DNA, 25 bp, Homo sapien
cagcagccgggggagcggggcgccg

SEQ ID NO: 1830896 - DNA, 25 bp, Homo sapien
ccgccgccgctctccccgcccgcgc

SEQ ID NO: 1830897 - DNA, 25 bp, Homo sapien
aaacaatgtcttgcggctgctgttg

SEQ ID NO: 1830898 - DNA, 25 bp, Homo sapien
aaagtgtaaatggatctggggttgc

SEQ ID NO: 1830899 - DNA, 25 bp, Homo sapien
agagaaacaatgtcttgcggctgct

SEQ ID NO: 1830900 - DNA, 25 bp, Homo sapien
gctccacggggcttgttttggatcc

SEQ ID NO: 1830901 - DNA, 25 bp, Homo sapien
actgtagtagaaatgatgtctgcgg

SEQ ID NO: 1830902 - DNA, 25 bp, Homo sapien
tgaaacaggtcctgtacggctccgc

SEQ ID NO: 1830903 - DNA, 25 bp, Homo sapien
tacggctccgccactgtagtagaaa

SEQ ID NO: 1830904 - DNA, 25 bp, Homo sapien
tgatgtctgcggtatactctgctct

SEQ ID NO: 1830905 - DNA, 25 bp, Homo sapien
ggcgagccgcacagagcacggcgag

SEQ ID NO: 1830906 - DNA, 25 bp, Homo sapien
cccggcgagccgcacagagcacggc

SEQ ID NO: 1830907 - DNA, 25 bp, Homo sapien
agagcacggcgagcgcaccgcgcgg

SEQ ID NO: 1830908 - DNA, 25 bp, Homo sapien
agccgcacagagcacggcgagcgca

SEQ ID NO: 1830909 - DNA, 25 bp, Homo sapien
ccggaaatcggctttgatatggaac

SEQ ID NO: 1830910 - DNA, 25 bp, Homo sapien
tttctctcttcgcacgcaggtccgg

SEQ ID NO: 1830911 - DNA, 25 bp, Homo sapien
gattgcctctgcgtgcaactccgga

SEQ ID NO: 1830912 - DNA, 25 bp, Homo sapien
tgatatggaactactccgctctagc

SEQ ID NO: 1830913 - DNA, 25 bp, Homo sapien
acctggaggactaggaggcgcctcc

SEQ ID NO: 1830914 - DNA, 25 bp, Homo sapien
tcttcttcggatgggtgcaccttgc

SEQ ID NO: 1830915 - DNA, 25 bp, Homo sapien
gcctccagactaagggcgctcagtg

SEQ ID NO: 1830916 - DNA, 25 bp, Homo sapien
tgcagatgattctggaaggccggta

SEQ ID NO: 1830917 - DNA, 25 bp, Homo sapien
agactctgaggtcagctcaccacac

SEQ ID NO: 1830918 - DNA, 25 bp, Homo sapien
tgtgcgtgtcaccaagactcttaaa

SEQ ID NO: 1830919 - DNA, 25 bp, Homo sapien
gactcttaaaagacatacttctgaa

SEQ ID NO: 1830920 - DNA, 25 bp, Homo sapien
cccagactaaagtcactgggctctg

SEQ ID NO: 1830921 - DNA, 25 bp, Homo sapien
agagttctagaaccgcctcctcgtc

SEQ ID NO: 1830922 - DNA, 25 bp, Homo sapien
gcctcagagagcacaagtacattac

SEQ ID NO: 1830923 - DNA, 25 bp, Homo sapien
gcgtcagctggtgtcggcgtcctcc

SEQ ID NO: 1830924 - DNA, 25 bp, Homo sapien
cattacactcctgcacggggcgtca

SEQ ID NO: 1830925 - DNA, 25 bp, Homo sapien
tagacacccactaaataggcattga

SEQ ID NO: 1830926 - DNA, 25 bp, Homo sapien
cacactcaggctttgcagatgtcat

SEQ ID NO: 1830927 - DNA, 25 bp, Homo sapien
gcttggagtttaaaggacctgccca

SEQ ID NO: 1830928 - DNA, 25 bp, Homo sapien
agttatccacctatgcagcttgaga

SEQ ID NO: 1830929 - DNA, 25 bp, Homo sapien
gtgtcatcatcgtagccattcacag

SEQ ID NO: 1830930 - DNA, 25 bp, Homo sapien
tcactgtgtcatcatcgtagccatt

SEQ ID NO: 1830931 - DNA, 25 bp, Homo sapien
gtcatcatcgtagccattcacagtc

SEQ ID NO: 1830932 - DNA, 25 bp, Homo sapien
ttgtccaatctccaaccatcctccc

SEQ ID NO: 1830933 - DNA, 25 bp, Homo sapien
ccgtgctggattttgagtattgtca

SEQ ID NO: 1830934 - DNA, 25 bp, Homo sapien
tgggaagcaggatgtgatttcctac

SEQ ID NO: 1830935 - DNA, 25 bp, Homo sapien
ctggaaccgtgctggattttgagta

SEQ ID NO: 1830936 - DNA, 25 bp, Homo sapien
actgtgactagactgaccacctgga

SEQ ID NO: 1830937 - DNA, 25 bp, Homo sapien
cagcaggctatgtgcaaacctccag

SEQ ID NO: 1830938 - DNA, 25 bp, Homo sapien
tgtccagtgtgacaccctccggtgt

SEQ ID NO: 1830939 - DNA, 25 bp, Homo sapien
tcttgtggctaatccagtaaaagct

SEQ ID NO: 1830940 - DNA, 25 bp, Homo sapien
tccggtgtcccatgacttgtctggg

SEQ ID NO: 1830941 - DNA, 25 bp, Homo sapien
gcttttatatattccctgagggctg

SEQ ID NO: 1830942 - DNA, 25 bp, Homo sapien
gtgacagtatcatatgcatccacat

SEQ ID NO: 1830943 - DNA, 25 bp, Homo sapien
ggctgcctagctcttcttgtgacag

SEQ ID NO: 1830944 - DNA, 25 bp, Homo sapien
tgcatgaagaggcttcccctctgtt

SEQ ID NO: 1830945 - DNA, 25 bp, Homo sapien
gaacccacttaatgtccttccagat

SEQ ID NO: 1830946 - DNA, 25 bp, Homo sapien
tgaaatatcgatgttctagcagcca

SEQ ID NO: 1830947 - DNA, 25 bp, Homo sapien
ggatcaaagggagatccatctggaa

SEQ ID NO: 1830948 - DNA, 25 bp, Homo sapien
tgggtgttctcctgtccatatcgat

SEQ ID NO: 1830949 - DNA, 25 bp, Homo sapien
gacaccgtgatactatttcagactg

SEQ ID NO: 1830950 - DNA, 25 bp, Homo sapien
tgtccgacactgtctcatatgaggg

SEQ ID NO: 1830951 - DNA, 25 bp, Homo sapien
cagtccagtgtctgcaactgtccga

SEQ ID NO: 1830952 - DNA, 25 bp, Homo sapien
gggacatcacgggaatcttccggca

SEQ ID NO: 1830953 - DNA, 25 bp, Homo sapien
tcatgtagtactggatctctgttcc

SEQ ID NO: 1830954 - DNA, 25 bp, Homo sapien
tttcccatcccctacatccatattt

SEQ ID NO: 1830955 - DNA, 25 bp, Homo sapien
tgagtctgctacaccctgtcctttc

SEQ ID NO: 1830956 - DNA, 25 bp, Homo sapien
cttcctttgagtctgctacaccctg

SEQ ID NO: 1830957 - DNA, 25 bp, Homo sapien
ctagggccaagatgactcaggggtt

SEQ ID NO: 1830958 - DNA, 25 bp, Homo sapien
aaaagtttatcgaggagctgctcca

SEQ ID NO: 1830959 - DNA, 25 bp, Homo sapien
gacatctagtttctttgtccctgtg

SEQ ID NO: 1830960 - DNA, 25 bp, Homo sapien
gcaaaatatggacagacatctagtt

SEQ ID NO: 1830961 - DNA, 25 bp, Homo sapien
ccatctgccaggattgccttgcaaa

SEQ ID NO: 1830962 - DNA, 25 bp, Homo sapien
tcatgcgatgctaaacaccagactg

SEQ ID NO: 1830963 - DNA, 25 bp, Homo sapien
aagacagggcagagtttgggtttgg

SEQ ID NO: 1830964 - DNA, 25 bp, Homo sapien
taccaggagacttaagtcttgccac

SEQ ID NO: 1830965 - DNA, 25 bp, Homo sapien
aacaccagactgtttaccaggagac

SEQ ID NO: 1830966 - DNA, 25 bp, Homo sapien
gtgctcccgatctttgcccacagca

SEQ ID NO: 1830967 - DNA, 25 bp, Homo sapien
tgctcccgatctttgcccacagcag

SEQ ID NO: 1830968 - DNA, 25 bp, Homo sapien
gcttatttctagcacagcaagtgtc

SEQ ID NO: 1830969 - DNA, 25 bp, Homo sapien
gaccatttttatcgcctcggaaaga

SEQ ID NO: 1830970 - DNA, 25 bp, Homo sapien
gaggtttgctgcacgttccatgtaa

SEQ ID NO: 1830971 - DNA, 25 bp, Homo sapien
gcaagtgtccaagtacaattcaatg

SEQ ID NO: 1830972 - DNA, 25 bp, Homo sapien
ctcttaggaggatggaaatggttac

SEQ ID NO: 1830973 - DNA, 25 bp, Homo sapien
gatatgactactctatgagaacccc

SEQ ID NO: 1830974 - DNA, 25 bp, Homo sapien
caatgcgaagattgcaaaagctctt

SEQ ID NO: 1830975 - DNA, 25 bp, Homo sapien
aaatggttacatggttggatagagg

SEQ ID NO: 1830976 - DNA, 25 bp, Homo sapien
agttctttggtgttctttatttcag

SEQ ID NO: 1830977 - DNA, 25 bp, Homo sapien
ttctttatttcagacacagccaggc

SEQ ID NO: 1830978 - DNA, 25 bp, Homo sapien
tggtgttctttatttcagacacagc

SEQ ID NO: 1830979 - DNA, 25 bp, Homo sapien
ctatttctgaaaaagttctttggtg

SEQ ID NO: 1830980 - DNA, 25 bp, Homo sapien
gatgggcaaattcgactttccttta

SEQ ID NO: 1830981 - DNA, 25 bp, Homo sapien
gccagtaggtctgaatgctccttag

SEQ ID NO: 1830982 - DNA, 25 bp, Homo sapien
aataaatacatctttttgatcatgg

SEQ ID NO: 1830983 - DNA, 25 bp, Homo sapien
gtcttgaaacgtgttagccagccca

SEQ ID NO: 1830984 - DNA, 25 bp, Homo sapien
gtctgccatgccaacgtgacaccat

SEQ ID NO: 1830985 - DNA, 25 bp, Homo sapien
agactcaaccagtgtcggcattctg

SEQ ID NO: 1830986 - DNA, 25 bp, Homo sapien
cagtctctggacacctatttgaatc

SEQ ID NO: 1830987 - DNA, 25 bp, Homo sapien
acctttacaatcactcagactcaac

SEQ ID NO: 1830988 - DNA, 25 bp, Homo sapien
gaaccctttcttggcacattgctgg

SEQ ID NO: 1830989 - DNA, 25 bp, Homo sapien
cattgctggaccatggacttgatgc

SEQ ID NO: 1830990 - DNA, 25 bp, Homo sapien
ggaaaatcttccgagcctgagctgg

SEQ ID NO: 1830991 - DNA, 25 bp, Homo sapien
tatcagtgctctggtcagaaactcc

SEQ ID NO: 1830992 - DNA, 25 bp, Homo sapien
tgggagctgcatcgcctgttccgac

SEQ ID NO: 1830993 - DNA, 25 bp, Homo sapien
tgtgtgtggatgagcgacctctcgt

SEQ ID NO: 1830994 - DNA, 25 bp, Homo sapien
ttccagaggctcgagtaatctacgt

SEQ ID NO: 1830995 - DNA, 25 bp, Homo sapien
ctacgtgcagcacggaacctgggca

SEQ ID NO: 1830996 - DNA, 25 bp, Homo sapien
gtgctagcctcctgtgatccttcaa

SEQ ID NO: 1830997 - DNA, 25 bp, Homo sapien
aggcagtgtaatgtagcaaagtcat

SEQ ID NO: 1830998 - DNA, 25 bp, Homo sapien
tagcctcctgtgatccttcaagaaa

SEQ ID NO: 1830999 - DNA, 25 bp, Homo sapien
ttttgtgtgctagcctcctgtgatc

SEQ ID NO: 1831000 - DNA, 25 bp, Homo sapien
ttgtctggacaatagaaaggcagct

SEQ ID NO: 1831001 - DNA, 25 bp, Homo sapien
gatgactccaatcccacacttgcag

SEQ ID NO: 1831002 - DNA, 25 bp, Homo sapien
agctgtgtccatctttgtctggaca

SEQ ID NO: 1831003 - DNA, 25 bp, Homo sapien
ctctcgtaacttctggatgactcca

SEQ ID NO: 1831004 - DNA, 25 bp, Homo sapien
gcctctgagtttagaggagccaaag

SEQ ID NO: 1831005 - DNA, 25 bp, Homo sapien
tatgcctctgagtttagaggagcca

SEQ ID NO: 1831006 - DNA, 25 bp, Homo sapien
agtatgcctctgagtttagaggagc

SEQ ID NO: 1831007 - DNA, 25 bp, Homo sapien
ctaggagagtatgcctctgagttta

SEQ ID NO: 1831008 - DNA, 25 bp, Homo sapien
aaggctgcacagaagctataggctt

SEQ ID NO: 1831009 - DNA, 25 bp, Homo sapien
aggctgcacagaagctataggcttt

SEQ ID NO: 1831010 - DNA, 25 bp, Homo sapien
attaacttttgctgtgtttgcacac

SEQ ID NO: 1831011 - DNA, 25 bp, Homo sapien
cattaacttttgctgtgtttgcaca

SEQ ID NO: 1831012 - DNA, 25 bp, Homo sapien
tccataagaacaattctaccaccat

SEQ ID NO: 1831013 - DNA, 25 bp, Homo sapien
tctgagaaaattccataagaacaat

SEQ ID NO: 1831014 - DNA, 25 bp, Homo sapien
aattccataagaacaattctaccac

SEQ ID NO: 1831015 - DNA, 25 bp, Homo sapien
gaaaattccataagaacaattctac

SEQ ID NO: 1831016 - DNA, 25 bp, Homo sapien
cctgagttctactctgcgacttaat

SEQ ID NO: 1831017 - DNA, 25 bp, Homo sapien
tcagctcaatagttggatgcctcat

SEQ ID NO: 1831018 - DNA, 25 bp, Homo sapien
taatggaatcatcagctcaatagtt

SEQ ID NO: 1831019 - DNA, 25 bp, Homo sapien
tattgtagaataatctaatggaatc

SEQ ID NO: 1831020 - DNA, 25 bp, Homo sapien
catggtccacgttgcctcctggggc

SEQ ID NO: 1831021 - DNA, 25 bp, Homo sapien
atggtccacgttgcctcctggggct

SEQ ID NO: 1831022 - DNA, 25 bp, Homo sapien
tacagcaatctcaggctagcaaggg

SEQ ID NO: 1831023 - DNA, 25 bp, Homo sapien
tagcaagggctaggagctgttacca

SEQ ID NO: 1831024 - DNA, 25 bp, Homo sapien
tggctaggcccaaccaaaggacaga

SEQ ID NO: 1831025 - DNA, 25 bp, Homo sapien
gccaacttggtgaagcacagagcag

SEQ ID NO: 1831026 - DNA, 25 bp, Homo sapien
agctccggctggcatctatctggca

SEQ ID NO: 1831027 - DNA, 25 bp, Homo sapien
gcagagctccggctggcatctatct

SEQ ID NO: 1831028 - DNA, 25 bp, Homo sapien
acagcagagctccggctggcatcta

SEQ ID NO: 1831029 - DNA, 25 bp, Homo sapien
ctccggctggcatctatctggcagg

SEQ ID NO: 1831030 - DNA, 25 bp, Homo sapien
tatattcagttgtgtgacgtttttc

SEQ ID NO: 1831031 - DNA, 25 bp, Homo sapien
ctctgtaggtttgatttcggatagt

SEQ ID NO: 1831032 - DNA, 25 bp, Homo sapien
tacgcaaagtctaactgatcattaa

SEQ ID NO: 1831033 - DNA, 25 bp, Homo sapien
cattaatcttttcttacgcaaagtc

SEQ ID NO: 1831034 - DNA, 25 bp, Homo sapien
ccatcactaagaacaccacctggtt

SEQ ID NO: 1831035 - DNA, 25 bp, Homo sapien
aatgtctgagcaacatccccatcac

SEQ ID NO: 1831036 - DNA, 25 bp, Homo sapien
gtttgctgaagttacatcaatgtct

SEQ ID NO: 1831037 - DNA, 25 bp, Homo sapien
acatcaatgtctgagcaacatcccc

SEQ ID NO: 1831038 - DNA, 25 bp, Homo sapien
aataagcaagcatgtagaacaaatt

SEQ ID NO: 1831039 - DNA, 25 bp, Homo sapien
actggcttggttagatggaagtagc

SEQ ID NO: 1831040 - DNA, 25 bp, Homo sapien
agctaaacacaagtgtgtgcatcat

SEQ ID NO: 1831041 - DNA, 25 bp, Homo sapien
ccagcacctgagacagcagctagtg

SEQ ID NO: 1831042 - DNA, 25 bp, Homo sapien
gaaactcgtctccaggcactcatat

SEQ ID NO: 1831043 - DNA, 25 bp, Homo sapien
ttgtcagggcaggtagtgattttcc

SEQ ID NO: 1831044 - DNA, 25 bp, Homo sapien
agcccagtaaccaggcccatttgtc

SEQ ID NO: 1831045 - DNA, 25 bp, Homo sapien
ccaatatccaccattgtcagtcctg

SEQ ID NO: 1831046 - DNA, 25 bp, Homo sapien
gaaataggatcatcgctggccctgg

SEQ ID NO: 1831047 - DNA, 25 bp, Homo sapien
tgactcttcctaacggaaataggat

SEQ ID NO: 1831048 - DNA, 25 bp, Homo sapien
gcctggtggttgagtcctcagctag

SEQ ID NO: 1831049 - DNA, 25 bp, Homo sapien
aaagcatttgaatgttatctgagac

SEQ ID NO: 1831050 - DNA, 25 bp, Homo sapien
tcgactgtgggaacagcaagatgta

SEQ ID NO: 1831051 - DNA, 25 bp, Homo sapien
tcagtcctgtttcgactgtgggaac

SEQ ID NO: 1831052 - DNA, 25 bp, Homo sapien
agagtgagtcagtcctgtttcgact

SEQ ID NO: 1831053 - DNA, 25 bp, Homo sapien
agcaagatgtaaaaactgggccagt

SEQ ID NO: 1831054 - DNA, 25 bp, Homo sapien
gacatggacagcgaaggaagccatg

SEQ ID NO: 1831055 - DNA, 25 bp, Homo sapien
ttctctaaagccttcatggggagct

SEQ ID NO: 1831056 - DNA, 25 bp, Homo sapien
gaagccatgcgaagagaaaggcaga

SEQ ID NO: 1831057 - DNA, 25 bp, Homo sapien
gctgccacaagttgcggagtgctgg

SEQ ID NO: 1831058 - DNA, 25 bp, Homo sapien
tgcctctggtcagtactcccaaaag

SEQ ID NO: 1831059 - DNA, 25 bp, Homo sapien
gacactgcctctggtcagtactccc

SEQ ID NO: 1831060 - DNA, 25 bp, Homo sapien
ggtcagtactcccaaaaggacacac

SEQ ID NO: 1831061 - DNA, 25 bp, Homo sapien
tctggtcagtactcccaaaaggaca

SEQ ID NO: 1831062 - DNA, 25 bp, Homo sapien
tcttggacatgttgacgtaagccac

SEQ ID NO: 1831063 - DNA, 25 bp, Homo sapien
ggagaacctccttcaataccttatg

SEQ ID NO: 1831064 - DNA, 25 bp, Homo sapien
tctgggtctgatccctgaagacctt

SEQ ID NO: 1831065 - DNA, 25 bp, Homo sapien
cctgtagatacaccagatatctggg

SEQ ID NO: 1831066 - DNA, 25 bp, Homo sapien
tacagttgctagctgcagccctgga

SEQ ID NO: 1831067 - DNA, 25 bp, Homo sapien
tattcaccatagctgagcaatggag

SEQ ID NO: 1831068 - DNA, 25 bp, Homo sapien
cctctttctaacagcatagtgggaa

SEQ ID NO: 1831069 - DNA, 25 bp, Homo sapien
aatggattcggcagcttatctcaga

SEQ ID NO: 1831070 - DNA, 25 bp, Homo sapien
tatgtgaaaagattggagctaccgc

SEQ ID NO: 1831071 - DNA, 25 bp, Homo sapien
tggctacagtggtacaaggctggcc

SEQ ID NO: 1831072 - DNA, 25 bp, Homo sapien
gagctaccgcagagataacccgtat

SEQ ID NO: 1831073 - DNA, 25 bp, Homo sapien
tgagacaacgcaaagtagatactgg

SEQ ID NO: 1831074 - DNA, 25 bp, Homo sapien
cacttcctgagtggacaaggtgggt

SEQ ID NO: 1831075 - DNA, 25 bp, Homo sapien
caggtgtgagcaagtagaaacggtc

SEQ ID NO: 1831076 - DNA, 25 bp, Homo sapien
tatctatccccaaattcaatgccag

SEQ ID NO: 1831077 - DNA, 25 bp, Homo sapien
tctgagctggttgggtgatctgcct

SEQ ID NO: 1831078 - DNA, 25 bp, Homo sapien
acacaatcccagtattgatcagcat

SEQ ID NO: 1831079 - DNA, 25 bp, Homo sapien
ttcacagacacaatcccagtattga

SEQ ID NO: 1831080 - DNA, 25 bp, Homo sapien
cagacacaatcccagtattgatcag

SEQ ID NO: 1831081 - DNA, 25 bp, Homo sapien
cacagacacaatcccagtattgatc

SEQ ID NO: 1831082 - DNA, 25 bp, Homo sapien
tgggtcccggctggtgctgcgccgg

SEQ ID NO: 1831083 - DNA, 25 bp, Homo sapien
gctgcgccgggtccctaagactttg

SEQ ID NO: 1831084 - DNA, 25 bp, Homo sapien
tcgcgtcgtcccctctggaaagcaa

SEQ ID NO: 1831085 - DNA, 25 bp, Homo sapien
ccagcttgggtttcgttcggccgag

SEQ ID NO: 1831086 - DNA, 25 bp, Homo sapien
tacttcgaggtcttcggcgagatcg

SEQ ID NO: 1831087 - DNA, 25 bp, Homo sapien
gacgtacaccaagatcttcgtcggg

SEQ ID NO: 1831088 - DNA, 25 bp, Homo sapien
gccagcctgcgcaagtacttcgagg

SEQ ID NO: 1831089 - DNA, 25 bp, Homo sapien
gctatggatttgtaagttgcacgga

SEQ ID NO: 1831090 - DNA, 25 bp, Homo sapien
ccggggtgaactgaaactttgctag

SEQ ID NO: 1831091 - DNA, 25 bp, Homo sapien
ggagccccgcgggtagagcggcgct

SEQ ID NO: 1831092 - DNA, 25 bp, Homo sapien
ggtagagcggcgctgccccttcgct

SEQ ID NO: 1831093 - DNA, 25 bp, Homo sapien
gttcggagaagacccagcgctgtgc

SEQ ID NO: 1831094 - DNA, 25 bp, Homo sapien
ctggatgccggttgttaagcgcgct

SEQ ID NO: 1831095 - DNA, 25 bp, Homo sapien
acaattgcattcccgggctggatgc

SEQ ID NO: 1831096 - DNA, 25 bp, Homo sapien
tgttaagcgcgctgttgctttgtaa

SEQ ID NO: 1831097 - DNA, 25 bp, Homo sapien
gggccgcaaccctgaacaattgcat

SEQ ID NO: 1831098 - DNA, 25 bp, Homo sapien
ctgctgccgaaagggcctgcaagga

SEQ ID NO: 1831099 - DNA, 25 bp, Homo sapien
tgatggcagaaaggccaacgtgaac

SEQ ID NO: 1831100 - DNA, 25 bp, Homo sapien
atggctgaccgggctgctgccgaaa

SEQ ID NO: 1831101 - DNA, 25 bp, Homo sapien
cattgatggcagaaaggccaacgtg

SEQ ID NO: 1831102 - DNA, 25 bp, Homo sapien
cctttcagatctaactcaggtgaac

SEQ ID NO: 1831103 - DNA, 25 bp, Homo sapien
gagtagcgtcacactaactttcacc

SEQ ID NO: 1831104 - DNA, 25 bp, Homo sapien
taaaggttcaacaactctcatcaga

SEQ ID NO: 1831105 - DNA, 25 bp, Homo sapien
gattcattgcttgcatgtcctaagt

SEQ ID NO: 1831106 - DNA, 25 bp, Homo sapien
ccatgtggcttcagataagagagac

SEQ ID NO: 1831107 - DNA, 25 bp, Homo sapien
agaaagccgataagcaccaagaagg

SEQ ID NO: 1831108 - DNA, 25 bp, Homo sapien
taagagagacgaacatcaggacaat

SEQ ID NO: 1831109 - DNA, 25 bp, Homo sapien
cttcgtgaaggaagtagaagttgac

SEQ ID NO: 1831110 - DNA, 25 bp, Homo sapien
tggaaacccttgtcgcatgacagga

SEQ ID NO: 1831111 - DNA, 25 bp, Homo sapien
taaactggcataagagtaggctctc

SEQ ID NO: 1831112 - DNA, 25 bp, Homo sapien
ccagggacagtgtttcataaagcca

SEQ ID NO: 1831113 - DNA, 25 bp, Homo sapien
gacaggatcaaaaatagcccggctg

SEQ ID NO: 1831114 - DNA, 25 bp, Homo sapien
gggccaaagtccactaccctctgag

SEQ ID NO: 1831115 - DNA, 25 bp, Homo sapien
ttgatgacgtcgtttctcctggcac

SEQ ID NO: 1831116 - DNA, 25 bp, Homo sapien
tgggaaacatctacaagtctggtaa

SEQ ID NO: 1831117 - DNA, 25 bp, Homo sapien
tgaccacgcgcctggtttctgacaa

SEQ ID NO: 1831118 - DNA, 25 bp, Homo sapien
tgaaaggccactacgaaatgacgcc

SEQ ID NO: 1831119 - DNA, 25 bp, Homo sapien
tgacgccaggagtaacaacggaact

SEQ ID NO: 1831120 - DNA, 25 bp, Homo sapien
caatcccaaagagcctgagtaaatg

SEQ ID NO: 1831121 - DNA, 25 bp, Homo sapien
tactccaggtagtgttctagatgag

SEQ ID NO: 1831122 - DNA, 25 bp, Homo sapien
aaaggaactttagatgtgacactgt

SEQ ID NO: 1831123 - DNA, 25 bp, Homo sapien
taagttttactatgctgcactctaa

SEQ ID NO: 1831124 - DNA, 25 bp, Homo sapien
gacaacaaggttactgagattacaa

SEQ ID NO: 1831125 - DNA, 25 bp, Homo sapien
ttcatatgtgcactgtataagagag

SEQ ID NO: 1831126 - DNA, 25 bp, Homo sapien
atgcccagctcatttagtcttgctc

SEQ ID NO: 1831127 - DNA, 25 bp, Homo sapien
tgcagtgtcatgattgtggctctct

SEQ ID NO: 1831128 - DNA, 25 bp, Homo sapien
gtgtcatgattgtggctctctgcag

SEQ ID NO: 1831129 - DNA, 25 bp, Homo sapien
gcccagctcatttagtcttgctctg

SEQ ID NO: 1831130 - DNA, 25 bp, Homo sapien
tctatatgctttgtcgtctaccacg

SEQ ID NO: 1831131 - DNA, 25 bp, Homo sapien
cacgcccggcctcatcaatagtatt

SEQ ID NO: 1831132 - DNA, 25 bp, Homo sapien
taccacgttttgcaatgtgcttggc

SEQ ID NO: 1831133 - DNA, 25 bp, Homo sapien
tacattggaagagtgcaactgggca

SEQ ID NO: 1831134 - DNA, 25 bp, Homo sapien
gactcctgaggaaagttcacgcttt

SEQ ID NO: 1831135 - DNA, 25 bp, Homo sapien
gagtgaattcctgtaaatccccttg

SEQ ID NO: 1831136 - DNA, 25 bp, Homo sapien
tgcatttactcctccgaaactttgg

SEQ ID NO: 1831137 - DNA, 25 bp, Homo sapien
tgatccagtcaaggaatgccgtgag

SEQ ID NO: 1831138 - DNA, 25 bp, Homo sapien
cttctctccatcttggggcaataat

SEQ ID NO: 1831139 - DNA, 25 bp, Homo sapien
gggcaataattcctccatgaagctg

SEQ ID NO: 1831140 - DNA, 25 bp, Homo sapien
ctccatgaagctgcctctgtttcat

SEQ ID NO: 1831141 - DNA, 25 bp, Homo sapien
tctctccatcttggggcaataattc

SEQ ID NO: 1831142 - DNA, 25 bp, Homo sapien
ggtgctccaccatatatcactttct

SEQ ID NO: 1831143 - DNA, 25 bp, Homo sapien
gcacagctgagactttgtcctgctc

SEQ ID NO: 1831144 - DNA, 25 bp, Homo sapien
tccaccatatatcactttctcaagg

SEQ ID NO: 1831145 - DNA, 25 bp, Homo sapien
gtgcacagctgagactttgtcctgc

SEQ ID NO: 1831146 - DNA, 25 bp, Homo sapien
cacaaagatgtagaggagacttctt

SEQ ID NO: 1831147 - DNA, 25 bp, Homo sapien
tcacaaagatgtagaggagacttct

SEQ ID NO: 1831148 - DNA, 25 bp, Homo sapien
gagacctgccacgtggtcatggaaa

SEQ ID NO: 1831149 - DNA, 25 bp, Homo sapien
agtcgacttgaaagattttgttcca

SEQ ID NO: 1831150 - DNA, 25 bp, Homo sapien
tcaattcaagattactttcagcgag

SEQ ID NO: 1831151 - DNA, 25 bp, Homo sapien
ggttccatgggccagtgatgcccgc

SEQ ID NO: 1831152 - DNA, 25 bp, Homo sapien
tagtcacatgatgatagagataatc

SEQ ID NO: 1831153 - DNA, 25 bp, Homo sapien
tattttctcctttagtcacatgatg

SEQ ID NO: 1831154 - DNA, 25 bp, Homo sapien
gatcaagttctcatgtcggcagctg

SEQ ID NO: 1831155 - DNA, 25 bp, Homo sapien
tagttcaggaatttccccggtgtga

SEQ ID NO: 1831156 - DNA, 25 bp, Homo sapien
cacagactgtccttcatacatgcca

SEQ ID NO: 1831157 - DNA, 25 bp, Homo sapien
taatgtctcatttccgcatgaagac

SEQ ID NO: 1831158 - DNA, 25 bp, Homo sapien
caatccagctaaactcacagactgt

SEQ ID NO: 1831159 - DNA, 25 bp, Homo sapien
catcttgagggtttttcctccacaa

SEQ ID NO: 1831160 - DNA, 25 bp, Homo sapien
tcgggtatccaacctatctgtgcct

SEQ ID NO: 1831161 - DNA, 25 bp, Homo sapien
tctctgcacagatcttcgggtatcc

SEQ ID NO: 1831162 - DNA, 25 bp, Homo sapien
catgccgtctcttgattcctaagga

SEQ ID NO: 1831163 - DNA, 25 bp, Homo sapien
tccatttctcgcatagcctggcgct

SEQ ID NO: 1831164 - DNA, 25 bp, Homo sapien
taagcaaaacggaacagacaacatg

SEQ ID NO: 1831165 - DNA, 25 bp, Homo sapien
tgggtacctcttcacttgcatctgg

SEQ ID NO: 1831166 - DNA, 25 bp, Homo sapien
gaaaaaactgattgagtctcacatg

SEQ ID NO: 1831167 - DNA, 25 bp, Homo sapien
ccatgccagaagttcctgagagctg

SEQ ID NO: 1831168 - DNA, 25 bp, Homo sapien
tctagacttcgagataactctgttg

SEQ ID NO: 1831169 - DNA, 25 bp, Homo sapien
ttctaaaactgtgcccataattgga

SEQ ID NO: 1831170 - DNA, 25 bp, Homo sapien
ggctgcttcagcaatacttttgtac

SEQ ID NO: 1831171 - DNA, 25 bp, Homo sapien
tgtcttgcctcttgccttgacgcct

SEQ ID NO: 1831172 - DNA, 25 bp, Homo sapien
gcagtaggctcaggtcagtagaccc

SEQ ID NO: 1831173 - DNA, 25 bp, Homo sapien
caaaaccccatgctaggctcagcag

SEQ ID NO: 1831174 - DNA, 25 bp, Homo sapien
cttttttggagaggcggagacctgt

SEQ ID NO: 1831175 - DNA, 25 bp, Homo sapien
tacatttgtccaccaatcttgggaa

SEQ ID NO: 1831176 - DNA, 25 bp, Homo sapien
gctaatgatcatgctcatcttggga

SEQ ID NO: 1831177 - DNA, 25 bp, Homo sapien
catgaaacaccatttggaggaagag

SEQ ID NO: 1831178 - DNA, 25 bp, Homo sapien
tggccatctttgctcatcagacctg

SEQ ID NO: 1831179 - DNA, 25 bp, Homo sapien
aatattgttaatgccacctctgagc

SEQ ID NO: 1831180 - DNA, 25 bp, Homo sapien
cgcactgggcctctcaattactttt

SEQ ID NO: 1831181 - DNA, 25 bp, Homo sapien
tgttgttgtgacctcctaccttccc

SEQ ID NO: 1831182 - DNA, 25 bp, Homo sapien
ataaatatcccttttcgtgttgttg

SEQ ID NO: 1831183 - DNA, 25 bp, Homo sapien
tccctaggaccttatctaatcaatc

SEQ ID NO: 1831184 - DNA, 25 bp, Homo sapien
tggtggtgcccactgtacgtctcca

SEQ ID NO: 1831185 - DNA, 25 bp, Homo sapien
ggagctcaaatgcagtgcgtctgta

SEQ ID NO: 1831186 - DNA, 25 bp, Homo sapien
agctgaaggctcttgctccacggcc

SEQ ID NO: 1831187 - DNA, 25 bp, Homo sapien
aatgcagtgcgtctgtaccacacac

SEQ ID NO: 1831188 - DNA, 25 bp, Homo sapien
ataagcaagtttaggctgttcacat

SEQ ID NO: 1831189 - DNA, 25 bp, Homo sapien
aataagcaagtttaggctgttcaca

SEQ ID NO: 1831190 - DNA, 25 bp, Homo sapien
taataagcaagtttaggctgttcac

SEQ ID NO: 1831191 - DNA, 25 bp, Homo sapien
taagcaagtttaggctgttcacatg

SEQ ID NO: 1831192 - DNA, 25 bp, Homo sapien
tgcagaccaaaatcaaagacggatg

SEQ ID NO: 1831193 - DNA, 25 bp, Homo sapien
gacatacgctgtgcatctggcggca

SEQ ID NO: 1831194 - DNA, 25 bp, Homo sapien
catagcagttgcacgagtctgcgtc

SEQ ID NO: 1831195 - DNA, 25 bp, Homo sapien
cctgatagcgaagatgttgtgggca

SEQ ID NO: 1831196 - DNA, 25 bp, Homo sapien
tttccccagcttggtaaccagtgag

SEQ ID NO: 1831197 - DNA, 25 bp, Homo sapien
gaacttgccaagaacctgcagtgat

SEQ ID NO: 1831198 - DNA, 25 bp, Homo sapien
ccagtgagaatcaggtctagggcta

SEQ ID NO: 1831199 - DNA, 25 bp, Homo sapien
gcagtgatcaactgggctttttcca

SEQ ID NO: 1831200 - DNA, 25 bp, Homo sapien
gtcgcttatcaagcccctgagaaac

SEQ ID NO: 1831201 - DNA, 25 bp, Homo sapien
tggacgtccccagtcgcttatcaag

SEQ ID NO: 1831202 - DNA, 25 bp, Homo sapien
cagtcgcttatcaagcccctgagaa

SEQ ID NO: 1831203 - DNA, 25 bp, Homo sapien
cttgctgtggacgtccccagtcgct

SEQ ID NO: 1831204 - DNA, 25 bp, Homo sapien
ccctcgatggcttggtcccacagcc

SEQ ID NO: 1831205 - DNA, 25 bp, Homo sapien
aagccctcgatggcttggtcccaca

SEQ ID NO: 1831206 - DNA, 25 bp, Homo sapien
gccctcgatggcttggtcccacagc

SEQ ID NO: 1831207 - DNA, 25 bp, Homo sapien
agccctcgatggcttggtcccacag

SEQ ID NO: 1831208 - DNA, 25 bp, Homo sapien
cctatgcgtggctgaattcaggtca

SEQ ID NO: 1831209 - DNA, 25 bp, Homo sapien
gaaagtgaactttagcctatgcgtg

SEQ ID NO: 1831210 - DNA, 25 bp, Homo sapien
tatatcctggactatgtgccggcgt

SEQ ID NO: 1831211 - DNA, 25 bp, Homo sapien
gatgttccatactccgttctgatca

SEQ ID NO: 1831212 - DNA, 25 bp, Homo sapien
ctggctgattgagggccagaagcgc

SEQ ID NO: 1831213 - DNA, 25 bp, Homo sapien
gctgattgagggccagaagcgccat

SEQ ID NO: 1831214 - DNA, 25 bp, Homo sapien
ggctgattgagggccagaagcgcca

SEQ ID NO: 1831215 - DNA, 25 bp, Homo sapien
ccctggctgattgagggccagaagc

SEQ ID NO: 1831216 - DNA, 25 bp, Homo sapien
tgttaaatgcccttgaaagcatctc

SEQ ID NO: 1831217 - DNA, 25 bp, Homo sapien
gttaaatgcccttgaaagcatctcc

SEQ ID NO: 1831218 - DNA, 25 bp, Homo sapien
ctctgttaaatgcccttgaaagcat

SEQ ID NO: 1831219 - DNA, 25 bp, Homo sapien
taaatgcccttgaaagcatctccat

SEQ ID NO: 1831220 - DNA, 25 bp, Homo sapien
aaagtacagtcgcatccagctaaga

SEQ ID NO: 1831221 - DNA, 25 bp, Homo sapien
gataacccttggaaacgtttgctga

SEQ ID NO: 1831222 - DNA, 25 bp, Homo sapien
caactttaaagcagaagctagggtc

SEQ ID NO: 1831223 - DNA, 25 bp, Homo sapien
ctagggtcataaagacatggagtcc

SEQ ID NO: 1831224 - DNA, 25 bp, Homo sapien
acaccagtcaggccgggtgccatag

SEQ ID NO: 1831225 - DNA, 25 bp, Homo sapien
gacaccagtcaggccgggtgccata

SEQ ID NO: 1831226 - DNA, 25 bp, Homo sapien
agacaccagtcaggccgggtgccat

SEQ ID NO: 1831227 - DNA, 25 bp, Homo sapien
gaccattggtcagcaaatgcagagg

SEQ ID NO: 1831228 - DNA, 25 bp, Homo sapien
gagctcttagatggcagcaacagaa

SEQ ID NO: 1831229 - DNA, 25 bp, Homo sapien
gggacgtctcatgtgttgacccaga

SEQ ID NO: 1831230 - DNA, 25 bp, Homo sapien
ctggccctggactcaagagtggatc

SEQ ID NO: 1831231 - DNA, 25 bp, Homo sapien
tgagcttctgaaagcggactaagca

SEQ ID NO: 1831232 - DNA, 25 bp, Homo sapien
tcgttttactgctaggagtagtcaa

SEQ ID NO: 1831233 - DNA, 25 bp, Homo sapien
aaagcactcccaggtcacccttgag

SEQ ID NO: 1831234 - DNA, 25 bp, Homo sapien
tacaagaagccgaagaaatgcagct

SEQ ID NO: 1831235 - DNA, 25 bp, Homo sapien
ccgagagattgagccatcaaagcct

SEQ ID NO: 1831236 - DNA, 25 bp, Homo sapien
gagagattgagccatcaaagcctca

SEQ ID NO: 1831237 - DNA, 25 bp, Homo sapien
agagattgagccatcaaagcctcat

SEQ ID NO: 1831238 - DNA, 25 bp, Homo sapien
accgagagattgagccatcaaagcc

SEQ ID NO: 1831239 - DNA, 25 bp, Homo sapien
gaagccttgttgagcttcacaaagg

SEQ ID NO: 1831240 - DNA, 25 bp, Homo sapien
ctgaagccttgttgagcttcacaaa

SEQ ID NO: 1831241 - DNA, 25 bp, Homo sapien
gttaactgaagccttgttgagcttc

SEQ ID NO: 1831242 - DNA, 25 bp, Homo sapien
agccttgttgagcttcacaaaggtt

SEQ ID NO: 1831243 - DNA, 25 bp, Homo sapien
tttgacgaagggaagaagctgcaac

SEQ ID NO: 1831244 - DNA, 25 bp, Homo sapien
agatttgacgaagggaagaagctgc

SEQ ID NO: 1831245 - DNA, 25 bp, Homo sapien
ttgaagatttgacgaagggaagaag

SEQ ID NO: 1831246 - DNA, 25 bp, Homo sapien
ctgttgaagatttgacgaagggaag

SEQ ID NO: 1831247 - DNA, 25 bp, Homo sapien
gggctcacaccattgatacctctga

SEQ ID NO: 1831248 - DNA, 25 bp, Homo sapien
gctcacaccattgatacctctgatc

SEQ ID NO: 1831249 - DNA, 25 bp, Homo sapien
ttgggctcacaccattgatacctct

SEQ ID NO: 1831250 - DNA, 25 bp, Homo sapien
agacctttgggctcacaccattgat

SEQ ID NO: 1831251 - DNA, 25 bp, Homo sapien
ttgtgatagtgcttcgctttttcat

SEQ ID NO: 1831252 - DNA, 25 bp, Homo sapien
tcgctttttcatagataagcttctt

SEQ ID NO: 1831253 - DNA, 25 bp, Homo sapien
tgccatcctcgccatttgaatttca

SEQ ID NO: 1831254 - DNA, 25 bp, Homo sapien
tcttgccatcctcgccatttgaatt

SEQ ID NO: 1831255 - DNA, 25 bp, Homo sapien
ctttcaaagcatcttttggacaaac

SEQ ID NO: 1831256 - DNA, 25 bp, Homo sapien
ctctgcgaaattccttcgctttttc

SEQ ID NO: 1831257 - DNA, 25 bp, Homo sapien
ttcgctttttcttaagcatttctgg

SEQ ID NO: 1831258 - DNA, 25 bp, Homo sapien
tccttcgctttttcttaagcatttc

SEQ ID NO: 1831259 - DNA, 25 bp, Homo sapien
attccttcgctttttcttaagcatt

SEQ ID NO: 1831260 - DNA, 25 bp, Homo sapien
cttcttcttctcttctacaccttcc

SEQ ID NO: 1831261 - DNA, 25 bp, Homo sapien
tcttcttctcttctacaccttccat

SEQ ID NO: 1831262 - DNA, 25 bp, Homo sapien
ttcttcttctcttctacaccttcca

SEQ ID NO: 1831263 - DNA, 25 bp, Homo sapien
catatatattgtgcctcttacagcc

SEQ ID NO: 1831264 - DNA, 25 bp, Homo sapien
taatgctcatgtaccaaggttttgc

SEQ ID NO: 1831265 - DNA, 25 bp, Homo sapien
tacagcctttggaatacattgtttc

SEQ ID NO: 1831266 - DNA, 25 bp, Homo sapien
ttgcaggcccagtacaagcatatat

SEQ ID NO: 1831267 - DNA, 25 bp, Homo sapien
cacaggcaagggtcaaattctaagg

SEQ ID NO: 1831268 - DNA, 25 bp, Homo sapien
ttaggcacagaaggcctaaactgac

SEQ ID NO: 1831269 - DNA, 25 bp, Homo sapien
tctaagggaagaaattgcgttaggc

SEQ ID NO: 1831270 - DNA, 25 bp, Homo sapien
gatgagtgctgggtgacacaggcaa

SEQ ID NO: 1831271 - DNA, 25 bp, Homo sapien
tccctctggattcattgtttccagg

SEQ ID NO: 1831272 - DNA, 25 bp, Homo sapien
ttctagcatctacccacggcactct

SEQ ID NO: 1831273 - DNA, 25 bp, Homo sapien
tccttcctctcgtatgtcacagtca

SEQ ID NO: 1831274 - DNA, 25 bp, Homo sapien
tacccacggcactctcttgttggct

SEQ ID NO: 1831275 - DNA, 25 bp, Homo sapien
ccttcctctcgtatgtcacagtcat

SEQ ID NO: 1831276 - DNA, 25 bp, Homo sapien
gtatatcacaagctggatacagtgg

SEQ ID NO: 1831277 - DNA, 25 bp, Homo sapien
ccctgactagtctctagctcctggg

SEQ ID NO: 1831278 - DNA, 25 bp, Homo sapien
cagctgtgtaccactccactagcta

SEQ ID NO: 1831279 - DNA, 25 bp, Homo sapien
acagctgtgtaccactccactagct

SEQ ID NO: 1831280 - DNA, 25 bp, Homo sapien
tatgttgccctgactagtctctagc

SEQ ID NO: 1831281 - DNA, 25 bp, Homo sapien
gtcatactctcaacaaccaaaatgg

SEQ ID NO: 1831282 - DNA, 25 bp, Homo sapien
taaagcctttcccagttgtcacctc

SEQ ID NO: 1831283 - DNA, 25 bp, Homo sapien
gaaagtctacacactcagccgagga

SEQ ID NO: 1831284 - DNA, 25 bp, Homo sapien
tatctcgagccacagtgtatgccag

SEQ ID NO: 1831285 - DNA, 25 bp, Homo sapien
cagttaaaacacaggtgtagaacac

SEQ ID NO: 1831286 - DNA, 25 bp, Homo sapien
ttttagcactgacatggcacaaaag

SEQ ID NO: 1831287 - DNA, 25 bp, Homo sapien
ccccagaggacccacatcctggtct

SEQ ID NO: 1831288 - DNA, 25 bp, Homo sapien
gcactgacatggcacaaaagtggga

SEQ ID NO: 1831289 - DNA, 25 bp, Homo sapien
gagattttgggagccctttagttca

SEQ ID NO: 1831290 - DNA, 25 bp, Homo sapien
tttaactgttgtaggccacagcccc

SEQ ID NO: 1831291 - DNA, 25 bp, Homo sapien
cttgtttaactgttgtaggccacag

SEQ ID NO: 1831292 - DNA, 25 bp, Homo sapien
tgtttaactgttgtaggccacagcc

SEQ ID NO: 1831293 - DNA, 25 bp, Homo sapien
ttccagagggtcctgttccataccc

SEQ ID NO: 1831294 - DNA, 25 bp, Homo sapien
cttaagatctaagaatttgctgaaa

SEQ ID NO: 1831295 - DNA, 25 bp, Homo sapien
tcttaagatctaagaatttgctgaa

SEQ ID NO: 1831296 - DNA, 25 bp, Homo sapien
ctttcttaagatctaagaatttgct

SEQ ID NO: 1831297 - DNA, 25 bp, Homo sapien
ttcttaagatctaagaatttgctga

SEQ ID NO: 1831298 - DNA, 25 bp, Homo sapien
caagagagactagcattcccagaca

SEQ ID NO: 1831299 - DNA, 25 bp, Homo sapien
catcattctagggtctttaagctca

SEQ ID NO: 1831300 - DNA, 25 bp, Homo sapien
tgagttggctacaagagaaagggac

SEQ ID NO: 1831301 - DNA, 25 bp, Homo sapien
gcagttccctctcgtaatgatgtaa

SEQ ID NO: 1831302 - DNA, 25 bp, Homo sapien
tagcacggaccattctttaatcagg

SEQ ID NO: 1831303 - DNA, 25 bp, Homo sapien
tagatctaacaagtccttagcacgg

SEQ ID NO: 1831304 - DNA, 25 bp, Homo sapien
aaagtttagcgcacaatacacccaa

SEQ ID NO: 1831305 - DNA, 25 bp, Homo sapien
gcttatcagcgcacataatggtgta

SEQ ID NO: 1831306 - DNA, 25 bp, Homo sapien
aaagaagtccttaggcagatctgac

SEQ ID NO: 1831307 - DNA, 25 bp, Homo sapien
ggcttctgtaacgaaagagaaagga

SEQ ID NO: 1831308 - DNA, 25 bp, Homo sapien
ccagtatctgaaagcagggcaccag

SEQ ID NO: 1831309 - DNA, 25 bp, Homo sapien
aattgagtacaacaccaatgtgacc

SEQ ID NO: 1831310 - DNA, 25 bp, Homo sapien
ctaacagcagtctttatcttgcgac

SEQ ID NO: 1831311 - DNA, 25 bp, Homo sapien
tcttgcgaccagagaatgaagttcc

SEQ ID NO: 1831312 - DNA, 25 bp, Homo sapien
cagtctttatcttgcgaccagagaa

SEQ ID NO: 1831313 - DNA, 25 bp, Homo sapien
tttatcttgcgaccagagaatgaag

SEQ ID NO: 1831314 - DNA, 25 bp, Homo sapien
tacacctaacacacacgctactgtt

SEQ ID NO: 1831315 - DNA, 25 bp, Homo sapien
taatcctccagaattatagtatggt

SEQ ID NO: 1831316 - DNA, 25 bp, Homo sapien
tacccaaaccatacggaatcttgat

SEQ ID NO: 1831317 - DNA, 25 bp, Homo sapien
catgcacatacccttaccaatgtaa

SEQ ID NO: 1831318 - DNA, 25 bp, Homo sapien
cactgtaaatgctgctggagactgg

SEQ ID NO: 1831319 - DNA, 25 bp, Homo sapien
aaatgtgaacactcctgatggactg

SEQ ID NO: 1831320 - DNA, 25 bp, Homo sapien
ctgcaggtgtgctagaatttgcacc

SEQ ID NO: 1831321 - DNA, 25 bp, Homo sapien
gtgaagttgaaatttgtagtgctgc

SEQ ID NO: 1831322 - DNA, 25 bp, Homo sapien
gagttgatactaaacgagcagtagg

SEQ ID NO: 1831323 - DNA, 25 bp, Homo sapien
tagtacatacttgacacctccaaca

SEQ ID NO: 1831324 - DNA, 25 bp, Homo sapien
tgcacccggccgcaacatgataggt

SEQ ID NO: 1831325 - DNA, 25 bp, Homo sapien
gatataggtttagaagctggaaggc

SEQ ID NO: 1831326 - DNA, 25 bp, Homo sapien
ggtggttaacgaatacaaacatata

SEQ ID NO: 1831327 - DNA, 25 bp, Homo sapien
gagagcacagtagagttaacaataa

SEQ ID NO: 1831328 - DNA, 25 bp, Homo sapien
aaacaagttgatctcataaaggtag

SEQ ID NO: 1831329 - DNA, 25 bp, Homo sapien
tacaacatctatggcactgaaggac

SEQ ID NO: 1831330 - DNA, 25 bp, Homo sapien
tacccagagtcaagagttttctaac

SEQ ID NO: 1831331 - DNA, 25 bp, Homo sapien
acccagagtcaagagttttctaaca

SEQ ID NO: 1831332 - DNA, 25 bp, Homo sapien
cagagtcaagagttttctaacatct

SEQ ID NO: 1831333 - DNA, 25 bp, Homo sapien
gctacccagagtcaagagttttcta

SEQ ID NO: 1831334 - DNA, 25 bp, Homo sapien
tgattaccataaaagacaaggcggt

SEQ ID NO: 1831335 - DNA, 25 bp, Homo sapien
catggatgacccttacaagccttag

SEQ ID NO: 1831336 - DNA, 25 bp, Homo sapien
tctagggatgcatctattagccaat

SEQ ID NO: 1831337 - DNA, 25 bp, Homo sapien
gtgcaccaaggtacatatacaagaa

SEQ ID NO: 1831338 - DNA, 25 bp, Homo sapien
gagccaaatgcagactgactaggtt

SEQ ID NO: 1831339 - DNA, 25 bp, Homo sapien
gcttgacactgtcccaaaagtaggt

SEQ ID NO: 1831340 - DNA, 25 bp, Homo sapien
actaggttgctgtccaaacacaggg

SEQ ID NO: 1831341 - DNA, 25 bp, Homo sapien
taggagttgttccagagccaaatgc

SEQ ID NO: 1831342 - DNA, 25 bp, Homo sapien
gctccaaagccgaaaccagaggtgg

SEQ ID NO: 1831343 - DNA, 25 bp, Homo sapien
gctggattcagcagtgttaccaaag

SEQ ID NO: 1831344 - DNA, 25 bp, Homo sapien
gaactaccaaatatgccaccaccag

SEQ ID NO: 1831345 - DNA, 25 bp, Homo sapien
tacttgaactagaggaactgttgtt

SEQ ID NO: 1831346 - DNA, 25 bp, Homo sapien
tatggttccaaggttgaagctgctc

SEQ ID NO: 1831347 - DNA, 25 bp, Homo sapien
gcttgttaaagtctgagaaggccca

SEQ ID NO: 1831348 - DNA, 25 bp, Homo sapien
ggtttatagacccagaatcggatga

SEQ ID NO: 1831349 - DNA, 25 bp, Homo sapien
gcaggctccacgttgccaaaagaga

SEQ ID NO: 1831350 - DNA, 25 bp, Homo sapien
taggcacaattcacagtcccagctt

SEQ ID NO: 1831351 - DNA, 25 bp, Homo sapien
ctgccttattctgcactaggcacaa

SEQ ID NO: 1831352 - DNA, 25 bp, Homo sapien
cagtcccagcttccctcgggtttct

SEQ ID NO: 1831353 - DNA, 25 bp, Homo sapien
ggctttgcactttcacatgccaaac

SEQ ID NO: 1831354 - DNA, 25 bp, Homo sapien
gtgctgctacttgaagcaggtactg

SEQ ID NO: 1831355 - DNA, 25 bp, Homo sapien
cagtgctgctacttgaagcaggtac

SEQ ID NO: 1831356 - DNA, 25 bp, Homo sapien
agtgctgctacttgaagcaggtact

SEQ ID NO: 1831357 - DNA, 25 bp, Homo sapien
aacagaatctatcttcggcgatgcg

SEQ ID NO: 1831358 - DNA, 25 bp, Homo sapien
caggtttcggtgtttcacaggctac

SEQ ID NO: 1831359 - DNA, 25 bp, Homo sapien
taagggctcgcttcacacaagttcc

SEQ ID NO: 1831360 - DNA, 25 bp, Homo sapien
tccgaaaccactgtcaatgtaaggg

SEQ ID NO: 1831361 - DNA, 25 bp, Homo sapien
tgagtttgtaatcaaaaggcttatc

SEQ ID NO: 1831362 - DNA, 25 bp, Homo sapien
gtaaatctcctaccaaactagtcag

SEQ ID NO: 1831363 - DNA, 25 bp, Homo sapien
gcttgtaagatatttccagcaaaag

SEQ ID NO: 1831364 - DNA, 25 bp, Homo sapien
catctctattcaaaagtaaatctcc

SEQ ID NO: 1831365 - DNA, 25 bp, Homo sapien
ccctcacaatcttcaggtggtgtct

SEQ ID NO: 1831366 - DNA, 25 bp, Homo sapien
ggtggtgtcttcttacaatttgtac

SEQ ID NO: 1831367 - DNA, 25 bp, Homo sapien
tcacaatcttcaggtggtgtcttct

SEQ ID NO: 1831368 - DNA, 25 bp, Homo sapien
gcaggtctaaaaggaccctcacaat

SEQ ID NO: 1831369 - DNA, 25 bp, Homo sapien
ataaaacactggactctcaaatgca

SEQ ID NO: 1831370 - DNA, 25 bp, Homo sapien
taataacattatgccaaataaaaca

SEQ ID NO: 1831371 - DNA, 25 bp, Homo sapien
ttaataacattatgccaaataaaac

SEQ ID NO: 1831372 - DNA, 25 bp, Homo sapien
aacactggactctcaaatgcatttt

SEQ ID NO: 1831373 - DNA, 25 bp, Homo sapien
aatgtttacatctaaagagtaatgg

SEQ ID NO: 1831374 - DNA, 25 bp, Homo sapien
tggtagctgctagcagtaagatgag

SEQ ID NO: 1831375 - DNA, 25 bp, Homo sapien
aagtgtagttatgggtaaaagcagg

SEQ ID NO: 1831376 - DNA, 25 bp, Homo sapien
cagtaagatgagtgacttactgctt

SEQ ID NO: 1831377 - DNA, 25 bp, Homo sapien
tttgcaattctaaagcgtgtcatgc

SEQ ID NO: 1831378 - DNA, 25 bp, Homo sapien
caacatctccctaatgcagtcagaa

SEQ ID NO: 1831379 - DNA, 25 bp, Homo sapien
gcatagcattccagaacttttagga

SEQ ID NO: 1831380 - DNA, 25 bp, Homo sapien
tcagaagatcattgaagaaacgctt

SEQ ID NO: 1831381 - DNA, 25 bp, Homo sapien
cctaggatcgtcttgagcttctggc

SEQ ID NO: 1831382 - DNA, 25 bp, Homo sapien
gtatcacaatctacatgggcctgca

SEQ ID NO: 1831383 - DNA, 25 bp, Homo sapien
caatgatgctgatttcttcggttca

SEQ ID NO: 1831384 - DNA, 25 bp, Homo sapien
gctaatttcatccaaatgaaggcat

SEQ ID NO: 1831385 - DNA, 25 bp, Homo sapien
gtttttgcaacaggcacactaaatg

SEQ ID NO: 1831386 - DNA, 25 bp, Homo sapien
ttgcaacaggcacactaaatgtaaa

SEQ ID NO: 1831387 - DNA, 25 bp, Homo sapien
ttttgcaacaggcacactaaatgta

SEQ ID NO: 1831388 - DNA, 25 bp, Homo sapien
tttgcaacaggcacactaaatgtaa

SEQ ID NO: 1831389 - DNA, 25 bp, Homo sapien
tggctctaggaccaacagaaataaa

SEQ ID NO: 1831390 - DNA, 25 bp, Homo sapien
taacatctacttgtgtcagaagaca

SEQ ID NO: 1831391 - DNA, 25 bp, Homo sapien
tcatgtagttgattaggtcctagtc

SEQ ID NO: 1831392 - DNA, 25 bp, Homo sapien
aacagcaattaaaggacagtctggg

SEQ ID NO: 1831393 - DNA, 25 bp, Homo sapien
gaaaatttaaacatgggactgccag

SEQ ID NO: 1831394 - DNA, 25 bp, Homo sapien
aaatttaaacatgggactgccagtg

SEQ ID NO: 1831395 - DNA, 25 bp, Homo sapien
gatgatggaggtagtacatttgcct

SEQ ID NO: 1831396 - DNA, 25 bp, Homo sapien
cagtagattttacgattggagatga

SEQ ID NO: 1831397 - DNA, 25 bp, Homo sapien
tgatctcaggggaactaaaattaaa

SEQ ID NO: 1831398 - DNA, 25 bp, Homo sapien
gagagattttcggtaatactggaac

SEQ ID NO: 1831399 - DNA, 25 bp, Homo sapien
tgcttgagacgaattgatgggtgat

SEQ ID NO: 1831400 - DNA, 25 bp, Homo sapien
cagtgaagaactggtgatcggtaga

SEQ ID NO: 1831401 - DNA, 25 bp, Homo sapien
taactgtcagtactgaggagtctgg

SEQ ID NO: 1831402 - DNA, 25 bp, Homo sapien
gagttccacttgtgctaaacgcaga

SEQ ID NO: 1831403 - DNA, 25 bp, Homo sapien
ggtatgacctgggattcttggaaca

SEQ ID NO: 1831404 - DNA, 25 bp, Homo sapien
tcatctgaaggcacaagagcaacca

SEQ ID NO: 1831405 - DNA, 25 bp, Homo sapien
gatttggtgttccaattaaaacaca

SEQ ID NO: 1831406 - DNA, 25 bp, Homo sapien
gaatgatagccctcattccaaccat

SEQ ID NO: 1831407 - DNA, 25 bp, Homo sapien
ggcaaaactcagttatatgttgttt

SEQ ID NO: 1831408 - DNA, 25 bp, Homo sapien
tgttgtttacctgagacctacttta

SEQ ID NO: 1831409 - DNA, 25 bp, Homo sapien
taaccaaggggataagacaaattca

SEQ ID NO: 1831410 - DNA, 25 bp, Homo sapien
tgtaaagtgtatgctctcatgaggg

SEQ ID NO: 1831411 - DNA, 25 bp, Homo sapien
ggctcaggtggccacgccactgcac

SEQ ID NO: 1831412 - DNA, 25 bp, Homo sapien
gtaaagtgtatgctctcatgagggc

SEQ ID NO: 1831413 - DNA, 25 bp, Homo sapien
tataatctactctctcatgccaact

SEQ ID NO: 1831414 - DNA, 25 bp, Homo sapien
aactgctactgtgtgtatacgctgc

SEQ ID NO: 1831415 - DNA, 25 bp, Homo sapien
ttctctgtccaacctccagcgtaga

SEQ ID NO: 1831416 - DNA, 25 bp, Homo sapien
cataatcaactgagggaggaggaac

SEQ ID NO: 1831417 - DNA, 25 bp, Homo sapien
ttctgatgcaaacaagcagcactgc

SEQ ID NO: 1831418 - DNA, 25 bp, Homo sapien
gaaacaatttgtggtctcaacatat

SEQ ID NO: 1831419 - DNA, 25 bp, Homo sapien
tcccactaattataactgaagaaag

SEQ ID NO: 1831420 - DNA, 25 bp, Homo sapien
ccgtgaccagccaatcttttaattt

SEQ ID NO: 1831421 - DNA, 25 bp, Homo sapien
tgtctccccgcaaattggccttaag

SEQ ID NO: 1831422 - DNA, 25 bp, Homo sapien
atgggccacatgtgcaaattctgga

SEQ ID NO: 1831423 - DNA, 25 bp, Homo sapien
actgggtgaagaatcctgtgacaca

SEQ ID NO: 1831424 - DNA, 25 bp, Homo sapien
tgaaaagtccttcgacgtgcacagt

SEQ ID NO: 1831425 - DNA, 25 bp, Homo sapien
ctacttgcgtggctgaggcacagga

SEQ ID NO: 1831426 - DNA, 25 bp, Homo sapien
gcaagaagaagacaggcagggcacg

SEQ ID NO: 1831427 - DNA, 25 bp, Homo sapien
acttgacatcaggagttcgacccag

SEQ ID NO: 1831428 - DNA, 25 bp, Homo sapien
ttgacatcaggagttcgacccagcc

SEQ ID NO: 1831429 - DNA, 25 bp, Homo sapien
ggcaaactgaaatttggatatgaaa

SEQ ID NO: 1831430 - DNA, 25 bp, Homo sapien
ctcctccagaggtttagaagcaaca

SEQ ID NO: 1831431 - DNA, 25 bp, Homo sapien
acaaagcgtgttctttctcgtctca

SEQ ID NO: 1831432 - DNA, 25 bp, Homo sapien
actgaaatttggatatgaaaagcca

SEQ ID NO: 1831433 - DNA, 25 bp, Homo sapien
ctctattttgtccgggtgtcatatt

SEQ ID NO: 1831434 - DNA, 25 bp, Homo sapien
ttctctattttgtccgggtgtcata

SEQ ID NO: 1831435 - DNA, 25 bp, Homo sapien
ctattttgtccgggtgtcatatttt

SEQ ID NO: 1831436 - DNA, 25 bp, Homo sapien
gttctctattttgtccgggtgtcat

SEQ ID NO: 1831437 - DNA, 25 bp, Homo sapien
gaacaggaggatattgagaatccac

SEQ ID NO: 1831438 - DNA, 25 bp, Homo sapien
actgcacttgttatctattctttga

SEQ ID NO: 1831439 - DNA, 25 bp, Homo sapien
aaacacttcgatttgttgctatgga

SEQ ID NO: 1831440 - DNA, 25 bp, Homo sapien
ccagaaggagtcagagatggtttaa

SEQ ID NO: 1831441 - DNA, 25 bp, Homo sapien
taaagaccatgagtatttcccagag

SEQ ID NO: 1831442 - DNA, 25 bp, Homo sapien
catgcatgcatacaaaatggaacta

SEQ ID NO: 1831443 - DNA, 25 bp, Homo sapien
ggaactatattcaaaacagcactac

SEQ ID NO: 1831444 - DNA, 25 bp, Homo sapien
tctaaaatggcttcacggatactct

SEQ ID NO: 1831445 - DNA, 25 bp, Homo sapien
ccctgaattactgtccatatttttt

SEQ ID NO: 1831446 - DNA, 25 bp, Homo sapien
cctgaattactgtccatattttttg

SEQ ID NO: 1831447 - DNA, 25 bp, Homo sapien
aatctgtgatatctatcccactcct

SEQ ID NO: 1831448 - DNA, 25 bp, Homo sapien
aaatctgtgatatctatcccactcc

SEQ ID NO: 1831449 - DNA, 25 bp, Homo sapien
aggagaagaaacaatggatggaatt

SEQ ID NO: 1831450 - DNA, 25 bp, Homo sapien
gaggagaagaaacaatggatggaat

SEQ ID NO: 1831451 - DNA, 25 bp, Homo sapien
ggagaagaaacaatggatggaattc

SEQ ID NO: 1831452 - DNA, 25 bp, Homo sapien
ttgaactggtcacaccgtaagattg

SEQ ID NO: 1831453 - DNA, 25 bp, Homo sapien
tattcgccgagctgttgaactggtc

SEQ ID NO: 1831454 - DNA, 25 bp, Homo sapien
tgtgcactgagttgcttagctttca

SEQ ID NO: 1831455 - DNA, 25 bp, Homo sapien
ttctctaaagactgcaatattcgcc

SEQ ID NO: 1831456 - DNA, 25 bp, Homo sapien
ggatctcaactatacctaggtttgt

SEQ ID NO: 1831457 - DNA, 25 bp, Homo sapien
aataataccctttccaatctgcatg

SEQ ID NO: 1831458 - DNA, 25 bp, Homo sapien
tctgtgcctactgcactggctagca

SEQ ID NO: 1831459 - DNA, 25 bp, Homo sapien
ctttatcaggtagaaggatctcaac

SEQ ID NO: 1831460 - DNA, 25 bp, Homo sapien
acggaggttgcagtgtggtccgaga

SEQ ID NO: 1831461 - DNA, 25 bp, Homo sapien
ttgtgccaccgcactccagcctggg

SEQ ID NO: 1831462 - DNA, 25 bp, Homo sapien
gcagtgtggtccgagattgtgccac

SEQ ID NO: 1831463 - DNA, 25 bp, Homo sapien
ctgggcgacagagccaagactccat

SEQ ID NO: 1831464 - DNA, 25 bp, Homo sapien
aaaaggagaatctccaagctgactg

SEQ ID NO: 1831465 - DNA, 25 bp, Homo sapien
tgactggttttaaggattgaagaat

SEQ ID NO: 1831466 - DNA, 25 bp, Homo sapien
gctgctgccccaccgtatgttgttt

SEQ ID NO: 1831467 - DNA, 25 bp, Homo sapien
cgtagtttagactgtcttacagcag

SEQ ID NO: 1831468 - DNA, 25 bp, Homo sapien
cagaggtggcaatgaagtgttcttt

SEQ ID NO: 1831469 - DNA, 25 bp, Homo sapien
ttccaaaggcagacaagttgaatgc

SEQ ID NO: 1831470 - DNA, 25 bp, Homo sapien
ctggtggcagtgtgctgtgagagtg

SEQ ID NO: 1831471 - DNA, 25 bp, Homo sapien
caaaggcagacaagttgaatgctgg

SEQ ID NO: 1831472 - DNA, 25 bp, Homo sapien
ctttatcagaagctcttgaagaaaa

SEQ ID NO: 1831473 - DNA, 25 bp, Homo sapien
tatcagaagctcttgaagaaaaacc

SEQ ID NO: 1831474 - DNA, 25 bp, Homo sapien
ttatcagaagctcttgaagaaaaac

SEQ ID NO: 1831475 - DNA, 25 bp, Homo sapien
tcagaagctcttgaagaaaaaccac

SEQ ID NO: 1831476 - DNA, 25 bp, Homo sapien
catggaaaaattcagatggctccga

SEQ ID NO: 1831477 - DNA, 25 bp, Homo sapien
cgaactgccaattgggaatgccgag

SEQ ID NO: 1831478 - DNA, 25 bp, Homo sapien
gctccgatgaagagaaggccttgtt

SEQ ID NO: 1831479 - DNA, 25 bp, Homo sapien
aatgccgaggatgtagatggctgac

SEQ ID NO: 1831480 - DNA, 25 bp, Homo sapien
gagcgatacactaccacaaatggtt

SEQ ID NO: 1831481 - DNA, 25 bp, Homo sapien
ggcatcccataataagcccaatata

SEQ ID NO: 1831482 - DNA, 25 bp, Homo sapien
cagtatataatagcttcaattcaaa

SEQ ID NO: 1831483 - DNA, 25 bp, Homo sapien
caatataacatactcctaggcaaaa

SEQ ID NO: 1831484 - DNA, 25 bp, Homo sapien
tattagagctctcctcatcggcata

SEQ ID NO: 1831485 - DNA, 25 bp, Homo sapien
tattttctggccagcgtggaacctc

SEQ ID NO: 1831486 - DNA, 25 bp, Homo sapien
gaacctcgcttgtgtctgttgaaca

SEQ ID NO: 1831487 - DNA, 25 bp, Homo sapien
tgaagtatctttgtagccaccctgg

SEQ ID NO: 1831488 - DNA, 25 bp, Homo sapien
taatggtgcgtgctactccagaggc

SEQ ID NO: 1831489 - DNA, 25 bp, Homo sapien
gaataatggtgcgtgctactccaga

SEQ ID NO: 1831490 - DNA, 25 bp, Homo sapien
ccaggaataatggtgcgtgctactc

SEQ ID NO: 1831491 - DNA, 25 bp, Homo sapien
aggaataatggtgcgtgctactcca

SEQ ID NO: 1831492 - DNA, 25 bp, Homo sapien
aaaataaagaaacgcgcgcatcatg

SEQ ID NO: 1831493 - DNA, 25 bp, Homo sapien
tacaatttcttttcccgcccagagc

SEQ ID NO: 1831494 - DNA, 25 bp, Homo sapien
aaccacacgtgtgcgccgcaaggct

SEQ ID NO: 1831495 - DNA, 25 bp, Homo sapien
aggcggcccaaaccacacgtgtgcg

SEQ ID NO: 1831496 - DNA, 25 bp, Homo sapien
gccaccgcggcgtcggggtcccata

SEQ ID NO: 1831497 - DNA, 25 bp, Homo sapien
ccgccaggccaccgcggcgtcgggg

SEQ ID NO: 1831498 - DNA, 25 bp, Homo sapien
gccaggccaccgcggcgtcggggtc

SEQ ID NO: 1831499 - DNA, 25 bp, Homo sapien
cgccaggccaccgcggcgtcggggt

SEQ ID NO: 1831500 - DNA, 25 bp, Homo sapien
tggcaacgccgcgtccggatcttgc

SEQ ID NO: 1831501 - DNA, 25 bp, Homo sapien
ttaattggcccctggtggcaacgcc

SEQ ID NO: 1831502 - DNA, 25 bp, Homo sapien
ctgatgctgttgtcgcccctgctgg

SEQ ID NO: 1831503 - DNA, 25 bp, Homo sapien
tgctggtaaggcttaattggcccct

SEQ ID NO: 1831504 - DNA, 25 bp, Homo sapien
ggcggagcctccgccgcttcccgct

SEQ ID NO: 1831505 - DNA, 25 bp, Homo sapien
agcctccgccgcttcccgctccggg

SEQ ID NO: 1831506 - DNA, 25 bp, Homo sapien
gtaagggggcgggagaggcagaggc

SEQ ID NO: 1831507 - DNA, 25 bp, Homo sapien
ctccgccgcttcccgctccggggcg

SEQ ID NO: 1831508 - DNA, 25 bp, Homo sapien
ttcaacaacggaacgcggcttctcg

SEQ ID NO: 1831509 - DNA, 25 bp, Homo sapien
cctattacccctgctaaggcggctg

SEQ ID NO: 1831510 - DNA, 25 bp, Homo sapien
gcggtcgcgagccagaatgtcgtca

SEQ ID NO: 1831511 - DNA, 25 bp, Homo sapien
gcatcatcatgctgcgacgagctga

SEQ ID NO: 1831512 - DNA, 25 bp, Homo sapien
ggctccttgttgacctaaattcaaa

SEQ ID NO: 1831513 - DNA, 25 bp, Homo sapien
tttccctctataaggcagtcttttg

SEQ ID NO: 1831514 - DNA, 25 bp, Homo sapien
cagattggctccttgttgacctaaa

SEQ ID NO: 1831515 - DNA, 25 bp, Homo sapien
tataaggcagtcttttgggtccaga

SEQ ID NO: 1831516 - DNA, 25 bp, Homo sapien
cccggtattcccaggagatctccca

SEQ ID NO: 1831517 - DNA, 25 bp, Homo sapien
gcccagccctgcttagcctccaaga

SEQ ID NO: 1831518 - DNA, 25 bp, Homo sapien
atccaagcacttaccaggcccagcc

SEQ ID NO: 1831519 - DNA, 25 bp, Homo sapien
tcccaggagatctcccatccaagca

SEQ ID NO: 1831520 - DNA, 25 bp, Homo sapien
aatgcagatctgtgcttcctgacgg

SEQ ID NO: 1831521 - DNA, 25 bp, Homo sapien
ccagtcccacaagtaatgggtgaat

SEQ ID NO: 1831522 - DNA, 25 bp, Homo sapien
ggccttatagctccggaaatgcaga

SEQ ID NO: 1831523 - DNA, 25 bp, Homo sapien
gcgcccattggacttgggccttata

SEQ ID NO: 1831524 - DNA, 25 bp, Homo sapien
ccagacattaaactgatcagaacag

SEQ ID NO: 1831525 - DNA, 25 bp, Homo sapien
gatcctagccaaaaggccaagaagt

SEQ ID NO: 1831526 - DNA, 25 bp, Homo sapien
atactacacttgatcctagccaaaa

SEQ ID NO: 1831527 - DNA, 25 bp, Homo sapien
cacttgatcctagccaaaaggccaa

SEQ ID NO: 1831528 - DNA, 25 bp, Homo sapien
cacatttattgagagtgcgtttgtt

SEQ ID NO: 1831529 - DNA, 25 bp, Homo sapien
attgagagtgcgtttgtttgagaca

SEQ ID NO: 1831530 - DNA, 25 bp, Homo sapien
ttcatctctctgtgcaatacttttt

SEQ ID NO: 1831531 - DNA, 25 bp, Homo sapien
atttattgagagtgcgtttgtttga

SEQ ID NO: 1831532 - DNA, 25 bp, Homo sapien
atctgtaactggttatgttcagtaa

SEQ ID NO: 1831533 - DNA, 25 bp, Homo sapien
ctgtaactggttatgttcagtaagt

SEQ ID NO: 1831534 - DNA, 25 bp, Homo sapien
tatgttcagtaagttgtaaacacct

SEQ ID NO: 1831535 - DNA, 25 bp, Homo sapien
tgttcagtaagttgtaaacacctct

SEQ ID NO: 1831536 - DNA, 25 bp, Homo sapien
agctctctaaagtggcatgtctgga

SEQ ID NO: 1831537 - DNA, 25 bp, Homo sapien
agtcttgcaaagtgttagtgtgtct

SEQ ID NO: 1831538 - DNA, 25 bp, Homo sapien
gttacagctctctaaagtggcatgt

SEQ ID NO: 1831539 - DNA, 25 bp, Homo sapien
cttgcaaagtgttagtgtgtctgga

SEQ ID NO: 1831540 - DNA, 25 bp, Homo sapien
ctttactgagcacttgtccaaaaca

SEQ ID NO: 1831541 - DNA, 25 bp, Homo sapien
tcttgccattcaaagatgttctttc

SEQ ID NO: 1831542 - DNA, 25 bp, Homo sapien
aacatcaattatcttgccattcaaa

SEQ ID NO: 1831543 - DNA, 25 bp, Homo sapien
gcacttgtccaaaacatcaattatc

SEQ ID NO: 1831544 - DNA, 25 bp, Homo sapien
tagttttcaaaaggcctgtctgtcc

SEQ ID NO: 1831545 - DNA, 25 bp, Homo sapien
catggaactctatacagggcaccct

SEQ ID NO: 1831546 - DNA, 25 bp, Homo sapien
gactgacaagcgaagtgtggcctgc

SEQ ID NO: 1831547 - DNA, 25 bp, Homo sapien
tatttcacaggtggcagggtactgc

SEQ ID NO: 1831548 - DNA, 25 bp, Homo sapien
gaccgattatacaggcatctacaga

SEQ ID NO: 1831549 - DNA, 25 bp, Homo sapien
tctcctgcaaacatggtaaagggtg

SEQ ID NO: 1831550 - DNA, 25 bp, Homo sapien
tgtataagagatcgcccaagttgct

SEQ ID NO: 1831551 - DNA, 25 bp, Homo sapien
caaatgaagacacgacagcagggtc

SEQ ID NO: 1831552 - DNA, 25 bp, Homo sapien
aagtgacaaagtgccgcttctccca

SEQ ID NO: 1831553 - DNA, 25 bp, Homo sapien
cagaggctgttgattcacccaagtg

SEQ ID NO: 1831554 - DNA, 25 bp, Homo sapien
agttaatccaggattttcagttctc

SEQ ID NO: 1831555 - DNA, 25 bp, Homo sapien
cacttagttaatccaggattttcag

SEQ ID NO: 1831556 - DNA, 25 bp, Homo sapien
agtgcacggtgtggattctccagct

SEQ ID NO: 1831557 - DNA, 25 bp, Homo sapien
tgcccaaggtgaccaggcgaacaaa

SEQ ID NO: 1831558 - DNA, 25 bp, Homo sapien
caaagacgccaagctgtggcctgag

SEQ ID NO: 1831559 - DNA, 25 bp, Homo sapien
gccaggcggcagcatgttttagaga

SEQ ID NO: 1831560 - DNA, 25 bp, Homo sapien
ggccttcttgacgaacaagggttga

SEQ ID NO: 1831561 - DNA, 25 bp, Homo sapien
gaatttttaagaggcctgccacacc

SEQ ID NO: 1831562 - DNA, 25 bp, Homo sapien
caagggttgaaaagctgatgtatac

SEQ ID NO: 1831563 - DNA, 25 bp, Homo sapien
attaaagagtctttgacactggcct

SEQ ID NO: 1831564 - DNA, 25 bp, Homo sapien
caccaacccatgtgccaggtaaaaa

SEQ ID NO: 1831565 - DNA, 25 bp, Homo sapien
caagttgttgcggtgaagggcctct

SEQ ID NO: 1831566 - DNA, 25 bp, Homo sapien
ctgtgcaggaagtgagcctgcttct

SEQ ID NO: 1831567 - DNA, 25 bp, Homo sapien
cacaattgcgttctagttcccaaaa

SEQ ID NO: 1831568 - DNA, 25 bp, Homo sapien
attgacagcacagaacccaaaaggc

SEQ ID NO: 1831569 - DNA, 25 bp, Homo sapien
tcattgacagcacagaacccaaaag

SEQ ID NO: 1831570 - DNA, 25 bp, Homo sapien
aaaaggctgcctctggaattattac

SEQ ID NO: 1831571 - DNA, 25 bp, Homo sapien
gaacccaaaaggctgcctctggaat

SEQ ID NO: 1831572 - DNA, 25 bp, Homo sapien
gagcccatcggagacagtcttgccg

SEQ ID NO: 1831573 - DNA, 25 bp, Homo sapien
gtcttgccgcctgttttatttggta

SEQ ID NO: 1831574 - DNA, 25 bp, Homo sapien
ggtcattctctaacttggaatgcag

SEQ ID NO: 1831575 - DNA, 25 bp, Homo sapien
agctctccagcagaagaatctgtca

SEQ ID NO: 1831576 - DNA, 25 bp, Homo sapien
tctgagctgtcactagaagggacca

SEQ ID NO: 1831577 - DNA, 25 bp, Homo sapien
gcaaactccacaggtacataaggct

SEQ ID NO: 1831578 - DNA, 25 bp, Homo sapien
tgaggacggcctgaaatcatgcaca

SEQ ID NO: 1831579 - DNA, 25 bp, Homo sapien
tagttctgaacatgagccagtcctg

SEQ ID NO: 1831580 - DNA, 25 bp, Homo sapien
gcaaaagtcagtcattagctccttg

SEQ ID NO: 1831581 - DNA, 25 bp, Homo sapien
tcagtcattagctccttgtagcaac

SEQ ID NO: 1831582 - DNA, 25 bp, Homo sapien
tagctccttgtagcaactgtactgt

SEQ ID NO: 1831583 - DNA, 25 bp, Homo sapien
cttgtagcaactgtactgttgagac

SEQ ID NO: 1831584 - DNA, 25 bp, Homo sapien
ttgagttattgccaattaagggagg

SEQ ID NO: 1831585 - DNA, 25 bp, Homo sapien
tcaaatagggagcagttcacagtgg

SEQ ID NO: 1831586 - DNA, 25 bp, Homo sapien
tattcctcaaggattagaatgacat

SEQ ID NO: 1831587 - DNA, 25 bp, Homo sapien
taagaatctacaaagccccaagaga

SEQ ID NO: 1831588 - DNA, 25 bp, Homo sapien
cagtctgtacccatttataagagaa

SEQ ID NO: 1831589 - DNA, 25 bp, Homo sapien
gatcatctgaactgagtcactctga

SEQ ID NO: 1831590 - DNA, 25 bp, Homo sapien
caggaacaatgtcttgatgctgttc

SEQ ID NO: 1831591 - DNA, 25 bp, Homo sapien
gaacctcaggtcaaacaaataatgc

SEQ ID NO: 1831592 - DNA, 25 bp, Homo sapien
gctgcttgagacttcctgggtcaag

SEQ ID NO: 1831593 - DNA, 25 bp, Homo sapien
gagcccaattgcctcttaggtgcag

SEQ ID NO: 1831594 - DNA, 25 bp, Homo sapien
tcaagtaagactccagcaagaacaa

SEQ ID NO: 1831595 - DNA, 25 bp, Homo sapien
gcaagccagtttcctatggagagta

SEQ ID NO: 1831596 - DNA, 25 bp, Homo sapien
gatgattgtctgtgaaagggcctta

SEQ ID NO: 1831597 - DNA, 25 bp, Homo sapien
gcaatatgacagaaatggttccgga

SEQ ID NO: 1831598 - DNA, 25 bp, Homo sapien
acaaaggctaccctagacagtgaga

SEQ ID NO: 1831599 - DNA, 25 bp, Homo sapien
aaattgtaggtcatggccacatcca

SEQ ID NO: 1831600 - DNA, 25 bp, Homo sapien
gtacaatgcagccagggttatgtgc

SEQ ID NO: 1831601 - DNA, 25 bp, Homo sapien
tattgtgttctactggcatgctgct

SEQ ID NO: 1831602 - DNA, 25 bp, Homo sapien
tcttctcacgtttgctattgtgttc

SEQ ID NO: 1831603 - DNA, 25 bp, Homo sapien
agggtacaatgcagccagggttatg

SEQ ID NO: 1831604 - DNA, 25 bp, Homo sapien
tttgaccaggtacaacggctcatgc

SEQ ID NO: 1831605 - DNA, 25 bp, Homo sapien
gaaccatggagtgatgaccgtgcat

SEQ ID NO: 1831606 - DNA, 25 bp, Homo sapien
gcatcacacacaaagacgacaacgg

SEQ ID NO: 1831607 - DNA, 25 bp, Homo sapien
tctgcaggccagagttaaactactg

SEQ ID NO: 1831608 - DNA, 25 bp, Homo sapien
ctcttttacaggcattaggggcttg

SEQ ID NO: 1831609 - DNA, 25 bp, Homo sapien
gggcttgaaaaactttggtggctga

SEQ ID NO: 1831610 - DNA, 25 bp, Homo sapien
gccttgcttccagggctatcctttt

SEQ ID NO: 1831611 - DNA, 25 bp, Homo sapien
gggctatccttttcttatgctcctc

SEQ ID NO: 1831612 - DNA, 25 bp, Homo sapien
tatagtcagacatgtccaactggtt

SEQ ID NO: 1831613 - DNA, 25 bp, Homo sapien
ccctgggtaaagttccataacatgc

SEQ ID NO: 1831614 - DNA, 25 bp, Homo sapien
cttctttattccttcgaggagaatc

SEQ ID NO: 1831615 - DNA, 25 bp, Homo sapien
taacatgctacatcttggtaactgg

SEQ ID NO: 1831616 - DNA, 25 bp, Homo sapien
gccagaaaggtccggtcggctggaa

SEQ ID NO: 1831617 - DNA, 25 bp, Homo sapien
cagaaaggtccggtcggctggaaga

SEQ ID NO: 1831618 - DNA, 25 bp, Homo sapien
agccagaaaggtccggtcggctgga

SEQ ID NO: 1831619 - DNA, 25 bp, Homo sapien
gaaaggtccggtcggctggaagaga

SEQ ID NO: 1831620 - DNA, 25 bp, Homo sapien
attatgaacatttggtgtactgagg

SEQ ID NO: 1831621 - DNA, 25 bp, Homo sapien
tcctccgaatgtgccgggctttggt

SEQ ID NO: 1831622 - DNA, 25 bp, Homo sapien
ggctcctccgaatgtgccgggcttt

SEQ ID NO: 1831623 - DNA, 25 bp, Homo sapien
gaacatttggtgtactgaggctcct

SEQ ID NO: 1831624 - DNA, 25 bp, Homo sapien
cggagccgttcaagactcagaatgt

SEQ ID NO: 1831625 - DNA, 25 bp, Homo sapien
gccggagccgttcaagactcagaat

SEQ ID NO: 1831626 - DNA, 25 bp, Homo sapien
ggagccgttcaagactcagaatgtt

SEQ ID NO: 1831627 - DNA, 25 bp, Homo sapien
ccggagccgttcaagactcagaatg

SEQ ID NO: 1831628 - DNA, 25 bp, Homo sapien
tgtacttctcaatgtacgtctcccc

SEQ ID NO: 1831629 - DNA, 25 bp, Homo sapien
agagccagcgtttcccggtcctcta

SEQ ID NO: 1831630 - DNA, 25 bp, Homo sapien
catctgatgtgccttcgttttcact

SEQ ID NO: 1831631 - DNA, 25 bp, Homo sapien
tgcagcacgcctcgagtgtacttct

SEQ ID NO: 1831632 - DNA, 25 bp, Homo sapien
caacgttttcatccaaagtgtggtg

SEQ ID NO: 1831633 - DNA, 25 bp, Homo sapien
gaacaacgttttcatccaaagtgtg

SEQ ID NO: 1831634 - DNA, 25 bp, Homo sapien
cgttttcatccaaagtgtggtgaga

SEQ ID NO: 1831635 - DNA, 25 bp, Homo sapien
tgtgaacaacgttttcatccaaagt

SEQ ID NO: 1831636 - DNA, 25 bp, Homo sapien
ggtatattggatactatttcatagg

SEQ ID NO: 1831637 - DNA, 25 bp, Homo sapien
ttttcagggatattctcctcttcaa

SEQ ID NO: 1831638 - DNA, 25 bp, Homo sapien
ctatttcataggttacaccacagga

SEQ ID NO: 1831639 - DNA, 25 bp, Homo sapien
ctcctcttcaaactctgcgtgaaac

SEQ ID NO: 1831640 - DNA, 25 bp, Homo sapien
gaatggcacaatcaggccccgttat

SEQ ID NO: 1831641 - DNA, 25 bp, Homo sapien
gaatcagactataacttggccagga

SEQ ID NO: 1831642 - DNA, 25 bp, Homo sapien
ggtgaaactgcccttactggatgac

SEQ ID NO: 1831643 - DNA, 25 bp, Homo sapien
ggctagaacaacactggagaggatc

SEQ ID NO: 1831644 - DNA, 25 bp, Homo sapien
cagaatcatgcaccgaggaatccca

SEQ ID NO: 1831645 - DNA, 25 bp, Homo sapien
ggtgtgaccctattcaagtgaacag

SEQ ID NO: 1831646 - DNA, 25 bp, Homo sapien
ttcgtaatactaactccatagcagc

SEQ ID NO: 1831647 - DNA, 25 bp, Homo sapien
tattggctgcaattcgttttcgtaa

SEQ ID NO: 1831648 - DNA, 25 bp, Homo sapien
caaaagtcagatgtagcagttttac

SEQ ID NO: 1831649 - DNA, 25 bp, Homo sapien
aaagtcagatgtagcagttttacag

SEQ ID NO: 1831650 - DNA, 25 bp, Homo sapien
aaaagtcagatgtagcagttttaca

SEQ ID NO: 1831651 - DNA, 25 bp, Homo sapien
acaaaagtcagatgtagcagtttta

SEQ ID NO: 1831652 - DNA, 25 bp, Homo sapien
gatggagttcacgccggatgcatgg

SEQ ID NO: 1831653 - DNA, 25 bp, Homo sapien
atgggcaggtagaaaaactggctgc

SEQ ID NO: 1831654 - DNA, 25 bp, Homo sapien
atcatcactgtgctttatgatgggc

SEQ ID NO: 1831655 - DNA, 25 bp, Homo sapien
gatgcatgggggccaacaagctgct

SEQ ID NO: 1831656 - DNA, 25 bp, Homo sapien
caaatcgaggaagagaactggtatg

SEQ ID NO: 1831657 - DNA, 25 bp, Homo sapien
cattcaaatcgaggaagagaactgg

SEQ ID NO: 1831658 - DNA, 25 bp, Homo sapien
aatcgaggaagagaactggtatgtg

SEQ ID NO: 1831659 - DNA, 25 bp, Homo sapien
ttcaaatcgaggaagagaactggta

SEQ ID NO: 1831660 - DNA, 25 bp, Homo sapien
tgggcttcccgctccacatcgtcct

SEQ ID NO: 1831661 - DNA, 25 bp, Homo sapien
cctgaaccagcggagtgcatggcaa

SEQ ID NO: 1831662 - DNA, 25 bp, Homo sapien
tactctagaatccaagtggccactg

SEQ ID NO: 1831663 - DNA, 25 bp, Homo sapien
ggctccctgggtacagtctaagtga

SEQ ID NO: 1831664 - DNA, 25 bp, Homo sapien
caatggcccaacagtggataggtgc

SEQ ID NO: 1831665 - DNA, 25 bp, Homo sapien
tactggtattgatcacatttgtgtt

SEQ ID NO: 1831666 - DNA, 25 bp, Homo sapien
aggtcctggtgcctaaagtaccttg

SEQ ID NO: 1831667 - DNA, 25 bp, Homo sapien
gctgctgtatgtcctaggtcctggt

SEQ ID NO: 1831668 - DNA, 25 bp, Homo sapien
ttggtttcagaagtgacccttcagc

SEQ ID NO: 1831669 - DNA, 25 bp, Homo sapien
tctcccttacgcagtttaagtcttc

SEQ ID NO: 1831670 - DNA, 25 bp, Homo sapien
tgttcatccaggtattctcgtcgtt

SEQ ID NO: 1831671 - DNA, 25 bp, Homo sapien
ttaatgagtgcatctgaccacctct

SEQ ID NO: 1831672 - DNA, 25 bp, Homo sapien
cacctctcccttacgcagtttaagt

SEQ ID NO: 1831673 - DNA, 25 bp, Homo sapien
gatcaaggatgctgttacccagaaa

SEQ ID NO: 1831674 - DNA, 25 bp, Homo sapien
tgctttaagaaatcccctaggcagc

SEQ ID NO: 1831675 - DNA, 25 bp, Homo sapien
caaacagccgcaggacgttagtcaa

SEQ ID NO: 1831676 - DNA, 25 bp, Homo sapien
cagccattggactgcactgtgaaaa

SEQ ID NO: 1831677 - DNA, 25 bp, Homo sapien
aactatccatatcatcaccatcctc

SEQ ID NO: 1831678 - DNA, 25 bp, Homo sapien
gataactatccatatcatcaccatc

SEQ ID NO: 1831679 - DNA, 25 bp, Homo sapien
ataactatccatatcatcaccatcc

SEQ ID NO: 1831680 - DNA, 25 bp, Homo sapien
taactatccatatcatcaccatcct

SEQ ID NO: 1831681 - DNA, 25 bp, Homo sapien
aaaacacttaacagacgtgacctgg

SEQ ID NO: 1831682 - DNA, 25 bp, Homo sapien
cattggtttcagctactgcatgaga

SEQ ID NO: 1831683 - DNA, 25 bp, Homo sapien
gctcttaaagagcacatagcactgg

SEQ ID NO: 1831684 - DNA, 25 bp, Homo sapien
tattaactgaaaattggcctaagca

SEQ ID NO: 1831685 - DNA, 25 bp, Homo sapien
ctctttggagtttggtggacctggc

SEQ ID NO: 1831686 - DNA, 25 bp, Homo sapien
tctttggagtttggtggacctggca

SEQ ID NO: 1831687 - DNA, 25 bp, Homo sapien
ctttggagtttggtggacctggcag

SEQ ID NO: 1831688 - DNA, 25 bp, Homo sapien
tgacttgtactctacgggaatgacc

SEQ ID NO: 1831689 - DNA, 25 bp, Homo sapien
ggatactgacaggatggcttcaacc

SEQ ID NO: 1831690 - DNA, 25 bp, Homo sapien
ggcttcaaccataagtggcagtgtc

SEQ ID NO: 1831691 - DNA, 25 bp, Homo sapien
tgcacaggtttcaccgtgacttgta

SEQ ID NO: 1831692 - DNA, 25 bp, Homo sapien
gacatcttttgcctgatgaagttcc

SEQ ID NO: 1831693 - DNA, 25 bp, Homo sapien
gttccactgcagcatactctcctaa

SEQ ID NO: 1831694 - DNA, 25 bp, Homo sapien
tgtctaagttgaaagatgcctcctg

SEQ ID NO: 1831695 - DNA, 25 bp, Homo sapien
gagatccacatttctattcttcgcg

SEQ ID NO: 1831696 - DNA, 25 bp, Homo sapien
gctcaagtcctagtcttaaccttgt

SEQ ID NO: 1831697 - DNA, 25 bp, Homo sapien
ctaaagctcacagccaagtacaaac

SEQ ID NO: 1831698 - DNA, 25 bp, Homo sapien
taaccttgtacctaaagctcacagc

SEQ ID NO: 1831699 - DNA, 25 bp, Homo sapien
gttcagagactctgctcaagtccta

SEQ ID NO: 1831700 - DNA, 25 bp, Homo sapien
tgctccatctgaaatgaactccaga

SEQ ID NO: 1831701 - DNA, 25 bp, Homo sapien
caccggtggccccatacttcaatgg

SEQ ID NO: 1831702 - DNA, 25 bp, Homo sapien
gcagtgttcttgtcttagcatgaag

SEQ ID NO: 1831703 - DNA, 25 bp, Homo sapien
gagaatcgacctcccagatggagct

SEQ ID NO: 1831704 - DNA, 25 bp, Homo sapien
tccttttgacctttcaactgttata

SEQ ID NO: 1831705 - DNA, 25 bp, Homo sapien
tttagagtatattagcctgatcgtg

SEQ ID NO: 1831706 - DNA, 25 bp, Homo sapien
caaaagaattatgcttaaaggagtc

SEQ ID NO: 1831707 - DNA, 25 bp, Homo sapien
gatcgtgaccttaaatccgtctctt

SEQ ID NO: 1831708 - DNA, 25 bp, Homo sapien
ggtgaaggcacctcggggtccacca

SEQ ID NO: 1831709 - DNA, 25 bp, Homo sapien
cccagaatgtgtattgacagaagac

SEQ ID NO: 1831710 - DNA, 25 bp, Homo sapien
gcagccaccgtagactcacactggt

SEQ ID NO: 1831711 - DNA, 25 bp, Homo sapien
gaaggtcactgtgtactgggcatcc

SEQ ID NO: 1831712 - DNA, 25 bp, Homo sapien
gaacagctcctgtaacacgcatcac

SEQ ID NO: 1831713 - DNA, 25 bp, Homo sapien
gacttcaaggctcccactttcactg

SEQ ID NO: 1831714 - DNA, 25 bp, Homo sapien
gaattctccgaagagtcatcctcca

SEQ ID NO: 1831715 - DNA, 25 bp, Homo sapien
catgtcagctttttgactcggtgaa

SEQ ID NO: 1831716 - DNA, 25 bp, Homo sapien
tacaatcataagccaccgtgtccgg

SEQ ID NO: 1831717 - DNA, 25 bp, Homo sapien
cagaagaggcattccaagaatacat

SEQ ID NO: 1831718 - DNA, 25 bp, Homo sapien
ctcgttttccgtagagtctctttgc

SEQ ID NO: 1831719 - DNA, 25 bp, Homo sapien
tgggcttcatagaaagggtcacctc

SEQ ID NO: 1831720 - DNA, 25 bp, Homo sapien
aatacattcgccaccccgatgaggt

SEQ ID NO: 1831721 - DNA, 25 bp, Homo sapien
ccattcttggtaaaggtctctcatg

SEQ ID NO: 1831722 - DNA, 25 bp, Homo sapien
tcctttcctcctcacttggatagct

SEQ ID NO: 1831723 - DNA, 25 bp, Homo sapien
tccagcttctcaatggtccacactt

SEQ ID NO: 1831724 - DNA, 25 bp, Homo sapien
ggatagctggttcactcactattgc

SEQ ID NO: 1831725 - DNA, 25 bp, Homo sapien
tccaagctgcagtgaagtggtatga

SEQ ID NO: 1831726 - DNA, 25 bp, Homo sapien
atgacaccatgactgactatttttt

SEQ ID NO: 1831727 - DNA, 25 bp, Homo sapien
gcacatgacaccatgactgactatt

SEQ ID NO: 1831728 - DNA, 25 bp, Homo sapien
ggtatgatcttagtgcactgcagcc

SEQ ID NO: 1831729 - DNA, 25 bp, Homo sapien
ttcctattggcactgaggtttgcag

SEQ ID NO: 1831730 - DNA, 25 bp, Homo sapien
caggctttgtcggaagagttcatcc

SEQ ID NO: 1831731 - DNA, 25 bp, Homo sapien
aggaagtttgcttccctcaccaagg

SEQ ID NO: 1831732 - DNA, 25 bp, Homo sapien
cagctgctctcgcagttttgccagg

SEQ ID NO: 1831733 - DNA, 25 bp, Homo sapien
agaaaatcaatctggaattaaggga

SEQ ID NO: 1831734 - DNA, 25 bp, Homo sapien
tcggttcccatgatttagctctcac

SEQ ID NO: 1831735 - DNA, 25 bp, Homo sapien
ttttctaagaatgatggccgccagt

SEQ ID NO: 1831736 - DNA, 25 bp, Homo sapien
tatacaggtcaactcatgactaagg

SEQ ID NO: 1831737 - DNA, 25 bp, Homo sapien
taacagagggcttacacttgtcttc

SEQ ID NO: 1831738 - DNA, 25 bp, Homo sapien
taatgggcgccttctcaggcactgg

SEQ ID NO: 1831739 - DNA, 25 bp, Homo sapien
tcctgttactgctatcgagaaggca

SEQ ID NO: 1831740 - DNA, 25 bp, Homo sapien
gaaagagtgtgagccatcaccaatg

SEQ ID NO: 1831741 - DNA, 25 bp, Homo sapien
ttgtgcccttggtctcttgccttgg

SEQ ID NO: 1831742 - DNA, 25 bp, Homo sapien
ctgtagaacaaagattattataata

SEQ ID NO: 1831743 - DNA, 25 bp, Homo sapien
aatcatatctataatctatttctag

SEQ ID NO: 1831744 - DNA, 25 bp, Homo sapien
atatattagctttattatactggaa

SEQ ID NO: 1831745 - DNA, 25 bp, Homo sapien
tggcttactgtaaccattgcctcct

SEQ ID NO: 1831746 - DNA, 25 bp, Homo sapien
cttggcttactgtaaccattgcctc

SEQ ID NO: 1831747 - DNA, 25 bp, Homo sapien
accatgcgctgctattttttctttt

SEQ ID NO: 1831748 - DNA, 25 bp, Homo sapien
cgcctgccaccatgcgctgctattt

SEQ ID NO: 1831749 - DNA, 25 bp, Homo sapien
gttcccgctcatacatgagccgctg

SEQ ID NO: 1831750 - DNA, 25 bp, Homo sapien
tgctggcggagttgctccagttccc

SEQ ID NO: 1831751 - DNA, 25 bp, Homo sapien
cggtcagggccgctactctgtggct

SEQ ID NO: 1831752 - DNA, 25 bp, Homo sapien
gagccgctgctcctctagggcactt

SEQ ID NO: 1831753 - DNA, 25 bp, Homo sapien
ccaggacctgaaccacattttgaac

SEQ ID NO: 1831754 - DNA, 25 bp, Homo sapien
tttctccaggacctgaaccacattt

SEQ ID NO: 1831755 - DNA, 25 bp, Homo sapien
caggacctgaaccacattttgaact

SEQ ID NO: 1831756 - DNA, 25 bp, Homo sapien
tctccaggacctgaaccacattttg

SEQ ID NO: 1831757 - DNA, 25 bp, Homo sapien
gacagggtgctacagtacttgccat

SEQ ID NO: 1831758 - DNA, 25 bp, Homo sapien
tatttagatggagcccaactgtcct

SEQ ID NO: 1831759 - DNA, 25 bp, Homo sapien
tagtcagtagtgcagaaacacacat

SEQ ID NO: 1831760 - DNA, 25 bp, Homo sapien
tctcaaacagtatataggctctggg

SEQ ID NO: 1831761 - DNA, 25 bp, Homo sapien
gtaggtgaatatatatctggaagta

SEQ ID NO: 1831762 - DNA, 25 bp, Homo sapien
ctattactgggatactgtaggtgaa

SEQ ID NO: 1831763 - DNA, 25 bp, Homo sapien
caaagccatcgataacagcagtaat

SEQ ID NO: 1831764 - DNA, 25 bp, Homo sapien
ggaagtactactgacctgaactgct

SEQ ID NO: 1831765 - DNA, 25 bp, Homo sapien
gaaagaggatcttcaaataagacca

SEQ ID NO: 1831766 - DNA, 25 bp, Homo sapien
gaggagcttcgtctgaaaccacatg

SEQ ID NO: 1831767 - DNA, 25 bp, Homo sapien
tcccagtgtttgtggaggagcttcg

SEQ ID NO: 1831768 - DNA, 25 bp, Homo sapien
ggcagacaggcttattatcgggaag

SEQ ID NO: 1831769 - DNA, 25 bp, Homo sapien
gcgatctcagctctaactgcggcct

SEQ ID NO: 1831770 - DNA, 25 bp, Homo sapien
ttaagacagactgggattcaccatg

SEQ ID NO: 1831771 - DNA, 25 bp, Homo sapien
acactggagagcaaggcctgatctg

SEQ ID NO: 1831772 - DNA, 25 bp, Homo sapien
ttcaatatggacaaaatcaacactg

SEQ ID NO: 1831773 - DNA, 25 bp, Homo sapien
atccaggtcatgctctggcgggccc

SEQ ID NO: 1831774 - DNA, 25 bp, Homo sapien
caatctcgacgtttcctcttaggta

SEQ ID NO: 1831775 - DNA, 25 bp, Homo sapien
ttcagggttttcatgataacttcca

SEQ ID NO: 1831776 - DNA, 25 bp, Homo sapien
tcatagttatagtctggttcagagg

SEQ ID NO: 1831777 - DNA, 25 bp, Homo sapien
tgattatttccccataggattcggt

SEQ ID NO: 1831778 - DNA, 25 bp, Homo sapien
cacagctgggtggtactgcacacaa

SEQ ID NO: 1831779 - DNA, 25 bp, Homo sapien
cataggattcggtcaccatgccaca

SEQ ID NO: 1831780 - DNA, 25 bp, Homo sapien
gcacacaagggtgccgttcacacag

SEQ ID NO: 1831781 - DNA, 25 bp, Homo sapien
ttgagaggtatctgcacccaccctg

SEQ ID NO: 1831782 - DNA, 25 bp, Homo sapien
gagtgacgtctccatcagatgcaat

SEQ ID NO: 1831783 - DNA, 25 bp, Homo sapien
tttcttttggagtgagagtgacgtc

SEQ ID NO: 1831784 - DNA, 25 bp, Homo sapien
tgtcaatctcacagtgctgaggctg

SEQ ID NO: 1831785 - DNA, 25 bp, Homo sapien
gaagttcgttaagagcagggtctgc

SEQ ID NO: 1831786 - DNA, 25 bp, Homo sapien
cagggaaatccccatgctttcaagt

SEQ ID NO: 1831787 - DNA, 25 bp, Homo sapien
gcattcagattgactaagtagcatt

SEQ ID NO: 1831788 - DNA, 25 bp, Homo sapien
caccttgataccggacatctccagg

SEQ ID NO: 1831789 - DNA, 25 bp, Homo sapien
ttctcttcccaagtcactgttagtt

SEQ ID NO: 1831790 - DNA, 25 bp, Homo sapien
cagactcttcgagcttctccttcag

SEQ ID NO: 1831791 - DNA, 25 bp, Homo sapien
tcttcccaagtcactgttagttctt

SEQ ID NO: 1831792 - DNA, 25 bp, Homo sapien
ttatcagcttttcagactcttcgag

SEQ ID NO: 1831793 - DNA, 25 bp, Homo sapien
gcagggagtaccaggctgcttttac

SEQ ID NO: 1831794 - DNA, 25 bp, Homo sapien
cagcagggagtaccaggctgctttt

SEQ ID NO: 1831795 - DNA, 25 bp, Homo sapien
agcagggagtaccaggctgctttta

SEQ ID NO: 1831796 - DNA, 25 bp, Homo sapien
ctatcatagaggtttggctgttgcc

SEQ ID NO: 1831797 - DNA, 25 bp, Homo sapien
tcatagttgtctgcggctgggctga

SEQ ID NO: 1831798 - DNA, 25 bp, Homo sapien
catatcttaatgtggagagggtctc

SEQ ID NO: 1831799 - DNA, 25 bp, Homo sapien
cacaatccttttggctcggtctgca

SEQ ID NO: 1831800 - DNA, 25 bp, Homo sapien
tctgtcacatctggaatagccaatt

SEQ ID NO: 1831801 - DNA, 25 bp, Homo sapien
gactgaatctcgataaggcacaaat

SEQ ID NO: 1831802 - DNA, 25 bp, Homo sapien
gatgatataaccaaccccaaggttg

SEQ ID NO: 1831803 - DNA, 25 bp, Homo sapien
gcagccaagtgaggactgaatctcg

SEQ ID NO: 1831804 - DNA, 25 bp, Homo sapien
tttgcttttacccttgccagctgcc

SEQ ID NO: 1831805 - DNA, 25 bp, Homo sapien
tcgagtgctacttgctaacagaaca

SEQ ID NO: 1831806 - DNA, 25 bp, Homo sapien
ggcagacggtgtaatttgccataca

SEQ ID NO: 1831807 - DNA, 25 bp, Homo sapien
gtgaagaccaaaacatggacctctg

SEQ ID NO: 1831808 - DNA, 25 bp, Homo sapien
gcttcgggtagccattaaacacagt

SEQ ID NO: 1831809 - DNA, 25 bp, Homo sapien
gagagtgctctatgatccaaatgtg

SEQ ID NO: 1831810 - DNA, 25 bp, Homo sapien
gaacccacttttggagatgttagct

SEQ ID NO: 1831811 - DNA, 25 bp, Homo sapien
catttagtgactagccattactgaa

SEQ ID NO: 1831812 - DNA, 25 bp, Homo sapien
gaatgagactgggaacgatacccat

SEQ ID NO: 1831813 - DNA, 25 bp, Homo sapien
gttattcaacgtctctaagcatcag

SEQ ID NO: 1831814 - DNA, 25 bp, Homo sapien
cgtctctaagcatcagtcctttcct

SEQ ID NO: 1831815 - DNA, 25 bp, Homo sapien
tcaacgtctctaagcatcagtcctt

SEQ ID NO: 1831816 - DNA, 25 bp, Homo sapien
tatttatgttattcaacgtctctaa

SEQ ID NO: 1831817 - DNA, 25 bp, Homo sapien
gccttctttcagtcgctctcctgca

SEQ ID NO: 1831818 - DNA, 25 bp, Homo sapien
gatactctttcgctacccgccaggt

SEQ ID NO: 1831819 - DNA, 25 bp, Homo sapien
tgcagctcctgttttagatactctt

SEQ ID NO: 1831820 - DNA, 25 bp, Homo sapien
cgccaggtctaccaagctgacctta

SEQ ID NO: 1831821 - DNA, 25 bp, Homo sapien
taagcaaagtagctcacctagtaag

SEQ ID NO: 1831822 - DNA, 25 bp, Homo sapien
aaccatgaaagactttacctatatg

SEQ ID NO: 1831823 - DNA, 25 bp, Homo sapien
gactttacctatatggacactttca

SEQ ID NO: 1831824 - DNA, 25 bp, Homo sapien
gtagctcacctagtaagcagaagag

SEQ ID NO: 1831825 - DNA, 25 bp, Homo sapien
cccagactgcaggtcataaagtgtc

SEQ ID NO: 1831826 - DNA, 25 bp, Homo sapien
ggagcggctgctttcttcgttcatg

SEQ ID NO: 1831827 - DNA, 25 bp, Homo sapien
gtagcagctaccgttcgagacttat

SEQ ID NO: 1831828 - DNA, 25 bp, Homo sapien
cgagacttatttccctcagacatca

SEQ ID NO: 1831829 - DNA, 25 bp, Homo sapien
gggcaaagcataaggaaaagaccat

SEQ ID NO: 1831830 - DNA, 25 bp, Homo sapien
caaagcataaggaaaagaccataag

SEQ ID NO: 1831831 - DNA, 25 bp, Homo sapien
aaaacacaagaatgtagtcctgcac

SEQ ID NO: 1831832 - DNA, 25 bp, Homo sapien
cctgcacaccaggtatatgtattaa

SEQ ID NO: 1831833 - DNA, 25 bp, Homo sapien
tcgtggaggtcaagcaactttcccc

SEQ ID NO: 1831834 - DNA, 25 bp, Homo sapien
tgggatgcaaatagagcaccctggc

SEQ ID NO: 1831835 - DNA, 25 bp, Homo sapien
gagctaagaaccagggacctcagtg

SEQ ID NO: 1831836 - DNA, 25 bp, Homo sapien
tccccaaatccagtaagaggtagag

SEQ ID NO: 1831837 - DNA, 25 bp, Homo sapien
tgacagctagttgagataaaccatc

SEQ ID NO: 1831838 - DNA, 25 bp, Homo sapien
taaaccatctacatatggtcccaaa

SEQ ID NO: 1831839 - DNA, 25 bp, Homo sapien
gagataaaccatctacatatggtcc

SEQ ID NO: 1831840 - DNA, 25 bp, Homo sapien
aactagtgacagctagttgagataa

SEQ ID NO: 1831841 - DNA, 25 bp, Homo sapien
gatgtgttacctagaaactcctgca

SEQ ID NO: 1831842 - DNA, 25 bp, Homo sapien
gcagcactctattgataaaagcagg

SEQ ID NO: 1831843 - DNA, 25 bp, Homo sapien
gacagtgagctacttagatgcacac

SEQ ID NO: 1831844 - DNA, 25 bp, Homo sapien
gatgcacacgatccagtacacagct

SEQ ID NO: 1831845 - DNA, 25 bp, Homo sapien
tcctgcagcctctcaagaagctggg

SEQ ID NO: 1831846 - DNA, 25 bp, Homo sapien
acagatgcccatcgccacacctggg

SEQ ID NO: 1831847 - DNA, 25 bp, Homo sapien
gatgcccatcgccacacctgggtaa

SEQ ID NO: 1831848 - DNA, 25 bp, Homo sapien
attacagatgcccatcgccacacct

SEQ ID NO: 1831849 - DNA, 25 bp, Homo sapien
gccttggaataaggcccagctgctc

SEQ ID NO: 1831850 - DNA, 25 bp, Homo sapien
gatcccgaactttctcattataaat

SEQ ID NO: 1831851 - DNA, 25 bp, Homo sapien
cagcatggcccatcatggaaaagga

SEQ ID NO: 1831852 - DNA, 25 bp, Homo sapien
gcagagccttggaataaggcccagc

SEQ ID NO: 1831853 - DNA, 25 bp, Homo sapien
ggcatgatcccccacatctggtcta

SEQ ID NO: 1831854 - DNA, 25 bp, Homo sapien
gagtggccaacttagcctcaaaccc

SEQ ID NO: 1831855 - DNA, 25 bp, Homo sapien
gaagagtggccaacttagcctcaaa

SEQ ID NO: 1831856 - DNA, 25 bp, Homo sapien
gtggccaacttagcctcaaaccctg

SEQ ID NO: 1831857 - DNA, 25 bp, Homo sapien
tacacgcattatacccctgaaaggc

SEQ ID NO: 1831858 - DNA, 25 bp, Homo sapien
aaaaatacacgcattatacccctga

SEQ ID NO: 1831859 - DNA, 25 bp, Homo sapien
ccatatgcaaaaatacacgcattat

SEQ ID NO: 1831860 - DNA, 25 bp, Homo sapien
cgcattatacccctgaaaggctttt

SEQ ID NO: 1831861 - DNA, 25 bp, Homo sapien
ttgaaattctaatgaatcccataag

SEQ ID NO: 1831862 - DNA, 25 bp, Homo sapien
tgaaattctaatgaatcccataaga

SEQ ID NO: 1831863 - DNA, 25 bp, Homo sapien
tagtttacactttggtcaaagtatg

SEQ ID NO: 1831864 - DNA, 25 bp, Homo sapien
cactttggtcaaagtatgactgttt

SEQ ID NO: 1831865 - DNA, 25 bp, Homo sapien
gcagtttcctattgactttactagg

SEQ ID NO: 1831866 - DNA, 25 bp, Homo sapien
tctctaaaaatgcattggtctctac

SEQ ID NO: 1831867 - DNA, 25 bp, Homo sapien
tacatgtttacctctgtgcagtttc

SEQ ID NO: 1831868 - DNA, 25 bp, Homo sapien
ggtctctacttacaacactctcaac

SEQ ID NO: 1831869 - DNA, 25 bp, Homo sapien
aaaaaggagctgtttacgctgagtg

SEQ ID NO: 1831870 - DNA, 25 bp, Homo sapien
gggtggatcccataaaagacgcaat

SEQ ID NO: 1831871 - DNA, 25 bp, Homo sapien
cagcataggaaaagacgacttgcca

SEQ ID NO: 1831872 - DNA, 25 bp, Homo sapien
agacgcaatatctccaccctaaacg

SEQ ID NO: 1831873 - DNA, 25 bp, Homo sapien
gccactctgcagatgttagctccac

SEQ ID NO: 1831874 - DNA, 25 bp, Homo sapien
tcagcagaaccgatgccaaaaaggc

SEQ ID NO: 1831875 - DNA, 25 bp, Homo sapien
tcgttaagtcccgtgggaagcagga

SEQ ID NO: 1831876 - DNA, 25 bp, Homo sapien
gacaatccgagcagagccataacat

SEQ ID NO: 1831877 - DNA, 25 bp, Homo sapien
gagagagctcctgtatggaatttct

SEQ ID NO: 1831878 - DNA, 25 bp, Homo sapien
gcctgacctcacttgttaataacca

SEQ ID NO: 1831879 - DNA, 25 bp, Homo sapien
ttctacaagcaaagtcacagacctg

SEQ ID NO: 1831880 - DNA, 25 bp, Homo sapien
ctggtgcagcaaattcacagggcaa

SEQ ID NO: 1831881 - DNA, 25 bp, Homo sapien
ccagctgagttatgcttgtacaaag

SEQ ID NO: 1831882 - DNA, 25 bp, Homo sapien
gggtcagttgtatttgctcctaaac

SEQ ID NO: 1831883 - DNA, 25 bp, Homo sapien
agagggctgctgattctaagaaaac

SEQ ID NO: 1831884 - DNA, 25 bp, Homo sapien
ccagctgggaggctactctctggac

SEQ ID NO: 1831885 - DNA, 25 bp, Homo sapien
atggaccaaaagcaataatcaaagg

SEQ ID NO: 1831886 - DNA, 25 bp, Homo sapien
tggaccaaaagcaataatcaaaggc

SEQ ID NO: 1831887 - DNA, 25 bp, Homo sapien
catggaccaaaagcaataatcaaag

SEQ ID NO: 1831888 - DNA, 25 bp, Homo sapien
ggaccaaaagcaataatcaaaggca

SEQ ID NO: 1831889 - DNA, 25 bp, Homo sapien
ctgaatgaaagaacaaaatattaaa

SEQ ID NO: 1831890 - DNA, 25 bp, Homo sapien
aaaaaatcactataggtttggtgct

SEQ ID NO: 1831891 - DNA, 25 bp, Homo sapien
gttgcagacaggaggtcttgcccta

SEQ ID NO: 1831892 - DNA, 25 bp, Homo sapien
ggatggccactactgtctgactgaa

SEQ ID NO: 1831893 - DNA, 25 bp, Homo sapien
gcatgccaccatatcgagcaattaa

SEQ ID NO: 1831894 - DNA, 25 bp, Homo sapien
ttcatctctgtccttgttctctcct

SEQ ID NO: 1831895 - DNA, 25 bp, Homo sapien
ctcagaattactaagtataatttca

SEQ ID NO: 1831896 - DNA, 25 bp, Homo sapien
tataatttcatctctgtccttgttc

SEQ ID NO: 1831897 - DNA, 25 bp, Homo sapien
gaattactaagtataatttcatctc

SEQ ID NO: 1831898 - DNA, 25 bp, Homo sapien
tccatatcgaattcatctttgaagc

SEQ ID NO: 1831899 - DNA, 25 bp, Homo sapien
gcctgcaatgtttatagtagtcact

SEQ ID NO: 1831900 - DNA, 25 bp, Homo sapien
cctgaaagcaggatccatatcgaat

SEQ ID NO: 1831901 - DNA, 25 bp, Homo sapien
tacttattgatgtacttaatggcat

SEQ ID NO: 1831902 - DNA, 25 bp, Homo sapien
taagacttctaattgggccaggctc

SEQ ID NO: 1831903 - DNA, 25 bp, Homo sapien
tcaggtggataaacaagcaagggca

SEQ ID NO: 1831904 - DNA, 25 bp, Homo sapien
tccatggcagcaggaactatgttcc

SEQ ID NO: 1831905 - DNA, 25 bp, Homo sapien
gattcggtcactagatgagcactgg

SEQ ID NO: 1831906 - DNA, 25 bp, Homo sapien
cagggaactcaagtatgtactaggc

SEQ ID NO: 1831907 - DNA, 25 bp, Homo sapien
tctggaaagcaataaactaacaccc

SEQ ID NO: 1831908 - DNA, 25 bp, Homo sapien
caactgcaaaatggtcaatctggaa

SEQ ID NO: 1831909 - DNA, 25 bp, Homo sapien
ccataaaaacgagatgtgaaggtgc

SEQ ID NO: 1831910 - DNA, 25 bp, Homo sapien
gattccaccaatgatcaagaaatcc

SEQ ID NO: 1831911 - DNA, 25 bp, Homo sapien
ttgggtatattgaacacagtgagat

SEQ ID NO: 1831912 - DNA, 25 bp, Homo sapien
ccaccaatgatcaagaaatcctttg

SEQ ID NO: 1831913 - DNA, 25 bp, Homo sapien
tgagagattccaccaatgatcaaga

SEQ ID NO: 1831914 - DNA, 25 bp, Homo sapien
cctggacggtttagccaattaagca

SEQ ID NO: 1831915 - DNA, 25 bp, Homo sapien
ctggacggtttagccaattaagcat

SEQ ID NO: 1831916 - DNA, 25 bp, Homo sapien
gctctccccctggacggtttagcca

SEQ ID NO: 1831917 - DNA, 25 bp, Homo sapien
cagctgacactttcctagttctatg

SEQ ID NO: 1831918 - DNA, 25 bp, Homo sapien
tcctagttctatgtcttagcacatc

SEQ ID NO: 1831919 - DNA, 25 bp, Homo sapien
tgattgtatcagtcaaagccatgac

SEQ ID NO: 1831920 - DNA, 25 bp, Homo sapien
taagtgaccccgacacataggtttg

SEQ ID NO: 1831921 - DNA, 25 bp, Homo sapien
tttcactaacacttgcctaaaggtg

SEQ ID NO: 1831922 - DNA, 25 bp, Homo sapien
actactgttgagatacctgtgtggc

SEQ ID NO: 1831923 - DNA, 25 bp, Homo sapien
tatttagaggaattaggcatggtct

SEQ ID NO: 1831924 - DNA, 25 bp, Homo sapien
tctgacatccggaagcttaaaacca

SEQ ID NO: 1831925 - DNA, 25 bp, Homo sapien
tcccacaatgcatattaggagtgct

SEQ ID NO: 1831926 - DNA, 25 bp, Homo sapien
gaatgaagagctatgttcagtcaac

SEQ ID NO: 1831927 - DNA, 25 bp, Homo sapien
gctacggttccatgagaatacctgg

SEQ ID NO: 1831928 - DNA, 25 bp, Homo sapien
gaacactattcttgcagttggtgag

SEQ ID NO: 1831929 - DNA, 25 bp, Homo sapien
gaatacctggtagggcaagaattgg

SEQ ID NO: 1831930 - DNA, 25 bp, Homo sapien
gggaagctacggttccatgagaata

SEQ ID NO: 1831931 - DNA, 25 bp, Homo sapien
gcttgcagtttgacagcgtgcagga

SEQ ID NO: 1831932 - DNA, 25 bp, Homo sapien
cgtgcaggacctgccaccttgagga

SEQ ID NO: 1831933 - DNA, 25 bp, Homo sapien
tgcaggacctgccaccttgaggact

SEQ ID NO: 1831934 - DNA, 25 bp, Homo sapien
ccagatgcttgcagtttgacagcgt

SEQ ID NO: 1831935 - DNA, 25 bp, Homo sapien
tgggagcaagagaccccctgactca

SEQ ID NO: 1831936 - DNA, 25 bp, Homo sapien
cccctgactcagcagcctactgatt

SEQ ID NO: 1831937 - DNA, 25 bp, Homo sapien
gaccccctgactcagcagcctactg

SEQ ID NO: 1831938 - DNA, 25 bp, Homo sapien
ctgggagcaagagaccccctgactc

SEQ ID NO: 1831939 - DNA, 25 bp, Homo sapien
ttcctcgtggcacctgttgcacttt

SEQ ID NO: 1831940 - DNA, 25 bp, Homo sapien
ggcctcaaacctgtcatgaaacatg

SEQ ID NO: 1831941 - DNA, 25 bp, Homo sapien
taaaagtaatatgcggctgggtgcg

SEQ ID NO: 1831942 - DNA, 25 bp, Homo sapien
gaaaaggtgcaactgggtatgccca

SEQ ID NO: 1831943 - DNA, 25 bp, Homo sapien
gaaaacatactccaatgaggcacga

SEQ ID NO: 1831944 - DNA, 25 bp, Homo sapien
tttcaactagttcgacctgcctgcc

SEQ ID NO: 1831945 - DNA, 25 bp, Homo sapien
tctctcacagataaagaaagctgcc

SEQ ID NO: 1831946 - DNA, 25 bp, Homo sapien
tacaccagttgcttaagtgcagacg

SEQ ID NO: 1831947 - DNA, 25 bp, Homo sapien
gcccggcttgtagcgtgcacttgca

SEQ ID NO: 1831948 - DNA, 25 bp, Homo sapien
ggcacaatttcggccaccgcaacct

SEQ ID NO: 1831949 - DNA, 25 bp, Homo sapien
gaagatagaacggtcctgaaagacg

SEQ ID NO: 1831950 - DNA, 25 bp, Homo sapien
gcttattatattgcggcagcctgga

SEQ ID NO: 1831951 - DNA, 25 bp, Homo sapien
tctcacctaacgaagaattgggctt

SEQ ID NO: 1831952 - DNA, 25 bp, Homo sapien
caacccaattagaaagcatagtgtc

SEQ ID NO: 1831953 - DNA, 25 bp, Homo sapien
tccacaagggattcgagcatgcaaa

SEQ ID NO: 1831954 - DNA, 25 bp, Homo sapien
taaaagatagtctcacctggccggg

SEQ ID NO: 1831955 - DNA, 25 bp, Homo sapien
gaatctgaccattctgtcggaggca

SEQ ID NO: 1831956 - DNA, 25 bp, Homo sapien
taaggcactttagggcgctttccgc

SEQ ID NO: 1831957 - DNA, 25 bp, Homo sapien
ctggaactacaactagatgatcaca

SEQ ID NO: 1831958 - DNA, 25 bp, Homo sapien
tatgcaattgaataccatacagcaa

SEQ ID NO: 1831959 - DNA, 25 bp, Homo sapien
cactgaacgaaagaagctagataca

SEQ ID NO: 1831960 - DNA, 25 bp, Homo sapien
tatgtaaggtgccaaaataggctaa

SEQ ID NO: 1831961 - DNA, 25 bp, Homo sapien
gggtctgatgcaattcacctcacgc

SEQ ID NO: 1831962 - DNA, 25 bp, Homo sapien
tagtacacctaaggacacctaagga

SEQ ID NO: 1831963 - DNA, 25 bp, Homo sapien
gatgaatgccccacaggattttaac

SEQ ID NO: 1831964 - DNA, 25 bp, Homo sapien
gcaataactatctctcaatctgagg

SEQ ID NO: 1831965 - DNA, 25 bp, Homo sapien
ctggaattagagatgtgagccactg

SEQ ID NO: 1831966 - DNA, 25 bp, Homo sapien
gaattagagatgtgagccactgtga

SEQ ID NO: 1831967 - DNA, 25 bp, Homo sapien
tgctggaattagagatgtgagccac

SEQ ID NO: 1831968 - DNA, 25 bp, Homo sapien
ggaattagagatgtgagccactgtg

SEQ ID NO: 1831969 - DNA, 25 bp, Homo sapien
catacaatttacccactaaaagtgt

SEQ ID NO: 1831970 - DNA, 25 bp, Homo sapien
ccatacaatttacccactaaaagtg

SEQ ID NO: 1831971 - DNA, 25 bp, Homo sapien
tacgatgagcctgtgtatatcaagt

SEQ ID NO: 1831972 - DNA, 25 bp, Homo sapien
ctttgtgtgtttgcacccaactacg

SEQ ID NO: 1831973 - DNA, 25 bp, Homo sapien
tgtttgcacccaactacgatgagcc

SEQ ID NO: 1831974 - DNA, 25 bp, Homo sapien
cccaactacgatgagcctgtgtata

SEQ ID NO: 1831975 - DNA, 25 bp, Homo sapien
cggtatggattcacttgaccacatc

SEQ ID NO: 1831976 - DNA, 25 bp, Homo sapien
ggtttcaacatggatcggtatggat

SEQ ID NO: 1831977 - DNA, 25 bp, Homo sapien
gagtgtctcctagatctaatcccaa

SEQ ID NO: 1831978 - DNA, 25 bp, Homo sapien
tatgacaatctgagcactaacaaga

SEQ ID NO: 1831979 - DNA, 25 bp, Homo sapien
tagatagtgctaccgcctcaaggca

SEQ ID NO: 1831980 - DNA, 25 bp, Homo sapien
cctggactccagaggtaatgctcct

SEQ ID NO: 1831981 - DNA, 25 bp, Homo sapien
ggcagaactttgtcttggactaaac

SEQ ID NO: 1831982 - DNA, 25 bp, Homo sapien
tttggtattatgcactttctcaggg

SEQ ID NO: 1831983 - DNA, 25 bp, Homo sapien
tttctggaagactgcacgtgtcagg

SEQ ID NO: 1831984 - DNA, 25 bp, Homo sapien
gacctgcagtgttaggtttcctcct

SEQ ID NO: 1831985 - DNA, 25 bp, Homo sapien
gaaggctcaaccatgggactaggac

SEQ ID NO: 1831986 - DNA, 25 bp, Homo sapien
cttatgctcaatcactcaaggatgg

SEQ ID NO: 1831987 - DNA, 25 bp, Homo sapien
gatttcagatcgcttacatgcttcc

SEQ ID NO: 1831988 - DNA, 25 bp, Homo sapien
actagatttcagatcgcttacatgc

SEQ ID NO: 1831989 - DNA, 25 bp, Homo sapien
gtgaaagtaactagatttcagatcg

SEQ ID NO: 1831990 - DNA, 25 bp, Homo sapien
gatcgcttacatgcttccagcaatt

SEQ ID NO: 1831991 - DNA, 25 bp, Homo sapien
agcagccagttcatcaagcccacag

SEQ ID NO: 1831992 - DNA, 25 bp, Homo sapien
agccagttcatcaagcccacagacc

SEQ ID NO: 1831993 - DNA, 25 bp, Homo sapien
tcaagcctcttctaacagcagccag

SEQ ID NO: 1831994 - DNA, 25 bp, Homo sapien
cagcagccagttcatcaagcccaca

SEQ ID NO: 1831995 - DNA, 25 bp, Homo sapien
tctggtctacagagacacaggagcc

SEQ ID NO: 1831996 - DNA, 25 bp, Homo sapien
ggaaccatcctagaagccttcagaa

SEQ ID NO: 1831997 - DNA, 25 bp, Homo sapien
tgggcagagagaagaataacaacac

SEQ ID NO: 1831998 - DNA, 25 bp, Homo sapien
ttcagaatggcggaggaagccagct

SEQ ID NO: 1831999 - DNA, 25 bp, Homo sapien
gacctcttacacttcaaaccttgga

SEQ ID NO: 1832000 - DNA, 25 bp, Homo sapien
ttgcaaacatagcatgaagcactgc

SEQ ID NO: 1832001 - DNA, 25 bp, Homo sapien
tgagcactatctaaaaaccaatgac

SEQ ID NO: 1832002 - DNA, 25 bp, Homo sapien
tgccaatatgcatttaaagacctct

SEQ ID NO: 1832003 - DNA, 25 bp, Homo sapien
ggtgcaggaccgtttgattcccttc

SEQ ID NO: 1832004 - DNA, 25 bp, Homo sapien
gcaggaccgtttgattcccttccat

SEQ ID NO: 1832005 - DNA, 25 bp, Homo sapien
gagggtgcaggaccgtttgattccc

SEQ ID NO: 1832006 - DNA, 25 bp, Homo sapien
ggaggagggtgcaggaccgtttgat

SEQ ID NO: 1832007 - DNA, 25 bp, Homo sapien
tcatgggccggacccggacggcaac

SEQ ID NO: 1832008 - DNA, 25 bp, Homo sapien
caacttttaccttggtatccgacat

SEQ ID NO: 1832009 - DNA, 25 bp, Homo sapien
gcaacttttaccttggtatccgaca

SEQ ID NO: 1832010 - DNA, 25 bp, Homo sapien
catgggccggacccggacggcaact

SEQ ID NO: 1832011 - DNA, 25 bp, Homo sapien
cgctccgccgtgagctccgagaggc

SEQ ID NO: 1832012 - DNA, 25 bp, Homo sapien
gctccgccgtgagctccgagaggca

SEQ ID NO: 1832013 - DNA, 25 bp, Homo sapien
gcgcccgctcggccttaggcggccc

SEQ ID NO: 1832014 - DNA, 25 bp, Homo sapien
ctcggccttaggcggcccctcacgc

SEQ ID NO: 1832015 - DNA, 25 bp, Homo sapien
cacgtcgtggcgtgtacgatgtata

SEQ ID NO: 1832016 - DNA, 25 bp, Homo sapien
tctttcacgtcgtggcgtgtacgat

SEQ ID NO: 1832017 - DNA, 25 bp, Homo sapien
ctgaccaaattctttcacgtcgtgg

SEQ ID NO: 1832018 - DNA, 25 bp, Homo sapien
cgtgtacgatgtataaaagttttgg

SEQ ID NO: 1832019 - DNA, 25 bp, Homo sapien
catttatttattcgtttatttcaga

SEQ ID NO: 1832020 - DNA, 25 bp, Homo sapien
ccatttatttattcgtttatttcag

SEQ ID NO: 1832021 - DNA, 25 bp, Homo sapien
caaactagatttgcactcctggaat

SEQ ID NO: 1832022 - DNA, 25 bp, Homo sapien
taaaagcagtatgtctgggcgttcc

SEQ ID NO: 1832023 - DNA, 25 bp, Homo sapien
gaccttcacggcgagtattacaacc

SEQ ID NO: 1832024 - DNA, 25 bp, Homo sapien
tcctggaatccagtagatccttcta

SEQ ID NO: 1832025 - DNA, 25 bp, Homo sapien
gttttgctgttctttcctcctccgc

SEQ ID NO: 1832026 - DNA, 25 bp, Homo sapien
ttctttcctcctccgctcctcctac

SEQ ID NO: 1832027 - DNA, 25 bp, Homo sapien
gttctttcctcctccgctcctccta

SEQ ID NO: 1832028 - DNA, 25 bp, Homo sapien
ttgctgttctttcctcctccgctcc

SEQ ID NO: 1832029 - DNA, 25 bp, Homo sapien
gaatccttcctcgaaggcgctcacc

SEQ ID NO: 1832030 - DNA, 25 bp, Homo sapien
ggaatccttcctcgaaggcgctcac

SEQ ID NO: 1832031 - DNA, 25 bp, Homo sapien
atccttcctcgaaggcgctcaccct

SEQ ID NO: 1832032 - DNA, 25 bp, Homo sapien
tggaatccttcctcgaaggcgctca

SEQ ID NO: 1832033 - DNA, 25 bp, Homo sapien
tggccttgtctactgtgcatatacc

SEQ ID NO: 1832034 - DNA, 25 bp, Homo sapien
ccttggcaaactcacatggggtgac

SEQ ID NO: 1832035 - DNA, 25 bp, Homo sapien
taggaatttgggactccaaattctg

SEQ ID NO: 1832036 - DNA, 25 bp, Homo sapien
caaattctggtcatctttctcaaca

SEQ ID NO: 1832037 - DNA, 25 bp, Homo sapien
gactcctagctctgaaggtgtccat

SEQ ID NO: 1832038 - DNA, 25 bp, Homo sapien
tcaggctagaagtcacagtcagctc

SEQ ID NO: 1832039 - DNA, 25 bp, Homo sapien
gactgcagcagtcaaggctttagct

SEQ ID NO: 1832040 - DNA, 25 bp, Homo sapien
tgcctaggtcagaggctccatccgg

SEQ ID NO: 1832041 - DNA, 25 bp, Homo sapien
tggtggaaaacatgctgcctaaccc

SEQ ID NO: 1832042 - DNA, 25 bp, Homo sapien
aagtgcgctcgagtggcttcttgac

SEQ ID NO: 1832043 - DNA, 25 bp, Homo sapien
cacgtggcccattgcatgctctctg

SEQ ID NO: 1832044 - DNA, 25 bp, Homo sapien
agtgaattaaggaagtgcgctcgag

SEQ ID NO: 1832045 - DNA, 25 bp, Homo sapien
cgtggcccattgcatgctctctgtg

SEQ ID NO: 1832046 - DNA, 25 bp, Homo sapien
ttttaaggacgttactattgatcat

SEQ ID NO: 1832047 - DNA, 25 bp, Homo sapien
tcttttaaggacgttactattgatc

SEQ ID NO: 1832048 - DNA, 25 bp, Homo sapien
tctcttttaaggacgttactattga

SEQ ID NO: 1832049 - DNA, 25 bp, Homo sapien
cttttaaggacgttactattgatca

SEQ ID NO: 1832050 - DNA, 25 bp, Homo sapien
tcagtggtacttcaagtgtggcaga

SEQ ID NO: 1832051 - DNA, 25 bp, Homo sapien
cagtggtacttcaagtgtggcagac

SEQ ID NO: 1832052 - DNA, 25 bp, Homo sapien
ctacagccaaggtggccaatgcaga

SEQ ID NO: 1832053 - DNA, 25 bp, Homo sapien
gtcctctacagccaaggtggccaat

SEQ ID NO: 1832054 - DNA, 25 bp, Homo sapien
cagtaagtaactatgacctcgagga

SEQ ID NO: 1832055 - DNA, 25 bp, Homo sapien
ccctgcctggatagatgagtttaag

SEQ ID NO: 1832056 - DNA, 25 bp, Homo sapien
gcaagtggctatgcctgtactccta

SEQ ID NO: 1832057 - DNA, 25 bp, Homo sapien
gccatcagagcagtcgcaaattgaa

SEQ ID NO: 1832058 - DNA, 25 bp, Homo sapien
aacactttgatggagcgatcgccgg

SEQ ID NO: 1832059 - DNA, 25 bp, Homo sapien
taagagccacaggatgcgaaagacc

SEQ ID NO: 1832060 - DNA, 25 bp, Homo sapien
tcttgggacaaagcgccagtccggt

SEQ ID NO: 1832061 - DNA, 25 bp, Homo sapien
tacctaatgtcttgggcagcgtccc

SEQ ID NO: 1832062 - DNA, 25 bp, Homo sapien
cgctctccgaggcttcggccgccat

SEQ ID NO: 1832063 - DNA, 25 bp, Homo sapien
ctggcccgctctccgaggcttcggc

SEQ ID NO: 1832064 - DNA, 25 bp, Homo sapien
ggcccgctctccgaggcttcggccg

SEQ ID NO: 1832065 - DNA, 25 bp, Homo sapien
cccgctctccgaggcttcggccgcc

SEQ ID NO: 1832066 - DNA, 25 bp, Homo sapien
gaagtcagtattccccagtgaagac

SEQ ID NO: 1832067 - DNA, 25 bp, Homo sapien
caactgcaagcggaaaggactctat

SEQ ID NO: 1832068 - DNA, 25 bp, Homo sapien
gcagatcagcgttctgtttctcaga

SEQ ID NO: 1832069 - DNA, 25 bp, Homo sapien
gactctatcccatggacacagggtg

SEQ ID NO: 1832070 - DNA, 25 bp, Homo sapien
tcaagttcaacatcagcgtgggcaa

SEQ ID NO: 1832071 - DNA, 25 bp, Homo sapien
gagagtaccgtagctttcaccagtg

SEQ ID NO: 1832072 - DNA, 25 bp, Homo sapien
tagaagtttgtacatgcaggccaag

SEQ ID NO: 1832073 - DNA, 25 bp, Homo sapien
caaaagcctatgaagagggccagcg

SEQ ID NO: 1832074 - DNA, 25 bp, Homo sapien
cttgattctgttatatacatggaga

SEQ ID NO: 1832075 - DNA, 25 bp, Homo sapien
gaccaccttgaaccctactgaaatg

SEQ ID NO: 1832076 - DNA, 25 bp, Homo sapien
ggatgctaggatctgagtaaaagac

SEQ ID NO: 1832077 - DNA, 25 bp, Homo sapien
ggagaaaccatgtgaaaagggatgc

SEQ ID NO: 1832078 - DNA, 25 bp, Homo sapien
catgctgattggtaaaatatcttgc

SEQ ID NO: 1832079 - DNA, 25 bp, Homo sapien
atgctgattggtaaaatatcttgca

SEQ ID NO: 1832080 - DNA, 25 bp, Homo sapien
tgctgattggtaaaatatcttgcaa

SEQ ID NO: 1832081 - DNA, 25 bp, Homo sapien
tccccaacttttatgtcgttcttca

SEQ ID NO: 1832082 - DNA, 25 bp, Homo sapien
tttcaatttcagcatgtggaacata

SEQ ID NO: 1832083 - DNA, 25 bp, Homo sapien
ttcaatttcagcatgtggaacataa

SEQ ID NO: 1832084 - DNA, 25 bp, Homo sapien
ttctgcatccccatattcacttctc

SEQ ID NO: 1832085 - DNA, 25 bp, Homo sapien
cctgcacaacttctgcatccccata

SEQ ID NO: 1832086 - DNA, 25 bp, Homo sapien
tttcctgcacaacttctgcatcccc

SEQ ID NO: 1832087 - DNA, 25 bp, Homo sapien
tgcacaacttctgcatccccatatt

SEQ ID NO: 1832088 - DNA, 25 bp, Homo sapien
accacttgggtgatacggatatgca

SEQ ID NO: 1832089 - DNA, 25 bp, Homo sapien
gatatgcaatatccaaccacattcc

SEQ ID NO: 1832090 - DNA, 25 bp, Homo sapien
ggatcatccatttccccgctcttct

SEQ ID NO: 1832091 - DNA, 25 bp, Homo sapien
tcccaataggactcatgagatttct

SEQ ID NO: 1832092 - DNA, 25 bp, Homo sapien
ttggatcataagaaagaacacacag

SEQ ID NO: 1832093 - DNA, 25 bp, Homo sapien
aggagatactgaaacttctttccca

SEQ ID NO: 1832094 - DNA, 25 bp, Homo sapien
tcccaggagggaaaacattgtatct

SEQ ID NO: 1832095 - DNA, 25 bp, Homo sapien
caggagggaaaacattgtatctgca

SEQ ID NO: 1832096 - DNA, 25 bp, Homo sapien
atggcaactaatgctcctctatccc

SEQ ID NO: 1832097 - DNA, 25 bp, Homo sapien
tggcaactaatgctcctctatccca

SEQ ID NO: 1832098 - DNA, 25 bp, Homo sapien
ctttttccctagctgcctcagtttc

SEQ ID NO: 1832099 - DNA, 25 bp, Homo sapien
tttctttttccctagctgcctcagt

SEQ ID NO: 1832100 - DNA, 25 bp, Homo sapien
ctttctttttccctagctgcctcag

SEQ ID NO: 1832101 - DNA, 25 bp, Homo sapien
gcctcagtttcccatagtttgggag

SEQ ID NO: 1832102 - DNA, 25 bp, Homo sapien
ctgggaagatcaaaaatactgcaac

SEQ ID NO: 1832103 - DNA, 25 bp, Homo sapien
gtacaatgaaatgttccccgaagaa

SEQ ID NO: 1832104 - DNA, 25 bp, Homo sapien
agtacaatgaaatgttccccgaaga

SEQ ID NO: 1832105 - DNA, 25 bp, Homo sapien
tacaatgaaatgttccccgaagaac

SEQ ID NO: 1832106 - DNA, 25 bp, Homo sapien
acaatgaaatgttccccgaagaact

SEQ ID NO: 1832107 - DNA, 25 bp, Homo sapien
acctgtgcgaggttcttttgggcca

SEQ ID NO: 1832108 - DNA, 25 bp, Homo sapien
taacaatgtttcctcgagcagagtg

SEQ ID NO: 1832109 - DNA, 25 bp, Homo sapien
ggtcaaccaattatcaggcagggtg

SEQ ID NO: 1832110 - DNA, 25 bp, Homo sapien
cacagaggacaactttgaagatcag

SEQ ID NO: 1832111 - DNA, 25 bp, Homo sapien
aatttcggtgattggttcttctgag

SEQ ID NO: 1832112 - DNA, 25 bp, Homo sapien
ggaatttcggtgattggttcttctg

SEQ ID NO: 1832113 - DNA, 25 bp, Homo sapien
caggaatttcggtgattggttcttc

SEQ ID NO: 1832114 - DNA, 25 bp, Homo sapien
tccaggaatttcggtgattggttct

SEQ ID NO: 1832115 - DNA, 25 bp, Homo sapien
tagggtaactcatagtaaaagtggc

SEQ ID NO: 1832116 - DNA, 25 bp, Homo sapien
gattcacgataacagaaactcctgt

SEQ ID NO: 1832117 - DNA, 25 bp, Homo sapien
tgaaccacatacaaggatccaggaa

SEQ ID NO: 1832118 - DNA, 25 bp, Homo sapien
tatgaacattgtcctgccaaaaagc

SEQ ID NO: 1832119 - DNA, 25 bp, Homo sapien
ctcttgcctttaaggaaagtatcta

SEQ ID NO: 1832120 - DNA, 25 bp, Homo sapien
tcttgcctttaaggaaagtatctaa

SEQ ID NO: 1832121 - DNA, 25 bp, Homo sapien
actcttgcctttaaggaaagtatct

SEQ ID NO: 1832122 - DNA, 25 bp, Homo sapien
gatgtccttgttcctgatgaaaagc

SEQ ID NO: 1832123 - DNA, 25 bp, Homo sapien
cagagttagtacttggtttttctgt

SEQ ID NO: 1832124 - DNA, 25 bp, Homo sapien
ccattcttccagagttagtacttgg

SEQ ID NO: 1832125 - DNA, 25 bp, Homo sapien
gcagtcttgccgttcacccacttgt

SEQ ID NO: 1832126 - DNA, 25 bp, Homo sapien
caagtgaagttcttgtaccatccat

SEQ ID NO: 1832127 - DNA, 25 bp, Homo sapien
caatgtcaagtgaagttcttgtacc

SEQ ID NO: 1832128 - DNA, 25 bp, Homo sapien
tgtcaagtgaagttcttgtaccatc

SEQ ID NO: 1832129 - DNA, 25 bp, Homo sapien
cttcaatgtcaagtgaagttcttgt

SEQ ID NO: 1832130 - DNA, 25 bp, Homo sapien
agagacacctttgtctcacaagcat

SEQ ID NO: 1832131 - DNA, 25 bp, Homo sapien
gacacctttgtctcacaagcatatg

SEQ ID NO: 1832132 - DNA, 25 bp, Homo sapien
ctttgtctcacaagcatatgtcttc

SEQ ID NO: 1832133 - DNA, 25 bp, Homo sapien
ttcagagacacctttgtctcacaag

SEQ ID NO: 1832134 - DNA, 25 bp, Homo sapien
agacaacaaagaacgcctgggctca

SEQ ID NO: 1832135 - DNA, 25 bp, Homo sapien
ttttgttgtccagacaacaaagaac

SEQ ID NO: 1832136 - DNA, 25 bp, Homo sapien
ttcacctgttgagctattaggaggc

SEQ ID NO: 1832137 - DNA, 25 bp, Homo sapien
gacagctagctttctgggatcgctc

SEQ ID NO: 1832138 - DNA, 25 bp, Homo sapien
tctctaatcttggtagacagctagc

SEQ ID NO: 1832139 - DNA, 25 bp, Homo sapien
cacagtcagtctctccagtcatcag

SEQ ID NO: 1832140 - DNA, 25 bp, Homo sapien
gaatcttctgacccggtatggtaaa

SEQ ID NO: 1832141 - DNA, 25 bp, Homo sapien
tagtgaagaatcacgcccacctcag

SEQ ID NO: 1832142 - DNA, 25 bp, Homo sapien
tgacccggtatggtaaatttctcat

SEQ ID NO: 1832143 - DNA, 25 bp, Homo sapien
tggccatccctctgctttttttatt

SEQ ID NO: 1832144 - DNA, 25 bp, Homo sapien
ctgggaacatgaattcacttcttag

SEQ ID NO: 1832145 - DNA, 25 bp, Homo sapien
gaacatgaattcacttcttagcaaa

SEQ ID NO: 1832146 - DNA, 25 bp, Homo sapien
gggaacatgaattcacttcttagca

SEQ ID NO: 1832147 - DNA, 25 bp, Homo sapien
ttcacttcttagcaaatatttgttg

SEQ ID NO: 1832148 - DNA, 25 bp, Homo sapien
gcgggtacgcctccgcttccacctc

SEQ ID NO: 1832149 - DNA, 25 bp, Homo sapien
tccgcttccacctccgccacttctc

SEQ ID NO: 1832150 - DNA, 25 bp, Homo sapien
tccgccaccaatgacgtccccaggg

SEQ ID NO: 1832151 - DNA, 25 bp, Homo sapien
agctggttgccggccattgcctccg

SEQ ID NO: 1832152 - DNA, 25 bp, Homo sapien
gcgatgttgccggtcggctaacccc

SEQ ID NO: 1832153 - DNA, 25 bp, Homo sapien
ttcgtcgcgatgttgccggtcggct

SEQ ID NO: 1832154 - DNA, 25 bp, Homo sapien
ggtgcggggtgggtatctgtctgaa

SEQ ID NO: 1832155 - DNA, 25 bp, Homo sapien
tcgccgggttcgtcgcgatgttgcc

SEQ ID NO: 1832156 - DNA, 25 bp, Homo sapien
caccacgcgttgagacttgatgagc

SEQ ID NO: 1832157 - DNA, 25 bp, Homo sapien
aaagcttctcggaaagcgaggcggc

SEQ ID NO: 1832158 - DNA, 25 bp, Homo sapien
gggcagttgcttctccgacttcgaa

SEQ ID NO: 1832159 - DNA, 25 bp, Homo sapien
tagctgttagtcaacggccgggcag

SEQ ID NO: 1832160 - DNA, 25 bp, Homo sapien
cacatagaagtccagtcttcccttg

SEQ ID NO: 1832161 - DNA, 25 bp, Homo sapien
aagaggccgacccagctgtagaaag

SEQ ID NO: 1832162 - DNA, 25 bp, Homo sapien
tattttagtggcagaaaggcgagtg

SEQ ID NO: 1832163 - DNA, 25 bp, Homo sapien
tccagtcttcccttgggtaagcctg

SEQ ID NO: 1832164 - DNA, 25 bp, Homo sapien
tgctgtattgtcatccctaacctac

SEQ ID NO: 1832165 - DNA, 25 bp, Homo sapien
aattgctgtattgtcatccctaacc

SEQ ID NO: 1832166 - DNA, 25 bp, Homo sapien
caggaaattgctgtattgtcatccc

SEQ ID NO: 1832167 - DNA, 25 bp, Homo sapien
gaaattgctgtattgtcatccctaa

SEQ ID NO: 1832168 - DNA, 25 bp, Homo sapien
catgtttagaactcagctgtgattt

SEQ ID NO: 1832169 - DNA, 25 bp, Homo sapien
ttcagtagtgaaccttcatccttag

SEQ ID NO: 1832170 - DNA, 25 bp, Homo sapien
gtagtgaaccttcatccttagtcat

SEQ ID NO: 1832171 - DNA, 25 bp, Homo sapien
tgatttcagtagtgaaccttcatcc

SEQ ID NO: 1832172 - DNA, 25 bp, Homo sapien
tgcacccagccaataaaatttattt

SEQ ID NO: 1832173 - DNA, 25 bp, Homo sapien
ctgcacccagccaataaaatttatt

SEQ ID NO: 1832174 - DNA, 25 bp, Homo sapien
ggcccttgattgattctggaactca

SEQ ID NO: 1832175 - DNA, 25 bp, Homo sapien
gcactaaacttaactacctgtgtcc

SEQ ID NO: 1832176 - DNA, 25 bp, Homo sapien
gaaggagctgacatgagggcgtggg

SEQ ID NO: 1832177 - DNA, 25 bp, Homo sapien
gaacaatatcttggttgcactaaac

SEQ ID NO: 1832178 - DNA, 25 bp, Homo sapien
ttctataactgtattccctccattg

SEQ ID NO: 1832179 - DNA, 25 bp, Homo sapien
cctccattgtttactctgacttata

SEQ ID NO: 1832180 - DNA, 25 bp, Homo sapien
ggtcaacaccctgctatgaaatcag

SEQ ID NO: 1832181 - DNA, 25 bp, Homo sapien
aataagaagtgggaatcagttgggc

SEQ ID NO: 1832182 - DNA, 25 bp, Homo sapien
aagtcacccgacagttcagcctctg

SEQ ID NO: 1832183 - DNA, 25 bp, Homo sapien
tttaaaattgcaagtcacccgacag

SEQ ID NO: 1832184 - DNA, 25 bp, Homo sapien
taagctcttaataggttttgcctgg

SEQ ID NO: 1832185 - DNA, 25 bp, Homo sapien
tggttgagaaccttgtctgcagtga

SEQ ID NO: 1832186 - DNA, 25 bp, Homo sapien
tagatttgtgcacccattggcaaaa

SEQ ID NO: 1832187 - DNA, 25 bp, Homo sapien
tattgtatcattgagaatgcagcac

SEQ ID NO: 1832188 - DNA, 25 bp, Homo sapien
cagcacagatagtgtgggcttcaca

SEQ ID NO: 1832189 - DNA, 25 bp, Homo sapien
tcctcctactgggtgttcaaaagaa

SEQ ID NO: 1832190 - DNA, 25 bp, Homo sapien
gtaaatacctaacacaccaagaatg

SEQ ID NO: 1832191 - DNA, 25 bp, Homo sapien
tgagactcattggtactgactggca

SEQ ID NO: 1832192 - DNA, 25 bp, Homo sapien
gccaacagctgtatatctcaaaagt

SEQ ID NO: 1832193 - DNA, 25 bp, Homo sapien
caagaatgtgcagtgaacctcaggc

SEQ ID NO: 1832194 - DNA, 25 bp, Homo sapien
tgtgcgtactcatcaagaactttca

SEQ ID NO: 1832195 - DNA, 25 bp, Homo sapien
ccaaattgtataggttatagggctg

SEQ ID NO: 1832196 - DNA, 25 bp, Homo sapien
cactccaagaaaatggtccattacc

SEQ ID NO: 1832197 - DNA, 25 bp, Homo sapien
gaattattccccataaggaaatgct

SEQ ID NO: 1832198 - DNA, 25 bp, Homo sapien
tcgaaggccaattattaggtctcat

SEQ ID NO: 1832199 - DNA, 25 bp, Homo sapien
gtgtcattgtgtcataaacagcatg

SEQ ID NO: 1832200 - DNA, 25 bp, Homo sapien
tacctttccctagtgtctgagtaac

SEQ ID NO: 1832201 - DNA, 25 bp, Homo sapien
gagtaactatcaagaaacaaacctg

SEQ ID NO: 1832202 - DNA, 25 bp, Homo sapien
taatatgatggacacactgccgctg

SEQ ID NO: 1832203 - DNA, 25 bp, Homo sapien
taatcgtgaagctggctaggtttcc

SEQ ID NO: 1832204 - DNA, 25 bp, Homo sapien
tttgtcagagacatccacgattgcc

SEQ ID NO: 1832205 - DNA, 25 bp, Homo sapien
tcgaggcaaagcagggtaactgttc

SEQ ID NO: 1832206 - DNA, 25 bp, Homo sapien
gctacccaggtacaccatgaggcca

SEQ ID NO: 1832207 - DNA, 25 bp, Homo sapien
gagcaacgttgagatgcccagctac

SEQ ID NO: 1832208 - DNA, 25 bp, Homo sapien
tcacctttgcctcgtagacaggaac

SEQ ID NO: 1832209 - DNA, 25 bp, Homo sapien
tctgagttcaggtcttatcactaac

SEQ ID NO: 1832210 - DNA, 25 bp, Homo sapien
tttcagttaaatcataagtaggata

SEQ ID NO: 1832211 - DNA, 25 bp, Homo sapien
ttaaatcataagtaggataattttc

SEQ ID NO: 1832212 - DNA, 25 bp, Homo sapien
agttaaatcataagtaggataattt

SEQ ID NO: 1832213 - DNA, 25 bp, Homo sapien
tcagttaaatcataagtaggataat

SEQ ID NO: 1832214 - DNA, 25 bp, Homo sapien
tagaaagaagtagaccacaggagac

SEQ ID NO: 1832215 - DNA, 25 bp, Homo sapien
ttgagatgctgttactctctgaaac

SEQ ID NO: 1832216 - DNA, 25 bp, Homo sapien
agtagaccacaggagactccatttt

SEQ ID NO: 1832217 - DNA, 25 bp, Homo sapien
gatgctgttactctctgaaacatgt

SEQ ID NO: 1832218 - DNA, 25 bp, Homo sapien
aaggggatatcaccaccgatcccac

SEQ ID NO: 1832219 - DNA, 25 bp, Homo sapien
gaagttgaatctgaatagaccaata

SEQ ID NO: 1832220 - DNA, 25 bp, Homo sapien
aatcaaacagacgaaataaaaaatg

SEQ ID NO: 1832221 - DNA, 25 bp, Homo sapien
caaacagacgaaataaaaaatgata

SEQ ID NO: 1832222 - DNA, 25 bp, Homo sapien
taagacggttcatgagattctgctt

SEQ ID NO: 1832223 - DNA, 25 bp, Homo sapien
gagaataagacggttcatgagattc

SEQ ID NO: 1832224 - DNA, 25 bp, Homo sapien
ctaagaagagaataagacggttcat

SEQ ID NO: 1832225 - DNA, 25 bp, Homo sapien
gaagagaataagacggttcatgaga

SEQ ID NO: 1832226 - DNA, 25 bp, Homo sapien
tgcaaatctgtttcattgtgacttc

SEQ ID NO: 1832227 - DNA, 25 bp, Homo sapien
gttcatcatctgaactatcctcaga

SEQ ID NO: 1832228 - DNA, 25 bp, Homo sapien
acttcttccaagttagcactggcca

SEQ ID NO: 1832229 - DNA, 25 bp, Homo sapien
ttttaattaaaggttcatcatctga

SEQ ID NO: 1832230 - DNA, 25 bp, Homo sapien
taacattggcacttttcacagattt

SEQ ID NO: 1832231 - DNA, 25 bp, Homo sapien
aacattggcacttttcacagatttt

SEQ ID NO: 1832232 - DNA, 25 bp, Homo sapien
tggtggtgctgctatctgctttctt

SEQ ID NO: 1832233 - DNA, 25 bp, Homo sapien
tctcttttggctgtcttttttggtg

SEQ ID NO: 1832234 - DNA, 25 bp, Homo sapien
ctcttttggctgtcttttttggtgg

SEQ ID NO: 1832235 - DNA, 25 bp, Homo sapien
caaatataatttcctccaataactt

SEQ ID NO: 1832236 - DNA, 25 bp, Homo sapien
gccatgatatatcgcacttacttca

SEQ ID NO: 1832237 - DNA, 25 bp, Homo sapien
catggcccgcaaacatctatagtaa

SEQ ID NO: 1832238 - DNA, 25 bp, Homo sapien
tacattatagtagatacgacatggc

SEQ ID NO: 1832239 - DNA, 25 bp, Homo sapien
taacaactgtattaactagccatga

SEQ ID NO: 1832240 - DNA, 25 bp, Homo sapien
ccctactttatggaaggtattgtga

SEQ ID NO: 1832241 - DNA, 25 bp, Homo sapien
aaagtacttggcctgcaattcatta

SEQ ID NO: 1832242 - DNA, 25 bp, Homo sapien
atttgattaatccatactctcaaag

SEQ ID NO: 1832243 - DNA, 25 bp, Homo sapien
ttaatccatactctcaaagtacttg

SEQ ID NO: 1832244 - DNA, 25 bp, Homo sapien
gagtaagacgtacgactctgtctca

SEQ ID NO: 1832245 - DNA, 25 bp, Homo sapien
taaagattcgagtttgctacttctc

SEQ ID NO: 1832246 - DNA, 25 bp, Homo sapien
gctgccattaatgtcagatagtaca

SEQ ID NO: 1832247 - DNA, 25 bp, Homo sapien
gctacttctctatatgctgagtggt

SEQ ID NO: 1832248 - DNA, 25 bp, Homo sapien
gaaagctgacacctagatctcagag

SEQ ID NO: 1832249 - DNA, 25 bp, Homo sapien
taacacctgtgaatagcatgaccaa

SEQ ID NO: 1832250 - DNA, 25 bp, Homo sapien
gcttgctgccgcgtaagatgggtct

SEQ ID NO: 1832251 - DNA, 25 bp, Homo sapien
ctatgatttataggcagcagggctc

SEQ ID NO: 1832252 - DNA, 25 bp, Homo sapien
atggtgcgatctcagctcactgcaa

SEQ ID NO: 1832253 - DNA, 25 bp, Homo sapien
cctctgcctccccggttcaagcaat

SEQ ID NO: 1832254 - DNA, 25 bp, Homo sapien
atcggcatgcaccaccacgcccagc

SEQ ID NO: 1832255 - DNA, 25 bp, Homo sapien
gctcaggctggagaacaatggtgcg

SEQ ID NO: 1832256 - DNA, 25 bp, Homo sapien
tcaggacatttggttcgcttagcct

SEQ ID NO: 1832257 - DNA, 25 bp, Homo sapien
atttggttcgcttagccttccttgc

SEQ ID NO: 1832258 - DNA, 25 bp, Homo sapien
ccttgccattccagaactgttccgt

SEQ ID NO: 1832259 - DNA, 25 bp, Homo sapien
cattccagaactgttccgttccttt

SEQ ID NO: 1832260 - DNA, 25 bp, Homo sapien
caagtttttttagatttcggcaatg

SEQ ID NO: 1832261 - DNA, 25 bp, Homo sapien
ttgcagagactagaacgacaggtcc

SEQ ID NO: 1832262 - DNA, 25 bp, Homo sapien
tataatatggtactcttgagctctc

SEQ ID NO: 1832263 - DNA, 25 bp, Homo sapien
tctaaaggcacactaggaaacagca

SEQ ID NO: 1832264 - DNA, 25 bp, Homo sapien
cacaggataacctagattgctccaa

SEQ ID NO: 1832265 - DNA, 25 bp, Homo sapien
tgcaattcccaaaagtaaacgagga

SEQ ID NO: 1832266 - DNA, 25 bp, Homo sapien
gaaaaggtaactctcactgtccaag

SEQ ID NO: 1832267 - DNA, 25 bp, Homo sapien
tactacttgttacatgatctccagg

SEQ ID NO: 1832268 - DNA, 25 bp, Homo sapien
ccagacacaggtagcaaggatgtaa

SEQ ID NO: 1832269 - DNA, 25 bp, Homo sapien
aatcaagaacctcacagatgctctt

SEQ ID NO: 1832270 - DNA, 25 bp, Homo sapien
ctctccaaatcaagaacctcacaga

SEQ ID NO: 1832271 - DNA, 25 bp, Homo sapien
caagatcctcttcactagttcacta

SEQ ID NO: 1832272 - DNA, 25 bp, Homo sapien
gaaattcaagatcctcttcactagt

SEQ ID NO: 1832273 - DNA, 25 bp, Homo sapien
tatattggacacttcctttttcaaa

SEQ ID NO: 1832274 - DNA, 25 bp, Homo sapien
tattggacacttcctttttcaaatg

SEQ ID NO: 1832275 - DNA, 25 bp, Homo sapien
ttatattggacacttcctttttcaa

SEQ ID NO: 1832276 - DNA, 25 bp, Homo sapien
atattggacacttcctttttcaaat

SEQ ID NO: 1832277 - DNA, 25 bp, Homo sapien
cctacaaacttaagtctctgaaaag

SEQ ID NO: 1832278 - DNA, 25 bp, Homo sapien
taagttacaatactggctgaacagt

SEQ ID NO: 1832279 - DNA, 25 bp, Homo sapien
accaaaagttacctgacagtaccag

SEQ ID NO: 1832280 - DNA, 25 bp, Homo sapien
gaacagtcaaccaattcaatatggg

SEQ ID NO: 1832281 - DNA, 25 bp, Homo sapien
cagtttgtgtagatttctaagttca

SEQ ID NO: 1832282 - DNA, 25 bp, Homo sapien
gcctggcctgttgtaaagcagtttg

SEQ ID NO: 1832283 - DNA, 25 bp, Homo sapien
gcctgttgtaaagcagtttgtgtag

SEQ ID NO: 1832284 - DNA, 25 bp, Homo sapien
ctggcctgttgtaaagcagtttgtg

SEQ ID NO: 1832285 - DNA, 25 bp, Homo sapien
ctgtaaggaagagacttgcattgtc

SEQ ID NO: 1832286 - DNA, 25 bp, Homo sapien
gaagagacttgcattgtcaacctct

SEQ ID NO: 1832287 - DNA, 25 bp, Homo sapien
ttgccttccacgatgagactctttt

SEQ ID NO: 1832288 - DNA, 25 bp, Homo sapien
ttccctcttgccttccacgatgaga

SEQ ID NO: 1832289 - DNA, 25 bp, Homo sapien
agaacagcctgaagtacgtggatag

SEQ ID NO: 1832290 - DNA, 25 bp, Homo sapien
ggcactcacagggactcagttaaaa

SEQ ID NO: 1832291 - DNA, 25 bp, Homo sapien
catttaatgcaatcaactgggagag

SEQ ID NO: 1832292 - DNA, 25 bp, Homo sapien
cacaaaaatctacggtgaggcgcgg

SEQ ID NO: 1832293 - DNA, 25 bp, Homo sapien
ctcttcctcctcgctctcctctctg

SEQ ID NO: 1832294 - DNA, 25 bp, Homo sapien
ttcctcctcgctctcctctctggga

SEQ ID NO: 1832295 - DNA, 25 bp, Homo sapien
cttcctcctcgctctcctctctggg

SEQ ID NO: 1832296 - DNA, 25 bp, Homo sapien
tcctcctcgctctcctctctgggac

SEQ ID NO: 1832297 - DNA, 25 bp, Homo sapien
cgggttctttctcggacgcgggctg

SEQ ID NO: 1832298 - DNA, 25 bp, Homo sapien
catttcgggttctttctcggacgcg

SEQ ID NO: 1832299 - DNA, 25 bp, Homo sapien
gcatttcgggttctttctcggacgc

SEQ ID NO: 1832300 - DNA, 25 bp, Homo sapien
catgcgggaagaaagccggacgtct

SEQ ID NO: 1832301 - DNA, 25 bp, Homo sapien
gaccgggcggccaccctgaatgatg

SEQ ID NO: 1832302 - DNA, 25 bp, Homo sapien
aagttgcctcctcccatagccggga

SEQ ID NO: 1832303 - DNA, 25 bp, Homo sapien
aatgatgctacccttcccgcgggac

SEQ ID NO: 1832304 - DNA, 25 bp, Homo sapien
tgtctggcgtgacgctcgcgccgcg

SEQ ID NO: 1832305 - DNA, 25 bp, Homo sapien
gaggagaaggcgcgcgggccgctgt

SEQ ID NO: 1832306 - DNA, 25 bp, Homo sapien
gcgggcctggcacgcgagggcacga

SEQ ID NO: 1832307 - DNA, 25 bp, Homo sapien
cacgcgagggcacgaggaggttctg

SEQ ID NO: 1832308 - DNA, 25 bp, Homo sapien
atgcggcgaccaatcagggccgcga

SEQ ID NO: 1832309 - DNA, 25 bp, Homo sapien
gaatgcggcgaccaatcagggccgc

SEQ ID NO: 1832310 - DNA, 25 bp, Homo sapien
tcaaaatggcggttcgggaaggaga

SEQ ID NO: 1832311 - DNA, 25 bp, Homo sapien
cgggaatgcggcgaccaatcagggc

SEQ ID NO: 1832312 - DNA, 25 bp, Homo sapien
cacagaagggctaattgcaaccata

SEQ ID NO: 1832313 - DNA, 25 bp, Homo sapien
ggcacacaggaagtagctgatgagt

SEQ ID NO: 1832314 - DNA, 25 bp, Homo sapien
ggtcagctcagtcatatgatcccac

SEQ ID NO: 1832315 - DNA, 25 bp, Homo sapien
tgatcccacctaaccacaaagaatt

SEQ ID NO: 1832316 - DNA, 25 bp, Homo sapien
actgtgcccggtcaaatcttatttt

SEQ ID NO: 1832317 - DNA, 25 bp, Homo sapien
cctgactgacatgcagcttggattt

SEQ ID NO: 1832318 - DNA, 25 bp, Homo sapien
agaaggtttgggagagtacctgact

SEQ ID NO: 1832319 - DNA, 25 bp, Homo sapien
tgggagagtacctgactgacatgca

SEQ ID NO: 1832320 - DNA, 25 bp, Homo sapien
aagatccttccatccgcatttccaa

SEQ ID NO: 1832321 - DNA, 25 bp, Homo sapien
tggccaccatccatagaattagatg

SEQ ID NO: 1832322 - DNA, 25 bp, Homo sapien
tccatagaattagatgaagaactct

SEQ ID NO: 1832323 - DNA, 25 bp, Homo sapien
tcaaccttctcaaagatccttccat

SEQ ID NO: 1832324 - DNA, 25 bp, Homo sapien
tggaaggaagtagcatgaaccttgg

SEQ ID NO: 1832325 - DNA, 25 bp, Homo sapien
ggaagtagcatgaaccttggtttgt

SEQ ID NO: 1832326 - DNA, 25 bp, Homo sapien
ctagtggaaggaagtagcatgaacc

SEQ ID NO: 1832327 - DNA, 25 bp, Homo sapien
catggcctagtggaaggaagtagca

SEQ ID NO: 1832328 - DNA, 25 bp, Homo sapien
ataagcaacagtgcactcagaccag

SEQ ID NO: 1832329 - DNA, 25 bp, Homo sapien
tggttgagattaattagttataagc

SEQ ID NO: 1832330 - DNA, 25 bp, Homo sapien
gactttgacttcagacaaatagatg

SEQ ID NO: 1832331 - DNA, 25 bp, Homo sapien
ccataaaataattagagtgagggat

SEQ ID NO: 1832332 - DNA, 25 bp, Homo sapien
agtgagggataataaaaatagccgg

SEQ ID NO: 1832333 - DNA, 25 bp, Homo sapien
caaatagatgcaaattgaggaagac

SEQ ID NO: 1832334 - DNA, 25 bp, Homo sapien
gttgcctataacacttaaatgcctc

SEQ ID NO: 1832335 - DNA, 25 bp, Homo sapien
taagtgtcctttacagagatcttct

SEQ ID NO: 1832336 - DNA, 25 bp, Homo sapien
taaatgcctccccatcgtctgtagg

SEQ ID NO: 1832337 - DNA, 25 bp, Homo sapien
catcctcattagttctctgcctgca

SEQ ID NO: 1832338 - DNA, 25 bp, Homo sapien
ttatcttctgatatctgccttctat

SEQ ID NO: 1832339 - DNA, 25 bp, Homo sapien
cagttgtagtaacttgattggtgag

SEQ ID NO: 1832340 - DNA, 25 bp, Homo sapien
tggttctttcagttgtagtaacttg

SEQ ID NO: 1832341 - DNA, 25 bp, Homo sapien
ctttcagttgtagtaacttgattgg

SEQ ID NO: 1832342 - DNA, 25 bp, Homo sapien
ggtctgcagcttgggaacgttgaca

SEQ ID NO: 1832343 - DNA, 25 bp, Homo sapien
ctggtctgcagcttgggaacgttga

SEQ ID NO: 1832344 - DNA, 25 bp, Homo sapien
tctgcagcttgggaacgttgacaga

SEQ ID NO: 1832345 - DNA, 25 bp, Homo sapien
cctggtctgcagcttgggaacgttg

SEQ ID NO: 1832346 - DNA, 25 bp, Homo sapien
agtacaagtggctggcgttcgttca

SEQ ID NO: 1832347 - DNA, 25 bp, Homo sapien
agtggctggcgttcgttcattcagc

SEQ ID NO: 1832348 - DNA, 25 bp, Homo sapien
ctggcgttcgttcattcagcaggcc

SEQ ID NO: 1832349 - DNA, 25 bp, Homo sapien
cttccccagtacaagtggctggcgt

SEQ ID NO: 1832350 - DNA, 25 bp, Homo sapien
agaggtttaacttcacatcaagttg

SEQ ID NO: 1832351 - DNA, 25 bp, Homo sapien
cacatcaagttggaagagttggagt

SEQ ID NO: 1832352 - DNA, 25 bp, Homo sapien
ttaacttcacatcaagttggaagag

SEQ ID NO: 1832353 - DNA, 25 bp, Homo sapien
gaggaggagaggtttaacttcacat

SEQ ID NO: 1832354 - DNA, 25 bp, Homo sapien
tagattggacacatcgattacaaaa

SEQ ID NO: 1832355 - DNA, 25 bp, Homo sapien
gattggacacatcgattacaaaact

SEQ ID NO: 1832356 - DNA, 25 bp, Homo sapien
tattagattggacacatcgattaca

SEQ ID NO: 1832357 - DNA, 25 bp, Homo sapien
ctatattagattggacacatcgatt

SEQ ID NO: 1832358 - DNA, 25 bp, Homo sapien
caattgtcacatgtcctaatggtaa

SEQ ID NO: 1832359 - DNA, 25 bp, Homo sapien
catgtcctaatggtaaaagtggtat

SEQ ID NO: 1832360 - DNA, 25 bp, Homo sapien
tgtcacatgtcctaatggtaaaagt

SEQ ID NO: 1832361 - DNA, 25 bp, Homo sapien
tcaattgtcacatgtcctaatggta

SEQ ID NO: 1832362 - DNA, 25 bp, Homo sapien
gaaatatggaatccttcacaaattt

SEQ ID NO: 1832363 - DNA, 25 bp, Homo sapien
catccttgcgcaggggccatgctaa

SEQ ID NO: 1832364 - DNA, 25 bp, Homo sapien
tagtatgtgtgctgctgaagcaagc

SEQ ID NO: 1832365 - DNA, 25 bp, Homo sapien
tggaatccttcacaaatttgcgtgt

SEQ ID NO: 1832366 - DNA, 25 bp, Homo sapien
gtggttggtttatacattggtattc

SEQ ID NO: 1832367 - DNA, 25 bp, Homo sapien
agtggttggtttatacattggtatt

SEQ ID NO: 1832368 - DNA, 25 bp, Homo sapien
cagtggttggtttatacattggtat

SEQ ID NO: 1832369 - DNA, 25 bp, Homo sapien
gcagtggttggtttatacattggta

SEQ ID NO: 1832370 - DNA, 25 bp, Homo sapien
cactcagtcatccaactcttgagaa

SEQ ID NO: 1832371 - DNA, 25 bp, Homo sapien
gtcatccaactcttgagaatctggc

SEQ ID NO: 1832372 - DNA, 25 bp, Homo sapien
ctcagtcatccaactcttgagaatc

SEQ ID NO: 1832373 - DNA, 25 bp, Homo sapien
cagtcatccaactcttgagaatctg

SEQ ID NO: 1832374 - DNA, 25 bp, Homo sapien
taagaccgactcaggagacggtgga

SEQ ID NO: 1832375 - DNA, 25 bp, Homo sapien
tggcagactcgttctctaagaccga

SEQ ID NO: 1832376 - DNA, 25 bp, Homo sapien
gaatagaggagcatgaggaaccaag

SEQ ID NO: 1832377 - DNA, 25 bp, Homo sapien
gactcgttctctaagaccgactcag

SEQ ID NO: 1832378 - DNA, 25 bp, Homo sapien
gaaggcacttaagggctctagctca

SEQ ID NO: 1832379 - DNA, 25 bp, Homo sapien
gctgttctcgaaggcacttaagggc

SEQ ID NO: 1832380 - DNA, 25 bp, Homo sapien
tgttctcgaaggcacttaagggctc

SEQ ID NO: 1832381 - DNA, 25 bp, Homo sapien
tctcgaaggcacttaagggctctag

SEQ ID NO: 1832382 - DNA, 25 bp, Homo sapien
aagagcttgatgttgcagccttcct

SEQ ID NO: 1832383 - DNA, 25 bp, Homo sapien
gatgcggaagagcttgatgttgcag

SEQ ID NO: 1832384 - DNA, 25 bp, Homo sapien
ctggagttttgaaggggatgcggaa

SEQ ID NO: 1832385 - DNA, 25 bp, Homo sapien
gggatgcggaagagcttgatgttgc

SEQ ID NO: 1832386 - DNA, 25 bp, Homo sapien
atggaagaagtttccaaggctggcc

SEQ ID NO: 1832387 - DNA, 25 bp, Homo sapien
tgctttcaccaacgctgaaaacagg

SEQ ID NO: 1832388 - DNA, 25 bp, Homo sapien
ctggtttgctttcaccaacgctgaa

SEQ ID NO: 1832389 - DNA, 25 bp, Homo sapien
cacgtcagttacttgtttctggaag

SEQ ID NO: 1832390 - DNA, 25 bp, Homo sapien
acaggttccttgttaaacacgtcag

SEQ ID NO: 1832391 - DNA, 25 bp, Homo sapien
ttttttgagaattcaccagatttat

SEQ ID NO: 1832392 - DNA, 25 bp, Homo sapien
gcccatggatgtacatcaaatagtt

SEQ ID NO: 1832393 - DNA, 25 bp, Homo sapien
agatttattgcccatggatgtacat

SEQ ID NO: 1832394 - DNA, 25 bp, Homo sapien
taagccagtaggtgttttccataac

SEQ ID NO: 1832395 - DNA, 25 bp, Homo sapien
gttgtttgggattggcatcacgtga

SEQ ID NO: 1832396 - DNA, 25 bp, Homo sapien
gtttgggattggcatcacgtgatgt

SEQ ID NO: 1832397 - DNA, 25 bp, Homo sapien
ttagatgggttgtttgggattggca

SEQ ID NO: 1832398 - DNA, 25 bp, Homo sapien
ttgggattggcatcacgtgatgtcc

SEQ ID NO: 1832399 - DNA, 25 bp, Homo sapien
aaggtttcttcggctgctttatttg

SEQ ID NO: 1832400 - DNA, 25 bp, Homo sapien
ttggaaggtttcttcggctgcttta

SEQ ID NO: 1832401 - DNA, 25 bp, Homo sapien
tggaaggtttcttcggctgctttat

SEQ ID NO: 1832402 - DNA, 25 bp, Homo sapien
atgcaaaacagtttggttctctcca

SEQ ID NO: 1832403 - DNA, 25 bp, Homo sapien
ctctgcaccatgcaaaacagtttgg

SEQ ID NO: 1832404 - DNA, 25 bp, Homo sapien
ggtgctctgcaccatgcaaaacagt

SEQ ID NO: 1832405 - DNA, 25 bp, Homo sapien
gctctgcaccatgcaaaacagtttg

SEQ ID NO: 1832406 - DNA, 25 bp, Homo sapien
ggacattcacccttcgcttcagtgt

SEQ ID NO: 1832407 - DNA, 25 bp, Homo sapien
tgtgctccagcagtatggacattca

SEQ ID NO: 1832408 - DNA, 25 bp, Homo sapien
tttgcagaactgtatgtgtctatgg

SEQ ID NO: 1832409 - DNA, 25 bp, Homo sapien
tatgttggcatgatttcctattaag

SEQ ID NO: 1832410 - DNA, 25 bp, Homo sapien
gcttggcttcattgcagttgatgtt

SEQ ID NO: 1832411 - DNA, 25 bp, Homo sapien
tgcttggcttcattgcagttgatgt

SEQ ID NO: 1832412 - DNA, 25 bp, Homo sapien
gcttcattgcagttgatgttcagat

SEQ ID NO: 1832413 - DNA, 25 bp, Homo sapien
ggcttcattgcagttgatgttcaga

SEQ ID NO: 1832414 - DNA, 25 bp, Homo sapien
cttgaaaccaaatgacagagcaact

SEQ ID NO: 1832415 - DNA, 25 bp, Homo sapien
cagagcaacttgaggcaaatttaag

SEQ ID NO: 1832416 - DNA, 25 bp, Homo sapien
tgaggcaaatttaagttattaacat

SEQ ID NO: 1832417 - DNA, 25 bp, Homo sapien
tgacagagcaacttgaggcaaattt

SEQ ID NO: 1832418 - DNA, 25 bp, Homo sapien
atggtaatcataggcttgtatgtac

SEQ ID NO: 1832419 - DNA, 25 bp, Homo sapien
tatgtacggcttatatggtttctgg

SEQ ID NO: 1832420 - DNA, 25 bp, Homo sapien
ggcttgtatgtacggcttatatggt

SEQ ID NO: 1832421 - DNA, 25 bp, Homo sapien
taatcataggcttgtatgtacggct

SEQ ID NO: 1832422 - DNA, 25 bp, Homo sapien
taataaactcaatggaaccttggat

SEQ ID NO: 1832423 - DNA, 25 bp, Homo sapien
attctgggcacaaaatgagcagggc

SEQ ID NO: 1832424 - DNA, 25 bp, Homo sapien
gaagaaaacccaattattctgggca

SEQ ID NO: 1832425 - DNA, 25 bp, Homo sapien
gcagggcatgccctctcccatttag

SEQ ID NO: 1832426 - DNA, 25 bp, Homo sapien
ttccatgaatggccacgtagggcaa

SEQ ID NO: 1832427 - DNA, 25 bp, Homo sapien
tccatgaatggccacgtagggcaaa

SEQ ID NO: 1832428 - DNA, 25 bp, Homo sapien
tgaatggccacgtagggcaaatcaa

SEQ ID NO: 1832429 - DNA, 25 bp, Homo sapien
tggccacgtagggcaaatcaatgta

SEQ ID NO: 1832430 - DNA, 25 bp, Homo sapien
tgtgcttcagcagatctgttactgc

SEQ ID NO: 1832431 - DNA, 25 bp, Homo sapien
atctgttactgccacccattatcaa

SEQ ID NO: 1832432 - DNA, 25 bp, Homo sapien
ccattatcaacccataggtatgtac

SEQ ID NO: 1832433 - DNA, 25 bp, Homo sapien
ttcagcagatctgttactgccaccc

SEQ ID NO: 1832434 - DNA, 25 bp, Homo sapien
ggctagttctcaagtaggagagaat

SEQ ID NO: 1832435 - DNA, 25 bp, Homo sapien
gaatgactcccgttccattcctggg

SEQ ID NO: 1832436 - DNA, 25 bp, Homo sapien
tggctagttctcaagtaggagagaa

SEQ ID NO: 1832437 - DNA, 25 bp, Homo sapien
ggagagaatgactcccgttccattc

SEQ ID NO: 1832438 - DNA, 25 bp, Homo sapien
tgagacatgtctccatttggagctc

SEQ ID NO: 1832439 - DNA, 25 bp, Homo sapien
ggagctcctgataagcccatgttca

SEQ ID NO: 1832440 - DNA, 25 bp, Homo sapien
tcaggcacaacatcgttcagcattt

SEQ ID NO: 1832441 - DNA, 25 bp, Homo sapien
tttgaggttccgcttttgtatcttc

SEQ ID NO: 1832442 - DNA, 25 bp, Homo sapien
cagccgcttctcgtgagagcacagg

SEQ ID NO: 1832443 - DNA, 25 bp, Homo sapien
cagtacagccgcttctcgtgagagc

SEQ ID NO: 1832444 - DNA, 25 bp, Homo sapien
tacagccgcttctcgtgagagcaca

SEQ ID NO: 1832445 - DNA, 25 bp, Homo sapien
gccgcttctcgtgagagcacaggcc

SEQ ID NO: 1832446 - DNA, 25 bp, Homo sapien
gtagggcatgaacttctaaatggaa

SEQ ID NO: 1832447 - DNA, 25 bp, Homo sapien
ggcatgaacttctaaatggaacctt

SEQ ID NO: 1832448 - DNA, 25 bp, Homo sapien
catgaacttctaaatggaacctttg

SEQ ID NO: 1832449 - DNA, 25 bp, Homo sapien
tagggcatgaacttctaaatggaac

SEQ ID NO: 1832450 - DNA, 25 bp, Homo sapien
catccagtgagcccatgccctggtg

SEQ ID NO: 1832451 - DNA, 25 bp, Homo sapien
tgatcttcaccttatccccctcgct

SEQ ID NO: 1832452 - DNA, 25 bp, Homo sapien
ccagtgagcccatgccctggtgctt

SEQ ID NO: 1832453 - DNA, 25 bp, Homo sapien
ccctcgctgaagtattgtttctggc

SEQ ID NO: 1832454 - DNA, 25 bp, Homo sapien
ttgcagggggcctccgtgatggcag

SEQ ID NO: 1832455 - DNA, 25 bp, Homo sapien
ggccttgaccacatgctccacggtc

SEQ ID NO: 1832456 - DNA, 25 bp, Homo sapien
agggccttgaccacatgctccacgg

SEQ ID NO: 1832457 - DNA, 25 bp, Homo sapien
actgtggaggctccaagttccaggg

SEQ ID NO: 1832458 - DNA, 25 bp, Homo sapien
ctccaagttccagggccttgaccac

SEQ ID NO: 1832459 - DNA, 25 bp, Homo sapien
tggggccgaccgcaggccatcactt

SEQ ID NO: 1832460 - DNA, 25 bp, Homo sapien
atccccacgcgcagcccgtccacac

SEQ ID NO: 1832461 - DNA, 25 bp, Homo sapien
cagcccatccccacgcgcagcccgt

SEQ ID NO: 1832462 - DNA, 25 bp, Homo sapien
caccagcatcaatcaggttctttcc

SEQ ID NO: 1832463 - DNA, 25 bp, Homo sapien
gcactatggcgatctgatacacttg

SEQ ID NO: 1832464 - DNA, 25 bp, Homo sapien
actatggcgatctgatacacttgag

SEQ ID NO: 1832465 - DNA, 25 bp, Homo sapien
atgcactatggcgatctgatacact

SEQ ID NO: 1832466 - DNA, 25 bp, Homo sapien
tggcgatctgatacacttgagttcc

SEQ ID NO: 1832467 - DNA, 25 bp, Homo sapien
tgtccaaggtcctgtagaaggacac

SEQ ID NO: 1832468 - DNA, 25 bp, Homo sapien
gcaacatatatattgtccaaggtcc

SEQ ID NO: 1832469 - DNA, 25 bp, Homo sapien
aagattatgaagtcgtcgcccgcct

SEQ ID NO: 1832470 - DNA, 25 bp, Homo sapien
gggatgagtccaagattatgaagtc

SEQ ID NO: 1832471 - DNA, 25 bp, Homo sapien
cagctcatcgagatcgttgacgata

SEQ ID NO: 1832472 - DNA, 25 bp, Homo sapien
ccaccagctcatcgagatcgttgac

SEQ ID NO: 1832473 - DNA, 25 bp, Homo sapien
tcttcaggtcggtgcaggcgataat

SEQ ID NO: 1832474 - DNA, 25 bp, Homo sapien
catcgagatcgttgacgataggcag

SEQ ID NO: 1832475 - DNA, 25 bp, Homo sapien
ccctttcttgctacgctgcaggatc

SEQ ID NO: 1832476 - DNA, 25 bp, Homo sapien
tcatttgcctctttcaacatcacgc

SEQ ID NO: 1832477 - DNA, 25 bp, Homo sapien
ctcatttgcctctttcaacatcacg

SEQ ID NO: 1832478 - DNA, 25 bp, Homo sapien
cttccctttcttgctacgctgcagg

SEQ ID NO: 1832479 - DNA, 25 bp, Homo sapien
ccaccagctcgatccttggcatcat

SEQ ID NO: 1832480 - DNA, 25 bp, Homo sapien
ccaccaccagctcgatccttggcat

SEQ ID NO: 1832481 - DNA, 25 bp, Homo sapien
accagctcgatccttggcatcatca

SEQ ID NO: 1832482 - DNA, 25 bp, Homo sapien
ccagctcgatccttggcatcatcac

SEQ ID NO: 1832483 - DNA, 25 bp, Homo sapien
cagcttgctacccatgatgtccgtc

SEQ ID NO: 1832484 - DNA, 25 bp, Homo sapien
tccgtctcagtcatcggaatgccag

SEQ ID NO: 1832485 - DNA, 25 bp, Homo sapien
tgatgtccgcggaggtgatgatgcc

SEQ ID NO: 1832486 - DNA, 25 bp, Homo sapien
aagaaagttgatgtccgcggaggtg

SEQ ID NO: 1832487 - DNA, 25 bp, Homo sapien
tgtgatgaagcccccctgttcaaac

SEQ ID NO: 1832488 - DNA, 25 bp, Homo sapien
atgaagcccccctgttcaaacttct

SEQ ID NO: 1832489 - DNA, 25 bp, Homo sapien
ctgtgatgaagcccccctgttcaaa

SEQ ID NO: 1832490 - DNA, 25 bp, Homo sapien
tgatgaagcccccctgttcaaactt

SEQ ID NO: 1832491 - DNA, 25 bp, Homo sapien
agcagttgctcagatagtccgccat

SEQ ID NO: 1832492 - DNA, 25 bp, Homo sapien
gagatcagcgtcagcggcgtcttca

SEQ ID NO: 1832493 - DNA, 25 bp, Homo sapien
aggagatcagcgtcagcggcgtctt

SEQ ID NO: 1832494 - DNA, 25 bp, Homo sapien
ggtgcagcagttgctcagatagtcc

SEQ ID NO: 1832495 - DNA, 25 bp, Homo sapien
catgttcctccggcttttacttttg

SEQ ID NO: 1832496 - DNA, 25 bp, Homo sapien
gggcaaagatgcatgttcctccggc

SEQ ID NO: 1832497 - DNA, 25 bp, Homo sapien
agtccagggcaaagatgcatgttcc

SEQ ID NO: 1832498 - DNA, 25 bp, Homo sapien
tcagtccagggcaaagatgcatgtt

SEQ ID NO: 1832499 - DNA, 25 bp, Homo sapien
tttatttccccatgcagtggttctc

SEQ ID NO: 1832500 - DNA, 25 bp, Homo sapien
tctgctcctctccatactccatcca

SEQ ID NO: 1832501 - DNA, 25 bp, Homo sapien
tctccatactccatccatccctggc

SEQ ID NO: 1832502 - DNA, 25 bp, Homo sapien
tatttccccatgcagtggttctctg

SEQ ID NO: 1832503 - DNA, 25 bp, Homo sapien
atggtgcctgttggcgtgcacagat

SEQ ID NO: 1832504 - DNA, 25 bp, Homo sapien
ccacaaagggcctgtgagtcccttc

SEQ ID NO: 1832505 - DNA, 25 bp, Homo sapien
cctttccacaaagggcctgtgagtc

SEQ ID NO: 1832506 - DNA, 25 bp, Homo sapien
gatcctttccacaaagggcctgtga

SEQ ID NO: 1832507 - DNA, 25 bp, Homo sapien
acaagcagtagagtcggtgcagcgc

SEQ ID NO: 1832508 - DNA, 25 bp, Homo sapien
cagcgcgcccgggttcggatagggt

SEQ ID NO: 1832509 - DNA, 25 bp, Homo sapien
gtagagtcggtgcagcgcgcccggg

SEQ ID NO: 1832510 - DNA, 25 bp, Homo sapien
ctgacaagcagtagagtcggtgcag

SEQ ID NO: 1832511 - DNA, 25 bp, Homo sapien
gtctgggagcgcaagtcctgttgca

SEQ ID NO: 1832512 - DNA, 25 bp, Homo sapien
tgtataaataaacgcgctgctaccg

SEQ ID NO: 1832513 - DNA, 25 bp, Homo sapien
tgctaccgctgctggcgagctgtgc

SEQ ID NO: 1832514 - DNA, 25 bp, Homo sapien
gctgaagtacgacccacatgggaag

SEQ ID NO: 1832515 - DNA, 25 bp, Homo sapien
gcagagcacggaggaaagacggaga

SEQ ID NO: 1832516 - DNA, 25 bp, Homo sapien
aagagctcctgtccggtgtgccagc

SEQ ID NO: 1832517 - DNA, 25 bp, Homo sapien
agccgcagagcacggaggaaagacg

SEQ ID NO: 1832518 - DNA, 25 bp, Homo sapien
ccgcagagcacggaggaaagacgga

SEQ ID NO: 1832519 - DNA, 25 bp, Homo sapien
aaatggtcaatattttcagcttgtg

SEQ ID NO: 1832520 - DNA, 25 bp, Homo sapien
gaaacaaatggtcaatattttcagc

SEQ ID NO: 1832521 - DNA, 25 bp, Homo sapien
ctgaaacaaatggtcaatattttca

SEQ ID NO: 1832522 - DNA, 25 bp, Homo sapien
acaaatggtcaatattttcagcttg

SEQ ID NO: 1832523 - DNA, 25 bp, Homo sapien
tcaaggtgccccttgcattctctgc

SEQ ID NO: 1832524 - DNA, 25 bp, Homo sapien
ttcttttcacaaggggttcttgaca

SEQ ID NO: 1832525 - DNA, 25 bp, Homo sapien
gctgtcagatttcaaggtgcccctt

SEQ ID NO: 1832526 - DNA, 25 bp, Homo sapien
gggttcttgacactcggtgagaggc

SEQ ID NO: 1832527 - DNA, 25 bp, Homo sapien
agctttctccacatggctaagtgta

SEQ ID NO: 1832528 - DNA, 25 bp, Homo sapien
gaacaacaggattggctattcacac

SEQ ID NO: 1832529 - DNA, 25 bp, Homo sapien
tctcttgctaggtcagaacaacagg

SEQ ID NO: 1832530 - DNA, 25 bp, Homo sapien
tccacatggctaagtgtatttgaca

SEQ ID NO: 1832531 - DNA, 25 bp, Homo sapien
caatctagtagaagaactttggctg

SEQ ID NO: 1832532 - DNA, 25 bp, Homo sapien
cagctctggtgtaatggatctggca

SEQ ID NO: 1832533 - DNA, 25 bp, Homo sapien
gcttcgtctgtccatgtgatatcca

SEQ ID NO: 1832534 - DNA, 25 bp, Homo sapien
gcttcagggaccttaaggatagctg

SEQ ID NO: 1832535 - DNA, 25 bp, Homo sapien
aaatgatggagaagtcaggtagtaa

SEQ ID NO: 1832536 - DNA, 25 bp, Homo sapien
tgatggagaagtcaggtagtaattt

SEQ ID NO: 1832537 - DNA, 25 bp, Homo sapien
atggagaagtcaggtagtaatttac

SEQ ID NO: 1832538 - DNA, 25 bp, Homo sapien
tggagaagtcaggtagtaatttact

SEQ ID NO: 1832539 - DNA, 25 bp, Homo sapien
tgccaaaatagtaagcggtgtatga

SEQ ID NO: 1832540 - DNA, 25 bp, Homo sapien
tcagcaatttgagggtaggagttag

SEQ ID NO: 1832541 - DNA, 25 bp, Homo sapien
ttccctggcatcctgttacctgtta

SEQ ID NO: 1832542 - DNA, 25 bp, Homo sapien
ttgttagggagtgctcaaaagcaga

SEQ ID NO: 1832543 - DNA, 25 bp, Homo sapien
aacagaattggatgacatctcccaa

SEQ ID NO: 1832544 - DNA, 25 bp, Homo sapien
cctgccccagggagtatccacatgt

SEQ ID NO: 1832545 - DNA, 25 bp, Homo sapien
aattgcttgtgcctaccatatattt

SEQ ID NO: 1832546 - DNA, 25 bp, Homo sapien
gatgttatgccggtatatactggta

SEQ ID NO: 1832547 - DNA, 25 bp, Homo sapien
tgtgactgggagaagccaatcatca

SEQ ID NO: 1832548 - DNA, 25 bp, Homo sapien
ggaggcatatctcatgtgactggga

SEQ ID NO: 1832549 - DNA, 25 bp, Homo sapien
gatggataatgtgcttatggtgtaa

SEQ ID NO: 1832550 - DNA, 25 bp, Homo sapien
cttatggtgtaaccaggtttgaggg

SEQ ID NO: 1832551 - DNA, 25 bp, Homo sapien
tttccactgacaacggagccactgc

SEQ ID NO: 1832552 - DNA, 25 bp, Homo sapien
tcacaggtttacaatgccgatttta

SEQ ID NO: 1832553 - DNA, 25 bp, Homo sapien
caatgccgattttattggcactata

SEQ ID NO: 1832554 - DNA, 25 bp, Homo sapien
tatatttttccactgacaacggagc

SEQ ID NO: 1832555 - DNA, 25 bp, Homo sapien
aactgaagtcaaggttcaaggccag

SEQ ID NO: 1832556 - DNA, 25 bp, Homo sapien
tgaaactgaagtcaaggttcaaggc

SEQ ID NO: 1832557 - DNA, 25 bp, Homo sapien
gaagtcaaggttcaaggccaggcat

SEQ ID NO: 1832558 - DNA, 25 bp, Homo sapien
gtcaaggttcaaggccaggcattct

SEQ ID NO: 1832559 - DNA, 25 bp, Homo sapien
cagtctgacggttgtttccaagtga

SEQ ID NO: 1832560 - DNA, 25 bp, Homo sapien
tgcatgggttactgcagagcacaga

SEQ ID NO: 1832561 - DNA, 25 bp, Homo sapien
tgagggtgtttaatgcatgggttac

SEQ ID NO: 1832562 - DNA, 25 bp, Homo sapien
ccaggcgcattgtgtctgtggaagt

SEQ ID NO: 1832563 - DNA, 25 bp, Homo sapien
tagatcattttcttcgggggcactg

SEQ ID NO: 1832564 - DNA, 25 bp, Homo sapien
caggcttagatcattttcttcgggg

SEQ ID NO: 1832565 - DNA, 25 bp, Homo sapien
gatcattttcttcgggggcactgct

SEQ ID NO: 1832566 - DNA, 25 bp, Homo sapien
cttagatcattttcttcgggggcac

SEQ ID NO: 1832567 - DNA, 25 bp, Homo sapien
cttcaagccaggtgggctgacaagt

SEQ ID NO: 1832568 - DNA, 25 bp, Homo sapien
tcctcctttgaccacaggaccccag

SEQ ID NO: 1832569 - DNA, 25 bp, Homo sapien
caggtgggctgacaagtcctccttt

SEQ ID NO: 1832570 - DNA, 25 bp, Homo sapien
tgacaagtcctcctttgaccacagg

SEQ ID NO: 1832571 - DNA, 25 bp, Homo sapien
tctaaggttcctatttgtctgtgga

SEQ ID NO: 1832572 - DNA, 25 bp, Homo sapien
ttctaaggttcctatttgtctgtgg

SEQ ID NO: 1832573 - DNA, 25 bp, Homo sapien
cttttctaaggttcctatttgtctg

SEQ ID NO: 1832574 - DNA, 25 bp, Homo sapien
tttctaaggttcctatttgtctgtg

SEQ ID NO: 1832575 - DNA, 25 bp, Homo sapien
caggcccagaggcaatttcctctta

SEQ ID NO: 1832576 - DNA, 25 bp, Homo sapien
ttgcagtgtattaaatttagtggcc

SEQ ID NO: 1832577 - DNA, 25 bp, Homo sapien
ttgggattacgggatcatgtggtaa

SEQ ID NO: 1832578 - DNA, 25 bp, Homo sapien
aaatttaatagacatcttactgtca

SEQ ID NO: 1832579 - DNA, 25 bp, Homo sapien
aaacatatctctggtacatcaaggg

SEQ ID NO: 1832580 - DNA, 25 bp, Homo sapien
gtttataaaggagagagctggcgac

SEQ ID NO: 1832581 - DNA, 25 bp, Homo sapien
gggcatgatacaaaccagtctaaag

SEQ ID NO: 1832582 - DNA, 25 bp, Homo sapien
gttttagataattggccagtgacag

SEQ ID NO: 1832583 - DNA, 25 bp, Homo sapien
gaaaatatctacttatccaggtttg

SEQ ID NO: 1832584 - DNA, 25 bp, Homo sapien
aatcaccatttcttggaaccccacg

SEQ ID NO: 1832585 - DNA, 25 bp, Homo sapien
tgtagcgtgcttcatgaaaatatct

SEQ ID NO: 1832586 - DNA, 25 bp, Homo sapien
gaaagccatgccgaagcaaatgtta

SEQ ID NO: 1832587 - DNA, 25 bp, Homo sapien
atttgtagcctaccattaaatcaat

SEQ ID NO: 1832588 - DNA, 25 bp, Homo sapien
cagatctaactcctttcttattaac

SEQ ID NO: 1832589 - DNA, 25 bp, Homo sapien
tgtgtatttgtagcctaccattaaa

SEQ ID NO: 1832590 - DNA, 25 bp, Homo sapien
cactgccaacttgtactcaaatgtg

SEQ ID NO: 1832591 - DNA, 25 bp, Homo sapien
gagtgttggtcgttttatcttgtag

SEQ ID NO: 1832592 - DNA, 25 bp, Homo sapien
aggaaattaagttgagtgttggtcg

SEQ ID NO: 1832593 - DNA, 25 bp, Homo sapien
caggaattcgggctttcgatgagaa

SEQ ID NO: 1832594 - DNA, 25 bp, Homo sapien
tccttaaggacctgacatgattcaa

SEQ ID NO: 1832595 - DNA, 25 bp, Homo sapien
aatcagtttttagccaggcattgtt

SEQ ID NO: 1832596 - DNA, 25 bp, Homo sapien
caatcagtttttagccaggcattgt

SEQ ID NO: 1832597 - DNA, 25 bp, Homo sapien
tcaatcagtttttagccaggcattg

SEQ ID NO: 1832598 - DNA, 25 bp, Homo sapien
tcaagtcagaccagtaaagcagatg

SEQ ID NO: 1832599 - DNA, 25 bp, Homo sapien
cactgcctgttgttgagggacgtgc

SEQ ID NO: 1832600 - DNA, 25 bp, Homo sapien
gcttaaagtacaggatggtgtttcc

SEQ ID NO: 1832601 - DNA, 25 bp, Homo sapien
gatctgagttaaccagtcactgcct

SEQ ID NO: 1832602 - DNA, 25 bp, Homo sapien
gaaagaagttgcagatgaaggataa

SEQ ID NO: 1832603 - DNA, 25 bp, Homo sapien
cgagaaagaagttgcagatgaagga

SEQ ID NO: 1832604 - DNA, 25 bp, Homo sapien
gagtaacgagaaagaagttgcagat

SEQ ID NO: 1832605 - DNA, 25 bp, Homo sapien
aagttgcagatgaaggataaatgga

SEQ ID NO: 1832606 - DNA, 25 bp, Homo sapien
gataatgaactatgcttgtcaacat

SEQ ID NO: 1832607 - DNA, 25 bp, Homo sapien
gcttgtcaacatggcctcattaacc

SEQ ID NO: 1832608 - DNA, 25 bp, Homo sapien
gagtggtcattagcttgctgataat

SEQ ID NO: 1832609 - DNA, 25 bp, Homo sapien
tcactgcagacctaattgtaggctg

SEQ ID NO: 1832610 - DNA, 25 bp, Homo sapien
tcattctctgtgtctggttgtcctg

SEQ ID NO: 1832611 - DNA, 25 bp, Homo sapien
cctgttctcagaagttgttcagttg

SEQ ID NO: 1832612 - DNA, 25 bp, Homo sapien
ggttgtcctgttctcagaagttgtt

SEQ ID NO: 1832613 - DNA, 25 bp, Homo sapien
agttgtgcttccataatatctcttg

SEQ ID NO: 1832614 - DNA, 25 bp, Homo sapien
ggtggtcatgttcaacttaacctga

SEQ ID NO: 1832615 - DNA, 25 bp, Homo sapien
tataggttaaagtagaaaatggtgc

SEQ ID NO: 1832616 - DNA, 25 bp, Homo sapien
cctgatgcctcaaagcaatattgca

SEQ ID NO: 1832617 - DNA, 25 bp, Homo sapien
atatagttaaaaagaggcagagctg

SEQ ID NO: 1832618 - DNA, 25 bp, Homo sapien
cagtgtttggatgcttcatgaagtc

SEQ ID NO: 1832619 - DNA, 25 bp, Homo sapien
cgaattccagtgtttggatgcttca

SEQ ID NO: 1832620 - DNA, 25 bp, Homo sapien
ttttggctgcccgaattccagtgtt

SEQ ID NO: 1832621 - DNA, 25 bp, Homo sapien
cttcctctatctactagtacctctg

SEQ ID NO: 1832622 - DNA, 25 bp, Homo sapien
tcatctccagaggatgcaccagctc

SEQ ID NO: 1832623 - DNA, 25 bp, Homo sapien
cctgctaaggttgaaacagctgcca

SEQ ID NO: 1832624 - DNA, 25 bp, Homo sapien
gattgtctggcccaggaggatccta

SEQ ID NO: 1832625 - DNA, 25 bp, Homo sapien
tgtgcttggtctcagcctggctggt

SEQ ID NO: 1832626 - DNA, 25 bp, Homo sapien
ggaagagggaaagatgctcatgaga

SEQ ID NO: 1832627 - DNA, 25 bp, Homo sapien
aggaagagggaaagatgctcatgag

SEQ ID NO: 1832628 - DNA, 25 bp, Homo sapien
tcaagggatgtagcctgagagttta

SEQ ID NO: 1832629 - DNA, 25 bp, Homo sapien
ttgttgcaacaagccccccacaaga

SEQ ID NO: 1832630 - DNA, 25 bp, Homo sapien
tgtagcctgagagtttatcaagcca

SEQ ID NO: 1832631 - DNA, 25 bp, Homo sapien
agccatggcttgttgcaacaagccc

SEQ ID NO: 1832632 - DNA, 25 bp, Homo sapien
tttgagaacttgagcctagagggac

SEQ ID NO: 1832633 - DNA, 25 bp, Homo sapien
ggacgcttggaaggtcaaacacata

SEQ ID NO: 1832634 - DNA, 25 bp, Homo sapien
taatgataatggttgaagccatagg

SEQ ID NO: 1832635 - DNA, 25 bp, Homo sapien
cagttggaagttcaggtttgagcta

SEQ ID NO: 1832636 - DNA, 25 bp, Homo sapien
ggtatggaatcaccagcaagagttc

SEQ ID NO: 1832637 - DNA, 25 bp, Homo sapien
cagggtatggaatcaccagcaagag

SEQ ID NO: 1832638 - DNA, 25 bp, Homo sapien
agaatggcagccaagtccaccttta

SEQ ID NO: 1832639 - DNA, 25 bp, Homo sapien
agttagaatggcagccaagtccacc

SEQ ID NO: 1832640 - DNA, 25 bp, Homo sapien
agaggagctggtattattcattctg

SEQ ID NO: 1832641 - DNA, 25 bp, Homo sapien
caccactgactgaaagaaatacaaa

SEQ ID NO: 1832642 - DNA, 25 bp, Homo sapien
aagaggagctggtattattcattct

SEQ ID NO: 1832643 - DNA, 25 bp, Homo sapien
aggagatatcaccactgactgaaag

SEQ ID NO: 1832644 - DNA, 25 bp, Homo sapien
ttatcgtgcatcttctgtgcaaagg

SEQ ID NO: 1832645 - DNA, 25 bp, Homo sapien
tactcccaacaccatggcaggtagc

SEQ ID NO: 1832646 - DNA, 25 bp, Homo sapien
tgcgtagcacttatctgttccagac

SEQ ID NO: 1832647 - DNA, 25 bp, Homo sapien
taccacgtggctacataggattccg

SEQ ID NO: 1832648 - DNA, 25 bp, Homo sapien
tcattgggtgtcaaacagatctctc

SEQ ID NO: 1832649 - DNA, 25 bp, Homo sapien
ggaccaggcctcatgtagtttccta

SEQ ID NO: 1832650 - DNA, 25 bp, Homo sapien
tacagtaagttcagcatcaagtgag

SEQ ID NO: 1832651 - DNA, 25 bp, Homo sapien
gccaattgttgctatgcaggagtaa

SEQ ID NO: 1832652 - DNA, 25 bp, Homo sapien
caggagtaagcatccttagcggtgt

SEQ ID NO: 1832653 - DNA, 25 bp, Homo sapien
cttgcatgttcctagaagaggtcac

SEQ ID NO: 1832654 - DNA, 25 bp, Homo sapien
cctagaagaggtcaccaggtctgcc

SEQ ID NO: 1832655 - DNA, 25 bp, Homo sapien
tgccaaatctctattagaacccatg

SEQ ID NO: 1832656 - DNA, 25 bp, Homo sapien
ggtaagccattagagatgccaaatc

SEQ ID NO: 1832657 - DNA, 25 bp, Homo sapien
caggtgcctgctgcttgttctctct

SEQ ID NO: 1832658 - DNA, 25 bp, Homo sapien
tgcttgttctctctttcactcctca

SEQ ID NO: 1832659 - DNA, 25 bp, Homo sapien
ctctcaggtgcctgctgcttgttct

SEQ ID NO: 1832660 - DNA, 25 bp, Homo sapien
tgttctctctttcactcctcaccat

SEQ ID NO: 1832661 - DNA, 25 bp, Homo sapien
tgtttagtatactgctgagcacctt

SEQ ID NO: 1832662 - DNA, 25 bp, Homo sapien
tatggaacataggaactttgtctgc

SEQ ID NO: 1832663 - DNA, 25 bp, Homo sapien
agatgtgacccctgtgtaggaggct

SEQ ID NO: 1832664 - DNA, 25 bp, Homo sapien
tatagattgtaaacccatcagggaa

SEQ ID NO: 1832665 - DNA, 25 bp, Homo sapien
cacttgattcttatgtttattgctt

SEQ ID NO: 1832666 - DNA, 25 bp, Homo sapien
ctacaatcagtaatttttcaaacac

SEQ ID NO: 1832667 - DNA, 25 bp, Homo sapien
ttttcaaacacttgattcttatgtt

SEQ ID NO: 1832668 - DNA, 25 bp, Homo sapien
aaacacttgattcttatgtttattg

SEQ ID NO: 1832669 - DNA, 25 bp, Homo sapien
ttgataccctggcatttctcgctga

SEQ ID NO: 1832670 - DNA, 25 bp, Homo sapien
ctatgcttcgcattcctcagtggaa

SEQ ID NO: 1832671 - DNA, 25 bp, Homo sapien
taacttcctgaggtagacaaaagca

SEQ ID NO: 1832672 - DNA, 25 bp, Homo sapien
tgtgatggattactaggcagccacg

SEQ ID NO: 1832673 - DNA, 25 bp, Homo sapien
gagctgctgtaatagattgtcgaga

SEQ ID NO: 1832674 - DNA, 25 bp, Homo sapien
tacttccaggttcaattaggtggcc

SEQ ID NO: 1832675 - DNA, 25 bp, Homo sapien
tagctatcacgttttccaggaagcc

SEQ ID NO: 1832676 - DNA, 25 bp, Homo sapien
taggtggccctttgttgagctgctg

SEQ ID NO: 1832677 - DNA, 25 bp, Homo sapien
tcatgtggcttcattaactgttctt

SEQ ID NO: 1832678 - DNA, 25 bp, Homo sapien
gatttctgccacaaccgatgtgtac

SEQ ID NO: 1832679 - DNA, 25 bp, Homo sapien
gaaggaacaggtctgtgtatggaaa

SEQ ID NO: 1832680 - DNA, 25 bp, Homo sapien
cgatgtgtacgcattccctttctcc

SEQ ID NO: 1832681 - DNA, 25 bp, Homo sapien
tgttatgtctactcctgggcagagg

SEQ ID NO: 1832682 - DNA, 25 bp, Homo sapien
tgggtccttgcagcgtgcgctcaca

SEQ ID NO: 1832683 - DNA, 25 bp, Homo sapien
gagctctacactggtgcaggctaag

SEQ ID NO: 1832684 - DNA, 25 bp, Homo sapien
tgcagggcggtggtgttaagcccct

SEQ ID NO: 1832685 - DNA, 25 bp, Homo sapien
tagtattagacctgaacaaatcagt

SEQ ID NO: 1832686 - DNA, 25 bp, Homo sapien
atttccagcaatagtattagacctg

SEQ ID NO: 1832687 - DNA, 25 bp, Homo sapien
aatcagtagacctaaaccacgtgga

SEQ ID NO: 1832688 - DNA, 25 bp, Homo sapien
tagacctgaacaaatcagtagacct

SEQ ID NO: 1832689 - DNA, 25 bp, Homo sapien
atcggccatccggatgtgtacatgc

SEQ ID NO: 1832690 - DNA, 25 bp, Homo sapien
tcggccatccggatgtgtacatgca

SEQ ID NO: 1832691 - DNA, 25 bp, Homo sapien
agataatgccatccgttaaggcagg

SEQ ID NO: 1832692 - DNA, 25 bp, Homo sapien
ggaatcggccatccggatgtgtaca

SEQ ID NO: 1832693 - DNA, 25 bp, Homo sapien
catgtatgagtagctgagaacggtg

SEQ ID NO: 1832694 - DNA, 25 bp, Homo sapien
gcatgtatgagtagctgagaacggt

SEQ ID NO: 1832695 - DNA, 25 bp, Homo sapien
tatgagtagctgagaacggtgaata

SEQ ID NO: 1832696 - DNA, 25 bp, Homo sapien
tgtatgagtagctgagaacggtgaa

SEQ ID NO: 1832697 - DNA, 25 bp, Homo sapien
ccgttctacctttcctgaagactga

SEQ ID NO: 1832698 - DNA, 25 bp, Homo sapien
cgttctacctttcctgaagactgag

SEQ ID NO: 1832699 - DNA, 25 bp, Homo sapien
tccgttctacctttcctgaagactg

SEQ ID NO: 1832700 - DNA, 25 bp, Homo sapien
taagaggtatttaagtcaatttgcc

SEQ ID NO: 1832701 - DNA, 25 bp, Homo sapien
cctgggcagggacaaatcttcgagc

SEQ ID NO: 1832702 - DNA, 25 bp, Homo sapien
agaggtatttaagtcaatttgccag

SEQ ID NO: 1832703 - DNA, 25 bp, Homo sapien
cagggacaaatcttcgagcttgatg

SEQ ID NO: 1832704 - DNA, 25 bp, Homo sapien
taggaggaatcctgggctgcaggca

SEQ ID NO: 1832705 - DNA, 25 bp, Homo sapien
acccgaagctcagcatccgtgatgg

SEQ ID NO: 1832706 - DNA, 25 bp, Homo sapien
tgcgagttacccgaagctcagcatc

SEQ ID NO: 1832707 - DNA, 25 bp, Homo sapien
cactgtgcgagttacccgaagctca

SEQ ID NO: 1832708 - DNA, 25 bp, Homo sapien
tgctgggcagaaatctctttggccc

SEQ ID NO: 1832709 - DNA, 25 bp, Homo sapien
ggctttccatcttggcaacggttca

SEQ ID NO: 1832710 - DNA, 25 bp, Homo sapien
ctaacagcagcctgctgttggtgct

SEQ ID NO: 1832711 - DNA, 25 bp, Homo sapien
taacagtcctcgaagggctttccat

SEQ ID NO: 1832712 - DNA, 25 bp, Homo sapien
aaaacctccttctaacatcccgatg

SEQ ID NO: 1832713 - DNA, 25 bp, Homo sapien
atgtaagctgccagtgtgagaagca

SEQ ID NO: 1832714 - DNA, 25 bp, Homo sapien
ctaagtgccctcagagatcagtaaa

SEQ ID NO: 1832715 - DNA, 25 bp, Homo sapien
cagtgtgagaagcagataaaacctc

SEQ ID NO: 1832716 - DNA, 25 bp, Homo sapien
acttgctgtaatttactaagatcaa

SEQ ID NO: 1832717 - DNA, 25 bp, Homo sapien
cgaagatacttgctgtaatttacta

SEQ ID NO: 1832718 - DNA, 25 bp, Homo sapien
cttctggggtcgaagatacttgctg

SEQ ID NO: 1832719 - DNA, 25 bp, Homo sapien
gggtcgaagatacttgctgtaattt

SEQ ID NO: 1832720 - DNA, 25 bp, Homo sapien
gctttgatggcccttcctctcaaaa

SEQ ID NO: 1832721 - DNA, 25 bp, Homo sapien
cttgggcatgcttcatattctgctt

SEQ ID NO: 1832722 - DNA, 25 bp, Homo sapien
tcctctcaaaagcttgtcccgttgt

SEQ ID NO: 1832723 - DNA, 25 bp, Homo sapien
tcaaaagcttgtcccgttgtgactt

SEQ ID NO: 1832724 - DNA, 25 bp, Homo sapien
gagggctcctcagcactgcctcttg

SEQ ID NO: 1832725 - DNA, 25 bp, Homo sapien
ggctcctcagcactgcctcttgttg

SEQ ID NO: 1832726 - DNA, 25 bp, Homo sapien
ctctggagggctcctcagcactgcc

SEQ ID NO: 1832727 - DNA, 25 bp, Homo sapien
tctggagggctcctcagcactgcct

SEQ ID NO: 1832728 - DNA, 25 bp, Homo sapien
cacatcgacttttgttataagtacg

SEQ ID NO: 1832729 - DNA, 25 bp, Homo sapien
tataagtacgctgtcatcattgtgc

SEQ ID NO: 1832730 - DNA, 25 bp, Homo sapien
ccacacatttgctaatttattgtcg

SEQ ID NO: 1832731 - DNA, 25 bp, Homo sapien
ttagtacgtattgtcatccatatac

SEQ ID NO: 1832732 - DNA, 25 bp, Homo sapien
tcattggcaactaaatcaggtgccc

SEQ ID NO: 1832733 - DNA, 25 bp, Homo sapien
tccattgcttgactggacctatgtc

SEQ ID NO: 1832734 - DNA, 25 bp, Homo sapien
ggataactaattccagatcctgact

SEQ ID NO: 1832735 - DNA, 25 bp, Homo sapien
tcaggtgccctagcgccttctgtag

SEQ ID NO: 1832736 - DNA, 25 bp, Homo sapien
cagcttgtactccacagccagtttc

SEQ ID NO: 1832737 - DNA, 25 bp, Homo sapien
cttgtactccacagccagtttcaat

SEQ ID NO: 1832738 - DNA, 25 bp, Homo sapien
gcagcttgtactccacagccagttt

SEQ ID NO: 1832739 - DNA, 25 bp, Homo sapien
tactccacagccagtttcaatttca

SEQ ID NO: 1832740 - DNA, 25 bp, Homo sapien
gcactgtggaggggccttgcacact

SEQ ID NO: 1832741 - DNA, 25 bp, Homo sapien
ctggttccttcatccagcctggcag

SEQ ID NO: 1832742 - DNA, 25 bp, Homo sapien
ggccttgcacactgtgtgctgggaa

SEQ ID NO: 1832743 - DNA, 25 bp, Homo sapien
cctggttccttcatccagcctggca

SEQ ID NO: 1832744 - DNA, 25 bp, Homo sapien
gtttgggaaggtattgatggttgag

SEQ ID NO: 1832745 - DNA, 25 bp, Homo sapien
taaatgtgtccctgttattacaaag

SEQ ID NO: 1832746 - DNA, 25 bp, Homo sapien
caaagacagataaaggacttttctg

SEQ ID NO: 1832747 - DNA, 25 bp, Homo sapien
cagataaaggacttttctgtgaaaa

SEQ ID NO: 1832748 - DNA, 25 bp, Homo sapien
cactgagacttgatcccagtagcag

SEQ ID NO: 1832749 - DNA, 25 bp, Homo sapien
gaacgggatacgctccagtatagcc

SEQ ID NO: 1832750 - DNA, 25 bp, Homo sapien
gaacaaacagggttgatatgctcct

SEQ ID NO: 1832751 - DNA, 25 bp, Homo sapien
tagcagtgaagtatgagaacgggat

SEQ ID NO: 1832752 - DNA, 25 bp, Homo sapien
acacaaatacaatataagcggtggc

SEQ ID NO: 1832753 - DNA, 25 bp, Homo sapien
gcacagaacagtgagcgccaagtgg

SEQ ID NO: 1832754 - DNA, 25 bp, Homo sapien
tataagcggtggcacagaacagtga

SEQ ID NO: 1832755 - DNA, 25 bp, Homo sapien
ttggggatatgagagccatacacac

SEQ ID NO: 1832756 - DNA, 25 bp, Homo sapien
taagcgggggcccagtgagatctga

SEQ ID NO: 1832757 - DNA, 25 bp, Homo sapien
tgcacttgcagctgcattaagcggg

SEQ ID NO: 1832758 - DNA, 25 bp, Homo sapien
cccagtgagatctgaaccgaggctg

SEQ ID NO: 1832759 - DNA, 25 bp, Homo sapien
atgcacttgcagctgcattaagcgg

SEQ ID NO: 1832760 - DNA, 25 bp, Homo sapien
taaaaatgaacctcgaaaactgcag

SEQ ID NO: 1832761 - DNA, 25 bp, Homo sapien
cagggctcaggcttgttgtctggtt

SEQ ID NO: 1832762 - DNA, 25 bp, Homo sapien
gctgcgacaaatccaggagccttgc

SEQ ID NO: 1832763 - DNA, 25 bp, Homo sapien
caggcagaccacgttccactgaaaa

SEQ ID NO: 1832764 - DNA, 25 bp, Homo sapien
agtgccatggtaacttgagtctgag

SEQ ID NO: 1832765 - DNA, 25 bp, Homo sapien
taacataatctatgagaattcccag

SEQ ID NO: 1832766 - DNA, 25 bp, Homo sapien
tgagtctgagtttgcaaagtgaaag

SEQ ID NO: 1832767 - DNA, 25 bp, Homo sapien
gagaattcccagtagtgccatggta

SEQ ID NO: 1832768 - DNA, 25 bp, Homo sapien
gatttgtccaaatcacactgtttct

SEQ ID NO: 1832769 - DNA, 25 bp, Homo sapien
tcgctgttatagaatgatttgtcca

SEQ ID NO: 1832770 - DNA, 25 bp, Homo sapien
aatcacactgtttctcccctaaggc

SEQ ID NO: 1832771 - DNA, 25 bp, Homo sapien
agccgttgaacacatcgaaaggttt

SEQ ID NO: 1832772 - DNA, 25 bp, Homo sapien
agcagggcaaatagctggttggggt

SEQ ID NO: 1832773 - DNA, 25 bp, Homo sapien
ggcaaatagctggttggggttatgt

SEQ ID NO: 1832774 - DNA, 25 bp, Homo sapien
cagggcaaatagctggttggggtta

SEQ ID NO: 1832775 - DNA, 25 bp, Homo sapien
caaatagctggttggggttatgttt

SEQ ID NO: 1832776 - DNA, 25 bp, Homo sapien
gattttttcctctggtcactggttc

SEQ ID NO: 1832777 - DNA, 25 bp, Homo sapien
tcctctggtcactggttctttattt

SEQ ID NO: 1832778 - DNA, 25 bp, Homo sapien
gcagtcattgcaaattgaggctctg

SEQ ID NO: 1832779 - DNA, 25 bp, Homo sapien
tgcagtcattgcaaattgaggctct

SEQ ID NO: 1832780 - DNA, 25 bp, Homo sapien
tcttggcgtagacacttcattattc

SEQ ID NO: 1832781 - DNA, 25 bp, Homo sapien
gcagagtttgtattgtacaatcttc

SEQ ID NO: 1832782 - DNA, 25 bp, Homo sapien
ttgtacaatcttcttggcgtagaca

SEQ ID NO: 1832783 - DNA, 25 bp, Homo sapien
tacaatcttcttggcgtagacactt

SEQ ID NO: 1832784 - DNA, 25 bp, Homo sapien
tctacaacttcactttttggaccca

SEQ ID NO: 1832785 - DNA, 25 bp, Homo sapien
actttttggacccactaacatcagc

SEQ ID NO: 1832786 - DNA, 25 bp, Homo sapien
tttttggacccactaacatcagctc

SEQ ID NO: 1832787 - DNA, 25 bp, Homo sapien
cttcactttttggacccactaacat

SEQ ID NO: 1832788 - DNA, 25 bp, Homo sapien
ccaatgactcgcctatttagaatgg

SEQ ID NO: 1832789 - DNA, 25 bp, Homo sapien
aatgactcgcctatttagaatggtt

SEQ ID NO: 1832790 - DNA, 25 bp, Homo sapien
tgactcgcctatttagaatggttcc

SEQ ID NO: 1832791 - DNA, 25 bp, Homo sapien
gactcgcctatttagaatggttccc

SEQ ID NO: 1832792 - DNA, 25 bp, Homo sapien
tgcgcagtcacatcatggtgatctt

SEQ ID NO: 1832793 - DNA, 25 bp, Homo sapien
gtgcatcccgccagcactagtcctg

SEQ ID NO: 1832794 - DNA, 25 bp, Homo sapien
agcactagtcctgccctgcgcagtc

SEQ ID NO: 1832795 - DNA, 25 bp, Homo sapien
ctgccctgcgcagtcacatcatggt

SEQ ID NO: 1832796 - DNA, 25 bp, Homo sapien
taaaggtacaagagcccacttgtgt

SEQ ID NO: 1832797 - DNA, 25 bp, Homo sapien
aaaggtacaagagcccacttgtgtt

SEQ ID NO: 1832798 - DNA, 25 bp, Homo sapien
aggtacaagagcccacttgtgttct

SEQ ID NO: 1832799 - DNA, 25 bp, Homo sapien
gtaaaggtacaagagcccacttgtg

SEQ ID NO: 1832800 - DNA, 25 bp, Homo sapien
tatctgtatcacacagtatctgcaa

SEQ ID NO: 1832801 - DNA, 25 bp, Homo sapien
taaatgcaacaattttatctgtatc

SEQ ID NO: 1832802 - DNA, 25 bp, Homo sapien
agatctgcaagtaagaaaggcttga

SEQ ID NO: 1832803 - DNA, 25 bp, Homo sapien
aaaggcttgatgcctcttgagcagt

SEQ ID NO: 1832804 - DNA, 25 bp, Homo sapien
attcccttaattttgctgcttcccg

SEQ ID NO: 1832805 - DNA, 25 bp, Homo sapien
cccttaattttgctgcttcccgcat

SEQ ID NO: 1832806 - DNA, 25 bp, Homo sapien
cttcatttatctggtggcattttct

SEQ ID NO: 1832807 - DNA, 25 bp, Homo sapien
cacaaattcccttaattttgctgct

SEQ ID NO: 1832808 - DNA, 25 bp, Homo sapien
tttgcagacatccacaatctctaca

SEQ ID NO: 1832809 - DNA, 25 bp, Homo sapien
tatccaattggagaggacaatatgg

SEQ ID NO: 1832810 - DNA, 25 bp, Homo sapien
taaacctaaaactgtctgcgagttg

SEQ ID NO: 1832811 - DNA, 25 bp, Homo sapien
agagctccccttacttggttaggtg

SEQ ID NO: 1832812 - DNA, 25 bp, Homo sapien
taacaccctttcagaggcatgcagt

SEQ ID NO: 1832813 - DNA, 25 bp, Homo sapien
tactagatttatgcctcaccagagg

SEQ ID NO: 1832814 - DNA, 25 bp, Homo sapien
ggtatctctcctaagtggctcgtca

SEQ ID NO: 1832815 - DNA, 25 bp, Homo sapien
tgaacagcagcccaaaagcaaaggt

SEQ ID NO: 1832816 - DNA, 25 bp, Homo sapien
cagatgttccgtttctttccccagg

SEQ ID NO: 1832817 - DNA, 25 bp, Homo sapien
tcctgattcatgataaagggagcct

SEQ ID NO: 1832818 - DNA, 25 bp, Homo sapien
tgacagaggtgtcgacagatctccc

SEQ ID NO: 1832819 - DNA, 25 bp, Homo sapien
tccagagtcaacttagaagagcaga

SEQ ID NO: 1832820 - DNA, 25 bp, Homo sapien
atttccctgtaagctttgctttcgt

SEQ ID NO: 1832821 - DNA, 25 bp, Homo sapien
aagctttgctttcgtacatcccaca

SEQ ID NO: 1832822 - DNA, 25 bp, Homo sapien
aatcttcatgtatttgggatttttc

SEQ ID NO: 1832823 - DNA, 25 bp, Homo sapien
cccacaaatttcaatctgtgttttc

SEQ ID NO: 1832824 - DNA, 25 bp, Homo sapien
tcctggtgacctgggagcacataag

SEQ ID NO: 1832825 - DNA, 25 bp, Homo sapien
gagtgcatttctgtacctgagtact

SEQ ID NO: 1832826 - DNA, 25 bp, Homo sapien
cacagtgctgtccttgcatgccata

SEQ ID NO: 1832827 - DNA, 25 bp, Homo sapien
ggtgtcccaagagctgtggtgttca

SEQ ID NO: 1832828 - DNA, 25 bp, Homo sapien
ccggtgatctttggcagagggtgct

SEQ ID NO: 1832829 - DNA, 25 bp, Homo sapien
ttggcagagggtgctgcttctttca

SEQ ID NO: 1832830 - DNA, 25 bp, Homo sapien
agagggtgctgcttctttcatgaac

SEQ ID NO: 1832831 - DNA, 25 bp, Homo sapien
ggcagagggtgctgcttctttcatg

SEQ ID NO: 1832832 - DNA, 25 bp, Homo sapien
atcagctggtgagcgttcaagcagg

SEQ ID NO: 1832833 - DNA, 25 bp, Homo sapien
tcttgttgggatcagctggtgagcg

SEQ ID NO: 1832834 - DNA, 25 bp, Homo sapien
ttgggatcagctggtgagcgttcaa

SEQ ID NO: 1832835 - DNA, 25 bp, Homo sapien
tgagcgttcaagcagggaggttgga

SEQ ID NO: 1832836 - DNA, 25 bp, Homo sapien
catattgaggattagagctttgaca

SEQ ID NO: 1832837 - DNA, 25 bp, Homo sapien
tcacggtgcccgctgatttggttcc

SEQ ID NO: 1832838 - DNA, 25 bp, Homo sapien
tcccatgttgatagaaagatcctgc

SEQ ID NO: 1832839 - DNA, 25 bp, Homo sapien
tatgcgaacaagtgagcactctggc

SEQ ID NO: 1832840 - DNA, 25 bp, Homo sapien
caaatagttcaccacatagttgctg

SEQ ID NO: 1832841 - DNA, 25 bp, Homo sapien
ttgctgtacacagcgggaggagatt

SEQ ID NO: 1832842 - DNA, 25 bp, Homo sapien
catagttgctgtacacagcgggagg

SEQ ID NO: 1832843 - DNA, 25 bp, Homo sapien
caccacatagttgctgtacacagcg

SEQ ID NO: 1832844 - DNA, 25 bp, Homo sapien
tactgagcatcaccatagatgtcct

SEQ ID NO: 1832845 - DNA, 25 bp, Homo sapien
cagttcttcgcagatattactgagc

SEQ ID NO: 1832846 - DNA, 25 bp, Homo sapien
caactgaagtatagccacctcaaag

SEQ ID NO: 1832847 - DNA, 25 bp, Homo sapien
ggtgcacaccttagatccatcagca

SEQ ID NO: 1832848 - DNA, 25 bp, Homo sapien
caattcagccttagaagtgatggag

SEQ ID NO: 1832849 - DNA, 25 bp, Homo sapien
gcacattggatatgacaattcagcc

SEQ ID NO: 1832850 - DNA, 25 bp, Homo sapien
tgatatgcaagtccatggccaagcc

SEQ ID NO: 1832851 - DNA, 25 bp, Homo sapien
caatagtacttaagctgctgttgag

SEQ ID NO: 1832852 - DNA, 25 bp, Homo sapien
tacaaatagttatgcccaagcaggt

SEQ ID NO: 1832853 - DNA, 25 bp, Homo sapien
aaaagtgaagttagtctgttaccag

SEQ ID NO: 1832854 - DNA, 25 bp, Homo sapien
tagctacagagtatcaccacattcc

SEQ ID NO: 1832855 - DNA, 25 bp, Homo sapien
ttccagactgtctactccgatagga

SEQ ID NO: 1832856 - DNA, 25 bp, Homo sapien
taaaagccactttctgaggtcgagg

SEQ ID NO: 1832857 - DNA, 25 bp, Homo sapien
aagccactttctgaggtcgaggtag

SEQ ID NO: 1832858 - DNA, 25 bp, Homo sapien
aaaagccactttctgaggtcgaggt

SEQ ID NO: 1832859 - DNA, 25 bp, Homo sapien
gccactttctgaggtcgaggtaggt

SEQ ID NO: 1832860 - DNA, 25 bp, Homo sapien
gtttgattagctgagggatgcaagc

SEQ ID NO: 1832861 - DNA, 25 bp, Homo sapien
caagcagctttgatcactggggacc

SEQ ID NO: 1832862 - DNA, 25 bp, Homo sapien
tcactggggacctcacttcctgcat

SEQ ID NO: 1832863 - DNA, 25 bp, Homo sapien
tcagaagtttgattagctgagggat

SEQ ID NO: 1832864 - DNA, 25 bp, Homo sapien
gaagcaagacgatcttcagtagtga

SEQ ID NO: 1832865 - DNA, 25 bp, Homo sapien
cttggaagcaagacgatcttcagta

SEQ ID NO: 1832866 - DNA, 25 bp, Homo sapien
aaacttggaagcaagacgatcttca

SEQ ID NO: 1832867 - DNA, 25 bp, Homo sapien
ctttactggtaactgtcaaaacttg

SEQ ID NO: 1832868 - DNA, 25 bp, Homo sapien
cctgaacaggaaccatgaggtatgt

SEQ ID NO: 1832869 - DNA, 25 bp, Homo sapien
tagggctttgcctgttgtgcctgtg

SEQ ID NO: 1832870 - DNA, 25 bp, Homo sapien
tgtagtatgggcttcatgtagggct

SEQ ID NO: 1832871 - DNA, 25 bp, Homo sapien
tcagagaagtccctgaacaggaacc

SEQ ID NO: 1832872 - DNA, 25 bp, Homo sapien
ttgcgaataacagcacacaaatttc

SEQ ID NO: 1832873 - DNA, 25 bp, Homo sapien
tgcgaataacagcacacaaatttct

SEQ ID NO: 1832874 - DNA, 25 bp, Homo sapien
cttgcgaataacagcacacaaattt

SEQ ID NO: 1832875 - DNA, 25 bp, Homo sapien
aagagcctgaggttgacaccttctg

SEQ ID NO: 1832876 - DNA, 25 bp, Homo sapien
ggaagagcctgaggttgacaccttc

SEQ ID NO: 1832877 - DNA, 25 bp, Homo sapien
cttgggaagagcctgaggttgacac

SEQ ID NO: 1832878 - DNA, 25 bp, Homo sapien
tgggaagagcctgaggttgacacct

SEQ ID NO: 1832879 - DNA, 25 bp, Homo sapien
tgggaattggagattccaagtgccc

SEQ ID NO: 1832880 - DNA, 25 bp, Homo sapien
ctgatccttgatctgaaataactct

SEQ ID NO: 1832881 - DNA, 25 bp, Homo sapien
aataactctgacagtgggaattgga

SEQ ID NO: 1832882 - DNA, 25 bp, Homo sapien
attccaagtgcccaaaagaagtgag

SEQ ID NO: 1832883 - DNA, 25 bp, Homo sapien
aagattctcgccaagaggattaacg

SEQ ID NO: 1832884 - DNA, 25 bp, Homo sapien
cgccaagaggattaacgtgcgtatt

SEQ ID NO: 1832885 - DNA, 25 bp, Homo sapien
ttctcgccaagaggattaacgtgcg

SEQ ID NO: 1832886 - DNA, 25 bp, Homo sapien
agataaagaaagacgccgaagagaa

SEQ ID NO: 1832887 - DNA, 25 bp, Homo sapien
gagctaagcatcatctttgagcatt

SEQ ID NO: 1832888 - DNA, 25 bp, Homo sapien
tgaaaatcatgagacatagctagtc

SEQ ID NO: 1832889 - DNA, 25 bp, Homo sapien
tgtgaaaatcatgagacatagctag

SEQ ID NO: 1832890 - DNA, 25 bp, Homo sapien
ttgagctaagcatcatctttgagca

SEQ ID NO: 1832891 - DNA, 25 bp, Homo sapien
tgtcaactgctctatcattatcctg

SEQ ID NO: 1832892 - DNA, 25 bp, Homo sapien
taagttcctgtcagttgtggatcta

SEQ ID NO: 1832893 - DNA, 25 bp, Homo sapien
ctgtgcgcatccacccctaataggg

SEQ ID NO: 1832894 - DNA, 25 bp, Homo sapien
ggctgtcaggttcatatatggcttg

SEQ ID NO: 1832895 - DNA, 25 bp, Homo sapien
tgtttgggcttgatgtcacctagtg

SEQ ID NO: 1832896 - DNA, 25 bp, Homo sapien
cagccacttgttcagaaagtgtttg

SEQ ID NO: 1832897 - DNA, 25 bp, Homo sapien
cattagctcaaaagttactctgatc

SEQ ID NO: 1832898 - DNA, 25 bp, Homo sapien
tgtgtgacctcgatcacctctcagg

SEQ ID NO: 1832899 - DNA, 25 bp, Homo sapien
tgtggtgaaaaagagtatgtctcat

SEQ ID NO: 1832900 - DNA, 25 bp, Homo sapien
tctcctcccatgacgatattctcgg

SEQ ID NO: 1832901 - DNA, 25 bp, Homo sapien
tagctgtctatagcccagtgataat

SEQ ID NO: 1832902 - DNA, 25 bp, Homo sapien
cccttggagccaaagatacactctt

SEQ ID NO: 1832903 - DNA, 25 bp, Homo sapien
ctttttggcttgctgatttcaggcc

SEQ ID NO: 1832904 - DNA, 25 bp, Homo sapien
atattaggataaaatgctttttggc

SEQ ID NO: 1832905 - DNA, 25 bp, Homo sapien
cttttctatattaggataaaatgct

SEQ ID NO: 1832906 - DNA, 25 bp, Homo sapien
gataaaatgctttttggcttgctga

SEQ ID NO: 1832907 - DNA, 25 bp, Homo sapien
acaagggcacactgttcccatgaag

SEQ ID NO: 1832908 - DNA, 25 bp, Homo sapien
tttgatgaagacaagggcacactgt

SEQ ID NO: 1832909 - DNA, 25 bp, Homo sapien
ctgcttttgatgaagacaagggcac

SEQ ID NO: 1832910 - DNA, 25 bp, Homo sapien
tgaagacaagggcacactgttccca

SEQ ID NO: 1832911 - DNA, 25 bp, Homo sapien
cttcagccaaatagactgggccacc

SEQ ID NO: 1832912 - DNA, 25 bp, Homo sapien
tacaggctgtcaaatgcaggaactt

SEQ ID NO: 1832913 - DNA, 25 bp, Homo sapien
gctgtggctatacaggctgtcaaat

SEQ ID NO: 1832914 - DNA, 25 bp, Homo sapien
gtttcaccagtgattaagctgtggc

SEQ ID NO: 1832915 - DNA, 25 bp, Homo sapien
tctcggagcaggttatatgtatata

SEQ ID NO: 1832916 - DNA, 25 bp, Homo sapien
agtcctttctcggagcaggttatat

SEQ ID NO: 1832917 - DNA, 25 bp, Homo sapien
tcctcattcataatagcacatttag

SEQ ID NO: 1832918 - DNA, 25 bp, Homo sapien
tatatgtatataacaatcctcattc

SEQ ID NO: 1832919 - DNA, 25 bp, Homo sapien
acttatccaatgaattcatgtcatt

SEQ ID NO: 1832920 - DNA, 25 bp, Homo sapien
ctgatattatcacttatccaatgaa

SEQ ID NO: 1832921 - DNA, 25 bp, Homo sapien
tcccgcatgttaatcagaaaagctt

SEQ ID NO: 1832922 - DNA, 25 bp, Homo sapien
ttttccagttgtgcatgccaggagc

SEQ ID NO: 1832923 - DNA, 25 bp, Homo sapien
tacttttggactacgccaaatgtag

SEQ ID NO: 1832924 - DNA, 25 bp, Homo sapien
tattgctcccagcattcattaggga

SEQ ID NO: 1832925 - DNA, 25 bp, Homo sapien
gaaactggaggcagtattcatggca

SEQ ID NO: 1832926 - DNA, 25 bp, Homo sapien
ggaggcagtattcatggcaccaatg

SEQ ID NO: 1832927 - DNA, 25 bp, Homo sapien
tcatggcaccaatggaagatgagaa

SEQ ID NO: 1832928 - DNA, 25 bp, Homo sapien
ggcagtattcatggcaccaatggaa

SEQ ID NO: 1832929 - DNA, 25 bp, Homo sapien
gctcagggccactgtagttggattc

SEQ ID NO: 1832930 - DNA, 25 bp, Homo sapien
gaacgcatgctgtttcagctcaggg

SEQ ID NO: 1832931 - DNA, 25 bp, Homo sapien
tatgcaaaggagcatggaacgcatg

SEQ ID NO: 1832932 - DNA, 25 bp, Homo sapien
ggtaactcctctaccagggcagtgg

SEQ ID NO: 1832933 - DNA, 25 bp, Homo sapien
taagcggcgcttattgaaccacctg

SEQ ID NO: 1832934 - DNA, 25 bp, Homo sapien
tcaagtatgccccagttaagcggcg

SEQ ID NO: 1832935 - DNA, 25 bp, Homo sapien
tggaccacctatcccaattaagtgg

SEQ ID NO: 1832936 - DNA, 25 bp, Homo sapien
cacagtgataccaactcaatggacc

SEQ ID NO: 1832937 - DNA, 25 bp, Homo sapien
ggttcagcagttcaggcagaagcca

SEQ ID NO: 1832938 - DNA, 25 bp, Homo sapien
catcctgcacgatgaggagctgact

SEQ ID NO: 1832939 - DNA, 25 bp, Homo sapien
gatgccatgcccctgtagacatttg

SEQ ID NO: 1832940 - DNA, 25 bp, Homo sapien
gactgcagtccttaagccaattatg

SEQ ID NO: 1832941 - DNA, 25 bp, Homo sapien
ttccaaccctctttccattctgtgc

SEQ ID NO: 1832942 - DNA, 25 bp, Homo sapien
ccaaccctctttccattctgtgctg

SEQ ID NO: 1832943 - DNA, 25 bp, Homo sapien
ccttccaaccctctttccattctgt

SEQ ID NO: 1832944 - DNA, 25 bp, Homo sapien
tccaaccctctttccattctgtgct

SEQ ID NO: 1832945 - DNA, 25 bp, Homo sapien
ctgttgccagtgttaatacagcata

SEQ ID NO: 1832946 - DNA, 25 bp, Homo sapien
tctgcctgttcctgccatcatttgc

SEQ ID NO: 1832947 - DNA, 25 bp, Homo sapien
ctgcctgttcctgccatcatttgct

SEQ ID NO: 1832948 - DNA, 25 bp, Homo sapien
gcttagctgacagtaaagagccttc

SEQ ID NO: 1832949 - DNA, 25 bp, Homo sapien
atttttcaggcttagctgacagtaa

SEQ ID NO: 1832950 - DNA, 25 bp, Homo sapien
tagctgacagtaaagagccttcttt

SEQ ID NO: 1832951 - DNA, 25 bp, Homo sapien
tcaggcttagctgacagtaaagagc

SEQ ID NO: 1832952 - DNA, 25 bp, Homo sapien
gaatcagcgggggaaacctttgcaa

SEQ ID NO: 1832953 - DNA, 25 bp, Homo sapien
ttggcagaatcagcgggggaaacct

SEQ ID NO: 1832954 - DNA, 25 bp, Homo sapien
cagcgggggaaacctttgcaatcct

SEQ ID NO: 1832955 - DNA, 25 bp, Homo sapien
tttctgttggcagaatcagcggggg

SEQ ID NO: 1832956 - DNA, 25 bp, Homo sapien
ggccaagttaaaacctccattgcta

SEQ ID NO: 1832957 - DNA, 25 bp, Homo sapien
ccattgctatctgaacatgtgaaag

SEQ ID NO: 1832958 - DNA, 25 bp, Homo sapien
aacatggagtttgcacctgacagaa

SEQ ID NO: 1832959 - DNA, 25 bp, Homo sapien
tttgctttttaacagagccagtgaa

SEQ ID NO: 1832960 - DNA, 25 bp, Homo sapien
ccttttcagggaggcaatcttcagt

SEQ ID NO: 1832961 - DNA, 25 bp, Homo sapien
tgttctctgtgtagtcagcccaaag

SEQ ID NO: 1832962 - DNA, 25 bp, Homo sapien
gagctggcagcagtatactgacatg

SEQ ID NO: 1832963 - DNA, 25 bp, Homo sapien
tgtatgtgccatgagagtagactaa

SEQ ID NO: 1832964 - DNA, 25 bp, Homo sapien
cctgtggtaatccttctttgtgtac

SEQ ID NO: 1832965 - DNA, 25 bp, Homo sapien
gctaagtgggcttccggcttctatc

SEQ ID NO: 1832966 - DNA, 25 bp, Homo sapien
tctatctcaacgcaagctcgtcttc

SEQ ID NO: 1832967 - DNA, 25 bp, Homo sapien
gctcgtcttctaaagcctctctgga

SEQ ID NO: 1832968 - DNA, 25 bp, Homo sapien
tacatcaagacaatgggtgccaaag

SEQ ID NO: 1832969 - DNA, 25 bp, Homo sapien
cagctgtatgaatctgaatcatctt

SEQ ID NO: 1832970 - DNA, 25 bp, Homo sapien
ggtgccaaagtacactcttcctgca

SEQ ID NO: 1832971 - DNA, 25 bp, Homo sapien
gaatcatcttctcccaatacatcaa

SEQ ID NO: 1832972 - DNA, 25 bp, Homo sapien
tatagcatactgtactggcctcctg

SEQ ID NO: 1832973 - DNA, 25 bp, Homo sapien
ccagtgttgctggacctgtagatct

SEQ ID NO: 1832974 - DNA, 25 bp, Homo sapien
tagaagacaatgacagggtaaaact

SEQ ID NO: 1832975 - DNA, 25 bp, Homo sapien
cttatgcccatataggagggaatat

SEQ ID NO: 1832976 - DNA, 25 bp, Homo sapien
cttgccaatctttgttgtccattca

SEQ ID NO: 1832977 - DNA, 25 bp, Homo sapien
cagtagacgatgagctgctgtgatc

SEQ ID NO: 1832978 - DNA, 25 bp, Homo sapien
tgctgtgatctttaagtcccaattc

SEQ ID NO: 1832979 - DNA, 25 bp, Homo sapien
taatatgtggaatacggtagacacc

SEQ ID NO: 1832980 - DNA, 25 bp, Homo sapien
cccaggcagcatgggattccagttt

SEQ ID NO: 1832981 - DNA, 25 bp, Homo sapien
gatgattgtactgcagacaatgtaa

SEQ ID NO: 1832982 - DNA, 25 bp, Homo sapien
gcagcatgggattccagttttctac

SEQ ID NO: 1832983 - DNA, 25 bp, Homo sapien
tgaccatttagagtgctggcccagg

SEQ ID NO: 1832984 - DNA, 25 bp, Homo sapien
cccagtcacttaggccatcatcttt

SEQ ID NO: 1832985 - DNA, 25 bp, Homo sapien
aacccagtcacttaggccatcatct

SEQ ID NO: 1832986 - DNA, 25 bp, Homo sapien
gtcacttaggccatcatctttaatc

SEQ ID NO: 1832987 - DNA, 25 bp, Homo sapien
aaaaacccagtcacttaggccatca

SEQ ID NO: 1832988 - DNA, 25 bp, Homo sapien
ccacaactgccacatcattctctct

SEQ ID NO: 1832989 - DNA, 25 bp, Homo sapien
ttccacaactgccacatcattctct

SEQ ID NO: 1832990 - DNA, 25 bp, Homo sapien
ttttccacaactgccacatcattct

SEQ ID NO: 1832991 - DNA, 25 bp, Homo sapien
cttttccacaactgccacatcattc

SEQ ID NO: 1832992 - DNA, 25 bp, Homo sapien
ctgaagattgggaacttgttctgtg

SEQ ID NO: 1832993 - DNA, 25 bp, Homo sapien
gattgggaacttgttctgtgaaaca

SEQ ID NO: 1832994 - DNA, 25 bp, Homo sapien
ggaacttgttctgtgaaacatgtgc

SEQ ID NO: 1832995 - DNA, 25 bp, Homo sapien
gttctgtgaaacatgtgctctctgc

SEQ ID NO: 1832996 - DNA, 25 bp, Homo sapien
catgagcaccagcaagagagacaaa

SEQ ID NO: 1832997 - DNA, 25 bp, Homo sapien
tcgatggttgtgtacagcctgggct

SEQ ID NO: 1832998 - DNA, 25 bp, Homo sapien
ggctctatggctacatcgatggttg

SEQ ID NO: 1832999 - DNA, 25 bp, Homo sapien
gaccatatatggatgctgatcctgg

SEQ ID NO: 1833000 - DNA, 25 bp, Homo sapien
tgcatgcattaagggcaatacagcc

SEQ ID NO: 1833001 - DNA, 25 bp, Homo sapien
catctccggtacatagtgtgttaag

SEQ ID NO: 1833002 - DNA, 25 bp, Homo sapien
cagagctgcaatctgccaaatccag

SEQ ID NO: 1833003 - DNA, 25 bp, Homo sapien
tagtgtgttaagcagcaaggtgtgc

SEQ ID NO: 1833004 - DNA, 25 bp, Homo sapien
tgtgatagatgaactcccaaataac

SEQ ID NO: 1833005 - DNA, 25 bp, Homo sapien
gccagtttggcactatacctatatg

SEQ ID NO: 1833006 - DNA, 25 bp, Homo sapien
tgagctgacatcctggttgtgtgac

SEQ ID NO: 1833007 - DNA, 25 bp, Homo sapien
tgtgtgactggtaacagtgtgatag

SEQ ID NO: 1833008 - DNA, 25 bp, Homo sapien
ataaagtattccaatttttgcttct

SEQ ID NO: 1833009 - DNA, 25 bp, Homo sapien
agtattccaatttttgcttctgcat

SEQ ID NO: 1833010 - DNA, 25 bp, Homo sapien
catataaagtattccaatttttgct

SEQ ID NO: 1833011 - DNA, 25 bp, Homo sapien
aaagtattccaatttttgcttctgc

SEQ ID NO: 1833012 - DNA, 25 bp, Homo sapien
cgcaccaccactttaagagcatcag

SEQ ID NO: 1833013 - DNA, 25 bp, Homo sapien
tgcaatttagtggcaagctgcttct

SEQ ID NO: 1833014 - DNA, 25 bp, Homo sapien
cagtcattatccacctgaggcagga

SEQ ID NO: 1833015 - DNA, 25 bp, Homo sapien
cttcttttggtcatgatgccgcacc

SEQ ID NO: 1833016 - DNA, 25 bp, Homo sapien
tcttctcatggtcgtacatcctcca

SEQ ID NO: 1833017 - DNA, 25 bp, Homo sapien
tatcttattcttctcatggtcgtac

SEQ ID NO: 1833018 - DNA, 25 bp, Homo sapien
tattcttctcatggtcgtacatcct

SEQ ID NO: 1833019 - DNA, 25 bp, Homo sapien
tctgtatcttattcttctcatggtc

SEQ ID NO: 1833020 - DNA, 25 bp, Homo sapien
tctctaatataaaccttacggtcta

SEQ ID NO: 1833021 - DNA, 25 bp, Homo sapien
cttctatttcccatgaatttgttca

SEQ ID NO: 1833022 - DNA, 25 bp, Homo sapien
cttacggtctacccagttggacttg

SEQ ID NO: 1833023 - DNA, 25 bp, Homo sapien
gtctcctggcaaggcaaatcaacat

SEQ ID NO: 1833024 - DNA, 25 bp, Homo sapien
ttcctatcttgtttgcccattgcca

SEQ ID NO: 1833025 - DNA, 25 bp, Homo sapien
tcttcctatcttgtttgcccattgc

SEQ ID NO: 1833026 - DNA, 25 bp, Homo sapien
tctttcccatagattcttcctatct

SEQ ID NO: 1833027 - DNA, 25 bp, Homo sapien
ctctttcccatagattcttcctatc

SEQ ID NO: 1833028 - DNA, 25 bp, Homo sapien
cctaagagaagtcacctgtcaacct

SEQ ID NO: 1833029 - DNA, 25 bp, Homo sapien
tcaatacagtcagaaggattccagg

SEQ ID NO: 1833030 - DNA, 25 bp, Homo sapien
gggtctctaaggcacctgcagtcaa

SEQ ID NO: 1833031 - DNA, 25 bp, Homo sapien
catgtctttcagctcgtcctaagag

SEQ ID NO: 1833032 - DNA, 25 bp, Homo sapien
ttgagcctgcttttataatactagg

SEQ ID NO: 1833033 - DNA, 25 bp, Homo sapien
ccattcagtcatttacaataattga

SEQ ID NO: 1833034 - DNA, 25 bp, Homo sapien
tcacaatgatgatttcctcagattt

SEQ ID NO: 1833035 - DNA, 25 bp, Homo sapien
tacatgattcctagccaaggtgtca

SEQ ID NO: 1833036 - DNA, 25 bp, Homo sapien
ctctccgccagggaaatcaatcaca

SEQ ID NO: 1833037 - DNA, 25 bp, Homo sapien
gaaatacagggaaattgcatgtcac

SEQ ID NO: 1833038 - DNA, 25 bp, Homo sapien
tactttgattggtctgggatggacc

SEQ ID NO: 1833039 - DNA, 25 bp, Homo sapien
cactttggctacacattgggatcac

SEQ ID NO: 1833040 - DNA, 25 bp, Homo sapien
tgtcttccccaacaataatgaaggc

SEQ ID NO: 1833041 - DNA, 25 bp, Homo sapien
tgtgtccgcataaatccaacgcaaa

SEQ ID NO: 1833042 - DNA, 25 bp, Homo sapien
acagttgtgagcaaggttataggac

SEQ ID NO: 1833043 - DNA, 25 bp, Homo sapien
aacagtatccagcacagttgtgagc

SEQ ID NO: 1833044 - DNA, 25 bp, Homo sapien
tgcttgggggctacaaatctgatag

SEQ ID NO: 1833045 - DNA, 25 bp, Homo sapien
caggccgcctgttgagtggatgctt

SEQ ID NO: 1833046 - DNA, 25 bp, Homo sapien
cccaggccgcctgttgagtggatgc

SEQ ID NO: 1833047 - DNA, 25 bp, Homo sapien
ggctacaaatctgatagcctactgg

SEQ ID NO: 1833048 - DNA, 25 bp, Homo sapien
tattttgatgccgaaaagggtcaga

SEQ ID NO: 1833049 - DNA, 25 bp, Homo sapien
gactaatggctcaagttcctgcttt

SEQ ID NO: 1833050 - DNA, 25 bp, Homo sapien
tgttgctcataattggcttctaggc

SEQ ID NO: 1833051 - DNA, 25 bp, Homo sapien
tgcccattgagatgtaggaaatagc

SEQ ID NO: 1833052 - DNA, 25 bp, Homo sapien
caaacacgggactctaactgcacag

SEQ ID NO: 1833053 - DNA, 25 bp, Homo sapien
cgtgtaaacatcagcttgggagccg

SEQ ID NO: 1833054 - DNA, 25 bp, Homo sapien
ttgggagccgagtcaatcaaacacg

SEQ ID NO: 1833055 - DNA, 25 bp, Homo sapien
gcatccgggtggcatgtcacagtca

SEQ ID NO: 1833056 - DNA, 25 bp, Homo sapien
aagcctgcagtctgttatttgtgga

SEQ ID NO: 1833057 - DNA, 25 bp, Homo sapien
tttccagagggttggattatcatct

SEQ ID NO: 1833058 - DNA, 25 bp, Homo sapien
cagagggttggattatcatcttgtg

SEQ ID NO: 1833059 - DNA, 25 bp, Homo sapien
gcctgcagtctgttatttgtggaag

SEQ ID NO: 1833060 - DNA, 25 bp, Homo sapien
aagtgaccagcatggttcttgtcga

SEQ ID NO: 1833061 - DNA, 25 bp, Homo sapien
tcttgtcgaatgaaaggcagtcagt

SEQ ID NO: 1833062 - DNA, 25 bp, Homo sapien
catggttcttgtcgaatgaaaggca

SEQ ID NO: 1833063 - DNA, 25 bp, Homo sapien
gaccagcatggttcttgtcgaatga

SEQ ID NO: 1833064 - DNA, 25 bp, Homo sapien
ataccaactgtgtggcttcactggg

SEQ ID NO: 1833065 - DNA, 25 bp, Homo sapien
aataccaactgtgtggcttcactgg

SEQ ID NO: 1833066 - DNA, 25 bp, Homo sapien
aggcatcataaaataccaactgtgt

SEQ ID NO: 1833067 - DNA, 25 bp, Homo sapien
catcataaaataccaactgtgtggc

SEQ ID NO: 1833068 - DNA, 25 bp, Homo sapien
actaggcccagagtaccttctctcc

SEQ ID NO: 1833069 - DNA, 25 bp, Homo sapien
ctccagccactaggcccagagtacc

SEQ ID NO: 1833070 - DNA, 25 bp, Homo sapien
cagccactaggcccagagtaccttc

SEQ ID NO: 1833071 - DNA, 25 bp, Homo sapien
ccactaggcccagagtaccttctct

SEQ ID NO: 1833072 - DNA, 25 bp, Homo sapien
aaagaatcggcaaaccaatattttg

SEQ ID NO: 1833073 - DNA, 25 bp, Homo sapien
atattttgtttcatggtccctcgta

SEQ ID NO: 1833074 - DNA, 25 bp, Homo sapien
ctaacacaacttaaaagaatcggca

SEQ ID NO: 1833075 - DNA, 25 bp, Homo sapien
ttcatggtccctcgtagccacagaa

SEQ ID NO: 1833076 - DNA, 25 bp, Homo sapien
tagtttacataatgatagaaaaatg

SEQ ID NO: 1833077 - DNA, 25 bp, Homo sapien
cattatataacctatcatttgtaac

SEQ ID NO: 1833078 - DNA, 25 bp, Homo sapien
ttttagttgtaatgataggttacat

SEQ ID NO: 1833079 - DNA, 25 bp, Homo sapien
catttgtaacctatcagttgtaatg

SEQ ID NO: 1833080 - DNA, 25 bp, Homo sapien
tgcatattcattggctgcagcagag

SEQ ID NO: 1833081 - DNA, 25 bp, Homo sapien
tataggttaagaatccactgtgctg

SEQ ID NO: 1833082 - DNA, 25 bp, Homo sapien
catgttcattcaccacagtggagtg

SEQ ID NO: 1833083 - DNA, 25 bp, Homo sapien
ctggactacatgctcagactctggg

SEQ ID NO: 1833084 - DNA, 25 bp, Homo sapien
tactttgacctccttgatagatgac

SEQ ID NO: 1833085 - DNA, 25 bp, Homo sapien
agccttttaggctcttcacttttct

SEQ ID NO: 1833086 - DNA, 25 bp, Homo sapien
tctttatgctcctttgacttggtac

SEQ ID NO: 1833087 - DNA, 25 bp, Homo sapien
tgataatgtcccttaagccttttag

SEQ ID NO: 1833088 - DNA, 25 bp, Homo sapien
gaagctacgagtgcaatgcttcaca

SEQ ID NO: 1833089 - DNA, 25 bp, Homo sapien
aagctacgagtgcaatgcttcacag

SEQ ID NO: 1833090 - DNA, 25 bp, Homo sapien
gctacgagtgcaatgcttcacagca

SEQ ID NO: 1833091 - DNA, 25 bp, Homo sapien
ttagaagctacgagtgcaatgcttc

SEQ ID NO: 1833092 - DNA, 25 bp, Homo sapien
caacaaaactgggtctgatttaaca

SEQ ID NO: 1833093 - DNA, 25 bp, Homo sapien
tattgccagacatgcctctagagcc

SEQ ID NO: 1833094 - DNA, 25 bp, Homo sapien
tttccatcaaggactacaaaccatg

SEQ ID NO: 1833095 - DNA, 25 bp, Homo sapien
tatgggcagattatcttcagagctg

SEQ ID NO: 1833096 - DNA, 25 bp, Homo sapien
ccatttattcactactgggagaata

SEQ ID NO: 1833097 - DNA, 25 bp, Homo sapien
cccagagtctgctgcacaaaaaaca

SEQ ID NO: 1833098 - DNA, 25 bp, Homo sapien
acctcggtgttggtgcttaggaact

SEQ ID NO: 1833099 - DNA, 25 bp, Homo sapien
tgctgcacaaaaaacacctcggtgt

SEQ ID NO: 1833100 - DNA, 25 bp, Homo sapien
gctactgtgaatgaccccagagtct

SEQ ID NO: 1833101 - DNA, 25 bp, Homo sapien
gggttctcgacctcctagctgctga

SEQ ID NO: 1833102 - DNA, 25 bp, Homo sapien
gctgattttggaagatcctccacca

SEQ ID NO: 1833103 - DNA, 25 bp, Homo sapien
gacctcctagctgctgattttggaa

SEQ ID NO: 1833104 - DNA, 25 bp, Homo sapien
ggcatgaagggttctcgacctccta

SEQ ID NO: 1833105 - DNA, 25 bp, Homo sapien
gagccgtttcacaacacaggcagct

SEQ ID NO: 1833106 - DNA, 25 bp, Homo sapien
cagctgaggaagaagattggccctt

SEQ ID NO: 1833107 - DNA, 25 bp, Homo sapien
aatcagagagccgtttcacaacaca

SEQ ID NO: 1833108 - DNA, 25 bp, Homo sapien
gggcgagccggcttgtttccacttg

SEQ ID NO: 1833109 - DNA, 25 bp, Homo sapien
tggcaaccgcgcacctgtgagccag

SEQ ID NO: 1833110 - DNA, 25 bp, Homo sapien
agagctgattgttttccttctcggt

SEQ ID NO: 1833111 - DNA, 25 bp, Homo sapien
tgtgctccctcattacagctcactc

SEQ ID NO: 1833112 - DNA, 25 bp, Homo sapien
tgtgttcaggtctgagggcgcccaa

SEQ ID NO: 1833113 - DNA, 25 bp, Homo sapien
tgggatgggcctctctggccatttc

SEQ ID NO: 1833114 - DNA, 25 bp, Homo sapien
tctctggccatttcaaggagcaagc

SEQ ID NO: 1833115 - DNA, 25 bp, Homo sapien
ctggccatttcaaggagcaagcggt

SEQ ID NO: 1833116 - DNA, 25 bp, Homo sapien
cctctctggccatttcaaggagcaa

SEQ ID NO: 1833117 - DNA, 25 bp, Homo sapien
gctgtgactctccactgtatccaga

SEQ ID NO: 1833118 - DNA, 25 bp, Homo sapien
tcagggtttgaccagctgtgactct

SEQ ID NO: 1833119 - DNA, 25 bp, Homo sapien
tcccgctgctggcatggaaacctga

SEQ ID NO: 1833120 - DNA, 25 bp, Homo sapien
ggcatggaaacctgacattgacctc

SEQ ID NO: 1833121 - DNA, 25 bp, Homo sapien
aaggacagagaactaggctgctgca

SEQ ID NO: 1833122 - DNA, 25 bp, Homo sapien
cttccatcgccccaaggggagtagg

SEQ ID NO: 1833123 - DNA, 25 bp, Homo sapien
gaactaggctgctgcagtgcctcct

SEQ ID NO: 1833124 - DNA, 25 bp, Homo sapien
tcctccttccatcgccccaagggga

SEQ ID NO: 1833125 - DNA, 25 bp, Homo sapien
gcttccgacagtctctgaatgctca

SEQ ID NO: 1833126 - DNA, 25 bp, Homo sapien
tccgacagtctctgaatgctcaaga

SEQ ID NO: 1833127 - DNA, 25 bp, Homo sapien
cagtctctgaatgctcaagaataat

SEQ ID NO: 1833128 - DNA, 25 bp, Homo sapien
catgctgcttccgacagtctctgaa

SEQ ID NO: 1833129 - DNA, 25 bp, Homo sapien
ttcttggcagggctaatgggcagca

SEQ ID NO: 1833130 - DNA, 25 bp, Homo sapien
ctgccaagcagacaggtggtgttat

SEQ ID NO: 1833131 - DNA, 25 bp, Homo sapien
tctaattccccagtgttctcctttg

SEQ ID NO: 1833132 - DNA, 25 bp, Homo sapien
tttccatcaatactccgctagagcc

SEQ ID NO: 1833133 - DNA, 25 bp, Homo sapien
taagtagcatcttttccaacatcaa

SEQ ID NO: 1833134 - DNA, 25 bp, Homo sapien
tcctcctaacactaaataagtagca

SEQ ID NO: 1833135 - DNA, 25 bp, Homo sapien
gaatggtgagtttccgggaccgata

SEQ ID NO: 1833136 - DNA, 25 bp, Homo sapien
aacactgagaggatttttcctccta

SEQ ID NO: 1833137 - DNA, 25 bp, Homo sapien
cagccaatcttgacaatagaaggga

SEQ ID NO: 1833138 - DNA, 25 bp, Homo sapien
tcatatgctaacaactttgcgcctt

SEQ ID NO: 1833139 - DNA, 25 bp, Homo sapien
caggtagatgactgtatgttttgac

SEQ ID NO: 1833140 - DNA, 25 bp, Homo sapien
ggaccattaacatgcaaatcatatg

SEQ ID NO: 1833141 - DNA, 25 bp, Homo sapien
gactttgtctccataggctttctcc

SEQ ID NO: 1833142 - DNA, 25 bp, Homo sapien
agacttgcagcttatgagggccaga

SEQ ID NO: 1833143 - DNA, 25 bp, Homo sapien
gaagagtacatcagccaaaccaaga

SEQ ID NO: 1833144 - DNA, 25 bp, Homo sapien
ccaagagctaagacttgcagcttat

SEQ ID NO: 1833145 - DNA, 25 bp, Homo sapien
cgaagtatagggcagcaaaaagaca

SEQ ID NO: 1833146 - DNA, 25 bp, Homo sapien
atcaaaacacaggttgctggtccac

SEQ ID NO: 1833147 - DNA, 25 bp, Homo sapien
gacatttctagcaagcctttaggag

SEQ ID NO: 1833148 - DNA, 25 bp, Homo sapien
tggaccaggctttgagtagctcttc

SEQ ID NO: 1833149 - DNA, 25 bp, Homo sapien
ttagctagccacactagactgctca

SEQ ID NO: 1833150 - DNA, 25 bp, Homo sapien
ggacttcgctggcaggacctcttaa

SEQ ID NO: 1833151 - DNA, 25 bp, Homo sapien
ggaacagctgggtaatttctcctag

SEQ ID NO: 1833152 - DNA, 25 bp, Homo sapien
ctcattgtgtggtagatagtgtctc

SEQ ID NO: 1833153 - DNA, 25 bp, Homo sapien
aatgcctgtgtcagggcgcatgcca

SEQ ID NO: 1833154 - DNA, 25 bp, Homo sapien
gaggaagacggagaaagatccccgc

SEQ ID NO: 1833155 - DNA, 25 bp, Homo sapien
gaactgcatttttcctaccctgagg

SEQ ID NO: 1833156 - DNA, 25 bp, Homo sapien
tggatatgtaaagaagcagcctggt

SEQ ID NO: 1833157 - DNA, 25 bp, Homo sapien
tcaggacccatcaaggcgacagtga

SEQ ID NO: 1833158 - DNA, 25 bp, Homo sapien
tcgcacattctctctttaagtcagg

SEQ ID NO: 1833159 - DNA, 25 bp, Homo sapien
attattcgacctttctctcgcacat

SEQ ID NO: 1833160 - DNA, 25 bp, Homo sapien
caaggtaactcaatttccctcaaca

SEQ ID NO: 1833161 - DNA, 25 bp, Homo sapien
gactgtcacattgtgtttaacccaa

SEQ ID NO: 1833162 - DNA, 25 bp, Homo sapien
ttgtgtttaacccaaagcaatgatg

SEQ ID NO: 1833163 - DNA, 25 bp, Homo sapien
gctgtgctatagatattggaaatca

SEQ ID NO: 1833164 - DNA, 25 bp, Homo sapien
aaaatgctgtgctatagatattgga

SEQ ID NO: 1833165 - DNA, 25 bp, Homo sapien
aacatattgagctccataagctcta

SEQ ID NO: 1833166 - DNA, 25 bp, Homo sapien
taacatattgagctccataagctct

SEQ ID NO: 1833167 - DNA, 25 bp, Homo sapien
ctaacatattgagctccataagctc

SEQ ID NO: 1833168 - DNA, 25 bp, Homo sapien
tatgaggcggctacttagtgaactg

SEQ ID NO: 1833169 - DNA, 25 bp, Homo sapien
agtgaactggaggttcctatttaga

SEQ ID NO: 1833170 - DNA, 25 bp, Homo sapien
taacaagtgatgctccacagggatc

SEQ ID NO: 1833171 - DNA, 25 bp, Homo sapien
tgcttgcacagttggaataatgtgc

SEQ ID NO: 1833172 - DNA, 25 bp, Homo sapien
cagtggatgaaatcaggcccggaag

SEQ ID NO: 1833173 - DNA, 25 bp, Homo sapien
actggagaatgactgtagaacctac

SEQ ID NO: 1833174 - DNA, 25 bp, Homo sapien
gaagcaataagacacgtgaaatggc

SEQ ID NO: 1833175 - DNA, 25 bp, Homo sapien
tagaacctacgaaatccaggagagg

SEQ ID NO: 1833176 - DNA, 25 bp, Homo sapien
tctgcgattaggttcacacccgtaa

SEQ ID NO: 1833177 - DNA, 25 bp, Homo sapien
tgtgctttcgcctgtctacaattgc

SEQ ID NO: 1833178 - DNA, 25 bp, Homo sapien
gctatcactaatgggaaagggttcc

SEQ ID NO: 1833179 - DNA, 25 bp, Homo sapien
tcttcatgcataaacatcactcctg

SEQ ID NO: 1833180 - DNA, 25 bp, Homo sapien
tacaattgcccaatcgaacagtctc

SEQ ID NO: 1833181 - DNA, 25 bp, Homo sapien
ggaggtgcaggccccttcctaatcc

SEQ ID NO: 1833182 - DNA, 25 bp, Homo sapien
aggaacttcaaggttgggaggtgca

SEQ ID NO: 1833183 - DNA, 25 bp, Homo sapien
aggtgcaggccccttcctaatcctg

SEQ ID NO: 1833184 - DNA, 25 bp, Homo sapien
actggtgaactcatatgaaggaact

SEQ ID NO: 1833185 - DNA, 25 bp, Homo sapien
cagtgagtacataaccaaggcgaat

SEQ ID NO: 1833186 - DNA, 25 bp, Homo sapien
aatgcagtgagtacataaccaaggc

SEQ ID NO: 1833187 - DNA, 25 bp, Homo sapien
ctgcaaatgcagtgagtacataacc

SEQ ID NO: 1833188 - DNA, 25 bp, Homo sapien
gtacataaccaaggcgaatgcaaac

SEQ ID NO: 1833189 - DNA, 25 bp, Homo sapien
caccatatgcgatagtagctgttgc

SEQ ID NO: 1833190 - DNA, 25 bp, Homo sapien
tgcagttgacaaataagagtagcct

SEQ ID NO: 1833191 - DNA, 25 bp, Homo sapien
tcagcagaagccctcacgctgggaa

SEQ ID NO: 1833192 - DNA, 25 bp, Homo sapien
tcatgctgtggatccctcaaatggg

SEQ ID NO: 1833193 - DNA, 25 bp, Homo sapien
aaaggcaagcactttgatgtccata

SEQ ID NO: 1833194 - DNA, 25 bp, Homo sapien
gggaacaattaacagaagcagggac

SEQ ID NO: 1833195 - DNA, 25 bp, Homo sapien
gaagcagggacattacggcccatgt

SEQ ID NO: 1833196 - DNA, 25 bp, Homo sapien
agtgcacccgccacttcatggcacg

SEQ ID NO: 1833197 - DNA, 25 bp, Homo sapien
aactgtgaagtggttagatcgagga

SEQ ID NO: 1833198 - DNA, 25 bp, Homo sapien
tgtctattcatcttggcagtcccac

SEQ ID NO: 1833199 - DNA, 25 bp, Homo sapien
acttgactccgatgataaactgtga

SEQ ID NO: 1833200 - DNA, 25 bp, Homo sapien
agttgcatggcaattgtttatctgc

SEQ ID NO: 1833201 - DNA, 25 bp, Homo sapien
tatggaatgttttttatgaatttgc

SEQ ID NO: 1833202 - DNA, 25 bp, Homo sapien
aaatatggaatgttttttatgaatt

SEQ ID NO: 1833203 - DNA, 25 bp, Homo sapien
tggaatgttttttatgaatttgcat

SEQ ID NO: 1833204 - DNA, 25 bp, Homo sapien
taaaatatggaatgttttttatgaa

SEQ ID NO: 1833205 - DNA, 25 bp, Homo sapien
ccatttgaggttatgataattttga

SEQ ID NO: 1833206 - DNA, 25 bp, Homo sapien
ataattttgatagcacggtaataat

SEQ ID NO: 1833207 - DNA, 25 bp, Homo sapien
tagcacggtaataatttccggacat

SEQ ID NO: 1833208 - DNA, 25 bp, Homo sapien
caaaaggtccatttgaggttatgat

SEQ ID NO: 1833209 - DNA, 25 bp, Homo sapien
gttcaggtagaaatagcagttgctc

SEQ ID NO: 1833210 - DNA, 25 bp, Homo sapien
acaggataatggcaagggtaaagaa

SEQ ID NO: 1833211 - DNA, 25 bp, Homo sapien
caggtagaaatagcagttgctcaaa

SEQ ID NO: 1833212 - DNA, 25 bp, Homo sapien
agggtaaagaagatctgctccgtcc

SEQ ID NO: 1833213 - DNA, 25 bp, Homo sapien
gcatttcggctcaactgtacaaata

SEQ ID NO: 1833214 - DNA, 25 bp, Homo sapien
ttagaacaggcatttcggctcaact

SEQ ID NO: 1833215 - DNA, 25 bp, Homo sapien
ccaggctctctttgttagaacaggc

SEQ ID NO: 1833216 - DNA, 25 bp, Homo sapien
ggctctctttgttagaacaggcatt

SEQ ID NO: 1833217 - DNA, 25 bp, Homo sapien
agttgactagttagaaaatagttgc

SEQ ID NO: 1833218 - DNA, 25 bp, Homo sapien
gggccttggagctttcggatcctgc

SEQ ID NO: 1833219 - DNA, 25 bp, Homo sapien
gagctttcggatcctgcccgccttt

SEQ ID NO: 1833220 - DNA, 25 bp, Homo sapien
aaattgactcgcagttgactagtta

SEQ ID NO: 1833221 - DNA, 25 bp, Homo sapien
cctttacgcaattgatgatactgtt

SEQ ID NO: 1833222 - DNA, 25 bp, Homo sapien
tttctcagagcactgtagcccctac

SEQ ID NO: 1833223 - DNA, 25 bp, Homo sapien
cctgccttcctttacgcaattgatg

SEQ ID NO: 1833224 - DNA, 25 bp, Homo sapien
tgtccagatttggactccctgcctt

SEQ ID NO: 1833225 - DNA, 25 bp, Homo sapien
ttttctgaagtaggagccaatcctg

SEQ ID NO: 1833226 - DNA, 25 bp, Homo sapien
gcattaagtactggcttatctgctg

SEQ ID NO: 1833227 - DNA, 25 bp, Homo sapien
caccccagttggagcaattattggc

SEQ ID NO: 1833228 - DNA, 25 bp, Homo sapien
tctgaagtaggagccaatcctgttt

SEQ ID NO: 1833229 - DNA, 25 bp, Homo sapien
aacgcaatacaatggctccgaagga

SEQ ID NO: 1833230 - DNA, 25 bp, Homo sapien
tctatgggcaaagtctgagtgggct

SEQ ID NO: 1833231 - DNA, 25 bp, Homo sapien
tgaagccctggctagaaagcagaat

SEQ ID NO: 1833232 - DNA, 25 bp, Homo sapien
ttatggccctgactaatggaattgc

SEQ ID NO: 1833233 - DNA, 25 bp, Homo sapien
gagacatgggtggattactcaacct

SEQ ID NO: 1833234 - DNA, 25 bp, Homo sapien
caggcaatagtatggtggtcagacc

SEQ ID NO: 1833235 - DNA, 25 bp, Homo sapien
tacattcagtaagtccagcaaaagc

SEQ ID NO: 1833236 - DNA, 25 bp, Homo sapien
cagcaaaagcccctggatagtgatg

SEQ ID NO: 1833237 - DNA, 25 bp, Homo sapien
tgaatgctaggtgcctttgccctgc

SEQ ID NO: 1833238 - DNA, 25 bp, Homo sapien
tcaatagggcattcacgagtcccag

SEQ ID NO: 1833239 - DNA, 25 bp, Homo sapien
ctagcgtggagagcttgccagcaca

SEQ ID NO: 1833240 - DNA, 25 bp, Homo sapien
cacccacggtgggacaaaggcgcct

SEQ ID NO: 1833241 - DNA, 25 bp, Homo sapien
tgatgcagctgcatgcacgtcggtt

SEQ ID NO: 1833242 - DNA, 25 bp, Homo sapien
gaatttggtgattcaccctgaatgg

SEQ ID NO: 1833243 - DNA, 25 bp, Homo sapien
caaatcaaaaccttttcatcctgaa

SEQ ID NO: 1833244 - DNA, 25 bp, Homo sapien
gagaaatgcttgagcgcttttgcaa

SEQ ID NO: 1833245 - DNA, 25 bp, Homo sapien
tgtctcattgacaacgctcttctca

SEQ ID NO: 1833246 - DNA, 25 bp, Homo sapien
tgacaacgctcttctcatggctcgg

SEQ ID NO: 1833247 - DNA, 25 bp, Homo sapien
aaattggcctgtctcattgacaacg

SEQ ID NO: 1833248 - DNA, 25 bp, Homo sapien
gtgtaagatgggtaaaattggcctg

SEQ ID NO: 1833249 - DNA, 25 bp, Homo sapien
ggatgagaattagatttcagcaggt

SEQ ID NO: 1833250 - DNA, 25 bp, Homo sapien
gatttcagcaggtatgaagatggtg

SEQ ID NO: 1833251 - DNA, 25 bp, Homo sapien
tacgcccgctgttggtatcactgcc

SEQ ID NO: 1833252 - DNA, 25 bp, Homo sapien
gatggatgggctgtctacgcccgct

SEQ ID NO: 1833253 - DNA, 25 bp, Homo sapien
tcttagcaggaaccttagcaggaac

SEQ ID NO: 1833254 - DNA, 25 bp, Homo sapien
ccctaattaaagaggatggtgccgc

SEQ ID NO: 1833255 - DNA, 25 bp, Homo sapien
tagcaggaacattgggatctggtga

SEQ ID NO: 1833256 - DNA, 25 bp, Homo sapien
tgcatcacaggatccaaggagagtc

SEQ ID NO: 1833257 - DNA, 25 bp, Homo sapien
gaatcctggagctactcaaacctaa

SEQ ID NO: 1833258 - DNA, 25 bp, Homo sapien
taacgtcatacacccaatcctctgg

SEQ ID NO: 1833259 - DNA, 25 bp, Homo sapien
taattaagcagccacgtaacgtcat

SEQ ID NO: 1833260 - DNA, 25 bp, Homo sapien
cacccaatcctctggagtgtggcca

SEQ ID NO: 1833261 - DNA, 25 bp, Homo sapien
gctgtgtatatatgttccctgatgc

SEQ ID NO: 1833262 - DNA, 25 bp, Homo sapien
cctgatgcaacctgaagttctctgt

SEQ ID NO: 1833263 - DNA, 25 bp, Homo sapien
agttctctgtagtgaacgttagttc

SEQ ID NO: 1833264 - DNA, 25 bp, Homo sapien
tatatatgttccctgatgcaacctg

SEQ ID NO: 1833265 - DNA, 25 bp, Homo sapien
tgaataggaagtcaggtaggtccct

SEQ ID NO: 1833266 - DNA, 25 bp, Homo sapien
taagggtctcagtgggatcagcatg

SEQ ID NO: 1833267 - DNA, 25 bp, Homo sapien
caggtcagggttgataagggtctca

SEQ ID NO: 1833268 - DNA, 25 bp, Homo sapien
aacataaggcagatccaagaggcac

SEQ ID NO: 1833269 - DNA, 25 bp, Homo sapien
gcgtcttcagcactggtatgcttgg

SEQ ID NO: 1833270 - DNA, 25 bp, Homo sapien
catgacccatgttcaaatagggttc

SEQ ID NO: 1833271 - DNA, 25 bp, Homo sapien
tatgcttggtgcataccaggtcctc

SEQ ID NO: 1833272 - DNA, 25 bp, Homo sapien
tagggttccagtaagtgcgtcttca

SEQ ID NO: 1833273 - DNA, 25 bp, Homo sapien
ataaatgataatgattgtcagggga

SEQ ID NO: 1833274 - DNA, 25 bp, Homo sapien
aatataaatgataatgattgtcagg

SEQ ID NO: 1833275 - DNA, 25 bp, Homo sapien
aaatgataatgattgtcaggggatg

SEQ ID NO: 1833276 - DNA, 25 bp, Homo sapien
tttaatataaatgataatgattgtc

SEQ ID NO: 1833277 - DNA, 25 bp, Homo sapien
gagtgccaagtaattgatgatgaga

SEQ ID NO: 1833278 - DNA, 25 bp, Homo sapien
ccaagtaattgatgatgagagtatg

SEQ ID NO: 1833279 - DNA, 25 bp, Homo sapien
ggcacaggattgagtgccaagtaat

SEQ ID NO: 1833280 - DNA, 25 bp, Homo sapien
ggattgagtgccaagtaattgatga

SEQ ID NO: 1833281 - DNA, 25 bp, Homo sapien
aaaggaagaagacagcgagtgctta

SEQ ID NO: 1833282 - DNA, 25 bp, Homo sapien
gaagacagcgagtgcttagctgcct

SEQ ID NO: 1833283 - DNA, 25 bp, Homo sapien
agcgtcccccgtgcttgatgaggca

SEQ ID NO: 1833284 - DNA, 25 bp, Homo sapien
cccgtgcttgatgaggcaaaaggaa

SEQ ID NO: 1833285 - DNA, 25 bp, Homo sapien
tgtttgcaaagtactgcagagttta

SEQ ID NO: 1833286 - DNA, 25 bp, Homo sapien
taatattaccgttattaagcctgct

SEQ ID NO: 1833287 - DNA, 25 bp, Homo sapien
cacttcatgagtaacccctaaggtt

SEQ ID NO: 1833288 - DNA, 25 bp, Homo sapien
taagcctgcttacaatgaggcaact

SEQ ID NO: 1833289 - DNA, 25 bp, Homo sapien
ctctcttttttccacatttcctctg

SEQ ID NO: 1833290 - DNA, 25 bp, Homo sapien
tctcttttttccacatttcctctgc

SEQ ID NO: 1833291 - DNA, 25 bp, Homo sapien
tcttttttccacatttcctctgccc

SEQ ID NO: 1833292 - DNA, 25 bp, Homo sapien
ctctctcttttttccacatttcctc

SEQ ID NO: 1833293 - DNA, 25 bp, Homo sapien
ctaagctcatgggtcagatcaaaag

SEQ ID NO: 1833294 - DNA, 25 bp, Homo sapien
ccaaggtgactgatacccactcaaa

SEQ ID NO: 1833295 - DNA, 25 bp, Homo sapien
tatctctgtagggaagctgctgaca

SEQ ID NO: 1833296 - DNA, 25 bp, Homo sapien
cagcctctccgttaagttgcttagg

SEQ ID NO: 1833297 - DNA, 25 bp, Homo sapien
ccaacctgtgtagggatatcaattg

SEQ ID NO: 1833298 - DNA, 25 bp, Homo sapien
caattgcttcctgtagctgttcttc

SEQ ID NO: 1833299 - DNA, 25 bp, Homo sapien
aaacattgtgtttataaatttgcat

SEQ ID NO: 1833300 - DNA, 25 bp, Homo sapien
gcatatcaaccccaacctgtgtagg

SEQ ID NO: 1833301 - DNA, 25 bp, Homo sapien
tattcaaggctgatcatgagtgcta

SEQ ID NO: 1833302 - DNA, 25 bp, Homo sapien
tcaaggctgatcatgagtgctatgg

SEQ ID NO: 1833303 - DNA, 25 bp, Homo sapien
ggctgatcatgagtgctatgggcat

SEQ ID NO: 1833304 - DNA, 25 bp, Homo sapien
atattcaaggctgatcatgagtgct

SEQ ID NO: 1833305 - DNA, 25 bp, Homo sapien
cacagacggctgtgcctggatatgt

SEQ ID NO: 1833306 - DNA, 25 bp, Homo sapien
catactttcacacgtactttcggtc

SEQ ID NO: 1833307 - DNA, 25 bp, Homo sapien
ggagattagaattgcaaggttcaca

SEQ ID NO: 1833308 - DNA, 25 bp, Homo sapien
ttcacatggggtgcattcagctcac

SEQ ID NO: 1833309 - DNA, 25 bp, Homo sapien
ctagctatgcgggatgtaaccaaca

SEQ ID NO: 1833310 - DNA, 25 bp, Homo sapien
tgtgttgactaccaccagcagcgac

SEQ ID NO: 1833311 - DNA, 25 bp, Homo sapien
gatttatgctatccaccaggagggt

SEQ ID NO: 1833312 - DNA, 25 bp, Homo sapien
ttttacacaaaataggccagcccca

SEQ ID NO: 1833313 - DNA, 25 bp, Homo sapien
gaagttgctaactgtcgtgaagttc

SEQ ID NO: 1833314 - DNA, 25 bp, Homo sapien
ccgcgttttaacagacagtgcaaat

SEQ ID NO: 1833315 - DNA, 25 bp, Homo sapien
cgtgaagttcgatttgaaagcaaaa

SEQ ID NO: 1833316 - DNA, 25 bp, Homo sapien
catttggaagcgttcttgaagttgc

SEQ ID NO: 1833317 - DNA, 25 bp, Homo sapien
ttagcgctgtaagggccgaacccaa

SEQ ID NO: 1833318 - DNA, 25 bp, Homo sapien
tatgggagataatcaacagctactc

SEQ ID NO: 1833319 - DNA, 25 bp, Homo sapien
tgtctgccgagcctagcatgggatg

SEQ ID NO: 1833320 - DNA, 25 bp, Homo sapien
aaccgccagaatgtctgccgagcct

SEQ ID NO: 1833321 - DNA, 25 bp, Homo sapien
actacagcgagtggattccctggca

SEQ ID NO: 1833322 - DNA, 25 bp, Homo sapien
cctagaaaactacagcgagtggatt

SEQ ID NO: 1833323 - DNA, 25 bp, Homo sapien
caagcgcgcttcagaaaggactggg

SEQ ID NO: 1833324 - DNA, 25 bp, Homo sapien
gagagggcgactgaggaagacagcc

SEQ ID NO: 1833325 - DNA, 25 bp, Homo sapien
cgggcgccctgaagcccagcgcaag

SEQ ID NO: 1833326 - DNA, 25 bp, Homo sapien
tgaagcccagcgcaagcaagcgagt

SEQ ID NO: 1833327 - DNA, 25 bp, Homo sapien
ccagcgcaagcaagcgagtgagcgc

SEQ ID NO: 1833328 - DNA, 25 bp, Homo sapien
gcaagcgagtgagcgcgcaggctgg

SEQ ID NO: 1833329 - DNA, 25 bp, Homo sapien
aatgaaaggaccaggactcggaagt

SEQ ID NO: 1833330 - DNA, 25 bp, Homo sapien
gctgggtgttgggtatcacaaacaa

SEQ ID NO: 1833331 - DNA, 25 bp, Homo sapien
tgtgctctccgcattgtgctgggtg

SEQ ID NO: 1833332 - DNA, 25 bp, Homo sapien
caggactcggaagttcccaaaattg

SEQ ID NO: 1833333 - DNA, 25 bp, Homo sapien
ctttgctgcattaggaattgttagg

SEQ ID NO: 1833334 - DNA, 25 bp, Homo sapien
gaatgcaaacaacaactccctttct

SEQ ID NO: 1833335 - DNA, 25 bp, Homo sapien
gcccttgcgtaaggaggtccaagat

SEQ ID NO: 1833336 - DNA, 25 bp, Homo sapien
cgattgtggtttttgaagactgagc

SEQ ID NO: 1833337 - DNA, 25 bp, Homo sapien
ccactgttggagtcatactgaagaa

SEQ ID NO: 1833338 - DNA, 25 bp, Homo sapien
tctgaaaatatagcagctgcctgga

SEQ ID NO: 1833339 - DNA, 25 bp, Homo sapien
tgggcttggagaagagccacgatga

SEQ ID NO: 1833340 - DNA, 25 bp, Homo sapien
agccacgatgagggccactgttgga

SEQ ID NO: 1833341 - DNA, 25 bp, Homo sapien
cccaggggacctgaactcatgaatt

SEQ ID NO: 1833342 - DNA, 25 bp, Homo sapien
tatagggattgattcatgctgacat

SEQ ID NO: 1833343 - DNA, 25 bp, Homo sapien
tgggtatagggattgattcatgctg

SEQ ID NO: 1833344 - DNA, 25 bp, Homo sapien
gaactcatgaattccttgggtatag

SEQ ID NO: 1833345 - DNA, 25 bp, Homo sapien
gtaaaagtcccttgacaaatgataa

SEQ ID NO: 1833346 - DNA, 25 bp, Homo sapien
gtattttatccatggttacttcaaa

SEQ ID NO: 1833347 - DNA, 25 bp, Homo sapien
ctttcagtatggtaaggtacagtag

SEQ ID NO: 1833348 - DNA, 25 bp, Homo sapien
tagagattgggtacataatatctaa

SEQ ID NO: 1833349 - DNA, 25 bp, Homo sapien
tttttggtcccccagctctatgagt

SEQ ID NO: 1833350 - DNA, 25 bp, Homo sapien
catttttggtcccccagctctatga

SEQ ID NO: 1833351 - DNA, 25 bp, Homo sapien
tttggtcccccagctctatgagtct

SEQ ID NO: 1833352 - DNA, 25 bp, Homo sapien
cccatttttggtcccccagctctat

SEQ ID NO: 1833353 - DNA, 25 bp, Homo sapien
catcaatgccaaagcggctgtggtg

SEQ ID NO: 1833354 - DNA, 25 bp, Homo sapien
agggctccaccctcgcctttgctgg

SEQ ID NO: 1833355 - DNA, 25 bp, Homo sapien
aacatcaatgccaaagcggctgtgg

SEQ ID NO: 1833356 - DNA, 25 bp, Homo sapien
tgaagagttttcattgtcagaagaa

SEQ ID NO: 1833357 - DNA, 25 bp, Homo sapien
gaacctcttgctagatggagaagct

SEQ ID NO: 1833358 - DNA, 25 bp, Homo sapien
gcttgcacggattgaaccacagaat

SEQ ID NO: 1833359 - DNA, 25 bp, Homo sapien
tatgagttaaagcaccaatttgatc

SEQ ID NO: 1833360 - DNA, 25 bp, Homo sapien
tggtatagccatcagtggacattca

SEQ ID NO: 1833361 - DNA, 25 bp, Homo sapien
tggagagtgaattccggccgcacat

SEQ ID NO: 1833362 - DNA, 25 bp, Homo sapien
gaacagcgcgtctttcttaaggcac

SEQ ID NO: 1833363 - DNA, 25 bp, Homo sapien
cagcgttgacggaatggagtgccct

SEQ ID NO: 1833364 - DNA, 25 bp, Homo sapien
tatagaacagaatgaacgtgccttc

SEQ ID NO: 1833365 - DNA, 25 bp, Homo sapien
tgagtgtcgcccactgagcaaagat

SEQ ID NO: 1833366 - DNA, 25 bp, Homo sapien
gattccctcgtaaaacccagagcga

SEQ ID NO: 1833367 - DNA, 25 bp, Homo sapien
tttccgaggacaatccaggaccgtg

SEQ ID NO: 1833368 - DNA, 25 bp, Homo sapien
gatatgaacgactgctatagccgcc

SEQ ID NO: 1833369 - DNA, 25 bp, Homo sapien
tctcggtggagacgggtcagccctt

SEQ ID NO: 1833370 - DNA, 25 bp, Homo sapien
tagaactcgaggttcagtctcggtg

SEQ ID NO: 1833371 - DNA, 25 bp, Homo sapien
ttctggtggtcagcgggctcttctg

SEQ ID NO: 1833372 - DNA, 25 bp, Homo sapien
cggtgtcctcccgtgcagtctgtca

SEQ ID NO: 1833373 - DNA, 25 bp, Homo sapien
taacagttatagctagtggtcttgc

SEQ ID NO: 1833374 - DNA, 25 bp, Homo sapien
tgttttgcccagtatagactcggaa

SEQ ID NO: 1833375 - DNA, 25 bp, Homo sapien
tagaagcctactttgtgaccaagga

SEQ ID NO: 1833376 - DNA, 25 bp, Homo sapien
gagtagatccgactttagaagccta

SEQ ID NO: 1833377 - DNA, 25 bp, Homo sapien
taagctactgtccaatctcttgtga

SEQ ID NO: 1833378 - DNA, 25 bp, Homo sapien
gaccaaaaattctgatgaccgcatc

SEQ ID NO: 1833379 - DNA, 25 bp, Homo sapien
tctcttgtgatgtgtaacttttaca

SEQ ID NO: 1833380 - DNA, 25 bp, Homo sapien
gctatgttacgctaagctactgtcc

SEQ ID NO: 1833381 - DNA, 25 bp, Homo sapien
gactgctgaaccctacctaagcctt

SEQ ID NO: 1833382 - DNA, 25 bp, Homo sapien
tgtataggcacaaccaaagagtcag

SEQ ID NO: 1833383 - DNA, 25 bp, Homo sapien
aatgttggctatgtcctaaccaggc

SEQ ID NO: 1833384 - DNA, 25 bp, Homo sapien
aacttatactggtggactgtgaacc

SEQ ID NO: 1833385 - DNA, 25 bp, Homo sapien
ctgaagttctgtgcgcaccgaagac

SEQ ID NO: 1833386 - DNA, 25 bp, Homo sapien
tgtgcgcaccgaagacataaatgac

SEQ ID NO: 1833387 - DNA, 25 bp, Homo sapien
ataaacctgaagttctgtgcgcacc

SEQ ID NO: 1833388 - DNA, 25 bp, Homo sapien
gagaaggatttgaggaaggacgaga

SEQ ID NO: 1833389 - DNA, 25 bp, Homo sapien
ttccagtaatcaaaaagtagtcaaa

SEQ ID NO: 1833390 - DNA, 25 bp, Homo sapien
tagattgcttatatggtttgatgct

SEQ ID NO: 1833391 - DNA, 25 bp, Homo sapien
tagaaggttgaatgattctaaaatg

SEQ ID NO: 1833392 - DNA, 25 bp, Homo sapien
tgatgctttcttagaaggttgaatg

SEQ ID NO: 1833393 - DNA, 25 bp, Homo sapien
cataaggcttgcaatatcatttcaa

SEQ ID NO: 1833394 - DNA, 25 bp, Homo sapien
gagatctcataaggcttgcaatatc

SEQ ID NO: 1833395 - DNA, 25 bp, Homo sapien
ttaaaagtaagattgcactttgttc

SEQ ID NO: 1833396 - DNA, 25 bp, Homo sapien
actgtgtttaggatccataccataa

SEQ ID NO: 1833397 - DNA, 25 bp, Homo sapien
ggagggtcgcgctcattggagagac

SEQ ID NO: 1833398 - DNA, 25 bp, Homo sapien
ctttgtgaggagggtcgcgctcatt

SEQ ID NO: 1833399 - DNA, 25 bp, Homo sapien
cattggagagactcggtgaaagcaa

SEQ ID NO: 1833400 - DNA, 25 bp, Homo sapien
agagaagcactgtgcacactttgtg

SEQ ID NO: 1833401 - DNA, 25 bp, Homo sapien
acccttgcatgacgtgagttttgaa

SEQ ID NO: 1833402 - DNA, 25 bp, Homo sapien
caatttctggttcacctaacccttg

SEQ ID NO: 1833403 - DNA, 25 bp, Homo sapien
aaaccagtaaattttcctgctgaca

SEQ ID NO: 1833404 - DNA, 25 bp, Homo sapien
atttatgaaacacaatttctggttc

SEQ ID NO: 1833405 - DNA, 25 bp, Homo sapien
ccatggagaaccgtgtgatgcgcct

SEQ ID NO: 1833406 - DNA, 25 bp, Homo sapien
gatgcgcctggaaggaatcatcatg

SEQ ID NO: 1833407 - DNA, 25 bp, Homo sapien
ctgagaaattctgcacggaggagat

SEQ ID NO: 1833408 - DNA, 25 bp, Homo sapien
tcccagggacgacaggcttggtcaa

SEQ ID NO: 1833409 - DNA, 25 bp, Homo sapien
ctgggtacgcacctggttccctgtc

SEQ ID NO: 1833410 - DNA, 25 bp, Homo sapien
tgggtacgcacctggttccctgtca

SEQ ID NO: 1833411 - DNA, 25 bp, Homo sapien
cacagcttcgcagctcatttgagaa

SEQ ID NO: 1833412 - DNA, 25 bp, Homo sapien
ggatgatagtggctccgctctgaca

SEQ ID NO: 1833413 - DNA, 25 bp, Homo sapien
tctgcatcacagagtgccgagaacg

SEQ ID NO: 1833414 - DNA, 25 bp, Homo sapien
taaagatgaaccattccttgaggga

SEQ ID NO: 1833415 - DNA, 25 bp, Homo sapien
gaaataggtttcgtataccagctgc

SEQ ID NO: 1833416 - DNA, 25 bp, Homo sapien
gagtgcttgctgtttccagtatcag

SEQ ID NO: 1833417 - DNA, 25 bp, Homo sapien
taagtaagaagagaggactgacacc

SEQ ID NO: 1833418 - DNA, 25 bp, Homo sapien
gaacaacaaggcaagacgtggtgac

SEQ ID NO: 1833419 - DNA, 25 bp, Homo sapien
cgattttgtgcgaaacccctatcct

SEQ ID NO: 1833420 - DNA, 25 bp, Homo sapien
tgttgaactcctgaaggcttgaggc

SEQ ID NO: 1833421 - DNA, 25 bp, Homo sapien
ggaccactggaatgtcaggagctaa

SEQ ID NO: 1833422 - DNA, 25 bp, Homo sapien
tagctccgtaccaatcaccttgatg

SEQ ID NO: 1833423 - DNA, 25 bp, Homo sapien
tcccagcagaagactagattcctga

SEQ ID NO: 1833424 - DNA, 25 bp, Homo sapien
tcacctactgaagactggccccatt

SEQ ID NO: 1833425 - DNA, 25 bp, Homo sapien
ttagtccagtgttcgtctctggttc

SEQ ID NO: 1833426 - DNA, 25 bp, Homo sapien
gacttggaaaactggaacttctgcc

SEQ ID NO: 1833427 - DNA, 25 bp, Homo sapien
gttccacataaagctcaccttgacc

SEQ ID NO: 1833428 - DNA, 25 bp, Homo sapien
ccttgaagacctatagaacagcccc

SEQ ID NO: 1833429 - DNA, 25 bp, Homo sapien
ctttgccagaacgtgtctcctgttc

SEQ ID NO: 1833430 - DNA, 25 bp, Homo sapien
aactccccacactgtacatgaaaat

SEQ ID NO: 1833431 - DNA, 25 bp, Homo sapien
tttgtttgtttccagcaacattcta

SEQ ID NO: 1833432 - DNA, 25 bp, Homo sapien
tttgtttccagcaacattctaccct

SEQ ID NO: 1833433 - DNA, 25 bp, Homo sapien
gtttgtttccagcaacattctaccc

SEQ ID NO: 1833434 - DNA, 25 bp, Homo sapien
tgtttccagcaacattctacccttc

SEQ ID NO: 1833435 - DNA, 25 bp, Homo sapien
gctgaaagcttgtgataaatggcca

SEQ ID NO: 1833436 - DNA, 25 bp, Homo sapien
gagcaggcctagatattatggcaca

SEQ ID NO: 1833437 - DNA, 25 bp, Homo sapien
cacagtggcttttgagagcaggcct

SEQ ID NO: 1833438 - DNA, 25 bp, Homo sapien
tctgggaagctttgagtgcacagtg

SEQ ID NO: 1833439 - DNA, 25 bp, Homo sapien
ccgtgggttacttggttctctctct

SEQ ID NO: 1833440 - DNA, 25 bp, Homo sapien
aatgagtggtaagtctatagcaggg

SEQ ID NO: 1833441 - DNA, 25 bp, Homo sapien
gaaatgagtggtaagtctatagcag

SEQ ID NO: 1833442 - DNA, 25 bp, Homo sapien
ctatagcaggggccgtgggttactt

SEQ ID NO: 1833443 - DNA, 25 bp, Homo sapien
tgcagatgcggttcagtttccttgt

SEQ ID NO: 1833444 - DNA, 25 bp, Homo sapien
tgtgcgctcctgataagcagtgagc

SEQ ID NO: 1833445 - DNA, 25 bp, Homo sapien
agccagtgtgcgctcctgataagca

SEQ ID NO: 1833446 - DNA, 25 bp, Homo sapien
tcagtttccttgtgcgcaccaccat

SEQ ID NO: 1833447 - DNA, 25 bp, Homo sapien
tgcagagtatttccagtctaggacc

SEQ ID NO: 1833448 - DNA, 25 bp, Homo sapien
aagtcaaattccaatcatcaggcct

SEQ ID NO: 1833449 - DNA, 25 bp, Homo sapien
gaagagggtgtcgtgatatagacaa

SEQ ID NO: 1833450 - DNA, 25 bp, Homo sapien
cagtttggggtaaagcatgcagagt

SEQ ID NO: 1833451 - DNA, 25 bp, Homo sapien
cactgcagaagcaagtagaggatct

SEQ ID NO: 1833452 - DNA, 25 bp, Homo sapien
cagaagcaagtagaggatcttgctc

SEQ ID NO: 1833453 - DNA, 25 bp, Homo sapien
tccactgcagaagcaagtagaggat

SEQ ID NO: 1833454 - DNA, 25 bp, Homo sapien
tgcagaagcaagtagaggatcttgc

SEQ ID NO: 1833455 - DNA, 25 bp, Homo sapien
ttgaagcacgcgataaagggcccga

SEQ ID NO: 1833456 - DNA, 25 bp, Homo sapien
agcactggaactgtaggctgaagtt

SEQ ID NO: 1833457 - DNA, 25 bp, Homo sapien
agagaaaagcactggaactgtaggc

SEQ ID NO: 1833458 - DNA, 25 bp, Homo sapien
ctagatggaacagataagacttgat

SEQ ID NO: 1833459 - DNA, 25 bp, Homo sapien
aatagcagcagagccaaatcggggt

SEQ ID NO: 1833460 - DNA, 25 bp, Homo sapien
aattaatagcagcagagccaaatcg

SEQ ID NO: 1833461 - DNA, 25 bp, Homo sapien
tcaattaatagcagcagagccaaat

SEQ ID NO: 1833462 - DNA, 25 bp, Homo sapien
ttaatagcagcagagccaaatcggg

SEQ ID NO: 1833463 - DNA, 25 bp, Homo sapien
aatggtttgaaatactggagcagcc

SEQ ID NO: 1833464 - DNA, 25 bp, Homo sapien
tgcaagcagcagaagtctggttatt

SEQ ID NO: 1833465 - DNA, 25 bp, Homo sapien
aaggaaaatctgtccgtggagtcac

SEQ ID NO: 1833466 - DNA, 25 bp, Homo sapien
cagcccagttggtgactgcaggttt

SEQ ID NO: 1833467 - DNA, 25 bp, Homo sapien
tcatatcacctccagcaacacaata

SEQ ID NO: 1833468 - DNA, 25 bp, Homo sapien
tcacctccagcaacacaatatttac

SEQ ID NO: 1833469 - DNA, 25 bp, Homo sapien
catatcacctccagcaacacaatat

SEQ ID NO: 1833470 - DNA, 25 bp, Homo sapien
tatcacctccagcaacacaatattt

SEQ ID NO: 1833471 - DNA, 25 bp, Homo sapien
cactcggaatctttcttacaagcct

SEQ ID NO: 1833472 - DNA, 25 bp, Homo sapien
actcggaatctttcttacaagcctc

SEQ ID NO: 1833473 - DNA, 25 bp, Homo sapien
gcactcggaatctttcttacaagcc

SEQ ID NO: 1833474 - DNA, 25 bp, Homo sapien
gccctttgcagacgtccgtcgactg

SEQ ID NO: 1833475 - DNA, 25 bp, Homo sapien
gagcaaactggtgtgcacgcctgtg

SEQ ID NO: 1833476 - DNA, 25 bp, Homo sapien
gcacgcctgtggtctatattctggg

SEQ ID NO: 1833477 - DNA, 25 bp, Homo sapien
tgtcagacatcctccatcaggttca

SEQ ID NO: 1833478 - DNA, 25 bp, Homo sapien
ttgctcagtggtaactggaaaccag

SEQ ID NO: 1833479 - DNA, 25 bp, Homo sapien
gaacagaaggcccttctttcagcca

SEQ ID NO: 1833480 - DNA, 25 bp, Homo sapien
tagaccttgctcagtggtaactgga

SEQ ID NO: 1833481 - DNA, 25 bp, Homo sapien
ccttctttcagccaccgccagaacc

SEQ ID NO: 1833482 - DNA, 25 bp, Homo sapien
taagcctggtgattcttagtcccta

SEQ ID NO: 1833483 - DNA, 25 bp, Homo sapien
tggagtgagggttacaagataagcc

SEQ ID NO: 1833484 - DNA, 25 bp, Homo sapien
tggatctactgtcctcacctttagg

SEQ ID NO: 1833485 - DNA, 25 bp, Homo sapien
ggattttgcttaaatgggctacatc

SEQ ID NO: 1833486 - DNA, 25 bp, Homo sapien
tctgaggctttgctagcatcaagtt

SEQ ID NO: 1833487 - DNA, 25 bp, Homo sapien
gtccagaaataagcaagatccttgc

SEQ ID NO: 1833488 - DNA, 25 bp, Homo sapien
aggctttgctagcatcaagttcaag

SEQ ID NO: 1833489 - DNA, 25 bp, Homo sapien
taagcaagatccttgctgggaattt

SEQ ID NO: 1833490 - DNA, 25 bp, Homo sapien
ttcttgacattgattagggtggtga

SEQ ID NO: 1833491 - DNA, 25 bp, Homo sapien
gctttcttgacattgattagggtgg

SEQ ID NO: 1833492 - DNA, 25 bp, Homo sapien
ctttcttgacattgattagggtggt

SEQ ID NO: 1833493 - DNA, 25 bp, Homo sapien
tcttgacattgattagggtggtgaa

SEQ ID NO: 1833494 - DNA, 25 bp, Homo sapien
tggggtcttagattcccttgaagta

SEQ ID NO: 1833495 - DNA, 25 bp, Homo sapien
taagtcttcctagggatctgccacc

SEQ ID NO: 1833496 - DNA, 25 bp, Homo sapien
aattttaagtcttcctagggatctg

SEQ ID NO: 1833497 - DNA, 25 bp, Homo sapien
ttttaagtcttcctagggatctgcc

SEQ ID NO: 1833498 - DNA, 25 bp, Homo sapien
gaactgctcatgtagcgtgcatgta

SEQ ID NO: 1833499 - DNA, 25 bp, Homo sapien
gctgagaactgctcatgtagcgtgc

SEQ ID NO: 1833500 - DNA, 25 bp, Homo sapien
catgtagcgtgcatgtaattgtggg

SEQ ID NO: 1833501 - DNA, 25 bp, Homo sapien
aattgtggggttgctgcttgctccg

SEQ ID NO: 1833502 - DNA, 25 bp, Homo sapien
tgtggccagcagcttcgcctgctga

SEQ ID NO: 1833503 - DNA, 25 bp, Homo sapien
cccagccctgtgggtgtggccagca

SEQ ID NO: 1833504 - DNA, 25 bp, Homo sapien
tgggtgtggccagcagcttcgcctg

SEQ ID NO: 1833505 - DNA, 25 bp, Homo sapien
ggtgtggccagcagcttcgcctgct

SEQ ID NO: 1833506 - DNA, 25 bp, Homo sapien
tcccagatgcagaagcgagtaaaga

SEQ ID NO: 1833507 - DNA, 25 bp, Homo sapien
ccatggcagatattccttgaggtcc

SEQ ID NO: 1833508 - DNA, 25 bp, Homo sapien
tcagcgaattccctggaaagccatg

SEQ ID NO: 1833509 - DNA, 25 bp, Homo sapien
tccaccggcttgctggtttcaaggg

SEQ ID NO: 1833510 - DNA, 25 bp, Homo sapien
cgcaatgagctctaacagcctcaca

SEQ ID NO: 1833511 - DNA, 25 bp, Homo sapien
cacgcaatgagctctaacagcctca

SEQ ID NO: 1833512 - DNA, 25 bp, Homo sapien
acgcaatgagctctaacagcctcac

SEQ ID NO: 1833513 - DNA, 25 bp, Homo sapien
ccacgcaatgagctctaacagcctc

SEQ ID NO: 1833514 - DNA, 25 bp, Homo sapien
tgcccgtgcaactgaatcactgggt

SEQ ID NO: 1833515 - DNA, 25 bp, Homo sapien
gctagttagagtcattcggtgagga

SEQ ID NO: 1833516 - DNA, 25 bp, Homo sapien
taaacactgctttgaggtcagggaa

SEQ ID NO: 1833517 - DNA, 25 bp, Homo sapien
cactgggtccaatcttcatggttag

SEQ ID NO: 1833518 - DNA, 25 bp, Homo sapien
gcagcctgggccttgatttggacct

SEQ ID NO: 1833519 - DNA, 25 bp, Homo sapien
ttggtcctgggccttggcctttggc

SEQ ID NO: 1833520 - DNA, 25 bp, Homo sapien
gcctttggctggcacagcctgagcc

SEQ ID NO: 1833521 - DNA, 25 bp, Homo sapien
cagcctgggccttgatttggacctg

SEQ ID NO: 1833522 - DNA, 25 bp, Homo sapien
caaaatttggggtaggcaatgtagg

SEQ ID NO: 1833523 - DNA, 25 bp, Homo sapien
ggcacaagcacacgtccaaaatttg

SEQ ID NO: 1833524 - DNA, 25 bp, Homo sapien
cacaagcacacgtccaaaatttggg

SEQ ID NO: 1833525 - DNA, 25 bp, Homo sapien
gcaggcacaagcacacgtccaaaat

SEQ ID NO: 1833526 - DNA, 25 bp, Homo sapien
gacaccctttgggatcttgggctta

SEQ ID NO: 1833527 - DNA, 25 bp, Homo sapien
tgggatcttgggcttaacctctttg

SEQ ID NO: 1833528 - DNA, 25 bp, Homo sapien
agctgacaccctttgggatcttggg

SEQ ID NO: 1833529 - DNA, 25 bp, Homo sapien
ctttgggatcttgggcttaacctct

SEQ ID NO: 1833530 - DNA, 25 bp, Homo sapien
ttggcacatgtactcacggccttgg

SEQ ID NO: 1833531 - DNA, 25 bp, Homo sapien
gccttggcacatgtactcacggcct

SEQ ID NO: 1833532 - DNA, 25 bp, Homo sapien
tggcacatgtactcacggccttggc

SEQ ID NO: 1833533 - DNA, 25 bp, Homo sapien
cttggcacatgtactcacggccttg

SEQ ID NO: 1833534 - DNA, 25 bp, Homo sapien
tctttatctcataatagagattatg

SEQ ID NO: 1833535 - DNA, 25 bp, Homo sapien
cataatagagattatgagagtaact

SEQ ID NO: 1833536 - DNA, 25 bp, Homo sapien
tatctcataatagagattatgagag

SEQ ID NO: 1833537 - DNA, 25 bp, Homo sapien
tgagtgggtctgtgaataacttcta

SEQ ID NO: 1833538 - DNA, 25 bp, Homo sapien
tctggacggtttagatagggctgct

SEQ ID NO: 1833539 - DNA, 25 bp, Homo sapien
gctggtcgtacttcaggtggcccca

SEQ ID NO: 1833540 - DNA, 25 bp, Homo sapien
tcgataaacagctcgcccatggcag

SEQ ID NO: 1833541 - DNA, 25 bp, Homo sapien
taattgtagccatgcagtagcctgc

SEQ ID NO: 1833542 - DNA, 25 bp, Homo sapien
attgggcttcaccttgagaaactcc

SEQ ID NO: 1833543 - DNA, 25 bp, Homo sapien
cagctttgtagccaagtcattgggc

SEQ ID NO: 1833544 - DNA, 25 bp, Homo sapien
ctttgtagccaagtcattgggcttc

SEQ ID NO: 1833545 - DNA, 25 bp, Homo sapien
ttcaccttgagaaactcccaaagca

SEQ ID NO: 1833546 - DNA, 25 bp, Homo sapien
tggctgcatatggaacagctgcctg

SEQ ID NO: 1833547 - DNA, 25 bp, Homo sapien
agtcacaaacgctggctgcatatgg

SEQ ID NO: 1833548 - DNA, 25 bp, Homo sapien
ggctgcatatggaacagctgcctgc

SEQ ID NO: 1833549 - DNA, 25 bp, Homo sapien
aggcaccaagtcacaaacgctggct

SEQ ID NO: 1833550 - DNA, 25 bp, Homo sapien
ctgaaaggagggccaggaacccagg

SEQ ID NO: 1833551 - DNA, 25 bp, Homo sapien
ggcagcagcatggaggactggaggg

SEQ ID NO: 1833552 - DNA, 25 bp, Homo sapien
cagcatggaggactggagggaaaag

SEQ ID NO: 1833553 - DNA, 25 bp, Homo sapien
aggaagagtcccaggcagcagcatg

SEQ ID NO: 1833554 - DNA, 25 bp, Homo sapien
cagcagcatggaggactggagggaa

SEQ ID NO: 1833555 - DNA, 25 bp, Homo sapien
aaaacttgtcccagcatctggtggc

SEQ ID NO: 1833556 - DNA, 25 bp, Homo sapien
agaccagcggacacagagacagttg

SEQ ID NO: 1833557 - DNA, 25 bp, Homo sapien
ggtggcttttccagaccagcggaca

SEQ ID NO: 1833558 - DNA, 25 bp, Homo sapien
gaccatgcagaaaacttgtcccagc

SEQ ID NO: 1833559 - DNA, 25 bp, Homo sapien
cagtgtaaatcgtaatgccaaaagt

SEQ ID NO: 1833560 - DNA, 25 bp, Homo sapien
tgtagccagcaactgcttagacagt

SEQ ID NO: 1833561 - DNA, 25 bp, Homo sapien
gacaatagaccgaaagaaagccagg

SEQ ID NO: 1833562 - DNA, 25 bp, Homo sapien
gaatggacgattgattgtagccagc

SEQ ID NO: 1833563 - DNA, 25 bp, Homo sapien
atgggctgcaccttctctaagcaaa

SEQ ID NO: 1833564 - DNA, 25 bp, Homo sapien
ggctgcaccttctctaagcaaatac

SEQ ID NO: 1833565 - DNA, 25 bp, Homo sapien
tgggctgcaccttctctaagcaaat

SEQ ID NO: 1833566 - DNA, 25 bp, Homo sapien
gggctgcaccttctctaagcaaata

SEQ ID NO: 1833567 - DNA, 25 bp, Homo sapien
gcaaacttcactaaagatccctccg

SEQ ID NO: 1833568 - DNA, 25 bp, Homo sapien
cttcactaaagatccctccggaggg

SEQ ID NO: 1833569 - DNA, 25 bp, Homo sapien
aacttcactaaagatccctccggag

SEQ ID NO: 1833570 - DNA, 25 bp, Homo sapien
ctttcactaagtctgcaaacttcac

SEQ ID NO: 1833571 - DNA, 25 bp, Homo sapien
catgagagatcagtctgctccactg

SEQ ID NO: 1833572 - DNA, 25 bp, Homo sapien
gcagtcactagtgggaccaatggcc

SEQ ID NO: 1833573 - DNA, 25 bp, Homo sapien
ctcatgtttgtgtcccagggcctaa

SEQ ID NO: 1833574 - DNA, 25 bp, Homo sapien
gagagtccttggcaaaccagggcag

SEQ ID NO: 1833575 - DNA, 25 bp, Homo sapien
ggagtaatcaattctgggcagtcac

SEQ ID NO: 1833576 - DNA, 25 bp, Homo sapien
attttcttctcccaagcaatctgat

SEQ ID NO: 1833577 - DNA, 25 bp, Homo sapien
tcccaagcaatctgattggcagtac

SEQ ID NO: 1833578 - DNA, 25 bp, Homo sapien
tgggaacatactgtttattcaataa

SEQ ID NO: 1833579 - DNA, 25 bp, Homo sapien
tcttctcccaagcaatctgattggc

SEQ ID NO: 1833580 - DNA, 25 bp, Homo sapien
aaatcagcccatgtgtacatcacgg

SEQ ID NO: 1833581 - DNA, 25 bp, Homo sapien
gaaaacattcggaaaacagcagccc

SEQ ID NO: 1833582 - DNA, 25 bp, Homo sapien
gggccatagcacattcataacaaag

SEQ ID NO: 1833583 - DNA, 25 bp, Homo sapien
tcacggccagccatgatcattaaca

SEQ ID NO: 1833584 - DNA, 25 bp, Homo sapien
cctcttggctcgtagagttttcagt

SEQ ID NO: 1833585 - DNA, 25 bp, Homo sapien
gtcctcttggctcgtagagttttca

SEQ ID NO: 1833586 - DNA, 25 bp, Homo sapien
cttggctcgtagagttttcagtgcc

SEQ ID NO: 1833587 - DNA, 25 bp, Homo sapien
tagtcctcttggctcgtagagtttt

SEQ ID NO: 1833588 - DNA, 25 bp, Homo sapien
cccagggaaccactatgactgagta

SEQ ID NO: 1833589 - DNA, 25 bp, Homo sapien
tctaatttttggagccgatgcctgg

SEQ ID NO: 1833590 - DNA, 25 bp, Homo sapien
ggtcacagtagctggaaatcatgca

SEQ ID NO: 1833591 - DNA, 25 bp, Homo sapien
caataacctggacatggccgattaa

SEQ ID NO: 1833592 - DNA, 25 bp, Homo sapien
tctgaggccgcctttgcgtatgagc

SEQ ID NO: 1833593 - DNA, 25 bp, Homo sapien
aatagtattatcaggagacttatga

SEQ ID NO: 1833594 - DNA, 25 bp, Homo sapien
caggagacttatgatgtgcaaataa

SEQ ID NO: 1833595 - DNA, 25 bp, Homo sapien
ctttgcgtatgagcttgtggtttca

SEQ ID NO: 1833596 - DNA, 25 bp, Homo sapien
ctacagtatgacaagtgagagcacc

SEQ ID NO: 1833597 - DNA, 25 bp, Homo sapien
aggcctgtctacactcaggcttccc

SEQ ID NO: 1833598 - DNA, 25 bp, Homo sapien
gagagcaccgcttttggcagtagga

SEQ ID NO: 1833599 - DNA, 25 bp, Homo sapien
caagtgagagcaccgcttttggcag

SEQ ID NO: 1833600 - DNA, 25 bp, Homo sapien
gttggtctgtggtgcgagcctcctc

SEQ ID NO: 1833601 - DNA, 25 bp, Homo sapien
tgcacaccactcgatcaggcaatga

SEQ ID NO: 1833602 - DNA, 25 bp, Homo sapien
tcagaacacgtcatagtccccagta

SEQ ID NO: 1833603 - DNA, 25 bp, Homo sapien
cacacaatcagttcacaagagcatg

SEQ ID NO: 1833604 - DNA, 25 bp, Homo sapien
taagctgatggtcggttcaactgcc

SEQ ID NO: 1833605 - DNA, 25 bp, Homo sapien
tgcctgcatcatacacagccttgag

SEQ ID NO: 1833606 - DNA, 25 bp, Homo sapien
gggtgctaccgtgtaagagacagcc

SEQ ID NO: 1833607 - DNA, 25 bp, Homo sapien
agagacagccagctgagtgacggcc

SEQ ID NO: 1833608 - DNA, 25 bp, Homo sapien
ggaaagcatcacttaaaaacttggc

SEQ ID NO: 1833609 - DNA, 25 bp, Homo sapien
agaaaaatggtcaaacaactaagca

SEQ ID NO: 1833610 - DNA, 25 bp, Homo sapien
gaaagcatcacttaaaaacttggca

SEQ ID NO: 1833611 - DNA, 25 bp, Homo sapien
aatggtcaaacaactaagcaaacaa

SEQ ID NO: 1833612 - DNA, 25 bp, Homo sapien
gctctagctgctaatgtgacaagaa

SEQ ID NO: 1833613 - DNA, 25 bp, Homo sapien
caccatgccacaaagcagacaggat

SEQ ID NO: 1833614 - DNA, 25 bp, Homo sapien
taatgtgacaagaattccagttaag

SEQ ID NO: 1833615 - DNA, 25 bp, Homo sapien
taaaatagtatccagggtagacacc

SEQ ID NO: 1833616 - DNA, 25 bp, Homo sapien
tagcaccgtggggtaccatggaacc

SEQ ID NO: 1833617 - DNA, 25 bp, Homo sapien
ggtaccatggaacccgctgatagca

SEQ ID NO: 1833618 - DNA, 25 bp, Homo sapien
cgtggggtaccatggaacccgctga

SEQ ID NO: 1833619 - DNA, 25 bp, Homo sapien
ccatggaacccgctgatagcacaca

SEQ ID NO: 1833620 - DNA, 25 bp, Homo sapien
gaatattccagttttccaagtacat

SEQ ID NO: 1833621 - DNA, 25 bp, Homo sapien
tttagccaagtagctgtctgaatat

SEQ ID NO: 1833622 - DNA, 25 bp, Homo sapien
aagtacattttgaaacttgtggcag

SEQ ID NO: 1833623 - DNA, 25 bp, Homo sapien
tgtctgaatattccagttttccaag

SEQ ID NO: 1833624 - DNA, 25 bp, Homo sapien
agacatgtccactgtggaaggattc

SEQ ID NO: 1833625 - DNA, 25 bp, Homo sapien
ccactgtggaaggattctgtttttt

SEQ ID NO: 1833626 - DNA, 25 bp, Homo sapien
cctgaagacatgtccactgtggaag

SEQ ID NO: 1833627 - DNA, 25 bp, Homo sapien
gtggaaggattctgttttttggcac

SEQ ID NO: 1833628 - DNA, 25 bp, Homo sapien
ccagatgtttaggttcgaaagcaga

SEQ ID NO: 1833629 - DNA, 25 bp, Homo sapien
agatgtttaggttcgaaagcagatc

SEQ ID NO: 1833630 - DNA, 25 bp, Homo sapien
tccagatgtttaggttcgaaagcag

SEQ ID NO: 1833631 - DNA, 25 bp, Homo sapien
tttccagatgtttaggttcgaaagc

SEQ ID NO: 1833632 - DNA, 25 bp, Homo sapien
attcttatccactccgctgaaccca

SEQ ID NO: 1833633 - DNA, 25 bp, Homo sapien
ttatccactccgctgaacccaaagc

SEQ ID NO: 1833634 - DNA, 25 bp, Homo sapien
cactccgctgaacccaaagccagct

SEQ ID NO: 1833635 - DNA, 25 bp, Homo sapien
atccactccgctgaacccaaagcca

SEQ ID NO: 1833636 - DNA, 25 bp, Homo sapien
ctgaccgtcactgggaccagcatca

SEQ ID NO: 1833637 - DNA, 25 bp, Homo sapien
tgttgagaactaaaaccagagccag

SEQ ID NO: 1833638 - DNA, 25 bp, Homo sapien
tgggaactaattcgtgagtgacaga

SEQ ID NO: 1833639 - DNA, 25 bp, Homo sapien
gagatcaatgacactaagggccttg

SEQ ID NO: 1833640 - DNA, 25 bp, Homo sapien
ctgctaaagaagtcatcatttgtaa

SEQ ID NO: 1833641 - DNA, 25 bp, Homo sapien
ctggaacttaaaacttgaaggatga

SEQ ID NO: 1833642 - DNA, 25 bp, Homo sapien
tggaacttaaaacttgaaggatgaa

SEQ ID NO: 1833643 - DNA, 25 bp, Homo sapien
actggaacttaaaacttgaaggatg

SEQ ID NO: 1833644 - DNA, 25 bp, Homo sapien
tcattcagttacagctactccatca

SEQ ID NO: 1833645 - DNA, 25 bp, Homo sapien
cagttacagctactccatcaaactt

SEQ ID NO: 1833646 - DNA, 25 bp, Homo sapien
gttacagctactccatcaaacttac

SEQ ID NO: 1833647 - DNA, 25 bp, Homo sapien
attcagttacagctactccatcaaa

SEQ ID NO: 1833648 - DNA, 25 bp, Homo sapien
aaccagtcatccacaaggcaggtga

SEQ ID NO: 1833649 - DNA, 25 bp, Homo sapien
gccggaaagcttgctttatggacaa

SEQ ID NO: 1833650 - DNA, 25 bp, Homo sapien
taatgtccatgcaaagtaatacttg

SEQ ID NO: 1833651 - DNA, 25 bp, Homo sapien
taagtagcagagtcgagccggaaag

SEQ ID NO: 1833652 - DNA, 25 bp, Homo sapien
tgatgcccaacttgtgtatcacagc

SEQ ID NO: 1833653 - DNA, 25 bp, Homo sapien
caaggtgatgcccaacttgtgtatc

SEQ ID NO: 1833654 - DNA, 25 bp, Homo sapien
tgcccaacttgtgtatcacagctcc

SEQ ID NO: 1833655 - DNA, 25 bp, Homo sapien
agacaccaaggtgatgcccaacttg

SEQ ID NO: 1833656 - DNA, 25 bp, Homo sapien
tggcaagctgtggaaaccttttcgc

SEQ ID NO: 1833657 - DNA, 25 bp, Homo sapien
caaggaccagctatgacactcatga

SEQ ID NO: 1833658 - DNA, 25 bp, Homo sapien
cctcaatgaaggctatgtagtcctt

SEQ ID NO: 1833659 - DNA, 25 bp, Homo sapien
tgtgtatatgcttcccctcaatgaa

SEQ ID NO: 1833660 - DNA, 25 bp, Homo sapien
ccacgcagaagaaccgcagtagcag

SEQ ID NO: 1833661 - DNA, 25 bp, Homo sapien
gaggccacgcagaagaaccgcagta

SEQ ID NO: 1833662 - DNA, 25 bp, Homo sapien
gttgtctgctttggcaaccaggcct

SEQ ID NO: 1833663 - DNA, 25 bp, Homo sapien
cagtttccactgaaagaggccacgc

SEQ ID NO: 1833664 - DNA, 25 bp, Homo sapien
tagcaagtcgatgttgttcagcaga

SEQ ID NO: 1833665 - DNA, 25 bp, Homo sapien
ttgatagcaagtcgatgttgttcag

SEQ ID NO: 1833666 - DNA, 25 bp, Homo sapien
gatagcaagtcgatgttgttcagca

SEQ ID NO: 1833667 - DNA, 25 bp, Homo sapien
tgttgttcagcagaaaggtcttcag

SEQ ID NO: 1833668 - DNA, 25 bp, Homo sapien
accaaaaggagggctgctgttctta

SEQ ID NO: 1833669 - DNA, 25 bp, Homo sapien
tctgagaaccaaaaggagggctgct

SEQ ID NO: 1833670 - DNA, 25 bp, Homo sapien
ccaaaaggagggctgctgttcttac

SEQ ID NO: 1833671 - DNA, 25 bp, Homo sapien
gagaaccaaaaggagggctgctgtt

SEQ ID NO: 1833672 - DNA, 25 bp, Homo sapien
gttgtgatcttctgagtgacaatca

SEQ ID NO: 1833673 - DNA, 25 bp, Homo sapien
ggttgtgatcttctgagtgacaatc

SEQ ID NO: 1833674 - DNA, 25 bp, Homo sapien
aggttgtgatcttctgagtgacaat

SEQ ID NO: 1833675 - DNA, 25 bp, Homo sapien
tgtgatcttctgagtgacaatcatc

SEQ ID NO: 1833676 - DNA, 25 bp, Homo sapien
gagattctcctacctttacttcctg

SEQ ID NO: 1833677 - DNA, 25 bp, Homo sapien
ccagctcggcatttcaaagtgctga

SEQ ID NO: 1833678 - DNA, 25 bp, Homo sapien
ccacgtggcttttcacaactactca

SEQ ID NO: 1833679 - DNA, 25 bp, Homo sapien
ctttgcaggccacgtggcttttcac

SEQ ID NO: 1833680 - DNA, 25 bp, Homo sapien
ctgccactgtagtgcaaaagcactc

SEQ ID NO: 1833681 - DNA, 25 bp, Homo sapien
cactgtagtgcaaaagcactcatag

SEQ ID NO: 1833682 - DNA, 25 bp, Homo sapien
atccgtagtgagaattccatagtgg

SEQ ID NO: 1833683 - DNA, 25 bp, Homo sapien
cggctgatgtggcatattgtaagat

SEQ ID NO: 1833684 - DNA, 25 bp, Homo sapien
ccagaaaaatccgtagtgagaattc

SEQ ID NO: 1833685 - DNA, 25 bp, Homo sapien
catagtggaagatgtatattcggct

SEQ ID NO: 1833686 - DNA, 25 bp, Homo sapien
ctgtaaggtcttgcactcaagattc

SEQ ID NO: 1833687 - DNA, 25 bp, Homo sapien
gtgaccatgattgcatagcacatta

SEQ ID NO: 1833688 - DNA, 25 bp, Homo sapien
ggatacactagcagtgaccatgatt

SEQ ID NO: 1833689 - DNA, 25 bp, Homo sapien
ctgtgaatattggatacactagcag

SEQ ID NO: 1833690 - DNA, 25 bp, Homo sapien
atagcacattaacaccagcacaaaa

SEQ ID NO: 1833691 - DNA, 25 bp, Homo sapien
ccggacatcagagctggttgtacca

SEQ ID NO: 1833692 - DNA, 25 bp, Homo sapien
caaaaatggtggcaaccgcatgccg

SEQ ID NO: 1833693 - DNA, 25 bp, Homo sapien
gagcaacaagctggcataccacaaa

SEQ ID NO: 1833694 - DNA, 25 bp, Homo sapien
ttgtaccaggacgtaagtagatgcg

SEQ ID NO: 1833695 - DNA, 25 bp, Homo sapien
ttccctgatactggtactaaaccca

SEQ ID NO: 1833696 - DNA, 25 bp, Homo sapien
tccctgatactggtactaaacccat

SEQ ID NO: 1833697 - DNA, 25 bp, Homo sapien
aatgatttgatctcccccgtctgtc

SEQ ID NO: 1833698 - DNA, 25 bp, Homo sapien
gaaacccattgtggtcaatcagctt

SEQ ID NO: 1833699 - DNA, 25 bp, Homo sapien
agaaaagaaacccattgtggtcaat

SEQ ID NO: 1833700 - DNA, 25 bp, Homo sapien
tggtcaatcagctttatcattaatg

SEQ ID NO: 1833701 - DNA, 25 bp, Homo sapien
ttgagcctagaagttcaaggcagct

SEQ ID NO: 1833702 - DNA, 25 bp, Homo sapien
ctagaagttcaaggcagctgtgagc

SEQ ID NO: 1833703 - DNA, 25 bp, Homo sapien
agcctagaagttcaaggcagctgtg

SEQ ID NO: 1833704 - DNA, 25 bp, Homo sapien
cctagaagttcaaggcagctgtgag

SEQ ID NO: 1833705 - DNA, 25 bp, Homo sapien
gactggatctcactaagtttcgtag

SEQ ID NO: 1833706 - DNA, 25 bp, Homo sapien
cactaagtttcgtaggctggtctct

SEQ ID NO: 1833707 - DNA, 25 bp, Homo sapien
atcacctgctgacaatgatatatac

SEQ ID NO: 1833708 - DNA, 25 bp, Homo sapien
cacctgctgacaatgatatatacaa

SEQ ID NO: 1833709 - DNA, 25 bp, Homo sapien
tggcagaagctttgctatccacctt

SEQ ID NO: 1833710 - DNA, 25 bp, Homo sapien
atggcagaagctttgctatccacct

SEQ ID NO: 1833711 - DNA, 25 bp, Homo sapien
catggagaccagatgatgagggagg

SEQ ID NO: 1833712 - DNA, 25 bp, Homo sapien
ggcctcggtgcccacgcgtgtgaaa

SEQ ID NO: 1833713 - DNA, 25 bp, Homo sapien
agggatcgttctaagtggagactgt

SEQ ID NO: 1833714 - DNA, 25 bp, Homo sapien
cacgcgtgtgaaacacacaccctgt

SEQ ID NO: 1833715 - DNA, 25 bp, Homo sapien
tccctttgcttctgattatactttg

SEQ ID NO: 1833716 - DNA, 25 bp, Homo sapien
ccctttgcttctgattatactttga

SEQ ID NO: 1833717 - DNA, 25 bp, Homo sapien
cttccactatcctcataggaaagct

SEQ ID NO: 1833718 - DNA, 25 bp, Homo sapien
cactatcctcataggaaagctttcc

SEQ ID NO: 1833719 - DNA, 25 bp, Homo sapien
cacactcctaatattacatgagagg

SEQ ID NO: 1833720 - DNA, 25 bp, Homo sapien
catgagaggatgcatgcagaggcat

SEQ ID NO: 1833721 - DNA, 25 bp, Homo sapien
gcttgctacactcaacagactttca

SEQ ID NO: 1833722 - DNA, 25 bp, Homo sapien
gacccaccatcgcaagaagttttcc

SEQ ID NO: 1833723 - DNA, 25 bp, Homo sapien
catcaaatacaaataccccagttcc

SEQ ID NO: 1833724 - DNA, 25 bp, Homo sapien
ctgggtaccgtcaatgtcaagaagg

SEQ ID NO: 1833725 - DNA, 25 bp, Homo sapien
aaggggtgtgcgcaaagggcagcag

SEQ ID NO: 1833726 - DNA, 25 bp, Homo sapien
gctgaaggggtgtgcgcaaagggca

SEQ ID NO: 1833727 - DNA, 25 bp, Homo sapien
tcattgctgaaggggtgtgcgcaaa

SEQ ID NO: 1833728 - DNA, 25 bp, Homo sapien
ggtgtgcgcaaagggcagcaggtgt

SEQ ID NO: 1833729 - DNA, 25 bp, Homo sapien
ccgccccgtgcacgcgatcgctggg

SEQ ID NO: 1833730 - DNA, 25 bp, Homo sapien
gaggcggagggacggtggctaacac

SEQ ID NO: 1833731 - DNA, 25 bp, Homo sapien
tgtaaaatacgccatggaggcggag

SEQ ID NO: 1833732 - DNA, 25 bp, Homo sapien
tgtgtggctgtaaaatacgccatgg

SEQ ID NO: 1833733 - DNA, 25 bp, Homo sapien
cgtggtgcggtaggaaaggctggac

SEQ ID NO: 1833734 - DNA, 25 bp, Homo sapien
gagcgggtgcaggtaggtggagccc

SEQ ID NO: 1833735 - DNA, 25 bp, Homo sapien
tggagcccgtggtgcggtaggaaag

SEQ ID NO: 1833736 - DNA, 25 bp, Homo sapien
ggaaaggctggacggctgcggctct

SEQ ID NO: 1833737 - DNA, 25 bp, Homo sapien
atcttcgggaggtggctgcccctgt

SEQ ID NO: 1833738 - DNA, 25 bp, Homo sapien
gcaaactctcgaggcgcaaactctc

SEQ ID NO: 1833739 - DNA, 25 bp, Homo sapien
gcaaactctcgaggcgcaaacttgg

SEQ ID NO: 1833740 - DNA, 25 bp, Homo sapien
gggaatgcgaaccggcgcaaactct

SEQ ID NO: 1833741 - DNA, 25 bp, Homo sapien
gcagccacgggcgccgtaggagggc

SEQ ID NO: 1833742 - DNA, 25 bp, Homo sapien
ctgcagccacgggcgccgtaggagg

SEQ ID NO: 1833743 - DNA, 25 bp, Homo sapien
tgcagccacgggcgccgtaggaggg

SEQ ID NO: 1833744 - DNA, 25 bp, Homo sapien
agccacgggcgccgtaggagggccg

SEQ ID NO: 1833745 - DNA, 25 bp, Homo sapien
gcatagtttcctacaccctgatctg

SEQ ID NO: 1833746 - DNA, 25 bp, Homo sapien
gactgctagcttcgggtcacttccg

SEQ ID NO: 1833747 - DNA, 25 bp, Homo sapien
gacatgttcggtgtcacacaagcaa

SEQ ID NO: 1833748 - DNA, 25 bp, Homo sapien
tgcgtttccctttcaagccgtagag

SEQ ID NO: 1833749 - DNA, 25 bp, Homo sapien
gatccttttcaggaatcgctagctg

SEQ ID NO: 1833750 - DNA, 25 bp, Homo sapien
tcatttgcatgccacgggtcctcaa

SEQ ID NO: 1833751 - DNA, 25 bp, Homo sapien
tcgctagctgatgaaaaagggtttc

SEQ ID NO: 1833752 - DNA, 25 bp, Homo sapien
ccaagttattgctaggttctgagaa

SEQ ID NO: 1833753 - DNA, 25 bp, Homo sapien
ggcttttacataatccagtcagata

SEQ ID NO: 1833754 - DNA, 25 bp, Homo sapien
cagtcagataactggaagtccaagg

SEQ ID NO: 1833755 - DNA, 25 bp, Homo sapien
cagtgcaggccctcaatgttttgag

SEQ ID NO: 1833756 - DNA, 25 bp, Homo sapien
tttacccttcagacgcctctcagtg

SEQ ID NO: 1833757 - DNA, 25 bp, Homo sapien
ccttctcacaaggtctcttaatgtc

SEQ ID NO: 1833758 - DNA, 25 bp, Homo sapien
gtggtgaggccaacctgagtacagt

SEQ ID NO: 1833759 - DNA, 25 bp, Homo sapien
ggtgctcagttcaggtctgtcagtg

SEQ ID NO: 1833760 - DNA, 25 bp, Homo sapien
aagtaaaagtcatggtccctgcttt

SEQ ID NO: 1833761 - DNA, 25 bp, Homo sapien
taaagactaaagcaatcgtggaaat

SEQ ID NO: 1833762 - DNA, 25 bp, Homo sapien
tgatgttatgagaaccgcaaggtga

SEQ ID NO: 1833763 - DNA, 25 bp, Homo sapien
cattctttgtgagccagcaagttta

SEQ ID NO: 1833764 - DNA, 25 bp, Homo sapien
ggtggtgagagtaaagaagaattcc

SEQ ID NO: 1833765 - DNA, 25 bp, Homo sapien
ggctaccatcctgtaaaaactagaa

SEQ ID NO: 1833766 - DNA, 25 bp, Homo sapien
tcacgggtacctggctaccatcctg

SEQ ID NO: 1833767 - DNA, 25 bp, Homo sapien
gctaccatcctgtaaaaactagaag

SEQ ID NO: 1833768 - DNA, 25 bp, Homo sapien
actctccccataaatctcatctaag

SEQ ID NO: 1833769 - DNA, 25 bp, Homo sapien
tcccaaattgcctatgccactctcc

SEQ ID NO: 1833770 - DNA, 25 bp, Homo sapien
aaatctcatctaagctctgggccaa

SEQ ID NO: 1833771 - DNA, 25 bp, Homo sapien
ccccataaatctcatctaagctctg

SEQ ID NO: 1833772 - DNA, 25 bp, Homo sapien
agtgagggaaactgctcctggtgag

SEQ ID NO: 1833773 - DNA, 25 bp, Homo sapien
gcagccaaatcacctcagaagtagc

SEQ ID NO: 1833774 - DNA, 25 bp, Homo sapien
acctcagaagtagcccagccaatat

SEQ ID NO: 1833775 - DNA, 25 bp, Homo sapien
caaatcacctcagaagtagcccagc

SEQ ID NO: 1833776 - DNA, 25 bp, Homo sapien
gcaacacacttgatacatttataga

SEQ ID NO: 1833777 - DNA, 25 bp, Homo sapien
caatagcaacacacttgatacattt

SEQ ID NO: 1833778 - DNA, 25 bp, Homo sapien
ttttcaatagcaacacacttgatac

SEQ ID NO: 1833779 - DNA, 25 bp, Homo sapien
tcttttcaatagcaacacacttgat

SEQ ID NO: 1833780 - DNA, 25 bp, Homo sapien
ttcaatatcctctctgcaacccaag

SEQ ID NO: 1833781 - DNA, 25 bp, Homo sapien
tattttcccatggataatagcagca

SEQ ID NO: 1833782 - DNA, 25 bp, Homo sapien
gcagtttgttaggaagccactttgc

SEQ ID NO: 1833783 - DNA, 25 bp, Homo sapien
gcaacccaagctttcaataatatct

SEQ ID NO: 1833784 - DNA, 25 bp, Homo sapien
tctttgttcaagaggtcagctgctg

SEQ ID NO: 1833785 - DNA, 25 bp, Homo sapien
gctgctgaggcgtgtctgcatccca

SEQ ID NO: 1833786 - DNA, 25 bp, Homo sapien
gcatctgtctgcacaacacggtctg

SEQ ID NO: 1833787 - DNA, 25 bp, Homo sapien
agtgcgtgtcctgtgccaatctgca

SEQ ID NO: 1833788 - DNA, 25 bp, Homo sapien
gatgctatccgattgcctcctttgg

SEQ ID NO: 1833789 - DNA, 25 bp, Homo sapien
tctgctcaccaagatagatgctatc

SEQ ID NO: 1833790 - DNA, 25 bp, Homo sapien
gccttgctggatggaatcaatatac

SEQ ID NO: 1833791 - DNA, 25 bp, Homo sapien
catcgtgggcacatctagtcaagac

SEQ ID NO: 1833792 - DNA, 25 bp, Homo sapien
gaaagtctaatctggattccgcggg

SEQ ID NO: 1833793 - DNA, 25 bp, Homo sapien
tcaacagatactcgtacctggctgg

SEQ ID NO: 1833794 - DNA, 25 bp, Homo sapien
ggcactcgggaaggtgtctctagaa

SEQ ID NO: 1833795 - DNA, 25 bp, Homo sapien
tgcaggacgcgagatgcacaaggca

SEQ ID NO: 1833796 - DNA, 25 bp, Homo sapien
atggtgaaatcagtagtctcgctcc

SEQ ID NO: 1833797 - DNA, 25 bp, Homo sapien
ctttgcgtctgcactgtgatcgtga

SEQ ID NO: 1833798 - DNA, 25 bp, Homo sapien
ctccctagcataaatttcccaaaca

SEQ ID NO: 1833799 - DNA, 25 bp, Homo sapien
gctgtcagacatccaagtttacatc

SEQ ID NO: 1833800 - DNA, 25 bp, Homo sapien
tttaatcccaaacatcttcctgaaa

SEQ ID NO: 1833801 - DNA, 25 bp, Homo sapien
tgtgatcgtgacaaatcttccctcc

SEQ ID NO: 1833802 - DNA, 25 bp, Homo sapien
tcctgctgcaactcaagttccacag

SEQ ID NO: 1833803 - DNA, 25 bp, Homo sapien
tccaagcgtttggtgttaccttctc

SEQ ID NO: 1833804 - DNA, 25 bp, Homo sapien
gcctctaggacggactgttgctatc

SEQ ID NO: 1833805 - DNA, 25 bp, Homo sapien
tctcgctccatctctaatagactaa

SEQ ID NO: 1833806 - DNA, 25 bp, Homo sapien
ctcccagcctcttagctgaaagcac

SEQ ID NO: 1833807 - DNA, 25 bp, Homo sapien
gagaaggtaacaccaaacgcttgga

SEQ ID NO: 1833808 - DNA, 25 bp, Homo sapien
tttcaggaagatgtttgggattaaa

SEQ ID NO: 1833809 - DNA, 25 bp, Homo sapien
ggagggaagatttgtcacgatcaca

SEQ ID NO: 1833810 - DNA, 25 bp, Homo sapien
ctgtggaacttgagttgcagcagga

SEQ ID NO: 1833811 - DNA, 25 bp, Homo sapien
gtgctttcagctaagaggctgggag

SEQ ID NO: 1833812 - DNA, 25 bp, Homo sapien
tgtttgggaaatttatgctagggag

SEQ ID NO: 1833813 - DNA, 25 bp, Homo sapien
gatagcaacagtccgtcctagaggc

SEQ ID NO: 1833814 - DNA, 25 bp, Homo sapien
tcacgatcacagtgcagacgcaaag

SEQ ID NO: 1833815 - DNA, 25 bp, Homo sapien
ggagcgagactactgatttcaccat

SEQ ID NO: 1833816 - DNA, 25 bp, Homo sapien
ttagtctattagagatggagcgaga

SEQ ID NO: 1833817 - DNA, 25 bp, Homo sapien
gatgtaaacttggatgtctgacagc

SEQ ID NO: 1833818 - DNA, 25 bp, Homo sapien
cctggttgagaagccccatattctg

SEQ ID NO: 1833819 - DNA, 25 bp, Homo sapien
cagtgaggtgacatgcttcagattc

SEQ ID NO: 1833820 - DNA, 25 bp, Homo sapien
gatgatatcatcagaaatccaagac

SEQ ID NO: 1833821 - DNA, 25 bp, Homo sapien
tcgacatgtcatttgccttagcagg

SEQ ID NO: 1833822 - DNA, 25 bp, Homo sapien
gaagcatagcctcctcgaatctgct

SEQ ID NO: 1833823 - DNA, 25 bp, Homo sapien
tctgctctttcaatcttcccaacaa

SEQ ID NO: 1833824 - DNA, 25 bp, Homo sapien
gcttcctgattggtgcagaggcatc

SEQ ID NO: 1833825 - DNA, 25 bp, Homo sapien
gcagccagtcctgtggtgtggttct

SEQ ID NO: 1833826 - DNA, 25 bp, Homo sapien
tggcgaaggctgaatgaaaatacag

SEQ ID NO: 1833827 - DNA, 25 bp, Homo sapien
catgtcgagtcttcgagagcaaatc

SEQ ID NO: 1833828 - DNA, 25 bp, Homo sapien
ctagggcaatggctactgtggcgaa

SEQ ID NO: 1833829 - DNA, 25 bp, Homo sapien
aaaatgagtttgactgagaataaag

SEQ ID NO: 1833830 - DNA, 25 bp, Homo sapien
tttggctggtcgcaaaagagtcagc

SEQ ID NO: 1833831 - DNA, 25 bp, Homo sapien
tatttggctggtcgcaaaagagtca

SEQ ID NO: 1833832 - DNA, 25 bp, Homo sapien
ctgatatttggctggtcgcaaaaga

SEQ ID NO: 1833833 - DNA, 25 bp, Homo sapien
gctggtcgcaaaagagtcagctcat

SEQ ID NO: 1833834 - DNA, 25 bp, Homo sapien
taactggacaatccctctgtccctg

SEQ ID NO: 1833835 - DNA, 25 bp, Homo sapien
aagataactggacaatccctctgtc

SEQ ID NO: 1833836 - DNA, 25 bp, Homo sapien
agaggcggggtgatagccccaggca

SEQ ID NO: 1833837 - DNA, 25 bp, Homo sapien
ggggtgatagccccaggcagccaaa

SEQ ID NO: 1833838 - DNA, 25 bp, Homo sapien
cttcatccacatgtctaaaagccag

SEQ ID NO: 1833839 - DNA, 25 bp, Homo sapien
tactctggggcttttgcttgtgttg

SEQ ID NO: 1833840 - DNA, 25 bp, Homo sapien
cacatgtctaaaagccagctctaat

SEQ ID NO: 1833841 - DNA, 25 bp, Homo sapien
atccacatgtctaaaagccagctct

SEQ ID NO: 1833842 - DNA, 25 bp, Homo sapien
gttcctcaagaactatgccacacat

SEQ ID NO: 1833843 - DNA, 25 bp, Homo sapien
accctcacggagctgtgcatccgtt

SEQ ID NO: 1833844 - DNA, 25 bp, Homo sapien
ctgtatcacaatggccaatcaccct

SEQ ID NO: 1833845 - DNA, 25 bp, Homo sapien
gtgcatccgttcctcaagaactatg

SEQ ID NO: 1833846 - DNA, 25 bp, Homo sapien
tgtccagaagacttcaggatgtctc

SEQ ID NO: 1833847 - DNA, 25 bp, Homo sapien
gtccagaagacttcaggatgtctct

SEQ ID NO: 1833848 - DNA, 25 bp, Homo sapien
cttcccccattggtccccatagaca

SEQ ID NO: 1833849 - DNA, 25 bp, Homo sapien
cccattggtccccatagacacttct

SEQ ID NO: 1833850 - DNA, 25 bp, Homo sapien
ccccattggtccccatagacacttc

SEQ ID NO: 1833851 - DNA, 25 bp, Homo sapien
tcccccattggtccccatagacact

SEQ ID NO: 1833852 - DNA, 25 bp, Homo sapien
taaatttggcttgtggtcctgcttc

SEQ ID NO: 1833853 - DNA, 25 bp, Homo sapien
gaaaggctgcagacagttccgagct

SEQ ID NO: 1833854 - DNA, 25 bp, Homo sapien
cctgcttctgctgtaatgtgagctg

SEQ ID NO: 1833855 - DNA, 25 bp, Homo sapien
tcagtgcaggtaaagggccgtatct

SEQ ID NO: 1833856 - DNA, 25 bp, Homo sapien
gacatgaagtgaccacacgctgttg

SEQ ID NO: 1833857 - DNA, 25 bp, Homo sapien
gctgataggcttgctccacataggg

SEQ ID NO: 1833858 - DNA, 25 bp, Homo sapien
gaatcctggcgacaagggactagta

SEQ ID NO: 1833859 - DNA, 25 bp, Homo sapien
ggatggaccttgacaacattagggt

SEQ ID NO: 1833860 - DNA, 25 bp, Homo sapien
tccaggctaataatgaaggtaccgg

SEQ ID NO: 1833861 - DNA, 25 bp, Homo sapien
tataaagtgctgatgcctgggcgtg

SEQ ID NO: 1833862 - DNA, 25 bp, Homo sapien
gaatgttaactggtgcccgcaatcg

SEQ ID NO: 1833863 - DNA, 25 bp, Homo sapien
cgacgtcatcgtgggaagcgtgtac

SEQ ID NO: 1833864 - DNA, 25 bp, Homo sapien
gagaagcccacgatttaaagggctc

SEQ ID NO: 1833865 - DNA, 25 bp, Homo sapien
tgccagacatcgtccgcatggtcca

SEQ ID NO: 1833866 - DNA, 25 bp, Homo sapien
cttgcctttggcacgtatctggaaa

SEQ ID NO: 1833867 - DNA, 25 bp, Homo sapien
gtccgcatggtccaacttgcctttg

SEQ ID NO: 1833868 - DNA, 25 bp, Homo sapien
ggaaaaatctcctgcgctgttcgtt

SEQ ID NO: 1833869 - DNA, 25 bp, Homo sapien
ttccaaaagcgaaacttgggctcta

SEQ ID NO: 1833870 - DNA, 25 bp, Homo sapien
gcgaaacttgggctctagactagat

SEQ ID NO: 1833871 - DNA, 25 bp, Homo sapien
actagatctacactgagtctgcggg

SEQ ID NO: 1833872 - DNA, 25 bp, Homo sapien
gccaggcgtggtcttccgtgggaga

SEQ ID NO: 1833873 - DNA, 25 bp, Homo sapien
tatgcaaatagggtccctgtcgccc

SEQ ID NO: 1833874 - DNA, 25 bp, Homo sapien
gccaatggaaaccagcaagtcgcgg

SEQ ID NO: 1833875 - DNA, 25 bp, Homo sapien
ccaatgggctgtgggaacggtcctc

SEQ ID NO: 1833876 - DNA, 25 bp, Homo sapien
actgaagtaaggaggtagcggccca

SEQ ID NO: 1833877 - DNA, 25 bp, Homo sapien
gcctcgcaatccgttgcatcggccg

SEQ ID NO: 1833878 - DNA, 25 bp, Homo sapien
ggcccgatatccgtgcggccgggac

SEQ ID NO: 1833879 - DNA, 25 bp, Homo sapien
cccgacgcctccatccccgcttggg

SEQ ID NO: 1833880 - DNA, 25 bp, Homo sapien
tctccagagccccgattatttttgg

SEQ ID NO: 1833881 - DNA, 25 bp, Homo sapien
gagggggcggctgtcgtcgccgccg

SEQ ID NO: 1833882 - DNA, 25 bp, Homo sapien
agggggcggctgtcgtcgccgccgc

SEQ ID NO: 1833883 - DNA, 25 bp, Homo sapien
gggagggggcggctgtcgtcgccgc

SEQ ID NO: 1833884 - DNA, 25 bp, Homo sapien
gtggggagggggcggctgtcgtcgc

SEQ ID NO: 1833885 - DNA, 25 bp, Homo sapien
caaagcggcgccgtagccgccggcc

SEQ ID NO: 1833886 - DNA, 25 bp, Homo sapien
atccagatcctcaccacgaacactt

SEQ ID NO: 1833887 - DNA, 25 bp, Homo sapien
ctcctctacaccacgccgcacggac

SEQ ID NO: 1833888 - DNA, 25 bp, Homo sapien
tgttcctcctccctccaaagcggcg

SEQ ID NO: 1833889 - DNA, 25 bp, Homo sapien
gcttcctctttctcgggcgtaggaa

SEQ ID NO: 1833890 - DNA, 25 bp, Homo sapien
cttcccctccaactcgaagcttcct

SEQ ID NO: 1833891 - DNA, 25 bp, Homo sapien
cctccaactcgaagcttcctctttc

SEQ ID NO: 1833892 - DNA, 25 bp, Homo sapien
agcttcctctttctcgggcgtagga

SEQ ID NO: 1833893 - DNA, 25 bp, Homo sapien
cattttaggatctgtaactcccggc

SEQ ID NO: 1833894 - DNA, 25 bp, Homo sapien
tccctgcggcgtgctcggagcgcag

SEQ ID NO: 1833895 - DNA, 25 bp, Homo sapien
agtcggccttggaggctcgttggcg

SEQ ID NO: 1833896 - DNA, 25 bp, Homo sapien
gggctgcgcttgacacattttagga

SEQ ID NO: 1833897 - DNA, 25 bp, Homo sapien
tgacgtttcgcacacgtgcgcgcag

SEQ ID NO: 1833898 - DNA, 25 bp, Homo sapien
tttcgcacacgtgcgcgcaggacgc

SEQ ID NO: 1833899 - DNA, 25 bp, Homo sapien
acacgtgcgcgcaggacgcgcctgt

SEQ ID NO: 1833900 - DNA, 25 bp, Homo sapien
ccgccggtgacgtttcgcacacgtg

SEQ ID NO: 1833901 - DNA, 25 bp, Homo sapien
tgggacggtcccggcgccctcgcac

SEQ ID NO: 1833902 - DNA, 25 bp, Homo sapien
ctgggacggtcccggcgccctcgca

SEQ ID NO: 1833903 - DNA, 25 bp, Homo sapien
cgccggctccctggcctgggacggt

SEQ ID NO: 1833904 - DNA, 25 bp, Homo sapien
tcctgctcgccggctccctggcctg

SEQ ID NO: 1833905 - DNA, 25 bp, Homo sapien
gccgcgggggcaccggattctgttg

SEQ ID NO: 1833906 - DNA, 25 bp, Homo sapien
gcaggttagtgaccgggacggctcg

SEQ ID NO: 1833907 - DNA, 25 bp, Homo sapien
agcagcaggttagtgaccgggacgg

SEQ ID NO: 1833908 - DNA, 25 bp, Homo sapien
cagcaggttagtgaccgggacggct

SEQ ID NO: 1833909 - DNA, 25 bp, Homo sapien
gaagcggtgagggtaggcggttgag

SEQ ID NO: 1833910 - DNA, 25 bp, Homo sapien
gcggtgagggtaggcggttgagcgg

SEQ ID NO: 1833911 - DNA, 25 bp, Homo sapien
aagcggtgagggtaggcggttgagc

SEQ ID NO: 1833912 - DNA, 25 bp, Homo sapien
ctgaagcggtgagggtaggcggttg

SEQ ID NO: 1833913 - DNA, 25 bp, Homo sapien
ctcgagggaaatgagtaagcaagaa

SEQ ID NO: 1833914 - DNA, 25 bp, Homo sapien
tcgagggaaatgagtaagcaagaaa

SEQ ID NO: 1833915 - DNA, 25 bp, Homo sapien
tagggggcggatggatgggcgatag

SEQ ID NO: 1833916 - DNA, 25 bp, Homo sapien
tggatgggcgatagaaaaccggagg

SEQ ID NO: 1833917 - DNA, 25 bp, Homo sapien
gggcttctcgccaatggccgagttg

SEQ ID NO: 1833918 - DNA, 25 bp, Homo sapien
tcgccaatggccgagttgagctctg

SEQ ID NO: 1833919 - DNA, 25 bp, Homo sapien
tagaaccgaaccagactcagttaga

SEQ ID NO: 1833920 - DNA, 25 bp, Homo sapien
tgaggcttggcctccacggggctag

SEQ ID NO: 1833921 - DNA, 25 bp, Homo sapien
gggctagaaccgaaccagactcagt

SEQ ID NO: 1833922 - DNA, 25 bp, Homo sapien
ccgaaccagactcagttagatccat

SEQ ID NO: 1833923 - DNA, 25 bp, Homo sapien
ttttttgcctgagttccactccgtc

SEQ ID NO: 1833924 - DNA, 25 bp, Homo sapien
gcctgagttccactccgtccatgat

SEQ ID NO: 1833925 - DNA, 25 bp, Homo sapien
gagttccactccgtccatgattcca

SEQ ID NO: 1833926 - DNA, 25 bp, Homo sapien
ttgcctgagttccactccgtccatg

SEQ ID NO: 1833927 - DNA, 25 bp, Homo sapien
gcttagcggcttttgttagacctga

SEQ ID NO: 1833928 - DNA, 25 bp, Homo sapien
gggtgcagtttatgcttagcggctt

SEQ ID NO: 1833929 - DNA, 25 bp, Homo sapien
tgttagacctgaactctcaatcttc

SEQ ID NO: 1833930 - DNA, 25 bp, Homo sapien
tgccaacttttgggtgcagtttatg

SEQ ID NO: 1833931 - DNA, 25 bp, Homo sapien
gagcattaagtaccaactgatgaga

SEQ ID NO: 1833932 - DNA, 25 bp, Homo sapien
ctctgagaatgatgggcagtgaact

SEQ ID NO: 1833933 - DNA, 25 bp, Homo sapien
tgaggcccacactatctcctgtgtg

SEQ ID NO: 1833934 - DNA, 25 bp, Homo sapien
tcatgtgtttataacctgcaccctg

SEQ ID NO: 1833935 - DNA, 25 bp, Homo sapien
catcaagggatggtgaaatcttgcc

SEQ ID NO: 1833936 - DNA, 25 bp, Homo sapien
attcctctgcactcggctgctgcga

SEQ ID NO: 1833937 - DNA, 25 bp, Homo sapien
ggtgtgtttgctcgtagcttctccc

SEQ ID NO: 1833938 - DNA, 25 bp, Homo sapien
tgtggtgctgcaggcaccgcagatt

SEQ ID NO: 1833939 - DNA, 25 bp, Homo sapien
cacgggactcagcaacagaaattct

SEQ ID NO: 1833940 - DNA, 25 bp, Homo sapien
ttgggaggcctcctaagtcaccaca

SEQ ID NO: 1833941 - DNA, 25 bp, Homo sapien
ggtgtatggcttaacaagtccccaa

SEQ ID NO: 1833942 - DNA, 25 bp, Homo sapien
gaaagttttcaggttgtactccaga

SEQ ID NO: 1833943 - DNA, 25 bp, Homo sapien
tagatcacagagtagatttaacata

SEQ ID NO: 1833944 - DNA, 25 bp, Homo sapien
agatcacagagtagatttaacatag

SEQ ID NO: 1833945 - DNA, 25 bp, Homo sapien
ccacacccggccattacagtgcttt

SEQ ID NO: 1833946 - DNA, 25 bp, Homo sapien
tgtggccattgaattcttggggacc

SEQ ID NO: 1833947 - DNA, 25 bp, Homo sapien
gttttgctgccgaagtgactgccca

SEQ ID NO: 1833948 - DNA, 25 bp, Homo sapien
gggaggttttgctgccgaagtgact

SEQ ID NO: 1833949 - DNA, 25 bp, Homo sapien
gacctcagggaggttttgctgccga

SEQ ID NO: 1833950 - DNA, 25 bp, Homo sapien
aaatgggtccattgcagaatcttgc

SEQ ID NO: 1833951 - DNA, 25 bp, Homo sapien
caactgtctctggatgccactatca

SEQ ID NO: 1833952 - DNA, 25 bp, Homo sapien
cccggtgggaggaatgcaactgtct

SEQ ID NO: 1833953 - DNA, 25 bp, Homo sapien
tcattacatctctgtggcctcaaat

SEQ ID NO: 1833954 - DNA, 25 bp, Homo sapien
tctaccagtgggaatggaagccagt

SEQ ID NO: 1833955 - DNA, 25 bp, Homo sapien
tctctctaggagcagactgaacata

SEQ ID NO: 1833956 - DNA, 25 bp, Homo sapien
aacatattgcaacctgtgagtcgga

SEQ ID NO: 1833957 - DNA, 25 bp, Homo sapien
tgtcccgtgagctgagatttgcctt

SEQ ID NO: 1833958 - DNA, 25 bp, Homo sapien
gggggtctgtgaacatggaggccat

SEQ ID NO: 1833959 - DNA, 25 bp, Homo sapien
gggaggggggtctgtgaacatggag

SEQ ID NO: 1833960 - DNA, 25 bp, Homo sapien
gaggggggtctgtgaacatggaggc

SEQ ID NO: 1833961 - DNA, 25 bp, Homo sapien
ggggggtctgtgaacatggaggcca

SEQ ID NO: 1833962 - DNA, 25 bp, Homo sapien
ggagcaccatcgttaaaaaagtcag

SEQ ID NO: 1833963 - DNA, 25 bp, Homo sapien
tagacccaccgaaagctctaaatgt

SEQ ID NO: 1833964 - DNA, 25 bp, Homo sapien
tctggtgaacttagcacaaagaagc

SEQ ID NO: 1833965 - DNA, 25 bp, Homo sapien
taagaatctgtggacttaaagacac

SEQ ID NO: 1833966 - DNA, 25 bp, Homo sapien
tttgtctcttcatggaattgttctg

SEQ ID NO: 1833967 - DNA, 25 bp, Homo sapien
catggaattgttctgtgggaatagt

SEQ ID NO: 1833968 - DNA, 25 bp, Homo sapien
tgcatatagtgattctgcattccaa

SEQ ID NO: 1833969 - DNA, 25 bp, Homo sapien
gcattccaacatctaacttccctgt

SEQ ID NO: 1833970 - DNA, 25 bp, Homo sapien
catggtgagttggtctttttgtgta

SEQ ID NO: 1833971 - DNA, 25 bp, Homo sapien
tggagagtcgagagcgggtcatggt

SEQ ID NO: 1833972 - DNA, 25 bp, Homo sapien
gcatttggaccaataacaccctgag

SEQ ID NO: 1833973 - DNA, 25 bp, Homo sapien
gagtgtcaagttcctcctcagtcgg

SEQ ID NO: 1833974 - DNA, 25 bp, Homo sapien
cttcacaaatatgccccttccttgc

SEQ ID NO: 1833975 - DNA, 25 bp, Homo sapien
gcttcacaaatatgccccttccttg

SEQ ID NO: 1833976 - DNA, 25 bp, Homo sapien
ttcacaaatatgccccttccttgca

SEQ ID NO: 1833977 - DNA, 25 bp, Homo sapien
tgtccacagcagaacttgacgattc

SEQ ID NO: 1833978 - DNA, 25 bp, Homo sapien
cttttggcccatcagatattgcctt

SEQ ID NO: 1833979 - DNA, 25 bp, Homo sapien
cagatattgccttgtccacagcaga

SEQ ID NO: 1833980 - DNA, 25 bp, Homo sapien
gacgattcatcatagaagcctatgg

SEQ ID NO: 1833981 - DNA, 25 bp, Homo sapien
gcccacaggtgaggtttccaggctt

SEQ ID NO: 1833982 - DNA, 25 bp, Homo sapien
gaagagagtatttctcctccgcacc

SEQ ID NO: 1833983 - DNA, 25 bp, Homo sapien
gaggatctgacgtaggtatggcttc

SEQ ID NO: 1833984 - DNA, 25 bp, Homo sapien
ttccaggcttcgaaccagcaggagg

SEQ ID NO: 1833985 - DNA, 25 bp, Homo sapien
gaaagagaagactcatatcttgtct

SEQ ID NO: 1833986 - DNA, 25 bp, Homo sapien
ttcatggttgtgtcgttttgccggg

SEQ ID NO: 1833987 - DNA, 25 bp, Homo sapien
agaagactcatatcttgtcttcccc

SEQ ID NO: 1833988 - DNA, 25 bp, Homo sapien
tttcatggttgtgtcgttttgccgg

SEQ ID NO: 1833989 - DNA, 25 bp, Homo sapien
ccattgtttgcttgcctgtatactt

SEQ ID NO: 1833990 - DNA, 25 bp, Homo sapien
tacttgttgatagcagggaccacca

SEQ ID NO: 1833991 - DNA, 25 bp, Homo sapien
ctgtatacttgttgatagcagggac

SEQ ID NO: 1833992 - DNA, 25 bp, Homo sapien
cattgtttgcttgcctgtatacttg

SEQ ID NO: 1833993 - DNA, 25 bp, Homo sapien
tttaccccagacacttgagccttgg

SEQ ID NO: 1833994 - DNA, 25 bp, Homo sapien
tgaggccaggattcagtactcacct

SEQ ID NO: 1833995 - DNA, 25 bp, Homo sapien
agactatagatgttccccactggct

SEQ ID NO: 1833996 - DNA, 25 bp, Homo sapien
gaagagtcgtcctaatgttgatcag

SEQ ID NO: 1833997 - DNA, 25 bp, Homo sapien
tgaagaagtagacctcccctggagg

SEQ ID NO: 1833998 - DNA, 25 bp, Homo sapien
gaaaatagcagtgcgctttcactaa

SEQ ID NO: 1833999 - DNA, 25 bp, Homo sapien
ggctaacaagcaatgtgacctccta

SEQ ID NO: 1834000 - DNA, 25 bp, Homo sapien
tcaaaagaagtgaccgagctcagtc

SEQ ID NO: 1834001 - DNA, 25 bp, Homo sapien
tccttaatagcatttcaagccgtgc

SEQ ID NO: 1834002 - DNA, 25 bp, Homo sapien
gaaaatgtgcaatcaggtgtctctc

SEQ ID NO: 1834003 - DNA, 25 bp, Homo sapien
aagccgtgccttctccgcagaatgc

SEQ ID NO: 1834004 - DNA, 25 bp, Homo sapien
tctaaacgcacagttgcaggctccc

SEQ ID NO: 1834005 - DNA, 25 bp, Homo sapien
accaggtcagatgatgtaacagccc

SEQ ID NO: 1834006 - DNA, 25 bp, Homo sapien
tgggaatatggcgtagtatctccgg

SEQ ID NO: 1834007 - DNA, 25 bp, Homo sapien
atctcccactgggaatatggcgtag

SEQ ID NO: 1834008 - DNA, 25 bp, Homo sapien
gaatatggcgtagtatctccggtcc

SEQ ID NO: 1834009 - DNA, 25 bp, Homo sapien
cccactgggaatatggcgtagtatc

SEQ ID NO: 1834010 - DNA, 25 bp, Homo sapien
acacactggacttggtacaaaatgt

SEQ ID NO: 1834011 - DNA, 25 bp, Homo sapien
tgtataaagggcaacacatgagctg

SEQ ID NO: 1834012 - DNA, 25 bp, Homo sapien
caaattatgactgcgtgagccttag

SEQ ID NO: 1834013 - DNA, 25 bp, Homo sapien
ttagtatccggcacacaaagtgggt

SEQ ID NO: 1834014 - DNA, 25 bp, Homo sapien
tcctggtaccattgagttgctgcta

SEQ ID NO: 1834015 - DNA, 25 bp, Homo sapien
atttgggactcagaacactcagcaa

SEQ ID NO: 1834016 - DNA, 25 bp, Homo sapien
tgaccacttccggtgtgctctgcac

SEQ ID NO: 1834017 - DNA, 25 bp, Homo sapien
catcgtttgccttagacggtatttg

SEQ ID NO: 1834018 - DNA, 25 bp, Homo sapien
atttggtgaccacttccggtgtgct

SEQ ID NO: 1834019 - DNA, 25 bp, Homo sapien
cggacactgagtaattgttacactg

SEQ ID NO: 1834020 - DNA, 25 bp, Homo sapien
tgactcctcgtaagggttataaagc

SEQ ID NO: 1834021 - DNA, 25 bp, Homo sapien
tgtgcagaaaccactcggacactga

SEQ ID NO: 1834022 - DNA, 25 bp, Homo sapien
ctgagaaagtgacaaatttgactcc

SEQ ID NO: 1834023 - DNA, 25 bp, Homo sapien
ggcttatagataggttccaacaggg

SEQ ID NO: 1834024 - DNA, 25 bp, Homo sapien
caggtggcatcaagaattgcccttg

SEQ ID NO: 1834025 - DNA, 25 bp, Homo sapien
atggctggcttatagataggttcca

SEQ ID NO: 1834026 - DNA, 25 bp, Homo sapien
gaattgcccttgataaaaactgctt

SEQ ID NO: 1834027 - DNA, 25 bp, Homo sapien
tcccctgcaagcctaaatgccctct

SEQ ID NO: 1834028 - DNA, 25 bp, Homo sapien
tgctcccctgcaagcctaaatgccc

SEQ ID NO: 1834029 - DNA, 25 bp, Homo sapien
tgcaagcctaaatgccctcttgccc

SEQ ID NO: 1834030 - DNA, 25 bp, Homo sapien
ccctgcaagcctaaatgccctcttg

SEQ ID NO: 1834031 - DNA, 25 bp, Homo sapien
cacagcctcctttccttcccgtcat

SEQ ID NO: 1834032 - DNA, 25 bp, Homo sapien
agaacacagcctcctttccttcccg

SEQ ID NO: 1834033 - DNA, 25 bp, Homo sapien
tcagaacacagcctcctttccttcc

SEQ ID NO: 1834034 - DNA, 25 bp, Homo sapien
tctcagaacacagcctcctttcctt

SEQ ID NO: 1834035 - DNA, 25 bp, Homo sapien
taaacgtggcgggacgtatgtgtca

SEQ ID NO: 1834036 - DNA, 25 bp, Homo sapien
tggcgctctccatctaaagtctgtg

SEQ ID NO: 1834037 - DNA, 25 bp, Homo sapien
taatttgatctcttcgggccaccgt

SEQ ID NO: 1834038 - DNA, 25 bp, Homo sapien
gctgagcatgcgcaaataaacgtgg

SEQ ID NO: 1834039 - DNA, 25 bp, Homo sapien
gtggccacagctccttttatggcca

SEQ ID NO: 1834040 - DNA, 25 bp, Homo sapien
ccttttatggccaagccttgtttct

SEQ ID NO: 1834041 - DNA, 25 bp, Homo sapien
cagctccttttatggccaagccttg

SEQ ID NO: 1834042 - DNA, 25 bp, Homo sapien
gccacagctccttttatggccaagc

SEQ ID NO: 1834043 - DNA, 25 bp, Homo sapien
tactcgcactatgcagacgtgttgc

SEQ ID NO: 1834044 - DNA, 25 bp, Homo sapien
agacactggatcaccgtcacggcag

SEQ ID NO: 1834045 - DNA, 25 bp, Homo sapien
caacatttattactaaagccagaca

SEQ ID NO: 1834046 - DNA, 25 bp, Homo sapien
gacgtgttgcggtgctgaatacaac

SEQ ID NO: 1834047 - DNA, 25 bp, Homo sapien
agtaagaagttacaagtagtatgga

SEQ ID NO: 1834048 - DNA, 25 bp, Homo sapien
agaagttacaagtagtatggagcat

SEQ ID NO: 1834049 - DNA, 25 bp, Homo sapien
gtaatcagtaagaagttacaagtag

SEQ ID NO: 1834050 - DNA, 25 bp, Homo sapien
taagaagttacaagtagtatggagc

SEQ ID NO: 1834051 - DNA, 25 bp, Homo sapien
ctctaggatattgcatcctccttct

SEQ ID NO: 1834052 - DNA, 25 bp, Homo sapien
tctaggatattgcatcctccttctt

SEQ ID NO: 1834053 - DNA, 25 bp, Homo sapien
tgctctaggatattgcatcctcctt

SEQ ID NO: 1834054 - DNA, 25 bp, Homo sapien
gctctaggatattgcatcctccttc

SEQ ID NO: 1834055 - DNA, 25 bp, Homo sapien
tagtctaggtgctataggcccagga

SEQ ID NO: 1834056 - DNA, 25 bp, Homo sapien
tcatagttgttaattccagcctggc

SEQ ID NO: 1834057 - DNA, 25 bp, Homo sapien
ggccctgagataatttcctaaaaca

SEQ ID NO: 1834058 - DNA, 25 bp, Homo sapien
tggattacctatgccagtagtcact

SEQ ID NO: 1834059 - DNA, 25 bp, Homo sapien
aactattacaaaatcgtgcctgctt

SEQ ID NO: 1834060 - DNA, 25 bp, Homo sapien
aaaactaacctttgcatagtatgca

SEQ ID NO: 1834061 - DNA, 25 bp, Homo sapien
gactgtgcttgtcctagaatctggt

SEQ ID NO: 1834062 - DNA, 25 bp, Homo sapien
tccataggagcatatgaaggtggga

SEQ ID NO: 1834063 - DNA, 25 bp, Homo sapien
actgcttgacaccttcattgctctg

SEQ ID NO: 1834064 - DNA, 25 bp, Homo sapien
cagtgtgtatgggaatcccttgagt

SEQ ID NO: 1834065 - DNA, 25 bp, Homo sapien
tccaaaggttagataaatgcagtgt

SEQ ID NO: 1834066 - DNA, 25 bp, Homo sapien
aagtccagtctgcatagtcttgaca

SEQ ID NO: 1834067 - DNA, 25 bp, Homo sapien
taaaattctatttgggtggctgtca

SEQ ID NO: 1834068 - DNA, 25 bp, Homo sapien
tgcactaatttgagcagagtatgcc

SEQ ID NO: 1834069 - DNA, 25 bp, Homo sapien
gatggctggctagcaaaatcaaaca

SEQ ID NO: 1834070 - DNA, 25 bp, Homo sapien
taaggatgccgtacagagatgagct

SEQ ID NO: 1834071 - DNA, 25 bp, Homo sapien
tggaagcattgtacagagaagacct

SEQ ID NO: 1834072 - DNA, 25 bp, Homo sapien
ctgtggaaggcagtataactagctg

SEQ ID NO: 1834073 - DNA, 25 bp, Homo sapien
ctgttagcgtgctggtagttgatga

SEQ ID NO: 1834074 - DNA, 25 bp, Homo sapien
cctctcctctgttagcgtgctggta

SEQ ID NO: 1834075 - DNA, 25 bp, Homo sapien
tgaggatgaagttgatgagatgagc

SEQ ID NO: 1834076 - DNA, 25 bp, Homo sapien
gagcctctcctctgttagcgtgctg

SEQ ID NO: 1834077 - DNA, 25 bp, Homo sapien
cttgtgcagtttgggagagtttact

SEQ ID NO: 1834078 - DNA, 25 bp, Homo sapien
ttgaaggactgataacctttgacat

SEQ ID NO: 1834079 - DNA, 25 bp, Homo sapien
gactgataacctttgacatgaggct

SEQ ID NO: 1834080 - DNA, 25 bp, Homo sapien
ttcttggtattagatcttgtgcagt

SEQ ID NO: 1834081 - DNA, 25 bp, Homo sapien
tcataaatattggtgttaggagaca

SEQ ID NO: 1834082 - DNA, 25 bp, Homo sapien
cataaatattggtgttaggagacat

SEQ ID NO: 1834083 - DNA, 25 bp, Homo sapien
ctcataaatattggtgttaggagac

SEQ ID NO: 1834084 - DNA, 25 bp, Homo sapien
tataatgccaccattatgcagaagc

SEQ ID NO: 1834085 - DNA, 25 bp, Homo sapien
ctataatgccaccattatgcagaag

SEQ ID NO: 1834086 - DNA, 25 bp, Homo sapien
cagtgcccttctctaatattgcttc

SEQ ID NO: 1834087 - DNA, 25 bp, Homo sapien
agttagggtcaagtttaggagcaga

SEQ ID NO: 1834088 - DNA, 25 bp, Homo sapien
gagcgatggcaagaggcaagggaag

SEQ ID NO: 1834089 - DNA, 25 bp, Homo sapien
cggagcgatggcaagaggcaaggga

SEQ ID NO: 1834090 - DNA, 25 bp, Homo sapien
taggagcagaagaaggacgaattaa

SEQ ID NO: 1834091 - DNA, 25 bp, Homo sapien
tattaaggcatagattgctatgatc

SEQ ID NO: 1834092 - DNA, 25 bp, Homo sapien
ttatggttacacttaggtgtcgttc

SEQ ID NO: 1834093 - DNA, 25 bp, Homo sapien
ttagattgtaggctatattaaggca

SEQ ID NO: 1834094 - DNA, 25 bp, Homo sapien
cttaggtgtcgttctctgggccaca

SEQ ID NO: 1834095 - DNA, 25 bp, Homo sapien
atgaaaccatgctctgatgacattt

SEQ ID NO: 1834096 - DNA, 25 bp, Homo sapien
gatgacattaccttttattgaactg

SEQ ID NO: 1834097 - DNA, 25 bp, Homo sapien
tgaaaccatgctctgatgacatttt

SEQ ID NO: 1834098 - DNA, 25 bp, Homo sapien
ttattagtgattatgatgacattac

SEQ ID NO: 1834099 - DNA, 25 bp, Homo sapien
actggaacagcatgtaccatttgcc

SEQ ID NO: 1834100 - DNA, 25 bp, Homo sapien
cactggaacagcatgtaccatttgc

SEQ ID NO: 1834101 - DNA, 25 bp, Homo sapien
tggaacagcatgtaccatttgcctc

SEQ ID NO: 1834102 - DNA, 25 bp, Homo sapien
gaacagcatgtaccatttgcctcat

SEQ ID NO: 1834103 - DNA, 25 bp, Homo sapien
atttcagggctggtcaaaagagaca

SEQ ID NO: 1834104 - DNA, 25 bp, Homo sapien
tcagggctggtcaaaagagacaaat

SEQ ID NO: 1834105 - DNA, 25 bp, Homo sapien
tccatttcagggctggtcaaaagag

SEQ ID NO: 1834106 - DNA, 25 bp, Homo sapien
gggctggtcaaaagagacaaatttc

SEQ ID NO: 1834107 - DNA, 25 bp, Homo sapien
ggtaaccatgattctactcttcttc

SEQ ID NO: 1834108 - DNA, 25 bp, Homo sapien
gactcatccatgtatgcctaattgc

SEQ ID NO: 1834109 - DNA, 25 bp, Homo sapien
tgctctgattaggacttcctcttag

SEQ ID NO: 1834110 - DNA, 25 bp, Homo sapien
caacttatttagctctcacacatga

SEQ ID NO: 1834111 - DNA, 25 bp, Homo sapien
tatgtggagttttataactatcttt

SEQ ID NO: 1834112 - DNA, 25 bp, Homo sapien
ctcagtttgttacttaacctccaag

SEQ ID NO: 1834113 - DNA, 25 bp, Homo sapien
tgtatgtaggtggttggtatagaag

SEQ ID NO: 1834114 - DNA, 25 bp, Homo sapien
tggtatagaagtgttctcagtttgt

SEQ ID NO: 1834115 - DNA, 25 bp, Homo sapien
accctgtttacccagggctgctgat

SEQ ID NO: 1834116 - DNA, 25 bp, Homo sapien
tcttaaagaaatatgcaccttctgg

SEQ ID NO: 1834117 - DNA, 25 bp, Homo sapien
gaaatatgcaccttctggatagagt

SEQ ID NO: 1834118 - DNA, 25 bp, Homo sapien
catggacatgtgttcaccagatgca

SEQ ID NO: 1834119 - DNA, 25 bp, Homo sapien
tcgatgagattttatcaccttcagg

SEQ ID NO: 1834120 - DNA, 25 bp, Homo sapien
caccttcaggttccattaagcagtt

SEQ ID NO: 1834121 - DNA, 25 bp, Homo sapien
tccaccttaggacaccagatttgtt

SEQ ID NO: 1834122 - DNA, 25 bp, Homo sapien
atttgttcctggtccataaagaagc

SEQ ID NO: 1834123 - DNA, 25 bp, Homo sapien
atgatgagggccgtccttgaccacg

SEQ ID NO: 1834124 - DNA, 25 bp, Homo sapien
ggtgctgtgcttatgattttcagcc

SEQ ID NO: 1834125 - DNA, 25 bp, Homo sapien
agcagcagaccgtctccatgggtgc

SEQ ID NO: 1834126 - DNA, 25 bp, Homo sapien
cgtccttgaccacgcatttggtcca

SEQ ID NO: 1834127 - DNA, 25 bp, Homo sapien
agacatagacatcatattaggagac

SEQ ID NO: 1834128 - DNA, 25 bp, Homo sapien
tttttcatattacttggataattca

SEQ ID NO: 1834129 - DNA, 25 bp, Homo sapien
atcaggcagcttatgatgcatgtga

SEQ ID NO: 1834130 - DNA, 25 bp, Homo sapien
ggttcttcatcaggcagcttatgat

SEQ ID NO: 1834131 - DNA, 25 bp, Homo sapien
tggagtaatacttcccactcatggg

SEQ ID NO: 1834132 - DNA, 25 bp, Homo sapien
tcctcatttgtggagtaatacttcc

SEQ ID NO: 1834133 - DNA, 25 bp, Homo sapien
ttgcaggttactctggaagccaact

SEQ ID NO: 1834134 - DNA, 25 bp, Homo sapien
aaggttcagtttggcaggttcagga

SEQ ID NO: 1834135 - DNA, 25 bp, Homo sapien
gagacaagctgtctatcaggtgaca

SEQ ID NO: 1834136 - DNA, 25 bp, Homo sapien
aataggcgttgacagtaattttcag

SEQ ID NO: 1834137 - DNA, 25 bp, Homo sapien
agcttttaagtcactagcctgagaa

SEQ ID NO: 1834138 - DNA, 25 bp, Homo sapien
tgacctgtagcagccagcctggtag

SEQ ID NO: 1834139 - DNA, 25 bp, Homo sapien
gatgacctgtagcagccagcctggt

SEQ ID NO: 1834140 - DNA, 25 bp, Homo sapien
ctgtagcagccagcctggtaggact

SEQ ID NO: 1834141 - DNA, 25 bp, Homo sapien
ggaggatgacctgtagcagccagcc

SEQ ID NO: 1834142 - DNA, 25 bp, Homo sapien
gaagggagattcatcaagtggacca

SEQ ID NO: 1834143 - DNA, 25 bp, Homo sapien
caagtggaccacctatctgccattc

SEQ ID NO: 1834144 - DNA, 25 bp, Homo sapien
ggagattcatcaagtggaccaccta

SEQ ID NO: 1834145 - DNA, 25 bp, Homo sapien
ccatgtgcataggagaagggagatt

SEQ ID NO: 1834146 - DNA, 25 bp, Homo sapien
tctctccgtttcctcttggtctccc

SEQ ID NO: 1834147 - DNA, 25 bp, Homo sapien
cccattgcttcctccgttgtcttcc

SEQ ID NO: 1834148 - DNA, 25 bp, Homo sapien
tcaagcaaattctgtgtgaccatca

SEQ ID NO: 1834149 - DNA, 25 bp, Homo sapien
cagcagtcatcacctacaccttgtt

SEQ ID NO: 1834150 - DNA, 25 bp, Homo sapien
tttaacagactgcttcctctgcatg

SEQ ID NO: 1834151 - DNA, 25 bp, Homo sapien
gatactggaccttactattcttcag

SEQ ID NO: 1834152 - DNA, 25 bp, Homo sapien
ttgatatcttggtcattcacccaca

SEQ ID NO: 1834153 - DNA, 25 bp, Homo sapien
tttagattttgctcggtctacttcc

SEQ ID NO: 1834154 - DNA, 25 bp, Homo sapien
tacttcctgaagatcattgctccat

SEQ ID NO: 1834155 - DNA, 25 bp, Homo sapien
gaagatcattgctccatcacttgtt

SEQ ID NO: 1834156 - DNA, 25 bp, Homo sapien
gtttttcagtctacagctcctttgc

SEQ ID NO: 1834157 - DNA, 25 bp, Homo sapien
gtggtcagacgtagaatggagttca

SEQ ID NO: 1834158 - DNA, 25 bp, Homo sapien
ggagttcaggtctgctctcacaagc

SEQ ID NO: 1834159 - DNA, 25 bp, Homo sapien
cgtagaatggagttcaggtctgctc

SEQ ID NO: 1834160 - DNA, 25 bp, Homo sapien
catgttgggctgagtggtcagacgt

SEQ ID NO: 1834161 - DNA, 25 bp, Homo sapien
ctgagaccaaaggaatatttttaag

SEQ ID NO: 1834162 - DNA, 25 bp, Homo sapien
tgagaccaaaggaatatttttaaga

SEQ ID NO: 1834163 - DNA, 25 bp, Homo sapien
ttgcccttcctccattcagttgtaa

SEQ ID NO: 1834164 - DNA, 25 bp, Homo sapien
tgaagagggtcttgagtaatgccca

SEQ ID NO: 1834165 - DNA, 25 bp, Homo sapien
gagtaatgcccagttcttggactct

SEQ ID NO: 1834166 - DNA, 25 bp, Homo sapien
gcgtgcttcccagtgttgctcagaa

SEQ ID NO: 1834167 - DNA, 25 bp, Homo sapien
catggtaagcccctgttctagacag

SEQ ID NO: 1834168 - DNA, 25 bp, Homo sapien
acaggtaaggatcatatcactcagg

SEQ ID NO: 1834169 - DNA, 25 bp, Homo sapien
ggattcattgccatggtaagcccct

SEQ ID NO: 1834170 - DNA, 25 bp, Homo sapien
tctagacaggtaaggatcatatcac

SEQ ID NO: 1834171 - DNA, 25 bp, Homo sapien
tctgctttgctttcaacactggcta

SEQ ID NO: 1834172 - DNA, 25 bp, Homo sapien
cactggctacagtatctttgggaat

SEQ ID NO: 1834173 - DNA, 25 bp, Homo sapien
gcaagacagctaatgacctgaagag

SEQ ID NO: 1834174 - DNA, 25 bp, Homo sapien
tcaggagagtctgttgtagcaagac

SEQ ID NO: 1834175 - DNA, 25 bp, Homo sapien
ccttagtgggctctctacttatact

SEQ ID NO: 1834176 - DNA, 25 bp, Homo sapien
ctttgttaaactctggaaatgcacc

SEQ ID NO: 1834177 - DNA, 25 bp, Homo sapien
aatgcaccttggtaacatcagtacc

SEQ ID NO: 1834178 - DNA, 25 bp, Homo sapien
atgctttgttaaactctggaaatgc

SEQ ID NO: 1834179 - DNA, 25 bp, Homo sapien
tgagaaccggtgaacagcttccttg

SEQ ID NO: 1834180 - DNA, 25 bp, Homo sapien
tttctgtagtctcaccactttctgg

SEQ ID NO: 1834181 - DNA, 25 bp, Homo sapien
ctccttctcattgagaaccggtgaa

SEQ ID NO: 1834182 - DNA, 25 bp, Homo sapien
tggcggttgtgttgtcagtagccct

SEQ ID NO: 1834183 - DNA, 25 bp, Homo sapien
agaaggttgaccaaagtcattcggt

SEQ ID NO: 1834184 - DNA, 25 bp, Homo sapien
cccaaaaaaccccatggagtggcat

SEQ ID NO: 1834185 - DNA, 25 bp, Homo sapien
ggagtatggttgagattctgctact

SEQ ID NO: 1834186 - DNA, 25 bp, Homo sapien
ctgctactgctgaaggcaaattttc

SEQ ID NO: 1834187 - DNA, 25 bp, Homo sapien
gaacttctatgtaaggcttgttagg

SEQ ID NO: 1834188 - DNA, 25 bp, Homo sapien
ggtgaacttctatgtaaggcttgtt

SEQ ID NO: 1834189 - DNA, 25 bp, Homo sapien
tgggtgaacttctatgtaaggcttg

SEQ ID NO: 1834190 - DNA, 25 bp, Homo sapien
gcttgggtgaacttctatgtaaggc

SEQ ID NO: 1834191 - DNA, 25 bp, Homo sapien
cagtaagctgatgtgtgcatcctcc

SEQ ID NO: 1834192 - DNA, 25 bp, Homo sapien
gctgatgtgtgcatcctccccttac

SEQ ID NO: 1834193 - DNA, 25 bp, Homo sapien
taagctgatgtgtgcatcctcccct

SEQ ID NO: 1834194 - DNA, 25 bp, Homo sapien
agtaagctgatgtgtgcatcctccc

SEQ ID NO: 1834195 - DNA, 25 bp, Homo sapien
gcacatgtgtacaccagacttgcaa

SEQ ID NO: 1834196 - DNA, 25 bp, Homo sapien
tacaccagacttgcaatttgtcttg

SEQ ID NO: 1834197 - DNA, 25 bp, Homo sapien
tgtgtacaccagacttgcaatttgt

SEQ ID NO: 1834198 - DNA, 25 bp, Homo sapien
accagacttgcaatttgtcttgatg

SEQ ID NO: 1834199 - DNA, 25 bp, Homo sapien
taattattgctttggaacttgtgcc

SEQ ID NO: 1834200 - DNA, 25 bp, Homo sapien
tgctttggaacttgtgcctataaaa

SEQ ID NO: 1834201 - DNA, 25 bp, Homo sapien
aaaagtacttggtcacttgtactca

SEQ ID NO: 1834202 - DNA, 25 bp, Homo sapien
tacaaatctaaaagtacttggtcac

SEQ ID NO: 1834203 - DNA, 25 bp, Homo sapien
agggtggtgggggatagagtcctgc

SEQ ID NO: 1834204 - DNA, 25 bp, Homo sapien
ggggatagagtcctgctccgttgcc

SEQ ID NO: 1834205 - DNA, 25 bp, Homo sapien
gtggtgggggatagagtcctgctcc

SEQ ID NO: 1834206 - DNA, 25 bp, Homo sapien
taatttgacatccttcttttttgag

SEQ ID NO: 1834207 - DNA, 25 bp, Homo sapien
tgtgttaatgcccttgtgtatgcca

SEQ ID NO: 1834208 - DNA, 25 bp, Homo sapien
gcttagccaactatagtcatctttc

SEQ ID NO: 1834209 - DNA, 25 bp, Homo sapien
actttgtcaaatatcgccttttcca

SEQ ID NO: 1834210 - DNA, 25 bp, Homo sapien
ccattacttctgctaggcctgctta

SEQ ID NO: 1834211 - DNA, 25 bp, Homo sapien
atagaatattttgactgccatggac

SEQ ID NO: 1834212 - DNA, 25 bp, Homo sapien
gcaggagacatagcaggtacaacgt

SEQ ID NO: 1834213 - DNA, 25 bp, Homo sapien
ggtacaacgtcttcatctcaggaaa

SEQ ID NO: 1834214 - DNA, 25 bp, Homo sapien
tcaggaaacctagcagttaccctaa

SEQ ID NO: 1834215 - DNA, 25 bp, Homo sapien
tctctaaagtaagtggagggtcatg

SEQ ID NO: 1834216 - DNA, 25 bp, Homo sapien
tggtcctccccagaattctctaaag

SEQ ID NO: 1834217 - DNA, 25 bp, Homo sapien
agggtcatgggcctcaaagtatgta

SEQ ID NO: 1834218 - DNA, 25 bp, Homo sapien
gggccagtggattccctccaagttc

SEQ ID NO: 1834219 - DNA, 25 bp, Homo sapien
cattcttcccctttggatcattttc

SEQ ID NO: 1834220 - DNA, 25 bp, Homo sapien
attccaggtagctcctcttctggtt

SEQ ID NO: 1834221 - DNA, 25 bp, Homo sapien
gatcattttctatttcactctgcag

SEQ ID NO: 1834222 - DNA, 25 bp, Homo sapien
gcagtttaatgacttttatattccc

SEQ ID NO: 1834223 - DNA, 25 bp, Homo sapien
gatggaagttctcagctggcacatt

SEQ ID NO: 1834224 - DNA, 25 bp, Homo sapien
ggatggaagttctcagctggcacat

SEQ ID NO: 1834225 - DNA, 25 bp, Homo sapien
catgaatatcaccacctcttgggat

SEQ ID NO: 1834226 - DNA, 25 bp, Homo sapien
tgaatatcaccacctcttgggatgg

SEQ ID NO: 1834227 - DNA, 25 bp, Homo sapien
tttaccaggtaatttctgggtatca

SEQ ID NO: 1834228 - DNA, 25 bp, Homo sapien
ttaccaggtaatttctgggtatcat

SEQ ID NO: 1834229 - DNA, 25 bp, Homo sapien
ctcacagactgttgtgaaaccttcc

SEQ ID NO: 1834230 - DNA, 25 bp, Homo sapien
tctcacagactgttgtgaaaccttc

SEQ ID NO: 1834231 - DNA, 25 bp, Homo sapien
tgttgttctcacagactgttgtgaa

SEQ ID NO: 1834232 - DNA, 25 bp, Homo sapien
tttgttgttctcacagactgttgtg

SEQ ID NO: 1834233 - DNA, 25 bp, Homo sapien
tggtatagctaggtccaggaagaca

SEQ ID NO: 1834234 - DNA, 25 bp, Homo sapien
tcagaaagcgatatgtggagaccac

SEQ ID NO: 1834235 - DNA, 25 bp, Homo sapien
taaaggactcctgttatagaggcta

SEQ ID NO: 1834236 - DNA, 25 bp, Homo sapien
tctttcagcgagacgtttggtttga

SEQ ID NO: 1834237 - DNA, 25 bp, Homo sapien
caaatgattcttgtgaccaggtaca

SEQ ID NO: 1834238 - DNA, 25 bp, Homo sapien
gaatgctgtgtcttatgacatgggc

SEQ ID NO: 1834239 - DNA, 25 bp, Homo sapien
gggtatgtccacctagttccacact

SEQ ID NO: 1834240 - DNA, 25 bp, Homo sapien
gcgtttaccatttgagctgaggctg

SEQ ID NO: 1834241 - DNA, 25 bp, Homo sapien
catcctattaggagggtaagaactt

SEQ ID NO: 1834242 - DNA, 25 bp, Homo sapien
ctctacaacctcatcctattaggag

SEQ ID NO: 1834243 - DNA, 25 bp, Homo sapien
agtagtgaagtgacaggcttcagtg

SEQ ID NO: 1834244 - DNA, 25 bp, Homo sapien
tgccagtagtgaagtgacaggcttc

SEQ ID NO: 1834245 - DNA, 25 bp, Homo sapien
tagtgaagtgacaggcttcagtgat

SEQ ID NO: 1834246 - DNA, 25 bp, Homo sapien
ccagtagtgaagtgacaggcttcag

SEQ ID NO: 1834247 - DNA, 25 bp, Homo sapien
gaaggtcccgtctgattaactgaat

SEQ ID NO: 1834248 - DNA, 25 bp, Homo sapien
gggcctgtgcacctgatatgtcaaa

SEQ ID NO: 1834249 - DNA, 25 bp, Homo sapien
tcagaaataacagtggatcccaaag

SEQ ID NO: 1834250 - DNA, 25 bp, Homo sapien
gcgtacgtaaacctaagcatgtgaa

SEQ ID NO: 1834251 - DNA, 25 bp, Homo sapien
tagactattacttggtagctcccag

SEQ ID NO: 1834252 - DNA, 25 bp, Homo sapien
gatgcttagccagcccacagaaatt

SEQ ID NO: 1834253 - DNA, 25 bp, Homo sapien
ggagatctgtctaccttattggcaa

SEQ ID NO: 1834254 - DNA, 25 bp, Homo sapien
tgagccgccattgtcaggagatctg

SEQ ID NO: 1834255 - DNA, 25 bp, Homo sapien
cattttgagagaagcccttagtgga

SEQ ID NO: 1834256 - DNA, 25 bp, Homo sapien
tagtggaattgccatcacaatgctc

SEQ ID NO: 1834257 - DNA, 25 bp, Homo sapien
caatgctcttgaatggtggccctga

SEQ ID NO: 1834258 - DNA, 25 bp, Homo sapien
cagacctcagtttcgttgtccatag

SEQ ID NO: 1834259 - DNA, 25 bp, Homo sapien
cacgttcttgttagtgccattgtta

SEQ ID NO: 1834260 - DNA, 25 bp, Homo sapien
ccgaggtttgttgattacacgttct

SEQ ID NO: 1834261 - DNA, 25 bp, Homo sapien
gttgattacacgttcttgttagtgc

SEQ ID NO: 1834262 - DNA, 25 bp, Homo sapien
tagtgccattgttattggtaaaatg

SEQ ID NO: 1834263 - DNA, 25 bp, Homo sapien
agacaaatacagctgcccgttccaa

SEQ ID NO: 1834264 - DNA, 25 bp, Homo sapien
tccaaattcttatctgtggctccgt

SEQ ID NO: 1834265 - DNA, 25 bp, Homo sapien
ctgtggctccgtttaaaaattcaag

SEQ ID NO: 1834266 - DNA, 25 bp, Homo sapien
gctgcccgttccaaattcttatctg

SEQ ID NO: 1834267 - DNA, 25 bp, Homo sapien
gagccttttcttgcagtcaattaaa

SEQ ID NO: 1834268 - DNA, 25 bp, Homo sapien
aaagcagagccttttcttgcagtca

SEQ ID NO: 1834269 - DNA, 25 bp, Homo sapien
gtcaattaaaggttcactctgactg

SEQ ID NO: 1834270 - DNA, 25 bp, Homo sapien
ttaaaggttcactctgactgtccat

SEQ ID NO: 1834271 - DNA, 25 bp, Homo sapien
ctagcactagtggtcttgaactgag

SEQ ID NO: 1834272 - DNA, 25 bp, Homo sapien
tggctaccgcatgagttacaggcac

SEQ ID NO: 1834273 - DNA, 25 bp, Homo sapien
taatcatggcccagtgtctcagtcc

SEQ ID NO: 1834274 - DNA, 25 bp, Homo sapien
cgtgatcatttgttagcggcaggaa

SEQ ID NO: 1834275 - DNA, 25 bp, Homo sapien
tgaaagcagaatagcattaccctgt

SEQ ID NO: 1834276 - DNA, 25 bp, Homo sapien
tagctggtatttttgacttggcatc

SEQ ID NO: 1834277 - DNA, 25 bp, Homo sapien
aaacgcatctctctgtgccgcctta

SEQ ID NO: 1834278 - DNA, 25 bp, Homo sapien
ggtgggtctggaatgatcccaaaaa

SEQ ID NO: 1834279 - DNA, 25 bp, Homo sapien
tacatatcataattggcctcgtgcc

SEQ ID NO: 1834280 - DNA, 25 bp, Homo sapien
tgctgtcattgaatggtaagaatcc

SEQ ID NO: 1834281 - DNA, 25 bp, Homo sapien
ggagatattaatgtcctcatcgtca

SEQ ID NO: 1834282 - DNA, 25 bp, Homo sapien
gaatccagtgtcaccatacaatttt

SEQ ID NO: 1834283 - DNA, 25 bp, Homo sapien
tggtgacactagacagtgctacaga

SEQ ID NO: 1834284 - DNA, 25 bp, Homo sapien
gacagtgctacagatgtcttattca

SEQ ID NO: 1834285 - DNA, 25 bp, Homo sapien
ctgcttggtgacactagacagtgct

SEQ ID NO: 1834286 - DNA, 25 bp, Homo sapien
cactagacagtgctacagatgtctt

SEQ ID NO: 1834287 - DNA, 25 bp, Homo sapien
cataatgtttggactgctagcgttg

SEQ ID NO: 1834288 - DNA, 25 bp, Homo sapien
ttttaaagatagaattacacctctc

SEQ ID NO: 1834289 - DNA, 25 bp, Homo sapien
gctctttgttagtcttgaaatctcg

SEQ ID NO: 1834290 - DNA, 25 bp, Homo sapien
tctgagaacagtgtactgcattgca

SEQ ID NO: 1834291 - DNA, 25 bp, Homo sapien
gctgaggcttggcatgacaaatccg

SEQ ID NO: 1834292 - DNA, 25 bp, Homo sapien
cacactcctgtggaaactggttgaa

SEQ ID NO: 1834293 - DNA, 25 bp, Homo sapien
gcttatggcagagatattggcacca

SEQ ID NO: 1834294 - DNA, 25 bp, Homo sapien
tatggttgaccagtgaagacacggg

SEQ ID NO: 1834295 - DNA, 25 bp, Homo sapien
gcattaatttcgcaacccacagtca

SEQ ID NO: 1834296 - DNA, 25 bp, Homo sapien
catatcagaaaagggactgtgcttg

SEQ ID NO: 1834297 - DNA, 25 bp, Homo sapien
tgtgttatccaaactactgttagcc

SEQ ID NO: 1834298 - DNA, 25 bp, Homo sapien
cattttgaccgctcgtctgattcag

SEQ ID NO: 1834299 - DNA, 25 bp, Homo sapien
gccccagaaggcttacatggcttcc

SEQ ID NO: 1834300 - DNA, 25 bp, Homo sapien
gattccacaaacacatcgtatgtaa

SEQ ID NO: 1834301 - DNA, 25 bp, Homo sapien
tgctcctcagtcctgtgcacagcaa

SEQ ID NO: 1834302 - DNA, 25 bp, Homo sapien
tggcttcccagtgtcaaaacgggca

SEQ ID NO: 1834303 - DNA, 25 bp, Homo sapien
tcaaagctgctgttggtctagattc

SEQ ID NO: 1834304 - DNA, 25 bp, Homo sapien
ttcactatgccgtgtcacaccatca

SEQ ID NO: 1834305 - DNA, 25 bp, Homo sapien
tatgccgtgtcacaccatcagcata

SEQ ID NO: 1834306 - DNA, 25 bp, Homo sapien
caaagctgctgttggtctagattca

SEQ ID NO: 1834307 - DNA, 25 bp, Homo sapien
caaaaatggattgttctgcatactc

SEQ ID NO: 1834308 - DNA, 25 bp, Homo sapien
gatagaatggccttcctcacttgca

SEQ ID NO: 1834309 - DNA, 25 bp, Homo sapien
gagcctagagactcacttgaattga

SEQ ID NO: 1834310 - DNA, 25 bp, Homo sapien
aagatctctctattgccaaaaatgg

SEQ ID NO: 1834311 - DNA, 25 bp, Homo sapien
aggagaaagctagccagtgagcggg

SEQ ID NO: 1834312 - DNA, 25 bp, Homo sapien
gtggctctcagtgccagtcactgtg

SEQ ID NO: 1834313 - DNA, 25 bp, Homo sapien
cagcagtagaggcatgccagtgttc

SEQ ID NO: 1834314 - DNA, 25 bp, Homo sapien
tgaagtaggacccatggggaaatgt

SEQ ID NO: 1834315 - DNA, 25 bp, Homo sapien
ggaagctgaggtgcgtacatggctc

SEQ ID NO: 1834316 - DNA, 25 bp, Homo sapien
gaggtgcgtacatggctccagttca

SEQ ID NO: 1834317 - DNA, 25 bp, Homo sapien
aagctgaggtgcgtacatggctcca

SEQ ID NO: 1834318 - DNA, 25 bp, Homo sapien
gctgaggtgcgtacatggctccagt

SEQ ID NO: 1834319 - DNA, 25 bp, Homo sapien
tcagagcaccgagctgctcatgact

SEQ ID NO: 1834320 - DNA, 25 bp, Homo sapien
gattccatggaatagtaccagatgg

SEQ ID NO: 1834321 - DNA, 25 bp, Homo sapien
cctcccatgtgagcagatacatgcc

SEQ ID NO: 1834322 - DNA, 25 bp, Homo sapien
taagcagccttaatacatcagccct

SEQ ID NO: 1834323 - DNA, 25 bp, Homo sapien
agagaatactgtgtggctgacttca

SEQ ID NO: 1834324 - DNA, 25 bp, Homo sapien
tgttgatgtgaggaaaaccattcca

SEQ ID NO: 1834325 - DNA, 25 bp, Homo sapien
gcctccgacagcgtactcatggaaa

SEQ ID NO: 1834326 - DNA, 25 bp, Homo sapien
gcaaaaatccttaatcaccccagag

SEQ ID NO: 1834327 - DNA, 25 bp, Homo sapien
catcttggacagttccaacagcctc

SEQ ID NO: 1834328 - DNA, 25 bp, Homo sapien
cacaagttacgttgttctggaggtc

SEQ ID NO: 1834329 - DNA, 25 bp, Homo sapien
cagttgttggaggaattactgtggc

SEQ ID NO: 1834330 - DNA, 25 bp, Homo sapien
gtggctacttaaatgggcaacaatt

SEQ ID NO: 1834331 - DNA, 25 bp, Homo sapien
taaccagagatccatttcatcactt

SEQ ID NO: 1834332 - DNA, 25 bp, Homo sapien
aaccagagatccatttcatcacttg

SEQ ID NO: 1834333 - DNA, 25 bp, Homo sapien
ctaaccagagatccatttcatcact

SEQ ID NO: 1834334 - DNA, 25 bp, Homo sapien
agaaactcagctcatgtatgatggg

SEQ ID NO: 1834335 - DNA, 25 bp, Homo sapien
tgccaagaaactcagctcatgtatg

SEQ ID NO: 1834336 - DNA, 25 bp, Homo sapien
caagaaactcagctcatgtatgatg

SEQ ID NO: 1834337 - DNA, 25 bp, Homo sapien
agctcatgtatgatggggcaccaac

SEQ ID NO: 1834338 - DNA, 25 bp, Homo sapien
gcttgtaattgctatgcttggcttt

SEQ ID NO: 1834339 - DNA, 25 bp, Homo sapien
gctatgatactgtagccaatgcttg

SEQ ID NO: 1834340 - DNA, 25 bp, Homo sapien
tactgtagccaatgcttgtaattgc

SEQ ID NO: 1834341 - DNA, 25 bp, Homo sapien
tagccaatgcttgtaattgctatgc

SEQ ID NO: 1834342 - DNA, 25 bp, Homo sapien
tgactcatgtctaacttcttcatgc

SEQ ID NO: 1834343 - DNA, 25 bp, Homo sapien
tcccctcagtgtgtcttctaaatga

SEQ ID NO: 1834344 - DNA, 25 bp, Homo sapien
tctaaatgactcatgtctaacttct

SEQ ID NO: 1834345 - DNA, 25 bp, Homo sapien
tctggcaccaggtcccctcagtgtg

SEQ ID NO: 1834346 - DNA, 25 bp, Homo sapien
tagagtctggttgtatttttctgtt

SEQ ID NO: 1834347 - DNA, 25 bp, Homo sapien
tggtagagtctggttgtatttttct

SEQ ID NO: 1834348 - DNA, 25 bp, Homo sapien
ggtagagtctggttgtatttttctg

SEQ ID NO: 1834349 - DNA, 25 bp, Homo sapien
ctggtagagtctggttgtatttttc

SEQ ID NO: 1834350 - DNA, 25 bp, Homo sapien
attttagaggctgcaagtcccagat

SEQ ID NO: 1834351 - DNA, 25 bp, Homo sapien
gattctgtttctggtcaggtctctg

SEQ ID NO: 1834352 - DNA, 25 bp, Homo sapien
gcaagtcccagatcaggtgccagca

SEQ ID NO: 1834353 - DNA, 25 bp, Homo sapien
ggctgcaagtcccagatcaggtgcc

SEQ ID NO: 1834354 - DNA, 25 bp, Homo sapien
ataccacagccgagagtgtcaccag

SEQ ID NO: 1834355 - DNA, 25 bp, Homo sapien
tctccagcagtgtaaacagtgtgca

SEQ ID NO: 1834356 - DNA, 25 bp, Homo sapien
tctaagacggaaatgctctccagca

SEQ ID NO: 1834357 - DNA, 25 bp, Homo sapien
tgcacaaggagaccagggagatacc

SEQ ID NO: 1834358 - DNA, 25 bp, Homo sapien
gctttgcccaaactgctttttcact

SEQ ID NO: 1834359 - DNA, 25 bp, Homo sapien
cataagtcactgcacttgtccatca

SEQ ID NO: 1834360 - DNA, 25 bp, Homo sapien
atatacataaatagagtgggcaggg

SEQ ID NO: 1834361 - DNA, 25 bp, Homo sapien
aatctgaatagcatgtgtatgatca

SEQ ID NO: 1834362 - DNA, 25 bp, Homo sapien
catgggaagtggaggtaagaaatat

SEQ ID NO: 1834363 - DNA, 25 bp, Homo sapien
gcttggcaaagagccaacttcagaa

SEQ ID NO: 1834364 - DNA, 25 bp, Homo sapien
cctgccgaaggcttgacagtgttgc

SEQ ID NO: 1834365 - DNA, 25 bp, Homo sapien
ttgcttggcaaagagccaacttcag

SEQ ID NO: 1834366 - DNA, 25 bp, Homo sapien
cgaaggcttgacagtgttgcttggc

SEQ ID NO: 1834367 - DNA, 25 bp, Homo sapien
ctatctctgtgtagtatcccttgct

SEQ ID NO: 1834368 - DNA, 25 bp, Homo sapien
tcatccactggctatctctgtgtag

SEQ ID NO: 1834369 - DNA, 25 bp, Homo sapien
tggctatctctgtgtagtatccctt

SEQ ID NO: 1834370 - DNA, 25 bp, Homo sapien
tccactggctatctctgtgtagtat

SEQ ID NO: 1834371 - DNA, 25 bp, Homo sapien
acataaaaaagaaaatcaactgatt

SEQ ID NO: 1834372 - DNA, 25 bp, Homo sapien
cataaaaaagaaaatcaactgattt

SEQ ID NO: 1834373 - DNA, 25 bp, Homo sapien
acaacataaaaaagaaaatcaactg

SEQ ID NO: 1834374 - DNA, 25 bp, Homo sapien
caacataaaaaagaaaatcaactga

SEQ ID NO: 1834375 - DNA, 25 bp, Homo sapien
taagggttaaccgtgctatatagct

SEQ ID NO: 1834376 - DNA, 25 bp, Homo sapien
tgagttagtaatctggtaagcactg

SEQ ID NO: 1834377 - DNA, 25 bp, Homo sapien
tatggacagcaaatcagttgtctgg

SEQ ID NO: 1834378 - DNA, 25 bp, Homo sapien
tctcactagtatggtgcctgcacaa

SEQ ID NO: 1834379 - DNA, 25 bp, Homo sapien
gaattcttgcatagagagtccattc

SEQ ID NO: 1834380 - DNA, 25 bp, Homo sapien
ccattcttttatggaaaggaagagg

SEQ ID NO: 1834381 - DNA, 25 bp, Homo sapien
caggtaggggactaaatatacagca

SEQ ID NO: 1834382 - DNA, 25 bp, Homo sapien
aaggaagaggtcaagaaataaggca

SEQ ID NO: 1834383 - DNA, 25 bp, Homo sapien
tgttacaagtccatcacacaacttg

SEQ ID NO: 1834384 - DNA, 25 bp, Homo sapien
tctggccacccttgttacaagtcca

SEQ ID NO: 1834385 - DNA, 25 bp, Homo sapien
cccttgttacaagtccatcacacaa

SEQ ID NO: 1834386 - DNA, 25 bp, Homo sapien
ggccacccttgttacaagtccatca

SEQ ID NO: 1834387 - DNA, 25 bp, Homo sapien
tgctagaacttagtaaaggatttct

SEQ ID NO: 1834388 - DNA, 25 bp, Homo sapien
ggctttagtgctagaacttagtaaa

SEQ ID NO: 1834389 - DNA, 25 bp, Homo sapien
tagtgctagaacttagtaaaggatt

SEQ ID NO: 1834390 - DNA, 25 bp, Homo sapien
ttggctttagtgctagaacttagta

SEQ ID NO: 1834391 - DNA, 25 bp, Homo sapien
gccatggctgctcagatgcatccca

SEQ ID NO: 1834392 - DNA, 25 bp, Homo sapien
atggctgctcagatgcatcccagac

SEQ ID NO: 1834393 - DNA, 25 bp, Homo sapien
cattcacagtagagtcctgttcctt

SEQ ID NO: 1834394 - DNA, 25 bp, Homo sapien
tgctgcccattcacagtagagtcct

SEQ ID NO: 1834395 - DNA, 25 bp, Homo sapien
ccatctggcttctgataggctgcat

SEQ ID NO: 1834396 - DNA, 25 bp, Homo sapien
tgagaacctcattgtggatagcacg

SEQ ID NO: 1834397 - DNA, 25 bp, Homo sapien
ggatagcacgcagtggtcttttcat

SEQ ID NO: 1834398 - DNA, 25 bp, Homo sapien
tagggtctgtgaacagaatctccat

SEQ ID NO: 1834399 - DNA, 25 bp, Homo sapien
ccaactcagggaaatcactgtaggc

SEQ ID NO: 1834400 - DNA, 25 bp, Homo sapien
agacatgtgtatggttctccaactc

SEQ ID NO: 1834401 - DNA, 25 bp, Homo sapien
aactcagggaaatcactgtaggcca

SEQ ID NO: 1834402 - DNA, 25 bp, Homo sapien
tgtatggttctccaactcagggaaa

SEQ ID NO: 1834403 - DNA, 25 bp, Homo sapien
ccagtttgtctcctccggcagcaag

SEQ ID NO: 1834404 - DNA, 25 bp, Homo sapien
agtttgtctcctccggcagcaagct

SEQ ID NO: 1834405 - DNA, 25 bp, Homo sapien
cccttcttgctgcttatggactcgg

SEQ ID NO: 1834406 - DNA, 25 bp, Homo sapien
tggactcggcgacctcgcactgtct

SEQ ID NO: 1834407 - DNA, 25 bp, Homo sapien
tcctggtggactggtggccaccaat

SEQ ID NO: 1834408 - DNA, 25 bp, Homo sapien
ctcctggtggactggtggccaccaa

SEQ ID NO: 1834409 - DNA, 25 bp, Homo sapien
ctggtggactggtggccaccaatgt

SEQ ID NO: 1834410 - DNA, 25 bp, Homo sapien
cctggtggactggtggccaccaatg

SEQ ID NO: 1834411 - DNA, 25 bp, Homo sapien
ctgagaaccagatccaaagcagata

SEQ ID NO: 1834412 - DNA, 25 bp, Homo sapien
tcctgagaaccagatccaaagcaga

SEQ ID NO: 1834413 - DNA, 25 bp, Homo sapien
ccaaagcagataacatccaggtgct

SEQ ID NO: 1834414 - DNA, 25 bp, Homo sapien
aaagcagataacatccaggtgctcc

SEQ ID NO: 1834415 - DNA, 25 bp, Homo sapien
ttgaagccgaactccaacctctgca

SEQ ID NO: 1834416 - DNA, 25 bp, Homo sapien
tgaagccgaactccaacctctgcag

SEQ ID NO: 1834417 - DNA, 25 bp, Homo sapien
ggcttgaagccgaactccaacctct

SEQ ID NO: 1834418 - DNA, 25 bp, Homo sapien
gagggcttgaagccgaactccaacc

SEQ ID NO: 1834419 - DNA, 25 bp, Homo sapien
tacacagtatcctgaaccaaggtac

SEQ ID NO: 1834420 - DNA, 25 bp, Homo sapien
gatggtccagcattgtttactgcag

SEQ ID NO: 1834421 - DNA, 25 bp, Homo sapien
aatacagctattctaaggccttcag

SEQ ID NO: 1834422 - DNA, 25 bp, Homo sapien
caaaaggtttcagtgcttgacagta

SEQ ID NO: 1834423 - DNA, 25 bp, Homo sapien
agggctggcagtacgcccaccagga

SEQ ID NO: 1834424 - DNA, 25 bp, Homo sapien
aggatcctaattcctccggcacctt

SEQ ID NO: 1834425 - DNA, 25 bp, Homo sapien
catggcttcgaaaagggagcaaaga

SEQ ID NO: 1834426 - DNA, 25 bp, Homo sapien
agtacgcccaccaggagtgctgacc

SEQ ID NO: 1834427 - DNA, 25 bp, Homo sapien
tgttctcactgactgtggcactgga

SEQ ID NO: 1834428 - DNA, 25 bp, Homo sapien
caagtgcccatgaaggatctgcgtg

SEQ ID NO: 1834429 - DNA, 25 bp, Homo sapien
tgtgtccgacagcagtgataattca

SEQ ID NO: 1834430 - DNA, 25 bp, Homo sapien
gtgcatggccgtctaacccgtactg

SEQ ID NO: 1834431 - DNA, 25 bp, Homo sapien
ccccgatgggtaccaaaattcatgg

SEQ ID NO: 1834432 - DNA, 25 bp, Homo sapien
gagatgtgatctttcttcagatggt

SEQ ID NO: 1834433 - DNA, 25 bp, Homo sapien
gatggttgggttcagtttagtgtaa

SEQ ID NO: 1834434 - DNA, 25 bp, Homo sapien
tagtaagtacagtcatctcttggta

SEQ ID NO: 1834435 - DNA, 25 bp, Homo sapien
gccaagaaggcgcagtacctgcact

SEQ ID NO: 1834436 - DNA, 25 bp, Homo sapien
gggtctgtgtagtcttctcaaagcc

SEQ ID NO: 1834437 - DNA, 25 bp, Homo sapien
tgaagctcgtgtagccagtttcggg

SEQ ID NO: 1834438 - DNA, 25 bp, Homo sapien
tgaacctcctgaagacaagagtgtg

SEQ ID NO: 1834439 - DNA, 25 bp, Homo sapien
tgcttttggtttacttttagcaaga

SEQ ID NO: 1834440 - DNA, 25 bp, Homo sapien
taatctttaagtcagaacctaattg

SEQ ID NO: 1834441 - DNA, 25 bp, Homo sapien
tttgtttcaatctctaatctttaag

SEQ ID NO: 1834442 - DNA, 25 bp, Homo sapien
caagaaatgcaagcggttgcatttt

SEQ ID NO: 1834443 - DNA, 25 bp, Homo sapien
gatttgtcgaaaactaattgtgccc

SEQ ID NO: 1834444 - DNA, 25 bp, Homo sapien
cctgaatgcttttggaatgcacggg

SEQ ID NO: 1834445 - DNA, 25 bp, Homo sapien
ggagtcccagtgctacaaacattgt

SEQ ID NO: 1834446 - DNA, 25 bp, Homo sapien
taaaggactcctggcaacattctgt

SEQ ID NO: 1834447 - DNA, 25 bp, Homo sapien
tatttaccctcaatttggctgcagc

SEQ ID NO: 1834448 - DNA, 25 bp, Homo sapien
gctggaccttcatgaaatcagtctc

SEQ ID NO: 1834449 - DNA, 25 bp, Homo sapien
actctgccgtttgacccagaaaggg

SEQ ID NO: 1834450 - DNA, 25 bp, Homo sapien
tccatactggcgaccaattggtgag

SEQ ID NO: 1834451 - DNA, 25 bp, Homo sapien
ctagcaatcagcatttagatttgtg

SEQ ID NO: 1834452 - DNA, 25 bp, Homo sapien
tgtgaagatctttgtagaggatttc

SEQ ID NO: 1834453 - DNA, 25 bp, Homo sapien
gtgtgtgggccttctcaacagctgg

SEQ ID NO: 1834454 - DNA, 25 bp, Homo sapien
ctgtgtgtgggccttctcaacagct

SEQ ID NO: 1834455 - DNA, 25 bp, Homo sapien
atagatttggctgtcagaatccaag

SEQ ID NO: 1834456 - DNA, 25 bp, Homo sapien
gtgggagtttcctagacaattctcc

SEQ ID NO: 1834457 - DNA, 25 bp, Homo sapien
taggcaccatgtattaaggattgac

SEQ ID NO: 1834458 - DNA, 25 bp, Homo sapien
tacactttacatgtaggttggtcct

SEQ ID NO: 1834459 - DNA, 25 bp, Homo sapien
tggtttatgccccatttcctcagct

SEQ ID NO: 1834460 - DNA, 25 bp, Homo sapien
tgttacagaaatgctcaaccatctg

SEQ ID NO: 1834461 - DNA, 25 bp, Homo sapien
ccacatttatttctggacacaggat

SEQ ID NO: 1834462 - DNA, 25 bp, Homo sapien
gacaggccctcactaagtatgaagt

SEQ ID NO: 1834463 - DNA, 25 bp, Homo sapien
taaaagacagaccctgcgccctgca

SEQ ID NO: 1834464 - DNA, 25 bp, Homo sapien
ggccttgggagccagcttccgggcc

SEQ ID NO: 1834465 - DNA, 25 bp, Homo sapien
gggtgtggaaggagaagcatgcgca

SEQ ID NO: 1834466 - DNA, 25 bp, Homo sapien
tgccgtcctcgccagactgtgggga

SEQ ID NO: 1834467 - DNA, 25 bp, Homo sapien
tagtgccatggtctcctgcggccag

SEQ ID NO: 1834468 - DNA, 25 bp, Homo sapien
ctagtgccatggtctcctgcggcca

SEQ ID NO: 1834469 - DNA, 25 bp, Homo sapien
agtgccatggtctcctgcggccaga

SEQ ID NO: 1834470 - DNA, 25 bp, Homo sapien
tgccatggtctcctgcggccagaaa

SEQ ID NO: 1834471 - DNA, 25 bp, Homo sapien
catggatcgtggtagctgaaggtgt

SEQ ID NO: 1834472 - DNA, 25 bp, Homo sapien
catgggcagatgtggttcgcaaggt

SEQ ID NO: 1834473 - DNA, 25 bp, Homo sapien
cttggaggcgtgacaaaggctgctc

SEQ ID NO: 1834474 - DNA, 25 bp, Homo sapien
ggtgttgtgggcagaaaagtcctca

SEQ ID NO: 1834475 - DNA, 25 bp, Homo sapien
cacgatgcagcctctttcggttcat

SEQ ID NO: 1834476 - DNA, 25 bp, Homo sapien
cagcctctttcggttcattttcagt

SEQ ID NO: 1834477 - DNA, 25 bp, Homo sapien
aagctagcctcttcacgatgcagcc

SEQ ID NO: 1834478 - DNA, 25 bp, Homo sapien
ggttcattttcagttcatcgttggc

SEQ ID NO: 1834479 - DNA, 25 bp, Homo sapien
tcacactgatgtgggaccaggctcc

SEQ ID NO: 1834480 - DNA, 25 bp, Homo sapien
aggattcagaatcgatgaccaggca

SEQ ID NO: 1834481 - DNA, 25 bp, Homo sapien
ggacccagtcagaaaggctgtcata

SEQ ID NO: 1834482 - DNA, 25 bp, Homo sapien
caggctccagatgaaggacccagtc

SEQ ID NO: 1834483 - DNA, 25 bp, Homo sapien
agcggagccagcgaagcccactggc

SEQ ID NO: 1834484 - DNA, 25 bp, Homo sapien
tgaaggctggaagctgatcttttca

SEQ ID NO: 1834485 - DNA, 25 bp, Homo sapien
aatggaaatctagtataggaaacag

SEQ ID NO: 1834486 - DNA, 25 bp, Homo sapien
cgaatgtgaaggctggaagctgatc

SEQ ID NO: 1834487 - DNA, 25 bp, Homo sapien
gaatcaacggctccttcattttgta

SEQ ID NO: 1834488 - DNA, 25 bp, Homo sapien
acggctccttcattttgtacaccca

SEQ ID NO: 1834489 - DNA, 25 bp, Homo sapien
caggttttcctcaccgtttgctccg

SEQ ID NO: 1834490 - DNA, 25 bp, Homo sapien
gtttgctccgaatcaacggctcctt

SEQ ID NO: 1834491 - DNA, 25 bp, Homo sapien
tggatcgtgatattgatctcaggtc

SEQ ID NO: 1834492 - DNA, 25 bp, Homo sapien
tgcagggcctgcttgacttgcaact

SEQ ID NO: 1834493 - DNA, 25 bp, Homo sapien
tctggcttcatattttggatcgtga

SEQ ID NO: 1834494 - DNA, 25 bp, Homo sapien
ttgatctcaggtccgccatgttttg

SEQ ID NO: 1834495 - DNA, 25 bp, Homo sapien
taggtgattgtgtgagaacttctcc

SEQ ID NO: 1834496 - DNA, 25 bp, Homo sapien
tgtgttccgtttctcttcccagagc

SEQ ID NO: 1834497 - DNA, 25 bp, Homo sapien
tgttgagattgccttaggtgattgt

SEQ ID NO: 1834498 - DNA, 25 bp, Homo sapien
tctccttgtaataactgtgttccgt

SEQ ID NO: 1834499 - DNA, 25 bp, Homo sapien
tcagctagctgaagccttattgtgc

SEQ ID NO: 1834500 - DNA, 25 bp, Homo sapien
taattcgggcaaggatctttgaaaa

SEQ ID NO: 1834501 - DNA, 25 bp, Homo sapien
ggagaaagtgaactaattcgggcaa

SEQ ID NO: 1834502 - DNA, 25 bp, Homo sapien
gtgttcaggcatgtcagctagctga

SEQ ID NO: 1834503 - DNA, 25 bp, Homo sapien
cagcctttaatgtcaggatgttttc

SEQ ID NO: 1834504 - DNA, 25 bp, Homo sapien
cagaaatctgacttctctacagcct

SEQ ID NO: 1834505 - DNA, 25 bp, Homo sapien
gaaatctgacttctctacagccttt

SEQ ID NO: 1834506 - DNA, 25 bp, Homo sapien
cttctctacagcctttaatgtcagg

SEQ ID NO: 1834507 - DNA, 25 bp, Homo sapien
tcataaatgtcagcagcgtctctag

SEQ ID NO: 1834508 - DNA, 25 bp, Homo sapien
taaatgtcagcagcgtctctagatg

SEQ ID NO: 1834509 - DNA, 25 bp, Homo sapien
tcagcagcgtctctagatgacttct

SEQ ID NO: 1834510 - DNA, 25 bp, Homo sapien
ttaatcataaatgtcagcagcgtct

SEQ ID NO: 1834511 - DNA, 25 bp, Homo sapien
gatattcccgcttctgggtgtctgg

SEQ ID NO: 1834512 - DNA, 25 bp, Homo sapien
aacaactgagaagcgtgtgctgggt

SEQ ID NO: 1834513 - DNA, 25 bp, Homo sapien
atagctggccgcttctgcacctgtc

SEQ ID NO: 1834514 - DNA, 25 bp, Homo sapien
tgtctccctggttccatcactggct

SEQ ID NO: 1834515 - DNA, 25 bp, Homo sapien
agcgttcctcgagttcccggcctgg

SEQ ID NO: 1834516 - DNA, 25 bp, Homo sapien
caggcttctaggttgattctctggg

SEQ ID NO: 1834517 - DNA, 25 bp, Homo sapien
ttctctggggactgatcttgtggca

SEQ ID NO: 1834518 - DNA, 25 bp, Homo sapien
gtggcattcacactgtgcctcaata

SEQ ID NO: 1834519 - DNA, 25 bp, Homo sapien
caagacagggtctgcgcctgcttcc

SEQ ID NO: 1834520 - DNA, 25 bp, Homo sapien
aggccagtgaggcgggaaatggcgc

SEQ ID NO: 1834521 - DNA, 25 bp, Homo sapien
tgaggcgggaaatggcgctctccat

SEQ ID NO: 1834522 - DNA, 25 bp, Homo sapien
aagacagggtctgcgcctgcttccg

SEQ ID NO: 1834523 - DNA, 25 bp, Homo sapien
aaaaacgaagacacatacacatgag

SEQ ID NO: 1834524 - DNA, 25 bp, Homo sapien
cacatgagcctagtcctggacagag

SEQ ID NO: 1834525 - DNA, 25 bp, Homo sapien
gagcctagtcctggacagagtcagg

SEQ ID NO: 1834526 - DNA, 25 bp, Homo sapien
cacatacacatgagcctagtcctgg

SEQ ID NO: 1834527 - DNA, 25 bp, Homo sapien
aggtgtgagattgtgcagtcactga

SEQ ID NO: 1834528 - DNA, 25 bp, Homo sapien
gctcttgctccaaaggaatgtctgg

SEQ ID NO: 1834529 - DNA, 25 bp, Homo sapien
cagaactttccagcgctggcaggtg

SEQ ID NO: 1834530 - DNA, 25 bp, Homo sapien
cactgagcgccttgccaaggagatt

SEQ ID NO: 1834531 - DNA, 25 bp, Homo sapien
tcggccaaggtgaagcgcaaaggat

SEQ ID NO: 1834532 - DNA, 25 bp, Homo sapien
caggtcggccaaggtgaagcgcaaa

SEQ ID NO: 1834533 - DNA, 25 bp, Homo sapien
tctgcaggtcggccaaggtgaagcg

SEQ ID NO: 1834534 - DNA, 25 bp, Homo sapien
tgcaggtcggccaaggtgaagcgca

SEQ ID NO: 1834535 - DNA, 25 bp, Homo sapien
tctagagtattatctgcctctcggt

SEQ ID NO: 1834536 - DNA, 25 bp, Homo sapien
gaaagctgatccctggtatgtgcca

SEQ ID NO: 1834537 - DNA, 25 bp, Homo sapien
ggtcctgcggccctactttgatgtc

SEQ ID NO: 1834538 - DNA, 25 bp, Homo sapien
taggtactatctgatgcttctagag

SEQ ID NO: 1834539 - DNA, 25 bp, Homo sapien
tccagagaccagactaggtaagtgt

SEQ ID NO: 1834540 - DNA, 25 bp, Homo sapien
tgtcgtatgggcaaatccagagacc

SEQ ID NO: 1834541 - DNA, 25 bp, Homo sapien
gctggcccaatctgtggacttgagg

SEQ ID NO: 1834542 - DNA, 25 bp, Homo sapien
tttccatacagagacaggccccaaa

SEQ ID NO: 1834543 - DNA, 25 bp, Homo sapien
cagaatctcatttggtttggccctg

SEQ ID NO: 1834544 - DNA, 25 bp, Homo sapien
atctcatttggtttggccctgattc

SEQ ID NO: 1834545 - DNA, 25 bp, Homo sapien
gaatctcatttggtttggccctgat

SEQ ID NO: 1834546 - DNA, 25 bp, Homo sapien
tcttcagaatctcatttggtttggc

SEQ ID NO: 1834547 - DNA, 25 bp, Homo sapien
tgtggaaagccaagtggaaagaata

SEQ ID NO: 1834548 - DNA, 25 bp, Homo sapien
tcattgtggaaagccaagtggaaag

SEQ ID NO: 1834549 - DNA, 25 bp, Homo sapien
attcattgtggaaagccaagtggaa

SEQ ID NO: 1834550 - DNA, 25 bp, Homo sapien
gagttttattcattgtggaaagcca

SEQ ID NO: 1834551 - DNA, 25 bp, Homo sapien
ttgtcttggatttcgatgtccccag

SEQ ID NO: 1834552 - DNA, 25 bp, Homo sapien
tgtcaggggttatgaagtaataagc

SEQ ID NO: 1834553 - DNA, 25 bp, Homo sapien
aacaagtgccagttgcctccttctt

SEQ ID NO: 1834554 - DNA, 25 bp, Homo sapien
atgaagtaataagctgaactgttcc

SEQ ID NO: 1834555 - DNA, 25 bp, Homo sapien
aaagtgagttcagtctttggagtca

SEQ ID NO: 1834556 - DNA, 25 bp, Homo sapien
tgttgtcttcaagtgtccacagagc

SEQ ID NO: 1834557 - DNA, 25 bp, Homo sapien
tcaaggactggttggttaagaaaca

SEQ ID NO: 1834558 - DNA, 25 bp, Homo sapien
tcatttaaacacaaagggctcttcc

SEQ ID NO: 1834559 - DNA, 25 bp, Homo sapien
aatgcagtttgagttgaacggcctg

SEQ ID NO: 1834560 - DNA, 25 bp, Homo sapien
catttcgatgctatcacaatgcagt

SEQ ID NO: 1834561 - DNA, 25 bp, Homo sapien
cggcctgcatctggtattgcttaag

SEQ ID NO: 1834562 - DNA, 25 bp, Homo sapien
attgcttaagtaatatcagtgtttc

SEQ ID NO: 1834563 - DNA, 25 bp, Homo sapien
gcactttgggcccataccatgcaag

SEQ ID NO: 1834564 - DNA, 25 bp, Homo sapien
cattgagtcattaaagagtggagtt

SEQ ID NO: 1834565 - DNA, 25 bp, Homo sapien
tgagaagagtcaactgccagagctg

SEQ ID NO: 1834566 - DNA, 25 bp, Homo sapien
tgagtgtgtgtttgggtctgctctg

SEQ ID NO: 1834567 - DNA, 25 bp, Homo sapien
tgtgtgatctgccatgtgccatgtg

SEQ ID NO: 1834568 - DNA, 25 bp, Homo sapien
agatgtctgcctcaagtagatttat

SEQ ID NO: 1834569 - DNA, 25 bp, Homo sapien
tttcaatgtggtacatacgggtggg

SEQ ID NO: 1834570 - DNA, 25 bp, Homo sapien
gaatatagttgaaggctgtgtgatc

SEQ ID NO: 1834571 - DNA, 25 bp, Homo sapien
ttcataatcacacaaggaagaaggc

SEQ ID NO: 1834572 - DNA, 25 bp, Homo sapien
catgggatctgctcgggactttgaa

SEQ ID NO: 1834573 - DNA, 25 bp, Homo sapien
tttgaacttggccagaaaatcctgt

SEQ ID NO: 1834574 - DNA, 25 bp, Homo sapien
ttttctcttggcgactgacttctcc

SEQ ID NO: 1834575 - DNA, 25 bp, Homo sapien
gaggatgatcatccccttgcacaaa

SEQ ID NO: 1834576 - DNA, 25 bp, Homo sapien
tgatcatccccttgcacaaagggag

SEQ ID NO: 1834577 - DNA, 25 bp, Homo sapien
gggtatcataatgttccgtaatgag

SEQ ID NO: 1834578 - DNA, 25 bp, Homo sapien
aatgttccgtaatgagaggatgatc

SEQ ID NO: 1834579 - DNA, 25 bp, Homo sapien
gagttaccggaagctcggcgtccat

SEQ ID NO: 1834580 - DNA, 25 bp, Homo sapien
gtccatgatggtctatggggcttcc

SEQ ID NO: 1834581 - DNA, 25 bp, Homo sapien
gcgtccatgatggtctatggggctt

SEQ ID NO: 1834582 - DNA, 25 bp, Homo sapien
gttaccggaagctcggcgtccatga

SEQ ID NO: 1834583 - DNA, 25 bp, Homo sapien
ctgacacctttgaaatgtggttgaa

SEQ ID NO: 1834584 - DNA, 25 bp, Homo sapien
tctgacacctttgaaatgtggttga

SEQ ID NO: 1834585 - DNA, 25 bp, Homo sapien
gtctgacacctttgaaatgtggttg

SEQ ID NO: 1834586 - DNA, 25 bp, Homo sapien
agggttaccgcctcccgcggcatgg

SEQ ID NO: 1834587 - DNA, 25 bp, Homo sapien
gttcacccacggaggtggccatcct

SEQ ID NO: 1834588 - DNA, 25 bp, Homo sapien
cttttcagatgttcacccacggagg

SEQ ID NO: 1834589 - DNA, 25 bp, Homo sapien
catagtgttggctaactgcttccac

SEQ ID NO: 1834590 - DNA, 25 bp, Homo sapien
agtgcgtgaagtacaattgttatca

SEQ ID NO: 1834591 - DNA, 25 bp, Homo sapien
gagaataagaagagctctgacgagt

SEQ ID NO: 1834592 - DNA, 25 bp, Homo sapien
gtgaagtacaattgttatcactgag

SEQ ID NO: 1834593 - DNA, 25 bp, Homo sapien
gctctgacgagttaaaattgggtca

SEQ ID NO: 1834594 - DNA, 25 bp, Homo sapien
gtgccttcctctaaaactccctgag

SEQ ID NO: 1834595 - DNA, 25 bp, Homo sapien
agctgcatcagcacgtggacggata

SEQ ID NO: 1834596 - DNA, 25 bp, Homo sapien
tcagcacgtggacggataatgcatg

SEQ ID NO: 1834597 - DNA, 25 bp, Homo sapien
cactccgtgtaaactggccataatt

SEQ ID NO: 1834598 - DNA, 25 bp, Homo sapien
aggaataagcattagctgcggttgg

SEQ ID NO: 1834599 - DNA, 25 bp, Homo sapien
cattagctgcggttggtctggagca

SEQ ID NO: 1834600 - DNA, 25 bp, Homo sapien
gcagggttcaaaggctttatgtttg

SEQ ID NO: 1834601 - DNA, 25 bp, Homo sapien
gatgggatggctttttatcagagga

SEQ ID NO: 1834602 - DNA, 25 bp, Homo sapien
gatcccaggtgctttgccgtgagaa

SEQ ID NO: 1834603 - DNA, 25 bp, Homo sapien
tgggcttgtgacctctgacaaggaa

SEQ ID NO: 1834604 - DNA, 25 bp, Homo sapien
aaggcctgagggagtggaaatgggc

SEQ ID NO: 1834605 - DNA, 25 bp, Homo sapien
gaacatgcactcttcgagttctgag

SEQ ID NO: 1834606 - DNA, 25 bp, Homo sapien
cagaaatggtagatggggagatgca

SEQ ID NO: 1834607 - DNA, 25 bp, Homo sapien
ctcagaaatggtagatggggagatg

SEQ ID NO: 1834608 - DNA, 25 bp, Homo sapien
gccacagactcagaaatggtagatg

SEQ ID NO: 1834609 - DNA, 25 bp, Homo sapien
cacagactcagaaatggtagatggg

SEQ ID NO: 1834610 - DNA, 25 bp, Homo sapien
tgcatgaagattcagcaagaagagc

SEQ ID NO: 1834611 - DNA, 25 bp, Homo sapien
ggaatccatagcaagcccaggagaa

SEQ ID NO: 1834612 - DNA, 25 bp, Homo sapien
gagcttttgagcacccgtatcaggg

SEQ ID NO: 1834613 - DNA, 25 bp, Homo sapien
taatttttcagtcaagtagagggtg

SEQ ID NO: 1834614 - DNA, 25 bp, Homo sapien
cccagccagtaagctactaaatgat

SEQ ID NO: 1834615 - DNA, 25 bp, Homo sapien
tacactgcgtgccacactgaatttc

SEQ ID NO: 1834616 - DNA, 25 bp, Homo sapien
tagtaagaaccgctgttacactgcg

SEQ ID NO: 1834617 - DNA, 25 bp, Homo sapien
gaatttcaactatccctctatctgc

SEQ ID NO: 1834618 - DNA, 25 bp, Homo sapien
tataacctctcctactccactggtg

SEQ ID NO: 1834619 - DNA, 25 bp, Homo sapien
actcagctcaaagggtaaatccctg

SEQ ID NO: 1834620 - DNA, 25 bp, Homo sapien
tctgtgtgtctgaggatccagatgg

SEQ ID NO: 1834621 - DNA, 25 bp, Homo sapien
tttgcttacataattgtccccggtg

SEQ ID NO: 1834622 - DNA, 25 bp, Homo sapien
gaggataagatctagagctttgatt

SEQ ID NO: 1834623 - DNA, 25 bp, Homo sapien
agaggataagatctagagctttgat

SEQ ID NO: 1834624 - DNA, 25 bp, Homo sapien
aggataagatctagagctttgatta

SEQ ID NO: 1834625 - DNA, 25 bp, Homo sapien
taacaatactaatggaatttctgaa

SEQ ID NO: 1834626 - DNA, 25 bp, Homo sapien
tattaggttcacttcgttttacaga

SEQ ID NO: 1834627 - DNA, 25 bp, Homo sapien
ggaatttctgaactgcctttggtta

SEQ ID NO: 1834628 - DNA, 25 bp, Homo sapien
aatttctgaactgcctttggttatt

SEQ ID NO: 1834629 - DNA, 25 bp, Homo sapien
tctgaaggctcacaacccttgggtt

SEQ ID NO: 1834630 - DNA, 25 bp, Homo sapien
cagacccacacggtgacagttcagt

SEQ ID NO: 1834631 - DNA, 25 bp, Homo sapien
tctcctgtgacgatgccactgccgg

SEQ ID NO: 1834632 - DNA, 25 bp, Homo sapien
actgccggcttggatctttgcactg

SEQ ID NO: 1834633 - DNA, 25 bp, Homo sapien
ctgatccacccgatgggctgagtga

SEQ ID NO: 1834634 - DNA, 25 bp, Homo sapien
gagtgagagggagtccctcctgttc

SEQ ID NO: 1834635 - DNA, 25 bp, Homo sapien
gatccacccgatgggctgagtgaga

SEQ ID NO: 1834636 - DNA, 25 bp, Homo sapien
gtctgggcaaagactgatgaggagt

SEQ ID NO: 1834637 - DNA, 25 bp, Homo sapien
ggcacatgatgactgttggactcca

SEQ ID NO: 1834638 - DNA, 25 bp, Homo sapien
gaaacagagcaaacctgtgcctgtg

SEQ ID NO: 1834639 - DNA, 25 bp, Homo sapien
gtgcctgtgcgtagaaggcacatga

SEQ ID NO: 1834640 - DNA, 25 bp, Homo sapien
cacgtatgtgttagacaaactcaga

SEQ ID NO: 1834641 - DNA, 25 bp, Homo sapien
taactaagagcatggaagaaaggat

SEQ ID NO: 1834642 - DNA, 25 bp, Homo sapien
gcggtatctcttgacacgatgggca

SEQ ID NO: 1834643 - DNA, 25 bp, Homo sapien
aatggctggcgaatccacccatcag

SEQ ID NO: 1834644 - DNA, 25 bp, Homo sapien
gaagctcctgagttaccagggacag

SEQ ID NO: 1834645 - DNA, 25 bp, Homo sapien
ttggaagcacagattgctgctctgc

SEQ ID NO: 1834646 - DNA, 25 bp, Homo sapien
cagtgttgagggtgaagatcaggga

SEQ ID NO: 1834647 - DNA, 25 bp, Homo sapien
ttgagggtgaagatcagggatgctg

SEQ ID NO: 1834648 - DNA, 25 bp, Homo sapien
tgggatgtttgtcctgtggcttctg

SEQ ID NO: 1834649 - DNA, 25 bp, Homo sapien
gaggtcggagccatcattatccagt

SEQ ID NO: 1834650 - DNA, 25 bp, Homo sapien
ctggaggtcggagccatcattatcc

SEQ ID NO: 1834651 - DNA, 25 bp, Homo sapien
atcattatccagtgcaatgatgttg

SEQ ID NO: 1834652 - DNA, 25 bp, Homo sapien
tcattatccagtgcaatgatgttgc

SEQ ID NO: 1834653 - DNA, 25 bp, Homo sapien
ttaagacactagtatcagagaaggc

SEQ ID NO: 1834654 - DNA, 25 bp, Homo sapien
tgtgctggaaacgtcacagtcagca

SEQ ID NO: 1834655 - DNA, 25 bp, Homo sapien
gctggaaacgtcacagtcagcattg

SEQ ID NO: 1834656 - DNA, 25 bp, Homo sapien
tatgtgctggaaacgtcacagtcag

SEQ ID NO: 1834657 - DNA, 25 bp, Homo sapien
ttatgtgctggaaacgtcacagtca

SEQ ID NO: 1834658 - DNA, 25 bp, Homo sapien
caagagtaatcaaactcagagcttt

SEQ ID NO: 1834659 - DNA, 25 bp, Homo sapien
tcaaactcagagctttcatatcaag

SEQ ID NO: 1834660 - DNA, 25 bp, Homo sapien
gagtaatcaaactcagagctttcat

SEQ ID NO: 1834661 - DNA, 25 bp, Homo sapien
actcagagctttcatatcaagagaa

SEQ ID NO: 1834662 - DNA, 25 bp, Homo sapien
gagctggtctgctccgaattctctt

SEQ ID NO: 1834663 - DNA, 25 bp, Homo sapien
tgctggtgacacatcactgtcagag

SEQ ID NO: 1834664 - DNA, 25 bp, Homo sapien
tcagagtccgaaaaagtggcctgag

SEQ ID NO: 1834665 - DNA, 25 bp, Homo sapien
tggtctgctccgaattctcttctct

SEQ ID NO: 1834666 - DNA, 25 bp, Homo sapien
aggttgtcgccattctgagtttaaa

SEQ ID NO: 1834667 - DNA, 25 bp, Homo sapien
agccccacaggcgataagagaggat

SEQ ID NO: 1834668 - DNA, 25 bp, Homo sapien
tcaggttgtcgccattctgagttta

SEQ ID NO: 1834669 - DNA, 25 bp, Homo sapien
taagagaggatttggctgtgaggcc

SEQ ID NO: 1834670 - DNA, 25 bp, Homo sapien
tctctgcaatacaccttttaaacat

SEQ ID NO: 1834671 - DNA, 25 bp, Homo sapien
tccaaaggaacccacaaccaatgac

SEQ ID NO: 1834672 - DNA, 25 bp, Homo sapien
gctctctgcaatacaccttttaaac

SEQ ID NO: 1834673 - DNA, 25 bp, Homo sapien
aggaacccacaaccaatgacctctt

SEQ ID NO: 1834674 - DNA, 25 bp, Homo sapien
tccttcaagccttcgtcttccctca

SEQ ID NO: 1834675 - DNA, 25 bp, Homo sapien
tcaccatctcctctcgcacctgttt

SEQ ID NO: 1834676 - DNA, 25 bp, Homo sapien
tccccacctcatagttcaccatctc

SEQ ID NO: 1834677 - DNA, 25 bp, Homo sapien
tctcctctcgcacctgtttcttgat

SEQ ID NO: 1834678 - DNA, 25 bp, Homo sapien
aaccagggcaaataagtgactgttt

SEQ ID NO: 1834679 - DNA, 25 bp, Homo sapien
cctggaataacgctgtttatcccca

SEQ ID NO: 1834680 - DNA, 25 bp, Homo sapien
tgttctgtctccctggaataacgct

SEQ ID NO: 1834681 - DNA, 25 bp, Homo sapien
tgtctccctggaataacgctgttta

SEQ ID NO: 1834682 - DNA, 25 bp, Homo sapien
tccccggagactggtatagctcgag

SEQ ID NO: 1834683 - DNA, 25 bp, Homo sapien
ttaattccccggagactggtatagc

SEQ ID NO: 1834684 - DNA, 25 bp, Homo sapien
gactggtatagctcgagtgtgcgat

SEQ ID NO: 1834685 - DNA, 25 bp, Homo sapien
tatagctcgagtgtgcgataagcga

SEQ ID NO: 1834686 - DNA, 25 bp, Homo sapien
ttattttgcaagctcctctgcaacc

SEQ ID NO: 1834687 - DNA, 25 bp, Homo sapien
tattttgcaagctcctctgcaacca

SEQ ID NO: 1834688 - DNA, 25 bp, Homo sapien
ccagtttaggatcttcctttctgcc

SEQ ID NO: 1834689 - DNA, 25 bp, Homo sapien
ctcccagtttaggatcttcctttct

SEQ ID NO: 1834690 - DNA, 25 bp, Homo sapien
gagagtcgggtcacaacgaaaacaa

SEQ ID NO: 1834691 - DNA, 25 bp, Homo sapien
ttacaacttcacagcaaacctttgg

SEQ ID NO: 1834692 - DNA, 25 bp, Homo sapien
gctgaggatccagagctcgaaaccc

SEQ ID NO: 1834693 - DNA, 25 bp, Homo sapien
gaataatctgtcgagtttcacactg

SEQ ID NO: 1834694 - DNA, 25 bp, Homo sapien
tcgaaacaggagatttccgtgggca

SEQ ID NO: 1834695 - DNA, 25 bp, Homo sapien
actgtcagggaggtttcgaaacagg

SEQ ID NO: 1834696 - DNA, 25 bp, Homo sapien
tccgtgggcaatccggagagctggc

SEQ ID NO: 1834697 - DNA, 25 bp, Homo sapien
tcagggaggtttcgaaacaggagat

SEQ ID NO: 1834698 - DNA, 25 bp, Homo sapien
gaagttcatgtgagatgagttccaa

SEQ ID NO: 1834699 - DNA, 25 bp, Homo sapien
cgtgctgatattcagcattctggaa

SEQ ID NO: 1834700 - DNA, 25 bp, Homo sapien
aagttcatgtgagatgagttccaac

SEQ ID NO: 1834701 - DNA, 25 bp, Homo sapien
acttctttgcagtgatccgtgctga

SEQ ID NO: 1834702 - DNA, 25 bp, Homo sapien
aatacttagcaagagtgattgtctg

SEQ ID NO: 1834703 - DNA, 25 bp, Homo sapien
agcaagagtgattgtctgtatcctc

SEQ ID NO: 1834704 - DNA, 25 bp, Homo sapien
tttggtccaatacttagcaagagtg

SEQ ID NO: 1834705 - DNA, 25 bp, Homo sapien
ggtccaatacttagcaagagtgatt

SEQ ID NO: 1834706 - DNA, 25 bp, Homo sapien
ggtcaacatcgttcctcccagcatt

SEQ ID NO: 1834707 - DNA, 25 bp, Homo sapien
cattcaagactccatatagagcacc

SEQ ID NO: 1834708 - DNA, 25 bp, Homo sapien
cctcgtgttttggttgacttggtca

SEQ ID NO: 1834709 - DNA, 25 bp, Homo sapien
tggaagggtgatattgaggcaaaac

SEQ ID NO: 1834710 - DNA, 25 bp, Homo sapien
cagactctggttgtgctcctgagaa

SEQ ID NO: 1834711 - DNA, 25 bp, Homo sapien
taattgcaggaactctacgcatccc

SEQ ID NO: 1834712 - DNA, 25 bp, Homo sapien
cagcaccccgcagaagatcagaggt

SEQ ID NO: 1834713 - DNA, 25 bp, Homo sapien
caaactcgctaaggcacttgtcagt

SEQ ID NO: 1834714 - DNA, 25 bp, Homo sapien
cacacttatcctgctttgccgtagc

SEQ ID NO: 1834715 - DNA, 25 bp, Homo sapien
tgccgtagctttaggacaaacaagt

SEQ ID NO: 1834716 - DNA, 25 bp, Homo sapien
gtgcaccgtgcatactgagtctcct

SEQ ID NO: 1834717 - DNA, 25 bp, Homo sapien
ggtcctttgcacattgctttgcaca

SEQ ID NO: 1834718 - DNA, 25 bp, Homo sapien
gcatgaacaacagttgtttggattt

SEQ ID NO: 1834719 - DNA, 25 bp, Homo sapien
caacagttgtttggatttgtggcca

SEQ ID NO: 1834720 - DNA, 25 bp, Homo sapien
aacaacagttgtttggatttgtggc

SEQ ID NO: 1834721 - DNA, 25 bp, Homo sapien
tgaacaacagttgtttggatttgtg

SEQ ID NO: 1834722 - DNA, 25 bp, Homo sapien
ctgcctgcccactgagcccccttcc

SEQ ID NO: 1834723 - DNA, 25 bp, Homo sapien
tgggatttcaccagctgcctgccca

SEQ ID NO: 1834724 - DNA, 25 bp, Homo sapien
cagctgcctgcccactgagccccct

SEQ ID NO: 1834725 - DNA, 25 bp, Homo sapien
ctgggatttcaccagctgcctgccc

SEQ ID NO: 1834726 - DNA, 25 bp, Homo sapien
tagagatcacctcctgtggtagacc

SEQ ID NO: 1834727 - DNA, 25 bp, Homo sapien
gtgctgtttgtcgatatttccagtt

SEQ ID NO: 1834728 - DNA, 25 bp, Homo sapien
cacctcctgtggtagaccaggagcc

SEQ ID NO: 1834729 - DNA, 25 bp, Homo sapien
cttcttcactagagatcacctcctg

SEQ ID NO: 1834730 - DNA, 25 bp, Homo sapien
aagtgggccctctctgttccatcaa

SEQ ID NO: 1834731 - DNA, 25 bp, Homo sapien
tgtggtcaaaagtgggccctctctg

SEQ ID NO: 1834732 - DNA, 25 bp, Homo sapien
ttcttcttgagcataaacacgactg

SEQ ID NO: 1834733 - DNA, 25 bp, Homo sapien
tcttgagcataaacacgactgtggt

SEQ ID NO: 1834734 - DNA, 25 bp, Homo sapien
cactcgactccatcacaggttctga

SEQ ID NO: 1834735 - DNA, 25 bp, Homo sapien
ggtttatagtgtatcagagcctcat

SEQ ID NO: 1834736 - DNA, 25 bp, Homo sapien
gtagctagggctacacactcgactc

SEQ ID NO: 1834737 - DNA, 25 bp, Homo sapien
tgatgtgtctaaagaggcaggcacg

SEQ ID NO: 1834738 - DNA, 25 bp, Homo sapien
tgggagtgatgagccctttgtcaaa

SEQ ID NO: 1834739 - DNA, 25 bp, Homo sapien
tttccaggttttacactgccatctc

SEQ ID NO: 1834740 - DNA, 25 bp, Homo sapien
tgcccgtttccaaccagctcctttg

SEQ ID NO: 1834741 - DNA, 25 bp, Homo sapien
ctaactttgtaactcctactgggag

SEQ ID NO: 1834742 - DNA, 25 bp, Homo sapien
caaaacctagcgaagaaggctttgg

SEQ ID NO: 1834743 - DNA, 25 bp, Homo sapien
tgtgtaagtggaccaaaacctagcg

SEQ ID NO: 1834744 - DNA, 25 bp, Homo sapien
cgactgccttgtgtaagtggaccaa

SEQ ID NO: 1834745 - DNA, 25 bp, Homo sapien
aaggcgactgccttgtgtaagtgga

SEQ ID NO: 1834746 - DNA, 25 bp, Homo sapien
gaggccaatgggttacttctcatgc

SEQ ID NO: 1834747 - DNA, 25 bp, Homo sapien
tcaagaggccaatgggttacttctc

SEQ ID NO: 1834748 - DNA, 25 bp, Homo sapien
caagaggccaatgggttacttctca

SEQ ID NO: 1834749 - DNA, 25 bp, Homo sapien
ggccaatgggttacttctcatgcac

SEQ ID NO: 1834750 - DNA, 25 bp, Homo sapien
tccagtgcgagatagcttcacgggt

SEQ ID NO: 1834751 - DNA, 25 bp, Homo sapien
taaatgtgccgctgtttcgaatcgc

SEQ ID NO: 1834752 - DNA, 25 bp, Homo sapien
tatgagagattcagatcatgccggc

SEQ ID NO: 1834753 - DNA, 25 bp, Homo sapien
cagttaccgagcttgtcccttaggg

SEQ ID NO: 1834754 - DNA, 25 bp, Homo sapien
taaaccgtgcgctaactgaggagtg

SEQ ID NO: 1834755 - DNA, 25 bp, Homo sapien
gacaactgtatacttagcgagcacg

SEQ ID NO: 1834756 - DNA, 25 bp, Homo sapien
tgcatagcatcacgcagaaaggagc

SEQ ID NO: 1834757 - DNA, 25 bp, Homo sapien
aattagactgtcattctcccgggct

SEQ ID NO: 1834758 - DNA, 25 bp, Homo sapien
gccaagttagaagccatcgtgtaca

SEQ ID NO: 1834759 - DNA, 25 bp, Homo sapien
ttcacgctgccaagttagaagccat

SEQ ID NO: 1834760 - DNA, 25 bp, Homo sapien
cagctgaaaattcacgctgccaagt

SEQ ID NO: 1834761 - DNA, 25 bp, Homo sapien
tagaagccatcgtgtacattcagga

SEQ ID NO: 1834762 - DNA, 25 bp, Homo sapien
aatactcctcatgtaagacatgcta

SEQ ID NO: 1834763 - DNA, 25 bp, Homo sapien
tgtgcctagttgtctgcttctgctt

SEQ ID NO: 1834764 - DNA, 25 bp, Homo sapien
gctttgtgcctagttgtctgcttct

SEQ ID NO: 1834765 - DNA, 25 bp, Homo sapien
aacaaaggtaaatactcctcatgta

SEQ ID NO: 1834766 - DNA, 25 bp, Homo sapien
cagagtgttatggaaagcaagatca

SEQ ID NO: 1834767 - DNA, 25 bp, Homo sapien
gaatgggtcccacagattctctgcc

SEQ ID NO: 1834768 - DNA, 25 bp, Homo sapien
ttctctgccgccagagtgttatgga

SEQ ID NO: 1834769 - DNA, 25 bp, Homo sapien
ccttggcttgcccatggaatgggtc

SEQ ID NO: 1834770 - DNA, 25 bp, Homo sapien
tgacttcctttcttgtgagtatata

SEQ ID NO: 1834771 - DNA, 25 bp, Homo sapien
cacccggctggtaccacatcttctt

SEQ ID NO: 1834772 - DNA, 25 bp, Homo sapien
tccacgtcctcactggcatttgtta

SEQ ID NO: 1834773 - DNA, 25 bp, Homo sapien
gctgctttccaatcatggctattgt

SEQ ID NO: 1834774 - DNA, 25 bp, Homo sapien
ctatgaaagcctgtgtccagactca

SEQ ID NO: 1834775 - DNA, 25 bp, Homo sapien
gctgactcaactggcaataagacaa

SEQ ID NO: 1834776 - DNA, 25 bp, Homo sapien
gctatactgccctagcattcagtga

SEQ ID NO: 1834777 - DNA, 25 bp, Homo sapien
gacaatggccagcaatctaggttca

SEQ ID NO: 1834778 - DNA, 25 bp, Homo sapien
tgtgtttcaagggaaagctcccctg

SEQ ID NO: 1834779 - DNA, 25 bp, Homo sapien
gctatgcaggatttacagggagttt

SEQ ID NO: 1834780 - DNA, 25 bp, Homo sapien
gatgacaggtgtctaggtaccactt

SEQ ID NO: 1834781 - DNA, 25 bp, Homo sapien
cctattgaggtaattacggagcact

SEQ ID NO: 1834782 - DNA, 25 bp, Homo sapien
gcttctcattgcacgcggagattat

SEQ ID NO: 1834783 - DNA, 25 bp, Homo sapien
catgaggaagcgttggttacagcag

SEQ ID NO: 1834784 - DNA, 25 bp, Homo sapien
catcgggttccaagccaatgggaag

SEQ ID NO: 1834785 - DNA, 25 bp, Homo sapien
actgtgaaaggataaagaggcgcga

SEQ ID NO: 1834786 - DNA, 25 bp, Homo sapien
ggaactataactcctctgcgagagg

SEQ ID NO: 1834787 - DNA, 25 bp, Homo sapien
cctttcattcgagaggcggagcggc

SEQ ID NO: 1834788 - DNA, 25 bp, Homo sapien
aatgccgagaacacggaagcgctgc

SEQ ID NO: 1834789 - DNA, 25 bp, Homo sapien
gactcagccgagagacagcaaactg

SEQ ID NO: 1834790 - DNA, 25 bp, Homo sapien
ggcggtgcgagtggcggcggcgcca

SEQ ID NO: 1834791 - DNA, 25 bp, Homo sapien
aagaaggtgaagtccggcaacgcca

SEQ ID NO: 1834792 - DNA, 25 bp, Homo sapien
gaagggagacaaggtcggtggcagt

SEQ ID NO: 1834793 - DNA, 25 bp, Homo sapien
ctacaagtaccggcccaggaagaag

SEQ ID NO: 1834794 - DNA, 25 bp, Homo sapien
tcgcccgccgaccaccgcggctacg

SEQ ID NO: 1834795 - DNA, 25 bp, Homo sapien
ggccgctcgcccgccgaccaccgcg

SEQ ID NO: 1834796 - DNA, 25 bp, Homo sapien
cgaccaccgcggctacgccagcctg

SEQ ID NO: 1834797 - DNA, 25 bp, Homo sapien
accaccgcggctacgccagcctgcg

SEQ ID NO: 1834798 - DNA, 25 bp, Homo sapien
ttttcacctactgaagggcgcgcag

SEQ ID NO: 1834799 - DNA, 25 bp, Homo sapien
tgaccggcgctaggaaatgacccga

SEQ ID NO: 1834800 - DNA, 25 bp, Homo sapien
ttctcgtcgtcggatcaaggagcgc

SEQ ID NO: 1834801 - DNA, 25 bp, Homo sapien
tggattttaacttcgagcccggctc

SEQ ID NO: 1834802 - DNA, 25 bp, Homo sapien
gaaatcagtgaggtgagacttccca

SEQ ID NO: 1834803 - DNA, 25 bp, Homo sapien
tctcttaatcggaatcgtgatggtg

SEQ ID NO: 1834804 - DNA, 25 bp, Homo sapien
aatataaaaagcagatagatggcgc

SEQ ID NO: 1834805 - DNA, 25 bp, Homo sapien
agatggcgctatgtttgattcctac

SEQ ID NO: 1834806 - DNA, 25 bp, Homo sapien
tgagttcgcgacactatgtactgcg

SEQ ID NO: 1834807 - DNA, 25 bp, Homo sapien
aaccactggatctatctaaatgccg

SEQ ID NO: 1834808 - DNA, 25 bp, Homo sapien
acagggcggctggttaatatctcac

SEQ ID NO: 1834809 - DNA, 25 bp, Homo sapien
gccattttacgtctccttcactgaa

SEQ ID NO: 1834810 - DNA, 25 bp, Homo sapien
tgccagctaatcatgtcaagttcac

SEQ ID NO: 1834811 - DNA, 25 bp, Homo sapien
catcctgtgcaatatgccgtgtaga

SEQ ID NO: 1834812 - DNA, 25 bp, Homo sapien
agttcactgcctgtcagattgttga

SEQ ID NO: 1834813 - DNA, 25 bp, Homo sapien
ttaatataacatgacaggcactagg

SEQ ID NO: 1834814 - DNA, 25 bp, Homo sapien
aggagaataattcataagagagtgg

SEQ ID NO: 1834815 - DNA, 25 bp, Homo sapien
aataattcataagagagtggggtgt

SEQ ID NO: 1834816 - DNA, 25 bp, Homo sapien
gaataattcataagagagtggggtg

SEQ ID NO: 1834817 - DNA, 25 bp, Homo sapien
gagaataattcataagagagtgggg

SEQ ID NO: 1834818 - DNA, 25 bp, Homo sapien
cctatctgatgctcatgggacccat

SEQ ID NO: 1834819 - DNA, 25 bp, Homo sapien
ggacccatcattgatcccatctgaa

SEQ ID NO: 1834820 - DNA, 25 bp, Homo sapien
agagcttcgccctccacaaagtgga

SEQ ID NO: 1834821 - DNA, 25 bp, Homo sapien
cttatgtggctgctaagcttcagca

SEQ ID NO: 1834822 - DNA, 25 bp, Homo sapien
actttgttgctttctggagtacaga

SEQ ID NO: 1834823 - DNA, 25 bp, Homo sapien
catttgggaactttgttgctttctg

SEQ ID NO: 1834824 - DNA, 25 bp, Homo sapien
ttgttgctttctggagtacagactc

SEQ ID NO: 1834825 - DNA, 25 bp, Homo sapien
atttgggaactttgttgctttctgg

SEQ ID NO: 1834826 - DNA, 25 bp, Homo sapien
tagttaatgagcacagtgctacctc

SEQ ID NO: 1834827 - DNA, 25 bp, Homo sapien
gaagtagtttaattggtgaaatagc

SEQ ID NO: 1834828 - DNA, 25 bp, Homo sapien
tgataaagaagtagtttaattggtg

SEQ ID NO: 1834829 - DNA, 25 bp, Homo sapien
ctgacatttagttaatgagcacagt

SEQ ID NO: 1834830 - DNA, 25 bp, Homo sapien
tctgtcatggctgataccagaaact

SEQ ID NO: 1834831 - DNA, 25 bp, Homo sapien
ttccctaaaaccactttctgctgct

SEQ ID NO: 1834832 - DNA, 25 bp, Homo sapien
ctgacttccctaaaaccactttctg

SEQ ID NO: 1834833 - DNA, 25 bp, Homo sapien
tcatggctgataccagaaactattc

SEQ ID NO: 1834834 - DNA, 25 bp, Homo sapien
tataatgtttgaactttcatgactg

SEQ ID NO: 1834835 - DNA, 25 bp, Homo sapien
actttcatgactggtcttgacacta

SEQ ID NO: 1834836 - DNA, 25 bp, Homo sapien
gtttgaactttcatgactggtcttg

SEQ ID NO: 1834837 - DNA, 25 bp, Homo sapien
gaggaaaaaaacgatcaatcacatg

SEQ ID NO: 1834838 - DNA, 25 bp, Homo sapien
aaatgtccttggcaacatcgctaca

SEQ ID NO: 1834839 - DNA, 25 bp, Homo sapien
tatcgtttagtaaaggccaatggtg

SEQ ID NO: 1834840 - DNA, 25 bp, Homo sapien
gccaatggtgtaataccaaggcaca

SEQ ID NO: 1834841 - DNA, 25 bp, Homo sapien
taaagaggacatggtacgagagagt

SEQ ID NO: 1834842 - DNA, 25 bp, Homo sapien
gatgggtccgatgttcttccgagca

SEQ ID NO: 1834843 - DNA, 25 bp, Homo sapien
tccgatgttcttccgagcacgtttc

SEQ ID NO: 1834844 - DNA, 25 bp, Homo sapien
taacccgatgggtccgatgttcttc

SEQ ID NO: 1834845 - DNA, 25 bp, Homo sapien
cttgaaagcataacccgatgggtcc

SEQ ID NO: 1834846 - DNA, 25 bp, Homo sapien
gaggaaactgtttggactctggcag

SEQ ID NO: 1834847 - DNA, 25 bp, Homo sapien
ggaaactgtttggactctggcagtg

SEQ ID NO: 1834848 - DNA, 25 bp, Homo sapien
aggaaactgtttggactctggcagt

SEQ ID NO: 1834849 - DNA, 25 bp, Homo sapien
ggtcactctggaatagtgcttcaga

SEQ ID NO: 1834850 - DNA, 25 bp, Homo sapien
cactctggaatagtgcttcagatgg

SEQ ID NO: 1834851 - DNA, 25 bp, Homo sapien
tctggaatagtgcttcagatggttt

SEQ ID NO: 1834852 - DNA, 25 bp, Homo sapien
taaaggtcactctggaatagtgctt

SEQ ID NO: 1834853 - DNA, 25 bp, Homo sapien
tattgcagatacagactagggggct

SEQ ID NO: 1834854 - DNA, 25 bp, Homo sapien
gaaaccaatttggagcctgcattag

SEQ ID NO: 1834855 - DNA, 25 bp, Homo sapien
cagctgtggatgttcgaagtcccag

SEQ ID NO: 1834856 - DNA, 25 bp, Homo sapien
cgctagggtaattatggagaaggaa

SEQ ID NO: 1834857 - DNA, 25 bp, Homo sapien
tattttccacgcagatccctgagga

SEQ ID NO: 1834858 - DNA, 25 bp, Homo sapien
agtaggcgactgactgcccaagaga

SEQ ID NO: 1834859 - DNA, 25 bp, Homo sapien
acctggagcattttcgagaggcaac

SEQ ID NO: 1834860 - DNA, 25 bp, Homo sapien
ggttcctgagcttccagtaggcgac

SEQ ID NO: 1834861 - DNA, 25 bp, Homo sapien
tggccggcggccgcttctttatctc

SEQ ID NO: 1834862 - DNA, 25 bp, Homo sapien
tcactttgcggccagagccgcggcc

SEQ ID NO: 1834863 - DNA, 25 bp, Homo sapien
ttcctgcgctctcggcctcactttg

SEQ ID NO: 1834864 - DNA, 25 bp, Homo sapien
actgcccagtactgtacgcgtccag

SEQ ID NO: 1834865 - DNA, 25 bp, Homo sapien
ggcatctctggtcccgggatgcgat

SEQ ID NO: 1834866 - DNA, 25 bp, Homo sapien
ggatgcgattgtcccggtttctcct

SEQ ID NO: 1834867 - DNA, 25 bp, Homo sapien
catcattcgcttaaggggctgggaa

SEQ ID NO: 1834868 - DNA, 25 bp, Homo sapien
tcgcagactgggacgggcggtgcaa

SEQ ID NO: 1834869 - DNA, 25 bp, Homo sapien
tcctgagagccttgccttcgcagtt

SEQ ID NO: 1834870 - DNA, 25 bp, Homo sapien
gcctgggaccccgagtcagatcttt

SEQ ID NO: 1834871 - DNA, 25 bp, Homo sapien
agacacctgatttgtcccggacaag

SEQ ID NO: 1834872 - DNA, 25 bp, Homo sapien
cgatgctggagctgggaattcttcc

SEQ ID NO: 1834873 - DNA, 25 bp, Homo sapien
cctggtcatgcaaaagaaagcgata

SEQ ID NO: 1834874 - DNA, 25 bp, Homo sapien
tgcagagcgctctgtagataccacg

SEQ ID NO: 1834875 - DNA, 25 bp, Homo sapien
agataccacgcacaatataaaaacg

SEQ ID NO: 1834876 - DNA, 25 bp, Homo sapien
tataacttagctgtctgcagagcgc

SEQ ID NO: 1834877 - DNA, 25 bp, Homo sapien
gaaatacatcacactgcgttagcac

SEQ ID NO: 1834878 - DNA, 25 bp, Homo sapien
cacattgctttcattggaaggtaaa

SEQ ID NO: 1834879 - DNA, 25 bp, Homo sapien
caaaggtgggcagttatttgaactc

SEQ ID NO: 1834880 - DNA, 25 bp, Homo sapien
gaactcaggctttgtttggtgaccc

SEQ ID NO: 1834881 - DNA, 25 bp, Homo sapien
cattgcttgtggaaaaacccttatc

SEQ ID NO: 1834882 - DNA, 25 bp, Homo sapien
aagagtggtgagcaaaggcttgtcc

SEQ ID NO: 1834883 - DNA, 25 bp, Homo sapien
caaaggcttgtcctcggagacctac

SEQ ID NO: 1834884 - DNA, 25 bp, Homo sapien
gtcgcttggctattactttcacctc

SEQ ID NO: 1834885 - DNA, 25 bp, Homo sapien
aaatgataatgcacctggcatagag

SEQ ID NO: 1834886 - DNA, 25 bp, Homo sapien
tacgaagaaatgataatgcacctgg

SEQ ID NO: 1834887 - DNA, 25 bp, Homo sapien
cataattacgaagaaatgataatgc

SEQ ID NO: 1834888 - DNA, 25 bp, Homo sapien
gaagaaatgataatgcacctggcat

SEQ ID NO: 1834889 - DNA, 25 bp, Homo sapien
ttttgcaaattgccaacttcatgca

SEQ ID NO: 1834890 - DNA, 25 bp, Homo sapien
tttgcaaattgccaacttcatgcat

SEQ ID NO: 1834891 - DNA, 25 bp, Homo sapien
cttttgcaaattgccaacttcatgc

SEQ ID NO: 1834892 - DNA, 25 bp, Homo sapien
tcctaggtgccctttggcatgaagc

SEQ ID NO: 1834893 - DNA, 25 bp, Homo sapien
ggcatgaagcatccgtgtggtttac

SEQ ID NO: 1834894 - DNA, 25 bp, Homo sapien
gctccaaggatctgaagggcggtaa

SEQ ID NO: 1834895 - DNA, 25 bp, Homo sapien
gtttaacgcagaacaggagctccaa

SEQ ID NO: 1834896 - DNA, 25 bp, Homo sapien
tctccagagtggtttgtaggaacca

SEQ ID NO: 1834897 - DNA, 25 bp, Homo sapien
tagggcttcacttagagtccctcct

SEQ ID NO: 1834898 - DNA, 25 bp, Homo sapien
atccacaaataagggctgaaatgca

SEQ ID NO: 1834899 - DNA, 25 bp, Homo sapien
ttccaggtagggcttcacttagagt

SEQ ID NO: 1834900 - DNA, 25 bp, Homo sapien
gccaaaggatatccacctcactgtg

SEQ ID NO: 1834901 - DNA, 25 bp, Homo sapien
tctacaaagagatagtcttttgcca

SEQ ID NO: 1834902 - DNA, 25 bp, Homo sapien
tgtggtttgaaatgtactattagga

SEQ ID NO: 1834903 - DNA, 25 bp, Homo sapien
ggattttagagatcttaaagccaag

SEQ ID NO: 1834904 - DNA, 25 bp, Homo sapien
atcctggcttgatgttggagtcccc

SEQ ID NO: 1834905 - DNA, 25 bp, Homo sapien
tctgaaattgcagggcagcttgatg

SEQ ID NO: 1834906 - DNA, 25 bp, Homo sapien
gatgcctggcaatgcatttactaag

SEQ ID NO: 1834907 - DNA, 25 bp, Homo sapien
tctttttgtgtgtggaacgcattca

SEQ ID NO: 1834908 - DNA, 25 bp, Homo sapien
tgaatgtcaagttacaatgacctac

SEQ ID NO: 1834909 - DNA, 25 bp, Homo sapien
gagaataaaatgttgctgcttattt

SEQ ID NO: 1834910 - DNA, 25 bp, Homo sapien
ctgcttatttctgaatgtcaagtta

SEQ ID NO: 1834911 - DNA, 25 bp, Homo sapien
aggtcagtgagaataaaatgttgct

SEQ ID NO: 1834912 - DNA, 25 bp, Homo sapien
ctttctttgctacttctcctatggt

SEQ ID NO: 1834913 - DNA, 25 bp, Homo sapien
tctttgctacttctcctatggtcat

SEQ ID NO: 1834914 - DNA, 25 bp, Homo sapien
ttctttgctacttctcctatggtca

SEQ ID NO: 1834915 - DNA, 25 bp, Homo sapien
tttctttgctacttctcctatggtc

SEQ ID NO: 1834916 - DNA, 25 bp, Homo sapien
gagagacccaaagccacagctcgct

SEQ ID NO: 1834917 - DNA, 25 bp, Homo sapien
tatgatcgcattcttctcaggtcag

SEQ ID NO: 1834918 - DNA, 25 bp, Homo sapien
tcagaagtcccatgcgagagaccca

SEQ ID NO: 1834919 - DNA, 25 bp, Homo sapien
tctgacgaaggcaagcttgctgctc

SEQ ID NO: 1834920 - DNA, 25 bp, Homo sapien
cggtttagcggaagcaaaatagaca

SEQ ID NO: 1834921 - DNA, 25 bp, Homo sapien
actgaattaaggacaacaatcaagc

SEQ ID NO: 1834922 - DNA, 25 bp, Homo sapien
ggacaacaatcaagcttttaactat

SEQ ID NO: 1834923 - DNA, 25 bp, Homo sapien
caccatcagctgtggtccggtttag

SEQ ID NO: 1834924 - DNA, 25 bp, Homo sapien
tttggtgtcctagacacagtagccc

SEQ ID NO: 1834925 - DNA, 25 bp, Homo sapien
ttttttggtgtcctagacacagtag

SEQ ID NO: 1834926 - DNA, 25 bp, Homo sapien
tcttttttggtgtcctagacacagt

SEQ ID NO: 1834927 - DNA, 25 bp, Homo sapien
agtggaggtgttgctttttacttct

SEQ ID NO: 1834928 - DNA, 25 bp, Homo sapien
gatggagtatgaatgggtgatatca

SEQ ID NO: 1834929 - DNA, 25 bp, Homo sapien
tctgtgaccattgtgaatgaggatg

SEQ ID NO: 1834930 - DNA, 25 bp, Homo sapien
tatgtgctgagtgacaccaagcttt

SEQ ID NO: 1834931 - DNA, 25 bp, Homo sapien
tgatatcatgagagagagtctgcat

SEQ ID NO: 1834932 - DNA, 25 bp, Homo sapien
tcttgctgttttattgtgagcagaa

SEQ ID NO: 1834933 - DNA, 25 bp, Homo sapien
caccttgcgtgtgcttgggtgtcct

SEQ ID NO: 1834934 - DNA, 25 bp, Homo sapien
attgtgagcagaagggagccattct

SEQ ID NO: 1834935 - DNA, 25 bp, Homo sapien
aggaagcctgctcactagggcatct

SEQ ID NO: 1834936 - DNA, 25 bp, Homo sapien
gtggtcctgttttcagggaatattc

SEQ ID NO: 1834937 - DNA, 25 bp, Homo sapien
ctgtaaggttgggtgtacgatgtgg

SEQ ID NO: 1834938 - DNA, 25 bp, Homo sapien
tgtacgatgtggtcctgttttcagg

SEQ ID NO: 1834939 - DNA, 25 bp, Homo sapien
ttgggtgtacgatgtggtcctgttt

SEQ ID NO: 1834940 - DNA, 25 bp, Homo sapien
gagattggtgatcaagaactttaaa

SEQ ID NO: 1834941 - DNA, 25 bp, Homo sapien
tgagaacaggaaatgttcgtgtgcc

SEQ ID NO: 1834942 - DNA, 25 bp, Homo sapien
gaaatgttcgtgtgccaggaatgtg

SEQ ID NO: 1834943 - DNA, 25 bp, Homo sapien
gaggaaatgacacgagcatgagatt

SEQ ID NO: 1834944 - DNA, 25 bp, Homo sapien
tcagggtgattttgacttcgtccta

SEQ ID NO: 1834945 - DNA, 25 bp, Homo sapien
cagggtgattttgacttcgtcctac

SEQ ID NO: 1834946 - DNA, 25 bp, Homo sapien
gagcttgttcagtgtccatagtcca

SEQ ID NO: 1834947 - DNA, 25 bp, Homo sapien
tccatggtgtccctcctcaggtctg

SEQ ID NO: 1834948 - DNA, 25 bp, Homo sapien
tcagcagcgggttgtgccctttgca

SEQ ID NO: 1834949 - DNA, 25 bp, Homo sapien
tcggtcccgggtccatttgttctca

SEQ ID NO: 1834950 - DNA, 25 bp, Homo sapien
tgtgtttcgccaattagacgaatcc

SEQ ID NO: 1834951 - DNA, 25 bp, Homo sapien
gacgaatgtgtttcgccaattagac

SEQ ID NO: 1834952 - DNA, 25 bp, Homo sapien
gatccactggacgaatgtgtttcgc

SEQ ID NO: 1834953 - DNA, 25 bp, Homo sapien
ctaccggatccactggacgaatgtg

SEQ ID NO: 1834954 - DNA, 25 bp, Homo sapien
acagttgcttcgtgccatgtcttca

SEQ ID NO: 1834955 - DNA, 25 bp, Homo sapien
aagccagacagttgcttcgtgccat

SEQ ID NO: 1834956 - DNA, 25 bp, Homo sapien
agaaaaatgaccttgagccccagaa

SEQ ID NO: 1834957 - DNA, 25 bp, Homo sapien
catgtcttcacctactgaagctgct

SEQ ID NO: 1834958 - DNA, 25 bp, Homo sapien
tccaggtaaaggaccaccctgattc

SEQ ID NO: 1834959 - DNA, 25 bp, Homo sapien
ttaacacccagcatgttccggtagg

SEQ ID NO: 1834960 - DNA, 25 bp, Homo sapien
ccttcgtggctatagcctgctgcct

SEQ ID NO: 1834961 - DNA, 25 bp, Homo sapien
tgggctgccgcagacttcctgatgg

SEQ ID NO: 1834962 - DNA, 25 bp, Homo sapien
tgaggccatagtgagttgtgattat

SEQ ID NO: 1834963 - DNA, 25 bp, Homo sapien
ggccatagtgagttgtgattatgcc

SEQ ID NO: 1834964 - DNA, 25 bp, Homo sapien
ttgaggccatagtgagttgtgatta

SEQ ID NO: 1834965 - DNA, 25 bp, Homo sapien
aggccatagtgagttgtgattatgc

SEQ ID NO: 1834966 - DNA, 25 bp, Homo sapien
gagcagggaatggaagtggtgatca

SEQ ID NO: 1834967 - DNA, 25 bp, Homo sapien
cttccatttctagctgtggagggca

SEQ ID NO: 1834968 - DNA, 25 bp, Homo sapien
gggcagcacacacagactgctgctg

SEQ ID NO: 1834969 - DNA, 25 bp, Homo sapien
ggtcaccaagatggagtccagcctt

SEQ ID NO: 1834970 - DNA, 25 bp, Homo sapien
taacctgccatagtaaaaggtctgc

SEQ ID NO: 1834971 - DNA, 25 bp, Homo sapien
gactttccattgtcttgtctttctg

SEQ ID NO: 1834972 - DNA, 25 bp, Homo sapien
tgcttattcaagaccaggacaagac

SEQ ID NO: 1834973 - DNA, 25 bp, Homo sapien
aaaatggctatttgtaacctgccat

SEQ ID NO: 1834974 - DNA, 25 bp, Homo sapien
gaagtgaagtctgttaagttaaaga

SEQ ID NO: 1834975 - DNA, 25 bp, Homo sapien
tagactagagtttgagtatttttct

SEQ ID NO: 1834976 - DNA, 25 bp, Homo sapien
ttggagatgttaactcttactgttt

SEQ ID NO: 1834977 - DNA, 25 bp, Homo sapien
ttgtgtgttgtatggcggagactta

SEQ ID NO: 1834978 - DNA, 25 bp, Homo sapien
atgatgctgacatagccatgtcctc

SEQ ID NO: 1834979 - DNA, 25 bp, Homo sapien
gacatagccatgtcctcctttaatc

SEQ ID NO: 1834980 - DNA, 25 bp, Homo sapien
aaacataatccatgatgctgacata

SEQ ID NO: 1834981 - DNA, 25 bp, Homo sapien
gtgccaaaaacataatccatgatgc

SEQ ID NO: 1834982 - DNA, 25 bp, Homo sapien
cgttctccgctgacacatacgggta

SEQ ID NO: 1834983 - DNA, 25 bp, Homo sapien
taattgatgttgtagacgttctccg

SEQ ID NO: 1834984 - DNA, 25 bp, Homo sapien
tgtagacgttctccgctgacacata

SEQ ID NO: 1834985 - DNA, 25 bp, Homo sapien
tccgctgacacatacgggtaacgga

SEQ ID NO: 1834986 - DNA, 25 bp, Homo sapien
caagggaagctcgtagacattgaac

SEQ ID NO: 1834987 - DNA, 25 bp, Homo sapien
aaaagggacaggctacagtcatttc

SEQ ID NO: 1834988 - DNA, 25 bp, Homo sapien
gacattgaacttgctctgatcagat

SEQ ID NO: 1834989 - DNA, 25 bp, Homo sapien
gagctcatcagagggaaaccaaggg

SEQ ID NO: 1834990 - DNA, 25 bp, Homo sapien
tctaaaatgaggtgcttcagtcagg

SEQ ID NO: 1834991 - DNA, 25 bp, Homo sapien
aggcagacgctattcaacacctggg

SEQ ID NO: 1834992 - DNA, 25 bp, Homo sapien
tcagtcaggacatttcgaaagaatt

SEQ ID NO: 1834993 - DNA, 25 bp, Homo sapien
gagcaaagcaatagtcacccacaag

SEQ ID NO: 1834994 - DNA, 25 bp, Homo sapien
ctgtagatgaggatttcttcttgtc

SEQ ID NO: 1834995 - DNA, 25 bp, Homo sapien
taagtgctaaggctgtagatgagga

SEQ ID NO: 1834996 - DNA, 25 bp, Homo sapien
aggctgtagatgaggatttcttctt

SEQ ID NO: 1834997 - DNA, 25 bp, Homo sapien
ttcttcttgtcggcctttaaacatc

SEQ ID NO: 1834998 - DNA, 25 bp, Homo sapien
gggtgagtaataaggagtgctttct

SEQ ID NO: 1834999 - DNA, 25 bp, Homo sapien
gatgtgggtgagtaataaggagtgc

SEQ ID NO: 1835000 - DNA, 25 bp, Homo sapien
ggtgagggatgtgggtgagtaataa

SEQ ID NO: 1835001 - DNA, 25 bp, Homo sapien
ctagtaagcccagggccaacgctgg

SEQ ID NO: 1835002 - DNA, 25 bp, Homo sapien
cacttgatcacgtgacagctgtttg

SEQ ID NO: 1835003 - DNA, 25 bp, Homo sapien
ctgcctgccacttgatcacgtgaca

SEQ ID NO: 1835004 - DNA, 25 bp, Homo sapien
tgccacttgatcacgtgacagctgt

SEQ ID NO: 1835005 - DNA, 25 bp, Homo sapien
cttgatcacgtgacagctgtttgca

SEQ ID NO: 1835006 - DNA, 25 bp, Homo sapien
tctgtggcttggagactgagactta

SEQ ID NO: 1835007 - DNA, 25 bp, Homo sapien
cacactcaggagctacatatggccg

SEQ ID NO: 1835008 - DNA, 25 bp, Homo sapien
cacaagtgtgtcacacgcaagggct

SEQ ID NO: 1835009 - DNA, 25 bp, Homo sapien
tgaatagctccctcgtttctgtggc

SEQ ID NO: 1835010 - DNA, 25 bp, Homo sapien
caggcccacagacagatttatcttg

SEQ ID NO: 1835011 - DNA, 25 bp, Homo sapien
cccacagacagatttatcttgagca

SEQ ID NO: 1835012 - DNA, 25 bp, Homo sapien
gacaggcccacagacagatttatct

SEQ ID NO: 1835013 - DNA, 25 bp, Homo sapien
ggcccacagacagatttatcttgag

SEQ ID NO: 1835014 - DNA, 25 bp, Homo sapien
gattcctgacacttggtaaataaaa

SEQ ID NO: 1835015 - DNA, 25 bp, Homo sapien
ggattcctgacacttggtaaataaa

SEQ ID NO: 1835016 - DNA, 25 bp, Homo sapien
ttaatgaaaccttctatccacccaa

SEQ ID NO: 1835017 - DNA, 25 bp, Homo sapien
taatgaaaccttctatccacccaag

SEQ ID NO: 1835018 - DNA, 25 bp, Homo sapien
attaatgaaaccttctatccaccca

SEQ ID NO: 1835019 - DNA, 25 bp, Homo sapien
aatgaaaccttctatccacccaagg

SEQ ID NO: 1835020 - DNA, 25 bp, Homo sapien
gttgccagccctcacttgacatctg

SEQ ID NO: 1835021 - DNA, 25 bp, Homo sapien
catctggcttgtgaggatgacttct

SEQ ID NO: 1835022 - DNA, 25 bp, Homo sapien
taattttgccccaacgttgccagcc

SEQ ID NO: 1835023 - DNA, 25 bp, Homo sapien
gctagctattgtttcttccgtcatt

SEQ ID NO: 1835024 - DNA, 25 bp, Homo sapien
gggtagagaaccatgctctagacgt

SEQ ID NO: 1835025 - DNA, 25 bp, Homo sapien
gctctagacgtttcttgttggtcat

SEQ ID NO: 1835026 - DNA, 25 bp, Homo sapien
tcgaatattaatctgaaagggagaa

SEQ ID NO: 1835027 - DNA, 25 bp, Homo sapien
tctccctgcaattttcgaatattaa

SEQ ID NO: 1835028 - DNA, 25 bp, Homo sapien
agggtaatacccttggccctgctgt

SEQ ID NO: 1835029 - DNA, 25 bp, Homo sapien
tgtggaatatttgccgtgtctgtgc

SEQ ID NO: 1835030 - DNA, 25 bp, Homo sapien
tatgtgggccttttccactgagttt

SEQ ID NO: 1835031 - DNA, 25 bp, Homo sapien
tactggtgcctgctgtatgtgggcc

SEQ ID NO: 1835032 - DNA, 25 bp, Homo sapien
cctgacttagctcatagaaggtttg

SEQ ID NO: 1835033 - DNA, 25 bp, Homo sapien
cccctcctgacttagctcatagaag

SEQ ID NO: 1835034 - DNA, 25 bp, Homo sapien
cctcctgacttagctcatagaaggt

SEQ ID NO: 1835035 - DNA, 25 bp, Homo sapien
gacttagctcatagaaggtttgtga

SEQ ID NO: 1835036 - DNA, 25 bp, Homo sapien
catctgttatgtgagggctcaaatg

SEQ ID NO: 1835037 - DNA, 25 bp, Homo sapien
ccatgagcctccacttatgcatcta

SEQ ID NO: 1835038 - DNA, 25 bp, Homo sapien
taagaaaccctaacctatctatgtc

SEQ ID NO: 1835039 - DNA, 25 bp, Homo sapien
gttagaaagagcatgactgctgact

SEQ ID NO: 1835040 - DNA, 25 bp, Homo sapien
acttttgacactggttctcactggc

SEQ ID NO: 1835041 - DNA, 25 bp, Homo sapien
aagtgacatcactgggagctcagca

SEQ ID NO: 1835042 - DNA, 25 bp, Homo sapien
tggcatcagtaactacatcagggac

SEQ ID NO: 1835043 - DNA, 25 bp, Homo sapien
agataccactggatgggaccgagca

SEQ ID NO: 1835044 - DNA, 25 bp, Homo sapien
tagtttactgtcatatggtcatgcc

SEQ ID NO: 1835045 - DNA, 25 bp, Homo sapien
tggtcatgcctcctctatgccctag

SEQ ID NO: 1835046 - DNA, 25 bp, Homo sapien
caggcaaggttgctacttcttagaa

SEQ ID NO: 1835047 - DNA, 25 bp, Homo sapien
ccaggtggcccttaagatcttgttc

SEQ ID NO: 1835048 - DNA, 25 bp, Homo sapien
gctgaaacgcacctccttcatctgg

SEQ ID NO: 1835049 - DNA, 25 bp, Homo sapien
ctgctctgaaactgccaaaacctac

SEQ ID NO: 1835050 - DNA, 25 bp, Homo sapien
tgctctgaaactgccaaaacctacc

SEQ ID NO: 1835051 - DNA, 25 bp, Homo sapien
tgaaactgctgaaacgcacctcctt

SEQ ID NO: 1835052 - DNA, 25 bp, Homo sapien
tcatcttgcactgggatctgccttc

SEQ ID NO: 1835053 - DNA, 25 bp, Homo sapien
cttgcactgggatttgccgcctcct

SEQ ID NO: 1835054 - DNA, 25 bp, Homo sapien
tcatcttgcactgggatctgcctcc

SEQ ID NO: 1835055 - DNA, 25 bp, Homo sapien
ttcctgcactggggtctgcctgctc

SEQ ID NO: 1835056 - DNA, 25 bp, Homo sapien
atcttgccctgaaatctgtctcctt

SEQ ID NO: 1835057 - DNA, 25 bp, Homo sapien
ctgctctggaacctgctactccttc

SEQ ID NO: 1835058 - DNA, 25 bp, Homo sapien
tgctctggaacctgctactccttct

SEQ ID NO: 1835059 - DNA, 25 bp, Homo sapien
cttttctgctctggaacctgtcttc

SEQ ID NO: 1835060 - DNA, 25 bp, Homo sapien
ctcttcttgctctggaacctgcctc

SEQ ID NO: 1835061 - DNA, 25 bp, Homo sapien
atttctgctctggaaccaactccct

SEQ ID NO: 1835062 - DNA, 25 bp, Homo sapien
tcacatttctgctctggaaccaact

SEQ ID NO: 1835063 - DNA, 25 bp, Homo sapien
gatgtatgttttcggtcctcttggt

SEQ ID NO: 1835064 - DNA, 25 bp, Homo sapien
tagtctctcttggacatcacttcct

SEQ ID NO: 1835065 - DNA, 25 bp, Homo sapien
ggaaactgtcccaatggttcaatta

SEQ ID NO: 1835066 - DNA, 25 bp, Homo sapien
taattctatgcctaacattctgagg

SEQ ID NO: 1835067 - DNA, 25 bp, Homo sapien
catatttggccagctactttctgag

SEQ ID NO: 1835068 - DNA, 25 bp, Homo sapien
atctttcatatttggccagctactt

SEQ ID NO: 1835069 - DNA, 25 bp, Homo sapien
atttggccagctactttctgagaac

SEQ ID NO: 1835070 - DNA, 25 bp, Homo sapien
ttcatatttggccagctactttctg

SEQ ID NO: 1835071 - DNA, 25 bp, Homo sapien
tggtagtgttgatttaagtagttct

SEQ ID NO: 1835072 - DNA, 25 bp, Homo sapien
tctggggcagcctgtttacctaata

SEQ ID NO: 1835073 - DNA, 25 bp, Homo sapien
ccttgactaccagagtttggtagtg

SEQ ID NO: 1835074 - DNA, 25 bp, Homo sapien
tggggcagcctgtttacctaataac

SEQ ID NO: 1835075 - DNA, 25 bp, Homo sapien
ctccctcctgttgttgtaccaaact

SEQ ID NO: 1835076 - DNA, 25 bp, Homo sapien
gggagaagcaggcaagatacagctt

SEQ ID NO: 1835077 - DNA, 25 bp, Homo sapien
gaagcaggcaagatacagcttgata

SEQ ID NO: 1835078 - DNA, 25 bp, Homo sapien
tgttgttgtaccaaactctttcttg

SEQ ID NO: 1835079 - DNA, 25 bp, Homo sapien
tttccataatgtattccaagcagcg

SEQ ID NO: 1835080 - DNA, 25 bp, Homo sapien
tccaagcagcgggacacctttcaca

SEQ ID NO: 1835081 - DNA, 25 bp, Homo sapien
atatcagaaatattcttgggttttc

SEQ ID NO: 1835082 - DNA, 25 bp, Homo sapien
cctgtgttaggggaatctggactaa

SEQ ID NO: 1835083 - DNA, 25 bp, Homo sapien
gactcgtaaatgatgtatttccacc

SEQ ID NO: 1835084 - DNA, 25 bp, Homo sapien
gtctggctaatgactgactcgtaaa

SEQ ID NO: 1835085 - DNA, 25 bp, Homo sapien
taacaaggtcatcccatgaaacttc

SEQ ID NO: 1835086 - DNA, 25 bp, Homo sapien
tgaaacttcagcacctgtgtttata

SEQ ID NO: 1835087 - DNA, 25 bp, Homo sapien
tttagattgcctactggatttccca

SEQ ID NO: 1835088 - DNA, 25 bp, Homo sapien
gctgatagcagaattgtcatttaga

SEQ ID NO: 1835089 - DNA, 25 bp, Homo sapien
tccacagatatgctgatagcagaat

SEQ ID NO: 1835090 - DNA, 25 bp, Homo sapien
ggatgatcccttgcctaaagctgtc

SEQ ID NO: 1835091 - DNA, 25 bp, Homo sapien
ctcttcactaggagactcagaacct

SEQ ID NO: 1835092 - DNA, 25 bp, Homo sapien
cttgccttgggtgaacacatgttac

SEQ ID NO: 1835093 - DNA, 25 bp, Homo sapien
ttcactaggagactcagaacctgca

SEQ ID NO: 1835094 - DNA, 25 bp, Homo sapien
cactaggagactcagaacctgcact

SEQ ID NO: 1835095 - DNA, 25 bp, Homo sapien
tcagtgcactatgccttcctgcttc

SEQ ID NO: 1835096 - DNA, 25 bp, Homo sapien
tcctgcttctctgcctctttgtctt

SEQ ID NO: 1835097 - DNA, 25 bp, Homo sapien
ttctctgcctctttgtcttcctcac

SEQ ID NO: 1835098 - DNA, 25 bp, Homo sapien
tgcttctctgcctctttgtcttcct

SEQ ID NO: 1835099 - DNA, 25 bp, Homo sapien
gcaatgctgtcggtttccccaaggt

SEQ ID NO: 1835100 - DNA, 25 bp, Homo sapien
cacttaactcggacatatgtagaca

SEQ ID NO: 1835101 - DNA, 25 bp, Homo sapien
aaaaatctcgtcctgtgatgcctcc

SEQ ID NO: 1835102 - DNA, 25 bp, Homo sapien
tccgggctgtctgcgttgtgtgaca

SEQ ID NO: 1835103 - DNA, 25 bp, Homo sapien
ccgcctggctggaatccgcctggag

SEQ ID NO: 1835104 - DNA, 25 bp, Homo sapien
gcctggagacctctttgtgatttcc

SEQ ID NO: 1835105 - DNA, 25 bp, Homo sapien
gctggaatccgcctggagacctctt

SEQ ID NO: 1835106 - DNA, 25 bp, Homo sapien
aatccgcctggagacctctttgtga

SEQ ID NO: 1835107 - DNA, 25 bp, Homo sapien
tttggagccgctggaatggaggcca

SEQ ID NO: 1835108 - DNA, 25 bp, Homo sapien
gccaccctcgtcttcgtcagcctct

SEQ ID NO: 1835109 - DNA, 25 bp, Homo sapien
cttgggagcaccacccggcagcagt

SEQ ID NO: 1835110 - DNA, 25 bp, Homo sapien
gaaaccttttggagccgctggaatg

SEQ ID NO: 1835111 - DNA, 25 bp, Homo sapien
ttttctttttcgtggcggcaggatc

SEQ ID NO: 1835112 - DNA, 25 bp, Homo sapien
tgagcacattggtagcagctcatgg

SEQ ID NO: 1835113 - DNA, 25 bp, Homo sapien
tccctctaaatgtctggagttggct

SEQ ID NO: 1835114 - DNA, 25 bp, Homo sapien
tttccagttgtaagcccatgtccct

SEQ ID NO: 1835115 - DNA, 25 bp, Homo sapien
tctgcagtagcattctggaggaatc

SEQ ID NO: 1835116 - DNA, 25 bp, Homo sapien
tagctgatagcataaggtgcaatag

SEQ ID NO: 1835117 - DNA, 25 bp, Homo sapien
tgcgatagcgtaaggtgcttttctc

SEQ ID NO: 1835118 - DNA, 25 bp, Homo sapien
caatagcataaggtgcgatagcgta

SEQ ID NO: 1835119 - DNA, 25 bp, Homo sapien
ctccttttggctttctcttctggca

SEQ ID NO: 1835120 - DNA, 25 bp, Homo sapien
ctcctacctccttttggctttctct

SEQ ID NO: 1835121 - DNA, 25 bp, Homo sapien
ccttttggctttctcttctggcatt

SEQ ID NO: 1835122 - DNA, 25 bp, Homo sapien
ttttggctttctcttctggcattgc

SEQ ID NO: 1835123 - DNA, 25 bp, Homo sapien
caaactcgcaggcagcttgtgactg

SEQ ID NO: 1835124 - DNA, 25 bp, Homo sapien
cttgtgactgcgggcatgctgtgct

SEQ ID NO: 1835125 - DNA, 25 bp, Homo sapien
gcagcttgtgactgcgggcatgctg

SEQ ID NO: 1835126 - DNA, 25 bp, Homo sapien
tgtgactgcgggcatgctgtgctga

SEQ ID NO: 1835127 - DNA, 25 bp, Homo sapien
tggctatagaaactgtcaggtggcc

SEQ ID NO: 1835128 - DNA, 25 bp, Homo sapien
gctatagaaactgtcaggtggcctt

SEQ ID NO: 1835129 - DNA, 25 bp, Homo sapien
tatagaaactgtcaggtggccttgc

SEQ ID NO: 1835130 - DNA, 25 bp, Homo sapien
atagaaactgtcaggtggccttgct

SEQ ID NO: 1835131 - DNA, 25 bp, Homo sapien
tttaatactgtatctctctgaggga

SEQ ID NO: 1835132 - DNA, 25 bp, Homo sapien
tctttgcagcaaatgaaggtgaact

SEQ ID NO: 1835133 - DNA, 25 bp, Homo sapien
gaatacagccaactatatggaacag

SEQ ID NO: 1835134 - DNA, 25 bp, Homo sapien
tgagtcttgacttctctcggaagag

SEQ ID NO: 1835135 - DNA, 25 bp, Homo sapien
aatgctgcgttgaaggtttgtcagc

SEQ ID NO: 1835136 - DNA, 25 bp, Homo sapien
atgctgcgttgaaggtttgtcagca

SEQ ID NO: 1835137 - DNA, 25 bp, Homo sapien
tgctgcgttgaaggtttgtcagcat

SEQ ID NO: 1835138 - DNA, 25 bp, Homo sapien
cagatgtcggttgcgatgactgtgt

SEQ ID NO: 1835139 - DNA, 25 bp, Homo sapien
ccacagatgtcggttgcgatgactg

SEQ ID NO: 1835140 - DNA, 25 bp, Homo sapien
tcttgcccacagatgtcggttgcga

SEQ ID NO: 1835141 - DNA, 25 bp, Homo sapien
cggcgtcttgcccacagatgtcggt

SEQ ID NO: 1835142 - DNA, 25 bp, Homo sapien
aacttgtagcactacagcagggcta

SEQ ID NO: 1835143 - DNA, 25 bp, Homo sapien
tactccaacggcctgtaacagcagt

SEQ ID NO: 1835144 - DNA, 25 bp, Homo sapien
tgccgttttggctttatcacccgga

SEQ ID NO: 1835145 - DNA, 25 bp, Homo sapien
tttgccagacactgccgttttggct

SEQ ID NO: 1835146 - DNA, 25 bp, Homo sapien
cgggctcaatttttacagttagtct

SEQ ID NO: 1835147 - DNA, 25 bp, Homo sapien
gctcaatttttacagttagtcttac

SEQ ID NO: 1835148 - DNA, 25 bp, Homo sapien
ggctcaatttttacagttagtctta

SEQ ID NO: 1835149 - DNA, 25 bp, Homo sapien
tgaccttccgggctcaatttttaca

SEQ ID NO: 1835150 - DNA, 25 bp, Homo sapien
tcttgctgtctgggtaggacagcat

SEQ ID NO: 1835151 - DNA, 25 bp, Homo sapien
ttccctaagtaactcttgctgtctg

SEQ ID NO: 1835152 - DNA, 25 bp, Homo sapien
tttccctaagtaactcttgctgtct

SEQ ID NO: 1835153 - DNA, 25 bp, Homo sapien
agtcctgtcccataagacccaacct

SEQ ID NO: 1835154 - DNA, 25 bp, Homo sapien
gtcctgtcccataagacccaacctg

SEQ ID NO: 1835155 - DNA, 25 bp, Homo sapien
tcctgtcccataagacccaacctgc

SEQ ID NO: 1835156 - DNA, 25 bp, Homo sapien
ctgtcccataagacccaacctgcat

SEQ ID NO: 1835157 - DNA, 25 bp, Homo sapien
gaaagctttccagcattgtatcttc

SEQ ID NO: 1835158 - DNA, 25 bp, Homo sapien
tctttgggcttgtgtattgctgagc

SEQ ID NO: 1835159 - DNA, 25 bp, Homo sapien
gaagttgtctgccatcaggcctcca

SEQ ID NO: 1835160 - DNA, 25 bp, Homo sapien
tcctgtctgtgtaatgaggcatata

SEQ ID NO: 1835161 - DNA, 25 bp, Homo sapien
tccaaacaactgatgtgaccatttc

SEQ ID NO: 1835162 - DNA, 25 bp, Homo sapien
gaccatttctcccttcaagggccag

SEQ ID NO: 1835163 - DNA, 25 bp, Homo sapien
tttccaaacaactgatgtgaccatt

SEQ ID NO: 1835164 - DNA, 25 bp, Homo sapien
tttctcccttcaagggccagccaca

SEQ ID NO: 1835165 - DNA, 25 bp, Homo sapien
tcggagctgatacctttggaggcaa

SEQ ID NO: 1835166 - DNA, 25 bp, Homo sapien
tactgttgtagtcaatactttcgga

SEQ ID NO: 1835167 - DNA, 25 bp, Homo sapien
caccattgcctagaatggtggatgc

SEQ ID NO: 1835168 - DNA, 25 bp, Homo sapien
agcacaggtgttaggctttctactg

SEQ ID NO: 1835169 - DNA, 25 bp, Homo sapien
aagtaggcatcagcacaccttgcag

SEQ ID NO: 1835170 - DNA, 25 bp, Homo sapien
acctcatatcttaaaattgagccag

SEQ ID NO: 1835171 - DNA, 25 bp, Homo sapien
cttttccaggtacctcatatcttaa

SEQ ID NO: 1835172 - DNA, 25 bp, Homo sapien
gagagacagatgatgaagtgaccta

SEQ ID NO: 1835173 - DNA, 25 bp, Homo sapien
accacttatgggcttcaatacaaag

SEQ ID NO: 1835174 - DNA, 25 bp, Homo sapien
ccccacaccagaatacaaaggatag

SEQ ID NO: 1835175 - DNA, 25 bp, Homo sapien
cttgagccctaagaggtgtatgtct

SEQ ID NO: 1835176 - DNA, 25 bp, Homo sapien
gaaacgtattttgtacgacaattgc

SEQ ID NO: 1835177 - DNA, 25 bp, Homo sapien
ctgtgaccagccaggtttatggata

SEQ ID NO: 1835178 - DNA, 25 bp, Homo sapien
cattgctaatgtgttctgtgaccag

SEQ ID NO: 1835179 - DNA, 25 bp, Homo sapien
ttttccttcagggttcagtgggcca

SEQ ID NO: 1835180 - DNA, 25 bp, Homo sapien
ctgagaggtatgcatcaaagcagtt

SEQ ID NO: 1835181 - DNA, 25 bp, Homo sapien
tcttcaaagtgtgcctacacaaatt

SEQ ID NO: 1835182 - DNA, 25 bp, Homo sapien
tctcttattacaacagtctggcttc

SEQ ID NO: 1835183 - DNA, 25 bp, Homo sapien
cttattacaacagtctggcttctgg

SEQ ID NO: 1835184 - DNA, 25 bp, Homo sapien
gtttcttcaaagtgtgcctacacaa

SEQ ID NO: 1835185 - DNA, 25 bp, Homo sapien
gagatgtgctgaaagcacttccctg

SEQ ID NO: 1835186 - DNA, 25 bp, Homo sapien
tcctttagctccctgcaggtattgc

SEQ ID NO: 1835187 - DNA, 25 bp, Homo sapien
tcctactctttatagcgagatgtgc

SEQ ID NO: 1835188 - DNA, 25 bp, Homo sapien
gcaatcgatgtacttctctcatgtg

SEQ ID NO: 1835189 - DNA, 25 bp, Homo sapien
gcacagctgctgataattggaggta

SEQ ID NO: 1835190 - DNA, 25 bp, Homo sapien
gaatacgcaaggtttgagcagccca

SEQ ID NO: 1835191 - DNA, 25 bp, Homo sapien
tcaggcctcagatcaaattggtaca

SEQ ID NO: 1835192 - DNA, 25 bp, Homo sapien
ggtacagcatgatccaaagcctcag

SEQ ID NO: 1835193 - DNA, 25 bp, Homo sapien
cctggaatgaggaggtatatcccca

SEQ ID NO: 1835194 - DNA, 25 bp, Homo sapien
tcaaagtccacatgacgtcacagtg

SEQ ID NO: 1835195 - DNA, 25 bp, Homo sapien
gcaaatatgtcctgatgatccgtag

SEQ ID NO: 1835196 - DNA, 25 bp, Homo sapien
caggcccattttagcaacgaatttg

SEQ ID NO: 1835197 - DNA, 25 bp, Homo sapien
tcatatgcaggccatcacagacagg

SEQ ID NO: 1835198 - DNA, 25 bp, Homo sapien
taaaacaggtggttcttgcatctca

SEQ ID NO: 1835199 - DNA, 25 bp, Homo sapien
tttggctctgtgagatgacccaggc

SEQ ID NO: 1835200 - DNA, 25 bp, Homo sapien
aataaattcaatgtggtggcccgga

SEQ ID NO: 1835201 - DNA, 25 bp, Homo sapien
cacagtgctgctcaatcgtgccgtt

SEQ ID NO: 1835202 - DNA, 25 bp, Homo sapien
gaagcagcctctgatccatgatcct

SEQ ID NO: 1835203 - DNA, 25 bp, Homo sapien
gctgacccaaatgcctggagttgac

SEQ ID NO: 1835204 - DNA, 25 bp, Homo sapien
gagttgaccctgtttgtctctccaa

SEQ ID NO: 1835205 - DNA, 25 bp, Homo sapien
catgtagagcaatatccaaatcctg

SEQ ID NO: 1835206 - DNA, 25 bp, Homo sapien
gcctcaatcgtttgttaccttttga

SEQ ID NO: 1835207 - DNA, 25 bp, Homo sapien
caggctttcccgtcatgtagagcaa

SEQ ID NO: 1835208 - DNA, 25 bp, Homo sapien
ccaaatcctgcctcaatcgtttgtt

SEQ ID NO: 1835209 - DNA, 25 bp, Homo sapien
gttgatggcgctcacatctattttg

SEQ ID NO: 1835210 - DNA, 25 bp, Homo sapien
tggaatgttgatggcgctcacatct

SEQ ID NO: 1835211 - DNA, 25 bp, Homo sapien
cacagtgtggaatgttgatggcgct

SEQ ID NO: 1835212 - DNA, 25 bp, Homo sapien
gatggcgctcacatctattttgtgt

SEQ ID NO: 1835213 - DNA, 25 bp, Homo sapien
agtctaaggtcaaaccactcacagg

SEQ ID NO: 1835214 - DNA, 25 bp, Homo sapien
tggaaaaaccgacttcctgacagtg

SEQ ID NO: 1835215 - DNA, 25 bp, Homo sapien
gtaacatttggagcccagccacact

SEQ ID NO: 1835216 - DNA, 25 bp, Homo sapien
tccaccttaaacttgccatttggtc

SEQ ID NO: 1835217 - DNA, 25 bp, Homo sapien
gtagcaatatccatgtggcttaagg

SEQ ID NO: 1835218 - DNA, 25 bp, Homo sapien
cacaggaaggtgctccagaaagcaa

SEQ ID NO: 1835219 - DNA, 25 bp, Homo sapien
caattgtttgctctcaccctgctga

SEQ ID NO: 1835220 - DNA, 25 bp, Homo sapien
agcaatatccatgtggcttaagggc

SEQ ID NO: 1835221 - DNA, 25 bp, Homo sapien
gaatattgcctgtgctgcttaccga

SEQ ID NO: 1835222 - DNA, 25 bp, Homo sapien
gcttaccgaagaaagggagcagtct

SEQ ID NO: 1835223 - DNA, 25 bp, Homo sapien
gaatgtcttcaagtatccacggcct

SEQ ID NO: 1835224 - DNA, 25 bp, Homo sapien
gacgaggctttcctactcgggtgaa

SEQ ID NO: 1835225 - DNA, 25 bp, Homo sapien
gaagccagaccgtctttcctcacag

SEQ ID NO: 1835226 - DNA, 25 bp, Homo sapien
catctccgtgggcacgcaagcttcc

SEQ ID NO: 1835227 - DNA, 25 bp, Homo sapien
cagctccacggctgcatctccgtgg

SEQ ID NO: 1835228 - DNA, 25 bp, Homo sapien
ccgtgggcacgcaagcttcccctgg

SEQ ID NO: 1835229 - DNA, 25 bp, Homo sapien
cgtggtgcacccgatcccggaatcg

SEQ ID NO: 1835230 - DNA, 25 bp, Homo sapien
ctcctgccgtctcccgcctgggctt

SEQ ID NO: 1835231 - DNA, 25 bp, Homo sapien
cgatcccggaatcgtgcgtctgcgc

SEQ ID NO: 1835232 - DNA, 25 bp, Homo sapien
ggtgcacccgatcccggaatcgtgc

SEQ ID NO: 1835233 - DNA, 25 bp, Homo sapien
gctgggcgaggggacttggaggaca

SEQ ID NO: 1835234 - DNA, 25 bp, Homo sapien
ggccggggtctcctgcctcgcagct

SEQ ID NO: 1835235 - DNA, 25 bp, Homo sapien
acctgctggcggagctccggccggg

SEQ ID NO: 1835236 - DNA, 25 bp, Homo sapien
ctgcgaaagaaggacctgctggcgg

SEQ ID NO: 1835237 - DNA, 25 bp, Homo sapien
agaggacgccaaggactggggaagg

SEQ ID NO: 1835238 - DNA, 25 bp, Homo sapien
caggctgttcccagggatttagtct

SEQ ID NO: 1835239 - DNA, 25 bp, Homo sapien
gctgttcccagggatttagtctggg

SEQ ID NO: 1835240 - DNA, 25 bp, Homo sapien
gcaagggcagccgtcgcctcggccg

SEQ ID NO: 1835241 - DNA, 25 bp, Homo sapien
gggcaagggcagccgtcgcctcggc

SEQ ID NO: 1835242 - DNA, 25 bp, Homo sapien
ggtatctgatgtatctgcctgagaa

SEQ ID NO: 1835243 - DNA, 25 bp, Homo sapien
gagctgaagatggataaacaaggta

SEQ ID NO: 1835244 - DNA, 25 bp, Homo sapien
ggataaacaaggtatctgatgtatc

SEQ ID NO: 1835245 - DNA, 25 bp, Homo sapien
ggagctgaagatggataaacaaggt

SEQ ID NO: 1835246 - DNA, 25 bp, Homo sapien
tcctgactagtgagacagcatggcc

SEQ ID NO: 1835247 - DNA, 25 bp, Homo sapien
aaagaaagagatgccgaatgccggg

SEQ ID NO: 1835248 - DNA, 25 bp, Homo sapien
cattctcattctagggaggatggca

SEQ ID NO: 1835249 - DNA, 25 bp, Homo sapien
aattgtagtctggatgtccccggcg

SEQ ID NO: 1835250 - DNA, 25 bp, Homo sapien
ccctcttgttatcagaggtagacat

SEQ ID NO: 1835251 - DNA, 25 bp, Homo sapien
tcttacgctgtcgaacccagttacc

SEQ ID NO: 1835252 - DNA, 25 bp, Homo sapien
cattgctccctgtgtaaatacaaga

SEQ ID NO: 1835253 - DNA, 25 bp, Homo sapien
tctacatatgtctgtgactgaccac

SEQ ID NO: 1835254 - DNA, 25 bp, Homo sapien
aaagtcaccaccaacaccgaattag

SEQ ID NO: 1835255 - DNA, 25 bp, Homo sapien
tccttactggcttaaccaaacacaa

SEQ ID NO: 1835256 - DNA, 25 bp, Homo sapien
tatcagcgctccttactggcttaac

SEQ ID NO: 1835257 - DNA, 25 bp, Homo sapien
cctctaaagcatgaacatctgtgtt

SEQ ID NO: 1835258 - DNA, 25 bp, Homo sapien
ttctggattatcagcgctccttact

SEQ ID NO: 1835259 - DNA, 25 bp, Homo sapien
tgtcaataacttccggttacctcca

SEQ ID NO: 1835260 - DNA, 25 bp, Homo sapien
tttgcctgtcaataacttccggtta

SEQ ID NO: 1835261 - DNA, 25 bp, Homo sapien
acctccagaaatacaacctacttca

SEQ ID NO: 1835262 - DNA, 25 bp, Homo sapien
tacctccagaaatacaacctacttc

SEQ ID NO: 1835263 - DNA, 25 bp, Homo sapien
gctgcagcgacaggcataaagctct

SEQ ID NO: 1835264 - DNA, 25 bp, Homo sapien
gctgacagtcgttctgggcttccca

SEQ ID NO: 1835265 - DNA, 25 bp, Homo sapien
tctgtataggaagctcccgatgctg

SEQ ID NO: 1835266 - DNA, 25 bp, Homo sapien
gctgaagtttggtcacctggttccc

SEQ ID NO: 1835267 - DNA, 25 bp, Homo sapien
tcgatgaggcatcatcctctcgctt

SEQ ID NO: 1835268 - DNA, 25 bp, Homo sapien
tctggcctttcgatgaggcatcatc

SEQ ID NO: 1835269 - DNA, 25 bp, Homo sapien
tggcctttcgatgaggcatcatcct

SEQ ID NO: 1835270 - DNA, 25 bp, Homo sapien
gatgaggcatcatcctctcgcttca

SEQ ID NO: 1835271 - DNA, 25 bp, Homo sapien
aatagtttcaagatgtctccagagc

SEQ ID NO: 1835272 - DNA, 25 bp, Homo sapien
tgcagagaatagtttcaagatgtct

SEQ ID NO: 1835273 - DNA, 25 bp, Homo sapien
gagaatagtttcaagatgtctccag

SEQ ID NO: 1835274 - DNA, 25 bp, Homo sapien
ctgcagagaatagtttcaagatgtc

SEQ ID NO: 1835275 - DNA, 25 bp, Homo sapien
gagtgagagggcaacccagctgtct

SEQ ID NO: 1835276 - DNA, 25 bp, Homo sapien
tgagtgagagggcaacccagctgtc

SEQ ID NO: 1835277 - DNA, 25 bp, Homo sapien
ctgagtgagagggcaacccagctgt

SEQ ID NO: 1835278 - DNA, 25 bp, Homo sapien
cacattggtgctgcatcaaagcctt

SEQ ID NO: 1835279 - DNA, 25 bp, Homo sapien
tgctccaatgttggtacaaccctgc

SEQ ID NO: 1835280 - DNA, 25 bp, Homo sapien
tttgaaaaccctttggatcacattg

SEQ ID NO: 1835281 - DNA, 25 bp, Homo sapien
gggaactgaccaggatgctacaaat

SEQ ID NO: 1835282 - DNA, 25 bp, Homo sapien
ctcctggtgaaaatctgggtctgaa

SEQ ID NO: 1835283 - DNA, 25 bp, Homo sapien
ctctggctcctggtgaaaatctggg

SEQ ID NO: 1835284 - DNA, 25 bp, Homo sapien
gggtctgaacccatagcaagtgagg

SEQ ID NO: 1835285 - DNA, 25 bp, Homo sapien
caaggcttcaccttctgagatgcag

SEQ ID NO: 1835286 - DNA, 25 bp, Homo sapien
ctgtgcccaggcccaaattctgtac

SEQ ID NO: 1835287 - DNA, 25 bp, Homo sapien
tcccatcttggctcccagactgcta

SEQ ID NO: 1835288 - DNA, 25 bp, Homo sapien
atcttggctcccagactgctaggat

SEQ ID NO: 1835289 - DNA, 25 bp, Homo sapien
ctaggctgatcgcaagctcctgggc

SEQ ID NO: 1835290 - DNA, 25 bp, Homo sapien
tcccagctattgtgaagcctccgac

SEQ ID NO: 1835291 - DNA, 25 bp, Homo sapien
ccagctattgtgaagcctccgacat

SEQ ID NO: 1835292 - DNA, 25 bp, Homo sapien
ctattgtgaagcctccgacatggtc

SEQ ID NO: 1835293 - DNA, 25 bp, Homo sapien
ttctcccagctattgtgaagcctcc

SEQ ID NO: 1835294 - DNA, 25 bp, Homo sapien
ctccagcgtaccctgcttttggaga

SEQ ID NO: 1835295 - DNA, 25 bp, Homo sapien
taggggccttgcctctccagcgtac

SEQ ID NO: 1835296 - DNA, 25 bp, Homo sapien
cgtaccctgcttttggagatcttgc

SEQ ID NO: 1835297 - DNA, 25 bp, Homo sapien
cttccttctcaagccccagtagggg

SEQ ID NO: 1835298 - DNA, 25 bp, Homo sapien
gaccgtggcaggactttgctttcca

SEQ ID NO: 1835299 - DNA, 25 bp, Homo sapien
gtcactattatgtcagcaggctagc

SEQ ID NO: 1835300 - DNA, 25 bp, Homo sapien
ccattattgatggagggaccgtggc

SEQ ID NO: 1835301 - DNA, 25 bp, Homo sapien
gctttccaatgtcactattatgtca

SEQ ID NO: 1835302 - DNA, 25 bp, Homo sapien
agcactagcaattccgcaactctgg

SEQ ID NO: 1835303 - DNA, 25 bp, Homo sapien
cttgacagcactagcaattccgcaa

SEQ ID NO: 1835304 - DNA, 25 bp, Homo sapien
caattccgcaactctggcgtgtgtc

SEQ ID NO: 1835305 - DNA, 25 bp, Homo sapien
cgcaactctggcgtgtgtctttgaa

SEQ ID NO: 1835306 - DNA, 25 bp, Homo sapien
gggaatgaccaaacgctagttgaac

SEQ ID NO: 1835307 - DNA, 25 bp, Homo sapien
catctgctgcacatcacgatgaggg

SEQ ID NO: 1835308 - DNA, 25 bp, Homo sapien
ggaaggaggacaacccaagccatct

SEQ ID NO: 1835309 - DNA, 25 bp, Homo sapien
gcttattgtaacacaattctgctgg

SEQ ID NO: 1835310 - DNA, 25 bp, Homo sapien
tgaggagcgtactgacataagggac

SEQ ID NO: 1835311 - DNA, 25 bp, Homo sapien
gcgtactgacataagggacctgaac

SEQ ID NO: 1835312 - DNA, 25 bp, Homo sapien
tcctggtgaggagcgtactgacata

SEQ ID NO: 1835313 - DNA, 25 bp, Homo sapien
ctgacataagggacctgaacacttc

SEQ ID NO: 1835314 - DNA, 25 bp, Homo sapien
gactgagagaatccaggatttggaa

SEQ ID NO: 1835315 - DNA, 25 bp, Homo sapien
ctgagagaatccaggatttggaaac

SEQ ID NO: 1835316 - DNA, 25 bp, Homo sapien
ggcacattccaagggactgagagaa

SEQ ID NO: 1835317 - DNA, 25 bp, Homo sapien
gggactgagagaatccaggatttgg

SEQ ID NO: 1835318 - DNA, 25 bp, Homo sapien
acagcttcccgtgtttagcctccga

SEQ ID NO: 1835319 - DNA, 25 bp, Homo sapien
tttctatgtttgtcgacaatgcgca

SEQ ID NO: 1835320 - DNA, 25 bp, Homo sapien
tcatatttcagtgtagttggagctc

SEQ ID NO: 1835321 - DNA, 25 bp, Homo sapien
tccgaatgccactttcccgcttctg

SEQ ID NO: 1835322 - DNA, 25 bp, Homo sapien
cctcatccccttcaaaaatcctaat

SEQ ID NO: 1835323 - DNA, 25 bp, Homo sapien
gttgcttagcaaccctcagcaggta

SEQ ID NO: 1835324 - DNA, 25 bp, Homo sapien
caggtagcaaggattcagctgcagc

SEQ ID NO: 1835325 - DNA, 25 bp, Homo sapien
gaaccttcttattactgtttgtgct

SEQ ID NO: 1835326 - DNA, 25 bp, Homo sapien
gaggtgaagaatcctgttcacccat

SEQ ID NO: 1835327 - DNA, 25 bp, Homo sapien
tgtagccaacagcttgaggtgaaga

SEQ ID NO: 1835328 - DNA, 25 bp, Homo sapien
agaatgtctgagtgtagccaacagc

SEQ ID NO: 1835329 - DNA, 25 bp, Homo sapien
tgtctgagtgtagccaacagcttga

SEQ ID NO: 1835330 - DNA, 25 bp, Homo sapien
tgtcacctttaacttgggaaggata

SEQ ID NO: 1835331 - DNA, 25 bp, Homo sapien
tggcccaatttggttgcaaggagta

SEQ ID NO: 1835332 - DNA, 25 bp, Homo sapien
tgagttttggcccaatttggttgca

SEQ ID NO: 1835333 - DNA, 25 bp, Homo sapien
ttttggcccaatttggttgcaagga

SEQ ID NO: 1835334 - DNA, 25 bp, Homo sapien
gcacttaatggtgctcccttgagtt

SEQ ID NO: 1835335 - DNA, 25 bp, Homo sapien
ttcttaacaataccctctgctcggt

SEQ ID NO: 1835336 - DNA, 25 bp, Homo sapien
caataccctctgctcggttagagct

SEQ ID NO: 1835337 - DNA, 25 bp, Homo sapien
tctgctcggttagagctgtcactga

SEQ ID NO: 1835338 - DNA, 25 bp, Homo sapien
tcggttagagctgtcactgactggc

SEQ ID NO: 1835339 - DNA, 25 bp, Homo sapien
tacacccaagcatggattcaaaaga

SEQ ID NO: 1835340 - DNA, 25 bp, Homo sapien
caatggaacggatcattaaggacct

SEQ ID NO: 1835341 - DNA, 25 bp, Homo sapien
gatacaactaaaagaagcttgcaat

SEQ ID NO: 1835342 - DNA, 25 bp, Homo sapien
cattaaggaccttctcagaaataga

SEQ ID NO: 1835343 - DNA, 25 bp, Homo sapien
atgattcggcacttcaggagcttga

SEQ ID NO: 1835344 - DNA, 25 bp, Homo sapien
tgttgtggatgattcggcacttcag

SEQ ID NO: 1835345 - DNA, 25 bp, Homo sapien
ataattgtcgattttatgtgaatcc

SEQ ID NO: 1835346 - DNA, 25 bp, Homo sapien
gagcttgagataattgtcgatttta

SEQ ID NO: 1835347 - DNA, 25 bp, Homo sapien
taataagcagaaaggcgagactctt

SEQ ID NO: 1835348 - DNA, 25 bp, Homo sapien
gcagtggagcaggttataataagca

SEQ ID NO: 1835349 - DNA, 25 bp, Homo sapien
cagaaaggcgagactcttcatcagc

SEQ ID NO: 1835350 - DNA, 25 bp, Homo sapien
ggcagtggagcaggttataataagc

SEQ ID NO: 1835351 - DNA, 25 bp, Homo sapien
gaagtcccgaccagacagggtagat

SEQ ID NO: 1835352 - DNA, 25 bp, Homo sapien
gatggaagtcccgaccagacagggt

SEQ ID NO: 1835353 - DNA, 25 bp, Homo sapien
cccgaccagacagggtagatctcat

SEQ ID NO: 1835354 - DNA, 25 bp, Homo sapien
ctgcagggatggaagtcccgaccag

SEQ ID NO: 1835355 - DNA, 25 bp, Homo sapien
ttatcatcacagaggtcaccgctta

SEQ ID NO: 1835356 - DNA, 25 bp, Homo sapien
gacacctgtcaaacagcattctaag

SEQ ID NO: 1835357 - DNA, 25 bp, Homo sapien
tgactatgaatgactaggctcttgc

SEQ ID NO: 1835358 - DNA, 25 bp, Homo sapien
tagcggtctataatatggaatgcct

SEQ ID NO: 1835359 - DNA, 25 bp, Homo sapien
ctctagaagccgtttggtttgctcc

SEQ ID NO: 1835360 - DNA, 25 bp, Homo sapien
ccatgccctctagaagccgtttggt

SEQ ID NO: 1835361 - DNA, 25 bp, Homo sapien
tggctgactatcagctccatgccct

SEQ ID NO: 1835362 - DNA, 25 bp, Homo sapien
gaagccgtttggtttgctcctcaat

SEQ ID NO: 1835363 - DNA, 25 bp, Homo sapien
agctttggataggatagcctccggg

SEQ ID NO: 1835364 - DNA, 25 bp, Homo sapien
gaggctcattccaggatcgcaatat

SEQ ID NO: 1835365 - DNA, 25 bp, Homo sapien
tccgtgaccagatgatacagaggct

SEQ ID NO: 1835366 - DNA, 25 bp, Homo sapien
gggcttcttgcataccacgtacttc

SEQ ID NO: 1835367 - DNA, 25 bp, Homo sapien
cttggtaatgaacccccggccatgg

SEQ ID NO: 1835368 - DNA, 25 bp, Homo sapien
tgatggccttggtaatgaacccccg

SEQ ID NO: 1835369 - DNA, 25 bp, Homo sapien
caagggaagaagtgtggcagctgtt

SEQ ID NO: 1835370 - DNA, 25 bp, Homo sapien
ttgctccttgtcttcgggggtggca

SEQ ID NO: 1835371 - DNA, 25 bp, Homo sapien
gatagacttctcttaataggcatta

SEQ ID NO: 1835372 - DNA, 25 bp, Homo sapien
aactgatagacttctcttaataggc

SEQ ID NO: 1835373 - DNA, 25 bp, Homo sapien
gtgtgcccaaactgatagacttctc

SEQ ID NO: 1835374 - DNA, 25 bp, Homo sapien
taataggcattataaaatcataact

SEQ ID NO: 1835375 - DNA, 25 bp, Homo sapien
aaagatggccagtcaaaaatggagg

SEQ ID NO: 1835376 - DNA, 25 bp, Homo sapien
tgctccttgattgacctagaagagt

SEQ ID NO: 1835377 - DNA, 25 bp, Homo sapien
tgtatgtttattctctgtggaggcc

SEQ ID NO: 1835378 - DNA, 25 bp, Homo sapien
aaaataattcagaaacacagggcac

SEQ ID NO: 1835379 - DNA, 25 bp, Homo sapien
gaggttttctaggttaacatgtagc

SEQ ID NO: 1835380 - DNA, 25 bp, Homo sapien
cacatgttaaaatgtatcgtttgaa

SEQ ID NO: 1835381 - DNA, 25 bp, Homo sapien
gatttcatggcactgtccctttctt

SEQ ID NO: 1835382 - DNA, 25 bp, Homo sapien
gcccagtagttcatgtgaaggctcc

SEQ ID NO: 1835383 - DNA, 25 bp, Homo sapien
tctcgaagggtcacctggcatcggg

SEQ ID NO: 1835384 - DNA, 25 bp, Homo sapien
tatggatgtagtgggacaggacgac

SEQ ID NO: 1835385 - DNA, 25 bp, Homo sapien
gctgaacatttctgaggagaggtta

SEQ ID NO: 1835386 - DNA, 25 bp, Homo sapien
gacgacggcgcggtcaaacaggtct

SEQ ID NO: 1835387 - DNA, 25 bp, Homo sapien
cacaggagcaggtttgacaccagca

SEQ ID NO: 1835388 - DNA, 25 bp, Homo sapien
acaggagcaggtttgacaccagcag

SEQ ID NO: 1835389 - DNA, 25 bp, Homo sapien
ttttcagaagtaatcctgccgagga

SEQ ID NO: 1835390 - DNA, 25 bp, Homo sapien
cagaagtaatcctgccgaggaaagc

SEQ ID NO: 1835391 - DNA, 25 bp, Homo sapien
cgcgagccactctgagatgatttat

SEQ ID NO: 1835392 - DNA, 25 bp, Homo sapien
cttaaataagaacgcgagccactct

SEQ ID NO: 1835393 - DNA, 25 bp, Homo sapien
ggcttgaaccaaattgacaaagaat

SEQ ID NO: 1835394 - DNA, 25 bp, Homo sapien
aaatgttactttgtccctttgagag

SEQ ID NO: 1835395 - DNA, 25 bp, Homo sapien
cacattagaggcctgataaccagaa

SEQ ID NO: 1835396 - DNA, 25 bp, Homo sapien
catcaggttgattcaagttggccaa

SEQ ID NO: 1835397 - DNA, 25 bp, Homo sapien
ctttccatggcgatcctttgatgtt

SEQ ID NO: 1835398 - DNA, 25 bp, Homo sapien
ttccatggcgatcctttgatgttca

SEQ ID NO: 1835399 - DNA, 25 bp, Homo sapien
tttccatggcgatcctttgatgttc

SEQ ID NO: 1835400 - DNA, 25 bp, Homo sapien
gaagatctggaagtctcacggtttt

SEQ ID NO: 1835401 - DNA, 25 bp, Homo sapien
aagatctggaagtctcacggttttc

SEQ ID NO: 1835402 - DNA, 25 bp, Homo sapien
tttcctggtcatctatttccgtcat

SEQ ID NO: 1835403 - DNA, 25 bp, Homo sapien
atgaatcaggcattcgtttcccttt

SEQ ID NO: 1835404 - DNA, 25 bp, Homo sapien
ttttcctggtcatctatttccgtca

SEQ ID NO: 1835405 - DNA, 25 bp, Homo sapien
gaatcaggcattcgtttcccttttc

SEQ ID NO: 1835406 - DNA, 25 bp, Homo sapien
ggtaacaatctcatgtattatcagt

SEQ ID NO: 1835407 - DNA, 25 bp, Homo sapien
gatctgagactagattggtttggag

SEQ ID NO: 1835408 - DNA, 25 bp, Homo sapien
tcttcctcaagattgctaggtaaag

SEQ ID NO: 1835409 - DNA, 25 bp, Homo sapien
ggattatatttcacttaggtaacaa

SEQ ID NO: 1835410 - DNA, 25 bp, Homo sapien
ccatgcatctaaagcagcctgtgac

SEQ ID NO: 1835411 - DNA, 25 bp, Homo sapien
ttagttcctagagccacatatgtgc

SEQ ID NO: 1835412 - DNA, 25 bp, Homo sapien
tggatagccaggataagagcaatct

SEQ ID NO: 1835413 - DNA, 25 bp, Homo sapien
caggattccatatactcacattagg

SEQ ID NO: 1835414 - DNA, 25 bp, Homo sapien
gaaggttcttatgacctactttata

SEQ ID NO: 1835415 - DNA, 25 bp, Homo sapien
tctttgagggtacttctggaatgaa

SEQ ID NO: 1835416 - DNA, 25 bp, Homo sapien
ggaatgaaggttcttatgacctact

SEQ ID NO: 1835417 - DNA, 25 bp, Homo sapien
atgaaggttcttatgacctacttta

SEQ ID NO: 1835418 - DNA, 25 bp, Homo sapien
tttcatcctaattttcctcttttca

SEQ ID NO: 1835419 - DNA, 25 bp, Homo sapien
tgtggatttttgttttcatcctaat

SEQ ID NO: 1835420 - DNA, 25 bp, Homo sapien
ttctgtggatttttgttttcatcct

SEQ ID NO: 1835421 - DNA, 25 bp, Homo sapien
catcctaattttcctcttttcaggg

SEQ ID NO: 1835422 - DNA, 25 bp, Homo sapien
taaatgaagtgagttggttacccac

SEQ ID NO: 1835423 - DNA, 25 bp, Homo sapien
caatataggagagatgtatgtgcct

SEQ ID NO: 1835424 - DNA, 25 bp, Homo sapien
tggtgcacgaatgtacagcatgctg

SEQ ID NO: 1835425 - DNA, 25 bp, Homo sapien
caggctcttctagttgggtggacac

SEQ ID NO: 1835426 - DNA, 25 bp, Homo sapien
tgtttccacagtgagttgactggca

SEQ ID NO: 1835427 - DNA, 25 bp, Homo sapien
cacagtgagttgactggcagatgat

SEQ ID NO: 1835428 - DNA, 25 bp, Homo sapien
tcaggtcttgtttccacagtgagtt

SEQ ID NO: 1835429 - DNA, 25 bp, Homo sapien
ttgtgctttgagcttgctggggact

SEQ ID NO: 1835430 - DNA, 25 bp, Homo sapien
cacgtagcatagaaagtccacctcc

SEQ ID NO: 1835431 - DNA, 25 bp, Homo sapien
tgttaacacgtagcatagaaagtcc

SEQ ID NO: 1835432 - DNA, 25 bp, Homo sapien
gatcagaactgtgtccttataaatg

SEQ ID NO: 1835433 - DNA, 25 bp, Homo sapien
tatatgtgtgttaacacgtagcata

SEQ ID NO: 1835434 - DNA, 25 bp, Homo sapien
caatgcgacactggccacacttatt

SEQ ID NO: 1835435 - DNA, 25 bp, Homo sapien
tacatcgtaatagacaatgcgacac

SEQ ID NO: 1835436 - DNA, 25 bp, Homo sapien
cacacttattcccatttgcattggg

SEQ ID NO: 1835437 - DNA, 25 bp, Homo sapien
tataggcaatttctacatcgtaata

SEQ ID NO: 1835438 - DNA, 25 bp, Homo sapien
acttttttggtgtcacctgcgccat

SEQ ID NO: 1835439 - DNA, 25 bp, Homo sapien
tggtttctggaacatcggttcttct

SEQ ID NO: 1835440 - DNA, 25 bp, Homo sapien
aacttttttggtgtcacctgcgcca

SEQ ID NO: 1835441 - DNA, 25 bp, Homo sapien
gggcactcaacaaggatgaagaact

SEQ ID NO: 1835442 - DNA, 25 bp, Homo sapien
tccccacagggcactcaacaaggat

SEQ ID NO: 1835443 - DNA, 25 bp, Homo sapien
tgtccacactggcatgattaagtgg

SEQ ID NO: 1835444 - DNA, 25 bp, Homo sapien
aactgagttacccttgacaagtcag

SEQ ID NO: 1835445 - DNA, 25 bp, Homo sapien
gggcctgccatttgcggacagcact

SEQ ID NO: 1835446 - DNA, 25 bp, Homo sapien
tgccatttgcggacagcactgaggt

SEQ ID NO: 1835447 - DNA, 25 bp, Homo sapien
gaacaactccagacaacactattag

SEQ ID NO: 1835448 - DNA, 25 bp, Homo sapien
tggaacaactccagacaacactatt

SEQ ID NO: 1835449 - DNA, 25 bp, Homo sapien
taccttgaaccacacaattcagatg

SEQ ID NO: 1835450 - DNA, 25 bp, Homo sapien
tcaaaactacccctgcaggagcggg

SEQ ID NO: 1835451 - DNA, 25 bp, Homo sapien
tatattatgcatcctgtccacaagt

SEQ ID NO: 1835452 - DNA, 25 bp, Homo sapien
agtgcttctcccaggcgaaaaccac

SEQ ID NO: 1835453 - DNA, 25 bp, Homo sapien
caatacctaatggataatgacggga

SEQ ID NO: 1835454 - DNA, 25 bp, Homo sapien
gcacatgttgacacccgtggtcttt

SEQ ID NO: 1835455 - DNA, 25 bp, Homo sapien
caaggtgccctgctagtgcacaata

SEQ ID NO: 1835456 - DNA, 25 bp, Homo sapien
gctcagtgcaatgagagtccccatg

SEQ ID NO: 1835457 - DNA, 25 bp, Homo sapien
tgctgcctctaaaggtctggtcccc

SEQ ID NO: 1835458 - DNA, 25 bp, Homo sapien
agtgagtcaccgcttggctgaacag

SEQ ID NO: 1835459 - DNA, 25 bp, Homo sapien
ctgctgcctctaaaggtctggtccc

SEQ ID NO: 1835460 - DNA, 25 bp, Homo sapien
tcaccgcttggctgaacagacacag

SEQ ID NO: 1835461 - DNA, 25 bp, Homo sapien
gagcagcatcatttagtggaggctg

SEQ ID NO: 1835462 - DNA, 25 bp, Homo sapien
ccttaagatccttggattggagcct

SEQ ID NO: 1835463 - DNA, 25 bp, Homo sapien
gcattggagggctttaagggtttca

SEQ ID NO: 1835464 - DNA, 25 bp, Homo sapien
cacagcctcaggtactttttcattc

SEQ ID NO: 1835465 - DNA, 25 bp, Homo sapien
ccagcattcttgtatataacaaatt

SEQ ID NO: 1835466 - DNA, 25 bp, Homo sapien
agcattcttgtatataacaaattac

SEQ ID NO: 1835467 - DNA, 25 bp, Homo sapien
cagcattcttgtatataacaaatta

SEQ ID NO: 1835468 - DNA, 25 bp, Homo sapien
gccttgtaccaccaggattgtttat

SEQ ID NO: 1835469 - DNA, 25 bp, Homo sapien
ccttgtaccaccaggattgtttatt

SEQ ID NO: 1835470 - DNA, 25 bp, Homo sapien
taaaccatatcttgaccccatctaa

SEQ ID NO: 1835471 - DNA, 25 bp, Homo sapien
tcagtacgtccaaacttgtcacagg

SEQ ID NO: 1835472 - DNA, 25 bp, Homo sapien
gggatatagactcaaataaaccata

SEQ ID NO: 1835473 - DNA, 25 bp, Homo sapien
aatccttggtaatatcagtacgtcc

SEQ ID NO: 1835474 - DNA, 25 bp, Homo sapien
ttagtagttagtcaaagattcatct

SEQ ID NO: 1835475 - DNA, 25 bp, Homo sapien
agttagtcaaagattcatcttcatc

SEQ ID NO: 1835476 - DNA, 25 bp, Homo sapien
ttcggtaatgttgaagcgattgttt

SEQ ID NO: 1835477 - DNA, 25 bp, Homo sapien
gaagcgattgtttcatagactatgc

SEQ ID NO: 1835478 - DNA, 25 bp, Homo sapien
cagccttttgacagctggcccagct

SEQ ID NO: 1835479 - DNA, 25 bp, Homo sapien
ccttttgacagctggcccagctggc

SEQ ID NO: 1835480 - DNA, 25 bp, Homo sapien
agccttttgacagctggcccagctg

SEQ ID NO: 1835481 - DNA, 25 bp, Homo sapien
tcagccttttgacagctggcccagc

SEQ ID NO: 1835482 - DNA, 25 bp, Homo sapien
gtctaggttctttttgtgccaaatg

SEQ ID NO: 1835483 - DNA, 25 bp, Homo sapien
gccctgcggacacaacacgttgagg

SEQ ID NO: 1835484 - DNA, 25 bp, Homo sapien
tagttcagagcaaaagtgggccctg

SEQ ID NO: 1835485 - DNA, 25 bp, Homo sapien
acgttgagggctttttgaatgatcc

SEQ ID NO: 1835486 - DNA, 25 bp, Homo sapien
acattcttggagggtttttgataga

SEQ ID NO: 1835487 - DNA, 25 bp, Homo sapien
cacattcttggagggtttttgatag

SEQ ID NO: 1835488 - DNA, 25 bp, Homo sapien
cattcttggagggtttttgatagaa

SEQ ID NO: 1835489 - DNA, 25 bp, Homo sapien
gggctgcttcaacataagaagaaca

SEQ ID NO: 1835490 - DNA, 25 bp, Homo sapien
ggctgcttcaacataagaagaacag

SEQ ID NO: 1835491 - DNA, 25 bp, Homo sapien
cataagaagaacagacttcaatggc

SEQ ID NO: 1835492 - DNA, 25 bp, Homo sapien
tgggctgcttcaacataagaagaac

SEQ ID NO: 1835493 - DNA, 25 bp, Homo sapien
tgcataagatgagatgggcgggtaa

SEQ ID NO: 1835494 - DNA, 25 bp, Homo sapien
cataagatgagatgggcgggtaatc

SEQ ID NO: 1835495 - DNA, 25 bp, Homo sapien
cgggtaatcaggcactgaaaatcca

SEQ ID NO: 1835496 - DNA, 25 bp, Homo sapien
atgggcgggtaatcaggcactgaaa

SEQ ID NO: 1835497 - DNA, 25 bp, Homo sapien
attccatgatatcttgctctgggcc

SEQ ID NO: 1835498 - DNA, 25 bp, Homo sapien
cttgggttgttaagatgctggcttc

SEQ ID NO: 1835499 - DNA, 25 bp, Homo sapien
tattttgcactaaagagactgtgaa

SEQ ID NO: 1835500 - DNA, 25 bp, Homo sapien
ctctgaccaaaaggtgttgtcactt

SEQ ID NO: 1835501 - DNA, 25 bp, Homo sapien
tgtgctctgggttgttcggtcacat

SEQ ID NO: 1835502 - DNA, 25 bp, Homo sapien
aaattggccaaagaactcaggatcg

SEQ ID NO: 1835503 - DNA, 25 bp, Homo sapien
tcaggatcgtctcttccctgctgtg

SEQ ID NO: 1835504 - DNA, 25 bp, Homo sapien
tcggtcacattgtcatgacagttct

SEQ ID NO: 1835505 - DNA, 25 bp, Homo sapien
ttattaagttaagctcctgagggag

SEQ ID NO: 1835506 - DNA, 25 bp, Homo sapien
gctgtaggctcgatggttaatgaaa

SEQ ID NO: 1835507 - DNA, 25 bp, Homo sapien
tcctgacccacgctgaattgtttta

SEQ ID NO: 1835508 - DNA, 25 bp, Homo sapien
taaggtcttagttccatggtgccat

SEQ ID NO: 1835509 - DNA, 25 bp, Homo sapien
cgtggactgagagtaatttagacat

SEQ ID NO: 1835510 - DNA, 25 bp, Homo sapien
cactcagaatcatcgtggactgaga

SEQ ID NO: 1835511 - DNA, 25 bp, Homo sapien
tgcaagccttgtacagagacatcta

SEQ ID NO: 1835512 - DNA, 25 bp, Homo sapien
gacatctacagcactatcataaata

SEQ ID NO: 1835513 - DNA, 25 bp, Homo sapien
catgttactatagatgacatcacac

SEQ ID NO: 1835514 - DNA, 25 bp, Homo sapien
acatgattgtaacttgcctcatctg

SEQ ID NO: 1835515 - DNA, 25 bp, Homo sapien
ctgtaatggatactgtgcaggtttc

SEQ ID NO: 1835516 - DNA, 25 bp, Homo sapien
tttcagaagagggtttgtgttggct

SEQ ID NO: 1835517 - DNA, 25 bp, Homo sapien
tgagttttatcccctgcccgccctc

SEQ ID NO: 1835518 - DNA, 25 bp, Homo sapien
ggcacctgagttttatcccctgccc

SEQ ID NO: 1835519 - DNA, 25 bp, Homo sapien
cacctgagttttatcccctgcccgc

SEQ ID NO: 1835520 - DNA, 25 bp, Homo sapien
ctgcccgccctcccttctttccctg

SEQ ID NO: 1835521 - DNA, 25 bp, Homo sapien
ctcctggacgtgcacatgctggcgg

SEQ ID NO: 1835522 - DNA, 25 bp, Homo sapien
ttggatttcggcctcgcctcctgga

SEQ ID NO: 1835523 - DNA, 25 bp, Homo sapien
attctgcagcgccacttggatttcg

SEQ ID NO: 1835524 - DNA, 25 bp, Homo sapien
ctggcggagcgaggctccttctgct

SEQ ID NO: 1835525 - DNA, 25 bp, Homo sapien
tattggccctgggataaggccccat

SEQ ID NO: 1835526 - DNA, 25 bp, Homo sapien
gcagcttgacagcagtggcttcttt

SEQ ID NO: 1835527 - DNA, 25 bp, Homo sapien
gcttgacagcagtggcttctttatt

SEQ ID NO: 1835528 - DNA, 25 bp, Homo sapien
gtggcttctttattggccctgggat

SEQ ID NO: 1835529 - DNA, 25 bp, Homo sapien
cctgttcggttctccctgatacatg

SEQ ID NO: 1835530 - DNA, 25 bp, Homo sapien
agcctccacccatgcctgttgccac

SEQ ID NO: 1835531 - DNA, 25 bp, Homo sapien
gggaatccaaatagctccaaaggca

SEQ ID NO: 1835532 - DNA, 25 bp, Homo sapien
caaaggcatcctctgaccccagtgg

SEQ ID NO: 1835533 - DNA, 25 bp, Homo sapien
tgtctgggaatccaaatagctccaa

SEQ ID NO: 1835534 - DNA, 25 bp, Homo sapien
ccccagtggcaggtgtctgagtcat

SEQ ID NO: 1835535 - DNA, 25 bp, Homo sapien
tccacaatgctaccttcatgaggag

SEQ ID NO: 1835536 - DNA, 25 bp, Homo sapien
aggagggcatatgccctaatgccca

SEQ ID NO: 1835537 - DNA, 25 bp, Homo sapien
tgagcaggaggatgttccacaatgc

SEQ ID NO: 1835538 - DNA, 25 bp, Homo sapien
tcatgaggagggcatatgccctaat

SEQ ID NO: 1835539 - DNA, 25 bp, Homo sapien
tgccggttggtttgcattcagatcc

SEQ ID NO: 1835540 - DNA, 25 bp, Homo sapien
ctgccggttggtttgcattcagatc

SEQ ID NO: 1835541 - DNA, 25 bp, Homo sapien
cctctccaactatgactagaccaaa

SEQ ID NO: 1835542 - DNA, 25 bp, Homo sapien
gattttgggtcgatgattataggct

SEQ ID NO: 1835543 - DNA, 25 bp, Homo sapien
caactatgactagaccaaaggctac

SEQ ID NO: 1835544 - DNA, 25 bp, Homo sapien
ggtcgatgattataggctcctggag

SEQ ID NO: 1835545 - DNA, 25 bp, Homo sapien
tagcttttaggtgatgaattaatta

SEQ ID NO: 1835546 - DNA, 25 bp, Homo sapien
ttagcttttaggtgatgaattaatt

SEQ ID NO: 1835547 - DNA, 25 bp, Homo sapien
taacatcactgtcaatgggaacagt

SEQ ID NO: 1835548 - DNA, 25 bp, Homo sapien
ataaaaatctatcaatccctgcttc

SEQ ID NO: 1835549 - DNA, 25 bp, Homo sapien
caaagtaatgtatgtgatgtaacta

SEQ ID NO: 1835550 - DNA, 25 bp, Homo sapien
taactagttgggaagtgctgataaa

SEQ ID NO: 1835551 - DNA, 25 bp, Homo sapien
taaaatgtaggtattgctcaggagc

SEQ ID NO: 1835552 - DNA, 25 bp, Homo sapien
ctttcattgcaactattctgcttgg

SEQ ID NO: 1835553 - DNA, 25 bp, Homo sapien
gcaactattctgcttgggctttctg

SEQ ID NO: 1835554 - DNA, 25 bp, Homo sapien
tgaatctgagtattccaggtcttcc

SEQ ID NO: 1835555 - DNA, 25 bp, Homo sapien
ggaagtccttgccagccaaactctg

SEQ ID NO: 1835556 - DNA, 25 bp, Homo sapien
caaactctggattagattcaacagc

SEQ ID NO: 1835557 - DNA, 25 bp, Homo sapien
acagcaagagacatttgcccatgat

SEQ ID NO: 1835558 - DNA, 25 bp, Homo sapien
ttgcccatgatctggcaggctgctg

SEQ ID NO: 1835559 - DNA, 25 bp, Homo sapien
gatgaactgaaatttggcatccact

SEQ ID NO: 1835560 - DNA, 25 bp, Homo sapien
ccactttggaactgttgtctactgt

SEQ ID NO: 1835561 - DNA, 25 bp, Homo sapien
cagggttgatctgagaccatggcag

SEQ ID NO: 1835562 - DNA, 25 bp, Homo sapien
gttgagtccagggttgatctgagac

SEQ ID NO: 1835563 - DNA, 25 bp, Homo sapien
agcagaaatctgaatgctagttgac

SEQ ID NO: 1835564 - DNA, 25 bp, Homo sapien
gcagaaatctgaatgctagttgacc

SEQ ID NO: 1835565 - DNA, 25 bp, Homo sapien
cagaaatctgaatgctagttgacct

SEQ ID NO: 1835566 - DNA, 25 bp, Homo sapien
gaaatctgaatgctagttgaccttt

SEQ ID NO: 1835567 - DNA, 25 bp, Homo sapien
ctcactatgaatttcctgggacaaa

SEQ ID NO: 1835568 - DNA, 25 bp, Homo sapien
tctcatcaaagagtggattgcgttc

SEQ ID NO: 1835569 - DNA, 25 bp, Homo sapien
gggtctgctgcttaatccatgtggg

SEQ ID NO: 1835570 - DNA, 25 bp, Homo sapien
caaaatagcataggtcatatccaag

SEQ ID NO: 1835571 - DNA, 25 bp, Homo sapien
gaattcagggagactcaaaaccagc

SEQ ID NO: 1835572 - DNA, 25 bp, Homo sapien
catggacagcatgtaggaattcagg

SEQ ID NO: 1835573 - DNA, 25 bp, Homo sapien
gatggccctgatgcttgattcctta

SEQ ID NO: 1835574 - DNA, 25 bp, Homo sapien
tattacaaggacttgcatggacagc

SEQ ID NO: 1835575 - DNA, 25 bp, Homo sapien
ctggtaaaaggttgtagaggaatag

SEQ ID NO: 1835576 - DNA, 25 bp, Homo sapien
taaaaggttgtagaggaatagcgaa

SEQ ID NO: 1835577 - DNA, 25 bp, Homo sapien
ttgtagaggaatagcgaacttccat

SEQ ID NO: 1835578 - DNA, 25 bp, Homo sapien
aggttgtagaggaatagcgaacttc

SEQ ID NO: 1835579 - DNA, 25 bp, Homo sapien
tgttcttgtctaaattggctgaaga

SEQ ID NO: 1835580 - DNA, 25 bp, Homo sapien
aattggctgaagacactttgcagca

SEQ ID NO: 1835581 - DNA, 25 bp, Homo sapien
tttgcagcagtacatcggattattc

SEQ ID NO: 1835582 - DNA, 25 bp, Homo sapien
actttgcagcagtacatcggattat

SEQ ID NO: 1835583 - DNA, 25 bp, Homo sapien
gaacccttgatctgctcatttgtga

SEQ ID NO: 1835584 - DNA, 25 bp, Homo sapien
ggtgtctatgcatggcaggtcttcc

SEQ ID NO: 1835585 - DNA, 25 bp, Homo sapien
cttgactgcactaatgtagaggtgt

SEQ ID NO: 1835586 - DNA, 25 bp, Homo sapien
cttcctggagaacccttgatctgct

SEQ ID NO: 1835587 - DNA, 25 bp, Homo sapien
cagtttccacgaatcatcatagtgc

SEQ ID NO: 1835588 - DNA, 25 bp, Homo sapien
gtttccacgaatcatcatagtgcag

SEQ ID NO: 1835589 - DNA, 25 bp, Homo sapien
tttccacgaatcatcatagtgcagc

SEQ ID NO: 1835590 - DNA, 25 bp, Homo sapien
ccacgaatcatcatagtgcagcttt

SEQ ID NO: 1835591 - DNA, 25 bp, Homo sapien
tcctagaacataactactctgattg

SEQ ID NO: 1835592 - DNA, 25 bp, Homo sapien
gtgactccattcaaatcctagaaca

SEQ ID NO: 1835593 - DNA, 25 bp, Homo sapien
catgactctattaaatgagactgat

SEQ ID NO: 1835594 - DNA, 25 bp, Homo sapien
ctactaaaacgccataggtgctgaa

SEQ ID NO: 1835595 - DNA, 25 bp, Homo sapien
tgtactggttcgaaccccgagagcg

SEQ ID NO: 1835596 - DNA, 25 bp, Homo sapien
caggcggtctgaggactaaaatggt

SEQ ID NO: 1835597 - DNA, 25 bp, Homo sapien
cagacaacatgaggcggtggaagca

SEQ ID NO: 1835598 - DNA, 25 bp, Homo sapien
gcagacactttcaggtttgtgccta

SEQ ID NO: 1835599 - DNA, 25 bp, Homo sapien
ggacggtccatccattctgcatatg

SEQ ID NO: 1835600 - DNA, 25 bp, Homo sapien
gagcacactccaatgttggtgagga

SEQ ID NO: 1835601 - DNA, 25 bp, Homo sapien
tatgtctgcgtctttgggacttaga

SEQ ID NO: 1835602 - DNA, 25 bp, Homo sapien
cttagagtctggcaagtagaagagg

SEQ ID NO: 1835603 - DNA, 25 bp, Homo sapien
tcagttaccgaaggagactctaagg

SEQ ID NO: 1835604 - DNA, 25 bp, Homo sapien
tctaaggccttctcccacgtttgga

SEQ ID NO: 1835605 - DNA, 25 bp, Homo sapien
gccaagcaacctcatacaatgggag

SEQ ID NO: 1835606 - DNA, 25 bp, Homo sapien
tgtgtgtgtgcccttttcaagagaa

SEQ ID NO: 1835607 - DNA, 25 bp, Homo sapien
tggaacaattcaaggcagctgtgct

SEQ ID NO: 1835608 - DNA, 25 bp, Homo sapien
tttcataggccgaaaggtgagccac

SEQ ID NO: 1835609 - DNA, 25 bp, Homo sapien
caagtccttaagagtgggagccaga

SEQ ID NO: 1835610 - DNA, 25 bp, Homo sapien
taactgcagtggaataactcgatgg

SEQ ID NO: 1835611 - DNA, 25 bp, Homo sapien
gcagtgacatcgtctcaacctggaa

SEQ ID NO: 1835612 - DNA, 25 bp, Homo sapien
ggaaactgaatgatcatcagaggca

SEQ ID NO: 1835613 - DNA, 25 bp, Homo sapien
cagagacagttgcaggagtagcctc

SEQ ID NO: 1835614 - DNA, 25 bp, Homo sapien
ccttaaagatttctgggacaggtct

SEQ ID NO: 1835615 - DNA, 25 bp, Homo sapien
ttgcctgcataaaggattcagtgac

SEQ ID NO: 1835616 - DNA, 25 bp, Homo sapien
gacctctggttgattgcctgcataa

SEQ ID NO: 1835617 - DNA, 25 bp, Homo sapien
cctgacctctggttgattgcctgca

SEQ ID NO: 1835618 - DNA, 25 bp, Homo sapien
cataaacctgacctctggttgattg

SEQ ID NO: 1835619 - DNA, 25 bp, Homo sapien
ctgatattttgtataatactttaaa

SEQ ID NO: 1835620 - DNA, 25 bp, Homo sapien
tgatattttgtataatactttaaag

SEQ ID NO: 1835621 - DNA, 25 bp, Homo sapien
gatattttgtataatactttaaaga

SEQ ID NO: 1835622 - DNA, 25 bp, Homo sapien
catcccctcagacaactctggctgc

SEQ ID NO: 1835623 - DNA, 25 bp, Homo sapien
atgtagatggttagccttgagtggg

SEQ ID NO: 1835624 - DNA, 25 bp, Homo sapien
ttagccttgagtggggtttaccaca

SEQ ID NO: 1835625 - DNA, 25 bp, Homo sapien
ttaacttcccttaagatgcctgttc

SEQ ID NO: 1835626 - DNA, 25 bp, Homo sapien
ttcccttaagatgcctgttcactgt

SEQ ID NO: 1835627 - DNA, 25 bp, Homo sapien
cagttttggaaaggtccttcctatg

SEQ ID NO: 1835628 - DNA, 25 bp, Homo sapien
tgtaagatagcgaatgcacctgtgc

SEQ ID NO: 1835629 - DNA, 25 bp, Homo sapien
cacctgtgcgttgaaggctgtttcg

SEQ ID NO: 1835630 - DNA, 25 bp, Homo sapien
aaggctgtttcgctgtaacacctac

SEQ ID NO: 1835631 - DNA, 25 bp, Homo sapien
cgaatgcacctgtgcgttgaaggct

SEQ ID NO: 1835632 - DNA, 25 bp, Homo sapien
ctcagtgtgctttccattagaatcc

SEQ ID NO: 1835633 - DNA, 25 bp, Homo sapien
gggtctcagtgtgctttccattaga

SEQ ID NO: 1835634 - DNA, 25 bp, Homo sapien
tttagctttgaatggaaagccctgg

SEQ ID NO: 1835635 - DNA, 25 bp, Homo sapien
ttggccagtttcagctttagctttg

SEQ ID NO: 1835636 - DNA, 25 bp, Homo sapien
tgaagatggtaattccactcttgct

SEQ ID NO: 1835637 - DNA, 25 bp, Homo sapien
gaagatggtaattccactcttgcta

SEQ ID NO: 1835638 - DNA, 25 bp, Homo sapien
tcctgaagatggtaattccactctt

SEQ ID NO: 1835639 - DNA, 25 bp, Homo sapien
agatggtaattccactcttgctatt

SEQ ID NO: 1835640 - DNA, 25 bp, Homo sapien
gggttcgtttcatgggcattcctga

SEQ ID NO: 1835641 - DNA, 25 bp, Homo sapien
gtttacaatcaaagatcgtcccttg

SEQ ID NO: 1835642 - DNA, 25 bp, Homo sapien
tgaaagctccctttaagatctctga

SEQ ID NO: 1835643 - DNA, 25 bp, Homo sapien
taaaaggcttgatgtagtgtgcagt

SEQ ID NO: 1835644 - DNA, 25 bp, Homo sapien
cctccacaaagtgccatccaatttc

SEQ ID NO: 1835645 - DNA, 25 bp, Homo sapien
ctccacaaagtgccatccaatttcc

SEQ ID NO: 1835646 - DNA, 25 bp, Homo sapien
tccacaaagtgccatccaatttcca

SEQ ID NO: 1835647 - DNA, 25 bp, Homo sapien
ccacaaagtgccatccaatttccat

SEQ ID NO: 1835648 - DNA, 25 bp, Homo sapien
ggtctaagccatataacatagggca

SEQ ID NO: 1835649 - DNA, 25 bp, Homo sapien
gaactgataaagtatgccttctgca

SEQ ID NO: 1835650 - DNA, 25 bp, Homo sapien
gcttctttgatgtttccaggaactg

SEQ ID NO: 1835651 - DNA, 25 bp, Homo sapien
aatgtctcaggctttggtctaagcc

SEQ ID NO: 1835652 - DNA, 25 bp, Homo sapien
gcagtccctgaagggctgaagggcc

SEQ ID NO: 1835653 - DNA, 25 bp, Homo sapien
cagtccctgaagggctgaagggccc

SEQ ID NO: 1835654 - DNA, 25 bp, Homo sapien
tatacactggaacaatatttgggaa

SEQ ID NO: 1835655 - DNA, 25 bp, Homo sapien
atatttgggaaattgttcttggtgg

SEQ ID NO: 1835656 - DNA, 25 bp, Homo sapien
ctatacactggaacaatatttggga

SEQ ID NO: 1835657 - DNA, 25 bp, Homo sapien
acactggaacaatatttgggaaatt

SEQ ID NO: 1835658 - DNA, 25 bp, Homo sapien
aggcttccatctgcagtaaggctga

SEQ ID NO: 1835659 - DNA, 25 bp, Homo sapien
tgatttccgggcagaacgttgaagc

SEQ ID NO: 1835660 - DNA, 25 bp, Homo sapien
gatacttaatgaccttgtggctcgg

SEQ ID NO: 1835661 - DNA, 25 bp, Homo sapien
tgtggctcgggtattgtgatttccg

SEQ ID NO: 1835662 - DNA, 25 bp, Homo sapien
ttagtaagtctcaatttgaaagact

SEQ ID NO: 1835663 - DNA, 25 bp, Homo sapien
tttagtaagtctcaatttgaaagac

SEQ ID NO: 1835664 - DNA, 25 bp, Homo sapien
tcttttagtaagtctcaatttgaaa

SEQ ID NO: 1835665 - DNA, 25 bp, Homo sapien
ctgtcttttagtaagtctcaatttg

SEQ ID NO: 1835666 - DNA, 25 bp, Homo sapien
caggggtaaacaagtatccaaagag

SEQ ID NO: 1835667 - DNA, 25 bp, Homo sapien
agtatccaaagagattttaaacacg

SEQ ID NO: 1835668 - DNA, 25 bp, Homo sapien
caccaccatttacatcttttgttct

SEQ ID NO: 1835669 - DNA, 25 bp, Homo sapien
tcttgcatgtcgtacaaggtcatgc

SEQ ID NO: 1835670 - DNA, 25 bp, Homo sapien
gcttgcagccagatgtgaacaatca

SEQ ID NO: 1835671 - DNA, 25 bp, Homo sapien
caccagcgttttgaactgctctgaa

SEQ ID NO: 1835672 - DNA, 25 bp, Homo sapien
tgacacggagtacaaataacaccta

SEQ ID NO: 1835673 - DNA, 25 bp, Homo sapien
tgctctgaataatctaaagctctgt

SEQ ID NO: 1835674 - DNA, 25 bp, Homo sapien
gatcagccattaggggctctacctg

SEQ ID NO: 1835675 - DNA, 25 bp, Homo sapien
ggcttctatgtccatgcggtagcaa

SEQ ID NO: 1835676 - DNA, 25 bp, Homo sapien
gtccatgcggtagcaactctgttcc

SEQ ID NO: 1835677 - DNA, 25 bp, Homo sapien
tggcccagccgatgctgtcactaga

SEQ ID NO: 1835678 - DNA, 25 bp, Homo sapien
gatgggttcgactggcagcatagct

SEQ ID NO: 1835679 - DNA, 25 bp, Homo sapien
cttcagggtacaaggatgggttcga

SEQ ID NO: 1835680 - DNA, 25 bp, Homo sapien
tacaaggatgggttcgactggcagc

SEQ ID NO: 1835681 - DNA, 25 bp, Homo sapien
gactggcagcatagctcttggttgc

SEQ ID NO: 1835682 - DNA, 25 bp, Homo sapien
cagggatcttcactaccacccctca

SEQ ID NO: 1835683 - DNA, 25 bp, Homo sapien
tcagggatcttcactaccacccctc

SEQ ID NO: 1835684 - DNA, 25 bp, Homo sapien
agggatcttcactaccacccctcac

SEQ ID NO: 1835685 - DNA, 25 bp, Homo sapien
gaatataatatcaaatgcataggtc

SEQ ID NO: 1835686 - DNA, 25 bp, Homo sapien
aatatcaaatgcataggtcttgatg

SEQ ID NO: 1835687 - DNA, 25 bp, Homo sapien
tataatatcaaatgcataggtcttg

SEQ ID NO: 1835688 - DNA, 25 bp, Homo sapien
tcaaatgcataggtcttgatggaca

SEQ ID NO: 1835689 - DNA, 25 bp, Homo sapien
tccacatcagggagctttagtcgag

SEQ ID NO: 1835690 - DNA, 25 bp, Homo sapien
tttagtcgagttccgaagagcctgg

SEQ ID NO: 1835691 - DNA, 25 bp, Homo sapien
caaattgaatccagggtgtgaggtc

SEQ ID NO: 1835692 - DNA, 25 bp, Homo sapien
gcaaataatggaaagcctctggtca

SEQ ID NO: 1835693 - DNA, 25 bp, Homo sapien
aaaagactacctatagaatgacaga

SEQ ID NO: 1835694 - DNA, 25 bp, Homo sapien
ttgaccagtgttccaaaagcattca

SEQ ID NO: 1835695 - DNA, 25 bp, Homo sapien
caatggcgaaagaatagtgtcttcc

SEQ ID NO: 1835696 - DNA, 25 bp, Homo sapien
actttcatgcatcaagggagtgaaa

SEQ ID NO: 1835697 - DNA, 25 bp, Homo sapien
gaaaagatgcctaactctaattagg

SEQ ID NO: 1835698 - DNA, 25 bp, Homo sapien
tatgagtcataagatcagacaggca

SEQ ID NO: 1835699 - DNA, 25 bp, Homo sapien
aaaatatgaaacgaagaggaatgat

SEQ ID NO: 1835700 - DNA, 25 bp, Homo sapien
cagacaggcaggtaacttttttagc

SEQ ID NO: 1835701 - DNA, 25 bp, Homo sapien
ttttccctagctgatcaaaggaggg

SEQ ID NO: 1835702 - DNA, 25 bp, Homo sapien
cctttaatcagaggatgggtcacac

SEQ ID NO: 1835703 - DNA, 25 bp, Homo sapien
gatgtaagaggcctttgctgacact

SEQ ID NO: 1835704 - DNA, 25 bp, Homo sapien
tctgatggaggctacgaggtcttga

SEQ ID NO: 1835705 - DNA, 25 bp, Homo sapien
ctggtgtctgtctcgttcatgtcac

SEQ ID NO: 1835706 - DNA, 25 bp, Homo sapien
gacattgagttgcaaaagccatgca

SEQ ID NO: 1835707 - DNA, 25 bp, Homo sapien
ggagagttgacaaaagtttgctcca

SEQ ID NO: 1835708 - DNA, 25 bp, Homo sapien
aaccgaagagaaattctgaaagcac

SEQ ID NO: 1835709 - DNA, 25 bp, Homo sapien
ggtcatgtttttggtacttgtagca

SEQ ID NO: 1835710 - DNA, 25 bp, Homo sapien
ccttggcttttcttgacagaagaca

SEQ ID NO: 1835711 - DNA, 25 bp, Homo sapien
tgtgatcaaaatgtcttcttaatgc

SEQ ID NO: 1835712 - DNA, 25 bp, Homo sapien
acagaagacattgtgatcaaaatgt

SEQ ID NO: 1835713 - DNA, 25 bp, Homo sapien
ccatggaagaagcccttggcttttc

SEQ ID NO: 1835714 - DNA, 25 bp, Homo sapien
ctccttgggattccgacacattttt

SEQ ID NO: 1835715 - DNA, 25 bp, Homo sapien
tttctccttgggattccgacacatt

SEQ ID NO: 1835716 - DNA, 25 bp, Homo sapien
cttttctccttgggattccgacaca

SEQ ID NO: 1835717 - DNA, 25 bp, Homo sapien
tctccttgggattccgacacatttt

SEQ ID NO: 1835718 - DNA, 25 bp, Homo sapien
ccttgtctttgatcattggagaatt

SEQ ID NO: 1835719 - DNA, 25 bp, Homo sapien
ttccttgtctttgatcattggagaa

SEQ ID NO: 1835720 - DNA, 25 bp, Homo sapien
tgtctttgatcattggagaattgtg

SEQ ID NO: 1835721 - DNA, 25 bp, Homo sapien
tctttgatcattggagaattgtggt

SEQ ID NO: 1835722 - DNA, 25 bp, Homo sapien
ggagttttgcatagcccagattttc

SEQ ID NO: 1835723 - DNA, 25 bp, Homo sapien
tcagttgagatccaagtaaggtccc

SEQ ID NO: 1835724 - DNA, 25 bp, Homo sapien
tcaaaggtgctttcactcaagagtg

SEQ ID NO: 1835725 - DNA, 25 bp, Homo sapien
ccctgtgtggagataggaacctatg

SEQ ID NO: 1835726 - DNA, 25 bp, Homo sapien
tttaagcttgctaccatcttttggt

SEQ ID NO: 1835727 - DNA, 25 bp, Homo sapien
cccgctctagcctgttttaagcttg

SEQ ID NO: 1835728 - DNA, 25 bp, Homo sapien
ctgtggatcggaaactaaggaaagt

SEQ ID NO: 1835729 - DNA, 25 bp, Homo sapien
ctgacgcagctctgcatttggtgac

SEQ ID NO: 1835730 - DNA, 25 bp, Homo sapien
caatacaatagatggattattgtat

SEQ ID NO: 1835731 - DNA, 25 bp, Homo sapien
cgacaatacaatagatggattattg

SEQ ID NO: 1835732 - DNA, 25 bp, Homo sapien
gacaatacaatagatggattattgt

SEQ ID NO: 1835733 - DNA, 25 bp, Homo sapien
acaatacaatagatggattattgta

SEQ ID NO: 1835734 - DNA, 25 bp, Homo sapien
gcttcagagatgctttctggccact

SEQ ID NO: 1835735 - DNA, 25 bp, Homo sapien
cactgtttggatgctcaaagcccac

SEQ ID NO: 1835736 - DNA, 25 bp, Homo sapien
ccttaggcttcagagatgctttctg

SEQ ID NO: 1835737 - DNA, 25 bp, Homo sapien
actgtttggatgctcaaagcccact

SEQ ID NO: 1835738 - DNA, 25 bp, Homo sapien
tatattgtgtttgccaccaccagga

SEQ ID NO: 1835739 - DNA, 25 bp, Homo sapien
tttccacaggccttcataaatgatg

SEQ ID NO: 1835740 - DNA, 25 bp, Homo sapien
tagggcaccatatgctctgggattg

SEQ ID NO: 1835741 - DNA, 25 bp, Homo sapien
tgggtattaacacagcatggcaggc

SEQ ID NO: 1835742 - DNA, 25 bp, Homo sapien
gatttgagcggaatataccaatctg

SEQ ID NO: 1835743 - DNA, 25 bp, Homo sapien
gagaggtacaattatcaacccaggg

SEQ ID NO: 1835744 - DNA, 25 bp, Homo sapien
catttcctctagagactgtaatgag

SEQ ID NO: 1835745 - DNA, 25 bp, Homo sapien
gaacaagtagaaccactagaagctg

SEQ ID NO: 1835746 - DNA, 25 bp, Homo sapien
caaggtgtctgttgattcggttcta

SEQ ID NO: 1835747 - DNA, 25 bp, Homo sapien
gcttggacagctgtgacaaattagc

SEQ ID NO: 1835748 - DNA, 25 bp, Homo sapien
cagtggctggtagttcctggaataa

SEQ ID NO: 1835749 - DNA, 25 bp, Homo sapien
tagcataggctgagtgtgttcgaca

SEQ ID NO: 1835750 - DNA, 25 bp, Homo sapien
gcaactttaaaactcggctgtgaaa

SEQ ID NO: 1835751 - DNA, 25 bp, Homo sapien
cagaaagactatgggtcacggtgga

SEQ ID NO: 1835752 - DNA, 25 bp, Homo sapien
ccaagggtgtatgatttgcagcaga

SEQ ID NO: 1835753 - DNA, 25 bp, Homo sapien
tctatagacttagtggactgagtcc

SEQ ID NO: 1835754 - DNA, 25 bp, Homo sapien
caatatttgatgctttgtggctggc

SEQ ID NO: 1835755 - DNA, 25 bp, Homo sapien
tctatacggtttacacagaaaggct

SEQ ID NO: 1835756 - DNA, 25 bp, Homo sapien
aatgctaatagactgtgaggaagcc

SEQ ID NO: 1835757 - DNA, 25 bp, Homo sapien
gcagtactccatcgttccatctggg

SEQ ID NO: 1835758 - DNA, 25 bp, Homo sapien
ttgaggaagagggagtctagtacgc

SEQ ID NO: 1835759 - DNA, 25 bp, Homo sapien
tctagtacgcatggccagcctggcg

SEQ ID NO: 1835760 - DNA, 25 bp, Homo sapien
aagagggagtctagtacgcatggcc

SEQ ID NO: 1835761 - DNA, 25 bp, Homo sapien
gggagtctagtacgcatggccagcc

SEQ ID NO: 1835762 - DNA, 25 bp, Homo sapien
gatcccatccagacccttctctcct

SEQ ID NO: 1835763 - DNA, 25 bp, Homo sapien
gaaattgtaaggaatattggcaaac

SEQ ID NO: 1835764 - DNA, 25 bp, Homo sapien
aagatcccatccagacccttctctc

SEQ ID NO: 1835765 - DNA, 25 bp, Homo sapien
actgtcacaggaaattgtaaggaat

SEQ ID NO: 1835766 - DNA, 25 bp, Homo sapien
gaatttttcggaggcatccagttac

SEQ ID NO: 1835767 - DNA, 25 bp, Homo sapien
aggcatccagttactctttaaggca

SEQ ID NO: 1835768 - DNA, 25 bp, Homo sapien
tgtattgactgtcaaacagtgccag

SEQ ID NO: 1835769 - DNA, 25 bp, Homo sapien
taggcttaagaatttttcggaggca

SEQ ID NO: 1835770 - DNA, 25 bp, Homo sapien
aaatgcttgtggttttattggacct

SEQ ID NO: 1835771 - DNA, 25 bp, Homo sapien
tgtggttttattggacctgcaaaat

SEQ ID NO: 1835772 - DNA, 25 bp, Homo sapien
ccaggccaaatgcttgtggttttat

SEQ ID NO: 1835773 - DNA, 25 bp, Homo sapien
tttctaccaggccaaatgcttgtgg

SEQ ID NO: 1835774 - DNA, 25 bp, Homo sapien
agtatgataatagaagaccctgtga

SEQ ID NO: 1835775 - DNA, 25 bp, Homo sapien
tttagtatgataatagaagaccctg

SEQ ID NO: 1835776 - DNA, 25 bp, Homo sapien
aatgaatgtgcaaactgttcggtat

SEQ ID NO: 1835777 - DNA, 25 bp, Homo sapien
tcggtatccgaaggcattattagct

SEQ ID NO: 1835778 - DNA, 25 bp, Homo sapien
tgaactcatacacagttgtaggtcc

SEQ ID NO: 1835779 - DNA, 25 bp, Homo sapien
tcatccacacaatatctgggaatgg

SEQ ID NO: 1835780 - DNA, 25 bp, Homo sapien
gggtcctctacgtattcttcatcca

SEQ ID NO: 1835781 - DNA, 25 bp, Homo sapien
tacacagttgtaggtccaggtcggg

SEQ ID NO: 1835782 - DNA, 25 bp, Homo sapien
gagtgaacgatattttccaaaatcc

SEQ ID NO: 1835783 - DNA, 25 bp, Homo sapien
tcattcatgttgtttgagtgaacga

SEQ ID NO: 1835784 - DNA, 25 bp, Homo sapien
tccaaaatcctgtctggtgataaaa

SEQ ID NO: 1835785 - DNA, 25 bp, Homo sapien
ccaaaatcctgtctggtgataaaat

SEQ ID NO: 1835786 - DNA, 25 bp, Homo sapien
tcaattgacgggaacatttacaaat

SEQ ID NO: 1835787 - DNA, 25 bp, Homo sapien
ttgacgggaacatttacaaatgaaa

SEQ ID NO: 1835788 - DNA, 25 bp, Homo sapien
gaacatttacaaatgaaatccttac

SEQ ID NO: 1835789 - DNA, 25 bp, Homo sapien
cgggaacatttacaaatgaaatcct

SEQ ID NO: 1835790 - DNA, 25 bp, Homo sapien
tgaatttaggaactgtctttcccca

SEQ ID NO: 1835791 - DNA, 25 bp, Homo sapien
ttctcctttaagatctgaatttagg

SEQ ID NO: 1835792 - DNA, 25 bp, Homo sapien
cataacagctgatgacatctcttgt

SEQ ID NO: 1835793 - DNA, 25 bp, Homo sapien
actgtctttccccataacagctgat

SEQ ID NO: 1835794 - DNA, 25 bp, Homo sapien
ttcagagggtaagttcacagaggat

SEQ ID NO: 1835795 - DNA, 25 bp, Homo sapien
cacagaggataccagggcaggtgat

SEQ ID NO: 1835796 - DNA, 25 bp, Homo sapien
gtaagttcacagaggataccagggc

SEQ ID NO: 1835797 - DNA, 25 bp, Homo sapien
cagagggtaagttcacagaggatac

SEQ ID NO: 1835798 - DNA, 25 bp, Homo sapien
tctcaagggtgacagtgcttctctc

SEQ ID NO: 1835799 - DNA, 25 bp, Homo sapien
gtcacacagaactttctcaagggtg

SEQ ID NO: 1835800 - DNA, 25 bp, Homo sapien
ctatgtcacacagaactttctcaag

SEQ ID NO: 1835801 - DNA, 25 bp, Homo sapien
ttctacttttcccaagcaccttctg

SEQ ID NO: 1835802 - DNA, 25 bp, Homo sapien
cagatgatggtatttctgctgcccc

SEQ ID NO: 1835803 - DNA, 25 bp, Homo sapien
agctcaggcctccacagatgggaag

SEQ ID NO: 1835804 - DNA, 25 bp, Homo sapien
cagagaaaaacttgtgggtgacttc

SEQ ID NO: 1835805 - DNA, 25 bp, Homo sapien
gtaaatgactaaatgcctcttctgg

SEQ ID NO: 1835806 - DNA, 25 bp, Homo sapien
taacagtttgtccaggtaaatgact

SEQ ID NO: 1835807 - DNA, 25 bp, Homo sapien
ttctggtacagcacagcgtcccatt

SEQ ID NO: 1835808 - DNA, 25 bp, Homo sapien
tcaaatcgggcagttagtacacagc

SEQ ID NO: 1835809 - DNA, 25 bp, Homo sapien
ctggaacagatttctcatacattcc

SEQ ID NO: 1835810 - DNA, 25 bp, Homo sapien
gaacagatttctcatacattcccat

SEQ ID NO: 1835811 - DNA, 25 bp, Homo sapien
ttcagcagaatggtcctcaagatta

SEQ ID NO: 1835812 - DNA, 25 bp, Homo sapien
gcagaatggtcctcaagattacttc

SEQ ID NO: 1835813 - DNA, 25 bp, Homo sapien
gactgaactaaggctttatcagtca

SEQ ID NO: 1835814 - DNA, 25 bp, Homo sapien
tattctgcagagactgaactaaggc

SEQ ID NO: 1835815 - DNA, 25 bp, Homo sapien
actgaactaaggctttatcagtcat

SEQ ID NO: 1835816 - DNA, 25 bp, Homo sapien
gtattctgcagagactgaactaagg

SEQ ID NO: 1835817 - DNA, 25 bp, Homo sapien
ctttgtgagggacgacggtgaccac

SEQ ID NO: 1835818 - DNA, 25 bp, Homo sapien
tgagggacgacggtgaccacctttc

SEQ ID NO: 1835819 - DNA, 25 bp, Homo sapien
aacatgctttgtgagggacgacggt

SEQ ID NO: 1835820 - DNA, 25 bp, Homo sapien
cacaaacatgctttgtgagggacga

SEQ ID NO: 1835821 - DNA, 25 bp, Homo sapien
gtagggagaagtccctctttctcta

SEQ ID NO: 1835822 - DNA, 25 bp, Homo sapien
aatatcggctgtgggtttgtgataa

SEQ ID NO: 1835823 - DNA, 25 bp, Homo sapien
gaatccgtctgatcctgggcaattt

SEQ ID NO: 1835824 - DNA, 25 bp, Homo sapien
aaaatgagctaggtagggagaagtc

SEQ ID NO: 1835825 - DNA, 25 bp, Homo sapien
ttcctgggtcagacatttagtgcct

SEQ ID NO: 1835826 - DNA, 25 bp, Homo sapien
tttcctgggtcagacatttagtgcc

SEQ ID NO: 1835827 - DNA, 25 bp, Homo sapien
tcctgggtcagacatttagtgcctc

SEQ ID NO: 1835828 - DNA, 25 bp, Homo sapien
atttcctgggtcagacatttagtgc

SEQ ID NO: 1835829 - DNA, 25 bp, Homo sapien
aagaagttcctagcgggatgctgct

SEQ ID NO: 1835830 - DNA, 25 bp, Homo sapien
tttctaagaagttcctagcgggatg

SEQ ID NO: 1835831 - DNA, 25 bp, Homo sapien
catttctaagaagttcctagcggga

SEQ ID NO: 1835832 - DNA, 25 bp, Homo sapien
tctaagaagttcctagcgggatgct

SEQ ID NO: 1835833 - DNA, 25 bp, Homo sapien
agtggttatagaggcttctccaagg

SEQ ID NO: 1835834 - DNA, 25 bp, Homo sapien
aagtggttatagaggcttctccaag

SEQ ID NO: 1835835 - DNA, 25 bp, Homo sapien
gtggttatagaggcttctccaagga

SEQ ID NO: 1835836 - DNA, 25 bp, Homo sapien
ggtaggtagcctcattgcatttaca

SEQ ID NO: 1835837 - DNA, 25 bp, Homo sapien
tacatctctgttgcaagctctcaga

SEQ ID NO: 1835838 - DNA, 25 bp, Homo sapien
tggtgaagcccgtcaaggacacact

SEQ ID NO: 1835839 - DNA, 25 bp, Homo sapien
tctttaggctggtgagtgcttttca

SEQ ID NO: 1835840 - DNA, 25 bp, Homo sapien
gtcttaacaaatgctacatgagaaa

SEQ ID NO: 1835841 - DNA, 25 bp, Homo sapien
gatgtaaagttcacgatgaaatcag

SEQ ID NO: 1835842 - DNA, 25 bp, Homo sapien
gaagtttgatgtaaagttcacgatg

SEQ ID NO: 1835843 - DNA, 25 bp, Homo sapien
tcacgatgaaatcaggaaggtcttt

SEQ ID NO: 1835844 - DNA, 25 bp, Homo sapien
tcagtgatgggtgttgaatctttgt

SEQ ID NO: 1835845 - DNA, 25 bp, Homo sapien
aattcaggagtataacactgatgag

SEQ ID NO: 1835846 - DNA, 25 bp, Homo sapien
catttgtcttagtgacaaagttgag

SEQ ID NO: 1835847 - DNA, 25 bp, Homo sapien
ttgatatgatccacatttatctcac

SEQ ID NO: 1835848 - DNA, 25 bp, Homo sapien
tctttcaccagcaaacttggctccc

SEQ ID NO: 1835849 - DNA, 25 bp, Homo sapien
tgataattcccaacttagaatcaat

SEQ ID NO: 1835850 - DNA, 25 bp, Homo sapien
cttgtccctctcttgataattccca

SEQ ID NO: 1835851 - DNA, 25 bp, Homo sapien
tctcttgataattcccaacttagaa

SEQ ID NO: 1835852 - DNA, 25 bp, Homo sapien
tcctccagactctcagtattctcat

SEQ ID NO: 1835853 - DNA, 25 bp, Homo sapien
ttctcattaatttgcttactcccag

SEQ ID NO: 1835854 - DNA, 25 bp, Homo sapien
ttaatttgcttactcccagcctgcc

SEQ ID NO: 1835855 - DNA, 25 bp, Homo sapien
ttcctttctcatgtctaactgtggt

SEQ ID NO: 1835856 - DNA, 25 bp, Homo sapien
tataaagggtagagaccaaagcctc

SEQ ID NO: 1835857 - DNA, 25 bp, Homo sapien
gccaacggagaaaggatgaactgca

SEQ ID NO: 1835858 - DNA, 25 bp, Homo sapien
ttgtttcaagggagccaacggagaa

SEQ ID NO: 1835859 - DNA, 25 bp, Homo sapien
gcctctttgcgcaattgtttcaagg

SEQ ID NO: 1835860 - DNA, 25 bp, Homo sapien
gccgtagtgatgaatttcaggatct

SEQ ID NO: 1835861 - DNA, 25 bp, Homo sapien
aatcttagggcatatacttcttaaa

SEQ ID NO: 1835862 - DNA, 25 bp, Homo sapien
cataagatgcgtgattctgccgtag

SEQ ID NO: 1835863 - DNA, 25 bp, Homo sapien
ctgtagaaatcttagggcatatact

SEQ ID NO: 1835864 - DNA, 25 bp, Homo sapien
tatttgccgcatgttttgccaatgg

SEQ ID NO: 1835865 - DNA, 25 bp, Homo sapien
tgccaatggagcctcgaagtgtcca

SEQ ID NO: 1835866 - DNA, 25 bp, Homo sapien
cttggtttcctatttgccgcatgtt

SEQ ID NO: 1835867 - DNA, 25 bp, Homo sapien
gaagtgtccagtgctatcatatcca

SEQ ID NO: 1835868 - DNA, 25 bp, Homo sapien
ttctttacccgcttccatgccgtag

SEQ ID NO: 1835869 - DNA, 25 bp, Homo sapien
tacccgcttccatgccgtagggcca

SEQ ID NO: 1835870 - DNA, 25 bp, Homo sapien
ctttacccgcttccatgccgtaggg

SEQ ID NO: 1835871 - DNA, 25 bp, Homo sapien
tttacccgcttccatgccgtagggc

SEQ ID NO: 1835872 - DNA, 25 bp, Homo sapien
gagtctcgtactgtatattctctga

SEQ ID NO: 1835873 - DNA, 25 bp, Homo sapien
atagagtctcgtactgtatattctc

SEQ ID NO: 1835874 - DNA, 25 bp, Homo sapien
ctggactcagggaatagagtctcgt

SEQ ID NO: 1835875 - DNA, 25 bp, Homo sapien
cagggaatagagtctcgtactgtat

SEQ ID NO: 1835876 - DNA, 25 bp, Homo sapien
gctcttctaagctagcattgtattt

SEQ ID NO: 1835877 - DNA, 25 bp, Homo sapien
tgcaactgcaccgttaccacagtct

SEQ ID NO: 1835878 - DNA, 25 bp, Homo sapien
taccacagtctgtttggcacccact

SEQ ID NO: 1835879 - DNA, 25 bp, Homo sapien
actatgccaatagtgtaggacacaa

SEQ ID NO: 1835880 - DNA, 25 bp, Homo sapien
actgtgtttattggatattccttgg

SEQ ID NO: 1835881 - DNA, 25 bp, Homo sapien
taagggccagcattgctatgttctg

SEQ ID NO: 1835882 - DNA, 25 bp, Homo sapien
gggtataagggccagcattgctatg

SEQ ID NO: 1835883 - DNA, 25 bp, Homo sapien
tattccttggagagggtataagggc

SEQ ID NO: 1835884 - DNA, 25 bp, Homo sapien
tgatggttgattattgttaaaagca

SEQ ID NO: 1835885 - DNA, 25 bp, Homo sapien
gcaaacgtcccactgctaatgtttt

SEQ ID NO: 1835886 - DNA, 25 bp, Homo sapien
attttcccatgcaaacgtcccactg

SEQ ID NO: 1835887 - DNA, 25 bp, Homo sapien
ctaatgtttttagaacctctgatgg

SEQ ID NO: 1835888 - DNA, 25 bp, Homo sapien
cccatcaccccacaattggttatgg

SEQ ID NO: 1835889 - DNA, 25 bp, Homo sapien
cccacaattggttatggctggattt

SEQ ID NO: 1835890 - DNA, 25 bp, Homo sapien
attagtactttctatatccctctga

SEQ ID NO: 1835891 - DNA, 25 bp, Homo sapien
tagtactttctatatccctctgaaa

SEQ ID NO: 1835892 - DNA, 25 bp, Homo sapien
agaggtttagttgacatacagttat

SEQ ID NO: 1835893 - DNA, 25 bp, Homo sapien
tctgtaaagtgagaactatacataa

SEQ ID NO: 1835894 - DNA, 25 bp, Homo sapien
tacataaaggactgcccaagacttg

SEQ ID NO: 1835895 - DNA, 25 bp, Homo sapien
tctcatggaaactatcacgagaaca

SEQ ID NO: 1835896 - DNA, 25 bp, Homo sapien
tattttcagagcaacgacaggctgt

SEQ ID NO: 1835897 - DNA, 25 bp, Homo sapien
gagttaacatttatctgccgtagag

SEQ ID NO: 1835898 - DNA, 25 bp, Homo sapien
tgcagcagcggtgagaatttggctc

SEQ ID NO: 1835899 - DNA, 25 bp, Homo sapien
caggcactgtactgtgtactagaga

SEQ ID NO: 1835900 - DNA, 25 bp, Homo sapien
catatccctactttgttcacagaac

SEQ ID NO: 1835901 - DNA, 25 bp, Homo sapien
tctccctggtgctttggagaagagg

SEQ ID NO: 1835902 - DNA, 25 bp, Homo sapien
actctccctggtgctttggagaaga

SEQ ID NO: 1835903 - DNA, 25 bp, Homo sapien
tgctgatttcatatccctactttgt

SEQ ID NO: 1835904 - DNA, 25 bp, Homo sapien
cctgacagaaaaaccattcttacat

SEQ ID NO: 1835905 - DNA, 25 bp, Homo sapien
gtgctgttacaaagtcctctctgaa

SEQ ID NO: 1835906 - DNA, 25 bp, Homo sapien
tccaggttgatttggcagcgattat

SEQ ID NO: 1835907 - DNA, 25 bp, Homo sapien
gatagcaggttgagattcacacgcg

SEQ ID NO: 1835908 - DNA, 25 bp, Homo sapien
agatcccagaactttatatgaagca

SEQ ID NO: 1835909 - DNA, 25 bp, Homo sapien
agagccatctccgtcagcccatagg

SEQ ID NO: 1835910 - DNA, 25 bp, Homo sapien
gcagagccatctccgtcagcccata

SEQ ID NO: 1835911 - DNA, 25 bp, Homo sapien
tggaagatcccagaactttatatga

SEQ ID NO: 1835912 - DNA, 25 bp, Homo sapien
ggcaaacagtgcttgactcccgtga

SEQ ID NO: 1835913 - DNA, 25 bp, Homo sapien
gatgaaacaagtgaatatacgtggg

SEQ ID NO: 1835914 - DNA, 25 bp, Homo sapien
aacaggtagaatagtagttttggct

SEQ ID NO: 1835915 - DNA, 25 bp, Homo sapien
tatacgtgggtcagaatcaggaaac

SEQ ID NO: 1835916 - DNA, 25 bp, Homo sapien
tagacacgatgtgatcacacgtctg

SEQ ID NO: 1835917 - DNA, 25 bp, Homo sapien
caattagacacgatgtgatcacacg

SEQ ID NO: 1835918 - DNA, 25 bp, Homo sapien
aaatacaattagacacgatgtgatc

SEQ ID NO: 1835919 - DNA, 25 bp, Homo sapien
cgatgtgatcacacgtctgtctcca

SEQ ID NO: 1835920 - DNA, 25 bp, Homo sapien
tgctggcttttagtaggaggcctca

SEQ ID NO: 1835921 - DNA, 25 bp, Homo sapien
cagggcctgcagtcatctaaagggt

SEQ ID NO: 1835922 - DNA, 25 bp, Homo sapien
ctgggcgattctggttctagctgtc

SEQ ID NO: 1835923 - DNA, 25 bp, Homo sapien
tcatgcctgacaagttagtgctggc

SEQ ID NO: 1835924 - DNA, 25 bp, Homo sapien
ttattgtgactctcctagtaacatt

SEQ ID NO: 1835925 - DNA, 25 bp, Homo sapien
tcagcctctggtgtacctagactac

SEQ ID NO: 1835926 - DNA, 25 bp, Homo sapien
ctctggtgtacctagactacaggca

SEQ ID NO: 1835927 - DNA, 25 bp, Homo sapien
tattgtgactctcctagtaacattt

SEQ ID NO: 1835928 - DNA, 25 bp, Homo sapien
gactgtcactaatgaagtagtaaca

SEQ ID NO: 1835929 - DNA, 25 bp, Homo sapien
catataagacacaatttagtaaccc

SEQ ID NO: 1835930 - DNA, 25 bp, Homo sapien
caagggtcaagtgtaattgcatcaa

SEQ ID NO: 1835931 - DNA, 25 bp, Homo sapien
ccttagttctagttgtgactgtcac

SEQ ID NO: 1835932 - DNA, 25 bp, Homo sapien
cattgcacgttcttagatgattgat

SEQ ID NO: 1835933 - DNA, 25 bp, Homo sapien
tgattgatgcacaaagacgtcactc

SEQ ID NO: 1835934 - DNA, 25 bp, Homo sapien
caaatgctcgttcatatggataaag

SEQ ID NO: 1835935 - DNA, 25 bp, Homo sapien
aagacgtcactctccaatgcaaatg

SEQ ID NO: 1835936 - DNA, 25 bp, Homo sapien
agcattgtcactgcgtctgttccag

SEQ ID NO: 1835937 - DNA, 25 bp, Homo sapien
tccctaggtgttcagtgacagcttg

SEQ ID NO: 1835938 - DNA, 25 bp, Homo sapien
cagctcgatggcctcaatgtgagtc

SEQ ID NO: 1835939 - DNA, 25 bp, Homo sapien
aatgtgagtccttctgcgcccagta

SEQ ID NO: 1835940 - DNA, 25 bp, Homo sapien
tgacagaaaacagtcactccagccc

SEQ ID NO: 1835941 - DNA, 25 bp, Homo sapien
caatagcgccgccaactaactgact

SEQ ID NO: 1835942 - DNA, 25 bp, Homo sapien
tctgctatgtcatacacatgacaga

SEQ ID NO: 1835943 - DNA, 25 bp, Homo sapien
gcccagttcctacatgagctcacag

SEQ ID NO: 1835944 - DNA, 25 bp, Homo sapien
ttctacaacgtagggagctacatgc

SEQ ID NO: 1835945 - DNA, 25 bp, Homo sapien
ggcagcctcaggattccacacgttg

SEQ ID NO: 1835946 - DNA, 25 bp, Homo sapien
gagtttcgtaaatgcctagtcagga

SEQ ID NO: 1835947 - DNA, 25 bp, Homo sapien
tacatgcaaggacaagaacgaaggc

SEQ ID NO: 1835948 - DNA, 25 bp, Homo sapien
gaaagtgagggaagtcgttcctcaa

SEQ ID NO: 1835949 - DNA, 25 bp, Homo sapien
gagaagctggagtcgagtagaatcc

SEQ ID NO: 1835950 - DNA, 25 bp, Homo sapien
cttctctgcgaaggtggtttttggg

SEQ ID NO: 1835951 - DNA, 25 bp, Homo sapien
gggaaaggcttgatcacaatggata

SEQ ID NO: 1835952 - DNA, 25 bp, Homo sapien
gaaagaacgttgtttcaggaactga

SEQ ID NO: 1835953 - DNA, 25 bp, Homo sapien
aagtgtgcacgggaatcaccagctc

SEQ ID NO: 1835954 - DNA, 25 bp, Homo sapien
aagcagatcatgtgcgtagcccagc

SEQ ID NO: 1835955 - DNA, 25 bp, Homo sapien
cagcctgtggtaggaaagtcagccc

SEQ ID NO: 1835956 - DNA, 25 bp, Homo sapien
tagtctgttctaatgctgctcaaaa

SEQ ID NO: 1835957 - DNA, 25 bp, Homo sapien
tatcctcagacactattatgaacac

SEQ ID NO: 1835958 - DNA, 25 bp, Homo sapien
taaacaagatcaatagacagctagc

SEQ ID NO: 1835959 - DNA, 25 bp, Homo sapien
tatgactaatcccacagaactacaa

SEQ ID NO: 1835960 - DNA, 25 bp, Homo sapien
tatcatttggcctgcaagccttcga

SEQ ID NO: 1835961 - DNA, 25 bp, Homo sapien
gaggcggccaaactatagcctgtgg

SEQ ID NO: 1835962 - DNA, 25 bp, Homo sapien
taactctttagatcagaggcggcca

SEQ ID NO: 1835963 - DNA, 25 bp, Homo sapien
aacaccaaggtcgagcagttgcagt

SEQ ID NO: 1835964 - DNA, 25 bp, Homo sapien
tttagaagaaccacattgtccaaag

SEQ ID NO: 1835965 - DNA, 25 bp, Homo sapien
ttctttagaagaaccacattgtcca

SEQ ID NO: 1835966 - DNA, 25 bp, Homo sapien
cagtctgtgtaaactaacttgtact

SEQ ID NO: 1835967 - DNA, 25 bp, Homo sapien
agccagtctgtgtaaactaacttgt

SEQ ID NO: 1835968 - DNA, 25 bp, Homo sapien
atactttcatgcagaggtgtctaac

SEQ ID NO: 1835969 - DNA, 25 bp, Homo sapien
aaaatactttcatgcagaggtgtct

SEQ ID NO: 1835970 - DNA, 25 bp, Homo sapien
taaaaatactttcatgcagaggtgt

SEQ ID NO: 1835971 - DNA, 25 bp, Homo sapien
aatactttcatgcagaggtgtctaa

SEQ ID NO: 1835972 - DNA, 25 bp, Homo sapien
gattcatactgactttggtgataag

SEQ ID NO: 1835973 - DNA, 25 bp, Homo sapien
agctgcctgtttaggggctacccga

SEQ ID NO: 1835974 - DNA, 25 bp, Homo sapien
aagtttgtgtccgttgccctccaca

SEQ ID NO: 1835975 - DNA, 25 bp, Homo sapien
gtgataagtttgtgtccgttgccct

SEQ ID NO: 1835976 - DNA, 25 bp, Homo sapien
gtcaataaaactgaggtcaatctag

SEQ ID NO: 1835977 - DNA, 25 bp, Homo sapien
ggatgtaaagaaagagccaaaggaa

SEQ ID NO: 1835978 - DNA, 25 bp, Homo sapien
ttctgatctactgatcctggatgta

SEQ ID NO: 1835979 - DNA, 25 bp, Homo sapien
tgttcagtgttcatagtacatggta

SEQ ID NO: 1835980 - DNA, 25 bp, Homo sapien
caatgggcccactatgggtgacaaa

SEQ ID NO: 1835981 - DNA, 25 bp, Homo sapien
gcccatgtaatgctagaagaggtca

SEQ ID NO: 1835982 - DNA, 25 bp, Homo sapien
tgtataacacaggagaacccaaggg

SEQ ID NO: 1835983 - DNA, 25 bp, Homo sapien
caagggtgacacataaacaatgggc

SEQ ID NO: 1835984 - DNA, 25 bp, Homo sapien
tagcttcatatttactgcagactcc

SEQ ID NO: 1835985 - DNA, 25 bp, Homo sapien
gttactttagcttcatatttactgc

SEQ ID NO: 1835986 - DNA, 25 bp, Homo sapien
ttttgactgcagtttcactggagtg

SEQ ID NO: 1835987 - DNA, 25 bp, Homo sapien
actggagtgttgctggtcagtgaaa

SEQ ID NO: 1835988 - DNA, 25 bp, Homo sapien
tggagccactttcattgaagcttgc

SEQ ID NO: 1835989 - DNA, 25 bp, Homo sapien
ttctccatagggttcagaaacgcta

SEQ ID NO: 1835990 - DNA, 25 bp, Homo sapien
tgtaaagtggataaactccagaggg

SEQ ID NO: 1835991 - DNA, 25 bp, Homo sapien
ctccagagggatgtgatagatgttg

SEQ ID NO: 1835992 - DNA, 25 bp, Homo sapien
gagactgagctcatcaaatatccat

SEQ ID NO: 1835993 - DNA, 25 bp, Homo sapien
cagtgaagttggagccttgtgacct

SEQ ID NO: 1835994 - DNA, 25 bp, Homo sapien
ttttcctgagctaaggcagttccca

SEQ ID NO: 1835995 - DNA, 25 bp, Homo sapien
gacctgtgcccgacagactgtactg

SEQ ID NO: 1835996 - DNA, 25 bp, Homo sapien
accatggcagcacttgttaataaaa

SEQ ID NO: 1835997 - DNA, 25 bp, Homo sapien
atgacataggccctccagtgtgccc

SEQ ID NO: 1835998 - DNA, 25 bp, Homo sapien
ttttgaccgcttaaagaagaccatg

SEQ ID NO: 1835999 - DNA, 25 bp, Homo sapien
cagtgtgcccagaggctgcatacct

SEQ ID NO: 1836000 - DNA, 25 bp, Homo sapien
tgttccctgtgcccgtttggaaaga

SEQ ID NO: 1836001 - DNA, 25 bp, Homo sapien
gtgcccgtttggaaagatttcaatg

SEQ ID NO: 1836002 - DNA, 25 bp, Homo sapien
tgtgcccgtttggaaagatttcaat

SEQ ID NO: 1836003 - DNA, 25 bp, Homo sapien
tctgttccctgtgcccgtttggaaa

SEQ ID NO: 1836004 - DNA, 25 bp, Homo sapien
tccagaggggcaccagtggattgtc

SEQ ID NO: 1836005 - DNA, 25 bp, Homo sapien
tgtctagaccagtaggagtagagga

SEQ ID NO: 1836006 - DNA, 25 bp, Homo sapien
tagcagtaggtatgatggagagtta

SEQ ID NO: 1836007 - DNA, 25 bp, Homo sapien
gatggagagttaactcctaatggcc

SEQ ID NO: 1836008 - DNA, 25 bp, Homo sapien
ggaatgattgcaatgcttcccactt

SEQ ID NO: 1836009 - DNA, 25 bp, Homo sapien
tttggaatgattgcaatgcttccca

SEQ ID NO: 1836010 - DNA, 25 bp, Homo sapien
cttctgcacactgtgcccatttgga

SEQ ID NO: 1836011 - DNA, 25 bp, Homo sapien
gcttcccacttttgtaatggttgaa

SEQ ID NO: 1836012 - DNA, 25 bp, Homo sapien
aagagatgatagaatattgaatacc

SEQ ID NO: 1836013 - DNA, 25 bp, Homo sapien
aaagagatgatagaatattgaatac

SEQ ID NO: 1836014 - DNA, 25 bp, Homo sapien
atcaggggagtaccctgaagtgctc

SEQ ID NO: 1836015 - DNA, 25 bp, Homo sapien
cttcagaactgatcaggggagtacc

SEQ ID NO: 1836016 - DNA, 25 bp, Homo sapien
tccttcctgccctcattgtgcagca

SEQ ID NO: 1836017 - DNA, 25 bp, Homo sapien
gtgcagcagcaggtctatctcttcc

SEQ ID NO: 1836018 - DNA, 25 bp, Homo sapien
ctaaacgggcttcataaattagttg

SEQ ID NO: 1836019 - DNA, 25 bp, Homo sapien
gaaccttgaacaacagatgtagaag

SEQ ID NO: 1836020 - DNA, 25 bp, Homo sapien
taaattagttgcatattgagtctga

SEQ ID NO: 1836021 - DNA, 25 bp, Homo sapien
tcttgcatcagggttgttgtggtct

SEQ ID NO: 1836022 - DNA, 25 bp, Homo sapien
tcagggtacagacgaagccagtcag

SEQ ID NO: 1836023 - DNA, 25 bp, Homo sapien
tagctttcccgcaagacatatggaa

SEQ ID NO: 1836024 - DNA, 25 bp, Homo sapien
gcttgacagataacagtgaggagag

SEQ ID NO: 1836025 - DNA, 25 bp, Homo sapien
tattacacaggagttcagaacaagg

SEQ ID NO: 1836026 - DNA, 25 bp, Homo sapien
tctttctcaacccaggtactcaaat

SEQ ID NO: 1836027 - DNA, 25 bp, Homo sapien
tactcaaataccctttaggactcat

SEQ ID NO: 1836028 - DNA, 25 bp, Homo sapien
gtactcaaataccctttaggactca

SEQ ID NO: 1836029 - DNA, 25 bp, Homo sapien
ttctcaacccaggtactcaaatacc

SEQ ID NO: 1836030 - DNA, 25 bp, Homo sapien
catttgactccttcgtaaagttgta

SEQ ID NO: 1836031 - DNA, 25 bp, Homo sapien
tgtttacctgtcttcaagatcactg

SEQ ID NO: 1836032 - DNA, 25 bp, Homo sapien
gtatccagtctgcttgtaggctaat

SEQ ID NO: 1836033 - DNA, 25 bp, Homo sapien
gtgtaataattccagccactagatg

SEQ ID NO: 1836034 - DNA, 25 bp, Homo sapien
gactctatcttggtgacttcctaga

SEQ ID NO: 1836035 - DNA, 25 bp, Homo sapien
ggctgcaccctcttctaagatatgt

SEQ ID NO: 1836036 - DNA, 25 bp, Homo sapien
tgttgagaagaaccagaagctggtc

SEQ ID NO: 1836037 - DNA, 25 bp, Homo sapien
ggttctgcccgcacagactctatct

SEQ ID NO: 1836038 - DNA, 25 bp, Homo sapien
ccgtgaagcagcactggaaggctct

SEQ ID NO: 1836039 - DNA, 25 bp, Homo sapien
gcccgtgtcgtttgagaagcttctc

SEQ ID NO: 1836040 - DNA, 25 bp, Homo sapien
gaagcttctctgcatcgcctggtac

SEQ ID NO: 1836041 - DNA, 25 bp, Homo sapien
aaaagaactcagcaagaagaccggt

SEQ ID NO: 1836042 - DNA, 25 bp, Homo sapien
ctgctttgggtaaggagagccgtga

SEQ ID NO: 1836043 - DNA, 25 bp, Homo sapien
gagccgtgaggagtgaacacttaag

SEQ ID NO: 1836044 - DNA, 25 bp, Homo sapien
taaggagagccgtgaggagtgaaca

SEQ ID NO: 1836045 - DNA, 25 bp, Homo sapien
cagctgctttgggtaaggagagccg

SEQ ID NO: 1836046 - DNA, 25 bp, Homo sapien
aaggaacagccagggttttgttctg

SEQ ID NO: 1836047 - DNA, 25 bp, Homo sapien
acagccagggttttgttctgtatgg

SEQ ID NO: 1836048 - DNA, 25 bp, Homo sapien
agccagggttttgttctgtatgggc

SEQ ID NO: 1836049 - DNA, 25 bp, Homo sapien
gaacagccagggttttgttctgtat

SEQ ID NO: 1836050 - DNA, 25 bp, Homo sapien
gggcatctcaaaaggacaattgaaa

SEQ ID NO: 1836051 - DNA, 25 bp, Homo sapien
gcccaagaaaattaagcagcctgtg

SEQ ID NO: 1836052 - DNA, 25 bp, Homo sapien
cactggatgtagctaaagatggcaa

SEQ ID NO: 1836053 - DNA, 25 bp, Homo sapien
tgtttgccaatgaacagatgtagac

SEQ ID NO: 1836054 - DNA, 25 bp, Homo sapien
cacatccaggaacacactccatata

SEQ ID NO: 1836055 - DNA, 25 bp, Homo sapien
tgacggcaccacatccaggaacaca

SEQ ID NO: 1836056 - DNA, 25 bp, Homo sapien
tctgacggcaccacatccaggaaca

SEQ ID NO: 1836057 - DNA, 25 bp, Homo sapien
caggaacacactccatataaattgc

SEQ ID NO: 1836058 - DNA, 25 bp, Homo sapien
agtaggaaaatcaattagaggaaag

SEQ ID NO: 1836059 - DNA, 25 bp, Homo sapien
gctgcgggagaacctcattaattct

SEQ ID NO: 1836060 - DNA, 25 bp, Homo sapien
gtgaattgagatgctgcgggagaac

SEQ ID NO: 1836061 - DNA, 25 bp, Homo sapien
tgaattgagatgctgcgggagaacc

SEQ ID NO: 1836062 - DNA, 25 bp, Homo sapien
aaggttgtgttttctaaatcctgct

SEQ ID NO: 1836063 - DNA, 25 bp, Homo sapien
gggaaaggaactggcctaccagaga

SEQ ID NO: 1836064 - DNA, 25 bp, Homo sapien
aaaccctgttacagcaaaggttgtg

SEQ ID NO: 1836065 - DNA, 25 bp, Homo sapien
aaagcatcaaagtgaggggaaagga

SEQ ID NO: 1836066 - DNA, 25 bp, Homo sapien
gctcagaggagtttacggacaccat

SEQ ID NO: 1836067 - DNA, 25 bp, Homo sapien
tcaagcattttgttccaatgactta

SEQ ID NO: 1836068 - DNA, 25 bp, Homo sapien
tatttctgccatccaatttaacaca

SEQ ID NO: 1836069 - DNA, 25 bp, Homo sapien
ttccaatgacttatttctgccatcc

SEQ ID NO: 1836070 - DNA, 25 bp, Homo sapien
gcattttgttccaatgacttatttc

SEQ ID NO: 1836071 - DNA, 25 bp, Homo sapien
cttgcttcctccacaatgtcagaga

SEQ ID NO: 1836072 - DNA, 25 bp, Homo sapien
gcttcctccacaatgtcagagatga

SEQ ID NO: 1836073 - DNA, 25 bp, Homo sapien
cacaatgtcagagatgatgtggacc

SEQ ID NO: 1836074 - DNA, 25 bp, Homo sapien
caatgtcagagatgatgtggaccat

SEQ ID NO: 1836075 - DNA, 25 bp, Homo sapien
ctttaagttgagaatggctctttct

SEQ ID NO: 1836076 - DNA, 25 bp, Homo sapien
taagttgagaatggctctttctggg

SEQ ID NO: 1836077 - DNA, 25 bp, Homo sapien
tgagaatggctctttctggggcctt

SEQ ID NO: 1836078 - DNA, 25 bp, Homo sapien
gccttccccagcttgccttttcttc

SEQ ID NO: 1836079 - DNA, 25 bp, Homo sapien
aacctgaggctagtggagcaagacc

SEQ ID NO: 1836080 - DNA, 25 bp, Homo sapien
gattcatggcagtattccagctgga

SEQ ID NO: 1836081 - DNA, 25 bp, Homo sapien
agttatggccaatactgaccccagc

SEQ ID NO: 1836082 - DNA, 25 bp, Homo sapien
gttgagctcaagtgcagttatggcc

SEQ ID NO: 1836083 - DNA, 25 bp, Homo sapien
tgatggccataagtagagcttaagg

SEQ ID NO: 1836084 - DNA, 25 bp, Homo sapien
ctgacgtgggtttgacctagatgaa

SEQ ID NO: 1836085 - DNA, 25 bp, Homo sapien
taaaggttatgactctcaactgagc

SEQ ID NO: 1836086 - DNA, 25 bp, Homo sapien
tgtgttgtgagcagagaagtactca

SEQ ID NO: 1836087 - DNA, 25 bp, Homo sapien
gatggtcttttgggacaggaggaac

SEQ ID NO: 1836088 - DNA, 25 bp, Homo sapien
ctgtaaggtcagatctttcttgtaa

SEQ ID NO: 1836089 - DNA, 25 bp, Homo sapien
tcttgtaatttgtaagtcttaaaga

SEQ ID NO: 1836090 - DNA, 25 bp, Homo sapien
gtaaggtcagatctttcttgtaatt

SEQ ID NO: 1836091 - DNA, 25 bp, Homo sapien
tgtaagtcttaaagaagtctgatta

SEQ ID NO: 1836092 - DNA, 25 bp, Homo sapien
aataagatggtaagcaggagcctcg

SEQ ID NO: 1836093 - DNA, 25 bp, Homo sapien
cagaacccactgctccgtggcagtc

SEQ ID NO: 1836094 - DNA, 25 bp, Homo sapien
taagcaggagcctcgtaaagcgcct

SEQ ID NO: 1836095 - DNA, 25 bp, Homo sapien
agaacccactgctccgtggcagtcg

SEQ ID NO: 1836096 - DNA, 25 bp, Homo sapien
gatggacttcatgaacattgcaatg

SEQ ID NO: 1836097 - DNA, 25 bp, Homo sapien
aagcagctcacagagggttggctgt

SEQ ID NO: 1836098 - DNA, 25 bp, Homo sapien
aagtgagcatccttgaagaccacaa

SEQ ID NO: 1836099 - DNA, 25 bp, Homo sapien
tacctctgtgagtagagcaactaaa

SEQ ID NO: 1836100 - DNA, 25 bp, Homo sapien
taagtcgtatcatccacatcagatc

SEQ ID NO: 1836101 - DNA, 25 bp, Homo sapien
tgtgggtaagccaagagccctcagt

SEQ ID NO: 1836102 - DNA, 25 bp, Homo sapien
catcagatctatatgattgctgtgg

SEQ ID NO: 1836103 - DNA, 25 bp, Homo sapien
cagttcaatagacacagcatttgaa

SEQ ID NO: 1836104 - DNA, 25 bp, Homo sapien
tatactcactgtactataaggagca

SEQ ID NO: 1836105 - DNA, 25 bp, Homo sapien
cactgtactataaggagcaaatgct

SEQ ID NO: 1836106 - DNA, 25 bp, Homo sapien
cactgtagttaagaagtatgaaata

SEQ ID NO: 1836107 - DNA, 25 bp, Homo sapien
aggtcttaccctgctaaaatcaagg

SEQ ID NO: 1836108 - DNA, 25 bp, Homo sapien
ccctggagaatgtcaagttccacat

SEQ ID NO: 1836109 - DNA, 25 bp, Homo sapien
tgcattgaaatggtagtgaacgctc

SEQ ID NO: 1836110 - DNA, 25 bp, Homo sapien
gagaatgtcaagttccacatttgca

SEQ ID NO: 1836111 - DNA, 25 bp, Homo sapien
cattgaaatggtagtgaacgctcat

SEQ ID NO: 1836112 - DNA, 25 bp, Homo sapien
tcagagatgtaagcagttaaatatg

SEQ ID NO: 1836113 - DNA, 25 bp, Homo sapien
cagagatgtaagcagttaaatatgg

SEQ ID NO: 1836114 - DNA, 25 bp, Homo sapien
gaaacatccacatgaaaatgcatgc

SEQ ID NO: 1836115 - DNA, 25 bp, Homo sapien
tcctgagatcatgggacaagaatcc

SEQ ID NO: 1836116 - DNA, 25 bp, Homo sapien
ggagggagtgttaccaggccatttc

SEQ ID NO: 1836117 - DNA, 25 bp, Homo sapien
aatccatcaaaaacatggtagtggg

SEQ ID NO: 1836118 - DNA, 25 bp, Homo sapien
aggctccttgttcaggataagaaat

SEQ ID NO: 1836119 - DNA, 25 bp, Homo sapien
tccttgttcaggataagaaattttg

SEQ ID NO: 1836120 - DNA, 25 bp, Homo sapien
gagcatctgtgtagtcagctgtgtt

SEQ ID NO: 1836121 - DNA, 25 bp, Homo sapien
atctggagcatctgtgtagtcagct

SEQ ID NO: 1836122 - DNA, 25 bp, Homo sapien
ccttcctcctgatgtgtatcagtgt

SEQ ID NO: 1836123 - DNA, 25 bp, Homo sapien
cttcctcctgatgtgtatcagtgtt

SEQ ID NO: 1836124 - DNA, 25 bp, Homo sapien
tcctgatgtgtatcagtgttaattc

SEQ ID NO: 1836125 - DNA, 25 bp, Homo sapien
tcctcctgatgtgtatcagtgttaa

SEQ ID NO: 1836126 - DNA, 25 bp, Homo sapien
gctttaaggtgagtccctattatta

SEQ ID NO: 1836127 - DNA, 25 bp, Homo sapien
ctgctttaaggtgagtccctattat

SEQ ID NO: 1836128 - DNA, 25 bp, Homo sapien
aggtgagtccctattattaccctct

SEQ ID NO: 1836129 - DNA, 25 bp, Homo sapien
gagtccctattattaccctctcagt

SEQ ID NO: 1836130 - DNA, 25 bp, Homo sapien
gtcttagaagtggtttcagtgggaa

SEQ ID NO: 1836131 - DNA, 25 bp, Homo sapien
cgtggaggaaacttccgtggtcgtg

SEQ ID NO: 1836132 - DNA, 25 bp, Homo sapien
tcagtgggaataacaactttggtcg

SEQ ID NO: 1836133 - DNA, 25 bp, Homo sapien
tttgctggtggtcttagaagtggtt

SEQ ID NO: 1836134 - DNA, 25 bp, Homo sapien
gccccagtcccatgaggagtagaca

SEQ ID NO: 1836135 - DNA, 25 bp, Homo sapien
aaatcacctccctgtctagcgtgcg

SEQ ID NO: 1836136 - DNA, 25 bp, Homo sapien
cagggttacagtccttctgggcaca

SEQ ID NO: 1836137 - DNA, 25 bp, Homo sapien
tgtggaacattagccccactggcag

SEQ ID NO: 1836138 - DNA, 25 bp, Homo sapien
gaactgaagaactgagtaagacacc

SEQ ID NO: 1836139 - DNA, 25 bp, Homo sapien
tttggtgccagtttttcacactgaa

SEQ ID NO: 1836140 - DNA, 25 bp, Homo sapien
tcagtgaaagacgtactttggtgcc

SEQ ID NO: 1836141 - DNA, 25 bp, Homo sapien
ttggatttttggaactgagactaca

SEQ ID NO: 1836142 - DNA, 25 bp, Homo sapien
ctccctgcaccttttggttttcatt

SEQ ID NO: 1836143 - DNA, 25 bp, Homo sapien
tttcatttcttccatcagtagccat

SEQ ID NO: 1836144 - DNA, 25 bp, Homo sapien
tggttttcatttcttccatcagtag

SEQ ID NO: 1836145 - DNA, 25 bp, Homo sapien
gttttcatttcttccatcagtagcc

SEQ ID NO: 1836146 - DNA, 25 bp, Homo sapien
tcagggaaagctcactggataaaca

SEQ ID NO: 1836147 - DNA, 25 bp, Homo sapien
gagaacctctcattggttctgggag

SEQ ID NO: 1836148 - DNA, 25 bp, Homo sapien
tgcagcatgctttacttgcctcagg

SEQ ID NO: 1836149 - DNA, 25 bp, Homo sapien
gtggcaaacaatgaaggactgcctt

SEQ ID NO: 1836150 - DNA, 25 bp, Homo sapien
cacttgggaccttgattgctgatga

SEQ ID NO: 1836151 - DNA, 25 bp, Homo sapien
ccatgtgggtgagcaaatgtcagcc

SEQ ID NO: 1836152 - DNA, 25 bp, Homo sapien
cagataatccaacagccagaagggc

SEQ ID NO: 1836153 - DNA, 25 bp, Homo sapien
catttagttaacaggtcagcgggca

SEQ ID NO: 1836154 - DNA, 25 bp, Homo sapien
tgcagctgacagcctcctcaggtct

SEQ ID NO: 1836155 - DNA, 25 bp, Homo sapien
cagctgacagcctcctcaggtctct

SEQ ID NO: 1836156 - DNA, 25 bp, Homo sapien
gctgacagcctcctcaggtctctca

SEQ ID NO: 1836157 - DNA, 25 bp, Homo sapien
ctgacagcctcctcaggtctctcat

SEQ ID NO: 1836158 - DNA, 25 bp, Homo sapien
gggctctcattacccaaacatctga

SEQ ID NO: 1836159 - DNA, 25 bp, Homo sapien
ttgccatgtgtcatcgagtcgctcc

SEQ ID NO: 1836160 - DNA, 25 bp, Homo sapien
ccttctgtataatgggagttctgga

SEQ ID NO: 1836161 - DNA, 25 bp, Homo sapien
gccaactttagaatcttgaccaaaa

SEQ ID NO: 1836162 - DNA, 25 bp, Homo sapien
tcttagtcatgggattcaatcacac

SEQ ID NO: 1836163 - DNA, 25 bp, Homo sapien
gattcctatagacatatgtacacaa

SEQ ID NO: 1836164 - DNA, 25 bp, Homo sapien
gtgaatatccacaaactaaagcaag

SEQ ID NO: 1836165 - DNA, 25 bp, Homo sapien
gataaactgatcatgtgcacaagaa

SEQ ID NO: 1836166 - DNA, 25 bp, Homo sapien
tgagtgtggcaacctaacattcccc

SEQ ID NO: 1836167 - DNA, 25 bp, Homo sapien
gttaagtcaacagagctccactggt

SEQ ID NO: 1836168 - DNA, 25 bp, Homo sapien
tattaataacgctgtgcctcaggag

SEQ ID NO: 1836169 - DNA, 25 bp, Homo sapien
cattctatttgtgataccccggcta

SEQ ID NO: 1836170 - DNA, 25 bp, Homo sapien
tttacaccagaaacatagtaccctg

SEQ ID NO: 1836171 - DNA, 25 bp, Homo sapien
caagattgttgcttatagcccacag

SEQ ID NO: 1836172 - DNA, 25 bp, Homo sapien
aatttggagagccagtctgccacgg

SEQ ID NO: 1836173 - DNA, 25 bp, Homo sapien
cacacaagggatgaatatgtcccca

SEQ ID NO: 1836174 - DNA, 25 bp, Homo sapien
ttccttcctgagtgtgcgccattgg

SEQ ID NO: 1836175 - DNA, 25 bp, Homo sapien
aaagcatttaagtgacggcatggcg

SEQ ID NO: 1836176 - DNA, 25 bp, Homo sapien
taactgggtgctcctttacaattcc

SEQ ID NO: 1836177 - DNA, 25 bp, Homo sapien
ggcatggcgatactagtcactaaca

SEQ ID NO: 1836178 - DNA, 25 bp, Homo sapien
caagtggcaattgtcttccagtgca

SEQ ID NO: 1836179 - DNA, 25 bp, Homo sapien
catttttcttgcgatccatatactc

SEQ ID NO: 1836180 - DNA, 25 bp, Homo sapien
taaagcgtacaataagagtgatcct

SEQ ID NO: 1836181 - DNA, 25 bp, Homo sapien
ggtagtattcgaccatagtgtcaca

SEQ ID NO: 1836182 - DNA, 25 bp, Homo sapien
gcagcatagtccttgttttgttggt

SEQ ID NO: 1836183 - DNA, 25 bp, Homo sapien
cacggcagcatagtccttgttttgt

SEQ ID NO: 1836184 - DNA, 25 bp, Homo sapien
ggtggtctttgagggtctacatcag

SEQ ID NO: 1836185 - DNA, 25 bp, Homo sapien
tcattttcttctggactggtaattt

SEQ ID NO: 1836186 - DNA, 25 bp, Homo sapien
gttacacggtgaacagaatttctag

SEQ ID NO: 1836187 - DNA, 25 bp, Homo sapien
tatgaaatcctagaggctccacagc

SEQ ID NO: 1836188 - DNA, 25 bp, Homo sapien
caactattgctcctgccacttgggt

SEQ ID NO: 1836189 - DNA, 25 bp, Homo sapien
tactaatccctaattaggccgggca

SEQ ID NO: 1836190 - DNA, 25 bp, Homo sapien
ggaccagttgaagctcattattaac

SEQ ID NO: 1836191 - DNA, 25 bp, Homo sapien
aggaccagttgaagctcattattaa

SEQ ID NO: 1836192 - DNA, 25 bp, Homo sapien
cagaatctcctcgacttgctcaggg

SEQ ID NO: 1836193 - DNA, 25 bp, Homo sapien
tcttcttcctcgtctactatttctg

SEQ ID NO: 1836194 - DNA, 25 bp, Homo sapien
ttctcctcatcggtgcctccattta

SEQ ID NO: 1836195 - DNA, 25 bp, Homo sapien
tccatttacacgagcagggcgtgcc

SEQ ID NO: 1836196 - DNA, 25 bp, Homo sapien
tgatggatcaaaaggaataatggat

SEQ ID NO: 1836197 - DNA, 25 bp, Homo sapien
gatcagccacatagtaccttagagg

SEQ ID NO: 1836198 - DNA, 25 bp, Homo sapien
tcttcacaggaatactaggagaaag

SEQ ID NO: 1836199 - DNA, 25 bp, Homo sapien
tatgtttttaaggttgatcagccac

SEQ ID NO: 1836200 - DNA, 25 bp, Homo sapien
ggtctaaatggctattcttcacagg

SEQ ID NO: 1836201 - DNA, 25 bp, Homo sapien
ccccgtgtttcagacctctctgctc

SEQ ID NO: 1836202 - DNA, 25 bp, Homo sapien
ctgatcgactggaacctcaacctga

SEQ ID NO: 1836203 - DNA, 25 bp, Homo sapien
gatcgactggaacctcaacctgagt

SEQ ID NO: 1836204 - DNA, 25 bp, Homo sapien
gactggaacctcaacctgagtatct

SEQ ID NO: 1836205 - DNA, 25 bp, Homo sapien
tcaaaatccaattgtgacatcgtgt

SEQ ID NO: 1836206 - DNA, 25 bp, Homo sapien
tccaattgtgacatcgtgtggctga

SEQ ID NO: 1836207 - DNA, 25 bp, Homo sapien
aaatcaaaatccaattgtgacatcg

SEQ ID NO: 1836208 - DNA, 25 bp, Homo sapien
aaatccaattgtgacatcgtgtggc

SEQ ID NO: 1836209 - DNA, 25 bp, Homo sapien
tttagttgatagtatttttgtgcac

SEQ ID NO: 1836210 - DNA, 25 bp, Homo sapien
ctccattgacatcccctcaatttca

SEQ ID NO: 1836211 - DNA, 25 bp, Homo sapien
aactccattgacatcccctcaattt

SEQ ID NO: 1836212 - DNA, 25 bp, Homo sapien
cctgactcttcaactccattgacat

SEQ ID NO: 1836213 - DNA, 25 bp, Homo sapien
tgactcttcaactccattgacatcc

SEQ ID NO: 1836214 - DNA, 25 bp, Homo sapien
acagcccatgtgcagttaggaccaa

SEQ ID NO: 1836215 - DNA, 25 bp, Homo sapien
gaccaaagaacctgcaggtcacgga

SEQ ID NO: 1836216 - DNA, 25 bp, Homo sapien
gtcacggacccgctatgctttttca

SEQ ID NO: 1836217 - DNA, 25 bp, Homo sapien
caaatggagcgatttcagtcacagc

SEQ ID NO: 1836218 - DNA, 25 bp, Homo sapien
tccaagagatcaggcagtttgtccg

SEQ ID NO: 1836219 - DNA, 25 bp, Homo sapien
tcctgatcgtaagaaactgtgagca

SEQ ID NO: 1836220 - DNA, 25 bp, Homo sapien
cgtcagccagatctcaggaaaccct

SEQ ID NO: 1836221 - DNA, 25 bp, Homo sapien
ttacagggtgttgccccaatctggc

SEQ ID NO: 1836222 - DNA, 25 bp, Homo sapien
gatccccttgatctggtcacctaag

SEQ ID NO: 1836223 - DNA, 25 bp, Homo sapien
taatcagtattaaagtgtcccgcca

SEQ ID NO: 1836224 - DNA, 25 bp, Homo sapien
tgtcaacctaattcagaggcctgag

SEQ ID NO: 1836225 - DNA, 25 bp, Homo sapien
gaagacaagcagtacagacgactct

SEQ ID NO: 1836226 - DNA, 25 bp, Homo sapien
cctgaactgctaactggctgggaat

SEQ ID NO: 1836227 - DNA, 25 bp, Homo sapien
gagaccctggacagatctgagacag

SEQ ID NO: 1836228 - DNA, 25 bp, Homo sapien
gacccgtcaaaagagttacactgtg

SEQ ID NO: 1836229 - DNA, 25 bp, Homo sapien
tgctcctagaaataaccgaccacag

SEQ ID NO: 1836230 - DNA, 25 bp, Homo sapien
gctggttttgctagcagcacatgat

SEQ ID NO: 1836231 - DNA, 25 bp, Homo sapien
tctgcccgtttatcagctgaccctg

SEQ ID NO: 1836232 - DNA, 25 bp, Homo sapien
aatattcacaatgactgtctcccga

SEQ ID NO: 1836233 - DNA, 25 bp, Homo sapien
gatgcaaacaacaaccgtctgcccg

SEQ ID NO: 1836234 - DNA, 25 bp, Homo sapien
tgtccaggggcttacctctcagaac

SEQ ID NO: 1836235 - DNA, 25 bp, Homo sapien
atgtccaggggcttacctctcagaa

SEQ ID NO: 1836236 - DNA, 25 bp, Homo sapien
gtccaggggcttacctctcagaaca

SEQ ID NO: 1836237 - DNA, 25 bp, Homo sapien
taaatgaaggcactgtttacagcat

SEQ ID NO: 1836238 - DNA, 25 bp, Homo sapien
gcagacaagagcaaaaggttacagc

SEQ ID NO: 1836239 - DNA, 25 bp, Homo sapien
ggagattttaagcagcaggtggtag

SEQ ID NO: 1836240 - DNA, 25 bp, Homo sapien
taagtctaacggttgtcaaatggcc

SEQ ID NO: 1836241 - DNA, 25 bp, Homo sapien
cccaggctctgatggaataatcaca

SEQ ID NO: 1836242 - DNA, 25 bp, Homo sapien
cctgagtctggttttgtgagctcgt

SEQ ID NO: 1836243 - DNA, 25 bp, Homo sapien
gctctgatggaataatcacatcttg

SEQ ID NO: 1836244 - DNA, 25 bp, Homo sapien
atcttgggtcttgccatcctgagtc

SEQ ID NO: 1836245 - DNA, 25 bp, Homo sapien
cgccagcctctgtgagagtatttac

SEQ ID NO: 1836246 - DNA, 25 bp, Homo sapien
acaggagactgagcttgccgaggac

SEQ ID NO: 1836247 - DNA, 25 bp, Homo sapien
caggtataggcaggtagtcaataaa

SEQ ID NO: 1836248 - DNA, 25 bp, Homo sapien
cagatgcccatatctaattcttcac

SEQ ID NO: 1836249 - DNA, 25 bp, Homo sapien
tgagcttgccgaggacagactgtca

SEQ ID NO: 1836250 - DNA, 25 bp, Homo sapien
gatctggctgggtaaatgtcacggt

SEQ ID NO: 1836251 - DNA, 25 bp, Homo sapien
gggcctaagactctccttcatttga

SEQ ID NO: 1836252 - DNA, 25 bp, Homo sapien
aatgtcacggtgttcagtgagaaaa

SEQ ID NO: 1836253 - DNA, 25 bp, Homo sapien
ccttcatttgatctggctgggtaaa

SEQ ID NO: 1836254 - DNA, 25 bp, Homo sapien
caagaacatgcagttggtctccacc

SEQ ID NO: 1836255 - DNA, 25 bp, Homo sapien
cctagagcttgtcagctcccccggg

SEQ ID NO: 1836256 - DNA, 25 bp, Homo sapien
gtgaaaactctgacaaaatttctca

SEQ ID NO: 1836257 - DNA, 25 bp, Homo sapien
ttcctccacgtgaaaactctgacaa

SEQ ID NO: 1836258 - DNA, 25 bp, Homo sapien
ccacgtgaaaactctgacaaaattt

SEQ ID NO: 1836259 - DNA, 25 bp, Homo sapien
gaaaatccgatatcatgtagacagc

SEQ ID NO: 1836260 - DNA, 25 bp, Homo sapien
tagacagcactacaccaagaataat

SEQ ID NO: 1836261 - DNA, 25 bp, Homo sapien
tagttggagccaaacagaatacagc

SEQ ID NO: 1836262 - DNA, 25 bp, Homo sapien
gagaagactctccaaatgctgggta

SEQ ID NO: 1836263 - DNA, 25 bp, Homo sapien
gatcctgcatgggacaattctaagg

SEQ ID NO: 1836264 - DNA, 25 bp, Homo sapien
tttcatgggctctgagagggtccca

SEQ ID NO: 1836265 - DNA, 25 bp, Homo sapien
tcaagcaacaaagggcagtaattgg

SEQ ID NO: 1836266 - DNA, 25 bp, Homo sapien
agtgccagggaggtaattctccaag

SEQ ID NO: 1836267 - DNA, 25 bp, Homo sapien
agtgcttccacgcatctgccaagag

SEQ ID NO: 1836268 - DNA, 25 bp, Homo sapien
tacctgttttgagcaagcccaatga

SEQ ID NO: 1836269 - DNA, 25 bp, Homo sapien
ggccttaggcaagacccagtgttgc

SEQ ID NO: 1836270 - DNA, 25 bp, Homo sapien
tatctaaccgttcaatgctcggaca

SEQ ID NO: 1836271 - DNA, 25 bp, Homo sapien
agttctgcatcctacgacagcaggg

SEQ ID NO: 1836272 - DNA, 25 bp, Homo sapien
gacagcagggtaacatgagttcttg

SEQ ID NO: 1836273 - DNA, 25 bp, Homo sapien
tcttggcattctaaagtggagctcc

SEQ ID NO: 1836274 - DNA, 25 bp, Homo sapien
ggaggctctggcctacaccagtaat

SEQ ID NO: 1836275 - DNA, 25 bp, Homo sapien
tgaggatgaattgcagtaacgcttc

SEQ ID NO: 1836276 - DNA, 25 bp, Homo sapien
gaattgcagtaacgcttcatgcttg

SEQ ID NO: 1836277 - DNA, 25 bp, Homo sapien
actctgaggatgaattgcagtaacg

SEQ ID NO: 1836278 - DNA, 25 bp, Homo sapien
aacgcttcatgcttggggcgatgca

SEQ ID NO: 1836279 - DNA, 25 bp, Homo sapien
tctgaattcacgtcttcttttttcc

SEQ ID NO: 1836280 - DNA, 25 bp, Homo sapien
caactgttgacttagagtggcgatc

SEQ ID NO: 1836281 - DNA, 25 bp, Homo sapien
ggagatgagttgtcactggatccaa

SEQ ID NO: 1836282 - DNA, 25 bp, Homo sapien
cactatttggaatggtttcttgtga

SEQ ID NO: 1836283 - DNA, 25 bp, Homo sapien
tgtggctgccaaaagtgggctcctc

SEQ ID NO: 1836284 - DNA, 25 bp, Homo sapien
gttgagtttcggtggcttttatcac

SEQ ID NO: 1836285 - DNA, 25 bp, Homo sapien
ctcctggggagccacatagcagcca

SEQ ID NO: 1836286 - DNA, 25 bp, Homo sapien
gctcctccacacaaaagggaggttg

SEQ ID NO: 1836287 - DNA, 25 bp, Homo sapien
tctcaagctctaccagtccctcatc

SEQ ID NO: 1836288 - DNA, 25 bp, Homo sapien
tcaagctctaccagtccctcatcca

SEQ ID NO: 1836289 - DNA, 25 bp, Homo sapien
caagctctaccagtccctcatccac

SEQ ID NO: 1836290 - DNA, 25 bp, Homo sapien
tctctcaagctctaccagtccctca

SEQ ID NO: 1836291 - DNA, 25 bp, Homo sapien
cctcccttggatctgaaggtcctct

SEQ ID NO: 1836292 - DNA, 25 bp, Homo sapien
ggatctgaaggtcctctcccctcat

SEQ ID NO: 1836293 - DNA, 25 bp, Homo sapien
ccttggatctgaaggtcctctcccc

SEQ ID NO: 1836294 - DNA, 25 bp, Homo sapien
ttggatctgaaggtcctctcccctc

SEQ ID NO: 1836295 - DNA, 25 bp, Homo sapien
tacaataggaggtagtgaagaagct

SEQ ID NO: 1836296 - DNA, 25 bp, Homo sapien
tggatcctacaataggaggtagtga

SEQ ID NO: 1836297 - DNA, 25 bp, Homo sapien
aataggaggtagtgaagaagctttc

SEQ ID NO: 1836298 - DNA, 25 bp, Homo sapien
tcctacaataggaggtagtgaagaa

SEQ ID NO: 1836299 - DNA, 25 bp, Homo sapien
ctgtggaaacaaattgcaatttaga

SEQ ID NO: 1836300 - DNA, 25 bp, Homo sapien
gaaacaaattgcaatttagaaatct

SEQ ID NO: 1836301 - DNA, 25 bp, Homo sapien
ggaaacaaattgcaatttagaaatc

SEQ ID NO: 1836302 - DNA, 25 bp, Homo sapien
gtggaaacaaattgcaatttagaaa

SEQ ID NO: 1836303 - DNA, 25 bp, Homo sapien
gccttctcatcgttgacttgtcaaa

SEQ ID NO: 1836304 - DNA, 25 bp, Homo sapien
aaggccttctcatcgttgacttgtc

SEQ ID NO: 1836305 - DNA, 25 bp, Homo sapien
aggccttctcatcgttgacttgtca

SEQ ID NO: 1836306 - DNA, 25 bp, Homo sapien
aaaaggccttctcatcgttgacttg

SEQ ID NO: 1836307 - DNA, 25 bp, Homo sapien
ttcttaaacttatctctgccaacag

SEQ ID NO: 1836308 - DNA, 25 bp, Homo sapien
tctgccaacagccacataaaactgc

SEQ ID NO: 1836309 - DNA, 25 bp, Homo sapien
taaacttatctctgccaacagccac

SEQ ID NO: 1836310 - DNA, 25 bp, Homo sapien
ttatctctgccaacagccacataaa

SEQ ID NO: 1836311 - DNA, 25 bp, Homo sapien
aaaaacccattgacctgtcagcttg

SEQ ID NO: 1836312 - DNA, 25 bp, Homo sapien
aatagccaccaacattcctgaaatg

SEQ ID NO: 1836313 - DNA, 25 bp, Homo sapien
taaatggccatatcatacagaacca

SEQ ID NO: 1836314 - DNA, 25 bp, Homo sapien
taaaactgctgctacgagctacaat

SEQ ID NO: 1836315 - DNA, 25 bp, Homo sapien
caaaaatggtttcaggcactgccaa

SEQ ID NO: 1836316 - DNA, 25 bp, Homo sapien
ctttgctggaaaggtgagtaggctg

SEQ ID NO: 1836317 - DNA, 25 bp, Homo sapien
tccacccactaaacagtagcagtag

SEQ ID NO: 1836318 - DNA, 25 bp, Homo sapien
gaaaggtgagtaggctgccctgtac

SEQ ID NO: 1836319 - DNA, 25 bp, Homo sapien
aagcacaatgatacaccatctcatg

SEQ ID NO: 1836320 - DNA, 25 bp, Homo sapien
caaaaagcacaatgatacaccatct

SEQ ID NO: 1836321 - DNA, 25 bp, Homo sapien
gcaaaggaactggtaaagatttcat

SEQ ID NO: 1836322 - DNA, 25 bp, Homo sapien
tcctgggcaaaggaactggtaaaga

SEQ ID NO: 1836323 - DNA, 25 bp, Homo sapien
catttgtagtacatgatcccactga

SEQ ID NO: 1836324 - DNA, 25 bp, Homo sapien
tttctgtgaccatttgtagtacatg

SEQ ID NO: 1836325 - DNA, 25 bp, Homo sapien
gccccgctcctcagagtgatttttt

SEQ ID NO: 1836326 - DNA, 25 bp, Homo sapien
agtacatgatcccactgattcaagg

SEQ ID NO: 1836327 - DNA, 25 bp, Homo sapien
ctggggataaggaggcgagaagctg

SEQ ID NO: 1836328 - DNA, 25 bp, Homo sapien
agaagctgggtttatgaggtctcca

SEQ ID NO: 1836329 - DNA, 25 bp, Homo sapien
gcgagaagctgggtttatgaggtct

SEQ ID NO: 1836330 - DNA, 25 bp, Homo sapien
aggcgagaagctgggtttatgaggt

SEQ ID NO: 1836331 - DNA, 25 bp, Homo sapien
gatagtgcacggctcctgaagcggt

SEQ ID NO: 1836332 - DNA, 25 bp, Homo sapien
cctgaagcggttttctaaagcgagc

SEQ ID NO: 1836333 - DNA, 25 bp, Homo sapien
tcctgctatggattactggttttac

SEQ ID NO: 1836334 - DNA, 25 bp, Homo sapien
taaagcgagctgacacgttgatcct

SEQ ID NO: 1836335 - DNA, 25 bp, Homo sapien
gccactgggtagatgtgatcacctt

SEQ ID NO: 1836336 - DNA, 25 bp, Homo sapien
agcccttgccactgggtagatgtga

SEQ ID NO: 1836337 - DNA, 25 bp, Homo sapien
agcaccctcaattcccgcagccctt

SEQ ID NO: 1836338 - DNA, 25 bp, Homo sapien
ctgggtagatgtgatcacctttgcc

SEQ ID NO: 1836339 - DNA, 25 bp, Homo sapien
accttatggccgctctcaagtacag

SEQ ID NO: 1836340 - DNA, 25 bp, Homo sapien
ggccgctctcaagtacagctgccat

SEQ ID NO: 1836341 - DNA, 25 bp, Homo sapien
tttccccttgaccttatggccgctc

SEQ ID NO: 1836342 - DNA, 25 bp, Homo sapien
ccttgaccttatggccgctctcaag

SEQ ID NO: 1836343 - DNA, 25 bp, Homo sapien
tactgtgtgacaggcactggactaa

SEQ ID NO: 1836344 - DNA, 25 bp, Homo sapien
gaggcaccccacattctgaaatcag

SEQ ID NO: 1836345 - DNA, 25 bp, Homo sapien
taaataaaatagtcaagacccctgc

SEQ ID NO: 1836346 - DNA, 25 bp, Homo sapien
ggacatctgaagaaccccaatgcag

SEQ ID NO: 1836347 - DNA, 25 bp, Homo sapien
tatctgctcatttgtgcaaaaggac

SEQ ID NO: 1836348 - DNA, 25 bp, Homo sapien
aatttggatatcagtcccctgtggg

SEQ ID NO: 1836349 - DNA, 25 bp, Homo sapien
cagtaaagtgccaaagactatctac

SEQ ID NO: 1836350 - DNA, 25 bp, Homo sapien
gtatgctaccctacatataggtaag

SEQ ID NO: 1836351 - DNA, 25 bp, Homo sapien
caaaaccagaatctccagagccccg

SEQ ID NO: 1836352 - DNA, 25 bp, Homo sapien
accagaatctccagagccccgtggt

SEQ ID NO: 1836353 - DNA, 25 bp, Homo sapien
aaaccagaatctccagagccccgtg

SEQ ID NO: 1836354 - DNA, 25 bp, Homo sapien
aaaaccagaatctccagagccccgt

SEQ ID NO: 1836355 - DNA, 25 bp, Homo sapien
ggaggtgtcaatacggactgctgcc

SEQ ID NO: 1836356 - DNA, 25 bp, Homo sapien
gaggtgtcaatacggactgctgcca

SEQ ID NO: 1836357 - DNA, 25 bp, Homo sapien
aggaggtgtcaatacggactgctgc

SEQ ID NO: 1836358 - DNA, 25 bp, Homo sapien
acaggaggtgtcaatacggactgct

SEQ ID NO: 1836359 - DNA, 25 bp, Homo sapien
cacttctccgtggagtgtggcagct

SEQ ID NO: 1836360 - DNA, 25 bp, Homo sapien
tccggcagtcttcttgcaccagcca

SEQ ID NO: 1836361 - DNA, 25 bp, Homo sapien
agccacttctccgtggagtgtggca

SEQ ID NO: 1836362 - DNA, 25 bp, Homo sapien
gcaccagccacttctccgtggagtg

SEQ ID NO: 1836363 - DNA, 25 bp, Homo sapien
gttttgcagtttcactctcttcctt

SEQ ID NO: 1836364 - DNA, 25 bp, Homo sapien
cccacaaacttttcagcaaggcaaa

SEQ ID NO: 1836365 - DNA, 25 bp, Homo sapien
gttcccacaaacttttcagcaaggc

SEQ ID NO: 1836366 - DNA, 25 bp, Homo sapien
tcctctcctggtacttctaaaattc

SEQ ID NO: 1836367 - DNA, 25 bp, Homo sapien
taagaagaaacaaggttgatccacg

SEQ ID NO: 1836368 - DNA, 25 bp, Homo sapien
gaaacaaggttgatccacgttctcc

SEQ ID NO: 1836369 - DNA, 25 bp, Homo sapien
gaagaaacaaggttgatccacgttc

SEQ ID NO: 1836370 - DNA, 25 bp, Homo sapien
ctaagaagaaacaaggttgatccac

SEQ ID NO: 1836371 - DNA, 25 bp, Homo sapien
ccatctcctttagaagggtttatgg

SEQ ID NO: 1836372 - DNA, 25 bp, Homo sapien
agaatcttctcacttgacagggaac

SEQ ID NO: 1836373 - DNA, 25 bp, Homo sapien
acagggaaccttcccatggatttca

SEQ ID NO: 1836374 - DNA, 25 bp, Homo sapien
agatttatttaacaacgctcagaat

SEQ ID NO: 1836375 - DNA, 25 bp, Homo sapien
tatttaacaacgctcagaatcttct

SEQ ID NO: 1836376 - DNA, 25 bp, Homo sapien
aacaacttccattggtcttttcttg

SEQ ID NO: 1836377 - DNA, 25 bp, Homo sapien
aactggtcatagaggtgtcttatat

SEQ ID NO: 1836378 - DNA, 25 bp, Homo sapien
aaagtgagtctacaattttcagccg

SEQ ID NO: 1836379 - DNA, 25 bp, Homo sapien
taatcttgtgagttggtaggatcaa

SEQ ID NO: 1836380 - DNA, 25 bp, Homo sapien
cagagattctgaaccagactttcat

SEQ ID NO: 1836381 - DNA, 25 bp, Homo sapien
tctccagtcacagtgtcaacctcta

SEQ ID NO: 1836382 - DNA, 25 bp, Homo sapien
ctgctgacccaagtgaaattccttc

SEQ ID NO: 1836383 - DNA, 25 bp, Homo sapien
tactgctgacccaagtgaaattcct

SEQ ID NO: 1836384 - DNA, 25 bp, Homo sapien
cttctccagtcacagtgtcaacctc

SEQ ID NO: 1836385 - DNA, 25 bp, Homo sapien
caacgagagttttgaggggcatcaa

SEQ ID NO: 1836386 - DNA, 25 bp, Homo sapien
gggcatcaatcacaccgagaagtca

SEQ ID NO: 1836387 - DNA, 25 bp, Homo sapien
tcatatcaaccccacactatagggc

SEQ ID NO: 1836388 - DNA, 25 bp, Homo sapien
agcccctcaaccactgaggtgtggg

SEQ ID NO: 1836389 - DNA, 25 bp, Homo sapien
ttccggattcggtggccagtccgcg

SEQ ID NO: 1836390 - DNA, 25 bp, Homo sapien
caaagggtgcctgaacgccgccggt

SEQ ID NO: 1836391 - DNA, 25 bp, Homo sapien
gtgtagatgttcctgacggccccaa

SEQ ID NO: 1836392 - DNA, 25 bp, Homo sapien
cgctctggatctggtctagcttccg

SEQ ID NO: 1836393 - DNA, 25 bp, Homo sapien
cgctcttcacgacgggctgagacag

SEQ ID NO: 1836394 - DNA, 25 bp, Homo sapien
aagcacgctcttcacgacgggctga

SEQ ID NO: 1836395 - DNA, 25 bp, Homo sapien
ccgttgcggtacacaagcacgctct

SEQ ID NO: 1836396 - DNA, 25 bp, Homo sapien
gttgcggtacacaagcacgctcttc

SEQ ID NO: 1836397 - DNA, 25 bp, Homo sapien
ttccccgctggccgccgcctcagct

SEQ ID NO: 1836398 - DNA, 25 bp, Homo sapien
cttccccgctggccgccgcctcagc

SEQ ID NO: 1836399 - DNA, 25 bp, Homo sapien
tccccgctggccgccgcctcagctc

SEQ ID NO: 1836400 - DNA, 25 bp, Homo sapien
ccccgctggccgccgcctcagctcg

SEQ ID NO: 1836401 - DNA, 25 bp, Homo sapien
ctgcttcgcgtcgggaggcacctcc

SEQ ID NO: 1836402 - DNA, 25 bp, Homo sapien
ttcgcgtcgggaggcacctccgctg

SEQ ID NO: 1836403 - DNA, 25 bp, Homo sapien
cacctccgctgtcccagcggcctca

SEQ ID NO: 1836404 - DNA, 25 bp, Homo sapien
tgcttcgcgtcgggaggcacctccg

SEQ ID NO: 1836405 - DNA, 25 bp, Homo sapien
accgtggcgtgcacagccaatcagg

SEQ ID NO: 1836406 - DNA, 25 bp, Homo sapien
tgaaagagaagtaacggccgtgcgc

SEQ ID NO: 1836407 - DNA, 25 bp, Homo sapien
gagtagacgctcaagtttttcaccg

SEQ ID NO: 1836408 - DNA, 25 bp, Homo sapien
gcctaggcgtccacccagaggagac

SEQ ID NO: 1836409 - DNA, 25 bp, Homo sapien
cgggcagaatcaaggtggacagctt

SEQ ID NO: 1836410 - DNA, 25 bp, Homo sapien
ctacgggcagaatcaaggtggacag

SEQ ID NO: 1836411 - DNA, 25 bp, Homo sapien
tacgggcagaatcaaggtggacagc

SEQ ID NO: 1836412 - DNA, 25 bp, Homo sapien
acgggcagaatcaaggtggacagct

SEQ ID NO: 1836413 - DNA, 25 bp, Homo sapien
agcaggagccggaaacgcgcggggc

SEQ ID NO: 1836414 - DNA, 25 bp, Homo sapien
gagcaggagccggaaacgcgcgggg

SEQ ID NO: 1836415 - DNA, 25 bp, Homo sapien
tgagcaggagccggaaacgcgcggg

SEQ ID NO: 1836416 - DNA, 25 bp, Homo sapien
ctgagcaggagccggaaacgcgcgg

SEQ ID NO: 1836417 - DNA, 25 bp, Homo sapien
tgatgtgtccagtgttgtattagaa

SEQ ID NO: 1836418 - DNA, 25 bp, Homo sapien
tgtgatgtgtccagtgttgtattag

SEQ ID NO: 1836419 - DNA, 25 bp, Homo sapien
gctgtgatgtgtccagtgttgtatt

SEQ ID NO: 1836420 - DNA, 25 bp, Homo sapien
ctgctgtgatgtgtccagtgttgta

SEQ ID NO: 1836421 - DNA, 25 bp, Homo sapien
gacccctagatagttatggaaccta

SEQ ID NO: 1836422 - DNA, 25 bp, Homo sapien
tcccatttgtgctaaaggccgaggt

SEQ ID NO: 1836423 - DNA, 25 bp, Homo sapien
cctctttgcagagcaattacggcaa

SEQ ID NO: 1836424 - DNA, 25 bp, Homo sapien
tatggaacctcaaagagttagacca

SEQ ID NO: 1836425 - DNA, 25 bp, Homo sapien
catttagattcacaaggcgggccat

SEQ ID NO: 1836426 - DNA, 25 bp, Homo sapien
cagtatcccttgtaaccatcgcagg

SEQ ID NO: 1836427 - DNA, 25 bp, Homo sapien
aagaagtctttgcagccatccaggg

SEQ ID NO: 1836428 - DNA, 25 bp, Homo sapien
catgccccgtagtgacagtatccct

SEQ ID NO: 1836429 - DNA, 25 bp, Homo sapien
caaacttccttggatcacgatgccc

SEQ ID NO: 1836430 - DNA, 25 bp, Homo sapien
ttggagccaatgataacagcatagc

SEQ ID NO: 1836431 - DNA, 25 bp, Homo sapien
tgtaacaggctatctttgaggaagt

SEQ ID NO: 1836432 - DNA, 25 bp, Homo sapien
catagctataaatgggattccttcc

SEQ ID NO: 1836433 - DNA, 25 bp, Homo sapien
ccagaactggattgcatttccagaa

SEQ ID NO: 1836434 - DNA, 25 bp, Homo sapien
tgtgatatgaggcaacacaagcaca

SEQ ID NO: 1836435 - DNA, 25 bp, Homo sapien
ttggcagtcacaataccagaactgg

SEQ ID NO: 1836436 - DNA, 25 bp, Homo sapien
gctgtttttatagatgtgatatgag

SEQ ID NO: 1836437 - DNA, 25 bp, Homo sapien
aatgaagcgtaggaacttgacaagc

SEQ ID NO: 1836438 - DNA, 25 bp, Homo sapien
gctaatctatatgcctacacctcag

SEQ ID NO: 1836439 - DNA, 25 bp, Homo sapien
gtagatatttagataccacccctgc

SEQ ID NO: 1836440 - DNA, 25 bp, Homo sapien
ttgacaagcccataggtagctatag

SEQ ID NO: 1836441 - DNA, 25 bp, Homo sapien
tactcccgtcgctgatttggaagaa

SEQ ID NO: 1836442 - DNA, 25 bp, Homo sapien
cactcctgtgtgtggtcatgggaag

SEQ ID NO: 1836443 - DNA, 25 bp, Homo sapien
cctcccaaagtagtgtgcatggaag

SEQ ID NO: 1836444 - DNA, 25 bp, Homo sapien
gattctagagtgtccagctcttgca

SEQ ID NO: 1836445 - DNA, 25 bp, Homo sapien
catggagtagggactgcagagaccc

SEQ ID NO: 1836446 - DNA, 25 bp, Homo sapien
tacatacgtgccatatcagttgacc

SEQ ID NO: 1836447 - DNA, 25 bp, Homo sapien
tcaagtgtcagatgtcagagtgctc

SEQ ID NO: 1836448 - DNA, 25 bp, Homo sapien
taggttactatgcagctagcacatg

SEQ ID NO: 1836449 - DNA, 25 bp, Homo sapien
ccccttttcaccagtctctactctt

SEQ ID NO: 1836450 - DNA, 25 bp, Homo sapien
cttttcaccagtctctactcttgag

SEQ ID NO: 1836451 - DNA, 25 bp, Homo sapien
tttagtatcatctcacccgtggcag

SEQ ID NO: 1836452 - DNA, 25 bp, Homo sapien
taatgcgacaaaggtccctcatgag

SEQ ID NO: 1836453 - DNA, 25 bp, Homo sapien
tgccacgctgcaggactgacaaatg

SEQ ID NO: 1836454 - DNA, 25 bp, Homo sapien
ttacagtagcgtgtggctcaggcca

SEQ ID NO: 1836455 - DNA, 25 bp, Homo sapien
tgttctaacagataaccacagaggg

SEQ ID NO: 1836456 - DNA, 25 bp, Homo sapien
tgtctatcaggatctaccaccgctc

SEQ ID NO: 1836457 - DNA, 25 bp, Homo sapien
tagtgtgtctctctactcccaggag

SEQ ID NO: 1836458 - DNA, 25 bp, Homo sapien
tacagcaggtctgactacaggcaat

SEQ ID NO: 1836459 - DNA, 25 bp, Homo sapien
tgtgattcagcatgagagaggtggg

SEQ ID NO: 1836460 - DNA, 25 bp, Homo sapien
attcagcatgagagaggtgggcaga

SEQ ID NO: 1836461 - DNA, 25 bp, Homo sapien
atggatgtgattcagcatgagagag

SEQ ID NO: 1836462 - DNA, 25 bp, Homo sapien
tgattcagcatgagagaggtgggca

SEQ ID NO: 1836463 - DNA, 25 bp, Homo sapien
tcaatctgagccaaggctatagacg

SEQ ID NO: 1836464 - DNA, 25 bp, Homo sapien
tgccccggagagtcgggctcccaaa

SEQ ID NO: 1836465 - DNA, 25 bp, Homo sapien
ctatagacgtgaagtgccccggaga

SEQ ID NO: 1836466 - DNA, 25 bp, Homo sapien
ttccagcagcaatgacgacttggtt

SEQ ID NO: 1836467 - DNA, 25 bp, Homo sapien
taagggacacaagacagaattcatg

SEQ ID NO: 1836468 - DNA, 25 bp, Homo sapien
tattgagttcctatggtagtccagg

SEQ ID NO: 1836469 - DNA, 25 bp, Homo sapien
gcagctaaggatgctcaccccaatc

SEQ ID NO: 1836470 - DNA, 25 bp, Homo sapien
taagttctgaaaaccgcagctaagg

SEQ ID NO: 1836471 - DNA, 25 bp, Homo sapien
cagttgctgtctgacctcgtttggc

SEQ ID NO: 1836472 - DNA, 25 bp, Homo sapien
aaactggatggtcttgtgggcctgc

SEQ ID NO: 1836473 - DNA, 25 bp, Homo sapien
gctccgggcccatgatctctgcagg

SEQ ID NO: 1836474 - DNA, 25 bp, Homo sapien
tcttggtcatcatacaccaaactgg

SEQ ID NO: 1836475 - DNA, 25 bp, Homo sapien
gatgagggagctcccaaaccttgag

SEQ ID NO: 1836476 - DNA, 25 bp, Homo sapien
ctttgccttggacctcacggtgatg

SEQ ID NO: 1836477 - DNA, 25 bp, Homo sapien
ccttggacctcacggtgatgaggga

SEQ ID NO: 1836478 - DNA, 25 bp, Homo sapien
gtgatgagggagctcccaaaccttg

SEQ ID NO: 1836479 - DNA, 25 bp, Homo sapien
caggagaaatcaatacatattgggc

SEQ ID NO: 1836480 - DNA, 25 bp, Homo sapien
tcaggagaaatcaatacatattggg

SEQ ID NO: 1836481 - DNA, 25 bp, Homo sapien
ttcaggagaaatcaatacatattgg

SEQ ID NO: 1836482 - DNA, 25 bp, Homo sapien
attatacccttataccctcatttct

SEQ ID NO: 1836483 - DNA, 25 bp, Homo sapien
tatacccttataccctcatttctac

SEQ ID NO: 1836484 - DNA, 25 bp, Homo sapien
atacccttataccctcatttctact

SEQ ID NO: 1836485 - DNA, 25 bp, Homo sapien
ttatacccttataccctcatttcta

SEQ ID NO: 1836486 - DNA, 25 bp, Homo sapien
aataatggccaaatgctttaggccc

SEQ ID NO: 1836487 - DNA, 25 bp, Homo sapien
ataatggccaaatgctttaggccca

SEQ ID NO: 1836488 - DNA, 25 bp, Homo sapien
taaataatggccaaatgctttaggc

SEQ ID NO: 1836489 - DNA, 25 bp, Homo sapien
agttaaataatggccaaatgcttta

SEQ ID NO: 1836490 - DNA, 25 bp, Homo sapien
aatcagtccagaggttacatctgct

SEQ ID NO: 1836491 - DNA, 25 bp, Homo sapien
tatacatatactcggccgtcttctc

SEQ ID NO: 1836492 - DNA, 25 bp, Homo sapien
tttgccagtcatgtcaccaagggtg

SEQ ID NO: 1836493 - DNA, 25 bp, Homo sapien
gttatccatgatttgcatttgccag

SEQ ID NO: 1836494 - DNA, 25 bp, Homo sapien
ccgccttggtgtagggtcacggtca

SEQ ID NO: 1836495 - DNA, 25 bp, Homo sapien
caggaatgccaccttagacacgtca

SEQ ID NO: 1836496 - DNA, 25 bp, Homo sapien
tgagtgcgtacatgcgagtggctcc

SEQ ID NO: 1836497 - DNA, 25 bp, Homo sapien
accaaatcgggagaagcggcggtct

SEQ ID NO: 1836498 - DNA, 25 bp, Homo sapien
gagctgtgcccagtgccttctgaat

SEQ ID NO: 1836499 - DNA, 25 bp, Homo sapien
aggggacatgagctgtgcccagtgc

SEQ ID NO: 1836500 - DNA, 25 bp, Homo sapien
atgagctgtgcccagtgccttctga

SEQ ID NO: 1836501 - DNA, 25 bp, Homo sapien
gctgtgcccagtgccttctgaatac

SEQ ID NO: 1836502 - DNA, 25 bp, Homo sapien
gtctcctgcatcaggcgcccattcc

SEQ ID NO: 1836503 - DNA, 25 bp, Homo sapien
tgcatcaggcgcccattccacaaga

SEQ ID NO: 1836504 - DNA, 25 bp, Homo sapien
ttccacaagaaatgcggtcacgtct

SEQ ID NO: 1836505 - DNA, 25 bp, Homo sapien
ggcagcatcgctctgcattcacttc

SEQ ID NO: 1836506 - DNA, 25 bp, Homo sapien
tcaaagcagagtcggcaacaacagt

SEQ ID NO: 1836507 - DNA, 25 bp, Homo sapien
tctgagaagtttgccgtatgctggc

SEQ ID NO: 1836508 - DNA, 25 bp, Homo sapien
gtggatacaatctcacgtcagcgtc

SEQ ID NO: 1836509 - DNA, 25 bp, Homo sapien
gcaaagtgtcagtgcgtggatacaa

SEQ ID NO: 1836510 - DNA, 25 bp, Homo sapien
tctcagagaagtcaccccaaggtct

SEQ ID NO: 1836511 - DNA, 25 bp, Homo sapien
ctcagagaagtcaccccaaggtcta

SEQ ID NO: 1836512 - DNA, 25 bp, Homo sapien
tcagagaagtcaccccaaggtctag

SEQ ID NO: 1836513 - DNA, 25 bp, Homo sapien
agtcccattcatcagtacgtggcca

SEQ ID NO: 1836514 - DNA, 25 bp, Homo sapien
cattcatcagtacgtggccactgga

SEQ ID NO: 1836515 - DNA, 25 bp, Homo sapien
tcatcagtacgtggccactggaaag

SEQ ID NO: 1836516 - DNA, 25 bp, Homo sapien
cagtacgtggccactggaaagggaa

SEQ ID NO: 1836517 - DNA, 25 bp, Homo sapien
gggaagtagccatacaccctcccaa

SEQ ID NO: 1836518 - DNA, 25 bp, Homo sapien
gccgtttggtgggaagtagccatac

SEQ ID NO: 1836519 - DNA, 25 bp, Homo sapien
atggtaaaccagctttggccgtttg

SEQ ID NO: 1836520 - DNA, 25 bp, Homo sapien
ttctcatctcggatgtgtaacaaat

SEQ ID NO: 1836521 - DNA, 25 bp, Homo sapien
cagtgacaccgtgaagggaatatcc

SEQ ID NO: 1836522 - DNA, 25 bp, Homo sapien
aaccaacagcaaggttctgttgtcc

SEQ ID NO: 1836523 - DNA, 25 bp, Homo sapien
atatccaaaccaggagaagtcttcc

SEQ ID NO: 1836524 - DNA, 25 bp, Homo sapien
gcattcttccaggtcgggctcccaa

SEQ ID NO: 1836525 - DNA, 25 bp, Homo sapien
gaccagatcgggttcactgtctcca

SEQ ID NO: 1836526 - DNA, 25 bp, Homo sapien
gaataaaacgcagccacaattccct

SEQ ID NO: 1836527 - DNA, 25 bp, Homo sapien
ggagccgatgaccagatcgggttca

SEQ ID NO: 1836528 - DNA, 25 bp, Homo sapien
gccaagagagtccagcccaagttac

SEQ ID NO: 1836529 - DNA, 25 bp, Homo sapien
tgatgttaggggaagaagacattcc

SEQ ID NO: 1836530 - DNA, 25 bp, Homo sapien
tccttgtttggaaccaaagtagaca

SEQ ID NO: 1836531 - DNA, 25 bp, Homo sapien
aaccaaagtagacatacacggcacc

SEQ ID NO: 1836532 - DNA, 25 bp, Homo sapien
ggaagaagacattcctccttgtttg

SEQ ID NO: 1836533 - DNA, 25 bp, Homo sapien
tcggagcccaccgagggagctccca

SEQ ID NO: 1836534 - DNA, 25 bp, Homo sapien
gtccacgttaaagtccaacacagcc

SEQ ID NO: 1836535 - DNA, 25 bp, Homo sapien
cgagggagctcccacggccaggtca

SEQ ID NO: 1836536 - DNA, 25 bp, Homo sapien
gtcaggcacgccgtccacgttaaag

SEQ ID NO: 1836537 - DNA, 25 bp, Homo sapien
ctgagccacggcctcggaaagagca

SEQ ID NO: 1836538 - DNA, 25 bp, Homo sapien
aagaggcacaagtttacttcccctg

SEQ ID NO: 1836539 - DNA, 25 bp, Homo sapien
gcacaagtttacttcccctgggctg

SEQ ID NO: 1836540 - DNA, 25 bp, Homo sapien
gagccacggcctcggaaagagcact

SEQ ID NO: 1836541 - DNA, 25 bp, Homo sapien
taggtaatctctccacacccgtgtg

SEQ ID NO: 1836542 - DNA, 25 bp, Homo sapien
cagtggcatctataagtgctgcccc

SEQ ID NO: 1836543 - DNA, 25 bp, Homo sapien
ataacaacgaatggcctttcacaca

SEQ ID NO: 1836544 - DNA, 25 bp, Homo sapien
cacgtccattatttattaggtaatc

SEQ ID NO: 1836545 - DNA, 25 bp, Homo sapien
gcaggcccaggtcattgccgtagat

SEQ ID NO: 1836546 - DNA, 25 bp, Homo sapien
agatgaggtacacgcgcccgatgtg

SEQ ID NO: 1836547 - DNA, 25 bp, Homo sapien
tggaagccttcaaggatcctgtggg

SEQ ID NO: 1836548 - DNA, 25 bp, Homo sapien
ggcggctgtagcctggtgcgcccac

SEQ ID NO: 1836549 - DNA, 25 bp, Homo sapien
cctggttgaggtcagctgaggtcat

SEQ ID NO: 1836550 - DNA, 25 bp, Homo sapien
ggaggtagccatacacacaagtgaa

SEQ ID NO: 1836551 - DNA, 25 bp, Homo sapien
ctgtgcttatgtagctgccagccca

SEQ ID NO: 1836552 - DNA, 25 bp, Homo sapien
cacaagtgaacgaccagtaaagaca

SEQ ID NO: 1836553 - DNA, 25 bp, Homo sapien
gaggcctttcggatctttcagggag

SEQ ID NO: 1836554 - DNA, 25 bp, Homo sapien
ggctggagacgtgcttttgtgacaa

SEQ ID NO: 1836555 - DNA, 25 bp, Homo sapien
ccttgtagataaaggacatggaatc

SEQ ID NO: 1836556 - DNA, 25 bp, Homo sapien
ccaagcctcgcataaggaaatgaca

SEQ ID NO: 1836557 - DNA, 25 bp, Homo sapien
tgagagccacctatgaacattgtcc

SEQ ID NO: 1836558 - DNA, 25 bp, Homo sapien
ccaggaatttacactaaagaacact

SEQ ID NO: 1836559 - DNA, 25 bp, Homo sapien
gtccaggaatttacactaaagaaca

SEQ ID NO: 1836560 - DNA, 25 bp, Homo sapien
tccaggaatttacactaaagaacac

SEQ ID NO: 1836561 - DNA, 25 bp, Homo sapien
caggaatttacactaaagaacactc

SEQ ID NO: 1836562 - DNA, 25 bp, Homo sapien
agtttatattcctgtcaacactttc

SEQ ID NO: 1836563 - DNA, 25 bp, Homo sapien
cactttcagttagggatgtagtcaa

SEQ ID NO: 1836564 - DNA, 25 bp, Homo sapien
caacactttcagttagggatgtagt

SEQ ID NO: 1836565 - DNA, 25 bp, Homo sapien
tgtcaacactttcagttagggatgt

SEQ ID NO: 1836566 - DNA, 25 bp, Homo sapien
ggtgtggttttgctggccgccacat

SEQ ID NO: 1836567 - DNA, 25 bp, Homo sapien
tgcaatgaacagagggttctcaggc

SEQ ID NO: 1836568 - DNA, 25 bp, Homo sapien
tgctggccgccacatgcaatgaaca

SEQ ID NO: 1836569 - DNA, 25 bp, Homo sapien
cacatgcaatgaacagagggttctc

SEQ ID NO: 1836570 - DNA, 25 bp, Homo sapien
ggtggtacagcctaagcttcccgct

SEQ ID NO: 1836571 - DNA, 25 bp, Homo sapien
cacacccacatctcaacccggttca

SEQ ID NO: 1836572 - DNA, 25 bp, Homo sapien
ccggttcaggtcagtagtggggaga

SEQ ID NO: 1836573 - DNA, 25 bp, Homo sapien
gtgcttcctagccacacccacatct

SEQ ID NO: 1836574 - DNA, 25 bp, Homo sapien
tatatttcggctgagtttctgatta

SEQ ID NO: 1836575 - DNA, 25 bp, Homo sapien
ttatctatatttcggctgagtttct

SEQ ID NO: 1836576 - DNA, 25 bp, Homo sapien
cttatctatatttcggctgagtttc

SEQ ID NO: 1836577 - DNA, 25 bp, Homo sapien
tctatatttcggctgagtttctgat

SEQ ID NO: 1836578 - DNA, 25 bp, Homo sapien
gactttgtagagtaagtgggatata

SEQ ID NO: 1836579 - DNA, 25 bp, Homo sapien
tagatggtaaatattagtggaccaa

SEQ ID NO: 1836580 - DNA, 25 bp, Homo sapien
catatcatccagtcctccaagaaaa

SEQ ID NO: 1836581 - DNA, 25 bp, Homo sapien
atgccatatcatccagtcctccaag

SEQ ID NO: 1836582 - DNA, 25 bp, Homo sapien
ttggaaacagctagcatctcaccat

SEQ ID NO: 1836583 - DNA, 25 bp, Homo sapien
ggaaacagctagcatctcaccatac

SEQ ID NO: 1836584 - DNA, 25 bp, Homo sapien
cttggaaacagctagcatctcacca

SEQ ID NO: 1836585 - DNA, 25 bp, Homo sapien
tggaaacagctagcatctcaccata

SEQ ID NO: 1836586 - DNA, 25 bp, Homo sapien
cggtgatgacttttcgaccatacag

SEQ ID NO: 1836587 - DNA, 25 bp, Homo sapien
cataaattcccagtagatctttgac

SEQ ID NO: 1836588 - DNA, 25 bp, Homo sapien
caacgattacattttcggtgatgac

SEQ ID NO: 1836589 - DNA, 25 bp, Homo sapien
cagtagatctttgactggcacatac

SEQ ID NO: 1836590 - DNA, 25 bp, Homo sapien
taaagtaagagttgttttgattctg

SEQ ID NO: 1836591 - DNA, 25 bp, Homo sapien
ataaagtaagagttgttttgattct

SEQ ID NO: 1836592 - DNA, 25 bp, Homo sapien
cacaaggaaattcatgtgggcaaag

SEQ ID NO: 1836593 - DNA, 25 bp, Homo sapien
cagtgaaaggctaattggaaattcg

SEQ ID NO: 1836594 - DNA, 25 bp, Homo sapien
gaaattcggaaggatgtctcatagc

SEQ ID NO: 1836595 - DNA, 25 bp, Homo sapien
ggccctcccaatctatttctaagtg

SEQ ID NO: 1836596 - DNA, 25 bp, Homo sapien
caactgacctgtaaggggactgaac

SEQ ID NO: 1836597 - DNA, 25 bp, Homo sapien
tggtgtcattagcaccacaactgag

SEQ ID NO: 1836598 - DNA, 25 bp, Homo sapien
ctgaacctgcgaccctggtgtcatt

SEQ ID NO: 1836599 - DNA, 25 bp, Homo sapien
tgtaaggggactgaacctgcgaccc

SEQ ID NO: 1836600 - DNA, 25 bp, Homo sapien
tgattcacctgcctcaccctcccaa

SEQ ID NO: 1836601 - DNA, 25 bp, Homo sapien
ggtgattcacctgcctcaccctccc

SEQ ID NO: 1836602 - DNA, 25 bp, Homo sapien
gcacgtgccatcgtaccaggctaat

SEQ ID NO: 1836603 - DNA, 25 bp, Homo sapien
caggcacgtgccatcgtaccaggct

SEQ ID NO: 1836604 - DNA, 25 bp, Homo sapien
gaaactgacccatacatatacataa

SEQ ID NO: 1836605 - DNA, 25 bp, Homo sapien
tttgggcctggaagttggagtttgc

SEQ ID NO: 1836606 - DNA, 25 bp, Homo sapien
gaaggtattgtagatcagcaaggaa

SEQ ID NO: 1836607 - DNA, 25 bp, Homo sapien
tcagaaagcccagaaactgacccat

SEQ ID NO: 1836608 - DNA, 25 bp, Homo sapien
tcaaactggctcaacacatctcctc

SEQ ID NO: 1836609 - DNA, 25 bp, Homo sapien
cagcgtcgtgcaaggtaattaaaat

SEQ ID NO: 1836610 - DNA, 25 bp, Homo sapien
agcgtcgtgcaaggtaattaaaatt

SEQ ID NO: 1836611 - DNA, 25 bp, Homo sapien
gaactggccatataaccaaaggtgt

SEQ ID NO: 1836612 - DNA, 25 bp, Homo sapien
ctttaaggaaatatcgaccataagg

SEQ ID NO: 1836613 - DNA, 25 bp, Homo sapien
taggaaagtaggagacactagctaa

SEQ ID NO: 1836614 - DNA, 25 bp, Homo sapien
ttatgacatgtcaacaacaaagtgt

SEQ ID NO: 1836615 - DNA, 25 bp, Homo sapien
tttagcaaatgtaaataaacagtac

SEQ ID NO: 1836616 - DNA, 25 bp, Homo sapien
gagaaaatttagcaaatgtaaataa

SEQ ID NO: 1836617 - DNA, 25 bp, Homo sapien
aaatttagcaaatgtaaataaacag

SEQ ID NO: 1836618 - DNA, 25 bp, Homo sapien
cgagaaaatttagcaaatgtaaata

SEQ ID NO: 1836619 - DNA, 25 bp, Homo sapien
cctctgaataggagccgtgaaaatc

SEQ ID NO: 1836620 - DNA, 25 bp, Homo sapien
gcctctgaataggagccgtgaaaat

SEQ ID NO: 1836621 - DNA, 25 bp, Homo sapien
ctgaataggagccgtgaaaatcaat

SEQ ID NO: 1836622 - DNA, 25 bp, Homo sapien
ctctgaataggagccgtgaaaatca

SEQ ID NO: 1836623 - DNA, 25 bp, Homo sapien
agctcccatggtcctaaggaatcct

SEQ ID NO: 1836624 - DNA, 25 bp, Homo sapien
caaggcccagactatgccagctgac

SEQ ID NO: 1836625 - DNA, 25 bp, Homo sapien
tcctaaggaatccttgttcaaggcc

SEQ ID NO: 1836626 - DNA, 25 bp, Homo sapien
aaggcccagactatgccagctgaca

SEQ ID NO: 1836627 - DNA, 25 bp, Homo sapien
agcccttacagagcggtacaaatgg

SEQ ID NO: 1836628 - DNA, 25 bp, Homo sapien
cagtgcatggcaggtttggtgctaa

SEQ ID NO: 1836629 - DNA, 25 bp, Homo sapien
agtgatgtatcccaaaccgtgttta

SEQ ID NO: 1836630 - DNA, 25 bp, Homo sapien
tattttaaggattggaggaccacgc

SEQ ID NO: 1836631 - DNA, 25 bp, Homo sapien
gtccagtgagtgctctcagacacat

SEQ ID NO: 1836632 - DNA, 25 bp, Homo sapien
tgaacgcttgcattaagaaacggag

SEQ ID NO: 1836633 - DNA, 25 bp, Homo sapien
aaacggagtccagtgagtgctctca

SEQ ID NO: 1836634 - DNA, 25 bp, Homo sapien
gggatagttctctcggatataatga

SEQ ID NO: 1836635 - DNA, 25 bp, Homo sapien
tctaaaacggaagagccagctgaga

SEQ ID NO: 1836636 - DNA, 25 bp, Homo sapien
cctacagtaagagggacggagccta

SEQ ID NO: 1836637 - DNA, 25 bp, Homo sapien
gcctgatgactaaaaagagccctac

SEQ ID NO: 1836638 - DNA, 25 bp, Homo sapien
taaactggctcacggaatcgcaagc

SEQ ID NO: 1836639 - DNA, 25 bp, Homo sapien
tcctttgcagatgctagggtaaaaa

SEQ ID NO: 1836640 - DNA, 25 bp, Homo sapien
cctgatacgcatcctggtgttctag

SEQ ID NO: 1836641 - DNA, 25 bp, Homo sapien
caggaaacacgattccagcctgata

SEQ ID NO: 1836642 - DNA, 25 bp, Homo sapien
gattccagcctgatacgcatcctgg

SEQ ID NO: 1836643 - DNA, 25 bp, Homo sapien
ttttccacagcagaggtagcacagc

SEQ ID NO: 1836644 - DNA, 25 bp, Homo sapien
gcccctcgtgttgcagctctggctt

SEQ ID NO: 1836645 - DNA, 25 bp, Homo sapien
ggcttcccacgtgtttatgggcaga

SEQ ID NO: 1836646 - DNA, 25 bp, Homo sapien
cggagccctcggctaacatggaagc

SEQ ID NO: 1836647 - DNA, 25 bp, Homo sapien
gagcaaagctagttccgttcacacc

SEQ ID NO: 1836648 - DNA, 25 bp, Homo sapien
tcagaaatggacctttgagcaaagc

SEQ ID NO: 1836649 - DNA, 25 bp, Homo sapien
tgagctctgacgctgagtgctaggc

SEQ ID NO: 1836650 - DNA, 25 bp, Homo sapien
tataggtgcaacaaagaagtacttc

SEQ ID NO: 1836651 - DNA, 25 bp, Homo sapien
gattacaggcactggcctccacacc

SEQ ID NO: 1836652 - DNA, 25 bp, Homo sapien
acaggcactggcctccacacctggc

SEQ ID NO: 1836653 - DNA, 25 bp, Homo sapien
gggattacaggcactggcctccaca

SEQ ID NO: 1836654 - DNA, 25 bp, Homo sapien
ttacaggcactggcctccacacctg

SEQ ID NO: 1836655 - DNA, 25 bp, Homo sapien
accaaaagaaacagaccagtgaaat

SEQ ID NO: 1836656 - DNA, 25 bp, Homo sapien
ccaaaagaaacagaccagtgaaata

SEQ ID NO: 1836657 - DNA, 25 bp, Homo sapien
gaaaccaaaagaaacagaccagtga

SEQ ID NO: 1836658 - DNA, 25 bp, Homo sapien
tgtagttaacacgcccattgtgaag

SEQ ID NO: 1836659 - DNA, 25 bp, Homo sapien
tctgtagttaacacgcccattgtga

SEQ ID NO: 1836660 - DNA, 25 bp, Homo sapien
ctgtagttaacacgcccattgtgaa

SEQ ID NO: 1836661 - DNA, 25 bp, Homo sapien
ctctgtagttaacacgcccattgtg

SEQ ID NO: 1836662 - DNA, 25 bp, Homo sapien
aacccaacatgatcagcaggccagg

SEQ ID NO: 1836663 - DNA, 25 bp, Homo sapien
gtgaacctctatggcagagagaacc

SEQ ID NO: 1836664 - DNA, 25 bp, Homo sapien
ctatttctacgtgtgttgaaaggcc

SEQ ID NO: 1836665 - DNA, 25 bp, Homo sapien
tgttgaaaggccacacggtgaacct

SEQ ID NO: 1836666 - DNA, 25 bp, Homo sapien
accggcttctctggtgacgtgggaa

SEQ ID NO: 1836667 - DNA, 25 bp, Homo sapien
gtcactgaccgaggaaaccaagcct

SEQ ID NO: 1836668 - DNA, 25 bp, Homo sapien
tagcttcaccagaacagcaaacaaa

SEQ ID NO: 1836669 - DNA, 25 bp, Homo sapien
gttttccaatgaagtcaactgtcca

SEQ ID NO: 1836670 - DNA, 25 bp, Homo sapien
tgtgcagatagtcaacatattagac

SEQ ID NO: 1836671 - DNA, 25 bp, Homo sapien
ctgtgcagatagtcaacatattaga

SEQ ID NO: 1836672 - DNA, 25 bp, Homo sapien
gtaaggacagacacccagccaggcg

SEQ ID NO: 1836673 - DNA, 25 bp, Homo sapien
ctggtaaggacagacacccagccag

SEQ ID NO: 1836674 - DNA, 25 bp, Homo sapien
ggccctggtaaggacagacacccag

SEQ ID NO: 1836675 - DNA, 25 bp, Homo sapien
tccttgtaggccctggtaaggacag

SEQ ID NO: 1836676 - DNA, 25 bp, Homo sapien
caatcaatactacgtgctcaggagc

SEQ ID NO: 1836677 - DNA, 25 bp, Homo sapien
ctatggaccgcgcacaaattccggg

SEQ ID NO: 1836678 - DNA, 25 bp, Homo sapien
gatcacggccttggcatttagggca

SEQ ID NO: 1836679 - DNA, 25 bp, Homo sapien
tacaactgaagaagcgtgatcacgg

SEQ ID NO: 1836680 - DNA, 25 bp, Homo sapien
cgacctgcatttggctgcggagctg

SEQ ID NO: 1836681 - DNA, 25 bp, Homo sapien
ccgggccatggcgacctgcatttgg

SEQ ID NO: 1836682 - DNA, 25 bp, Homo sapien
tgtcgccgtcgttgcccgggccatg

SEQ ID NO: 1836683 - DNA, 25 bp, Homo sapien
tcgggtcgacgtttccaggctgccg

SEQ ID NO: 1836684 - DNA, 25 bp, Homo sapien
cgccaccttccccgtgcaagacccg

SEQ ID NO: 1836685 - DNA, 25 bp, Homo sapien
ccccgtgcaagacccggccagcggc

SEQ ID NO: 1836686 - DNA, 25 bp, Homo sapien
gacagcttcgtgggcggccgctggc

SEQ ID NO: 1836687 - DNA, 25 bp, Homo sapien
acagcttcgtgggcggccgctggct

SEQ ID NO: 1836688 - DNA, 25 bp, Homo sapien
gaacgtgagcgcctaatacaagcga

SEQ ID NO: 1836689 - DNA, 25 bp, Homo sapien
catgggatcggaaacggagagaact

SEQ ID NO: 1836690 - DNA, 25 bp, Homo sapien
cagagtagctgaaatatctccgcag

SEQ ID NO: 1836691 - DNA, 25 bp, Homo sapien
ttatggtcaacaagcctaaccgtgg

SEQ ID NO: 1836692 - DNA, 25 bp, Homo sapien
tgttatcagtgtaagctgtgggttg

SEQ ID NO: 1836693 - DNA, 25 bp, Homo sapien
tgtttaccatgacaagtctcaccct

SEQ ID NO: 1836694 - DNA, 25 bp, Homo sapien
gatttttaagcccatcatataattg

SEQ ID NO: 1836695 - DNA, 25 bp, Homo sapien
tggctacattctaaatggatgtact

SEQ ID NO: 1836696 - DNA, 25 bp, Homo sapien
tgtcgctacagaacatgggcccaga

SEQ ID NO: 1836697 - DNA, 25 bp, Homo sapien
cccttttggtggagtgaagcagtcc

SEQ ID NO: 1836698 - DNA, 25 bp, Homo sapien
catgggccgtcacaaaggcttgatc

SEQ ID NO: 1836699 - DNA, 25 bp, Homo sapien
tagggaccaatatgtgccacgtgcc

SEQ ID NO: 1836700 - DNA, 25 bp, Homo sapien
tgtaattgccaacccactttgtaga

SEQ ID NO: 1836701 - DNA, 25 bp, Homo sapien
gaccggcgttgcctctcactttgaa

SEQ ID NO: 1836702 - DNA, 25 bp, Homo sapien
ccaagtaggtggagacgaagcacct

SEQ ID NO: 1836703 - DNA, 25 bp, Homo sapien
gatgcaaatccaattaggcggccaa

SEQ ID NO: 1836704 - DNA, 25 bp, Homo sapien
ctgcctagcatctggcctggagtgt

SEQ ID NO: 1836705 - DNA, 25 bp, Homo sapien
tcattgagccactgggaagctatgg

SEQ ID NO: 1836706 - DNA, 25 bp, Homo sapien
gcctggagtgtactagccacattcc

SEQ ID NO: 1836707 - DNA, 25 bp, Homo sapien
tgagtaactaaaggtctggcaagac

SEQ ID NO: 1836708 - DNA, 25 bp, Homo sapien
taattacttgtgatttagatgtatc

SEQ ID NO: 1836709 - DNA, 25 bp, Homo sapien
cttgtgatttagatgtatccatcct

SEQ ID NO: 1836710 - DNA, 25 bp, Homo sapien
tacttgtgatttagatgtatccatc

SEQ ID NO: 1836711 - DNA, 25 bp, Homo sapien
tgtgatttagatgtatccatccttt

SEQ ID NO: 1836712 - DNA, 25 bp, Homo sapien
tagaccaagagggagatattgacct

SEQ ID NO: 1836713 - DNA, 25 bp, Homo sapien
ttacaacatggactagaaaaggacc

SEQ ID NO: 1836714 - DNA, 25 bp, Homo sapien
catttatggtattgtctgggactgc

SEQ ID NO: 1836715 - DNA, 25 bp, Homo sapien
aactatggcccacgaatcaaacctg

SEQ ID NO: 1836716 - DNA, 25 bp, Homo sapien
gaaattagccacgtaacaagagtct

SEQ ID NO: 1836717 - DNA, 25 bp, Homo sapien
tttctggcatagctaccgtgagttc

SEQ ID NO: 1836718 - DNA, 25 bp, Homo sapien
tattctactaaagagagacagcaga

SEQ ID NO: 1836719 - DNA, 25 bp, Homo sapien
gcaggaacttcccagcgatgataat

SEQ ID NO: 1836720 - DNA, 25 bp, Homo sapien
acacaaatctgaatgtcatatagtt

SEQ ID NO: 1836721 - DNA, 25 bp, Homo sapien
aacacaaatctgaatgtcatatagt

SEQ ID NO: 1836722 - DNA, 25 bp, Homo sapien
cacaaatctgaatgtcatatagttc

SEQ ID NO: 1836723 - DNA, 25 bp, Homo sapien
gagtcgttatccctatctatggcag

SEQ ID NO: 1836724 - DNA, 25 bp, Homo sapien
tgatccacaggagactatgcaggcc

SEQ ID NO: 1836725 - DNA, 25 bp, Homo sapien
tgaaccagtcaacgtagcaggctac

SEQ ID NO: 1836726 - DNA, 25 bp, Homo sapien
taaccctggtcacctgataaggcag

SEQ ID NO: 1836727 - DNA, 25 bp, Homo sapien
taaacaacaccgagaggagtcagtg

SEQ ID NO: 1836728 - DNA, 25 bp, Homo sapien
tgttgccgtcagcacagaaagcttg

SEQ ID NO: 1836729 - DNA, 25 bp, Homo sapien
ttccttagaggcaatcacagcagct

SEQ ID NO: 1836730 - DNA, 25 bp, Homo sapien
gatggcccgtgcctcttagacaagc

SEQ ID NO: 1836731 - DNA, 25 bp, Homo sapien
tttgtgctgtaactcccactgactg

SEQ ID NO: 1836732 - DNA, 25 bp, Homo sapien
ggtcaatgaactattctaaaagagt

SEQ ID NO: 1836733 - DNA, 25 bp, Homo sapien
taacaagcatctcagttaaaagagc

SEQ ID NO: 1836734 - DNA, 25 bp, Homo sapien
ccactgactggtcttggattcaagg

SEQ ID NO: 1836735 - DNA, 25 bp, Homo sapien
cggctgaagattgtgtcctggtcac

SEQ ID NO: 1836736 - DNA, 25 bp, Homo sapien
tctctccatcttttctcggctgaag

SEQ ID NO: 1836737 - DNA, 25 bp, Homo sapien
gcaataactgaaggaagctccattt

SEQ ID NO: 1836738 - DNA, 25 bp, Homo sapien
ggaaccattcatggaaacctttgga

SEQ ID NO: 1836739 - DNA, 25 bp, Homo sapien
tcagactcggataccatcaggctgg

SEQ ID NO: 1836740 - DNA, 25 bp, Homo sapien
tgtgctctgtgcttcggtgcttgat

SEQ ID NO: 1836741 - DNA, 25 bp, Homo sapien
tgctctgtgcttcggtgcttgatac

SEQ ID NO: 1836742 - DNA, 25 bp, Homo sapien
gagttgtgctctgtgcttcggtgct

SEQ ID NO: 1836743 - DNA, 25 bp, Homo sapien
gattcacttccagctgtcagtcgtt

SEQ ID NO: 1836744 - DNA, 25 bp, Homo sapien
catctgaggaggaacgccgtgattc

SEQ ID NO: 1836745 - DNA, 25 bp, Homo sapien
tgatgggcacggagtggtgctctcc

SEQ ID NO: 1836746 - DNA, 25 bp, Homo sapien
tcgttgtggttgcaggtcctgtgat

SEQ ID NO: 1836747 - DNA, 25 bp, Homo sapien
tatccaggatggtgtactttgtttt

SEQ ID NO: 1836748 - DNA, 25 bp, Homo sapien
catatttgggcctcagttccattct

SEQ ID NO: 1836749 - DNA, 25 bp, Homo sapien
tcctgttcatccatgttatccagga

SEQ ID NO: 1836750 - DNA, 25 bp, Homo sapien
gttccattctttcctgttcatccat

SEQ ID NO: 1836751 - DNA, 25 bp, Homo sapien
caagtgaaacctcctgttagcacaa

SEQ ID NO: 1836752 - DNA, 25 bp, Homo sapien
tgttagcacaataagagtaaaagcc

SEQ ID NO: 1836753 - DNA, 25 bp, Homo sapien
caaagccaagtgaaacctcctgtta

SEQ ID NO: 1836754 - DNA, 25 bp, Homo sapien
gccaacactgtcacatagaatatac

SEQ ID NO: 1836755 - DNA, 25 bp, Homo sapien
aagcctcctctataccagaactcac

SEQ ID NO: 1836756 - DNA, 25 bp, Homo sapien
aaagcctcctctataccagaactca

SEQ ID NO: 1836757 - DNA, 25 bp, Homo sapien
tctctccatcccagatataacgctg

SEQ ID NO: 1836758 - DNA, 25 bp, Homo sapien
aacgctgtataaggttctccatcca

SEQ ID NO: 1836759 - DNA, 25 bp, Homo sapien
tcccagatataacgctgtataaggt

SEQ ID NO: 1836760 - DNA, 25 bp, Homo sapien
ctccatccataagtgagagcaaatg

SEQ ID NO: 1836761 - DNA, 25 bp, Homo sapien
cttcagcagctttgagaaccttgaa

SEQ ID NO: 1836762 - DNA, 25 bp, Homo sapien
catgtgcagatttcgggccacttca

SEQ ID NO: 1836763 - DNA, 25 bp, Homo sapien
ggcggcctgctctgtacataaaaca

SEQ ID NO: 1836764 - DNA, 25 bp, Homo sapien
ttctcctttgagagccgcatgtgca

SEQ ID NO: 1836765 - DNA, 25 bp, Homo sapien
gagatccgagtgggcccgaatcttc

SEQ ID NO: 1836766 - DNA, 25 bp, Homo sapien
ctgagatccgagtgggcccgaatct

SEQ ID NO: 1836767 - DNA, 25 bp, Homo sapien
ccgagtgggcccgaatcttctggac

SEQ ID NO: 1836768 - DNA, 25 bp, Homo sapien
atccgagtgggcccgaatcttctgg

SEQ ID NO: 1836769 - DNA, 25 bp, Homo sapien
cttaatgtccgagtccagcacgttc

SEQ ID NO: 1836770 - DNA, 25 bp, Homo sapien
aagggtgtccttccgctgctctgtc

SEQ ID NO: 1836771 - DNA, 25 bp, Homo sapien
cagctgcctcacaagggtgtccttc

SEQ ID NO: 1836772 - DNA, 25 bp, Homo sapien
gctgcccaacaccaacctgcagggt

SEQ ID NO: 1836773 - DNA, 25 bp, Homo sapien
ctgtcagcgtaaagaccccaaaggc

SEQ ID NO: 1836774 - DNA, 25 bp, Homo sapien
catctgtcagcgtaaagaccccaaa

SEQ ID NO: 1836775 - DNA, 25 bp, Homo sapien
tggtcacatctgtcagcgtaaagac

SEQ ID NO: 1836776 - DNA, 25 bp, Homo sapien
ggtcacatctgtcagcgtaaagacc

SEQ ID NO: 1836777 - DNA, 25 bp, Homo sapien
ggtgactcgcaagtggaaagtgtac

SEQ ID NO: 1836778 - DNA, 25 bp, Homo sapien
gtgtctgtgtccgaggccccctgac

SEQ ID NO: 1836779 - DNA, 25 bp, Homo sapien
cagattcgtaagctgcagagccaca

SEQ ID NO: 1836780 - DNA, 25 bp, Homo sapien
ccctgactgtcggtgactcgcaagt

SEQ ID NO: 1836781 - DNA, 25 bp, Homo sapien
gacacaattctttggtcatcagtag

SEQ ID NO: 1836782 - DNA, 25 bp, Homo sapien
tggccatcccggatccacagatagg

SEQ ID NO: 1836783 - DNA, 25 bp, Homo sapien
taatggaattattgggaagcacaag

SEQ ID NO: 1836784 - DNA, 25 bp, Homo sapien
ccttgaaccatccaaagtaatggaa

SEQ ID NO: 1836785 - DNA, 25 bp, Homo sapien
gctggtctttcactgtcaaacggaa

SEQ ID NO: 1836786 - DNA, 25 bp, Homo sapien
cacagtggctattgctttgtcaata

SEQ ID NO: 1836787 - DNA, 25 bp, Homo sapien
gtcacagtggctattgctttgtcaa

SEQ ID NO: 1836788 - DNA, 25 bp, Homo sapien
cagtcacagtggctattgctttgtc

SEQ ID NO: 1836789 - DNA, 25 bp, Homo sapien
ccagtcacagtggctattgctttgt

SEQ ID NO: 1836790 - DNA, 25 bp, Homo sapien
acagccactggaggtctattgtttt

SEQ ID NO: 1836791 - DNA, 25 bp, Homo sapien
gatcagctctttatcagggccggcc

SEQ ID NO: 1836792 - DNA, 25 bp, Homo sapien
ccatccagggtagcactttccactg

SEQ ID NO: 1836793 - DNA, 25 bp, Homo sapien
gctcccagtggtagaagacaatgcc

SEQ ID NO: 1836794 - DNA, 25 bp, Homo sapien
caccttcagctgaaatgtataatct

SEQ ID NO: 1836795 - DNA, 25 bp, Homo sapien
ccttcagctgaaatgtataatctcc

SEQ ID NO: 1836796 - DNA, 25 bp, Homo sapien
agtcaccacagcagtagactgttgc

SEQ ID NO: 1836797 - DNA, 25 bp, Homo sapien
acagtcaccacagcagtagactgtt

SEQ ID NO: 1836798 - DNA, 25 bp, Homo sapien
agataaatgaaggtatggcgtctgt

SEQ ID NO: 1836799 - DNA, 25 bp, Homo sapien
gataaatgaaggtatggcgtctgta

SEQ ID NO: 1836800 - DNA, 25 bp, Homo sapien
aatgaaggtatggcgtctgtactcc

SEQ ID NO: 1836801 - DNA, 25 bp, Homo sapien
tactcctttggacatcttaatcaag

SEQ ID NO: 1836802 - DNA, 25 bp, Homo sapien
cattttgtgattgccccagttaata

SEQ ID NO: 1836803 - DNA, 25 bp, Homo sapien
taaggcaataaggttgttactgtgg

SEQ ID NO: 1836804 - DNA, 25 bp, Homo sapien
ctgtggatattcttcggggaaagaa

SEQ ID NO: 1836805 - DNA, 25 bp, Homo sapien
cactattagggctgcagttgtagag

SEQ ID NO: 1836806 - DNA, 25 bp, Homo sapien
cattagcaactggtgggtagtccac

SEQ ID NO: 1836807 - DNA, 25 bp, Homo sapien
aagttatggtgtgatttggtcctgc

SEQ ID NO: 1836808 - DNA, 25 bp, Homo sapien
ggacaatctggtgatcgtcactgct

SEQ ID NO: 1836809 - DNA, 25 bp, Homo sapien
aatggatcaggtttaagttctgcct

SEQ ID NO: 1836810 - DNA, 25 bp, Homo sapien
tgccactctcttaacggagactaaa

SEQ ID NO: 1836811 - DNA, 25 bp, Homo sapien
aaaaatggatcaggtttaagttctg

SEQ ID NO: 1836812 - DNA, 25 bp, Homo sapien
gccactctcttaacggagactaaaa

SEQ ID NO: 1836813 - DNA, 25 bp, Homo sapien
cgggagagtcaactgaagtcttctc

SEQ ID NO: 1836814 - DNA, 25 bp, Homo sapien
tagacaagcgtaagacgggagagtc

SEQ ID NO: 1836815 - DNA, 25 bp, Homo sapien
acaagcgtaagacgggagagtcaac

SEQ ID NO: 1836816 - DNA, 25 bp, Homo sapien
caggatcaaggttagacaagcgtaa

SEQ ID NO: 1836817 - DNA, 25 bp, Homo sapien
caactgctacaggtggcaggttgac

SEQ ID NO: 1836818 - DNA, 25 bp, Homo sapien
ggcaaagtgagctcttgcagttggg

SEQ ID NO: 1836819 - DNA, 25 bp, Homo sapien
gaaacaactgctacaggtggcaggt

SEQ ID NO: 1836820 - DNA, 25 bp, Homo sapien
tacaggtggcaggttgactcttctg

SEQ ID NO: 1836821 - DNA, 25 bp, Homo sapien
cactagaaacagtgactttgaagac

SEQ ID NO: 1836822 - DNA, 25 bp, Homo sapien
tctccaaaggcgttttcactagaaa

SEQ ID NO: 1836823 - DNA, 25 bp, Homo sapien
tgaagacataaagtccgacggacaa

SEQ ID NO: 1836824 - DNA, 25 bp, Homo sapien
tccttctccaaaggcgttttcacta

SEQ ID NO: 1836825 - DNA, 25 bp, Homo sapien
aattccattcatagttgtaggttgt

SEQ ID NO: 1836826 - DNA, 25 bp, Homo sapien
tctgtggggtggcttattaaattcc

SEQ ID NO: 1836827 - DNA, 25 bp, Homo sapien
tttatttcaccttggtagtctgtgg

SEQ ID NO: 1836828 - DNA, 25 bp, Homo sapien
agaggttaagagtttgcttgtgtcc

SEQ ID NO: 1836829 - DNA, 25 bp, Homo sapien
ccagccgataccgtaagttctttca

SEQ ID NO: 1836830 - DNA, 25 bp, Homo sapien
cttcattgtcgggtaaagttataat

SEQ ID NO: 1836831 - DNA, 25 bp, Homo sapien
tcaacttcattgtcgggtaaagtta

SEQ ID NO: 1836832 - DNA, 25 bp, Homo sapien
aattaggttatctccagccgatacc

SEQ ID NO: 1836833 - DNA, 25 bp, Homo sapien
tgtgctctgtactccccggggtgac

SEQ ID NO: 1836834 - DNA, 25 bp, Homo sapien
gaagactatgggaaggcattagaac

SEQ ID NO: 1836835 - DNA, 25 bp, Homo sapien
cagtggtaggagatatgggtagctc

SEQ ID NO: 1836836 - DNA, 25 bp, Homo sapien
ggtgactgtgagcactgggcttttc

SEQ ID NO: 1836837 - DNA, 25 bp, Homo sapien
ctggggccaggcataattgctcaca

SEQ ID NO: 1836838 - DNA, 25 bp, Homo sapien
ttgacctgggtgtggaacaagaccc

SEQ ID NO: 1836839 - DNA, 25 bp, Homo sapien
tgtcttccgaagcagctacactggg

SEQ ID NO: 1836840 - DNA, 25 bp, Homo sapien
agtaagccatgctgcaccgtggcat

SEQ ID NO: 1836841 - DNA, 25 bp, Homo sapien
tggattttcaaagcccctgggtgta

SEQ ID NO: 1836842 - DNA, 25 bp, Homo sapien
tcttgaagaaacctactagggtgga

SEQ ID NO: 1836843 - DNA, 25 bp, Homo sapien
taaatgtcgctagagtatccaggcg

SEQ ID NO: 1836844 - DNA, 25 bp, Homo sapien
tctagcagccaaagcacctgttggg

SEQ ID NO: 1836845 - DNA, 25 bp, Homo sapien
cagagctgttgctggattgttcctg

SEQ ID NO: 1836846 - DNA, 25 bp, Homo sapien
ccagagctgttgctggattgttcct

SEQ ID NO: 1836847 - DNA, 25 bp, Homo sapien
tccagagctgttgctggattgttcc

SEQ ID NO: 1836848 - DNA, 25 bp, Homo sapien
agtagtcggcaagggaagcaacaca

SEQ ID NO: 1836849 - DNA, 25 bp, Homo sapien
tggagtagtcggcaagggaagcaac

SEQ ID NO: 1836850 - DNA, 25 bp, Homo sapien
tagtcggcaagggaagcaacacact

SEQ ID NO: 1836851 - DNA, 25 bp, Homo sapien
tcctgaagatggagtagtcggcaag

SEQ ID NO: 1836852 - DNA, 25 bp, Homo sapien
gccactgggttgcaagaggtccttc

SEQ ID NO: 1836853 - DNA, 25 bp, Homo sapien
gcatcatgtccccatagtccagcag

SEQ ID NO: 1836854 - DNA, 25 bp, Homo sapien
ccgtgcagtctacgacagggaaggt

SEQ ID NO: 1836855 - DNA, 25 bp, Homo sapien
tctccaacagaggagttgaaggccc

SEQ ID NO: 1836856 - DNA, 25 bp, Homo sapien
atccatcaaggtgacccataagtcc

SEQ ID NO: 1836857 - DNA, 25 bp, Homo sapien
tatccatcaaggtgacccataagtc

SEQ ID NO: 1836858 - DNA, 25 bp, Homo sapien
ccactcctacacaagctggcctggt

SEQ ID NO: 1836859 - DNA, 25 bp, Homo sapien
catcacagtcaactagagcctgctg

SEQ ID NO: 1836860 - DNA, 25 bp, Homo sapien
gctatggcgggaccagtggtatgga

SEQ ID NO: 1836861 - DNA, 25 bp, Homo sapien
ggcctgggcaccagtatgggtctgg

SEQ ID NO: 1836862 - DNA, 25 bp, Homo sapien
ctcctttatcaacaaggtatggttc

SEQ ID NO: 1836863 - DNA, 25 bp, Homo sapien
gcagaagacagtttggatgaatgtg

SEQ ID NO: 1836864 - DNA, 25 bp, Homo sapien
agaagacagtttggatgaatgtgga

SEQ ID NO: 1836865 - DNA, 25 bp, Homo sapien
agcagcagaagacagtttggatgaa

SEQ ID NO: 1836866 - DNA, 25 bp, Homo sapien
cagcagaagacagtttggatgaatg

SEQ ID NO: 1836867 - DNA, 25 bp, Homo sapien
cagcagcagcaatgaagagagcaca

SEQ ID NO: 1836868 - DNA, 25 bp, Homo sapien
accagcagcagcaatgaagagagca

SEQ ID NO: 1836869 - DNA, 25 bp, Homo sapien
gcagcagcaatgaagagagcacacc

SEQ ID NO: 1836870 - DNA, 25 bp, Homo sapien
agagagcacacctgtggggggcgcc

SEQ ID NO: 1836871 - DNA, 25 bp, Homo sapien
tgtgcaccacacagtgggtgatggc

SEQ ID NO: 1836872 - DNA, 25 bp, Homo sapien
gacctggcaatctgcagcactccgt

SEQ ID NO: 1836873 - DNA, 25 bp, Homo sapien
tccgttccagaaacgggcatacctg

SEQ ID NO: 1836874 - DNA, 25 bp, Homo sapien
gcagtgcctcaataacatagtttca

SEQ ID NO: 1836875 - DNA, 25 bp, Homo sapien
gcatacctggctctacatacagcag

SEQ ID NO: 1836876 - DNA, 25 bp, Homo sapien
gacaggctgaagctactgctgcgct

SEQ ID NO: 1836877 - DNA, 25 bp, Homo sapien
cgcgcgcacctgctgttaagaggta

SEQ ID NO: 1836878 - DNA, 25 bp, Homo sapien
gtcgtcatcgcaggtcttacacaca

SEQ ID NO: 1836879 - DNA, 25 bp, Homo sapien
cagcacaggtggagcaaggttgcac

SEQ ID NO: 1836880 - DNA, 25 bp, Homo sapien
gcacgcgcacacacgccctcaggga

SEQ ID NO: 1836881 - DNA, 25 bp, Homo sapien
cgcgcacacacgccctcagggatgt

SEQ ID NO: 1836882 - DNA, 25 bp, Homo sapien
agggatgtggggcgcggcagccgcc

SEQ ID NO: 1836883 - DNA, 25 bp, Homo sapien
cgcacacacgccctcagggatgtgg

SEQ ID NO: 1836884 - DNA, 25 bp, Homo sapien
tcatggacacaaaaacatactaaaa

SEQ ID NO: 1836885 - DNA, 25 bp, Homo sapien
atctcatcatggacacaaaaacata

SEQ ID NO: 1836886 - DNA, 25 bp, Homo sapien
taatctcatcatggacacaaaaaca

SEQ ID NO: 1836887 - DNA, 25 bp, Homo sapien
atggacacaaaaacatactaaaaca

SEQ ID NO: 1836888 - DNA, 25 bp, Homo sapien
attctttatttaaatttctcttgtg

SEQ ID NO: 1836889 - DNA, 25 bp, Homo sapien
caatgtggtacctgtttggaatcca

SEQ ID NO: 1836890 - DNA, 25 bp, Homo sapien
taagcaccgttgaaaactctgacag

SEQ ID NO: 1836891 - DNA, 25 bp, Homo sapien
tgtcccatggtgctatcaaaccgat

SEQ ID NO: 1836892 - DNA, 25 bp, Homo sapien
aatggcctcacatcctgaatgcagg

SEQ ID NO: 1836893 - DNA, 25 bp, Homo sapien
tatatctaagttgcacagaagaccc

SEQ ID NO: 1836894 - DNA, 25 bp, Homo sapien
tatctaagttgcacagaagacccca

SEQ ID NO: 1836895 - DNA, 25 bp, Homo sapien
ccccagtgatcactaggaaatctac

SEQ ID NO: 1836896 - DNA, 25 bp, Homo sapien
agaccccagtgatcactaggaaatc

SEQ ID NO: 1836897 - DNA, 25 bp, Homo sapien
gctgctgctctgaaaaatattcgat

SEQ ID NO: 1836898 - DNA, 25 bp, Homo sapien
cacagtccagtttttctaatccaag

SEQ ID NO: 1836899 - DNA, 25 bp, Homo sapien
caatgttgttgggtaaaccaccaca

SEQ ID NO: 1836900 - DNA, 25 bp, Homo sapien
caaaacgaagtttacaagcagcagt

SEQ ID NO: 1836901 - DNA, 25 bp, Homo sapien
tgattcattcgttccgcagcatgcc

SEQ ID NO: 1836902 - DNA, 25 bp, Homo sapien
tctcgatcccttagatttgtatctc

SEQ ID NO: 1836903 - DNA, 25 bp, Homo sapien
taactgtagctgactctggagcctc

SEQ ID NO: 1836904 - DNA, 25 bp, Homo sapien
tctccaaatgggatgtcataaggca

SEQ ID NO: 1836905 - DNA, 25 bp, Homo sapien
gccatcagcggctccctcctcaata

SEQ ID NO: 1836906 - DNA, 25 bp, Homo sapien
cccaggccatcagcggctccctcct

SEQ ID NO: 1836907 - DNA, 25 bp, Homo sapien
caatacaccaaaggcatgctgaaca

SEQ ID NO: 1836908 - DNA, 25 bp, Homo sapien
ctcaatacaccaaaggcatgctgaa

SEQ ID NO: 1836909 - DNA, 25 bp, Homo sapien
atttcttcaacattatagctgtgaa

SEQ ID NO: 1836910 - DNA, 25 bp, Homo sapien
ttcttcaacattatagctgtgaaat

SEQ ID NO: 1836911 - DNA, 25 bp, Homo sapien
gatttcttcaacattatagctgtga

SEQ ID NO: 1836912 - DNA, 25 bp, Homo sapien
aggaataatctcttggctttttaat

SEQ ID NO: 1836913 - DNA, 25 bp, Homo sapien
taataatctcataattacttgatct

SEQ ID NO: 1836914 - DNA, 25 bp, Homo sapien
ttgatctcttctttaggtagctata

SEQ ID NO: 1836915 - DNA, 25 bp, Homo sapien
aatctcataattacttgatctcttc

SEQ ID NO: 1836916 - DNA, 25 bp, Homo sapien
cttctttaggtagctataatatggg

SEQ ID NO: 1836917 - DNA, 25 bp, Homo sapien
tattccaggtaatgagagagaacat

SEQ ID NO: 1836918 - DNA, 25 bp, Homo sapien
tcgagccctctctgacagattgttt

SEQ ID NO: 1836919 - DNA, 25 bp, Homo sapien
tgctgccattttcttgctgagtatc

SEQ ID NO: 1836920 - DNA, 25 bp, Homo sapien
gctgagtatcttcagatgggctgat

SEQ ID NO: 1836921 - DNA, 25 bp, Homo sapien
taaaagagccctaaaagtgacactg

SEQ ID NO: 1836922 - DNA, 25 bp, Homo sapien
tataattgagcattaatcacgctgc

SEQ ID NO: 1836923 - DNA, 25 bp, Homo sapien
tgtacggaaagtcatcccatagccc

SEQ ID NO: 1836924 - DNA, 25 bp, Homo sapien
tatgggtaggatctctgacatcaga

SEQ ID NO: 1836925 - DNA, 25 bp, Homo sapien
caccacatttggagaagcgtgtcat

SEQ ID NO: 1836926 - DNA, 25 bp, Homo sapien
tgtggtgcataacagtatactctag

SEQ ID NO: 1836927 - DNA, 25 bp, Homo sapien
tatttcctaaacacgaagacatgct

SEQ ID NO: 1836928 - DNA, 25 bp, Homo sapien
tctagtatgatcaacaagtcagaag

SEQ ID NO: 1836929 - DNA, 25 bp, Homo sapien
gatagtatgtcctccgcaatgcacc

SEQ ID NO: 1836930 - DNA, 25 bp, Homo sapien
gcaatgcaccatatcaagcatctga

SEQ ID NO: 1836931 - DNA, 25 bp, Homo sapien
gccaattgtgctactagtgtcctaa

SEQ ID NO: 1836932 - DNA, 25 bp, Homo sapien
gagtacaggccatttatcttacaga

SEQ ID NO: 1836933 - DNA, 25 bp, Homo sapien
tactatcatagacaaaggtgtttgc

SEQ ID NO: 1836934 - DNA, 25 bp, Homo sapien
cctactttcctcaacaggtggactg

SEQ ID NO: 1836935 - DNA, 25 bp, Homo sapien
cagttactaaatagcacaggtggac

SEQ ID NO: 1836936 - DNA, 25 bp, Homo sapien
cagttactaaatagcacaggtagac

SEQ ID NO: 1836937 - DNA, 25 bp, Homo sapien
tctgggtgagacctaagattctgca

SEQ ID NO: 1836938 - DNA, 25 bp, Homo sapien
gttttatgtgttaggccagtgctcc

SEQ ID NO: 1836939 - DNA, 25 bp, Homo sapien
taacaaattcccgagtagcagtggc

SEQ ID NO: 1836940 - DNA, 25 bp, Homo sapien
aaggctctgggacacgggctttcaa

SEQ ID NO: 1836941 - DNA, 25 bp, Homo sapien
gaaacacgctgaagtttgccccttc

SEQ ID NO: 1836942 - DNA, 25 bp, Homo sapien
aaatctaatcaggtcacaggcctta

SEQ ID NO: 1836943 - DNA, 25 bp, Homo sapien
catacttgacctgagttctgagaga

SEQ ID NO: 1836944 - DNA, 25 bp, Homo sapien
tcactctcattcatacttgacctga

SEQ ID NO: 1836945 - DNA, 25 bp, Homo sapien
cattgatcagcttgatccgcatctt

SEQ ID NO: 1836946 - DNA, 25 bp, Homo sapien
atagccatgacaccattgatcagct

SEQ ID NO: 1836947 - DNA, 25 bp, Homo sapien
gcttgatccgcatcttttctgaggg

SEQ ID NO: 1836948 - DNA, 25 bp, Homo sapien
gtaagagaatcctaatagccatgac

SEQ ID NO: 1836949 - DNA, 25 bp, Homo sapien
caacttgctctggttagtaaaacgg

SEQ ID NO: 1836950 - DNA, 25 bp, Homo sapien
tgagtaaacaattccccaacaagag

SEQ ID NO: 1836951 - DNA, 25 bp, Homo sapien
tcctcacaggtgctaagttaacatg

SEQ ID NO: 1836952 - DNA, 25 bp, Homo sapien
taaaacgggagccagagacaaatca

SEQ ID NO: 1836953 - DNA, 25 bp, Homo sapien
tcttacccagacttaggacatcagg

SEQ ID NO: 1836954 - DNA, 25 bp, Homo sapien
tcatgcaggatgctataagagtacc

SEQ ID NO: 1836955 - DNA, 25 bp, Homo sapien
cagatactccttactagatgtgcag

SEQ ID NO: 1836956 - DNA, 25 bp, Homo sapien
gagggccttgtaaggcagctacact

SEQ ID NO: 1836957 - DNA, 25 bp, Homo sapien
ccggtcagcctagggcctagaataa

SEQ ID NO: 1836958 - DNA, 25 bp, Homo sapien
ttattctggccggtcagcctagggc

SEQ ID NO: 1836959 - DNA, 25 bp, Homo sapien
ctagggcctagaataaataaacaat

SEQ ID NO: 1836960 - DNA, 25 bp, Homo sapien
ctgttattctggccggtcagcctag

SEQ ID NO: 1836961 - DNA, 25 bp, Homo sapien
gacgcgcagggctacctggtatcaa

SEQ ID NO: 1836962 - DNA, 25 bp, Homo sapien
tctggtgcagtgttagatccgctgc

SEQ ID NO: 1836963 - DNA, 25 bp, Homo sapien
tggtatcaaactgcctccgtgcgga

SEQ ID NO: 1836964 - DNA, 25 bp, Homo sapien
tggaccccaaatcacgttcgaagcg

SEQ ID NO: 1836965 - DNA, 25 bp, Homo sapien
accggaggctcgaagtaggagttca

SEQ ID NO: 1836966 - DNA, 25 bp, Homo sapien
aggtcggcgttccaaggcgctctcc

SEQ ID NO: 1836967 - DNA, 25 bp, Homo sapien
tcaggtcggcgttccaaggcgctct

SEQ ID NO: 1836968 - DNA, 25 bp, Homo sapien
tcctccaccggaggctcgaagtagg

SEQ ID NO: 1836969 - DNA, 25 bp, Homo sapien
gatgaggtttgtgcgctccaccgac

SEQ ID NO: 1836970 - DNA, 25 bp, Homo sapien
aggtaatggagccggaagcgaggac

SEQ ID NO: 1836971 - DNA, 25 bp, Homo sapien
ctaggtaatggagccggaagcgagg

SEQ ID NO: 1836972 - DNA, 25 bp, Homo sapien
gtaatggagccggaagcgaggacag

SEQ ID NO: 1836973 - DNA, 25 bp, Homo sapien
ggaagcgaggacagcgaaagcgtac

SEQ ID NO: 1836974 - DNA, 25 bp, Homo sapien
ttccatctcccagtcgttctcggcc

SEQ ID NO: 1836975 - DNA, 25 bp, Homo sapien
gttctcggccaggaagcactgagcc

SEQ ID NO: 1836976 - DNA, 25 bp, Homo sapien
gtcgttctcggccaggaagcactga

SEQ ID NO: 1836977 - DNA, 25 bp, Homo sapien
tcccagtcgttctcggccaggaagc

SEQ ID NO: 1836978 - DNA, 25 bp, Homo sapien
cttgcgaccgaggcaaactccacac

SEQ ID NO: 1836979 - DNA, 25 bp, Homo sapien
gctttttcacctcaggctcgccctc

SEQ ID NO: 1836980 - DNA, 25 bp, Homo sapien
ccacacacagaagtcgccgcttttt

SEQ ID NO: 1836981 - DNA, 25 bp, Homo sapien
acacacagaagtcgccgctttttca

SEQ ID NO: 1836982 - DNA, 25 bp, Homo sapien
tcggaaaactggtgcagctgcgccg

SEQ ID NO: 1836983 - DNA, 25 bp, Homo sapien
gaacaggaggccaacgcgcggctct

SEQ ID NO: 1836984 - DNA, 25 bp, Homo sapien
gggaaatgcgctgctctcggaaaac

SEQ ID NO: 1836985 - DNA, 25 bp, Homo sapien
tgtgtcatggcgctcccgcatcaac

SEQ ID NO: 1836986 - DNA, 25 bp, Homo sapien
agctcttccgaagttcgttcttgcg

SEQ ID NO: 1836987 - DNA, 25 bp, Homo sapien
tggaaaaccgtccacgatgaccagc

SEQ ID NO: 1836988 - DNA, 25 bp, Homo sapien
gactttccagctcttccgaagttcg

SEQ ID NO: 1836989 - DNA, 25 bp, Homo sapien
gttcttgcgcaaagcccaaaggctg

SEQ ID NO: 1836990 - DNA, 25 bp, Homo sapien
gcttatgcgtgtaaataggttgctg

SEQ ID NO: 1836991 - DNA, 25 bp, Homo sapien
gcagggctttacaaaagcacagctg

SEQ ID NO: 1836992 - DNA, 25 bp, Homo sapien
aattagaattcagcctaaactgtag

SEQ ID NO: 1836993 - DNA, 25 bp, Homo sapien
acagctgttttcagtgactcctaat

SEQ ID NO: 1836994 - DNA, 25 bp, Homo sapien
gaagctcaattgcaaaaattctaca

SEQ ID NO: 1836995 - DNA, 25 bp, Homo sapien
acacaatttgcgctttccctcttta

SEQ ID NO: 1836996 - DNA, 25 bp, Homo sapien
attccaaactgaagctcaattgcaa

SEQ ID NO: 1836997 - DNA, 25 bp, Homo sapien
aattctacacaatttgcgctttccc

SEQ ID NO: 1836998 - DNA, 25 bp, Homo sapien
ggccagatccacctttcttatacct

SEQ ID NO: 1836999 - DNA, 25 bp, Homo sapien
gtgcccggccagatccacctttctt

SEQ ID NO: 1837000 - DNA, 25 bp, Homo sapien
acctttcttatacctcctagccata

SEQ ID NO: 1837001 - DNA, 25 bp, Homo sapien
ttatacctcctagccataaatactg

SEQ ID NO: 1837002 - DNA, 25 bp, Homo sapien
gaaaacctcttctcacatatttggg

SEQ ID NO: 1837003 - DNA, 25 bp, Homo sapien
ggaacactgttgtgagatgcacaca

SEQ ID NO: 1837004 - DNA, 25 bp, Homo sapien
tctgtggatctgaccaacaaggcca

SEQ ID NO: 1837005 - DNA, 25 bp, Homo sapien
tagcaggaccactctcagttaagat

SEQ ID NO: 1837006 - DNA, 25 bp, Homo sapien
ccagcagatcctgttaggtgagggc

SEQ ID NO: 1837007 - DNA, 25 bp, Homo sapien
gaaagtcctgggtcaaggcccagca

SEQ ID NO: 1837008 - DNA, 25 bp, Homo sapien
tagcgaatcttaggtccttcccaga

SEQ ID NO: 1837009 - DNA, 25 bp, Homo sapien
tgtaccgagaataaaaccatgcaga

SEQ ID NO: 1837010 - DNA, 25 bp, Homo sapien
agtgagcatacaggagtcccagatg

SEQ ID NO: 1837011 - DNA, 25 bp, Homo sapien
tacaggagtcccagatgtttacttc

SEQ ID NO: 1837012 - DNA, 25 bp, Homo sapien
tgtttacttctagtatttcccacta

SEQ ID NO: 1837013 - DNA, 25 bp, Homo sapien
gcatacaggagtcccagatgtttac

SEQ ID NO: 1837014 - DNA, 25 bp, Homo sapien
gaatcgccaagggagctcctgataa

SEQ ID NO: 1837015 - DNA, 25 bp, Homo sapien
cattgcttcccagagattgctagta

SEQ ID NO: 1837016 - DNA, 25 bp, Homo sapien
taaaaacgtaaacaatggctgccaa

SEQ ID NO: 1837017 - DNA, 25 bp, Homo sapien
tactgggacaacaaaacgaatatgg

SEQ ID NO: 1837018 - DNA, 25 bp, Homo sapien
tttagccacagactatgaaataatt

SEQ ID NO: 1837019 - DNA, 25 bp, Homo sapien
tgaaataattctctaaggtgaccag

SEQ ID NO: 1837020 - DNA, 25 bp, Homo sapien
tatttagccacagactatgaaataa

SEQ ID NO: 1837021 - DNA, 25 bp, Homo sapien
ttctctaaggtgaccagtaacatca

SEQ ID NO: 1837022 - DNA, 25 bp, Homo sapien
aacatggcccagtaaaatatgaggc

SEQ ID NO: 1837023 - DNA, 25 bp, Homo sapien
gaatgtatctgacagtgctctggaa

SEQ ID NO: 1837024 - DNA, 25 bp, Homo sapien
caattggaaactggtaagcactagt

SEQ ID NO: 1837025 - DNA, 25 bp, Homo sapien
gctttatagctacttcagactccag

SEQ ID NO: 1837026 - DNA, 25 bp, Homo sapien
tagtaagatactgatgcagtgcagc

SEQ ID NO: 1837027 - DNA, 25 bp, Homo sapien
acagatgtcaaagaggcaaaaacca

SEQ ID NO: 1837028 - DNA, 25 bp, Homo sapien
cagtccgtgcacgacatctaatttt

SEQ ID NO: 1837029 - DNA, 25 bp, Homo sapien
cataaaaatgagtatcaccttgtgc

SEQ ID NO: 1837030 - DNA, 25 bp, Homo sapien
tctggcatataaggacggaggtgat

SEQ ID NO: 1837031 - DNA, 25 bp, Homo sapien
gccaactgcccagtgggtgagctgt

SEQ ID NO: 1837032 - DNA, 25 bp, Homo sapien
gcagatgctgcataacttgaagatt

SEQ ID NO: 1837033 - DNA, 25 bp, Homo sapien
cggaggtgatcctctatggtgccaa

SEQ ID NO: 1837034 - DNA, 25 bp, Homo sapien
tgtagtccctatccatattctagac

SEQ ID NO: 1837035 - DNA, 25 bp, Homo sapien
gaatagaagctagtgagaggatgaa

SEQ ID NO: 1837036 - DNA, 25 bp, Homo sapien
attaaagctaaaggcatttcatggg

SEQ ID NO: 1837037 - DNA, 25 bp, Homo sapien
tattctagacagacaaaatcttgcc

SEQ ID NO: 1837038 - DNA, 25 bp, Homo sapien
gattgttgacaacgattccagtctt

SEQ ID NO: 1837039 - DNA, 25 bp, Homo sapien
acgattccagtcttgtccttgcggc

SEQ ID NO: 1837040 - DNA, 25 bp, Homo sapien
tccttgcggctcagtacatgcagaa

SEQ ID NO: 1837041 - DNA, 25 bp, Homo sapien
gaagagaaacactgactggttagga

SEQ ID NO: 1837042 - DNA, 25 bp, Homo sapien
ggacagtacactccacaacagcagt

SEQ ID NO: 1837043 - DNA, 25 bp, Homo sapien
catagtactttaagccccaaggaca

SEQ ID NO: 1837044 - DNA, 25 bp, Homo sapien
tcaaatgctcaacggtcacatgact

SEQ ID NO: 1837045 - DNA, 25 bp, Homo sapien
cacatgactactggccaccattaag

SEQ ID NO: 1837046 - DNA, 25 bp, Homo sapien
ttgggcatggtgagacaccaaatgc

SEQ ID NO: 1837047 - DNA, 25 bp, Homo sapien
tacatgacatgaccaggcttgatgg

SEQ ID NO: 1837048 - DNA, 25 bp, Homo sapien
tatttagacaatactgagttgtaca

SEQ ID NO: 1837049 - DNA, 25 bp, Homo sapien
aatgctacatgacatgaccaggctt

SEQ ID NO: 1837050 - DNA, 25 bp, Homo sapien
tgccgttacgtcaaaaacagtagga

SEQ ID NO: 1837051 - DNA, 25 bp, Homo sapien
tttcccagaataagatgtggttatc

SEQ ID NO: 1837052 - DNA, 25 bp, Homo sapien
aaaaccaagttcctgctatgtagca

SEQ ID NO: 1837053 - DNA, 25 bp, Homo sapien
caaattgggttcttatcatcaaacc

SEQ ID NO: 1837054 - DNA, 25 bp, Homo sapien
tgcgcctttaaagattaagaggatt

SEQ ID NO: 1837055 - DNA, 25 bp, Homo sapien
taagtaacacgggaacattatgatt

SEQ ID NO: 1837056 - DNA, 25 bp, Homo sapien
acagtaagtaacacgggaacattat

SEQ ID NO: 1837057 - DNA, 25 bp, Homo sapien
tttggattgcgcctttaaagattaa

SEQ ID NO: 1837058 - DNA, 25 bp, Homo sapien
caatatggtaagcaaccagggtggg

SEQ ID NO: 1837059 - DNA, 25 bp, Homo sapien
gcagcatgaaagaagtaattcccac

SEQ ID NO: 1837060 - DNA, 25 bp, Homo sapien
tgggtgcaagaaccggtaaccacac

SEQ ID NO: 1837061 - DNA, 25 bp, Homo sapien
tgagtgagactgaaaaaggccttcc

SEQ ID NO: 1837062 - DNA, 25 bp, Homo sapien
agaactgagtgagttatatttaagg

SEQ ID NO: 1837063 - DNA, 25 bp, Homo sapien
aactgagtgagttatatttaaggcc

SEQ ID NO: 1837064 - DNA, 25 bp, Homo sapien
aaaaagaggcctgcaagttaacatt

SEQ ID NO: 1837065 - DNA, 25 bp, Homo sapien
aaaaaagaggcctgcaagttaacat

SEQ ID NO: 1837066 - DNA, 25 bp, Homo sapien
ctgaggcacaagaacggctcaaacc

SEQ ID NO: 1837067 - DNA, 25 bp, Homo sapien
cacaagaacggctcaaacctgggag

SEQ ID NO: 1837068 - DNA, 25 bp, Homo sapien
ggcacaagaacggctcaaacctggg

SEQ ID NO: 1837069 - DNA, 25 bp, Homo sapien
gaggcacaagaacggctcaaacctg

SEQ ID NO: 1837070 - DNA, 25 bp, Homo sapien
atgtgtggtgaaggcttcaagagtt

SEQ ID NO: 1837071 - DNA, 25 bp, Homo sapien
tatacggttttagaaggatgtgtgg

SEQ ID NO: 1837072 - DNA, 25 bp, Homo sapien
aaatatacggttttagaaggatgtg

SEQ ID NO: 1837073 - DNA, 25 bp, Homo sapien
gtggtgaaggcttcaagagttacag

SEQ ID NO: 1837074 - DNA, 25 bp, Homo sapien
gattctataatccaaacgctttctt

SEQ ID NO: 1837075 - DNA, 25 bp, Homo sapien
tgtgggcccctctataaatcagtaa

SEQ ID NO: 1837076 - DNA, 25 bp, Homo sapien
ggaaccaccacactgtcaagagatt

SEQ ID NO: 1837077 - DNA, 25 bp, Homo sapien
gaaatactcatcacactttagacca

SEQ ID NO: 1837078 - DNA, 25 bp, Homo sapien
tttcaatatcattccgaggccaaag

SEQ ID NO: 1837079 - DNA, 25 bp, Homo sapien
ggctcatcagattctttccacctag

SEQ ID NO: 1837080 - DNA, 25 bp, Homo sapien
tgaacaggcctaaaaggctcatcag

SEQ ID NO: 1837081 - DNA, 25 bp, Homo sapien
gaaatccatctcctgagtacagcca

SEQ ID NO: 1837082 - DNA, 25 bp, Homo sapien
tacatcaagccatgtcacaaattat

SEQ ID NO: 1837083 - DNA, 25 bp, Homo sapien
aaacagctacatcaagccatgtcac

SEQ ID NO: 1837084 - DNA, 25 bp, Homo sapien
tgtcacaaattatagggttccccta

SEQ ID NO: 1837085 - DNA, 25 bp, Homo sapien
taatctgaatagctcatgatgtaat

SEQ ID NO: 1837086 - DNA, 25 bp, Homo sapien
tcatgactggtataacctcagacac

SEQ ID NO: 1837087 - DNA, 25 bp, Homo sapien
ggaatagctggaatctcgcacacct

SEQ ID NO: 1837088 - DNA, 25 bp, Homo sapien
cgaggagcatggagctgtaccacat

SEQ ID NO: 1837089 - DNA, 25 bp, Homo sapien
ctcatagactgatatcgaggagcat

SEQ ID NO: 1837090 - DNA, 25 bp, Homo sapien
caaactggtcagctagagattcttt

SEQ ID NO: 1837091 - DNA, 25 bp, Homo sapien
tctaagctgagcacgtagtctgttc

SEQ ID NO: 1837092 - DNA, 25 bp, Homo sapien
caaaggcaatatacatcttgaagtc

SEQ ID NO: 1837093 - DNA, 25 bp, Homo sapien
tcagagcttgtttcttccgggagtt

SEQ ID NO: 1837094 - DNA, 25 bp, Homo sapien
caaggagaatcatgacggcagaagg

SEQ ID NO: 1837095 - DNA, 25 bp, Homo sapien
tatcttcttgtgagcattgccgagg

SEQ ID NO: 1837096 - DNA, 25 bp, Homo sapien
tggttagacctgattaatgcccggg

SEQ ID NO: 1837097 - DNA, 25 bp, Homo sapien
aattagattttacccagccagctcc

SEQ ID NO: 1837098 - DNA, 25 bp, Homo sapien
ggagacacaggatcactcaggtttt

SEQ ID NO: 1837099 - DNA, 25 bp, Homo sapien
gggagacacaggatcactcaggttt

SEQ ID NO: 1837100 - DNA, 25 bp, Homo sapien
cgggagacacaggatcactcaggtt

SEQ ID NO: 1837101 - DNA, 25 bp, Homo sapien
actcacggaccgactctagggcggg

SEQ ID NO: 1837102 - DNA, 25 bp, Homo sapien
tagctctctctcacgttgaacagac

SEQ ID NO: 1837103 - DNA, 25 bp, Homo sapien
catcgtggaaacaattcccgcccgg

SEQ ID NO: 1837104 - DNA, 25 bp, Homo sapien
gctgcagtgcgcaccgtgactggac

SEQ ID NO: 1837105 - DNA, 25 bp, Homo sapien
ctgggacccatagtctggctcggcg

SEQ ID NO: 1837106 - DNA, 25 bp, Homo sapien
tgggacccatagtctggctcggcgc

SEQ ID NO: 1837107 - DNA, 25 bp, Homo sapien
gggacccatagtctggctcggcgcc

SEQ ID NO: 1837108 - DNA, 25 bp, Homo sapien
tgcgctaagggtcagcaaagtaacc

SEQ ID NO: 1837109 - DNA, 25 bp, Homo sapien
cctacagtcggattccggctctcag

SEQ ID NO: 1837110 - DNA, 25 bp, Homo sapien
gagcgtccgcggcagtactgcctcg

SEQ ID NO: 1837111 - DNA, 25 bp, Homo sapien
tctcaggaaaggtcgaggagacccg

SEQ ID NO: 1837112 - DNA, 25 bp, Homo sapien
ccttggcaccaaaaagcgttgagtc

SEQ ID NO: 1837113 - DNA, 25 bp, Homo sapien
atcgaaacgtttgccgccgagtcgc

SEQ ID NO: 1837114 - DNA, 25 bp, Homo sapien
ccccttaggtggttcactgtcttca

SEQ ID NO: 1837115 - DNA, 25 bp, Homo sapien
gagtcgcacgtccttggcaccaaaa

SEQ ID NO: 1837116 - DNA, 25 bp, Homo sapien
tgccacaagctgaacattaaggtca

SEQ ID NO: 1837117 - DNA, 25 bp, Homo sapien
gccacaagctgaacattaaggtcat

SEQ ID NO: 1837118 - DNA, 25 bp, Homo sapien
tatgccacaagctgaacattaaggt

SEQ ID NO: 1837119 - DNA, 25 bp, Homo sapien
cacaagctgaacattaaggtcattg

SEQ ID NO: 1837120 - DNA, 25 bp, Homo sapien
gctgctaggttcctgtaaagccaac

SEQ ID NO: 1837121 - DNA, 25 bp, Homo sapien
tgggagggtttatattctatacagc

SEQ ID NO: 1837122 - DNA, 25 bp, Homo sapien
tataccgatgtcaccagtgttaatg

SEQ ID NO: 1837123 - DNA, 25 bp, Homo sapien
cagctgatacagcatgggctgctag

SEQ ID NO: 1837124 - DNA, 25 bp, Homo sapien
tatcatttctacaagaataatgtga

SEQ ID NO: 1837125 - DNA, 25 bp, Homo sapien
tgtgaggtctagaaatcagtttgtt

SEQ ID NO: 1837126 - DNA, 25 bp, Homo sapien
ccaattaataatccttcttctagaa

SEQ ID NO: 1837127 - DNA, 25 bp, Homo sapien
tcactgtagagctggtggaacttgg

SEQ ID NO: 1837128 - DNA, 25 bp, Homo sapien
ggttttggcgcgctctcacttccgc

SEQ ID NO: 1837129 - DNA, 25 bp, Homo sapien
tcacttccgcgcttcctattggctg

SEQ ID NO: 1837130 - DNA, 25 bp, Homo sapien
tattggctggctggcgcagttcccg

SEQ ID NO: 1837131 - DNA, 25 bp, Homo sapien
actgcaacgcgggtaagggactcag

SEQ ID NO: 1837132 - DNA, 25 bp, Homo sapien
gcttgtccaaaaggaaacatcggaa

SEQ ID NO: 1837133 - DNA, 25 bp, Homo sapien
aacatctacaacttccagccctggg

SEQ ID NO: 1837134 - DNA, 25 bp, Homo sapien
tatagctgtccgcaggcttgtccaa

SEQ ID NO: 1837135 - DNA, 25 bp, Homo sapien
ataaaaatcttggaggagtcaccca

SEQ ID NO: 1837136 - DNA, 25 bp, Homo sapien
ttggtaatataaccacaggtggaac

SEQ ID NO: 1837137 - DNA, 25 bp, Homo sapien
aaaatattgtagattgaagagcagg

SEQ ID NO: 1837138 - DNA, 25 bp, Homo sapien
ccctctgcgatacatggtaaaaatt

SEQ ID NO: 1837139 - DNA, 25 bp, Homo sapien
acattatccttgtaaccctctgcga

SEQ ID NO: 1837140 - DNA, 25 bp, Homo sapien
tgggaactgaccctagtgatggaga

SEQ ID NO: 1837141 - DNA, 25 bp, Homo sapien
tgttagtatagcatgtcagccgggt

SEQ ID NO: 1837142 - DNA, 25 bp, Homo sapien
tagtagttgcctaagggtcatgtag

SEQ ID NO: 1837143 - DNA, 25 bp, Homo sapien
ctacaaagtataatgagaaagcaga

SEQ ID NO: 1837144 - DNA, 25 bp, Homo sapien
taaattttctttggctatcttctgc

SEQ ID NO: 1837145 - DNA, 25 bp, Homo sapien
agcacagctcagtcaaagcaagtct

SEQ ID NO: 1837146 - DNA, 25 bp, Homo sapien
ggttggttaacacacatagagtgca

SEQ ID NO: 1837147 - DNA, 25 bp, Homo sapien
gaatcaggtacatatcccttaggca

SEQ ID NO: 1837148 - DNA, 25 bp, Homo sapien
tatggttgcaactgaagctagaggc

SEQ ID NO: 1837149 - DNA, 25 bp, Homo sapien
tcagccccatgtgcaaccagatcat

SEQ ID NO: 1837150 - DNA, 25 bp, Homo sapien
catccaaacgtttgtgccagtggag

SEQ ID NO: 1837151 - DNA, 25 bp, Homo sapien
tttaggtgtcggaacacacgcgctc

SEQ ID NO: 1837152 - DNA, 25 bp, Homo sapien
caccaccggaggttctgtactgaaa

SEQ ID NO: 1837153 - DNA, 25 bp, Homo sapien
ctaactgcgtgctttaacatcttta

SEQ ID NO: 1837154 - DNA, 25 bp, Homo sapien
taactgcgtgctttaacatctttat

SEQ ID NO: 1837155 - DNA, 25 bp, Homo sapien
aactgcgtgctttaacatctttatt

SEQ ID NO: 1837156 - DNA, 25 bp, Homo sapien
ctgcgtgctttaacatctttatttc

SEQ ID NO: 1837157 - DNA, 25 bp, Homo sapien
gatagtagactcgaatctgccttca

SEQ ID NO: 1837158 - DNA, 25 bp, Homo sapien
cagagagctgcaacatgtaactgga

SEQ ID NO: 1837159 - DNA, 25 bp, Homo sapien
ttttccagggtaatacacagagagc

SEQ ID NO: 1837160 - DNA, 25 bp, Homo sapien
tccttgacgcaagacaagttattgc

SEQ ID NO: 1837161 - DNA, 25 bp, Homo sapien
ttataaaatgagtgtcgtgaaacac

SEQ ID NO: 1837162 - DNA, 25 bp, Homo sapien
tgtcgtgaaacactcattttagcac

SEQ ID NO: 1837163 - DNA, 25 bp, Homo sapien
tgttataaaatgagtgtcgtgaaac

SEQ ID NO: 1837164 - DNA, 25 bp, Homo sapien
tataaaatgagtgtcgtgaaacact

SEQ ID NO: 1837165 - DNA, 25 bp, Homo sapien
ctgtgaaggccagcagtccaatttt

SEQ ID NO: 1837166 - DNA, 25 bp, Homo sapien
cagtccaattttctgggcagcttga

SEQ ID NO: 1837167 - DNA, 25 bp, Homo sapien
cagcagtccaattttctgggcagct

SEQ ID NO: 1837168 - DNA, 25 bp, Homo sapien
aaggccagcagtccaattttctggg

SEQ ID NO: 1837169 - DNA, 25 bp, Homo sapien
tgggtagagattcattcatcaacac

SEQ ID NO: 1837170 - DNA, 25 bp, Homo sapien
tcaacacttggccaagtacaacaat

SEQ ID NO: 1837171 - DNA, 25 bp, Homo sapien
gcccttaacagtgacacgccagaat

SEQ ID NO: 1837172 - DNA, 25 bp, Homo sapien
cagaatttctggagacgccgacaca

SEQ ID NO: 1837173 - DNA, 25 bp, Homo sapien
cccaaatttgcgtacaagaaaatcg

SEQ ID NO: 1837174 - DNA, 25 bp, Homo sapien
tttgcgtacaagaaaatcggctgtt

SEQ ID NO: 1837175 - DNA, 25 bp, Homo sapien
gtacaagaaaatcggctgttagcca

SEQ ID NO: 1837176 - DNA, 25 bp, Homo sapien
caaatttgcgtacaagaaaatcggc

SEQ ID NO: 1837177 - DNA, 25 bp, Homo sapien
tgtaaaaaggccagtggtccttcag

SEQ ID NO: 1837178 - DNA, 25 bp, Homo sapien
aaaggccagtggtccttcaggtaca

SEQ ID NO: 1837179 - DNA, 25 bp, Homo sapien
ggccagtggtccttcaggtacacca

SEQ ID NO: 1837180 - DNA, 25 bp, Homo sapien
tgtgtaaaaaggccagtggtccttc

SEQ ID NO: 1837181 - DNA, 25 bp, Homo sapien
ggagtttcagtatgccatgcagact

SEQ ID NO: 1837182 - DNA, 25 bp, Homo sapien
gtttcagtatgccatgcagactggt

SEQ ID NO: 1837183 - DNA, 25 bp, Homo sapien
gagtttcagtatgccatgcagactg

SEQ ID NO: 1837184 - DNA, 25 bp, Homo sapien
ttcagtatgccatgcagactggtct

SEQ ID NO: 1837185 - DNA, 25 bp, Homo sapien
ccacacaactaaaagcacccctcaa

SEQ ID NO: 1837186 - DNA, 25 bp, Homo sapien
tgccacacaactaaaagcacccctc

SEQ ID NO: 1837187 - DNA, 25 bp, Homo sapien
gccacacaactaaaagcacccctca

SEQ ID NO: 1837188 - DNA, 25 bp, Homo sapien
gaaagaaccatttgccagaagcctg

SEQ ID NO: 1837189 - DNA, 25 bp, Homo sapien
gaactatttggccagggaatcctac

SEQ ID NO: 1837190 - DNA, 25 bp, Homo sapien
gggcagtaaccacccctcaggatgt

SEQ ID NO: 1837191 - DNA, 25 bp, Homo sapien
gataggtactgtgaaacgagactct

SEQ ID NO: 1837192 - DNA, 25 bp, Homo sapien
tgtggcaacttcagttccatgacga

SEQ ID NO: 1837193 - DNA, 25 bp, Homo sapien
ccgactttaacacagtctcgaggaa

SEQ ID NO: 1837194 - DNA, 25 bp, Homo sapien
gttccatgacgacctccgactttaa

SEQ ID NO: 1837195 - DNA, 25 bp, Homo sapien
aaatttgtccaattgttcatatgcc

SEQ ID NO: 1837196 - DNA, 25 bp, Homo sapien
gggtgagatagacactgatcagttc

SEQ ID NO: 1837197 - DNA, 25 bp, Homo sapien
tccatatagaaagtctccagacaat

SEQ ID NO: 1837198 - DNA, 25 bp, Homo sapien
tccagacaatatagttcactctcag

SEQ ID NO: 1837199 - DNA, 25 bp, Homo sapien
tagtacacagactgatcaatccata

SEQ ID NO: 1837200 - DNA, 25 bp, Homo sapien
tcagtatcagattgacacaatgtca

SEQ ID NO: 1837201 - DNA, 25 bp, Homo sapien
gcttcggctcgcacacggtgcgcac

SEQ ID NO: 1837202 - DNA, 25 bp, Homo sapien
tcggctcgcacacggtgcgcacaca

SEQ ID NO: 1837203 - DNA, 25 bp, Homo sapien
cacacggtgcgcacacacactggcc

SEQ ID NO: 1837204 - DNA, 25 bp, Homo sapien
gcacacggtgcgcacacacactggc

SEQ ID NO: 1837205 - DNA, 25 bp, Homo sapien
actgtgccggctaataagatgtact

SEQ ID NO: 1837206 - DNA, 25 bp, Homo sapien
tactgacctaaaggcaaactggttc

SEQ ID NO: 1837207 - DNA, 25 bp, Homo sapien
tcccttgggctagtgcaaaacatga

SEQ ID NO: 1837208 - DNA, 25 bp, Homo sapien
actaacatacggtgcaaagaagaca

SEQ ID NO: 1837209 - DNA, 25 bp, Homo sapien
tttcagagccaggcaagctgctttc

SEQ ID NO: 1837210 - DNA, 25 bp, Homo sapien
ttcagagccaggcaagctgctttct

SEQ ID NO: 1837211 - DNA, 25 bp, Homo sapien
tcattcttactctctgagataaact

SEQ ID NO: 1837212 - DNA, 25 bp, Homo sapien
tactctctgagataaactatagcat

SEQ ID NO: 1837213 - DNA, 25 bp, Homo sapien
cctcatgaaggcattttggtttgtt

SEQ ID NO: 1837214 - DNA, 25 bp, Homo sapien
ttcgtagtttaagaggtatacctca

SEQ ID NO: 1837215 - DNA, 25 bp, Homo sapien
tctaagggcacatttcgaacactgg

SEQ ID NO: 1837216 - DNA, 25 bp, Homo sapien
tgggcccctgttgctatttctaagg

SEQ ID NO: 1837217 - DNA, 25 bp, Homo sapien
gaaagatcataactgtgtagcaaag

SEQ ID NO: 1837218 - DNA, 25 bp, Homo sapien
gatgcgtatatatcctgctaccagc

SEQ ID NO: 1837219 - DNA, 25 bp, Homo sapien
agcgtcacagcctcactaacttcgt

SEQ ID NO: 1837220 - DNA, 25 bp, Homo sapien
catctcttagtgattgcagagtctg

SEQ ID NO: 1837221 - DNA, 25 bp, Homo sapien
ggctgctgccaagtaaagcgtcaca

SEQ ID NO: 1837222 - DNA, 25 bp, Homo sapien
ctctctggttaatagcagagccaga

SEQ ID NO: 1837223 - DNA, 25 bp, Homo sapien
cattagtatacattcaaatgcggaa

SEQ ID NO: 1837224 - DNA, 25 bp, Homo sapien
gcctgaaaggaagcattatggatta

SEQ ID NO: 1837225 - DNA, 25 bp, Homo sapien
aaatcacagaaaatagcctaaatgc

SEQ ID NO: 1837226 - DNA, 25 bp, Homo sapien
gcctaaatgcccaacaatataatca

SEQ ID NO: 1837227 - DNA, 25 bp, Homo sapien
gagatgtaaactgccactgatgcaa

SEQ ID NO: 1837228 - DNA, 25 bp, Homo sapien
gaccgtgtaataagagcctagagat

SEQ ID NO: 1837229 - DNA, 25 bp, Homo sapien
tagtaaatgagtaggccttcttggg

SEQ ID NO: 1837230 - DNA, 25 bp, Homo sapien
catgctccgtgctggtacagtgctg

SEQ ID NO: 1837231 - DNA, 25 bp, Homo sapien
gaaaacagtgacgacttccgaggac

SEQ ID NO: 1837232 - DNA, 25 bp, Homo sapien
gtcactgacgccgtggctggtgaag

SEQ ID NO: 1837233 - DNA, 25 bp, Homo sapien
ggctggtgaagtaactgtaatactg

SEQ ID NO: 1837234 - DNA, 25 bp, Homo sapien
gccagctggctcaggtaactctcca

SEQ ID NO: 1837235 - DNA, 25 bp, Homo sapien
gatattctttgttgacagttctggc

SEQ ID NO: 1837236 - DNA, 25 bp, Homo sapien
tattctttgttgacagttctggcaa

SEQ ID NO: 1837237 - DNA, 25 bp, Homo sapien
ctgtggtagacaccaacagggctgc

SEQ ID NO: 1837238 - DNA, 25 bp, Homo sapien
ttcatcactctgtccgctgggctgt

SEQ ID NO: 1837239 - DNA, 25 bp, Homo sapien
gacagctgcgagtttctccatcact

SEQ ID NO: 1837240 - DNA, 25 bp, Homo sapien
agtttctccatcacttggatctgcc

SEQ ID NO: 1837241 - DNA, 25 bp, Homo sapien
tcactgacagctgcgagtttctcca

SEQ ID NO: 1837242 - DNA, 25 bp, Homo sapien
tctcatcactgacagctgcgagttt

SEQ ID NO: 1837243 - DNA, 25 bp, Homo sapien
ctgtgtcttcagtgagcgcttcact

SEQ ID NO: 1837244 - DNA, 25 bp, Homo sapien
agttgggtgcagtactggaggtgcc

SEQ ID NO: 1837245 - DNA, 25 bp, Homo sapien
agtgagcgcttcactgagatgcccc

SEQ ID NO: 1837246 - DNA, 25 bp, Homo sapien
tgcacgagttgggtgcagtactgga

SEQ ID NO: 1837247 - DNA, 25 bp, Homo sapien
gtgggcaaaacattagctattcttt

SEQ ID NO: 1837248 - DNA, 25 bp, Homo sapien
aggtgggcaaaacattagctattct

SEQ ID NO: 1837249 - DNA, 25 bp, Homo sapien
attgaaggtgggcaaaacattagct

SEQ ID NO: 1837250 - DNA, 25 bp, Homo sapien
ctattgaaggtgggcaaaacattag

SEQ ID NO: 1837251 - DNA, 25 bp, Homo sapien
cacaggtcaagtccacatggtttgc

SEQ ID NO: 1837252 - DNA, 25 bp, Homo sapien
acttgcctatcttgaaaaatagaga

SEQ ID NO: 1837253 - DNA, 25 bp, Homo sapien
catggtttgcatcgggccccaacag

SEQ ID NO: 1837254 - DNA, 25 bp, Homo sapien
tgtgcacaaaccacaggtcaagtcc

SEQ ID NO: 1837255 - DNA, 25 bp, Homo sapien
tagagacatgcagtaccagtggcag

SEQ ID NO: 1837256 - DNA, 25 bp, Homo sapien
aacttgacttggatgcgtgccttga

SEQ ID NO: 1837257 - DNA, 25 bp, Homo sapien
tacaagaaatatgcaccatgggact

SEQ ID NO: 1837258 - DNA, 25 bp, Homo sapien
tctctggcaaagactcactgggttg

SEQ ID NO: 1837259 - DNA, 25 bp, Homo sapien
tgagtcagcacctccgccaacatta

SEQ ID NO: 1837260 - DNA, 25 bp, Homo sapien
tcctcctcgtcaaaatcagaggtgt

SEQ ID NO: 1837261 - DNA, 25 bp, Homo sapien
cagaggtgttcaggaaatcaaagct

SEQ ID NO: 1837262 - DNA, 25 bp, Homo sapien
tctaaagcactttcaactgtgagac

SEQ ID NO: 1837263 - DNA, 25 bp, Homo sapien
aaaatggcacaatatctgggactgg

SEQ ID NO: 1837264 - DNA, 25 bp, Homo sapien
tacaaccatggataaaatggcacaa

SEQ ID NO: 1837265 - DNA, 25 bp, Homo sapien
aaagaagtacaaccatggataaaat

SEQ ID NO: 1837266 - DNA, 25 bp, Homo sapien
ggcacaatatctgggactggttgca

SEQ ID NO: 1837267 - DNA, 25 bp, Homo sapien
tcttagcgcaaggtaggaagggcct

SEQ ID NO: 1837268 - DNA, 25 bp, Homo sapien
aacaatgccagttgctatgggcaca

SEQ ID NO: 1837269 - DNA, 25 bp, Homo sapien
tgttccctaggtaagaagccctgca

SEQ ID NO: 1837270 - DNA, 25 bp, Homo sapien
caaaaggcgctagctatctaaggca

SEQ ID NO: 1837271 - DNA, 25 bp, Homo sapien
catcaccctagatgcctggaatggg

SEQ ID NO: 1837272 - DNA, 25 bp, Homo sapien
ggaggctatgccatcaactgaacta

SEQ ID NO: 1837273 - DNA, 25 bp, Homo sapien
gcctgcatatacaagccctgagctg

SEQ ID NO: 1837274 - DNA, 25 bp, Homo sapien
tagtagaataccagacaagcagcct

SEQ ID NO: 1837275 - DNA, 25 bp, Homo sapien
cctatggattgagggtatccctgga

SEQ ID NO: 1837276 - DNA, 25 bp, Homo sapien
gctgtctgatccctatggattgagg

SEQ ID NO: 1837277 - DNA, 25 bp, Homo sapien
ccctggagagtctgtagatctcccg

SEQ ID NO: 1837278 - DNA, 25 bp, Homo sapien
ctggagagtctgtagatctcccgct

SEQ ID NO: 1837279 - DNA, 25 bp, Homo sapien
ggttctaatgcaagtaaaagcccat

SEQ ID NO: 1837280 - DNA, 25 bp, Homo sapien
tctgcagatgtgagcctcttgacca

SEQ ID NO: 1837281 - DNA, 25 bp, Homo sapien
ttccgaagtgtccagttccacaggc

SEQ ID NO: 1837282 - DNA, 25 bp, Homo sapien
tcatgacttcttggttcagatcctg

SEQ ID NO: 1837283 - DNA, 25 bp, Homo sapien
gactgtcggcggcaagcctcagatg

SEQ ID NO: 1837284 - DNA, 25 bp, Homo sapien
cctgaggactgtcggcggcaagcct

SEQ ID NO: 1837285 - DNA, 25 bp, Homo sapien
gcacctgaggactgtcggcggcaag

SEQ ID NO: 1837286 - DNA, 25 bp, Homo sapien
actgtcggcggcaagcctcagatgg

SEQ ID NO: 1837287 - DNA, 25 bp, Homo sapien
gggtgatggtaatttctggatttgt

SEQ ID NO: 1837288 - DNA, 25 bp, Homo sapien
caagctgctgaggttaaactccgca

SEQ ID NO: 1837289 - DNA, 25 bp, Homo sapien
gtgtcatccataccctcattctggg

SEQ ID NO: 1837290 - DNA, 25 bp, Homo sapien
gtgagggcgcagtccccgttgggca

SEQ ID NO: 1837291 - DNA, 25 bp, Homo sapien
ttcaaagatgtcatcaggtagattt

SEQ ID NO: 1837292 - DNA, 25 bp, Homo sapien
caaagatgtcatcaggtagatttga

SEQ ID NO: 1837293 - DNA, 25 bp, Homo sapien
tcaaagatgtcatcaggtagatttg

SEQ ID NO: 1837294 - DNA, 25 bp, Homo sapien
atctgaggccactagatcccgacac

SEQ ID NO: 1837295 - DNA, 25 bp, Homo sapien
catgcagttcgttgcacccaaactg

SEQ ID NO: 1837296 - DNA, 25 bp, Homo sapien
tgctgggaataagcccggcaaataa

SEQ ID NO: 1837297 - DNA, 25 bp, Homo sapien
cccaaactgtccgttgtagcatggt

SEQ ID NO: 1837298 - DNA, 25 bp, Homo sapien
tggagctcagtgtggaagatggtga

SEQ ID NO: 1837299 - DNA, 25 bp, Homo sapien
taactgagggatgacatcatgaggg

SEQ ID NO: 1837300 - DNA, 25 bp, Homo sapien
ggaagggccccaatgagggagtggc

SEQ ID NO: 1837301 - DNA, 25 bp, Homo sapien
tacaatggtgtacacgctataactg

SEQ ID NO: 1837302 - DNA, 25 bp, Homo sapien
gctgcggtgcagcttggcaaagaaa

SEQ ID NO: 1837303 - DNA, 25 bp, Homo sapien
actcaagacagacagccgcctgggc

SEQ ID NO: 1837304 - DNA, 25 bp, Homo sapien
atagagctctagcacggccttggga

SEQ ID NO: 1837305 - DNA, 25 bp, Homo sapien
gcaaagaaagtgtcttgcaaggcac

SEQ ID NO: 1837306 - DNA, 25 bp, Homo sapien
cttgttcccagcgcctgaggatgcg

SEQ ID NO: 1837307 - DNA, 25 bp, Homo sapien
tgccttgttcccagcgcctgaggat

SEQ ID NO: 1837308 - DNA, 25 bp, Homo sapien
gccttgttcccagcgcctgaggatg

SEQ ID NO: 1837309 - DNA, 25 bp, Homo sapien
ccttgttcccagcgcctgaggatgc

SEQ ID NO: 1837310 - DNA, 25 bp, Homo sapien
tgaggtcgggctgcaaacagctctt

SEQ ID NO: 1837311 - DNA, 25 bp, Homo sapien
gttgctagccctttgagctccgtga

SEQ ID NO: 1837312 - DNA, 25 bp, Homo sapien
gatgtcgacagccactacctgaggt

SEQ ID NO: 1837313 - DNA, 25 bp, Homo sapien
aggtcacgctacctaccaggatgtg

SEQ ID NO: 1837314 - DNA, 25 bp, Homo sapien
cttagattgactttacttactctga

SEQ ID NO: 1837315 - DNA, 25 bp, Homo sapien
tatctgaaatcagaagcggattttc

SEQ ID NO: 1837316 - DNA, 25 bp, Homo sapien
tgtaatagacttgtgcagaaaagtc

SEQ ID NO: 1837317 - DNA, 25 bp, Homo sapien
gccagaggtggatatttcaaaagtg

SEQ ID NO: 1837318 - DNA, 25 bp, Homo sapien
ggatcatccagccgtggcaccagga

SEQ ID NO: 1837319 - DNA, 25 bp, Homo sapien
gatcatccagccgtggcaccaggaa

SEQ ID NO: 1837320 - DNA, 25 bp, Homo sapien
tcatccagccgtggcaccaggaaag

SEQ ID NO: 1837321 - DNA, 25 bp, Homo sapien
atcatccagccgtggcaccaggaaa

SEQ ID NO: 1837322 - DNA, 25 bp, Homo sapien
gctgccggccatacttcatgaaaat

SEQ ID NO: 1837323 - DNA, 25 bp, Homo sapien
cttgatggagatgaacccaactatc

SEQ ID NO: 1837324 - DNA, 25 bp, Homo sapien
gctctgcttgccatttacttctatt

SEQ ID NO: 1837325 - DNA, 25 bp, Homo sapien
accgctgccggccatacttcatgaa

SEQ ID NO: 1837326 - DNA, 25 bp, Homo sapien
ctccaggacagaggcgtgcaaagcc

SEQ ID NO: 1837327 - DNA, 25 bp, Homo sapien
tctccaggacagaggcgtgcaaagc

SEQ ID NO: 1837328 - DNA, 25 bp, Homo sapien
gatctccaggacagaggcgtgcaaa

SEQ ID NO: 1837329 - DNA, 25 bp, Homo sapien
ttgatctccaggacagaggcgtgca

SEQ ID NO: 1837330 - DNA, 25 bp, Homo sapien
ccaagaaattggaaggtgaggtgta

SEQ ID NO: 1837331 - DNA, 25 bp, Homo sapien
aaattggaaggtgaggtgtagaaca

SEQ ID NO: 1837332 - DNA, 25 bp, Homo sapien
ctgtaaccaagaaattggaaggtga

SEQ ID NO: 1837333 - DNA, 25 bp, Homo sapien
aattggaaggtgaggtgtagaacat

SEQ ID NO: 1837334 - DNA, 25 bp, Homo sapien
gagttccttctatcacaggtaaaga

SEQ ID NO: 1837335 - DNA, 25 bp, Homo sapien
gggggagttccttctatcacaggta

SEQ ID NO: 1837336 - DNA, 25 bp, Homo sapien
ataacactttttggggccattcctg

SEQ ID NO: 1837337 - DNA, 25 bp, Homo sapien
ccttctatcacaggtaaagaagaca

SEQ ID NO: 1837338 - DNA, 25 bp, Homo sapien
gaagacacgaacaattcctccctgt

SEQ ID NO: 1837339 - DNA, 25 bp, Homo sapien
tttagaggcactccgaggaaataat

SEQ ID NO: 1837340 - DNA, 25 bp, Homo sapien
aaaaagatcacataccttggcaggg

SEQ ID NO: 1837341 - DNA, 25 bp, Homo sapien
catatataaatggatccccagggaa

SEQ ID NO: 1837342 - DNA, 25 bp, Homo sapien
gagtttcaggcggccgtgagccact

SEQ ID NO: 1837343 - DNA, 25 bp, Homo sapien
acctgtgatcctgtgctctgggagg

SEQ ID NO: 1837344 - DNA, 25 bp, Homo sapien
aggttaggagtttcaggcggccgtg

SEQ ID NO: 1837345 - DNA, 25 bp, Homo sapien
ttaggagtttcaggcggccgtgagc

SEQ ID NO: 1837346 - DNA, 25 bp, Homo sapien
tggagccagcacatttaaaaacagc

SEQ ID NO: 1837347 - DNA, 25 bp, Homo sapien
taaacgttgcgtgggtaagctgaca

SEQ ID NO: 1837348 - DNA, 25 bp, Homo sapien
taaaaacctctgcaaattggtcagg

SEQ ID NO: 1837349 - DNA, 25 bp, Homo sapien
ccatcacttgtcagtaggtggcaga

SEQ ID NO: 1837350 - DNA, 25 bp, Homo sapien
gctgttcaccatacattacactggg

SEQ ID NO: 1837351 - DNA, 25 bp, Homo sapien
tcagaatgcagtcaagtgcctggcc

SEQ ID NO: 1837352 - DNA, 25 bp, Homo sapien
catgtggaactcaaggccagggagc

SEQ ID NO: 1837353 - DNA, 25 bp, Homo sapien
ccaactagagaggtgagtggcaacc

SEQ ID NO: 1837354 - DNA, 25 bp, Homo sapien
tcacagatgtagtttctgagtttgc

SEQ ID NO: 1837355 - DNA, 25 bp, Homo sapien
cattgaaagccttcacagatgtagt

SEQ ID NO: 1837356 - DNA, 25 bp, Homo sapien
tgaaagccttcacagatgtagtttc

SEQ ID NO: 1837357 - DNA, 25 bp, Homo sapien
ttcacagatgtagtttctgagtttg

SEQ ID NO: 1837358 - DNA, 25 bp, Homo sapien
ccatcccactcctagggtgtctctg

SEQ ID NO: 1837359 - DNA, 25 bp, Homo sapien
tccatcagggctgcgatgtagcggg

SEQ ID NO: 1837360 - DNA, 25 bp, Homo sapien
agatctggtccgagggtggtccctt

SEQ ID NO: 1837361 - DNA, 25 bp, Homo sapien
ctccagatctggtccgagggtggtc

SEQ ID NO: 1837362 - DNA, 25 bp, Homo sapien
gagaattctcccagcagattctcta

SEQ ID NO: 1837363 - DNA, 25 bp, Homo sapien
tctcccagcagattctctagctcca

SEQ ID NO: 1837364 - DNA, 25 bp, Homo sapien
gaattctcccagcagattctctagc

SEQ ID NO: 1837365 - DNA, 25 bp, Homo sapien
attctcccagcagattctctagctc

SEQ ID NO: 1837366 - DNA, 25 bp, Homo sapien
ctcatgcctgtaatcccagcacttt

SEQ ID NO: 1837367 - DNA, 25 bp, Homo sapien
gcatttaaaaaacattattctaggc

SEQ ID NO: 1837368 - DNA, 25 bp, Homo sapien
ggctcatgcctgtaatcccagcact

SEQ ID NO: 1837369 - DNA, 25 bp, Homo sapien
aacattattctaggccgggctcagt

SEQ ID NO: 1837370 - DNA, 25 bp, Homo sapien
gggatgttgcgaaggcttgcttcat

SEQ ID NO: 1837371 - DNA, 25 bp, Homo sapien
ctgtcagactctcccgggcagcttt

SEQ ID NO: 1837372 - DNA, 25 bp, Homo sapien
gcgtcgctggatacaataagcttca

SEQ ID NO: 1837373 - DNA, 25 bp, Homo sapien
gaagctccgattgatctctgtcaga

SEQ ID NO: 1837374 - DNA, 25 bp, Homo sapien
taccatcaggcattgtcaaaagcaa

SEQ ID NO: 1837375 - DNA, 25 bp, Homo sapien
gcagttaactacaagaattttcagg

SEQ ID NO: 1837376 - DNA, 25 bp, Homo sapien
tttcaggcggataacaaacaacaat

SEQ ID NO: 1837377 - DNA, 25 bp, Homo sapien
gggaggcatacttacctagcactat

SEQ ID NO: 1837378 - DNA, 25 bp, Homo sapien
actccaggcgtctcatgtatctttc

SEQ ID NO: 1837379 - DNA, 25 bp, Homo sapien
aaactccaggcgtctcatgtatctt

SEQ ID NO: 1837380 - DNA, 25 bp, Homo sapien
tgaaactccaggcgtctcatgtatc

SEQ ID NO: 1837381 - DNA, 25 bp, Homo sapien
tatgaaactccaggcgtctcatgta

SEQ ID NO: 1837382 - DNA, 25 bp, Homo sapien
gccactgaggatggtcaagcgcatt

SEQ ID NO: 1837383 - DNA, 25 bp, Homo sapien
tttttacggaacatgaggtcttggc

SEQ ID NO: 1837384 - DNA, 25 bp, Homo sapien
taaagccagctcatttcctgtgtgc

SEQ ID NO: 1837385 - DNA, 25 bp, Homo sapien
cacgcccggccttaagaagagttct

SEQ ID NO: 1837386 - DNA, 25 bp, Homo sapien
atatcttttaactgagctgtcaact

SEQ ID NO: 1837387 - DNA, 25 bp, Homo sapien
tatcttttaactgagctgtcaactt

SEQ ID NO: 1837388 - DNA, 25 bp, Homo sapien
catatcttttaactgagctgtcaac

SEQ ID NO: 1837389 - DNA, 25 bp, Homo sapien
gcaagaggtctgtagagtcagccct

SEQ ID NO: 1837390 - DNA, 25 bp, Homo sapien
ttttgaaaggtctagcagtggcact

SEQ ID NO: 1837391 - DNA, 25 bp, Homo sapien
tgaaccttgctctgtagttgggcag

SEQ ID NO: 1837392 - DNA, 25 bp, Homo sapien
gatgtaatcgtaatctctgcgcctg

SEQ ID NO: 1837393 - DNA, 25 bp, Homo sapien
catttttcaaggccctgtagacttc

SEQ ID NO: 1837394 - DNA, 25 bp, Homo sapien
tcaagtccatttttcaaggccctgt

SEQ ID NO: 1837395 - DNA, 25 bp, Homo sapien
ctgtagacttcttccacccttttag

SEQ ID NO: 1837396 - DNA, 25 bp, Homo sapien
cccttttaggctgaggctctttggg

SEQ ID NO: 1837397 - DNA, 25 bp, Homo sapien
cttgagagcggaggaattttcaatg

SEQ ID NO: 1837398 - DNA, 25 bp, Homo sapien
tcttgagagcggaggaattttcaat

SEQ ID NO: 1837399 - DNA, 25 bp, Homo sapien
aggcttcttgagagcggaggaattt

SEQ ID NO: 1837400 - DNA, 25 bp, Homo sapien
cttcttgagagcggaggaattttca

SEQ ID NO: 1837401 - DNA, 25 bp, Homo sapien
tcgcctttcctggaggccgctgaaa

SEQ ID NO: 1837402 - DNA, 25 bp, Homo sapien
aaaggactggcttctaatgatccca

SEQ ID NO: 1837403 - DNA, 25 bp, Homo sapien
aggccgctgaaacccgcaaaggact

SEQ ID NO: 1837404 - DNA, 25 bp, Homo sapien
ctggatcgcctttcctggaggccgc

SEQ ID NO: 1837405 - DNA, 25 bp, Homo sapien
gccctccaggcgaaaaagactggga

SEQ ID NO: 1837406 - DNA, 25 bp, Homo sapien
gcgaaaaagactgggatcctaccaa

SEQ ID NO: 1837407 - DNA, 25 bp, Homo sapien
tgggccctccaggcgaaaaagactg

SEQ ID NO: 1837408 - DNA, 25 bp, Homo sapien
tccaggcgaaaaagactgggatcct

SEQ ID NO: 1837409 - DNA, 25 bp, Homo sapien
tgaagactccaaagtgggcagacaa

SEQ ID NO: 1837410 - DNA, 25 bp, Homo sapien
tagaccttcctcaaagctacgcgaa

SEQ ID NO: 1837411 - DNA, 25 bp, Homo sapien
gcaggtgacttcaatccagagaggg

SEQ ID NO: 1837412 - DNA, 25 bp, Homo sapien
gcagtttgagcgagttacttcccca

SEQ ID NO: 1837413 - DNA, 25 bp, Homo sapien
aatcagaacaaatgtctgtccagga

SEQ ID NO: 1837414 - DNA, 25 bp, Homo sapien
cctaagattgtcaaatactttggga

SEQ ID NO: 1837415 - DNA, 25 bp, Homo sapien
caggtaaacaaggttctcaaaatca

SEQ ID NO: 1837416 - DNA, 25 bp, Homo sapien
tgtaacaggtaaacaaggttctcaa

SEQ ID NO: 1837417 - DNA, 25 bp, Homo sapien
gcttttgtagtcttagaaatgatca

SEQ ID NO: 1837418 - DNA, 25 bp, Homo sapien
taaatttacatatggaactgatggc

SEQ ID NO: 1837419 - DNA, 25 bp, Homo sapien
tggccactaggaatgtgactagagt

SEQ ID NO: 1837420 - DNA, 25 bp, Homo sapien
ggaactgatggccactaggaatgtg

SEQ ID NO: 1837421 - DNA, 25 bp, Homo sapien
gagaacttggagataacctgtctct

SEQ ID NO: 1837422 - DNA, 25 bp, Homo sapien
caggaatcaatcttggagggctgtt

SEQ ID NO: 1837423 - DNA, 25 bp, Homo sapien
catgcagcaggccctaaagtgcagc

SEQ ID NO: 1837424 - DNA, 25 bp, Homo sapien
gaaggacatctgtcatgtggcaggc

SEQ ID NO: 1837425 - DNA, 25 bp, Homo sapien
ttttgactaatgttgtcataactca

SEQ ID NO: 1837426 - DNA, 25 bp, Homo sapien
aatgattcagggcataaaactcgcc

SEQ ID NO: 1837427 - DNA, 25 bp, Homo sapien
taaaactcgcctaagtctaatgagg

SEQ ID NO: 1837428 - DNA, 25 bp, Homo sapien
tctaatgagggattgggttgatttt

SEQ ID NO: 1837429 - DNA, 25 bp, Homo sapien
tacgtgtgtgccgtcatatgccagc

SEQ ID NO: 1837430 - DNA, 25 bp, Homo sapien
tactgccccagcctaggattactgg

SEQ ID NO: 1837431 - DNA, 25 bp, Homo sapien
cagttgcaaagttgagtggcttccc

SEQ ID NO: 1837432 - DNA, 25 bp, Homo sapien
gcagaacaacccagtgtcaaagagt

SEQ ID NO: 1837433 - DNA, 25 bp, Homo sapien
tgttctttgtctaaaggatttgaag

SEQ ID NO: 1837434 - DNA, 25 bp, Homo sapien
tgattctcctgccttagcctcctga

SEQ ID NO: 1837435 - DNA, 25 bp, Homo sapien
gtgattctcctgccttagcctcctg

SEQ ID NO: 1837436 - DNA, 25 bp, Homo sapien
ttagtaaagctggagttttaccatg

SEQ ID NO: 1837437 - DNA, 25 bp, Homo sapien
ctcagggtctctcctcagtcagatg

SEQ ID NO: 1837438 - DNA, 25 bp, Homo sapien
tagcatggtagtctcaggatagtca

SEQ ID NO: 1837439 - DNA, 25 bp, Homo sapien
tgtgtctgaccgtataaaccaatct

SEQ ID NO: 1837440 - DNA, 25 bp, Homo sapien
tccatctcctaagtgggaccccaat

SEQ ID NO: 1837441 - DNA, 25 bp, Homo sapien
tgcgtcagatagagtgatcggcact

SEQ ID NO: 1837442 - DNA, 25 bp, Homo sapien
tcgtgccatgcacatagaccagcag

SEQ ID NO: 1837443 - DNA, 25 bp, Homo sapien
tgccacatgctactgtccctcagag

SEQ ID NO: 1837444 - DNA, 25 bp, Homo sapien
tccctcagagaaggatcgtgccatg

SEQ ID NO: 1837445 - DNA, 25 bp, Homo sapien
aaatcagtgcacagcttcttttatt

SEQ ID NO: 1837446 - DNA, 25 bp, Homo sapien
gtggtgtgatccctgcttactgcaa

SEQ ID NO: 1837447 - DNA, 25 bp, Homo sapien
tttatttttggagacggagtctcgc

SEQ ID NO: 1837448 - DNA, 25 bp, Homo sapien
cctccgcctcccaggttcaaatgat

SEQ ID NO: 1837449 - DNA, 25 bp, Homo sapien
cagggttctctggcatataaaagcc

SEQ ID NO: 1837450 - DNA, 25 bp, Homo sapien
acctccggctttgcagacagcctga

SEQ ID NO: 1837451 - DNA, 25 bp, Homo sapien
gcaccaatgcaatgcccggagctgc

SEQ ID NO: 1837452 - DNA, 25 bp, Homo sapien
taacgacgacggctccttgtcatgt

SEQ ID NO: 1837453 - DNA, 25 bp, Homo sapien
ttggagtgacccgtggaatcgcgcc

SEQ ID NO: 1837454 - DNA, 25 bp, Homo sapien
cacgccaggctcctttgcaagagct

SEQ ID NO: 1837455 - DNA, 25 bp, Homo sapien
tgcttccagctgatcgccggcacgc

SEQ ID NO: 1837456 - DNA, 25 bp, Homo sapien
ctggcgcggcagctttggagtgacc

SEQ ID NO: 1837457 - DNA, 25 bp, Homo sapien
tttgtagggcactctctctaccggg

SEQ ID NO: 1837458 - DNA, 25 bp, Homo sapien
gacacagctctcataaagatggcag

SEQ ID NO: 1837459 - DNA, 25 bp, Homo sapien
ccccgctgaagagggctgctttgta

SEQ ID NO: 1837460 - DNA, 25 bp, Homo sapien
tgttctggtggatttgaatgataaa

SEQ ID NO: 1837461 - DNA, 25 bp, Homo sapien
gcatcctcgggctggaatacaagca

SEQ ID NO: 1837462 - DNA, 25 bp, Homo sapien
aagcagccagaaccatcgcctgata

SEQ ID NO: 1837463 - DNA, 25 bp, Homo sapien
cagtcgtggtctgggcactgcatcc

SEQ ID NO: 1837464 - DNA, 25 bp, Homo sapien
aaccatcgcctgataaactgtgtca

SEQ ID NO: 1837465 - DNA, 25 bp, Homo sapien
aaagcgctactacggattagcacag

SEQ ID NO: 1837466 - DNA, 25 bp, Homo sapien
tttctctatttactggagtctggag

SEQ ID NO: 1837467 - DNA, 25 bp, Homo sapien
gggagaactgagtaaagcgctacta

SEQ ID NO: 1837468 - DNA, 25 bp, Homo sapien
cagtactaatggtctcataggacga

SEQ ID NO: 1837469 - DNA, 25 bp, Homo sapien
caggaatggcactgttgtaagtgac

SEQ ID NO: 1837470 - DNA, 25 bp, Homo sapien
cttcctgactcaggaatggcactgt

SEQ ID NO: 1837471 - DNA, 25 bp, Homo sapien
tgactcaggaatggcactgttgtaa

SEQ ID NO: 1837472 - DNA, 25 bp, Homo sapien
ggaatggcactgttgtaagtgacat

SEQ ID NO: 1837473 - DNA, 25 bp, Homo sapien
ctattgggctgaggggtatcttgct

SEQ ID NO: 1837474 - DNA, 25 bp, Homo sapien
gaggggtatcttgctgaggtttggg

SEQ ID NO: 1837475 - DNA, 25 bp, Homo sapien
gggtatcttgctgaggtttgggcat

SEQ ID NO: 1837476 - DNA, 25 bp, Homo sapien
cctattgggctgaggggtatcttgc

SEQ ID NO: 1837477 - DNA, 25 bp, Homo sapien
tatgctctggctacacagcacaaag

SEQ ID NO: 1837478 - DNA, 25 bp, Homo sapien
atgataagatatgctctggctacac

SEQ ID NO: 1837479 - DNA, 25 bp, Homo sapien
cagcacaaagtaaagatggttttta

SEQ ID NO: 1837480 - DNA, 25 bp, Homo sapien
gcacaaagtaaagatggtttttagc

SEQ ID NO: 1837481 - DNA, 25 bp, Homo sapien
tccttctggtacttgaaagagtcac

SEQ ID NO: 1837482 - DNA, 25 bp, Homo sapien
gccaagcacatcctcatttcagggt

SEQ ID NO: 1837483 - DNA, 25 bp, Homo sapien
gaatcatcaccctcatagtcagcca

SEQ ID NO: 1837484 - DNA, 25 bp, Homo sapien
cctcttcagcctagggtgtgcagat

SEQ ID NO: 1837485 - DNA, 25 bp, Homo sapien
tttgtaaacagcctacatggaaaga

SEQ ID NO: 1837486 - DNA, 25 bp, Homo sapien
tccagattataccagattgcataat

SEQ ID NO: 1837487 - DNA, 25 bp, Homo sapien
aatattccagattataccagattgc

SEQ ID NO: 1837488 - DNA, 25 bp, Homo sapien
taggtatttatcctaattacaattc

SEQ ID NO: 1837489 - DNA, 25 bp, Homo sapien
agctcctcagcatcaaaaaactgca

SEQ ID NO: 1837490 - DNA, 25 bp, Homo sapien
ggagctcctcagcatcaaaaaactg

SEQ ID NO: 1837491 - DNA, 25 bp, Homo sapien
cttcatcgaccaggagctcctcagc

SEQ ID NO: 1837492 - DNA, 25 bp, Homo sapien
aggagctcctcagcatcaaaaaact

SEQ ID NO: 1837493 - DNA, 25 bp, Homo sapien
ggagaggacaggcgcgagaagcagc

SEQ ID NO: 1837494 - DNA, 25 bp, Homo sapien
ttggagaggacaggcgcgagaagca

SEQ ID NO: 1837495 - DNA, 25 bp, Homo sapien
tggagaggacaggcgcgagaagcag

SEQ ID NO: 1837496 - DNA, 25 bp, Homo sapien
gagaggacaggcgcgagaagcagca

SEQ ID NO: 1837497 - DNA, 25 bp, Homo sapien
gctctgagggcttgaaaaacattcc

SEQ ID NO: 1837498 - DNA, 25 bp, Homo sapien
tgatgtttctggacaagggttgcac

SEQ ID NO: 1837499 - DNA, 25 bp, Homo sapien
gagggccctagctattccacttcaa

SEQ ID NO: 1837500 - DNA, 25 bp, Homo sapien
gacaacttatgggagtgactgcaca

SEQ ID NO: 1837501 - DNA, 25 bp, Homo sapien
cagcaggacctgtagggcagggact

SEQ ID NO: 1837502 - DNA, 25 bp, Homo sapien
acagcaggacctgtagggcagggac

SEQ ID NO: 1837503 - DNA, 25 bp, Homo sapien
taaacccgtatccttgcaaattcag

SEQ ID NO: 1837504 - DNA, 25 bp, Homo sapien
tctcagcctctgcacgtgaagggtc

SEQ ID NO: 1837505 - DNA, 25 bp, Homo sapien
tgaaataggtaggttgggccagctt

SEQ ID NO: 1837506 - DNA, 25 bp, Homo sapien
gagtcattagattgccctctcagcc

SEQ ID NO: 1837507 - DNA, 25 bp, Homo sapien
gactgcgacatcctagaagacaaag

SEQ ID NO: 1837508 - DNA, 25 bp, Homo sapien
tgcagtaccatagaacacagtccag

SEQ ID NO: 1837509 - DNA, 25 bp, Homo sapien
tccagaagttctctaggcaagagcg

SEQ ID NO: 1837510 - DNA, 25 bp, Homo sapien
caagatctttgcgtgaggcctgata

SEQ ID NO: 1837511 - DNA, 25 bp, Homo sapien
gatccacagtagtcgtaaatatgta

SEQ ID NO: 1837512 - DNA, 25 bp, Homo sapien
cagtagtcgtaaatatgtagtgaat

SEQ ID NO: 1837513 - DNA, 25 bp, Homo sapien
ggcttcctgtattctgcagtggaca

SEQ ID NO: 1837514 - DNA, 25 bp, Homo sapien
cttccgctggatccacagtagtcgt

SEQ ID NO: 1837515 - DNA, 25 bp, Homo sapien
cattggtgcagtatcaaaacaagga

SEQ ID NO: 1837516 - DNA, 25 bp, Homo sapien
ttgacattggtgcagtatcaaaaca

SEQ ID NO: 1837517 - DNA, 25 bp, Homo sapien
caccacctggctctaatggttactt

SEQ ID NO: 1837518 - DNA, 25 bp, Homo sapien
ttttacataactttagtgcagtatc

SEQ ID NO: 1837519 - DNA, 25 bp, Homo sapien
ttcttcgacattgccgtcgacggtg

SEQ ID NO: 1837520 - DNA, 25 bp, Homo sapien
catgttcttcgacattgccgtcgac

SEQ ID NO: 1837521 - DNA, 25 bp, Homo sapien
gacggtgagcccttgggccgcatct

SEQ ID NO: 1837522 - DNA, 25 bp, Homo sapien
tgttcttcgacattgccgtcgacgg

SEQ ID NO: 1837523 - DNA, 25 bp, Homo sapien
ccctgccgccaaatcatcagaggct

SEQ ID NO: 1837524 - DNA, 25 bp, Homo sapien
gtaagtgagcttatccaggatggga

SEQ ID NO: 1837525 - DNA, 25 bp, Homo sapien
gcttttgggcattggtgctttgctc

SEQ ID NO: 1837526 - DNA, 25 bp, Homo sapien
ttcctctggcctgatacagctgggc

SEQ ID NO: 1837527 - DNA, 25 bp, Homo sapien
tttttcttctgtaaagcaggaggaa

SEQ ID NO: 1837528 - DNA, 25 bp, Homo sapien
tttcttctgtaaagcaggaggaatt

SEQ ID NO: 1837529 - DNA, 25 bp, Homo sapien
cctgcgcactttttcttctgtaaag

SEQ ID NO: 1837530 - DNA, 25 bp, Homo sapien
actttttcttctgtaaagcaggagg

SEQ ID NO: 1837531 - DNA, 25 bp, Homo sapien
tacgagtgaatagtttaaaagccgc

SEQ ID NO: 1837532 - DNA, 25 bp, Homo sapien
ctggatgctcagagcttcatatggc

SEQ ID NO: 1837533 - DNA, 25 bp, Homo sapien
gccacaatcgtgagtcgtaccctgg

SEQ ID NO: 1837534 - DNA, 25 bp, Homo sapien
tctgaaaaaagtggactgattggac

SEQ ID NO: 1837535 - DNA, 25 bp, Homo sapien
tgctccctagcccactttcgatttt

SEQ ID NO: 1837536 - DNA, 25 bp, Homo sapien
ttgaaagccatttgcaggtaaagtg

SEQ ID NO: 1837537 - DNA, 25 bp, Homo sapien
taatggctctgatcaccattgctgc

SEQ ID NO: 1837538 - DNA, 25 bp, Homo sapien
tgctaagccatgaggagactgggat

SEQ ID NO: 1837539 - DNA, 25 bp, Homo sapien
tggtggggcctggagtatctctgtg

SEQ ID NO: 1837540 - DNA, 25 bp, Homo sapien
gtggggcctggagtatctctgtgga

SEQ ID NO: 1837541 - DNA, 25 bp, Homo sapien
gggcctggagtatctctgtggaaaa

SEQ ID NO: 1837542 - DNA, 25 bp, Homo sapien
ggggcctggagtatctctgtggaaa

SEQ ID NO: 1837543 - DNA, 25 bp, Homo sapien
tgccccgaagttccccagcattgct

SEQ ID NO: 1837544 - DNA, 25 bp, Homo sapien
ttccccagcattgctgcttttgttg

SEQ ID NO: 1837545 - DNA, 25 bp, Homo sapien
ccgaagttccccagcattgctgctt

SEQ ID NO: 1837546 - DNA, 25 bp, Homo sapien
tgctgccccgaagttccccagcatt

SEQ ID NO: 1837547 - DNA, 25 bp, Homo sapien
ggttcgtccgaagttgcagccggca

SEQ ID NO: 1837548 - DNA, 25 bp, Homo sapien
tggcagtccgaggtgaatgaacgtc

SEQ ID NO: 1837549 - DNA, 25 bp, Homo sapien
caagtctgagaaagattaaacagcc

SEQ ID NO: 1837550 - DNA, 25 bp, Homo sapien
catggtgacaattgcctgagcattg

SEQ ID NO: 1837551 - DNA, 25 bp, Homo sapien
attttcagtagaatgcgttccagtc

SEQ ID NO: 1837552 - DNA, 25 bp, Homo sapien
tctcctttaaaggtagcattacctc

SEQ ID NO: 1837553 - DNA, 25 bp, Homo sapien
gtagaatgcgttccagtcttagctt

SEQ ID NO: 1837554 - DNA, 25 bp, Homo sapien
gcattacctcttattccaagcctaa

SEQ ID NO: 1837555 - DNA, 25 bp, Homo sapien
ttatgttcaccattcaccccctgta

SEQ ID NO: 1837556 - DNA, 25 bp, Homo sapien
tttctccaccttgtcgcctcctctc

SEQ ID NO: 1837557 - DNA, 25 bp, Homo sapien
tgcttggtcacagtgtagcatttcc

SEQ ID NO: 1837558 - DNA, 25 bp, Homo sapien
ggcctggagagggtaacagcttctc

SEQ ID NO: 1837559 - DNA, 25 bp, Homo sapien
gcactgatttgacagtagccagcat

SEQ ID NO: 1837560 - DNA, 25 bp, Homo sapien
agcactgatttgacagtagccagca

SEQ ID NO: 1837561 - DNA, 25 bp, Homo sapien
ttgaagaagtgagcacaaaggacct

SEQ ID NO: 1837562 - DNA, 25 bp, Homo sapien
gaagaagtgagcacaaaggacctgc

SEQ ID NO: 1837563 - DNA, 25 bp, Homo sapien
attgttggtcttatcctgtgggttg

SEQ ID NO: 1837564 - DNA, 25 bp, Homo sapien
gttgaagaagtgagcacaaaggacc

SEQ ID NO: 1837565 - DNA, 25 bp, Homo sapien
tgggtaaacagtttgaatagacatt

SEQ ID NO: 1837566 - DNA, 25 bp, Homo sapien
aaatcctgaagcacgtgcctagctg

SEQ ID NO: 1837567 - DNA, 25 bp, Homo sapien
ccacattttggtttgcgcgaattgc

SEQ ID NO: 1837568 - DNA, 25 bp, Homo sapien
aaaaaatttatcacttgccctgtag

SEQ ID NO: 1837569 - DNA, 25 bp, Homo sapien
catccattgtttcatgaggactgca

SEQ ID NO: 1837570 - DNA, 25 bp, Homo sapien
tggagtgggttgtgttcatggctca

SEQ ID NO: 1837571 - DNA, 25 bp, Homo sapien
gctggagtgggttgtgttcatggct

SEQ ID NO: 1837572 - DNA, 25 bp, Homo sapien
aggctggagtgggttgtgttcatgg

SEQ ID NO: 1837573 - DNA, 25 bp, Homo sapien
gagtgggttgtgttcatggctcact

SEQ ID NO: 1837574 - DNA, 25 bp, Homo sapien
atgatattcctattccttcagcctg

SEQ ID NO: 1837575 - DNA, 25 bp, Homo sapien
gacgatgatattcctattccttcag

SEQ ID NO: 1837576 - DNA, 25 bp, Homo sapien
ggctcctcgttgtagggagagagtg

SEQ ID NO: 1837577 - DNA, 25 bp, Homo sapien
ctcctcgttgtagggagagagtggg

SEQ ID NO: 1837578 - DNA, 25 bp, Homo sapien
cttgtttgattttgcacacctccca

SEQ ID NO: 1837579 - DNA, 25 bp, Homo sapien
tttgattttgcacacctcccagtcc

SEQ ID NO: 1837580 - DNA, 25 bp, Homo sapien
attttgcacacctcccagtccatgg

SEQ ID NO: 1837581 - DNA, 25 bp, Homo sapien
tgtttgattttgcacacctcccagt

SEQ ID NO: 1837582 - DNA, 25 bp, Homo sapien
cttcattccagtgaagcggttctcc

SEQ ID NO: 1837583 - DNA, 25 bp, Homo sapien
tcattccagtgaagcggttctccac

SEQ ID NO: 1837584 - DNA, 25 bp, Homo sapien
ttcattccagtgaagcggttctcca

SEQ ID NO: 1837585 - DNA, 25 bp, Homo sapien
cagcccacaccgtgtttgtccgcga

SEQ ID NO: 1837586 - DNA, 25 bp, Homo sapien
tcagtacagcccacaccgtgtttgt

SEQ ID NO: 1837587 - DNA, 25 bp, Homo sapien
gtacagcccacaccgtgtttgtccg

SEQ ID NO: 1837588 - DNA, 25 bp, Homo sapien
agcccacaccgtgtttgtccgcgac

SEQ ID NO: 1837589 - DNA, 25 bp, Homo sapien
tgaccggttcctaggtcttcgtgta

SEQ ID NO: 1837590 - DNA, 25 bp, Homo sapien
tgtgcatgaggttctcgtccatgtt

SEQ ID NO: 1837591 - DNA, 25 bp, Homo sapien
ccagcctcgtagctgatgtgcatga

SEQ ID NO: 1837592 - DNA, 25 bp, Homo sapien
ggcacttggttcttggggttctcca

SEQ ID NO: 1837593 - DNA, 25 bp, Homo sapien
tctccaggattccagcctcgtagct

SEQ ID NO: 1837594 - DNA, 25 bp, Homo sapien
cgggataggaatcccgtgctgcttt

SEQ ID NO: 1837595 - DNA, 25 bp, Homo sapien
ccgggataggaatcccgtgctgctt

SEQ ID NO: 1837596 - DNA, 25 bp, Homo sapien
tatctgggggaccagcgagtaccag

SEQ ID NO: 1837597 - DNA, 25 bp, Homo sapien
gagcagtgccctttatctgggggac

SEQ ID NO: 1837598 - DNA, 25 bp, Homo sapien
tgggggaccagcgagtaccaggtga

SEQ ID NO: 1837599 - DNA, 25 bp, Homo sapien
accagcgagtaccaggtgagctcaa

SEQ ID NO: 1837600 - DNA, 25 bp, Homo sapien
tggcgccgcgggacaccccctcctg

SEQ ID NO: 1837601 - DNA, 25 bp, Homo sapien
gcgccgcgggacaccccctcctgct

SEQ ID NO: 1837602 - DNA, 25 bp, Homo sapien
cgccgcgggacaccccctcctgctg

SEQ ID NO: 1837603 - DNA, 25 bp, Homo sapien
ggcgccgcgggacaccccctcctgc

SEQ ID NO: 1837604 - DNA, 25 bp, Homo sapien
tttgctggcaatgcagggcctggcg

SEQ ID NO: 1837605 - DNA, 25 bp, Homo sapien
tcttccacaaactccctgatgacat

SEQ ID NO: 1837606 - DNA, 25 bp, Homo sapien
ttgtttgctggcaatgcagggcctg

SEQ ID NO: 1837607 - DNA, 25 bp, Homo sapien
aatgcagggcctggcgagaaaggtg

SEQ ID NO: 1837608 - DNA, 25 bp, Homo sapien
gccgccaccataggccagaactctc

SEQ ID NO: 1837609 - DNA, 25 bp, Homo sapien
gaggtgtccaggccgccaccatagg

SEQ ID NO: 1837610 - DNA, 25 bp, Homo sapien
ggaggtgtccaggccgccaccatag

SEQ ID NO: 1837611 - DNA, 25 bp, Homo sapien
caggccgccaccataggccagaact

SEQ ID NO: 1837612 - DNA, 25 bp, Homo sapien
gctgtaggagactgaattatgggct

SEQ ID NO: 1837613 - DNA, 25 bp, Homo sapien
gctctagtgagcaattgttcaggaa

SEQ ID NO: 1837614 - DNA, 25 bp, Homo sapien
cagtgacagataaagaagtttaccc

SEQ ID NO: 1837615 - DNA, 25 bp, Homo sapien
tcactttaaggagcaatctttccct

SEQ ID NO: 1837616 - DNA, 25 bp, Homo sapien
tgaatgctactcacaggtggaaact

SEQ ID NO: 1837617 - DNA, 25 bp, Homo sapien
tagagccattgggtgaaaaagagag

SEQ ID NO: 1837618 - DNA, 25 bp, Homo sapien
gtcacgtgtataaatgagagccaag

SEQ ID NO: 1837619 - DNA, 25 bp, Homo sapien
acaagcaagtcatttttgaaagcac

SEQ ID NO: 1837620 - DNA, 25 bp, Homo sapien
cagagtccctcgtttgctcagagct

SEQ ID NO: 1837621 - DNA, 25 bp, Homo sapien
tggagtgggattcagagggttcaga

SEQ ID NO: 1837622 - DNA, 25 bp, Homo sapien
tgagagaggaccagagctatggata

SEQ ID NO: 1837623 - DNA, 25 bp, Homo sapien
ataaactgtcccttcgtagttgcca

SEQ ID NO: 1837624 - DNA, 25 bp, Homo sapien
acacacccggtcagcagagcacact

SEQ ID NO: 1837625 - DNA, 25 bp, Homo sapien
gtgcacacacccggtcagcagagca

SEQ ID NO: 1837626 - DNA, 25 bp, Homo sapien
gcacacacccggtcagcagagcaca

SEQ ID NO: 1837627 - DNA, 25 bp, Homo sapien
tagtgcacacacccggtcagcagag

SEQ ID NO: 1837628 - DNA, 25 bp, Homo sapien
ttgactgaggatatttagccaaagt

SEQ ID NO: 1837629 - DNA, 25 bp, Homo sapien
atttgaaatacagttcattggtttc

SEQ ID NO: 1837630 - DNA, 25 bp, Homo sapien
ttgaaatacagttcattggtttctg

SEQ ID NO: 1837631 - DNA, 25 bp, Homo sapien
gactgaggatatttagccaaagtat

SEQ ID NO: 1837632 - DNA, 25 bp, Homo sapien
ggctgctctgtaaattgacgctgga

SEQ ID NO: 1837633 - DNA, 25 bp, Homo sapien
tgggtgcttgtatccacgctgaaaa

SEQ ID NO: 1837634 - DNA, 25 bp, Homo sapien
aagctaaatctgcaaccgtagtgcc

SEQ ID NO: 1837635 - DNA, 25 bp, Homo sapien
gacccttgccagataacaggtgagc

SEQ ID NO: 1837636 - DNA, 25 bp, Homo sapien
aggagagccctccttcgaagtccca

SEQ ID NO: 1837637 - DNA, 25 bp, Homo sapien
aggtccccttgcccagtcacaatta

SEQ ID NO: 1837638 - DNA, 25 bp, Homo sapien
ccttgtgtagaattgtcaacccagg

SEQ ID NO: 1837639 - DNA, 25 bp, Homo sapien
gggattcagactgctgcttgaccag

SEQ ID NO: 1837640 - DNA, 25 bp, Homo sapien
aatctcctggttgtcaaagcttata

SEQ ID NO: 1837641 - DNA, 25 bp, Homo sapien
ccccaactgtggcagactaaaggaa

SEQ ID NO: 1837642 - DNA, 25 bp, Homo sapien
ctgctgtcatcatgtagaaggccca

SEQ ID NO: 1837643 - DNA, 25 bp, Homo sapien
ggcattcagttatctgtgcccaccc

SEQ ID NO: 1837644 - DNA, 25 bp, Homo sapien
gacaggaaacgttatcaaagcagat

SEQ ID NO: 1837645 - DNA, 25 bp, Homo sapien
ttgagggccacccttgcaggctgac

SEQ ID NO: 1837646 - DNA, 25 bp, Homo sapien
aagacaggaaacgttatcaaagcag

SEQ ID NO: 1837647 - DNA, 25 bp, Homo sapien
tgcaaaatattgttgagggccaccc

SEQ ID NO: 1837648 - DNA, 25 bp, Homo sapien
tcacactgactctcatgcagcaggg

SEQ ID NO: 1837649 - DNA, 25 bp, Homo sapien
tgtgagttggaaaatgcaaccctcc

SEQ ID NO: 1837650 - DNA, 25 bp, Homo sapien
gattcgctgcctgcaaacatgcaca

SEQ ID NO: 1837651 - DNA, 25 bp, Homo sapien
tgataagcgtccttccctcgcaggt

SEQ ID NO: 1837652 - DNA, 25 bp, Homo sapien
ccatggcctgtttctgatccagtgt

SEQ ID NO: 1837653 - DNA, 25 bp, Homo sapien
ttgagctggcgcctccggatcctgt

SEQ ID NO: 1837654 - DNA, 25 bp, Homo sapien
cagtgtaatcgcgaaggtaacacca

SEQ ID NO: 1837655 - DNA, 25 bp, Homo sapien
tgtttctgatccagtgtaatcgcga

SEQ ID NO: 1837656 - DNA, 25 bp, Homo sapien
taagtccagacgtataaaaatgaaa

SEQ ID NO: 1837657 - DNA, 25 bp, Homo sapien
aacaaaagggtcttgcagctatcct

SEQ ID NO: 1837658 - DNA, 25 bp, Homo sapien
ggtcttgcagctatcctggaagtta

SEQ ID NO: 1837659 - DNA, 25 bp, Homo sapien
tggaagttaagtccagacgtataaa

SEQ ID NO: 1837660 - DNA, 25 bp, Homo sapien
caacttccaaccatagtcctcgttg

SEQ ID NO: 1837661 - DNA, 25 bp, Homo sapien
tctccaacttccaaccatagtcctc

SEQ ID NO: 1837662 - DNA, 25 bp, Homo sapien
tggctatccccagtcagactcctct

SEQ ID NO: 1837663 - DNA, 25 bp, Homo sapien
tccaaccatagtcctcgttgtccag

SEQ ID NO: 1837664 - DNA, 25 bp, Homo sapien
cttctgcgcagaatttccctgcttc

SEQ ID NO: 1837665 - DNA, 25 bp, Homo sapien
tgcgcagaatttccctgcttcctgt

SEQ ID NO: 1837666 - DNA, 25 bp, Homo sapien
cgcagaatttccctgcttcctgttc

SEQ ID NO: 1837667 - DNA, 25 bp, Homo sapien
gaactgccctcttctgcgcagaatt

SEQ ID NO: 1837668 - DNA, 25 bp, Homo sapien
ttcagtctcggcagaagagaagtgg

SEQ ID NO: 1837669 - DNA, 25 bp, Homo sapien
cttaatgccatgagatttggatcct

SEQ ID NO: 1837670 - DNA, 25 bp, Homo sapien
ccaccacccgaaggcagcttctctt

SEQ ID NO: 1837671 - DNA, 25 bp, Homo sapien
agactccaccacccgaaggcagctt

SEQ ID NO: 1837672 - DNA, 25 bp, Homo sapien
ttgtggagaggactgcacatttgtc

SEQ ID NO: 1837673 - DNA, 25 bp, Homo sapien
ggagaggactgcacatttgtctcac

SEQ ID NO: 1837674 - DNA, 25 bp, Homo sapien
gcacatttgtctcactgggacatct

SEQ ID NO: 1837675 - DNA, 25 bp, Homo sapien
gactgcacatttgtctcactgggac

SEQ ID NO: 1837676 - DNA, 25 bp, Homo sapien
ctctcggccttcaggaaatgatctt

SEQ ID NO: 1837677 - DNA, 25 bp, Homo sapien
ttggcgggtctcacccacagagaga

SEQ ID NO: 1837678 - DNA, 25 bp, Homo sapien
tgggcctgaactcatgtgtgagcca

SEQ ID NO: 1837679 - DNA, 25 bp, Homo sapien
tctgtttctagagctcaattgaaaa

SEQ ID NO: 1837680 - DNA, 25 bp, Homo sapien
gagacgtgacatttctaggacgagc

SEQ ID NO: 1837681 - DNA, 25 bp, Homo sapien
ggacgagctgccaccgtagctgatt

SEQ ID NO: 1837682 - DNA, 25 bp, Homo sapien
tgaaacctgaacttggataggccag

SEQ ID NO: 1837683 - DNA, 25 bp, Homo sapien
ccagcacacggaggcaggatgagac

SEQ ID NO: 1837684 - DNA, 25 bp, Homo sapien
cgttagaggagaaactggatattag

SEQ ID NO: 1837685 - DNA, 25 bp, Homo sapien
ttagaggagaaactggatattagga

SEQ ID NO: 1837686 - DNA, 25 bp, Homo sapien
gttagaggagaaactggatattagg

SEQ ID NO: 1837687 - DNA, 25 bp, Homo sapien
tagaggagaaactggatattaggaa

SEQ ID NO: 1837688 - DNA, 25 bp, Homo sapien
ttcagtgcacagttgccacaaacct

SEQ ID NO: 1837689 - DNA, 25 bp, Homo sapien
gatacataattttgccagtgccctc

SEQ ID NO: 1837690 - DNA, 25 bp, Homo sapien
aaaacaagttgtgcctgtaaagtgc

SEQ ID NO: 1837691 - DNA, 25 bp, Homo sapien
aatgtgcattgtacgtctttctgga

SEQ ID NO: 1837692 - DNA, 25 bp, Homo sapien
taagaaatcttgtcagcaaggtcac

SEQ ID NO: 1837693 - DNA, 25 bp, Homo sapien
gatctgcagtaccatcttcgtctga

SEQ ID NO: 1837694 - DNA, 25 bp, Homo sapien
aaggctcccagcatatgatatccaa

SEQ ID NO: 1837695 - DNA, 25 bp, Homo sapien
aagtaagtctccatgtttgcctgag

SEQ ID NO: 1837696 - DNA, 25 bp, Homo sapien
taaaataatcttttatttgctcacc

SEQ ID NO: 1837697 - DNA, 25 bp, Homo sapien
ttaaaataatcttttatttgctcac

SEQ ID NO: 1837698 - DNA, 25 bp, Homo sapien
ttatgcatgtgagcggttaaccaga

SEQ ID NO: 1837699 - DNA, 25 bp, Homo sapien
gaatcagacctagcatatataatca

SEQ ID NO: 1837700 - DNA, 25 bp, Homo sapien
tatcacgaaaacagaccatttccag

SEQ ID NO: 1837701 - DNA, 25 bp, Homo sapien
gcatcttaatcatacgaatatcacg

SEQ ID NO: 1837702 - DNA, 25 bp, Homo sapien
agagaatttgttcctattgggttca

SEQ ID NO: 1837703 - DNA, 25 bp, Homo sapien
agaatttgttcctattgggttcatt

SEQ ID NO: 1837704 - DNA, 25 bp, Homo sapien
cagagaatttgttcctattgggttc

SEQ ID NO: 1837705 - DNA, 25 bp, Homo sapien
tttccacagagaatttgttcctatt

SEQ ID NO: 1837706 - DNA, 25 bp, Homo sapien
ctgtggatggaacaagtaaaatatt

SEQ ID NO: 1837707 - DNA, 25 bp, Homo sapien
ttgaatctggctatgtagtgatcca

SEQ ID NO: 1837708 - DNA, 25 bp, Homo sapien
tgcatcagatcagtgaattcttgaa

SEQ ID NO: 1837709 - DNA, 25 bp, Homo sapien
tcacaaaggcaacgtggaattatct

SEQ ID NO: 1837710 - DNA, 25 bp, Homo sapien
gaatgtgaactggaatatgaccctc

SEQ ID NO: 1837711 - DNA, 25 bp, Homo sapien
tatactatgacataaccctgtgagg

SEQ ID NO: 1837712 - DNA, 25 bp, Homo sapien
tcaaaaggtcggactccaagtctcc

SEQ ID NO: 1837713 - DNA, 25 bp, Homo sapien
tttcacaatggctaaacctgctcag

SEQ ID NO: 1837714 - DNA, 25 bp, Homo sapien
gatgggatacctgtttgaggaataa

SEQ ID NO: 1837715 - DNA, 25 bp, Homo sapien
gagaaattcacttgtaccttccttc

SEQ ID NO: 1837716 - DNA, 25 bp, Homo sapien
gctaggcactaggtctacccaggtg

SEQ ID NO: 1837717 - DNA, 25 bp, Homo sapien
aataaaaccatacgtgtgctcagca

SEQ ID NO: 1837718 - DNA, 25 bp, Homo sapien
ttgcaaaatcacaggcccattctgc

SEQ ID NO: 1837719 - DNA, 25 bp, Homo sapien
aatgacttccagttgggtggtgtga

SEQ ID NO: 1837720 - DNA, 25 bp, Homo sapien
tcaggaatgacttccagttgggtgg

SEQ ID NO: 1837721 - DNA, 25 bp, Homo sapien
caggaatgacttccagttgggtggt

SEQ ID NO: 1837722 - DNA, 25 bp, Homo sapien
acatcaggaatgacttccagttggg

SEQ ID NO: 1837723 - DNA, 25 bp, Homo sapien
agcatgggaatgtgctctggaaact

SEQ ID NO: 1837724 - DNA, 25 bp, Homo sapien
taaagcatgggaatgtgctctggaa

SEQ ID NO: 1837725 - DNA, 25 bp, Homo sapien
aagcatgggaatgtgctctggaaac

SEQ ID NO: 1837726 - DNA, 25 bp, Homo sapien
aaagcatgggaatgtgctctggaaa

SEQ ID NO: 1837727 - DNA, 25 bp, Homo sapien
gtcctccctgagagatagtgtttct

SEQ ID NO: 1837728 - DNA, 25 bp, Homo sapien
ctgttgatgtagctcagaactttca

SEQ ID NO: 1837729 - DNA, 25 bp, Homo sapien
tcagggtgttgaatacagacagctc

SEQ ID NO: 1837730 - DNA, 25 bp, Homo sapien
ggaatccttatatgtgaaaatctag

SEQ ID NO: 1837731 - DNA, 25 bp, Homo sapien
agcaacagaatctagtattagtgaa

SEQ ID NO: 1837732 - DNA, 25 bp, Homo sapien
cagaatctagtattagtgaaggtac

SEQ ID NO: 1837733 - DNA, 25 bp, Homo sapien
tctagtattagtgaaggtacaggta

SEQ ID NO: 1837734 - DNA, 25 bp, Homo sapien
gtgaaggtacaggtaaatgtattct

SEQ ID NO: 1837735 - DNA, 25 bp, Homo sapien
ttgacctggatgtcccaatgtggaa

SEQ ID NO: 1837736 - DNA, 25 bp, Homo sapien
gctgttaaaagatttgaggttgacc

SEQ ID NO: 1837737 - DNA, 25 bp, Homo sapien
caatgtggaaggctatctaaaatat

SEQ ID NO: 1837738 - DNA, 25 bp, Homo sapien
gcagaatatctgtactaggatttca

SEQ ID NO: 1837739 - DNA, 25 bp, Homo sapien
gacagaaactcagtgggccattccc

SEQ ID NO: 1837740 - DNA, 25 bp, Homo sapien
gcctgggaggatacacactgagcta

SEQ ID NO: 1837741 - DNA, 25 bp, Homo sapien
tatcaaagcttaccataagagtggg

SEQ ID NO: 1837742 - DNA, 25 bp, Homo sapien
aataaatgcctctgcttgcaagctc

SEQ ID NO: 1837743 - DNA, 25 bp, Homo sapien
tataccttcctaaccagatttgctt

SEQ ID NO: 1837744 - DNA, 25 bp, Homo sapien
gaagctctaatggtggaatctcaca

SEQ ID NO: 1837745 - DNA, 25 bp, Homo sapien
tctcacacattagtcagaatctggg

SEQ ID NO: 1837746 - DNA, 25 bp, Homo sapien
ttatgcatatccacagcgtcctcag

SEQ ID NO: 1837747 - DNA, 25 bp, Homo sapien
ctgggggcgccaggtgcttccagac

SEQ ID NO: 1837748 - DNA, 25 bp, Homo sapien
tatatgtcaggatcccgctggagcc

SEQ ID NO: 1837749 - DNA, 25 bp, Homo sapien
gagtagaccattcttcaccacgtgt

SEQ ID NO: 1837750 - DNA, 25 bp, Homo sapien
gaatcctatatacaactcatcccag

SEQ ID NO: 1837751 - DNA, 25 bp, Homo sapien
cgctggagccgtgtttggaatccta

SEQ ID NO: 1837752 - DNA, 25 bp, Homo sapien
tcccaatgcagggtaaatggccttt

SEQ ID NO: 1837753 - DNA, 25 bp, Homo sapien
tagttttaacaatccatcggcacca

SEQ ID NO: 1837754 - DNA, 25 bp, Homo sapien
taaggtcggcctggctaagatgcag

SEQ ID NO: 1837755 - DNA, 25 bp, Homo sapien
tagaggagccctttcagtgtctgca

SEQ ID NO: 1837756 - DNA, 25 bp, Homo sapien
tctcatcccgcattctacttgatgc

SEQ ID NO: 1837757 - DNA, 25 bp, Homo sapien
tgccttgcaccagtgtgcgagccct

SEQ ID NO: 1837758 - DNA, 25 bp, Homo sapien
caccagtttatgagatgtgccttgc

SEQ ID NO: 1837759 - DNA, 25 bp, Homo sapien
tctacttgatgcagtctgccccagc

SEQ ID NO: 1837760 - DNA, 25 bp, Homo sapien
catacaataagtttaagggcagacc

SEQ ID NO: 1837761 - DNA, 25 bp, Homo sapien
taactatcacgacaaactggcaagg

SEQ ID NO: 1837762 - DNA, 25 bp, Homo sapien
gaagtcaatctttgggaatggctca

SEQ ID NO: 1837763 - DNA, 25 bp, Homo sapien
gagcaagccctgtgcaagcaaacaa

SEQ ID NO: 1837764 - DNA, 25 bp, Homo sapien
caggaaaaggattgaagtcctcatc

SEQ ID NO: 1837765 - DNA, 25 bp, Homo sapien
tcaaccaaatagtcatatcctccag

SEQ ID NO: 1837766 - DNA, 25 bp, Homo sapien
ggattgaagtcctcatctgtctcaa

SEQ ID NO: 1837767 - DNA, 25 bp, Homo sapien
catagggatgttctcgttgtggtct

SEQ ID NO: 1837768 - DNA, 25 bp, Homo sapien
tatccaggatgagtgaagaaatatt

SEQ ID NO: 1837769 - DNA, 25 bp, Homo sapien
cctgaccacaaggttgtaatcttta

SEQ ID NO: 1837770 - DNA, 25 bp, Homo sapien
tagagcagcattcaagatttccaaa

SEQ ID NO: 1837771 - DNA, 25 bp, Homo sapien
ctctggaggctctatgatgcccttg

SEQ ID NO: 1837772 - DNA, 25 bp, Homo sapien
gttgagttcatttgggtcatttttg

SEQ ID NO: 1837773 - DNA, 25 bp, Homo sapien
gggtccatgttatcacatcagagtt

SEQ ID NO: 1837774 - DNA, 25 bp, Homo sapien
tcttcccagatcaagggtggctccc

SEQ ID NO: 1837775 - DNA, 25 bp, Homo sapien
cccggtcgaggggtccatgttatca

SEQ ID NO: 1837776 - DNA, 25 bp, Homo sapien
gagaccacattaagcaattatacac

SEQ ID NO: 1837777 - DNA, 25 bp, Homo sapien
gaaacacatcagcaagagaccacat

SEQ ID NO: 1837778 - DNA, 25 bp, Homo sapien
cgttgcaagagaacgtagcatgtca

SEQ ID NO: 1837779 - DNA, 25 bp, Homo sapien
tatacacatgtagctacgttgcaag

SEQ ID NO: 1837780 - DNA, 25 bp, Homo sapien
cacaatcgggatacaggacagttca

SEQ ID NO: 1837781 - DNA, 25 bp, Homo sapien
tccagaaggactgcaccatttggca

SEQ ID NO: 1837782 - DNA, 25 bp, Homo sapien
caaagacactgcaaaagcgttttcc

SEQ ID NO: 1837783 - DNA, 25 bp, Homo sapien
taattagggcagatactcaggagtg

SEQ ID NO: 1837784 - DNA, 25 bp, Homo sapien
gctcaatggactagaacacatcctg

SEQ ID NO: 1837785 - DNA, 25 bp, Homo sapien
taacatcctccagtgaactgtagga

SEQ ID NO: 1837786 - DNA, 25 bp, Homo sapien
gatttcactatttagaatgcccaag

SEQ ID NO: 1837787 - DNA, 25 bp, Homo sapien
tctattaaaaggtctatgatgccaa

SEQ ID NO: 1837788 - DNA, 25 bp, Homo sapien
caactcatgtttccaacagggtgac

SEQ ID NO: 1837789 - DNA, 25 bp, Homo sapien
tagatggcttagttaaaagtcccca

SEQ ID NO: 1837790 - DNA, 25 bp, Homo sapien
ttagaactaagcataccagggttcc

SEQ ID NO: 1837791 - DNA, 25 bp, Homo sapien
gcaaagtcgctcattccaccatacg

SEQ ID NO: 1837792 - DNA, 25 bp, Homo sapien
ccagcaaagggacaataaattcggg

SEQ ID NO: 1837793 - DNA, 25 bp, Homo sapien
tctgttttaatgaattgggctttcc

SEQ ID NO: 1837794 - DNA, 25 bp, Homo sapien
accagccgagccttgtagttcagga

SEQ ID NO: 1837795 - DNA, 25 bp, Homo sapien
gatgggtgagattccacaaaatacc

SEQ ID NO: 1837796 - DNA, 25 bp, Homo sapien
aatgacaggatttagattagagtct

SEQ ID NO: 1837797 - DNA, 25 bp, Homo sapien
tgacaggatttagattagagtctcc

SEQ ID NO: 1837798 - DNA, 25 bp, Homo sapien
atgacaggatttagattagagtctc

SEQ ID NO: 1837799 - DNA, 25 bp, Homo sapien
tgtcattagtggaggatttccccgg

SEQ ID NO: 1837800 - DNA, 25 bp, Homo sapien
tctgtaaatggagtcatgatgcccc

SEQ ID NO: 1837801 - DNA, 25 bp, Homo sapien
gaaaatgttaccaagccagccaaag

SEQ ID NO: 1837802 - DNA, 25 bp, Homo sapien
tggcaattcattcggaccctagctg

SEQ ID NO: 1837803 - DNA, 25 bp, Homo sapien
tgcaaagaatgatgcaccgtgaaga

SEQ ID NO: 1837804 - DNA, 25 bp, Homo sapien
tctgtgtcagacgtggttctagcca

SEQ ID NO: 1837805 - DNA, 25 bp, Homo sapien
ctctcatggagtgttcattctagtg

SEQ ID NO: 1837806 - DNA, 25 bp, Homo sapien
gacgtggttctagccactgggaata

SEQ ID NO: 1837807 - DNA, 25 bp, Homo sapien
gaacttgaggaattagacaggacgc

SEQ ID NO: 1837808 - DNA, 25 bp, Homo sapien
tgctggtcacatgcaaatcagggcc

SEQ ID NO: 1837809 - DNA, 25 bp, Homo sapien
gacaggacgcagaacatacagggta

SEQ ID NO: 1837810 - DNA, 25 bp, Homo sapien
tgtggttacacactccgggaggcaa

SEQ ID NO: 1837811 - DNA, 25 bp, Homo sapien
gatgtgtctacattgaggctgcaca

SEQ ID NO: 1837812 - DNA, 25 bp, Homo sapien
tagtgttgaggatacacacttcccc

SEQ ID NO: 1837813 - DNA, 25 bp, Homo sapien
tctgctctacggtctacatggtgaa

SEQ ID NO: 1837814 - DNA, 25 bp, Homo sapien
tgcactagaggtccccaactagagg

SEQ ID NO: 1837815 - DNA, 25 bp, Homo sapien
tttagcaatgtgccatgcgtgatac

SEQ ID NO: 1837816 - DNA, 25 bp, Homo sapien
gcatttagcaatgtgccatgcgtga

SEQ ID NO: 1837817 - DNA, 25 bp, Homo sapien
catttagcaatgtgccatgcgtgat

SEQ ID NO: 1837818 - DNA, 25 bp, Homo sapien
agcatttagcaatgtgccatgcgtg

SEQ ID NO: 1837819 - DNA, 25 bp, Homo sapien
gtatcactttcatacaaaatattac

SEQ ID NO: 1837820 - DNA, 25 bp, Homo sapien
ggtatcactttcatacaaaatatta

SEQ ID NO: 1837821 - DNA, 25 bp, Homo sapien
ttggtatcactttcatacaaaatat

SEQ ID NO: 1837822 - DNA, 25 bp, Homo sapien
tggtatcactttcatacaaaatatt

SEQ ID NO: 1837823 - DNA, 25 bp, Homo sapien
cagccttcccccattgggtctggtg

SEQ ID NO: 1837824 - DNA, 25 bp, Homo sapien
tctggtgcagtctactatattgagt

SEQ ID NO: 1837825 - DNA, 25 bp, Homo sapien
cattagagcaaccttcataggcagc

SEQ ID NO: 1837826 - DNA, 25 bp, Homo sapien
gaaagtcattggaaagcctgatgct

SEQ ID NO: 1837827 - DNA, 25 bp, Homo sapien
gacaaggacttctgtatacagtctg

SEQ ID NO: 1837828 - DNA, 25 bp, Homo sapien
tccaggtgttgagcccaaaggatca

SEQ ID NO: 1837829 - DNA, 25 bp, Homo sapien
gacttggtggatactaggtgtctca

SEQ ID NO: 1837830 - DNA, 25 bp, Homo sapien
gaacacccatagtttgaattccaag

SEQ ID NO: 1837831 - DNA, 25 bp, Homo sapien
tttgtactccacaataatgcaagtg

SEQ ID NO: 1837832 - DNA, 25 bp, Homo sapien
gatcatgaatcgaagatttttgtcc

SEQ ID NO: 1837833 - DNA, 25 bp, Homo sapien
tcaggatgaacaccgtccatcaaga

SEQ ID NO: 1837834 - DNA, 25 bp, Homo sapien
tccacaataatgcaagtgtccatct

SEQ ID NO: 1837835 - DNA, 25 bp, Homo sapien
aaaccaacaactgtgaatttcagtt

SEQ ID NO: 1837836 - DNA, 25 bp, Homo sapien
aactggacaccgctctgattcagat

SEQ ID NO: 1837837 - DNA, 25 bp, Homo sapien
tggcacgacattgatattagtcaac

SEQ ID NO: 1837838 - DNA, 25 bp, Homo sapien
tatctggtcttctcccagcaagctt

SEQ ID NO: 1837839 - DNA, 25 bp, Homo sapien
tcagattccaaaatacaggcctttc

SEQ ID NO: 1837840 - DNA, 25 bp, Homo sapien
aaaaaatagtgtcatctagtatgac

SEQ ID NO: 1837841 - DNA, 25 bp, Homo sapien
tcatctagtatgacagacagtttgt

SEQ ID NO: 1837842 - DNA, 25 bp, Homo sapien
ctaggataagacagatggaaaggtt

SEQ ID NO: 1837843 - DNA, 25 bp, Homo sapien
ccaacatattgacagagaagtgagg

SEQ ID NO: 1837844 - DNA, 25 bp, Homo sapien
aacttgaggtccatgcaggcatgag

SEQ ID NO: 1837845 - DNA, 25 bp, Homo sapien
tccacgggcaaaagcaggaccgatt

SEQ ID NO: 1837846 - DNA, 25 bp, Homo sapien
actgatgtaaatgaggtctgcctgg

SEQ ID NO: 1837847 - DNA, 25 bp, Homo sapien
gaggctcatggagcaaccaccatcc

SEQ ID NO: 1837848 - DNA, 25 bp, Homo sapien
ccaagggttaggaggattcagttct

SEQ ID NO: 1837849 - DNA, 25 bp, Homo sapien
agtcccaagggttaggaggattcag

SEQ ID NO: 1837850 - DNA, 25 bp, Homo sapien
caagggttaggaggattcagttcta

SEQ ID NO: 1837851 - DNA, 25 bp, Homo sapien
gagaacaaatctggattaatgacaa

SEQ ID NO: 1837852 - DNA, 25 bp, Homo sapien
atgagaacaaatctggattaatgac

SEQ ID NO: 1837853 - DNA, 25 bp, Homo sapien
tgagaacaaatctggattaatgaca

SEQ ID NO: 1837854 - DNA, 25 bp, Homo sapien
aaatgagaacaaatctggattaatg

SEQ ID NO: 1837855 - DNA, 25 bp, Homo sapien
gaaatagcctcctctccaattgtgt

SEQ ID NO: 1837856 - DNA, 25 bp, Homo sapien
ggtctacgggccagaacaattccca

SEQ ID NO: 1837857 - DNA, 25 bp, Homo sapien
gataacgagttctggccatctccta

SEQ ID NO: 1837858 - DNA, 25 bp, Homo sapien
tgtggacaccaggacgtgaaatggc

SEQ ID NO: 1837859 - DNA, 25 bp, Homo sapien
tgggcaatccaacctggtctacggg

SEQ ID NO: 1837860 - DNA, 25 bp, Homo sapien
gaaaattggcagaaccatgcggtca

SEQ ID NO: 1837861 - DNA, 25 bp, Homo sapien
gcagctatttggcatgccaggccat

SEQ ID NO: 1837862 - DNA, 25 bp, Homo sapien
tgaaatccttgacccctagaatagt

SEQ ID NO: 1837863 - DNA, 25 bp, Homo sapien
tcatagatgacagggagacaacagt

SEQ ID NO: 1837864 - DNA, 25 bp, Homo sapien
tcatttacttctactatctctcctt

SEQ ID NO: 1837865 - DNA, 25 bp, Homo sapien
catttacttctactatctctccttt

SEQ ID NO: 1837866 - DNA, 25 bp, Homo sapien
gaagaatgtggcttagacacttaga

SEQ ID NO: 1837867 - DNA, 25 bp, Homo sapien
cacccgagttgtttcctttagtatg

SEQ ID NO: 1837868 - DNA, 25 bp, Homo sapien
ttagtctccttatagaatcctatgc

SEQ ID NO: 1837869 - DNA, 25 bp, Homo sapien
ctgtaaaagcaccacgtagcctaat

SEQ ID NO: 1837870 - DNA, 25 bp, Homo sapien
tgtgctacagaggtaacagaatgtc

SEQ ID NO: 1837871 - DNA, 25 bp, Homo sapien
tggagtatactcctttgaacaaaat

SEQ ID NO: 1837872 - DNA, 25 bp, Homo sapien
acagaatgtctgactatggctgccc

SEQ ID NO: 1837873 - DNA, 25 bp, Homo sapien
catgtttctgatagctctggagact

SEQ ID NO: 1837874 - DNA, 25 bp, Homo sapien
tgagagaaagcaaaggactcttggt

SEQ ID NO: 1837875 - DNA, 25 bp, Homo sapien
agtgagagaaagcaaaggactcttg

SEQ ID NO: 1837876 - DNA, 25 bp, Homo sapien
gagagaaagcaaaggactcttggta

SEQ ID NO: 1837877 - DNA, 25 bp, Homo sapien
agagaaagcaaaggactcttggtac

SEQ ID NO: 1837878 - DNA, 25 bp, Homo sapien
catattcttgcatgccctcagtcgg

SEQ ID NO: 1837879 - DNA, 25 bp, Homo sapien
ccttccttaagactggcaacttcaa

SEQ ID NO: 1837880 - DNA, 25 bp, Homo sapien
tgataggcacaacaggatctcagtt

SEQ ID NO: 1837881 - DNA, 25 bp, Homo sapien
gccagtgctcttattgcgaaagaaa

SEQ ID NO: 1837882 - DNA, 25 bp, Homo sapien
tgttgctcatttgctcccctaaggc

SEQ ID NO: 1837883 - DNA, 25 bp, Homo sapien
tgggtcaaatagaaacgaatcgtcc

SEQ ID NO: 1837884 - DNA, 25 bp, Homo sapien
tcaccacgcagcatcagtcttgggt

SEQ ID NO: 1837885 - DNA, 25 bp, Homo sapien
tagtcagcctgaaaacaggacgttt

SEQ ID NO: 1837886 - DNA, 25 bp, Homo sapien
tggcattcttggtgtacatccctct

SEQ ID NO: 1837887 - DNA, 25 bp, Homo sapien
ctggcattcttggtgtacatccctc

SEQ ID NO: 1837888 - DNA, 25 bp, Homo sapien
gcattcttggtgtacatccctcttc

SEQ ID NO: 1837889 - DNA, 25 bp, Homo sapien
ggcattcttggtgtacatccctctt

SEQ ID NO: 1837890 - DNA, 25 bp, Homo sapien
cttttgaaagcactctgtatcttcc

SEQ ID NO: 1837891 - DNA, 25 bp, Homo sapien
ggcacttttgaaagcactctgtatc

SEQ ID NO: 1837892 - DNA, 25 bp, Homo sapien
taccacttagcccactgcctttcac

SEQ ID NO: 1837893 - DNA, 25 bp, Homo sapien
atttaggcacttttgaaagcactct

SEQ ID NO: 1837894 - DNA, 25 bp, Homo sapien
ttcgaatctgacactggaggagcct

SEQ ID NO: 1837895 - DNA, 25 bp, Homo sapien
tagtgaagcacgtgaatacaaaccc

SEQ ID NO: 1837896 - DNA, 25 bp, Homo sapien
caatatgccatgtacgcgaacaggg

SEQ ID NO: 1837897 - DNA, 25 bp, Homo sapien
gacacagcttttggtgcgggcagac

SEQ ID NO: 1837898 - DNA, 25 bp, Homo sapien
tctgctataattaaggaaggtccta

SEQ ID NO: 1837899 - DNA, 25 bp, Homo sapien
gtttgacctctcaagagagagcagc

SEQ ID NO: 1837900 - DNA, 25 bp, Homo sapien
gaaggtcctactgcaaacaggtttg

SEQ ID NO: 1837901 - DNA, 25 bp, Homo sapien
agtgcttcctgtacactatgcatga

SEQ ID NO: 1837902 - DNA, 25 bp, Homo sapien
taggcaggggccaaacagcacaaga

SEQ ID NO: 1837903 - DNA, 25 bp, Homo sapien
tgttccattccgagtaggcaggggc

SEQ ID NO: 1837904 - DNA, 25 bp, Homo sapien
aggggccaaacagcacaagagcagc

SEQ ID NO: 1837905 - DNA, 25 bp, Homo sapien
ggccaaacagcacaagagcagctcc

SEQ ID NO: 1837906 - DNA, 25 bp, Homo sapien
gaaatggagtgaggttgaaatcttc

SEQ ID NO: 1837907 - DNA, 25 bp, Homo sapien
tccgaaagtaattacgagagcacag

SEQ ID NO: 1837908 - DNA, 25 bp, Homo sapien
agcacagcaggcgagtcagacttct

SEQ ID NO: 1837909 - DNA, 25 bp, Homo sapien
gacatgaacactcagcctgctgata

SEQ ID NO: 1837910 - DNA, 25 bp, Homo sapien
tcctccccgcttcattaaaatcaat

SEQ ID NO: 1837911 - DNA, 25 bp, Homo sapien
gtcctccccgcttcattaaaatcaa

SEQ ID NO: 1837912 - DNA, 25 bp, Homo sapien
agtcctccccgcttcattaaaatca

SEQ ID NO: 1837913 - DNA, 25 bp, Homo sapien
caagagcctagatcagtggtacaca

SEQ ID NO: 1837914 - DNA, 25 bp, Homo sapien
tgttgctcatatctggccaagagcc

SEQ ID NO: 1837915 - DNA, 25 bp, Homo sapien
gtgggtgcctgccttaatttctaga

SEQ ID NO: 1837916 - DNA, 25 bp, Homo sapien
gattttggaaggcaagcactacact

SEQ ID NO: 1837917 - DNA, 25 bp, Homo sapien
taaccaggattacagacgtacgcca

SEQ ID NO: 1837918 - DNA, 25 bp, Homo sapien
tgacttcgactcaacgcagcctctg

SEQ ID NO: 1837919 - DNA, 25 bp, Homo sapien
caatggcatgacttcgactcaacgc

SEQ ID NO: 1837920 - DNA, 25 bp, Homo sapien
ccaggattacagacgtacgccaaca

SEQ ID NO: 1837921 - DNA, 25 bp, Homo sapien
tggattccagctagcagtatcagcc

SEQ ID NO: 1837922 - DNA, 25 bp, Homo sapien
caggtgcgtcttcgttcagctctac

SEQ ID NO: 1837923 - DNA, 25 bp, Homo sapien
gacaccgctggtgtagaccgtctca

SEQ ID NO: 1837924 - DNA, 25 bp, Homo sapien
agctgttggatgtgttcaggcctcc

SEQ ID NO: 1837925 - DNA, 25 bp, Homo sapien
ctgaaagactggatggctttactag

SEQ ID NO: 1837926 - DNA, 25 bp, Homo sapien
aagactggatggctttactagaaat

SEQ ID NO: 1837927 - DNA, 25 bp, Homo sapien
gaaagactggatggctttactagaa

SEQ ID NO: 1837928 - DNA, 25 bp, Homo sapien
actggatggctttactagaaattga

SEQ ID NO: 1837929 - DNA, 25 bp, Homo sapien
tatgagaatcagacactacaacttg

SEQ ID NO: 1837930 - DNA, 25 bp, Homo sapien
taccgactatgagaatcagacacta

SEQ ID NO: 1837931 - DNA, 25 bp, Homo sapien
cataggtaccgactatgagaatcag

SEQ ID NO: 1837932 - DNA, 25 bp, Homo sapien
tattccttgcataggtaccgactat

SEQ ID NO: 1837933 - DNA, 25 bp, Homo sapien
tgcaggtctcccaggcgggtttatt

SEQ ID NO: 1837934 - DNA, 25 bp, Homo sapien
catgagttggagattctctcgccgc

SEQ ID NO: 1837935 - DNA, 25 bp, Homo sapien
tcagcctccatgagttggagattct

SEQ ID NO: 1837936 - DNA, 25 bp, Homo sapien
gttggagattctctcgccgcagcat

SEQ ID NO: 1837937 - DNA, 25 bp, Homo sapien
cctccatgagttggagattctctcg

SEQ ID NO: 1837938 - DNA, 25 bp, Homo sapien
caaggctgtcgattgagaccctaga

SEQ ID NO: 1837939 - DNA, 25 bp, Homo sapien
gggtttagctggattgggaccacat

SEQ ID NO: 1837940 - DNA, 25 bp, Homo sapien
gattccaagcttcaaatgtggcaga

SEQ ID NO: 1837941 - DNA, 25 bp, Homo sapien
taaatgaatcatagaggctccagat

SEQ ID NO: 1837942 - DNA, 25 bp, Homo sapien
gagatcatgccactacgctccagcc

SEQ ID NO: 1837943 - DNA, 25 bp, Homo sapien
catgccactacgctccagcctgtgt

SEQ ID NO: 1837944 - DNA, 25 bp, Homo sapien
atcatgccactacgctccagcctgt

SEQ ID NO: 1837945 - DNA, 25 bp, Homo sapien
agatcatgccactacgctccagcct

SEQ ID NO: 1837946 - DNA, 25 bp, Homo sapien
tggcaccacgtaagtatcacacacg

SEQ ID NO: 1837947 - DNA, 25 bp, Homo sapien
caagagacttcatgggatgatgaga

SEQ ID NO: 1837948 - DNA, 25 bp, Homo sapien
gcccgcttttgcctatagtgatgaa

SEQ ID NO: 1837949 - DNA, 25 bp, Homo sapien
tatgcatcttgttcttggcaccacg

SEQ ID NO: 1837950 - DNA, 25 bp, Homo sapien
gcaagaaaatgtgacccaaaaacaa

SEQ ID NO: 1837951 - DNA, 25 bp, Homo sapien
tccatcatctaatccaagattctaa

SEQ ID NO: 1837952 - DNA, 25 bp, Homo sapien
tctaatccaagattctaacgcagag

SEQ ID NO: 1837953 - DNA, 25 bp, Homo sapien
gattctaacgcagagaagcaagaaa

SEQ ID NO: 1837954 - DNA, 25 bp, Homo sapien
cctctgcaactatctctgcttccag

SEQ ID NO: 1837955 - DNA, 25 bp, Homo sapien
tacctccaccgcctccaaattttgc

SEQ ID NO: 1837956 - DNA, 25 bp, Homo sapien
caaattttgctctgtgacaattaca

SEQ ID NO: 1837957 - DNA, 25 bp, Homo sapien
tatcaactgtattatgatcctaaaa

SEQ ID NO: 1837958 - DNA, 25 bp, Homo sapien
cataacatctatggtttaaatagtg

SEQ ID NO: 1837959 - DNA, 25 bp, Homo sapien
ttccataacatctatggtttaaata

SEQ ID NO: 1837960 - DNA, 25 bp, Homo sapien
aacatctatggtttaaatagtgcca

SEQ ID NO: 1837961 - DNA, 25 bp, Homo sapien
taacatctatggtttaaatagtgcc

SEQ ID NO: 1837962 - DNA, 25 bp, Homo sapien
cacaaacaaagattttcttcatggt

SEQ ID NO: 1837963 - DNA, 25 bp, Homo sapien
cagcctgtgagtatgtgccatttct

SEQ ID NO: 1837964 - DNA, 25 bp, Homo sapien
gtgtccacctctttaacacgagagt

SEQ ID NO: 1837965 - DNA, 25 bp, Homo sapien
caaactatcgtctgtattttcaaag

SEQ ID NO: 1837966 - DNA, 25 bp, Homo sapien
gaactgccatacagccttcccttta

SEQ ID NO: 1837967 - DNA, 25 bp, Homo sapien
gaaacttcattggtatgtgccagaa

SEQ ID NO: 1837968 - DNA, 25 bp, Homo sapien
tgcattaaggaaatgtctagcttaa

SEQ ID NO: 1837969 - DNA, 25 bp, Homo sapien
tatcacatggtttggaaacttcagg

SEQ ID NO: 1837970 - DNA, 25 bp, Homo sapien
gaggaagttctgagcacccgttgat

SEQ ID NO: 1837971 - DNA, 25 bp, Homo sapien
tactgtaacaaggtatgtgcgtctg

SEQ ID NO: 1837972 - DNA, 25 bp, Homo sapien
tttaatcggcgctgacaacaagagg

SEQ ID NO: 1837973 - DNA, 25 bp, Homo sapien
cagatgtgttttgagccctagtgac

SEQ ID NO: 1837974 - DNA, 25 bp, Homo sapien
aagcaatgggattggaggaagagca

SEQ ID NO: 1837975 - DNA, 25 bp, Homo sapien
agcaatgggattggaggaagagcaa

SEQ ID NO: 1837976 - DNA, 25 bp, Homo sapien
caaagaaatctataatgagttgtga

SEQ ID NO: 1837977 - DNA, 25 bp, Homo sapien
ggaagagcaaagaaatctataatga

SEQ ID NO: 1837978 - DNA, 25 bp, Homo sapien
gaatttgggttacatcatctttgcc

SEQ ID NO: 1837979 - DNA, 25 bp, Homo sapien
gtggcatacaaatcgaactattctg

SEQ ID NO: 1837980 - DNA, 25 bp, Homo sapien
ggatggtggccttaaagtgtatgaa

SEQ ID NO: 1837981 - DNA, 25 bp, Homo sapien
aaaagtcattcctagtctccacttt

SEQ ID NO: 1837982 - DNA, 25 bp, Homo sapien
tagggttctttcagatctccctgtg

SEQ ID NO: 1837983 - DNA, 25 bp, Homo sapien
tacagtatgtttgctggaatgagaa

SEQ ID NO: 1837984 - DNA, 25 bp, Homo sapien
ccctgtgtggaagtgttgtcttcta

SEQ ID NO: 1837985 - DNA, 25 bp, Homo sapien
agtatcattgtcttggcagaatcag

SEQ ID NO: 1837986 - DNA, 25 bp, Homo sapien
aggacctatggcctcttttctgcca

SEQ ID NO: 1837987 - DNA, 25 bp, Homo sapien
gatgaggacctatggcctcttttct

SEQ ID NO: 1837988 - DNA, 25 bp, Homo sapien
aggtgatgaggacctatggcctctt

SEQ ID NO: 1837989 - DNA, 25 bp, Homo sapien
ggacctatggcctcttttctgccat

SEQ ID NO: 1837990 - DNA, 25 bp, Homo sapien
ctttgttcacgatgcagggatcaat

SEQ ID NO: 1837991 - DNA, 25 bp, Homo sapien
tgttcacgatgcagggatcaataac

SEQ ID NO: 1837992 - DNA, 25 bp, Homo sapien
gatgcagggatcaataacagcgatg

SEQ ID NO: 1837993 - DNA, 25 bp, Homo sapien
tcacgatgcagggatcaataacagc

SEQ ID NO: 1837994 - DNA, 25 bp, Homo sapien
gtgtgtgtttcctactctattagaa

SEQ ID NO: 1837995 - DNA, 25 bp, Homo sapien
gaacttattattcgtgtttcctgaa

SEQ ID NO: 1837996 - DNA, 25 bp, Homo sapien
actctattagaaattccttgacctg

SEQ ID NO: 1837997 - DNA, 25 bp, Homo sapien
cttgacctgatctgcagttctccat

SEQ ID NO: 1837998 - DNA, 25 bp, Homo sapien
gctggcagatctctataatgcccca

SEQ ID NO: 1837999 - DNA, 25 bp, Homo sapien
gtcttgccacgttgtaaggagattt

SEQ ID NO: 1838000 - DNA, 25 bp, Homo sapien
taaggaaacagctggcagatctcta

SEQ ID NO: 1838001 - DNA, 25 bp, Homo sapien
attatttaaggaaacagctggcaga

SEQ ID NO: 1838002 - DNA, 25 bp, Homo sapien
taaagactagtctagtgtaatagaa

SEQ ID NO: 1838003 - DNA, 25 bp, Homo sapien
tagtctagtgtaatagaagagggaa

SEQ ID NO: 1838004 - DNA, 25 bp, Homo sapien
tctagtgtaatagaagagggaaaga

SEQ ID NO: 1838005 - DNA, 25 bp, Homo sapien
gactagtctagtgtaatagaagagg

SEQ ID NO: 1838006 - DNA, 25 bp, Homo sapien
tgtgtagaaaccgtaaagcgtattc

SEQ ID NO: 1838007 - DNA, 25 bp, Homo sapien
tgaccttgtgtgagcatcagccata

SEQ ID NO: 1838008 - DNA, 25 bp, Homo sapien
agtagtgagggagtaaatgctaacc

SEQ ID NO: 1838009 - DNA, 25 bp, Homo sapien
gcacttggcctatttagggcttcta

SEQ ID NO: 1838010 - DNA, 25 bp, Homo sapien
gaggattgccttgacagctgtgcgc

SEQ ID NO: 1838011 - DNA, 25 bp, Homo sapien
gcagcagggcatccgtttggcagct

SEQ ID NO: 1838012 - DNA, 25 bp, Homo sapien
caaagcggactgatttgggcaacgg

SEQ ID NO: 1838013 - DNA, 25 bp, Homo sapien
cagagagtaaggaacagggacgaat

SEQ ID NO: 1838014 - DNA, 25 bp, Homo sapien
ctttggacctgaaatgggaccctat

SEQ ID NO: 1838015 - DNA, 25 bp, Homo sapien
ggagctgccgtgtttaaaattacta

SEQ ID NO: 1838016 - DNA, 25 bp, Homo sapien
acttagtgcagccttactcagtgac

SEQ ID NO: 1838017 - DNA, 25 bp, Homo sapien
cctggtttgtgaggtgctcaacagc

SEQ ID NO: 1838018 - DNA, 25 bp, Homo sapien
ctaggattggatcagaggagttact

SEQ ID NO: 1838019 - DNA, 25 bp, Homo sapien
agtggcattccgcacagtctgaggc

SEQ ID NO: 1838020 - DNA, 25 bp, Homo sapien
tagtcttggactgaagctctctaaa

SEQ ID NO: 1838021 - DNA, 25 bp, Homo sapien
ctgattcaagtgtgaagccaggatc

SEQ ID NO: 1838022 - DNA, 25 bp, Homo sapien
cttccatcatgtaggctttggagcc

SEQ ID NO: 1838023 - DNA, 25 bp, Homo sapien
caagcttaggaacgtcatctctttc

SEQ ID NO: 1838024 - DNA, 25 bp, Homo sapien
ctttggagccactttcctcagagcc

SEQ ID NO: 1838025 - DNA, 25 bp, Homo sapien
ctatacaagcttaggaacgtcatct

SEQ ID NO: 1838026 - DNA, 25 bp, Homo sapien
ttacaaattgatatgagaagccaac

SEQ ID NO: 1838027 - DNA, 25 bp, Homo sapien
caaattgatatgagaagccaactgt

SEQ ID NO: 1838028 - DNA, 25 bp, Homo sapien
cttttacaaattgatatgagaagcc

SEQ ID NO: 1838029 - DNA, 25 bp, Homo sapien
ttggcttttacaaattgatatgaga

SEQ ID NO: 1838030 - DNA, 25 bp, Homo sapien
aggtaattgtcttgtcacacaatgg

SEQ ID NO: 1838031 - DNA, 25 bp, Homo sapien
cacaatggtgtaaccagccaacatc

SEQ ID NO: 1838032 - DNA, 25 bp, Homo sapien
cgtgtccataatggcatcattgact

SEQ ID NO: 1838033 - DNA, 25 bp, Homo sapien
gccaacatcctcgaacagatccgtg

SEQ ID NO: 1838034 - DNA, 25 bp, Homo sapien
cagatgcaactatgggccccttttc

SEQ ID NO: 1838035 - DNA, 25 bp, Homo sapien
gagaataatcaccagatgcaactat

SEQ ID NO: 1838036 - DNA, 25 bp, Homo sapien
gcctctagctgtgagttggcaaatg

SEQ ID NO: 1838037 - DNA, 25 bp, Homo sapien
gcctcagggaaagcatcgtatgaaa

SEQ ID NO: 1838038 - DNA, 25 bp, Homo sapien
ttctgccttatgtgattcttttgcc

SEQ ID NO: 1838039 - DNA, 25 bp, Homo sapien
tctgccttatgtgattcttttgcca

SEQ ID NO: 1838040 - DNA, 25 bp, Homo sapien
gccttatgtgattcttttgccattt

SEQ ID NO: 1838041 - DNA, 25 bp, Homo sapien
atttctgccttatgtgattcttttg

SEQ ID NO: 1838042 - DNA, 25 bp, Homo sapien
gggtctctcctctcaagccagtcta

SEQ ID NO: 1838043 - DNA, 25 bp, Homo sapien
caagtggttaagtcagggtctctcc

SEQ ID NO: 1838044 - DNA, 25 bp, Homo sapien
tgactactgtgtggcaattgtacca

SEQ ID NO: 1838045 - DNA, 25 bp, Homo sapien
tacccaatattacacagttcctgag

SEQ ID NO: 1838046 - DNA, 25 bp, Homo sapien
actaggagctcgctgaattggctta

SEQ ID NO: 1838047 - DNA, 25 bp, Homo sapien
ggactaggagctcgctgaattggct

SEQ ID NO: 1838048 - DNA, 25 bp, Homo sapien
ctaggagctcgctgaattggcttac

SEQ ID NO: 1838049 - DNA, 25 bp, Homo sapien
tggggactaggagctcgctgaattg

SEQ ID NO: 1838050 - DNA, 25 bp, Homo sapien
aagaatatgcattgtcgggacggcg

SEQ ID NO: 1838051 - DNA, 25 bp, Homo sapien
tttctgtgcgttgctgtccccaagc

SEQ ID NO: 1838052 - DNA, 25 bp, Homo sapien
gcccatgcgctgttaagaatatgca

SEQ ID NO: 1838053 - DNA, 25 bp, Homo sapien
agcatggacatatttctgtgcgttg

SEQ ID NO: 1838054 - DNA, 25 bp, Homo sapien
cgtacaggatacagaaacaagtgac

SEQ ID NO: 1838055 - DNA, 25 bp, Homo sapien
gacgtacaggatacagaaacaagtg

SEQ ID NO: 1838056 - DNA, 25 bp, Homo sapien
gagaggacgtacaggatacagaaac

SEQ ID NO: 1838057 - DNA, 25 bp, Homo sapien
gaggacgtacaggatacagaaacaa

SEQ ID NO: 1838058 - DNA, 25 bp, Homo sapien
tagaaacatcttgctccaatagcag

SEQ ID NO: 1838059 - DNA, 25 bp, Homo sapien
ctgttataaatgattgacaccgctg

SEQ ID NO: 1838060 - DNA, 25 bp, Homo sapien
tataaatgattgacaccgctgaaaa

SEQ ID NO: 1838061 - DNA, 25 bp, Homo sapien
gattgacaccgctgaaaatttagaa

SEQ ID NO: 1838062 - DNA, 25 bp, Homo sapien
tccatgcagtacatctgtgcagctt

SEQ ID NO: 1838063 - DNA, 25 bp, Homo sapien
tattgtctgactcatagaatccatg

SEQ ID NO: 1838064 - DNA, 25 bp, Homo sapien
cttacaattatatctgtaggtattg

SEQ ID NO: 1838065 - DNA, 25 bp, Homo sapien
attatatctgtaggtattgtctgac

SEQ ID NO: 1838066 - DNA, 25 bp, Homo sapien
ccagatctcagggacgttgttggga

SEQ ID NO: 1838067 - DNA, 25 bp, Homo sapien
agatctcagggacgttgttgggaca

SEQ ID NO: 1838068 - DNA, 25 bp, Homo sapien
gatctcagggacgttgttgggacat

SEQ ID NO: 1838069 - DNA, 25 bp, Homo sapien
cagatctcagggacgttgttgggac

SEQ ID NO: 1838070 - DNA, 25 bp, Homo sapien
gagaattaggtaactctagggcata

SEQ ID NO: 1838071 - DNA, 25 bp, Homo sapien
gaatacgcgtcaaggaagaaaatcc

SEQ ID NO: 1838072 - DNA, 25 bp, Homo sapien
cattcatggtgatcttgggaggaaa

SEQ ID NO: 1838073 - DNA, 25 bp, Homo sapien
gaatgacggcctgtaagatattgga

SEQ ID NO: 1838074 - DNA, 25 bp, Homo sapien
ggatcccgcttacaggtgcatatgg

SEQ ID NO: 1838075 - DNA, 25 bp, Homo sapien
ggcctggagatttcaagcaacatgc

SEQ ID NO: 1838076 - DNA, 25 bp, Homo sapien
acctggatccagagtaaaacatgca

SEQ ID NO: 1838077 - DNA, 25 bp, Homo sapien
tctatagcctcatggtggatcccgc

SEQ ID NO: 1838078 - DNA, 25 bp, Homo sapien
atttgattcctgggataagtctcat

SEQ ID NO: 1838079 - DNA, 25 bp, Homo sapien
agcacgcgtcatgacatccagctaa

SEQ ID NO: 1838080 - DNA, 25 bp, Homo sapien
ctacaagcacgcgtcatgacatcca

SEQ ID NO: 1838081 - DNA, 25 bp, Homo sapien
ggataagtctcatttggccatgata

SEQ ID NO: 1838082 - DNA, 25 bp, Homo sapien
ttcgcttctcgggaccaagcgatcc

SEQ ID NO: 1838083 - DNA, 25 bp, Homo sapien
ggcaaccttcgcttctcgggaccaa

SEQ ID NO: 1838084 - DNA, 25 bp, Homo sapien
cttcgcttctcgggaccaagcgatc

SEQ ID NO: 1838085 - DNA, 25 bp, Homo sapien
catggcaaccttcgcttctcgggac

SEQ ID NO: 1838086 - DNA, 25 bp, Homo sapien
gaacaggattcacagatggcagaaa

SEQ ID NO: 1838087 - DNA, 25 bp, Homo sapien
catgctagctgtgttccttgcgtgg

SEQ ID NO: 1838088 - DNA, 25 bp, Homo sapien
gcagcaggaaaacctaggcttctag

SEQ ID NO: 1838089 - DNA, 25 bp, Homo sapien
gctggaggccccacatagacatgtg

SEQ ID NO: 1838090 - DNA, 25 bp, Homo sapien
gtgtgagctggtgcccggtaacaaa

SEQ ID NO: 1838091 - DNA, 25 bp, Homo sapien
tacttattggacaacaaatcctctg

SEQ ID NO: 1838092 - DNA, 25 bp, Homo sapien
tcactacaggcggaaaacaacttct

SEQ ID NO: 1838093 - DNA, 25 bp, Homo sapien
caacttctgtagagtggattctcct

SEQ ID NO: 1838094 - DNA, 25 bp, Homo sapien
tggatattgaattagtaggcatgaa

SEQ ID NO: 1838095 - DNA, 25 bp, Homo sapien
gacttgaaagtcaaacctattcctg

SEQ ID NO: 1838096 - DNA, 25 bp, Homo sapien
agtcaaacctattcctggatccatg

SEQ ID NO: 1838097 - DNA, 25 bp, Homo sapien
catcagaactcttgtgtggccaggt

SEQ ID NO: 1838098 - DNA, 25 bp, Homo sapien
tgagagcaaatacctacacaggcag

SEQ ID NO: 1838099 - DNA, 25 bp, Homo sapien
tttgacctgtgaggcgcaccatggc

SEQ ID NO: 1838100 - DNA, 25 bp, Homo sapien
tgcaggaggaaatcccacagctatt

SEQ ID NO: 1838101 - DNA, 25 bp, Homo sapien
gctatttagccctgaaccaccaaga

SEQ ID NO: 1838102 - DNA, 25 bp, Homo sapien
cctagtgtgctactgtaaaggtgca

SEQ ID NO: 1838103 - DNA, 25 bp, Homo sapien
tgccccagaagaatcatggcccagg

SEQ ID NO: 1838104 - DNA, 25 bp, Homo sapien
ttatcttacccaagacaccagggaa

SEQ ID NO: 1838105 - DNA, 25 bp, Homo sapien
ggtgtaattagcagcgcacagactt

SEQ ID NO: 1838106 - DNA, 25 bp, Homo sapien
agaacatctggcctacgggagtgaa

SEQ ID NO: 1838107 - DNA, 25 bp, Homo sapien
tgtagcaagagaaatttgtcaaacc

SEQ ID NO: 1838108 - DNA, 25 bp, Homo sapien
aagccactaaatacagttacctgaa

SEQ ID NO: 1838109 - DNA, 25 bp, Homo sapien
ggtatgtatagggtcagtgctaaac

SEQ ID NO: 1838110 - DNA, 25 bp, Homo sapien
aaaaagagggctgtacaattgtgac

SEQ ID NO: 1838111 - DNA, 25 bp, Homo sapien
tgtagagtagcgaagaatttggcaa

SEQ ID NO: 1838112 - DNA, 25 bp, Homo sapien
tcagaaagatggtatcagaactagg

SEQ ID NO: 1838113 - DNA, 25 bp, Homo sapien
gatctagactctcaatcccttgtca

SEQ ID NO: 1838114 - DNA, 25 bp, Homo sapien
cagacctcggagtactgctaagtgt

SEQ ID NO: 1838115 - DNA, 25 bp, Homo sapien
tacatttaaagcttggtcggtgacc

SEQ ID NO: 1838116 - DNA, 25 bp, Homo sapien
ggtgacctttgcataccatcaacga

SEQ ID NO: 1838117 - DNA, 25 bp, Homo sapien
tatctgaggcagctacagattgccc

SEQ ID NO: 1838118 - DNA, 25 bp, Homo sapien
gctttcttcaaagagtgtcagctgt

SEQ ID NO: 1838119 - DNA, 25 bp, Homo sapien
tgtgttctggttcgtaactgcttct

SEQ ID NO: 1838120 - DNA, 25 bp, Homo sapien
ggcttgtccatggaataatcagagg

SEQ ID NO: 1838121 - DNA, 25 bp, Homo sapien
tgagcttgccaattgatgtgaggct

SEQ ID NO: 1838122 - DNA, 25 bp, Homo sapien
ctattgtgtctcagtggttgccttg

SEQ ID NO: 1838123 - DNA, 25 bp, Homo sapien
ttgtgtctcagtggttgccttgctc

SEQ ID NO: 1838124 - DNA, 25 bp, Homo sapien
tattgtgtctcagtggttgccttgc

SEQ ID NO: 1838125 - DNA, 25 bp, Homo sapien
gtgtctcagtggttgccttgctcac

SEQ ID NO: 1838126 - DNA, 25 bp, Homo sapien
gcatcatctggcagcttggccaaga

SEQ ID NO: 1838127 - DNA, 25 bp, Homo sapien
ccaagatatattgaaaactcttcac

SEQ ID NO: 1838128 - DNA, 25 bp, Homo sapien
cttggccaagatatattgaaaactc

SEQ ID NO: 1838129 - DNA, 25 bp, Homo sapien
gtgttttggaaggtgcatcatctgg

SEQ ID NO: 1838130 - DNA, 25 bp, Homo sapien
ttgagtaccaatgtcacaaggcagt

SEQ ID NO: 1838131 - DNA, 25 bp, Homo sapien
gaaaagagcatgaccaagttcctgg

SEQ ID NO: 1838132 - DNA, 25 bp, Homo sapien
gacatcccactggtcttggtcagga

SEQ ID NO: 1838133 - DNA, 25 bp, Homo sapien
tcagctgggcatggttgatgctaca

SEQ ID NO: 1838134 - DNA, 25 bp, Homo sapien
tgatttctagtctggtgctacaggc

SEQ ID NO: 1838135 - DNA, 25 bp, Homo sapien
cactcagagatggaaaaattaggca

SEQ ID NO: 1838136 - DNA, 25 bp, Homo sapien
tgctacaggcatgctgcaagcttcc

SEQ ID NO: 1838137 - DNA, 25 bp, Homo sapien
ttgaacttagagctacagaggcccc

SEQ ID NO: 1838138 - DNA, 25 bp, Homo sapien
caaatcccatttactggctctggga

SEQ ID NO: 1838139 - DNA, 25 bp, Homo sapien
gccgactccaggtgcactctgtgtt

SEQ ID NO: 1838140 - DNA, 25 bp, Homo sapien
tctgggaacgtcgagcagttatttc

SEQ ID NO: 1838141 - DNA, 25 bp, Homo sapien
tgaagtgttggtgtatcctcaggga

SEQ ID NO: 1838142 - DNA, 25 bp, Homo sapien
gtcagcatgttttgtcaagtctggc

SEQ ID NO: 1838143 - DNA, 25 bp, Homo sapien
tctggctgatcccaaacagcatgga

SEQ ID NO: 1838144 - DNA, 25 bp, Homo sapien
gacacgtgattggtgtgtcagcatg

SEQ ID NO: 1838145 - DNA, 25 bp, Homo sapien
tgagtctggtgttgtgacacgtgat

SEQ ID NO: 1838146 - DNA, 25 bp, Homo sapien
tagtggtcagaatatggtccagtgt

SEQ ID NO: 1838147 - DNA, 25 bp, Homo sapien
cagaatatggtccagtgttggagtc

SEQ ID NO: 1838148 - DNA, 25 bp, Homo sapien
tggtcagaatatggtccagtgttgg

SEQ ID NO: 1838149 - DNA, 25 bp, Homo sapien
ctagtggtcagaatatggtccagtg

SEQ ID NO: 1838150 - DNA, 25 bp, Homo sapien
gacaattttcacgtacctttcagga

SEQ ID NO: 1838151 - DNA, 25 bp, Homo sapien
ttctttctcacagtgggatccgcca

SEQ ID NO: 1838152 - DNA, 25 bp, Homo sapien
gaacaattctccaagtccgggtcat

SEQ ID NO: 1838153 - DNA, 25 bp, Homo sapien
gggtgaaccacacatgccagattct

SEQ ID NO: 1838154 - DNA, 25 bp, Homo sapien
tatttgtacagattttccttggcct

SEQ ID NO: 1838155 - DNA, 25 bp, Homo sapien
aattttctgtccttgatgagaatga

SEQ ID NO: 1838156 - DNA, 25 bp, Homo sapien
gaatgatactttccttctggtatag

SEQ ID NO: 1838157 - DNA, 25 bp, Homo sapien
gtatagggagggcatctttcatctc

SEQ ID NO: 1838158 - DNA, 25 bp, Homo sapien
gacagtgtcatattagtctgattat

SEQ ID NO: 1838159 - DNA, 25 bp, Homo sapien
cccgtctgtgctaaagatataaaca

SEQ ID NO: 1838160 - DNA, 25 bp, Homo sapien
ggcataagacagtgtcatattagtc

SEQ ID NO: 1838161 - DNA, 25 bp, Homo sapien
tgtgctaaagatataaacattagcc

SEQ ID NO: 1838162 - DNA, 25 bp, Homo sapien
actgcactcgtctgtgcgacagagg

SEQ ID NO: 1838163 - DNA, 25 bp, Homo sapien
aggccactgcactcgtctgtgcgac

SEQ ID NO: 1838164 - DNA, 25 bp, Homo sapien
caggccactgcactcgtctgtgcga

SEQ ID NO: 1838165 - DNA, 25 bp, Homo sapien
gcactcgtctgtgcgacagaggaag

SEQ ID NO: 1838166 - DNA, 25 bp, Homo sapien
taaacgggcatttgtgacaggcaag

SEQ ID NO: 1838167 - DNA, 25 bp, Homo sapien
cattcccgaaatgcgcttaaacggg

SEQ ID NO: 1838168 - DNA, 25 bp, Homo sapien
caggcaagtaagatggctggttaac

SEQ ID NO: 1838169 - DNA, 25 bp, Homo sapien
aaactaatggccgatggaacgctcc

SEQ ID NO: 1838170 - DNA, 25 bp, Homo sapien
ttgggctttatggtggtgactctca

SEQ ID NO: 1838171 - DNA, 25 bp, Homo sapien
gggctttatggtggtgactctcagt

SEQ ID NO: 1838172 - DNA, 25 bp, Homo sapien
gctttgggctttatggtggtgactc

SEQ ID NO: 1838173 - DNA, 25 bp, Homo sapien
ctttgggctttatggtggtgactct

SEQ ID NO: 1838174 - DNA, 25 bp, Homo sapien
ttacgaagcagacgatggatccggc

SEQ ID NO: 1838175 - DNA, 25 bp, Homo sapien
gaagagcgagacttagacttggcgc

SEQ ID NO: 1838176 - DNA, 25 bp, Homo sapien
tgttatcgcgagacgcattgcctgc

SEQ ID NO: 1838177 - DNA, 25 bp, Homo sapien
tgtgagatactctaacactgccgcc

SEQ ID NO: 1838178 - DNA, 25 bp, Homo sapien
ctcctcgcatcaaattgcagcaaca

SEQ ID NO: 1838179 - DNA, 25 bp, Homo sapien
tatctttgagcgtatagcgagcgag

SEQ ID NO: 1838180 - DNA, 25 bp, Homo sapien
cagtgcgcttgctactgccgggaga

SEQ ID NO: 1838181 - DNA, 25 bp, Homo sapien
aagtgctaaagcaggtccatccgga

SEQ ID NO: 1838182 - DNA, 25 bp, Homo sapien
taaacatgctgtgtctgagggcacc

SEQ ID NO: 1838183 - DNA, 25 bp, Homo sapien
tccagtgtccgcgtggacctgcttc

SEQ ID NO: 1838184 - DNA, 25 bp, Homo sapien
gagattccagtgtccgcgtggacct

SEQ ID NO: 1838185 - DNA, 25 bp, Homo sapien
aggcaatgcgctcaaaaatgtcact

SEQ ID NO: 1838186 - DNA, 25 bp, Homo sapien
acaacgtgcttggctagttccccag

SEQ ID NO: 1838187 - DNA, 25 bp, Homo sapien
tttcggaaatggtagtgccctttga

SEQ ID NO: 1838188 - DNA, 25 bp, Homo sapien
tgccctttgaagcaagctccagcat

SEQ ID NO: 1838189 - DNA, 25 bp, Homo sapien
tcggaaatggtagtgccctttgaag

SEQ ID NO: 1838190 - DNA, 25 bp, Homo sapien
cggaaatggtagtgccctttgaagc

SEQ ID NO: 1838191 - DNA, 25 bp, Homo sapien
ccgagtgacaatggcttagggtgac

SEQ ID NO: 1838192 - DNA, 25 bp, Homo sapien
caacgccgtcggaacaagaagaaga

SEQ ID NO: 1838193 - DNA, 25 bp, Homo sapien
tagggtgacgttttgcccaacatcc

SEQ ID NO: 1838194 - DNA, 25 bp, Homo sapien
gctcgacaagctgctggcccgagtg

SEQ ID NO: 1838195 - DNA, 25 bp, Homo sapien
tgctcaagccgtaagtctagaagtc

SEQ ID NO: 1838196 - DNA, 25 bp, Homo sapien
ccttctgggtctaacaggagtctca

SEQ ID NO: 1838197 - DNA, 25 bp, Homo sapien
tagcaagtcttagtggcatatctcc

SEQ ID NO: 1838198 - DNA, 25 bp, Homo sapien
gagtctcaaccccaagtgtccaaaa

SEQ ID NO: 1838199 - DNA, 25 bp, Homo sapien
tgctctcagagttgaaccaaaggta

SEQ ID NO: 1838200 - DNA, 25 bp, Homo sapien
taagagctagaacttagcaagagca

SEQ ID NO: 1838201 - DNA, 25 bp, Homo sapien
catgggtaggtatctcttcttgact

SEQ ID NO: 1838202 - DNA, 25 bp, Homo sapien
taaaattccacctcggactgagtaa

SEQ ID NO: 1838203 - DNA, 25 bp, Homo sapien
tgtggttggaatctgcctagctgct

SEQ ID NO: 1838204 - DNA, 25 bp, Homo sapien
gctgcagaaaggttccaaagacact

SEQ ID NO: 1838205 - DNA, 25 bp, Homo sapien
tagagaatcaactagtggagactgc

SEQ ID NO: 1838206 - DNA, 25 bp, Homo sapien
tagtgtgttcattagaggacaggcc

SEQ ID NO: 1838207 - DNA, 25 bp, Homo sapien
tggaatttgtattaaaagtgatgcg

SEQ ID NO: 1838208 - DNA, 25 bp, Homo sapien
tacatactaaaagtatattggctca

SEQ ID NO: 1838209 - DNA, 25 bp, Homo sapien
ttatatataaagagagccttgttct

SEQ ID NO: 1838210 - DNA, 25 bp, Homo sapien
agtgatgcgtatataaagaaaagcc

SEQ ID NO: 1838211 - DNA, 25 bp, Homo sapien
gaccatcttgcataaacaatgttga

SEQ ID NO: 1838212 - DNA, 25 bp, Homo sapien
ttgggagtaccagtccctagcacag

SEQ ID NO: 1838213 - DNA, 25 bp, Homo sapien
cttacaaaccaggtgcagaccatca

SEQ ID NO: 1838214 - DNA, 25 bp, Homo sapien
aaacatagctcccagggtgctgtcc

SEQ ID NO: 1838215 - DNA, 25 bp, Homo sapien
caactgatgcagagaggaagactga

SEQ ID NO: 1838216 - DNA, 25 bp, Homo sapien
tcccttcaataaggaggttgtccca

SEQ ID NO: 1838217 - DNA, 25 bp, Homo sapien
ttcagatatattacatgttacaaac

SEQ ID NO: 1838218 - DNA, 25 bp, Homo sapien
tttattggtttgacaatcatttata

SEQ ID NO: 1838219 - DNA, 25 bp, Homo sapien
aaaatagtgcacacaaatgtcattt

SEQ ID NO: 1838220 - DNA, 25 bp, Homo sapien
aaatagtgcacacaaatgtcatttg

SEQ ID NO: 1838221 - DNA, 25 bp, Homo sapien
ctcagtgataggtgatcctaaacat

SEQ ID NO: 1838222 - DNA, 25 bp, Homo sapien
aagttgtcttccttgcctcagtgat

SEQ ID NO: 1838223 - DNA, 25 bp, Homo sapien
aaagatggtctcgtgtattatattt

SEQ ID NO: 1838224 - DNA, 25 bp, Homo sapien
tctcaagttgtcttccttgcctcag

SEQ ID NO: 1838225 - DNA, 25 bp, Homo sapien
taataggtgtccagattagctcctc

SEQ ID NO: 1838226 - DNA, 25 bp, Homo sapien
gctttacctggttaataggtgtcca

SEQ ID NO: 1838227 - DNA, 25 bp, Homo sapien
ggtctctggcaagttgggctgaaac

SEQ ID NO: 1838228 - DNA, 25 bp, Homo sapien
tctgtgttaactgggatagtggtct

SEQ ID NO: 1838229 - DNA, 25 bp, Homo sapien
gaccagaggctacatgcgtgtttcc

SEQ ID NO: 1838230 - DNA, 25 bp, Homo sapien
ttttccacccgaggaacaaggcaga

SEQ ID NO: 1838231 - DNA, 25 bp, Homo sapien
gtcacagaggactgatagccaggcc

SEQ ID NO: 1838232 - DNA, 25 bp, Homo sapien
ctagtctgtgtttgggtgggcccat

SEQ ID NO: 1838233 - DNA, 25 bp, Homo sapien
gaagccaagttcagcaatggaagtc

SEQ ID NO: 1838234 - DNA, 25 bp, Homo sapien
taatacttgactgaggaaaacctga

SEQ ID NO: 1838235 - DNA, 25 bp, Homo sapien
gccatgcaataaacgtctacagatg

SEQ ID NO: 1838236 - DNA, 25 bp, Homo sapien
taagaatatgcctagaggctgtgca

SEQ ID NO: 1838237 - DNA, 25 bp, Homo sapien
taggtggggcttcacacggtggctc

SEQ ID NO: 1838238 - DNA, 25 bp, Homo sapien
gaaatcaactacactcaccaatcac

SEQ ID NO: 1838239 - DNA, 25 bp, Homo sapien
caatcacaactaaacgtgtttccat

SEQ ID NO: 1838240 - DNA, 25 bp, Homo sapien
actcatttttgccagccaatgagaa

SEQ ID NO: 1838241 - DNA, 25 bp, Homo sapien
gcacccgttattccttctcgtctga

SEQ ID NO: 1838242 - DNA, 25 bp, Homo sapien
tattctcaggcttaacatggtctcc

SEQ ID NO: 1838243 - DNA, 25 bp, Homo sapien
tgttcttcctacttcgttgaaggcc

SEQ ID NO: 1838244 - DNA, 25 bp, Homo sapien
gatattatagcacttgccaaaggtc

SEQ ID NO: 1838245 - DNA, 25 bp, Homo sapien
cagagacgtgtgtgttgtttttctt

SEQ ID NO: 1838246 - DNA, 25 bp, Homo sapien
ttgtttttctttagcccagtcctga

SEQ ID NO: 1838247 - DNA, 25 bp, Homo sapien
ttctttagcccagtcctgaatttct

SEQ ID NO: 1838248 - DNA, 25 bp, Homo sapien
tcagagacgtgtgtgttgtttttct

SEQ ID NO: 1838249 - DNA, 25 bp, Homo sapien
taggccagtcacattaatggctgcc

SEQ ID NO: 1838250 - DNA, 25 bp, Homo sapien
caggatgaaggttttaaaccaggcg

SEQ ID NO: 1838251 - DNA, 25 bp, Homo sapien
gccatcaggatgaaggttttaaacc

SEQ ID NO: 1838252 - DNA, 25 bp, Homo sapien
aaggtagaaaattaggccagtcaca

SEQ ID NO: 1838253 - DNA, 25 bp, Homo sapien
agattgtggtggtggaagactcctc

SEQ ID NO: 1838254 - DNA, 25 bp, Homo sapien
tctgaccagggagcttctgtggttc

SEQ ID NO: 1838255 - DNA, 25 bp, Homo sapien
gaaaccataaatacagagattgtgg

SEQ ID NO: 1838256 - DNA, 25 bp, Homo sapien
cctctttatgggaaatgtggccatg

SEQ ID NO: 1838257 - DNA, 25 bp, Homo sapien
gagagatgcctgatttgaccaaatt

SEQ ID NO: 1838258 - DNA, 25 bp, Homo sapien
gaagtccacttctgtaccaatgggc

SEQ ID NO: 1838259 - DNA, 25 bp, Homo sapien
caaatacctgtgttgatcaatccac

SEQ ID NO: 1838260 - DNA, 25 bp, Homo sapien
gacatgtgcaaaaacagaagtctgc

SEQ ID NO: 1838261 - DNA, 25 bp, Homo sapien
agttgaacatgctttaataaatcca

SEQ ID NO: 1838262 - DNA, 25 bp, Homo sapien
tagtcctcctatcattccagttaaa

SEQ ID NO: 1838263 - DNA, 25 bp, Homo sapien
ggatcaatccagtcaaagtggaagc

SEQ ID NO: 1838264 - DNA, 25 bp, Homo sapien
aagtggaagcaattagtcctcctat

SEQ ID NO: 1838265 - DNA, 25 bp, Homo sapien
gaattgggaccactcatgacttttg

SEQ ID NO: 1838266 - DNA, 25 bp, Homo sapien
tatgaacatccacaggtagagcttg

SEQ ID NO: 1838267 - DNA, 25 bp, Homo sapien
tttcagcaatagaacccctggagtt

SEQ ID NO: 1838268 - DNA, 25 bp, Homo sapien
tccctgttcatagaggagtcacatc

SEQ ID NO: 1838269 - DNA, 25 bp, Homo sapien
tagaaggtggaactcaggtaaggca

SEQ ID NO: 1838270 - DNA, 25 bp, Homo sapien
taaggcaggcagacaccaaagattg

SEQ ID NO: 1838271 - DNA, 25 bp, Homo sapien
cctgttgcaccagcaagtattagga

SEQ ID NO: 1838272 - DNA, 25 bp, Homo sapien
ctgggagcaatatccaagccattta

SEQ ID NO: 1838273 - DNA, 25 bp, Homo sapien
gaagagtttccggacagcaattacg

SEQ ID NO: 1838274 - DNA, 25 bp, Homo sapien
tgaagagtttccggacagcaattac

SEQ ID NO: 1838275 - DNA, 25 bp, Homo sapien
gtgaagagtttccggacagcaatta

SEQ ID NO: 1838276 - DNA, 25 bp, Homo sapien
tgctaggttaccacagatccaggca

SEQ ID NO: 1838277 - DNA, 25 bp, Homo sapien
caggcaaacaaatagggaagggaag

SEQ ID NO: 1838278 - DNA, 25 bp, Homo sapien
cacagatccaggcaaacaaataggg

SEQ ID NO: 1838279 - DNA, 25 bp, Homo sapien
taactgacctgctaggttaccacag

SEQ ID NO: 1838280 - DNA, 25 bp, Homo sapien
gccttgataggcagagattgtctac

SEQ ID NO: 1838281 - DNA, 25 bp, Homo sapien
gactggaagcgacttaagtatagcc

SEQ ID NO: 1838282 - DNA, 25 bp, Homo sapien
taaacattggagtgtatagtgtcat

SEQ ID NO: 1838283 - DNA, 25 bp, Homo sapien
catgaagcatggagttgataaacat

SEQ ID NO: 1838284 - DNA, 25 bp, Homo sapien
catcataaaacagaacgaaccagag

SEQ ID NO: 1838285 - DNA, 25 bp, Homo sapien
gatgcttatacatgggtggtctttg

SEQ ID NO: 1838286 - DNA, 25 bp, Homo sapien
aaccagagaagacatacggcacagc

SEQ ID NO: 1838287 - DNA, 25 bp, Homo sapien
tgctggaccagggaggatgtgatgt

SEQ ID NO: 1838288 - DNA, 25 bp, Homo sapien
ccagtggtagaaggtgttcccctca

SEQ ID NO: 1838289 - DNA, 25 bp, Homo sapien
caccctctacccagtggtagaaggt

SEQ ID NO: 1838290 - DNA, 25 bp, Homo sapien
tctacccagtggtagaaggtgttcc

SEQ ID NO: 1838291 - DNA, 25 bp, Homo sapien
cagtggtagaaggtgttcccctcag

SEQ ID NO: 1838292 - DNA, 25 bp, Homo sapien
ttcagctccaaaggtgaaacggcac

SEQ ID NO: 1838293 - DNA, 25 bp, Homo sapien
tgaacacaaatctctggcgactaga

SEQ ID NO: 1838294 - DNA, 25 bp, Homo sapien
ttgaatggatgttgggaagagccct

SEQ ID NO: 1838295 - DNA, 25 bp, Homo sapien
gcgactagactgaagcttgacctat

SEQ ID NO: 1838296 - DNA, 25 bp, Homo sapien
cgtgagatgctaggaaatgtaggca

SEQ ID NO: 1838297 - DNA, 25 bp, Homo sapien
tctttaggagacaaatatagcagga

SEQ ID NO: 1838298 - DNA, 25 bp, Homo sapien
tcagggcagcggtgacagaagccat

SEQ ID NO: 1838299 - DNA, 25 bp, Homo sapien
ccataagtgatcttggcaatagctg

SEQ ID NO: 1838300 - DNA, 25 bp, Homo sapien
ggaacttaatgagtattgacttctc

SEQ ID NO: 1838301 - DNA, 25 bp, Homo sapien
taaaagcatatgcatctatatcgcc

SEQ ID NO: 1838302 - DNA, 25 bp, Homo sapien
tatagtcctaagcataataccttgc

SEQ ID NO: 1838303 - DNA, 25 bp, Homo sapien
taccttgcttgtgataggaacttaa

SEQ ID NO: 1838304 - DNA, 25 bp, Homo sapien
caagtaggacaataaagggtcccag

SEQ ID NO: 1838305 - DNA, 25 bp, Homo sapien
gggccagcccagagattcacagata

SEQ ID NO: 1838306 - DNA, 25 bp, Homo sapien
aatatagaagaccatgggccagccc

SEQ ID NO: 1838307 - DNA, 25 bp, Homo sapien
cccagagattcacagataactccag

SEQ ID NO: 1838308 - DNA, 25 bp, Homo sapien
aattctctcatcttcatagcaagaa

SEQ ID NO: 1838309 - DNA, 25 bp, Homo sapien
gataggattcaaacattctaggctt

SEQ ID NO: 1838310 - DNA, 25 bp, Homo sapien
gctctagggaagaatgtaatacaat

SEQ ID NO: 1838311 - DNA, 25 bp, Homo sapien
cacacatttcttatggctctaggga

SEQ ID NO: 1838312 - DNA, 25 bp, Homo sapien
tactcatagaagtaagtcggcctcg

SEQ ID NO: 1838313 - DNA, 25 bp, Homo sapien
tgatgtactcatagaagtaagtcgg

SEQ ID NO: 1838314 - DNA, 25 bp, Homo sapien
catagaagtaagtcggcctcgttcc

SEQ ID NO: 1838315 - DNA, 25 bp, Homo sapien
tgtactcatagaagtaagtcggcct

SEQ ID NO: 1838316 - DNA, 25 bp, Homo sapien
gagaaaggtttgacatttaatctct

SEQ ID NO: 1838317 - DNA, 25 bp, Homo sapien
tgaaatgagaaaggtttgacattta

SEQ ID NO: 1838318 - DNA, 25 bp, Homo sapien
cctgtgaatttaaactctgttcagt

SEQ ID NO: 1838319 - DNA, 25 bp, Homo sapien
aatgagaaaggtttgacatttaatc

SEQ ID NO: 1838320 - DNA, 25 bp, Homo sapien
tattccagagaagtatccaacagga

SEQ ID NO: 1838321 - DNA, 25 bp, Homo sapien
tggtgggatgagcaggcttaacaca

SEQ ID NO: 1838322 - DNA, 25 bp, Homo sapien
tgaactgctcgacatacaacgaccc

SEQ ID NO: 1838323 - DNA, 25 bp, Homo sapien
ggtggaactcaagatgattccctgg

SEQ ID NO: 1838324 - DNA, 25 bp, Homo sapien
catgtggatctgtgctattcaccat

SEQ ID NO: 1838325 - DNA, 25 bp, Homo sapien
tgtggaggtgttgggcaaaccatgt

SEQ ID NO: 1838326 - DNA, 25 bp, Homo sapien
aaccatgtggatctgtgctattcac

SEQ ID NO: 1838327 - DNA, 25 bp, Homo sapien
ttatccaggagcttctttgtggagg

SEQ ID NO: 1838328 - DNA, 25 bp, Homo sapien
caacagtgcacaaggaaagacaatc

SEQ ID NO: 1838329 - DNA, 25 bp, Homo sapien
tgaggttcaggcacgcacgctgtgc

SEQ ID NO: 1838330 - DNA, 25 bp, Homo sapien
aatccatagcgaaaggaacagaaac

SEQ ID NO: 1838331 - DNA, 25 bp, Homo sapien
gcacgctgtgctgttattataacat

SEQ ID NO: 1838332 - DNA, 25 bp, Homo sapien
tagagtaatcagttggtgtacagcc

SEQ ID NO: 1838333 - DNA, 25 bp, Homo sapien
cagaaagtcgcaattgctgacagag

SEQ ID NO: 1838334 - DNA, 25 bp, Homo sapien
aaataccctgtgttactcttggaca

SEQ ID NO: 1838335 - DNA, 25 bp, Homo sapien
tagaagttccaagaaaatcaagcca

SEQ ID NO: 1838336 - DNA, 25 bp, Homo sapien
gaagttgcttctcttcttgctgaag

SEQ ID NO: 1838337 - DNA, 25 bp, Homo sapien
tcttcttgctgaagggttttgcctc

SEQ ID NO: 1838338 - DNA, 25 bp, Homo sapien
ttctcttcttgctgaagggttttgc

SEQ ID NO: 1838339 - DNA, 25 bp, Homo sapien
ttgctgaagggttttgcctccaccc

SEQ ID NO: 1838340 - DNA, 25 bp, Homo sapien
tgtgagtgcaaaacacgttgatgtc

SEQ ID NO: 1838341 - DNA, 25 bp, Homo sapien
ctgtgagtgcaaaacacgttgatgt

SEQ ID NO: 1838342 - DNA, 25 bp, Homo sapien
gtgcaaaacacgttgatgtcagcat

SEQ ID NO: 1838343 - DNA, 25 bp, Homo sapien
gagtgcaaaacacgttgatgtcagc

SEQ ID NO: 1838344 - DNA, 25 bp, Homo sapien
ttcatttaatgagccccgtagacta

SEQ ID NO: 1838345 - DNA, 25 bp, Homo sapien
cttacggccctctggggaatcaact

SEQ ID NO: 1838346 - DNA, 25 bp, Homo sapien
tgctcatttcatttaatgagccccg

SEQ ID NO: 1838347 - DNA, 25 bp, Homo sapien
gggaatcaactgattgctcatttca

SEQ ID NO: 1838348 - DNA, 25 bp, Homo sapien
ctgattcgggacaaaaaagtgattt

SEQ ID NO: 1838349 - DNA, 25 bp, Homo sapien
tcatgctgggcaatttctggcattt

SEQ ID NO: 1838350 - DNA, 25 bp, Homo sapien
ccaggagactttgatgttgttattc

SEQ ID NO: 1838351 - DNA, 25 bp, Homo sapien
cctctaaagaaatgttgtaaatctt

SEQ ID NO: 1838352 - DNA, 25 bp, Homo sapien
catagcagatgctctgtaaattcaa

SEQ ID NO: 1838353 - DNA, 25 bp, Homo sapien
tagtgattgaaacccctaggtcagc

SEQ ID NO: 1838354 - DNA, 25 bp, Homo sapien
tctgccatcagtatcccagttctgg

SEQ ID NO: 1838355 - DNA, 25 bp, Homo sapien
tgttcaaagtccatgtgttaaataa

SEQ ID NO: 1838356 - DNA, 25 bp, Homo sapien
gtgtacatattcacccacttcaata

SEQ ID NO: 1838357 - DNA, 25 bp, Homo sapien
tggatttctgcatccctgttacgga

SEQ ID NO: 1838358 - DNA, 25 bp, Homo sapien
gatttctgcatccctgttacggagc

SEQ ID NO: 1838359 - DNA, 25 bp, Homo sapien
caagagttagtgacttgatgttgga

SEQ ID NO: 1838360 - DNA, 25 bp, Homo sapien
agagttagtgacttgatgttggatt

SEQ ID NO: 1838361 - DNA, 25 bp, Homo sapien
taagcaagtattgtcttgcaaggca

SEQ ID NO: 1838362 - DNA, 25 bp, Homo sapien
ttcaggaaacgggatgctgccatcc

SEQ ID NO: 1838363 - DNA, 25 bp, Homo sapien
gggaatcttcaggaaacgggatgct

SEQ ID NO: 1838364 - DNA, 25 bp, Homo sapien
gcaaggcatctgtatcagctgtgtt

SEQ ID NO: 1838365 - DNA, 25 bp, Homo sapien
aatgctgccagggaaattttctgac

SEQ ID NO: 1838366 - DNA, 25 bp, Homo sapien
tttagcgtaaagtcgagtgtttgtc

SEQ ID NO: 1838367 - DNA, 25 bp, Homo sapien
tgccctctgctattggagatcagga

SEQ ID NO: 1838368 - DNA, 25 bp, Homo sapien
gatcttcagaacatgtctgccctct

SEQ ID NO: 1838369 - DNA, 25 bp, Homo sapien
tattcttttgtgcaagttgggctcc

SEQ ID NO: 1838370 - DNA, 25 bp, Homo sapien
tatgcaggcaagtgattcccttcag

SEQ ID NO: 1838371 - DNA, 25 bp, Homo sapien
tgaactccctaacacagcaaacaag

SEQ ID NO: 1838372 - DNA, 25 bp, Homo sapien
taccatcacttggaatcggcactcc

SEQ ID NO: 1838373 - DNA, 25 bp, Homo sapien
tctagcagaagccaatggacaaggg

SEQ ID NO: 1838374 - DNA, 25 bp, Homo sapien
gaatctaacatactgggtcccacac

SEQ ID NO: 1838375 - DNA, 25 bp, Homo sapien
tgccctagtgagtttgtcaccccgg

SEQ ID NO: 1838376 - DNA, 25 bp, Homo sapien
ttctggagaaccgaacagcttgcca

SEQ ID NO: 1838377 - DNA, 25 bp, Homo sapien
cacggaagccttctattttatgcaa

SEQ ID NO: 1838378 - DNA, 25 bp, Homo sapien
attttcatcacggaagccttctatt

SEQ ID NO: 1838379 - DNA, 25 bp, Homo sapien
tttatgcaatacggtgcctaatgac

SEQ ID NO: 1838380 - DNA, 25 bp, Homo sapien
cttctattttatgcaatacggtgcc

SEQ ID NO: 1838381 - DNA, 25 bp, Homo sapien
tagaagagtagtcctaacaggttaa

SEQ ID NO: 1838382 - DNA, 25 bp, Homo sapien
caggttaacggcaaacagcaagaag

SEQ ID NO: 1838383 - DNA, 25 bp, Homo sapien
tctccaaatatgaggtagaagagta

SEQ ID NO: 1838384 - DNA, 25 bp, Homo sapien
tcctaacaggttaacggcaaacagc

SEQ ID NO: 1838385 - DNA, 25 bp, Homo sapien
gacaggtgctatgctcgaaaatcct

SEQ ID NO: 1838386 - DNA, 25 bp, Homo sapien
tccactgacagtgggtacaatgaca

SEQ ID NO: 1838387 - DNA, 25 bp, Homo sapien
aatcctcttgatgctcccatgagaa

SEQ ID NO: 1838388 - DNA, 25 bp, Homo sapien
tgctcgaaaatcctcttgatgctcc

SEQ ID NO: 1838389 - DNA, 25 bp, Homo sapien
ggaatgttccggtctagatccagag

SEQ ID NO: 1838390 - DNA, 25 bp, Homo sapien
tctagatccagagatgtttgacagt

SEQ ID NO: 1838391 - DNA, 25 bp, Homo sapien
tgacaggaatgttccggtctagatc

SEQ ID NO: 1838392 - DNA, 25 bp, Homo sapien
agatgtttgacagtatccttcagcc

SEQ ID NO: 1838393 - DNA, 25 bp, Homo sapien
tatagccggaattgaggtaaggcag

SEQ ID NO: 1838394 - DNA, 25 bp, Homo sapien
cagagacacaatgagtgctgaagag

SEQ ID NO: 1838395 - DNA, 25 bp, Homo sapien
taatccgcaagagagcgtcagcaag

SEQ ID NO: 1838396 - DNA, 25 bp, Homo sapien
gcaaggcagttgctgtgatatagcc

SEQ ID NO: 1838397 - DNA, 25 bp, Homo sapien
cacagtgatgagtctaaactttttg

SEQ ID NO: 1838398 - DNA, 25 bp, Homo sapien
ttttggttagaaggaaatctgccag

SEQ ID NO: 1838399 - DNA, 25 bp, Homo sapien
tgacccaggcaacaataaaaggaag

SEQ ID NO: 1838400 - DNA, 25 bp, Homo sapien
ggaaatctgccagatagcctcccac

SEQ ID NO: 1838401 - DNA, 25 bp, Homo sapien
cagagtaattggtcagccatgcaag

SEQ ID NO: 1838402 - DNA, 25 bp, Homo sapien
cccagaaaagctactggcatgagta

SEQ ID NO: 1838403 - DNA, 25 bp, Homo sapien
tcagatggaatgattagtgagggca

SEQ ID NO: 1838404 - DNA, 25 bp, Homo sapien
ggcagtgagaccacaacttttgttg

SEQ ID NO: 1838405 - DNA, 25 bp, Homo sapien
gctgaaacagcctaaacatatggac

SEQ ID NO: 1838406 - DNA, 25 bp, Homo sapien
tgtgctaactaaccattgatggctg

SEQ ID NO: 1838407 - DNA, 25 bp, Homo sapien
catatggaccaaatgggtagagatc

SEQ ID NO: 1838408 - DNA, 25 bp, Homo sapien
gatgttaacatggtacacagagctg

SEQ ID NO: 1838409 - DNA, 25 bp, Homo sapien
tttctgaggtgcttatccatggata

SEQ ID NO: 1838410 - DNA, 25 bp, Homo sapien
taaatcacaacaaaccagagaaggc

SEQ ID NO: 1838411 - DNA, 25 bp, Homo sapien
gaggtgcttatccatggataggaaa

SEQ ID NO: 1838412 - DNA, 25 bp, Homo sapien
tgcttatccatggataggaaacggg

SEQ ID NO: 1838413 - DNA, 25 bp, Homo sapien
cctaacaatgccttttgatgaggat

SEQ ID NO: 1838414 - DNA, 25 bp, Homo sapien
tctcctgggatcagcatgtcttttt

SEQ ID NO: 1838415 - DNA, 25 bp, Homo sapien
tatccaatttttgagcaccttctgt

SEQ ID NO: 1838416 - DNA, 25 bp, Homo sapien
gagactatcctttatctattgaacc

SEQ ID NO: 1838417 - DNA, 25 bp, Homo sapien
tccatccagtgacccatgaattatg

SEQ ID NO: 1838418 - DNA, 25 bp, Homo sapien
ttttctgtgagtgtaggcaccgtcc

SEQ ID NO: 1838419 - DNA, 25 bp, Homo sapien
ttagagagatccacagcagtactcc

SEQ ID NO: 1838420 - DNA, 25 bp, Homo sapien
gcagtactccctgtaagactaataa

SEQ ID NO: 1838421 - DNA, 25 bp, Homo sapien
tgcaagcctatcccctactgccttc

SEQ ID NO: 1838422 - DNA, 25 bp, Homo sapien
ctgcaagcctatcccctactgcctt

SEQ ID NO: 1838423 - DNA, 25 bp, Homo sapien
gccacctatgaggatggcagtaaag

SEQ ID NO: 1838424 - DNA, 25 bp, Homo sapien
actaatgaagccacctatgaggatg

SEQ ID NO: 1838425 - DNA, 25 bp, Homo sapien
cccaagggtttcactaatgaagcca

SEQ ID NO: 1838426 - DNA, 25 bp, Homo sapien
gccacccaagggtttcactaatgaa

SEQ ID NO: 1838427 - DNA, 25 bp, Homo sapien
tggttctcagaaccacaccatcagt

SEQ ID NO: 1838428 - DNA, 25 bp, Homo sapien
acctcaactctggttctcagaacca

SEQ ID NO: 1838429 - DNA, 25 bp, Homo sapien
tctggacacccctgtttgaacctca

SEQ ID NO: 1838430 - DNA, 25 bp, Homo sapien
ttttcccatacagcaagtgcatgtc

SEQ ID NO: 1838431 - DNA, 25 bp, Homo sapien
taagctgagcaattccatccaccag

SEQ ID NO: 1838432 - DNA, 25 bp, Homo sapien
ttccatccaccagtacagtctgcag

SEQ ID NO: 1838433 - DNA, 25 bp, Homo sapien
tgagcaattccatccaccagtacag

SEQ ID NO: 1838434 - DNA, 25 bp, Homo sapien
ttataagctgagcaattccatccac

SEQ ID NO: 1838435 - DNA, 25 bp, Homo sapien
cttcgttcttgtggagggccccact

SEQ ID NO: 1838436 - DNA, 25 bp, Homo sapien
ctgcttcgttcttgtggagggcccc

SEQ ID NO: 1838437 - DNA, 25 bp, Homo sapien
tgcttcgttcttgtggagggcccca

SEQ ID NO: 1838438 - DNA, 25 bp, Homo sapien
gcttcgttcttgtggagggccccac

SEQ ID NO: 1838439 - DNA, 25 bp, Homo sapien
caacagcaccaaagatgatgccttg

SEQ ID NO: 1838440 - DNA, 25 bp, Homo sapien
aagaaatgccaaccactcgctttgt

SEQ ID NO: 1838441 - DNA, 25 bp, Homo sapien
taggccctggactattcgagttaca

SEQ ID NO: 1838442 - DNA, 25 bp, Homo sapien
gagccattgtcagtatgccaccata

SEQ ID NO: 1838443 - DNA, 25 bp, Homo sapien
cctcagaggaatcattgagctggga

SEQ ID NO: 1838444 - DNA, 25 bp, Homo sapien
tacttaggccaccaaatgagtcaac

SEQ ID NO: 1838445 - DNA, 25 bp, Homo sapien
tgttgaccatggctaccatggtgat

SEQ ID NO: 1838446 - DNA, 25 bp, Homo sapien
gattgagggcttgtgctgttgacca

SEQ ID NO: 1838447 - DNA, 25 bp, Homo sapien
aattgcagaaatgtaagacgagggc

SEQ ID NO: 1838448 - DNA, 25 bp, Homo sapien
gacattttgtgctatcgttgtgaaa

SEQ ID NO: 1838449 - DNA, 25 bp, Homo sapien
ggctattccatagcgagcagaacat

SEQ ID NO: 1838450 - DNA, 25 bp, Homo sapien
gtgctatcgttgtgaaattgcagaa

SEQ ID NO: 1838451 - DNA, 25 bp, Homo sapien
tgggactcaactctgtcttggtggc

SEQ ID NO: 1838452 - DNA, 25 bp, Homo sapien
tgtgggactcaactctgtcttggtg

SEQ ID NO: 1838453 - DNA, 25 bp, Homo sapien
gctgtgggactcaactctgtcttgg

SEQ ID NO: 1838454 - DNA, 25 bp, Homo sapien
ttgctgtgggactcaactctgtctt

SEQ ID NO: 1838455 - DNA, 25 bp, Homo sapien
tgtttctcctctcctagtgaatggt

SEQ ID NO: 1838456 - DNA, 25 bp, Homo sapien
gtgtttctcctctcctagtgaatgg

SEQ ID NO: 1838457 - DNA, 25 bp, Homo sapien
tgtgtttctcctctcctagtgaatg

SEQ ID NO: 1838458 - DNA, 25 bp, Homo sapien
tttctcctctcctagtgaatggttt

SEQ ID NO: 1838459 - DNA, 25 bp, Homo sapien
gactcactgtaagtatcgctgatat

SEQ ID NO: 1838460 - DNA, 25 bp, Homo sapien
acctggcttctactacccctgacaa

SEQ ID NO: 1838461 - DNA, 25 bp, Homo sapien
tatcgctgatatgtgtgtcactcat

SEQ ID NO: 1838462 - DNA, 25 bp, Homo sapien
gcttcctcatttgactcactgtaag

SEQ ID NO: 1838463 - DNA, 25 bp, Homo sapien
aaaccaaacactgcatgttctcact

SEQ ID NO: 1838464 - DNA, 25 bp, Homo sapien
cataggtgggaattgaacagtgaga

SEQ ID NO: 1838465 - DNA, 25 bp, Homo sapien
cacaccagggcctgttgtggggtgg

SEQ ID NO: 1838466 - DNA, 25 bp, Homo sapien
ctcagcaaaatatcgcaaggacaaa

SEQ ID NO: 1838467 - DNA, 25 bp, Homo sapien
gattctttgccaccctagggcttaa

SEQ ID NO: 1838468 - DNA, 25 bp, Homo sapien
ggcttcaagttgaacccagcgtttc

SEQ ID NO: 1838469 - DNA, 25 bp, Homo sapien
cgacttaatgtctgtggaagggctt

SEQ ID NO: 1838470 - DNA, 25 bp, Homo sapien
caagcttactcccttggactttttg

SEQ ID NO: 1838471 - DNA, 25 bp, Homo sapien
gaagcattcggaaatccagcccaat

SEQ ID NO: 1838472 - DNA, 25 bp, Homo sapien
tttgaagaagcattcggaaatccag

SEQ ID NO: 1838473 - DNA, 25 bp, Homo sapien
cttccccttgtgagtgtctcctcag

SEQ ID NO: 1838474 - DNA, 25 bp, Homo sapien
cccttgtgagtgtctcctcaggacc

SEQ ID NO: 1838475 - DNA, 25 bp, Homo sapien
cttgttaagctcctcgccgttgcga

SEQ ID NO: 1838476 - DNA, 25 bp, Homo sapien
tgttaagctcctcgccgttgcgaat

SEQ ID NO: 1838477 - DNA, 25 bp, Homo sapien
ttaagctcctcgccgttgcgaatgg

SEQ ID NO: 1838478 - DNA, 25 bp, Homo sapien
aagctcctcgccgttgcgaatggcc

SEQ ID NO: 1838479 - DNA, 25 bp, Homo sapien
ctacaggtggcgcaggatgatgcgg

SEQ ID NO: 1838480 - DNA, 25 bp, Homo sapien
gatgatgcgggtcttcttgtcgcgg

SEQ ID NO: 1838481 - DNA, 25 bp, Homo sapien
tctcggcggtcaggtgctccagcac

SEQ ID NO: 1838482 - DNA, 25 bp, Homo sapien
tcgcgggccgggttgccagccagct

SEQ ID NO: 1838483 - DNA, 25 bp, Homo sapien
ggccgccaggtacacctgcgctctg

SEQ ID NO: 1838484 - DNA, 25 bp, Homo sapien
gcctttgcggagcagacggcgctgg

SEQ ID NO: 1838485 - DNA, 25 bp, Homo sapien
ttgcggagcagacggcgctggagcc

SEQ ID NO: 1838486 - DNA, 25 bp, Homo sapien
ctctggccccgacacgctcggcata

SEQ ID NO: 1838487 - DNA, 25 bp, Homo sapien
gcctcgccaccctgcttcccacaac

SEQ ID NO: 1838488 - DNA, 25 bp, Homo sapien
cttcagcgccagcctcgccaccctg

SEQ ID NO: 1838489 - DNA, 25 bp, Homo sapien
ttcagcgccagcctcgccaccctgc

SEQ ID NO: 1838490 - DNA, 25 bp, Homo sapien
ccagcctcgccaccctgcttcccac

SEQ ID NO: 1838491 - DNA, 25 bp, Homo sapien
caggctccaacattaacacagggct

SEQ ID NO: 1838492 - DNA, 25 bp, Homo sapien
gctatgggcctacctgtcacatgga

SEQ ID NO: 1838493 - DNA, 25 bp, Homo sapien
gcttaagtgccaatgtctgtgctat

SEQ ID NO: 1838494 - DNA, 25 bp, Homo sapien
tcatcttgtagctaccacctctatg

SEQ ID NO: 1838495 - DNA, 25 bp, Homo sapien
gtatccatcctgagtaatgttcttt

SEQ ID NO: 1838496 - DNA, 25 bp, Homo sapien
tgtatccatcctgagtaatgttctt

SEQ ID NO: 1838497 - DNA, 25 bp, Homo sapien
tatccatcctgagtaatgttctttt

SEQ ID NO: 1838498 - DNA, 25 bp, Homo sapien
tatctttttctacgctcaaaaggaa

SEQ ID NO: 1838499 - DNA, 25 bp, Homo sapien
taaaggatatgtcttaagtgttagg

SEQ ID NO: 1838500 - DNA, 25 bp, Homo sapien
gtgttaggagccaaattaattcctg

SEQ ID NO: 1838501 - DNA, 25 bp, Homo sapien
cctgttagagttgacgctgcctatc

SEQ ID NO: 1838502 - DNA, 25 bp, Homo sapien
tatggctacaattccgagcagatct

SEQ ID NO: 1838503 - DNA, 25 bp, Homo sapien
ccgatcggtgctgagatctgtaaca

SEQ ID NO: 1838504 - DNA, 25 bp, Homo sapien
tatagctttacagttccgatcggtg

SEQ ID NO: 1838505 - DNA, 25 bp, Homo sapien
ttaatctcttgcaattgggctagga

SEQ ID NO: 1838506 - DNA, 25 bp, Homo sapien
gagtgggtcccaagtatcagtgtct

SEQ ID NO: 1838507 - DNA, 25 bp, Homo sapien
ttagtagtatctgggttccacccca

SEQ ID NO: 1838508 - DNA, 25 bp, Homo sapien
gggaagactaacacacagccagagt

SEQ ID NO: 1838509 - DNA, 25 bp, Homo sapien
cgggcgcatgctagaaacctctaag

SEQ ID NO: 1838510 - DNA, 25 bp, Homo sapien
gaaaaagacattcctccaaccagac

SEQ ID NO: 1838511 - DNA, 25 bp, Homo sapien
aagttctgcttgtccaaacgtgagg

SEQ ID NO: 1838512 - DNA, 25 bp, Homo sapien
tcagaggcgggtaagggtcctctct

SEQ ID NO: 1838513 - DNA, 25 bp, Homo sapien
tgaggtaaaagaccaggccaaacat

SEQ ID NO: 1838514 - DNA, 25 bp, Homo sapien
gactgatgaggaatccagtggcagt

SEQ ID NO: 1838515 - DNA, 25 bp, Homo sapien
ctgcgatgagcccaaatccccttga

SEQ ID NO: 1838516 - DNA, 25 bp, Homo sapien
agagatgattcctgcgatgagccca

SEQ ID NO: 1838517 - DNA, 25 bp, Homo sapien
gattcctgcgatgagcccaaatccc

SEQ ID NO: 1838518 - DNA, 25 bp, Homo sapien
caatctctgttagggaagcttggga

SEQ ID NO: 1838519 - DNA, 25 bp, Homo sapien
ggagcaatgcagtctctctgggaac

SEQ ID NO: 1838520 - DNA, 25 bp, Homo sapien
gtagctaatatgaacaacaccatgg

SEQ ID NO: 1838521 - DNA, 25 bp, Homo sapien
agggcctacctaatataactgtgag

SEQ ID NO: 1838522 - DNA, 25 bp, Homo sapien
actgaggtctaacacctctggaggg

SEQ ID NO: 1838523 - DNA, 25 bp, Homo sapien
aatgtcagtaacattaaagagtttc

SEQ ID NO: 1838524 - DNA, 25 bp, Homo sapien
tttgtagttatttgtcattctgcca

SEQ ID NO: 1838525 - DNA, 25 bp, Homo sapien
gtttcacggcgaccactgaggtcta

SEQ ID NO: 1838526 - DNA, 25 bp, Homo sapien
gagtcacataggttactggtcccag

SEQ ID NO: 1838527 - DNA, 25 bp, Homo sapien
ggcagggccacagcacatattgatg

SEQ ID NO: 1838528 - DNA, 25 bp, Homo sapien
tatcacgtaactggaggccacaaag

SEQ ID NO: 1838529 - DNA, 25 bp, Homo sapien
tggtcccaggaataagtatcagcaa

SEQ ID NO: 1838530 - DNA, 25 bp, Homo sapien
ggcaatgaggacatgctgtcaggga

SEQ ID NO: 1838531 - DNA, 25 bp, Homo sapien
gggcaatgaggacatgctgtcaggg

SEQ ID NO: 1838532 - DNA, 25 bp, Homo sapien
tgggcaatgaggacatgctgtcagg

SEQ ID NO: 1838533 - DNA, 25 bp, Homo sapien
ctgggcaatgaggacatgctgtcag

SEQ ID NO: 1838534 - DNA, 25 bp, Homo sapien
aatgggcccacacgcttatccttac

SEQ ID NO: 1838535 - DNA, 25 bp, Homo sapien
taaatgggcccacacgcttatcctt

SEQ ID NO: 1838536 - DNA, 25 bp, Homo sapien
tgcagaaaagggattggttaaatgg

SEQ ID NO: 1838537 - DNA, 25 bp, Homo sapien
tgtgcagaaaagggattggttaaat

SEQ ID NO: 1838538 - DNA, 25 bp, Homo sapien
gagatgaaaagagctttcgcacagt

SEQ ID NO: 1838539 - DNA, 25 bp, Homo sapien
cagcagcaataaaaggcagggagga

SEQ ID NO: 1838540 - DNA, 25 bp, Homo sapien
cgcacagtgatcaatctgagaagat

SEQ ID NO: 1838541 - DNA, 25 bp, Homo sapien
tctgagaagattcctggacaaaagg

SEQ ID NO: 1838542 - DNA, 25 bp, Homo sapien
tatacagagtagttatagagatacg

SEQ ID NO: 1838543 - DNA, 25 bp, Homo sapien
cttacccccatgatactgtgggttg

SEQ ID NO: 1838544 - DNA, 25 bp, Homo sapien
tttgtcagttacacagaccagccat

SEQ ID NO: 1838545 - DNA, 25 bp, Homo sapien
gatacgttagcaccaaaatttgtca

SEQ ID NO: 1838546 - DNA, 25 bp, Homo sapien
tatcacttagtattgtgcaacctgg

SEQ ID NO: 1838547 - DNA, 25 bp, Homo sapien
tcagctggtgtggtagtatagcata

SEQ ID NO: 1838548 - DNA, 25 bp, Homo sapien
gttaagaatatggatgctgcagcag

SEQ ID NO: 1838549 - DNA, 25 bp, Homo sapien
gggcaagttatctcacctctaagtg

SEQ ID NO: 1838550 - DNA, 25 bp, Homo sapien
ggcatgtgaccatcgcctttatggg

SEQ ID NO: 1838551 - DNA, 25 bp, Homo sapien
ggtgcacaaccagaaatggctgaaa

SEQ ID NO: 1838552 - DNA, 25 bp, Homo sapien
ggaaaatggcccaaagtggtaggca

SEQ ID NO: 1838553 - DNA, 25 bp, Homo sapien
tgttaacatggagcagagtactgat

SEQ ID NO: 1838554 - DNA, 25 bp, Homo sapien
cctaacacttatgcacgggtgatgc

SEQ ID NO: 1838555 - DNA, 25 bp, Homo sapien
catcataaatcactgtgaaccatag

SEQ ID NO: 1838556 - DNA, 25 bp, Homo sapien
tgctccttttccctaacacttatgc

SEQ ID NO: 1838557 - DNA, 25 bp, Homo sapien
cactgtgaaccataggagacagcag

SEQ ID NO: 1838558 - DNA, 25 bp, Homo sapien
ggcctgtgagattagtccccccaca

SEQ ID NO: 1838559 - DNA, 25 bp, Homo sapien
tgtgagattagtccccccacacaga

SEQ ID NO: 1838560 - DNA, 25 bp, Homo sapien
aaggcctgtgagattagtcccccca

SEQ ID NO: 1838561 - DNA, 25 bp, Homo sapien
gaagataaaaggccagctcaaggcc

SEQ ID NO: 1838562 - DNA, 25 bp, Homo sapien
ctgatcctgcaatggtggtgagctt

SEQ ID NO: 1838563 - DNA, 25 bp, Homo sapien
tgatcctgcaatggtggtgagcttg

SEQ ID NO: 1838564 - DNA, 25 bp, Homo sapien
cactttgcccaaatagtaaactgac

SEQ ID NO: 1838565 - DNA, 25 bp, Homo sapien
cccactttgcccaaatagtaaactg

SEQ ID NO: 1838566 - DNA, 25 bp, Homo sapien
tcaagtggaggagcccactttgccc

SEQ ID NO: 1838567 - DNA, 25 bp, Homo sapien
cttcgttcaagtggaggagcccact

SEQ ID NO: 1838568 - DNA, 25 bp, Homo sapien
cattaagacctttgatattttgtag

SEQ ID NO: 1838569 - DNA, 25 bp, Homo sapien
gaaaatcattaagacctttgatatt

SEQ ID NO: 1838570 - DNA, 25 bp, Homo sapien
tggatcccaccaagaatgagaaagt

SEQ ID NO: 1838571 - DNA, 25 bp, Homo sapien
tctggatcccaccaagaatgagaaa

SEQ ID NO: 1838572 - DNA, 25 bp, Homo sapien
cctggactgtccgaaccatgatgac

SEQ ID NO: 1838573 - DNA, 25 bp, Homo sapien
aatcactccgaagtcagcagccagt

SEQ ID NO: 1838574 - DNA, 25 bp, Homo sapien
ctgggctccattgatacacagaggc

SEQ ID NO: 1838575 - DNA, 25 bp, Homo sapien
gatcagagtcagtattatcccatag

SEQ ID NO: 1838576 - DNA, 25 bp, Homo sapien
gaggcattagatagaccttgctgct

SEQ ID NO: 1838577 - DNA, 25 bp, Homo sapien
cacacgctgcgttatcatggtgaag

SEQ ID NO: 1838578 - DNA, 25 bp, Homo sapien
gatgatcgcaatgctcagactcaca

SEQ ID NO: 1838579 - DNA, 25 bp, Homo sapien
ggtgttcaccatggcgatgatcgca

SEQ ID NO: 1838580 - DNA, 25 bp, Homo sapien
cagcccatagcgtaatgaacagaaa

SEQ ID NO: 1838581 - DNA, 25 bp, Homo sapien
taagagccagcccatagcgtaatga

SEQ ID NO: 1838582 - DNA, 25 bp, Homo sapien
gataagagccagcccatagcgtaat

SEQ ID NO: 1838583 - DNA, 25 bp, Homo sapien
gagccagcccatagcgtaatgaaca

SEQ ID NO: 1838584 - DNA, 25 bp, Homo sapien
tttcctggtggcaggcttcccgtcc

SEQ ID NO: 1838585 - DNA, 25 bp, Homo sapien
ttcctggtggcaggcttcccgtcca

SEQ ID NO: 1838586 - DNA, 25 bp, Homo sapien
tcctggtggcaggcttcccgtccat

SEQ ID NO: 1838587 - DNA, 25 bp, Homo sapien
gctttgtggtggagtttccctgtgc

SEQ ID NO: 1838588 - DNA, 25 bp, Homo sapien
gaatctcttttactacgacagtctt

SEQ ID NO: 1838589 - DNA, 25 bp, Homo sapien
ccctgaatctcttttactacgacag

SEQ ID NO: 1838590 - DNA, 25 bp, Homo sapien
gaaatggtaccacgctttgtggtgg

SEQ ID NO: 1838591 - DNA, 25 bp, Homo sapien
tattttaagccctagactataaggc

SEQ ID NO: 1838592 - DNA, 25 bp, Homo sapien
tgtccattggtaccagtggcttctc

SEQ ID NO: 1838593 - DNA, 25 bp, Homo sapien
taggcaatattaccagatggagatc

SEQ ID NO: 1838594 - DNA, 25 bp, Homo sapien
tagggtcttcattgaatcagttatc

SEQ ID NO: 1838595 - DNA, 25 bp, Homo sapien
tgaacatgtctcttgagataggtcc

SEQ ID NO: 1838596 - DNA, 25 bp, Homo sapien
ctgcaaactctttatgttgcaatca

SEQ ID NO: 1838597 - DNA, 25 bp, Homo sapien
tctttatgttgcaatcactctgaac

SEQ ID NO: 1838598 - DNA, 25 bp, Homo sapien
tcactctgaacatgtctcttgagat

SEQ ID NO: 1838599 - DNA, 25 bp, Homo sapien
tattaaccagtgttggttgttgttc

SEQ ID NO: 1838600 - DNA, 25 bp, Homo sapien
cttattaaccagtgttggttgttgt

SEQ ID NO: 1838601 - DNA, 25 bp, Homo sapien
tttaccacagtggagcatctggctc

SEQ ID NO: 1838602 - DNA, 25 bp, Homo sapien
ttaaactgtagttggctgggattcc

SEQ ID NO: 1838603 - DNA, 25 bp, Homo sapien
cacttagaaaacaggatcactccag

SEQ ID NO: 1838604 - DNA, 25 bp, Homo sapien
ttacctagaaaaagcatcgagtggg

SEQ ID NO: 1838605 - DNA, 25 bp, Homo sapien
gcagttagtgtgactctggatccag

SEQ ID NO: 1838606 - DNA, 25 bp, Homo sapien
agtgactcgtggatacacccaggag

SEQ ID NO: 1838607 - DNA, 25 bp, Homo sapien
cacctcaggaagacgttactttgaa

SEQ ID NO: 1838608 - DNA, 25 bp, Homo sapien
cactggcatgaagcaagagcctcag

SEQ ID NO: 1838609 - DNA, 25 bp, Homo sapien
gggcaaagcaagataatagtgatga

SEQ ID NO: 1838610 - DNA, 25 bp, Homo sapien
cgtctttaatgggtcagggctttga

SEQ ID NO: 1838611 - DNA, 25 bp, Homo sapien
taccacagatggttaacctggactg

SEQ ID NO: 1838612 - DNA, 25 bp, Homo sapien
gctttgatttccaagggtcttcagg

SEQ ID NO: 1838613 - DNA, 25 bp, Homo sapien
ctgccatttgaactcatgtagggaa

SEQ ID NO: 1838614 - DNA, 25 bp, Homo sapien
gtcagaaggtctgcgttctcctagt

SEQ ID NO: 1838615 - DNA, 25 bp, Homo sapien
cgttctcctagtttgtttgctgcca

SEQ ID NO: 1838616 - DNA, 25 bp, Homo sapien
gaaagaaagctgcaattatccgcca

SEQ ID NO: 1838617 - DNA, 25 bp, Homo sapien
ccaatggcctaactgacccaagaag

SEQ ID NO: 1838618 - DNA, 25 bp, Homo sapien
gaaaccaatggcctaactgacccaa

SEQ ID NO: 1838619 - DNA, 25 bp, Homo sapien
gaaattcagacacttacagagcagc

SEQ ID NO: 1838620 - DNA, 25 bp, Homo sapien
gcctgggcaaggctcccatctctaa

SEQ ID NO: 1838621 - DNA, 25 bp, Homo sapien
catcatgaagactcgatctgctagg

SEQ ID NO: 1838622 - DNA, 25 bp, Homo sapien
cagtcttaggttgggctgctgaaac

SEQ ID NO: 1838623 - DNA, 25 bp, Homo sapien
tagacatccagcaccacagtagtac

SEQ ID NO: 1838624 - DNA, 25 bp, Homo sapien
caaagagagagctagctttctggtc

SEQ ID NO: 1838625 - DNA, 25 bp, Homo sapien
aaggcggtttcagctctggagtgac

SEQ ID NO: 1838626 - DNA, 25 bp, Homo sapien
taaccagataatacagatgcccggc

SEQ ID NO: 1838627 - DNA, 25 bp, Homo sapien
tggagtgacactgaacgtacttctc

SEQ ID NO: 1838628 - DNA, 25 bp, Homo sapien
tcttccagggatgtcacgaggtgtc

SEQ ID NO: 1838629 - DNA, 25 bp, Homo sapien
ccaatctagacataaatgctggccc

SEQ ID NO: 1838630 - DNA, 25 bp, Homo sapien
aatcatctgacttgtacatcattgt

SEQ ID NO: 1838631 - DNA, 25 bp, Homo sapien
taatatcccaaccaacccaatctag

SEQ ID NO: 1838632 - DNA, 25 bp, Homo sapien
tatgctcaagatgttgtattggttc

SEQ ID NO: 1838633 - DNA, 25 bp, Homo sapien
caagcatagtgatagcaatgcacct

SEQ ID NO: 1838634 - DNA, 25 bp, Homo sapien
tatttgctacagtcgtattcctaga

SEQ ID NO: 1838635 - DNA, 25 bp, Homo sapien
gctccttggattagagaccatcctg

SEQ ID NO: 1838636 - DNA, 25 bp, Homo sapien
aagtcctacttgtcagtgtctatgg

SEQ ID NO: 1838637 - DNA, 25 bp, Homo sapien
gcttcagttgtaagagaaccctttc

SEQ ID NO: 1838638 - DNA, 25 bp, Homo sapien
agagaaccctttctactctttgctg

SEQ ID NO: 1838639 - DNA, 25 bp, Homo sapien
acacatttgtcttccatgggcttca

SEQ ID NO: 1838640 - DNA, 25 bp, Homo sapien
cacatttgtcttccatgggcttcag

SEQ ID NO: 1838641 - DNA, 25 bp, Homo sapien
taagtccttaggtagctatgccact

SEQ ID NO: 1838642 - DNA, 25 bp, Homo sapien
gaatagggttgtactcagatatacc

SEQ ID NO: 1838643 - DNA, 25 bp, Homo sapien
ctgtgtggttattaggcaaactcaa

SEQ ID NO: 1838644 - DNA, 25 bp, Homo sapien
tatgccacttacataatgaactaga

SEQ ID NO: 1838645 - DNA, 25 bp, Homo sapien
ggccagataatcagctgaagcttta

SEQ ID NO: 1838646 - DNA, 25 bp, Homo sapien
ggatcaacccctcttgcatatgcac

SEQ ID NO: 1838647 - DNA, 25 bp, Homo sapien
gctgaagctttacattctgtccctt

SEQ ID NO: 1838648 - DNA, 25 bp, Homo sapien
tcttgcatatgcacatccgcagtgc

SEQ ID NO: 1838649 - DNA, 25 bp, Homo sapien
taggtgcactaggtgcagttagaaa

SEQ ID NO: 1838650 - DNA, 25 bp, Homo sapien
gcattctggagtagactctaggtgc

SEQ ID NO: 1838651 - DNA, 25 bp, Homo sapien
cactaggtgcagttagaaaaagttc

SEQ ID NO: 1838652 - DNA, 25 bp, Homo sapien
tagactctaggtgcactaggtgcag

SEQ ID NO: 1838653 - DNA, 25 bp, Homo sapien
tccggacactgaggccacggacttg

SEQ ID NO: 1838654 - DNA, 25 bp, Homo sapien
atccggacactgaggccacggactt

SEQ ID NO: 1838655 - DNA, 25 bp, Homo sapien
tactagaagaaacttctaactgaat

SEQ ID NO: 1838656 - DNA, 25 bp, Homo sapien
gttactagaagaaacttctaactga

SEQ ID NO: 1838657 - DNA, 25 bp, Homo sapien
taggtggctcttaaaagagccgttg

SEQ ID NO: 1838658 - DNA, 25 bp, Homo sapien
aggtggctcttaaaagagccgttgg

SEQ ID NO: 1838659 - DNA, 25 bp, Homo sapien
tagctactttcttgggctttacagt

SEQ ID NO: 1838660 - DNA, 25 bp, Homo sapien
ggtttggcagtctttggcttcgtca

SEQ ID NO: 1838661 - DNA, 25 bp, Homo sapien
tttacagccttagctttagcagggc

SEQ ID NO: 1838662 - DNA, 25 bp, Homo sapien
gatttccttgttgccgcaggctttt

SEQ ID NO: 1838663 - DNA, 25 bp, Homo sapien
tttagatgcacccgttgccttagtt

SEQ ID NO: 1838664 - DNA, 25 bp, Homo sapien
tagatgcacccgttgccttagtttt

SEQ ID NO: 1838665 - DNA, 25 bp, Homo sapien
ttgacgctctttttgctagcccccg

SEQ ID NO: 1838666 - DNA, 25 bp, Homo sapien
tgctagcccccgtggcctttttgag

SEQ ID NO: 1838667 - DNA, 25 bp, Homo sapien
tttaagagctgccaacgacacacca

SEQ ID NO: 1838668 - DNA, 25 bp, Homo sapien
cacgatcagctctgacacggaaggg

SEQ ID NO: 1838669 - DNA, 25 bp, Homo sapien
cacgctccttagaggaggaagcagc

SEQ ID NO: 1838670 - DNA, 25 bp, Homo sapien
gaggctccggtaccctttgtctgca

SEQ ID NO: 1838671 - DNA, 25 bp, Homo sapien
ggtttcgcccagtctcagaaggcag

SEQ ID NO: 1838672 - DNA, 25 bp, Homo sapien
tgcgccgtgattggtgcccgtcagt

SEQ ID NO: 1838673 - DNA, 25 bp, Homo sapien
ggccccaacgcagcctatttatagg

SEQ ID NO: 1838674 - DNA, 25 bp, Homo sapien
taaagtggtataaacctgacgaagc

SEQ ID NO: 1838675 - DNA, 25 bp, Homo sapien
tatgaaaaccagatgtagaagagga

SEQ ID NO: 1838676 - DNA, 25 bp, Homo sapien
ggttatgaaaaccagatgtagaaga

SEQ ID NO: 1838677 - DNA, 25 bp, Homo sapien
gggaattataatacctttggaatca

SEQ ID NO: 1838678 - DNA, 25 bp, Homo sapien
tacctttggaatcaatgccttgttt

SEQ ID NO: 1838679 - DNA, 25 bp, Homo sapien
tctctgacggtccaagcaaaggctc

SEQ ID NO: 1838680 - DNA, 25 bp, Homo sapien
caaacagttggccactaaggcagcc

SEQ ID NO: 1838681 - DNA, 25 bp, Homo sapien
taaactacctttccagcgcctggtg

SEQ ID NO: 1838682 - DNA, 25 bp, Homo sapien
gaagtctactggtggcaaggcgcca

SEQ ID NO: 1838683 - DNA, 25 bp, Homo sapien
gggacgcaccctttatggctttggc

SEQ ID NO: 1838684 - DNA, 25 bp, Homo sapien
ctctggtctgatctacgaggagact

SEQ ID NO: 1838685 - DNA, 25 bp, Homo sapien
ggagaacgtgatccgtgacgctgtc

SEQ ID NO: 1838686 - DNA, 25 bp, Homo sapien
gctcaaggtgtttttggagaacgtg

SEQ ID NO: 1838687 - DNA, 25 bp, Homo sapien
tacagcttttgctgacgttaagtca

SEQ ID NO: 1838688 - DNA, 25 bp, Homo sapien
gtaaaggcttctggcgctaccggca

SEQ ID NO: 1838689 - DNA, 25 bp, Homo sapien
aaatggaagtaaaggcttctggcgc

SEQ ID NO: 1838690 - DNA, 25 bp, Homo sapien
aaaagtacagcttttgctgacgtta

SEQ ID NO: 1838691 - DNA, 25 bp, Homo sapien
taaagccattgagatgttaccatcc

SEQ ID NO: 1838692 - DNA, 25 bp, Homo sapien
catccgaaagaatacaatcacagct

SEQ ID NO: 1838693 - DNA, 25 bp, Homo sapien
gagatgttaccatccgaaagaatac

SEQ ID NO: 1838694 - DNA, 25 bp, Homo sapien
aatagccgagtaaagccattgagat

SEQ ID NO: 1838695 - DNA, 25 bp, Homo sapien
gcgtccttgacgcttgagcgcgtaa

SEQ ID NO: 1838696 - DNA, 25 bp, Homo sapien
gcttggcgtgctccgtgtaggtcac

SEQ ID NO: 1838697 - DNA, 25 bp, Homo sapien
tgcgcttggcgtgctccgtgtaggt

SEQ ID NO: 1838698 - DNA, 25 bp, Homo sapien
cgcttggcgtgctccgtgtaggtca

SEQ ID NO: 1838699 - DNA, 25 bp, Homo sapien
cttgcgcttggcgtgctccgtgtag

SEQ ID NO: 1838700 - DNA, 25 bp, Homo sapien
gatgccttggatgttatcccgcagc

SEQ ID NO: 1838701 - DNA, 25 bp, Homo sapien
caccacgcctagcaaggcgccgaat

SEQ ID NO: 1838702 - DNA, 25 bp, Homo sapien
ccgaatggccggtttggtgatgcct

SEQ ID NO: 1838703 - DNA, 25 bp, Homo sapien
cgagtctcctcataaatcaaaccgg

SEQ ID NO: 1838704 - DNA, 25 bp, Homo sapien
cttttcggtgacgcttggcacctcc

SEQ ID NO: 1838705 - DNA, 25 bp, Homo sapien
tttcggtgacgcttggcacctccct

SEQ ID NO: 1838706 - DNA, 25 bp, Homo sapien
tcggtgacgcttggcacctccctta

SEQ ID NO: 1838707 - DNA, 25 bp, Homo sapien
ttttcggtgacgcttggcacctccc

SEQ ID NO: 1838708 - DNA, 25 bp, Homo sapien
accaggtacgcgaaaagaaagcaag

SEQ ID NO: 1838709 - DNA, 25 bp, Homo sapien
tttaagactgatgaaaaagtgactt

SEQ ID NO: 1838710 - DNA, 25 bp, Homo sapien
tccgagctgtctgtttagtacgagc

SEQ ID NO: 1838711 - DNA, 25 bp, Homo sapien
gcttccgaatcagcaactcggtcga

SEQ ID NO: 1838712 - DNA, 25 bp, Homo sapien
taccgccggtggatttccgagctgt

SEQ ID NO: 1838713 - DNA, 25 bp, Homo sapien
agatcggtcttgaagtcttgggcga

SEQ ID NO: 1838714 - DNA, 25 bp, Homo sapien
cacagaaaagcttgcctgcagagac

SEQ ID NO: 1838715 - DNA, 25 bp, Homo sapien
cagaaaagcttgcctgcagagacgt

SEQ ID NO: 1838716 - DNA, 25 bp, Homo sapien
aaaccacagaaaagcttgcctgcag

SEQ ID NO: 1838717 - DNA, 25 bp, Homo sapien
gcaaaaccacagaaaagcttgcctg

SEQ ID NO: 1838718 - DNA, 25 bp, Homo sapien
tttgctgttaggctgattttgtctg

SEQ ID NO: 1838719 - DNA, 25 bp, Homo sapien
cctttgctgttaggctgattttgtc

SEQ ID NO: 1838720 - DNA, 25 bp, Homo sapien
agcctttgctgttaggctgattttg

SEQ ID NO: 1838721 - DNA, 25 bp, Homo sapien
gcctttgctgttaggctgattttgt

SEQ ID NO: 1838722 - DNA, 25 bp, Homo sapien
tcactttcccttggccttatgatgg

SEQ ID NO: 1838723 - DNA, 25 bp, Homo sapien
ctttcccttggccttatgatggctc

SEQ ID NO: 1838724 - DNA, 25 bp, Homo sapien
ggctctcagttttcttaggcagcag

SEQ ID NO: 1838725 - DNA, 25 bp, Homo sapien
tcccttggccttatgatggctctca

SEQ ID NO: 1838726 - DNA, 25 bp, Homo sapien
gcctgaatattaggcaaaacgccac

SEQ ID NO: 1838727 - DNA, 25 bp, Homo sapien
agaagaccgagtcttagccttggcg

SEQ ID NO: 1838728 - DNA, 25 bp, Homo sapien
ggaaactgcaaacctgcacgagaag

SEQ ID NO: 1838729 - DNA, 25 bp, Homo sapien
gtcattgcggatggccaattgcagg

SEQ ID NO: 1838730 - DNA, 25 bp, Homo sapien
tttattaagctcctcgtcattgcgg

SEQ ID NO: 1838731 - DNA, 25 bp, Homo sapien
tctgataagggaaaatcgccacaag

SEQ ID NO: 1838732 - DNA, 25 bp, Homo sapien
gataagggaaaatcgccacaagaaa

SEQ ID NO: 1838733 - DNA, 25 bp, Homo sapien
aactacttctgataagggaaaatcg

SEQ ID NO: 1838734 - DNA, 25 bp, Homo sapien
tacttctgataagggaaaatcgcca

SEQ ID NO: 1838735 - DNA, 25 bp, Homo sapien
cctttgggtttggaagtgcttacat

SEQ ID NO: 1838736 - DNA, 25 bp, Homo sapien
tttgggtttggaagtgcttacataa

SEQ ID NO: 1838737 - DNA, 25 bp, Homo sapien
tgggtttggaagtgcttacataagc

SEQ ID NO: 1838738 - DNA, 25 bp, Homo sapien
ggtttggaagtgcttacataagcac

SEQ ID NO: 1838739 - DNA, 25 bp, Homo sapien
gccttagtgatagccttcttagaac

SEQ ID NO: 1838740 - DNA, 25 bp, Homo sapien
tgcgccttagtgatagccttcttag

SEQ ID NO: 1838741 - DNA, 25 bp, Homo sapien
cttagtgatagccttcttagaaccc

SEQ ID NO: 1838742 - DNA, 25 bp, Homo sapien
tagtgatagccttcttagaaccctt

SEQ ID NO: 1838743 - DNA, 25 bp, Homo sapien
tggccgccgagatcttagaactggt

SEQ ID NO: 1838744 - DNA, 25 bp, Homo sapien
atcttagaactggtgggcagcgcca

SEQ ID NO: 1838745 - DNA, 25 bp, Homo sapien
tacctggccgccgagatcttagaac

SEQ ID NO: 1838746 - DNA, 25 bp, Homo sapien
cgagatcttagaactggtgggcagc

SEQ ID NO: 1838747 - DNA, 25 bp, Homo sapien
tggctcgtacgaagcaaacagctcg

SEQ ID NO: 1838748 - DNA, 25 bp, Homo sapien
aaagatatccagctggcacgtcgca

SEQ ID NO: 1838749 - DNA, 25 bp, Homo sapien
tcttcgaagacaccaatctgtgcgc

SEQ ID NO: 1838750 - DNA, 25 bp, Homo sapien
cgaaatccgtcgctaccagaagtcc

SEQ ID NO: 1838751 - DNA, 25 bp, Homo sapien
catggaaagcgtccgaaatcccaga

SEQ ID NO: 1838752 - DNA, 25 bp, Homo sapien
tatgtggcacaaaaaactccctagg

SEQ ID NO: 1838753 - DNA, 25 bp, Homo sapien
taggacaaaggtacctgcacgcact

SEQ ID NO: 1838754 - DNA, 25 bp, Homo sapien
catgtactagaagaacggaccaacc

SEQ ID NO: 1838755 - DNA, 25 bp, Homo sapien
ctcttttattgagatcagtggtggc

SEQ ID NO: 1838756 - DNA, 25 bp, Homo sapien
tattgagatcagtggtggctctgaa

SEQ ID NO: 1838757 - DNA, 25 bp, Homo sapien
ttttattgagatcagtggtggctct

SEQ ID NO: 1838758 - DNA, 25 bp, Homo sapien
cagctcttttattgagatcagtggt

SEQ ID NO: 1838759 - DNA, 25 bp, Homo sapien
cttgggcgccgccttcttaggcttg

SEQ ID NO: 1838760 - DNA, 25 bp, Homo sapien
ccttgggcttcacagccttagcagc

SEQ ID NO: 1838761 - DNA, 25 bp, Homo sapien
cttgacaaccttgggcttagcggcc

SEQ ID NO: 1838762 - DNA, 25 bp, Homo sapien
ctatttcttcttgggcgccgccttc

SEQ ID NO: 1838763 - DNA, 25 bp, Homo sapien
tggctgccccaactggcttcttagg

SEQ ID NO: 1838764 - DNA, 25 bp, Homo sapien
gctttcttgggcttcgcaaccttgg

SEQ ID NO: 1838765 - DNA, 25 bp, Homo sapien
gctcttcttcggagttgcgccgcca

SEQ ID NO: 1838766 - DNA, 25 bp, Homo sapien
tttcttggttacagtggccgcggcc

SEQ ID NO: 1838767 - DNA, 25 bp, Homo sapien
gccaacgcttttttcagagcagcca

SEQ ID NO: 1838768 - DNA, 25 bp, Homo sapien
gggaccagacgccttacgaggcgta

SEQ ID NO: 1838769 - DNA, 25 bp, Homo sapien
agcagccagagaaactccgctacgc

SEQ ID NO: 1838770 - DNA, 25 bp, Homo sapien
tacgctctttagaggcggccacagc

SEQ ID NO: 1838771 - DNA, 25 bp, Homo sapien
aaactcgggtacaagtggcaaagcg

SEQ ID NO: 1838772 - DNA, 25 bp, Homo sapien
aactcgggtacaagtggcaaagcgc

SEQ ID NO: 1838773 - DNA, 25 bp, Homo sapien
atcaaaaactcgggtacaagtggca

SEQ ID NO: 1838774 - DNA, 25 bp, Homo sapien
tcaaaaactcgggtacaagtggcaa

SEQ ID NO: 1838775 - DNA, 25 bp, Homo sapien
ctgtatatatagagcgcaggcgcgc

SEQ ID NO: 1838776 - DNA, 25 bp, Homo sapien
tgctcccaagttgtgtttgttccac

SEQ ID NO: 1838777 - DNA, 25 bp, Homo sapien
gcaggcgcgctctgattggtgctct

SEQ ID NO: 1838778 - DNA, 25 bp, Homo sapien
attggtgctctggtcgcccgcctgg

SEQ ID NO: 1838779 - DNA, 25 bp, Homo sapien
cgctcctttgcccctgaaggttctt

SEQ ID NO: 1838780 - DNA, 25 bp, Homo sapien
ctgttcgctcctttgcccctgaagg

SEQ ID NO: 1838781 - DNA, 25 bp, Homo sapien
ttcgctcctttgcccctgaaggttc

SEQ ID NO: 1838782 - DNA, 25 bp, Homo sapien
tgttcgctcctttgcccctgaaggt

SEQ ID NO: 1838783 - DNA, 25 bp, Homo sapien
attgctgcttggccaccagcatcca

SEQ ID NO: 1838784 - DNA, 25 bp, Homo sapien
ttgctgcttggccaccagcatccat

SEQ ID NO: 1838785 - DNA, 25 bp, Homo sapien
tgccattgctgcttggccaccagca

SEQ ID NO: 1838786 - DNA, 25 bp, Homo sapien
ccattgctgcttggccaccagcatc

SEQ ID NO: 1838787 - DNA, 25 bp, Homo sapien
tatttctgcgaagtgaactcagcac

SEQ ID NO: 1838788 - DNA, 25 bp, Homo sapien
taaactgtgcatggtcttacctata

SEQ ID NO: 1838789 - DNA, 25 bp, Homo sapien
cagcacttctttacagagctcaagg

SEQ ID NO: 1838790 - DNA, 25 bp, Homo sapien
cactctgagggacagcgggcttatt

SEQ ID NO: 1838791 - DNA, 25 bp, Homo sapien
attcacaaaccatggtagtaaagag

SEQ ID NO: 1838792 - DNA, 25 bp, Homo sapien
caaaccatggtagtaaagagaaggg

SEQ ID NO: 1838793 - DNA, 25 bp, Homo sapien
ctggtggccataggtaaatgtacca

SEQ ID NO: 1838794 - DNA, 25 bp, Homo sapien
cacggtggtccggtgaccagagatg

SEQ ID NO: 1838795 - DNA, 25 bp, Homo sapien
tttgaattgctggaatcacaggcca

SEQ ID NO: 1838796 - DNA, 25 bp, Homo sapien
cagctatttgaattgctggaatcac

SEQ ID NO: 1838797 - DNA, 25 bp, Homo sapien
ctatttgaattgctggaatcacagg

SEQ ID NO: 1838798 - DNA, 25 bp, Homo sapien
ttgaattgctggaatcacaggccat

SEQ ID NO: 1838799 - DNA, 25 bp, Homo sapien
tgaaagcctaggatgcgttgacatc

SEQ ID NO: 1838800 - DNA, 25 bp, Homo sapien
tgcatgcattctggtatctcaagca

SEQ ID NO: 1838801 - DNA, 25 bp, Homo sapien
aaggccctgatttcaccacaatgca

SEQ ID NO: 1838802 - DNA, 25 bp, Homo sapien
tttccgggatggattgaaggccctg

SEQ ID NO: 1838803 - DNA, 25 bp, Homo sapien
ggtgtgcagtactgcgatcacggct

SEQ ID NO: 1838804 - DNA, 25 bp, Homo sapien
gtctcagtctgacaccaaggctggt

SEQ ID NO: 1838805 - DNA, 25 bp, Homo sapien
gacaccaaggctggtgtgcagtact

SEQ ID NO: 1838806 - DNA, 25 bp, Homo sapien
aaggctggtgtgcagtactgcgatc

SEQ ID NO: 1838807 - DNA, 25 bp, Homo sapien
taatagtgtttatgggagcgtgccc

SEQ ID NO: 1838808 - DNA, 25 bp, Homo sapien
caaaggtgtgccaatggtactgaca

SEQ ID NO: 1838809 - DNA, 25 bp, Homo sapien
gagacacaggtatgctacggaacca

SEQ ID NO: 1838810 - DNA, 25 bp, Homo sapien
caagcctaggaagtgcaagtcaaga

SEQ ID NO: 1838811 - DNA, 25 bp, Homo sapien
taagaatacgcggtctcctgagaac

SEQ ID NO: 1838812 - DNA, 25 bp, Homo sapien
catccagggcattacaaaaccggct

SEQ ID NO: 1838813 - DNA, 25 bp, Homo sapien
gaacgttattcgagacgccgtcacc

SEQ ID NO: 1838814 - DNA, 25 bp, Homo sapien
taagcgccatcgtaaggtgctccgg

SEQ ID NO: 1838815 - DNA, 25 bp, Homo sapien
tcctatttattgatcccttgaagtc

SEQ ID NO: 1838816 - DNA, 25 bp, Homo sapien
tatcagcaagttatgtttggatgcc

SEQ ID NO: 1838817 - DNA, 25 bp, Homo sapien
tattctgggacaccttgattcctat

SEQ ID NO: 1838818 - DNA, 25 bp, Homo sapien
aacaatagttacaatgacaccacag

SEQ ID NO: 1838819 - DNA, 25 bp, Homo sapien
gctcttacatgtaaaagcctcctct

SEQ ID NO: 1838820 - DNA, 25 bp, Homo sapien
tggacctctagatatacggcagtct

SEQ ID NO: 1838821 - DNA, 25 bp, Homo sapien
tgtaaaagcctcctctagtgcacca

SEQ ID NO: 1838822 - DNA, 25 bp, Homo sapien
tagtgcaccatcgagcttttcagga

SEQ ID NO: 1838823 - DNA, 25 bp, Homo sapien
gacaacgtctgactcgctgtcaccc

SEQ ID NO: 1838824 - DNA, 25 bp, Homo sapien
caagagaccgttttgtgtaagacaa

SEQ ID NO: 1838825 - DNA, 25 bp, Homo sapien
actgtatccttaaacgcctgggtgc

SEQ ID NO: 1838826 - DNA, 25 bp, Homo sapien
ggagcgtgccaaccatgcttgacta

SEQ ID NO: 1838827 - DNA, 25 bp, Homo sapien
tccaaattggcctcccggaaagctc

SEQ ID NO: 1838828 - DNA, 25 bp, Homo sapien
ccaaattggcctcccggaaagctct

SEQ ID NO: 1838829 - DNA, 25 bp, Homo sapien
caattttgacttcgaagcccttgcc

SEQ ID NO: 1838830 - DNA, 25 bp, Homo sapien
gcttctggtagatttaggaatcacc

SEQ ID NO: 1838831 - DNA, 25 bp, Homo sapien
taggagttgtcgctctcggcttctt

SEQ ID NO: 1838832 - DNA, 25 bp, Homo sapien
gaagcaccagtacccctggtttgca

SEQ ID NO: 1838833 - DNA, 25 bp, Homo sapien
gacttgcacttatcaagccagccgg

SEQ ID NO: 1838834 - DNA, 25 bp, Homo sapien
gaagctgcaggcacggtttcagaca

SEQ ID NO: 1838835 - DNA, 25 bp, Homo sapien
caacttggacacagagaggttcggc

SEQ ID NO: 1838836 - DNA, 25 bp, Homo sapien
gaaagggcctcggtgatcaacttgg

SEQ ID NO: 1838837 - DNA, 25 bp, Homo sapien
caagatgtaataaccagcgaaaagc

SEQ ID NO: 1838838 - DNA, 25 bp, Homo sapien
gagaaacgcaagatgtaataaccag

SEQ ID NO: 1838839 - DNA, 25 bp, Homo sapien
aacgcaagatgtaataaccagcgaa

SEQ ID NO: 1838840 - DNA, 25 bp, Homo sapien
acagagaaacgcaagatgtaataac

SEQ ID NO: 1838841 - DNA, 25 bp, Homo sapien
tgcattagatagctaaaatggtacc

SEQ ID NO: 1838842 - DNA, 25 bp, Homo sapien
gcaccgtgtcactcagtttggaaaa

SEQ ID NO: 1838843 - DNA, 25 bp, Homo sapien
gttgacagatacgttactccattgc

SEQ ID NO: 1838844 - DNA, 25 bp, Homo sapien
tagtatatagtgcttcttctgtgcc

SEQ ID NO: 1838845 - DNA, 25 bp, Homo sapien
tctctaacttctaagtagcaaagtc

SEQ ID NO: 1838846 - DNA, 25 bp, Homo sapien
ctctaacttctaagtagcaaagtca

SEQ ID NO: 1838847 - DNA, 25 bp, Homo sapien
atctctaacttctaagtagcaaagt

SEQ ID NO: 1838848 - DNA, 25 bp, Homo sapien
tctaacttctaagtagcaaagtcat

SEQ ID NO: 1838849 - DNA, 25 bp, Homo sapien
tagcagggtttcacttgacagcact

SEQ ID NO: 1838850 - DNA, 25 bp, Homo sapien
gacagcactcttaccatactcactt

SEQ ID NO: 1838851 - DNA, 25 bp, Homo sapien
catgttcagtgagattagcagggtt

SEQ ID NO: 1838852 - DNA, 25 bp, Homo sapien
tccggtgataagaaaagtatacagc

SEQ ID NO: 1838853 - DNA, 25 bp, Homo sapien
tcagtatatgtgcagagctccctct

SEQ ID NO: 1838854 - DNA, 25 bp, Homo sapien
tgcatgggaacagctcaactgtgca

SEQ ID NO: 1838855 - DNA, 25 bp, Homo sapien
gatgcatggtcaatcgaatttccag

SEQ ID NO: 1838856 - DNA, 25 bp, Homo sapien
cctggccttggattgaggagaacaa

SEQ ID NO: 1838857 - DNA, 25 bp, Homo sapien
agagtcctccgcagaaaaggcacct

SEQ ID NO: 1838858 - DNA, 25 bp, Homo sapien
gcagtttagtatcccttcagagtcc

SEQ ID NO: 1838859 - DNA, 25 bp, Homo sapien
ggtcatggctaacaagaaacatggg

SEQ ID NO: 1838860 - DNA, 25 bp, Homo sapien
ggaagaatgaccctcactaatagag

SEQ ID NO: 1838861 - DNA, 25 bp, Homo sapien
gtgattctctagaaacaattagtga

SEQ ID NO: 1838862 - DNA, 25 bp, Homo sapien
gcatactatttacttgtgctcaagg

SEQ ID NO: 1838863 - DNA, 25 bp, Homo sapien
tcaaggtatatcaagcaatggactg

SEQ ID NO: 1838864 - DNA, 25 bp, Homo sapien
tagaaacacttaagattggctgtgc

SEQ ID NO: 1838865 - DNA, 25 bp, Homo sapien
cacgatttctggcaccagagttttt

SEQ ID NO: 1838866 - DNA, 25 bp, Homo sapien
tgttaggtaggccatgtcttcacga

SEQ ID NO: 1838867 - DNA, 25 bp, Homo sapien
caacatttccatgttaggtaggcca

SEQ ID NO: 1838868 - DNA, 25 bp, Homo sapien
gagcaagtctaaccatgtgagtttg

SEQ ID NO: 1838869 - DNA, 25 bp, Homo sapien
tgtcttagatgaataggtctcaaag

SEQ ID NO: 1838870 - DNA, 25 bp, Homo sapien
ttggcttgtcttagatgaataggtc

SEQ ID NO: 1838871 - DNA, 25 bp, Homo sapien
ggtctcaaagatcagtttggtcaaa

SEQ ID NO: 1838872 - DNA, 25 bp, Homo sapien
caaagatcagtttggtcaactttag

SEQ ID NO: 1838873 - DNA, 25 bp, Homo sapien
tgaagaggaaacttcctacttccag

SEQ ID NO: 1838874 - DNA, 25 bp, Homo sapien
gggaagcacatatccatctgctctg

SEQ ID NO: 1838875 - DNA, 25 bp, Homo sapien
ggaggttccagcattgttataatgt

SEQ ID NO: 1838876 - DNA, 25 bp, Homo sapien
gagattccaaatgtgtttacactgg

SEQ ID NO: 1838877 - DNA, 25 bp, Homo sapien
taaaggctcaaggtagtcattatct

SEQ ID NO: 1838878 - DNA, 25 bp, Homo sapien
aggctcaaggtagtcattatctcga

SEQ ID NO: 1838879 - DNA, 25 bp, Homo sapien
aataagtaaaggctcaaggtagtca

SEQ ID NO: 1838880 - DNA, 25 bp, Homo sapien
ggtagtcattatctcgaatgcttac

SEQ ID NO: 1838881 - DNA, 25 bp, Homo sapien
ggcaattgtgttcccgcataggcat

SEQ ID NO: 1838882 - DNA, 25 bp, Homo sapien
tatagtacttgatagagtcagagct

SEQ ID NO: 1838883 - DNA, 25 bp, Homo sapien
gagctgtttggattaaccatagccc

SEQ ID NO: 1838884 - DNA, 25 bp, Homo sapien
accatagcccttaaacaaagcaggc

SEQ ID NO: 1838885 - DNA, 25 bp, Homo sapien
gtcatccaaaacctgcatggtcctc

SEQ ID NO: 1838886 - DNA, 25 bp, Homo sapien
tctacgcccacacgtatacagtacg

SEQ ID NO: 1838887 - DNA, 25 bp, Homo sapien
gacgaaaacagaggcagtcatccaa

SEQ ID NO: 1838888 - DNA, 25 bp, Homo sapien
cgtatacagtacgtgatttacaaat

SEQ ID NO: 1838889 - DNA, 25 bp, Homo sapien
tacactgtgaactcagtacttaagc

SEQ ID NO: 1838890 - DNA, 25 bp, Homo sapien
tacttaagctcacacattgaatcct

SEQ ID NO: 1838891 - DNA, 25 bp, Homo sapien
catgtaaccagtacaactagtggaa

SEQ ID NO: 1838892 - DNA, 25 bp, Homo sapien
aagtggcgaaagcaacagtatctat

SEQ ID NO: 1838893 - DNA, 25 bp, Homo sapien
taagaccactaatgaaactcacagt

SEQ ID NO: 1838894 - DNA, 25 bp, Homo sapien
taagtctttatgtaagccaactaaa

SEQ ID NO: 1838895 - DNA, 25 bp, Homo sapien
tcccttaagtggataatttcacaat

SEQ ID NO: 1838896 - DNA, 25 bp, Homo sapien
taattagaacttaaagaggtagcac

SEQ ID NO: 1838897 - DNA, 25 bp, Homo sapien
caaaactgacgcatattaggttaaa

SEQ ID NO: 1838898 - DNA, 25 bp, Homo sapien
gggcagttggaaacccaggagacac

SEQ ID NO: 1838899 - DNA, 25 bp, Homo sapien
gagacacacccttcagtatactacg

SEQ ID NO: 1838900 - DNA, 25 bp, Homo sapien
gttgttatcaaaactgacgcatatt

SEQ ID NO: 1838901 - DNA, 25 bp, Homo sapien
tcaaatatgtcgttaacgaaagaat

SEQ ID NO: 1838902 - DNA, 25 bp, Homo sapien
tttcttctgcgctttggtcactgcc

SEQ ID NO: 1838903 - DNA, 25 bp, Homo sapien
caaatatgtcgttaacgaaagaatt

SEQ ID NO: 1838904 - DNA, 25 bp, Homo sapien
atctttcttctgcgctttggtcact

SEQ ID NO: 1838905 - DNA, 25 bp, Homo sapien
ggagagtacctcttagttaattgga

SEQ ID NO: 1838906 - DNA, 25 bp, Homo sapien
cttttatgctaatgagggatggaga

SEQ ID NO: 1838907 - DNA, 25 bp, Homo sapien
gaaatgtgtcgaaagtaaagagcgg

SEQ ID NO: 1838908 - DNA, 25 bp, Homo sapien
taaagagcggatttctgctacttat

SEQ ID NO: 1838909 - DNA, 25 bp, Homo sapien
tctgcctaagaagaccgagagtcac

SEQ ID NO: 1838910 - DNA, 25 bp, Homo sapien
gacaggtatctgagctcccggaaac

SEQ ID NO: 1838911 - DNA, 25 bp, Homo sapien
caatgtctggacgtggtaagcaagg

SEQ ID NO: 1838912 - DNA, 25 bp, Homo sapien
gctcaacaaactgctaggccgggtg

SEQ ID NO: 1838913 - DNA, 25 bp, Homo sapien
aagcgcccgccaccagtagaaacgg

SEQ ID NO: 1838914 - DNA, 25 bp, Homo sapien
gcgcccgccaccagtagaaacggag

SEQ ID NO: 1838915 - DNA, 25 bp, Homo sapien
cgcccgccaccagtagaaacggagt

SEQ ID NO: 1838916 - DNA, 25 bp, Homo sapien
agcgcccgccaccagtagaaacgga

SEQ ID NO: 1838917 - DNA, 25 bp, Homo sapien
ggatgctaaacctagaggtctccca

SEQ ID NO: 1838918 - DNA, 25 bp, Homo sapien
atttcggtagcttcagttggattcc

SEQ ID NO: 1838919 - DNA, 25 bp, Homo sapien
gaggtctcccaattaccaaaggcac

SEQ ID NO: 1838920 - DNA, 25 bp, Homo sapien
gactatttaaattggggcgagtgga

SEQ ID NO: 1838921 - DNA, 25 bp, Homo sapien
tagtttgggcagagtaaaggagcca

SEQ ID NO: 1838922 - DNA, 25 bp, Homo sapien
gaaagcatgctaaattccagcctct

SEQ ID NO: 1838923 - DNA, 25 bp, Homo sapien
tggtgagaatctgttcctggctaac

SEQ ID NO: 1838924 - DNA, 25 bp, Homo sapien
gcacattgcctacagttgaaagaag

SEQ ID NO: 1838925 - DNA, 25 bp, Homo sapien
agttgtctagattgttaattctttt

SEQ ID NO: 1838926 - DNA, 25 bp, Homo sapien
taagttgtctagattgttaattctt

SEQ ID NO: 1838927 - DNA, 25 bp, Homo sapien
tctaagttgtctagattgttaattc

SEQ ID NO: 1838928 - DNA, 25 bp, Homo sapien
acatcatgtgtactgataattctaa

SEQ ID NO: 1838929 - DNA, 25 bp, Homo sapien
aaaattccagtcactcttgggctag

SEQ ID NO: 1838930 - DNA, 25 bp, Homo sapien
acagttctgggatgattaaccctga

SEQ ID NO: 1838931 - DNA, 25 bp, Homo sapien
cattcttgtcaggtagcagactgtg

SEQ ID NO: 1838932 - DNA, 25 bp, Homo sapien
tgggctagactcaacgttcttaaaa

SEQ ID NO: 1838933 - DNA, 25 bp, Homo sapien
tggagatactcattcgcttaaatat

SEQ ID NO: 1838934 - DNA, 25 bp, Homo sapien
gaggaagcctagaacactctttttg

SEQ ID NO: 1838935 - DNA, 25 bp, Homo sapien
tatcacttcagtgaggccctccatt

SEQ ID NO: 1838936 - DNA, 25 bp, Homo sapien
gatagtgatgctgggaacgtgaact

SEQ ID NO: 1838937 - DNA, 25 bp, Homo sapien
gctttcattaaagggctaggattta

SEQ ID NO: 1838938 - DNA, 25 bp, Homo sapien
acagtgaaaatgagtggatataggc

SEQ ID NO: 1838939 - DNA, 25 bp, Homo sapien
tggatataggctttcattaaagggc

SEQ ID NO: 1838940 - DNA, 25 bp, Homo sapien
ctccgaaggtggtagacagtgaaaa

SEQ ID NO: 1838941 - DNA, 25 bp, Homo sapien
caaggcaatggggatcatgaattcc

SEQ ID NO: 1838942 - DNA, 25 bp, Homo sapien
aagggctccaagaaggcggtgacta

SEQ ID NO: 1838943 - DNA, 25 bp, Homo sapien
actattaacgctacgatgcctgaac

SEQ ID NO: 1838944 - DNA, 25 bp, Homo sapien
aaggcggtgactaaggctcagaaga

SEQ ID NO: 1838945 - DNA, 25 bp, Homo sapien
tgattgcgggagaaaaagaatctcg

SEQ ID NO: 1838946 - DNA, 25 bp, Homo sapien
ttaaggtgcctgactgcacgtaggc

SEQ ID NO: 1838947 - DNA, 25 bp, Homo sapien
caatagttatcgcaggactgaagcc

SEQ ID NO: 1838948 - DNA, 25 bp, Homo sapien
tcctagatgcccctgagtacggagg

SEQ ID NO: 1838949 - DNA, 25 bp, Homo sapien
tgtccatgccaacacaacctttggg

SEQ ID NO: 1838950 - DNA, 25 bp, Homo sapien
atccaagacctgagacacaaagcaa

SEQ ID NO: 1838951 - DNA, 25 bp, Homo sapien
caacagcctgccgagatctctcttt

SEQ ID NO: 1838952 - DNA, 25 bp, Homo sapien
ggccatcagggctagctacttcata

SEQ ID NO: 1838953 - DNA, 25 bp, Homo sapien
gtgtacagggtatcatatttaaaag

SEQ ID NO: 1838954 - DNA, 25 bp, Homo sapien
tacatatgtgtacagggtatcatat

SEQ ID NO: 1838955 - DNA, 25 bp, Homo sapien
aaagcaacgtcaaatacttgaatga

SEQ ID NO: 1838956 - DNA, 25 bp, Homo sapien
tttccaggccaaattgattcattta

SEQ ID NO: 1838957 - DNA, 25 bp, Homo sapien
ggcttgggcgctgcatatacacaga

SEQ ID NO: 1838958 - DNA, 25 bp, Homo sapien
tcagcaaagtcaaatgaacgtgggc

SEQ ID NO: 1838959 - DNA, 25 bp, Homo sapien
caaaactccctaggcactggcttgg

SEQ ID NO: 1838960 - DNA, 25 bp, Homo sapien
cagagagatatggtggtccttgacc

SEQ ID NO: 1838961 - DNA, 25 bp, Homo sapien
agctgggactacagtcaccacgccc

SEQ ID NO: 1838962 - DNA, 25 bp, Homo sapien
ggactacagtcaccacgcccgacta

SEQ ID NO: 1838963 - DNA, 25 bp, Homo sapien
ctgggactacagtcaccacgcccga

SEQ ID NO: 1838964 - DNA, 25 bp, Homo sapien
gggactacagtcaccacgcccgact

SEQ ID NO: 1838965 - DNA, 25 bp, Homo sapien
aaccctgtgatgccgtgttgaatag

SEQ ID NO: 1838966 - DNA, 25 bp, Homo sapien
gaataggagtactttctcaccacac

SEQ ID NO: 1838967 - DNA, 25 bp, Homo sapien
tgaataggagtactttctcaccaca

SEQ ID NO: 1838968 - DNA, 25 bp, Homo sapien
tgatgccgtgttgaataggagtact

SEQ ID NO: 1838969 - DNA, 25 bp, Homo sapien
tcagaagaagataggccgccattgg

SEQ ID NO: 1838970 - DNA, 25 bp, Homo sapien
gaataaaccctatataatcagctat

SEQ ID NO: 1838971 - DNA, 25 bp, Homo sapien
ggcagatttagaatactaaacttcc

SEQ ID NO: 1838972 - DNA, 25 bp, Homo sapien
tcttaaactggcagatttagaatac

SEQ ID NO: 1838973 - DNA, 25 bp, Homo sapien
tgcttataagccaaactctccatag

SEQ ID NO: 1838974 - DNA, 25 bp, Homo sapien
gaaatcctttgtttgcctagggatc

SEQ ID NO: 1838975 - DNA, 25 bp, Homo sapien
taagcccgagtcagtttaatttcag

SEQ ID NO: 1838976 - DNA, 25 bp, Homo sapien
taaacatcctaagttcctgacagag

SEQ ID NO: 1838977 - DNA, 25 bp, Homo sapien
cattgcagataagagtccttacagt

SEQ ID NO: 1838978 - DNA, 25 bp, Homo sapien
tatttgtcaccctagtttcagcttc

SEQ ID NO: 1838979 - DNA, 25 bp, Homo sapien
gggcagacttttaattcccagagct

SEQ ID NO: 1838980 - DNA, 25 bp, Homo sapien
aatcctgattaatggtatttgcccc

SEQ ID NO: 1838981 - DNA, 25 bp, Homo sapien
atcaattacgaccctttcatgtata

SEQ ID NO: 1838982 - DNA, 25 bp, Homo sapien
aatcaattacgaccctttcatgtat

SEQ ID NO: 1838983 - DNA, 25 bp, Homo sapien
ctggagtaacccactagggaatggc

SEQ ID NO: 1838984 - DNA, 25 bp, Homo sapien
caacatacctttaaattggccacgg

SEQ ID NO: 1838985 - DNA, 25 bp, Homo sapien
cagtggcatactgatagtcctgcga

SEQ ID NO: 1838986 - DNA, 25 bp, Homo sapien
tgaggacagcgaataatacagtggc

SEQ ID NO: 1838987 - DNA, 25 bp, Homo sapien
ttttgcggtagtgtactgtagaggt

SEQ ID NO: 1838988 - DNA, 25 bp, Homo sapien
ccgttggttttgcggtagtgtactg

SEQ ID NO: 1838989 - DNA, 25 bp, Homo sapien
ttgcggtagtgtactgtagaggtaa

SEQ ID NO: 1838990 - DNA, 25 bp, Homo sapien
tggttttgcggtagtgtactgtaga

SEQ ID NO: 1838991 - DNA, 25 bp, Homo sapien
tattgtcacgcaataccttacggtg

SEQ ID NO: 1838992 - DNA, 25 bp, Homo sapien
aatgaggccagaaatacgcttgacg

SEQ ID NO: 1838993 - DNA, 25 bp, Homo sapien
cgtgttccgtgtaggtgacagcatc

SEQ ID NO: 1838994 - DNA, 25 bp, Homo sapien
aggaaaactttcagcactccgcgag

SEQ ID NO: 1838995 - DNA, 25 bp, Homo sapien
ggcatactaatataattgtttcact

SEQ ID NO: 1838996 - DNA, 25 bp, Homo sapien
actttgcattcctatatattatcta

SEQ ID NO: 1838997 - DNA, 25 bp, Homo sapien
tgataatggcatactaatataattg

SEQ ID NO: 1838998 - DNA, 25 bp, Homo sapien
aaataaatattattctggccgggtg

SEQ ID NO: 1838999 - DNA, 25 bp, Homo sapien
tacgatatgaagatcggcccttgcc

SEQ ID NO: 1839000 - DNA, 25 bp, Homo sapien
acttttgataaaggccgaggctgcc

SEQ ID NO: 1839001 - DNA, 25 bp, Homo sapien
tgtaaagatcataacaccgtagccg

SEQ ID NO: 1839002 - DNA, 25 bp, Homo sapien
gaaactgtacatgccgtgactcctg

SEQ ID NO: 1839003 - DNA, 25 bp, Homo sapien
tcattcccgccaaaccaggcagtgt

SEQ ID NO: 1839004 - DNA, 25 bp, Homo sapien
gctaaggagtgcagcgcctcaggtt

SEQ ID NO: 1839005 - DNA, 25 bp, Homo sapien
tgttaggaaaatcaagaccgaggcc

SEQ ID NO: 1839006 - DNA, 25 bp, Homo sapien
aagaaagttcccaagccggaggcat

SEQ ID NO: 1839007 - DNA, 25 bp, Homo sapien
gaacagaggttccagtttacggaca

SEQ ID NO: 1839008 - DNA, 25 bp, Homo sapien
tccagtttacggacagcaacagtaa

SEQ ID NO: 1839009 - DNA, 25 bp, Homo sapien
cagaggttccagtttacggacagca

SEQ ID NO: 1839010 - DNA, 25 bp, Homo sapien
cttgagtgaacagaggttccagttt

SEQ ID NO: 1839011 - DNA, 25 bp, Homo sapien
gagctctgaaaacgcagatcagtct

SEQ ID NO: 1839012 - DNA, 25 bp, Homo sapien
gccgagctctgaaaacgcagatcag

SEQ ID NO: 1839013 - DNA, 25 bp, Homo sapien
cgagctctgaaaacgcagatcagtc

SEQ ID NO: 1839014 - DNA, 25 bp, Homo sapien
gctctgaaaacgcagatcagtcttg

SEQ ID NO: 1839015 - DNA, 25 bp, Homo sapien
tcacggactagacgctggaatggca

SEQ ID NO: 1839016 - DNA, 25 bp, Homo sapien
tttgcgaatcagcagctcggtcgac

SEQ ID NO: 1839017 - DNA, 25 bp, Homo sapien
tggctggagcgctctttcgagcagc

SEQ ID NO: 1839018 - DNA, 25 bp, Homo sapien
ttgcgtggcgctttcccacccgtgg

SEQ ID NO: 1839019 - DNA, 25 bp, Homo sapien
ccgtatatataaagacacccctgtt

SEQ ID NO: 1839020 - DNA, 25 bp, Homo sapien
ggcaaaattgtgtctagctactagg

SEQ ID NO: 1839021 - DNA, 25 bp, Homo sapien
tgcagctcgattggtggagacgccc

SEQ ID NO: 1839022 - DNA, 25 bp, Homo sapien
taaatgttggcgctgaaactggctt

SEQ ID NO: 1839023 - DNA, 25 bp, Homo sapien
tgacagaacatctcctgcatgtaga

SEQ ID NO: 1839024 - DNA, 25 bp, Homo sapien
tttatggcatctttaaaatggacgg

SEQ ID NO: 1839025 - DNA, 25 bp, Homo sapien
aatggacggttagtttcacgattca

SEQ ID NO: 1839026 - DNA, 25 bp, Homo sapien
cgcgccccgccaatttgcttatgta

SEQ ID NO: 1839027 - DNA, 25 bp, Homo sapien
ttagtttcacgattcagtgttaaga

SEQ ID NO: 1839028 - DNA, 25 bp, Homo sapien
aaaagccaatataagagttctcgtt

SEQ ID NO: 1839029 - DNA, 25 bp, Homo sapien
agcaagcggtgtacgcggcccacag

SEQ ID NO: 1839030 - DNA, 25 bp, Homo sapien
cgcgaagagcgggtcttagccttag

SEQ ID NO: 1839031 - DNA, 25 bp, Homo sapien
tgagcaattgtgactttacccagca

SEQ ID NO: 1839032 - DNA, 25 bp, Homo sapien
acccagcaacttgtttagctcctcg

SEQ ID NO: 1839033 - DNA, 25 bp, Homo sapien
tgccaccctacaccacagccgtcca

SEQ ID NO: 1839034 - DNA, 25 bp, Homo sapien
caccctacaccacagccgtccagag

SEQ ID NO: 1839035 - DNA, 25 bp, Homo sapien
ccctacaccacagccgtccagagac

SEQ ID NO: 1839036 - DNA, 25 bp, Homo sapien
gccaccctacaccacagccgtccag

SEQ ID NO: 1839037 - DNA, 25 bp, Homo sapien
tgactccatggagagcggactctgc

SEQ ID NO: 1839038 - DNA, 25 bp, Homo sapien
gaaatgccagaggaaccgtgcctat

SEQ ID NO: 1839039 - DNA, 25 bp, Homo sapien
caaagttcccgtatgcgcgttttca

SEQ ID NO: 1839040 - DNA, 25 bp, Homo sapien
tgcagttccggtcttgtgagccaaa

SEQ ID NO: 1839041 - DNA, 25 bp, Homo sapien
gacgagtctctatatggccttgcag

SEQ ID NO: 1839042 - DNA, 25 bp, Homo sapien
gatgtcacctagacgaagctcacag

SEQ ID NO: 1839043 - DNA, 25 bp, Homo sapien
tctgcgaggcaaatggagacgagtc

SEQ ID NO: 1839044 - DNA, 25 bp, Homo sapien
gataaaattcatacccctgcgtgga

SEQ ID NO: 1839045 - DNA, 25 bp, Homo sapien
ggcttcatggcattctcctgccgca

SEQ ID NO: 1839046 - DNA, 25 bp, Homo sapien
cggcttcatggcattctcctgccgc

SEQ ID NO: 1839047 - DNA, 25 bp, Homo sapien
ccggcttcatggcattctcctgccg

SEQ ID NO: 1839048 - DNA, 25 bp, Homo sapien
aaacctgaggttgctcatggagtac

SEQ ID NO: 1839049 - DNA, 25 bp, Homo sapien
tcagaggaaggtcatacgaacattc

SEQ ID NO: 1839050 - DNA, 25 bp, Homo sapien
tgtcaaggcgccatactttggagta

SEQ ID NO: 1839051 - DNA, 25 bp, Homo sapien
ggagtactatgttgtcagaaacctg

SEQ ID NO: 1839052 - DNA, 25 bp, Homo sapien
cgcgcacggcggaaaacgagatttt

SEQ ID NO: 1839053 - DNA, 25 bp, Homo sapien
tgaagaaagcctcatgcatcgacct

SEQ ID NO: 1839054 - DNA, 25 bp, Homo sapien
taaatgatagtacagacgcaagccg

SEQ ID NO: 1839055 - DNA, 25 bp, Homo sapien
gcaaatctgttaactcctgagctga

SEQ ID NO: 1839056 - DNA, 25 bp, Homo sapien
tatcggggtgaacctgttttagcac

SEQ ID NO: 1839057 - DNA, 25 bp, Homo sapien
tgagatgccagtatcggggtgaacc

SEQ ID NO: 1839058 - DNA, 25 bp, Homo sapien
ggtaccttcggacactgcgtgcttg

SEQ ID NO: 1839059 - DNA, 25 bp, Homo sapien
ggaacccttcttcggagcaggagct

SEQ ID NO: 1839060 - DNA, 25 bp, Homo sapien
gctgtcagaaaacaataacagcagt

SEQ ID NO: 1839061 - DNA, 25 bp, Homo sapien
tccggagaaactgcgccattgttgt

SEQ ID NO: 1839062 - DNA, 25 bp, Homo sapien
aagtcctgttatttgggtgagtcca

SEQ ID NO: 1839063 - DNA, 25 bp, Homo sapien
gaacaccttacagggaatccgatag

SEQ ID NO: 1839064 - DNA, 25 bp, Homo sapien
taaattgttcggtgcacctcagctc

SEQ ID NO: 1839065 - DNA, 25 bp, Homo sapien
taggcaacggattttaaatgagtga

SEQ ID NO: 1839066 - DNA, 25 bp, Homo sapien
cactttctaacgcaaacacattcga

SEQ ID NO: 1839067 - DNA, 25 bp, Homo sapien
gaaacgaggaatcattgagagatac

SEQ ID NO: 1839068 - DNA, 25 bp, Homo sapien
gccttgtactctataatgaaacgag

SEQ ID NO: 1839069 - DNA, 25 bp, Homo sapien
ggccactttcttggtcccagcagcg

SEQ ID NO: 1839070 - DNA, 25 bp, Homo sapien
ctttttcgcactcttggccactttc

SEQ ID NO: 1839071 - DNA, 25 bp, Homo sapien
tcggcttccccgacttaggcttggc

SEQ ID NO: 1839072 - DNA, 25 bp, Homo sapien
ggggctttggccttagctggactct

SEQ ID NO: 1839073 - DNA, 25 bp, Homo sapien
gccttggtgataagctcagatactg

SEQ ID NO: 1839074 - DNA, 25 bp, Homo sapien
gaagcaccggtacctttggtctgca

SEQ ID NO: 1839075 - DNA, 25 bp, Homo sapien
ggagcaagtggagcagtctccgaca

SEQ ID NO: 1839076 - DNA, 25 bp, Homo sapien
cacaggtgttttttctgcgggtgca

SEQ ID NO: 1839077 - DNA, 25 bp, Homo sapien
gtcttcccagaaaagacaataagta

SEQ ID NO: 1839078 - DNA, 25 bp, Homo sapien
acaataagtaatctcaaactgtcag

SEQ ID NO: 1839079 - DNA, 25 bp, Homo sapien
aagacaataagtaatctcaaactgt

SEQ ID NO: 1839080 - DNA, 25 bp, Homo sapien
ttcccagaaaagacaataagtaatc

SEQ ID NO: 1839081 - DNA, 25 bp, Homo sapien
acgatattgcaaggaaaggcctggc

SEQ ID NO: 1839082 - DNA, 25 bp, Homo sapien
tgaaaagggccattaacgatattgc

SEQ ID NO: 1839083 - DNA, 25 bp, Homo sapien
cattaacgatattgcaaggaaaggc

SEQ ID NO: 1839084 - DNA, 25 bp, Homo sapien
gggccattaacgatattgcaaggaa

SEQ ID NO: 1839085 - DNA, 25 bp, Homo sapien
tacagggttcttccctggcgtttga

SEQ ID NO: 1839086 - DNA, 25 bp, Homo sapien
tcttccctggcgtttgagcacgtag

SEQ ID NO: 1839087 - DNA, 25 bp, Homo sapien
cagggttcttccctggcgtttgagc

SEQ ID NO: 1839088 - DNA, 25 bp, Homo sapien
ttccctggcgtttgagcacgtagac

SEQ ID NO: 1839089 - DNA, 25 bp, Homo sapien
ggcgtaccagatcacattttccagg

SEQ ID NO: 1839090 - DNA, 25 bp, Homo sapien
caagcgccggatagtgcacttggta

SEQ ID NO: 1839091 - DNA, 25 bp, Homo sapien
ataaatgaggcccaagatgcgcttg

SEQ ID NO: 1839092 - DNA, 25 bp, Homo sapien
gtaccttgcgatggcacttggcacc

SEQ ID NO: 1839093 - DNA, 25 bp, Homo sapien
ggaaaacgtattcagtccccgctca

SEQ ID NO: 1839094 - DNA, 25 bp, Homo sapien
tctctaaacaaaacgattactcgct

SEQ ID NO: 1839095 - DNA, 25 bp, Homo sapien
gataaacaagtcagaactatctcta

SEQ ID NO: 1839096 - DNA, 25 bp, Homo sapien
gctttccgcagccttttatataacg

SEQ ID NO: 1839097 - DNA, 25 bp, Homo sapien
gatctctaaacgaaagtgtcaaaca

SEQ ID NO: 1839098 - DNA, 25 bp, Homo sapien
tagagaataaggatctctaaacgaa

SEQ ID NO: 1839099 - DNA, 25 bp, Homo sapien
taagaaattctcttgtagtagggag

SEQ ID NO: 1839100 - DNA, 25 bp, Homo sapien
cttgtagtagggagatttgctggca

SEQ ID NO: 1839101 - DNA, 25 bp, Homo sapien
caagacataaaagaattcctaatca

SEQ ID NO: 1839102 - DNA, 25 bp, Homo sapien
gcccaaattccaagacataaaagaa

SEQ ID NO: 1839103 - DNA, 25 bp, Homo sapien
catgctgaagttgaaacaagcccaa

SEQ ID NO: 1839104 - DNA, 25 bp, Homo sapien
gaagttgaaacaagcccaaattcca

SEQ ID NO: 1839105 - DNA, 25 bp, Homo sapien
ttggtttaagttggcgcacaccctc

SEQ ID NO: 1839106 - DNA, 25 bp, Homo sapien
tttaagttggcgcacaccctcagta

SEQ ID NO: 1839107 - DNA, 25 bp, Homo sapien
ttaagttggcgcacaccctcagtac

SEQ ID NO: 1839108 - DNA, 25 bp, Homo sapien
agttggcgcacaccctcagtacaac

SEQ ID NO: 1839109 - DNA, 25 bp, Homo sapien
cactcgcttggcgtggatagcacac

SEQ ID NO: 1839110 - DNA, 25 bp, Homo sapien
ggctttgccgccagtggacttacga

SEQ ID NO: 1839111 - DNA, 25 bp, Homo sapien
gaatggtagcttgcgaatcagtagc

SEQ ID NO: 1839112 - DNA, 25 bp, Homo sapien
ttatgccctctctccgcgaatgcgg

SEQ ID NO: 1839113 - DNA, 25 bp, Homo sapien
ggtttcaagcaatggtcacaactga

SEQ ID NO: 1839114 - DNA, 25 bp, Homo sapien
gcaatggtcacaactgaacaaacag

SEQ ID NO: 1839115 - DNA, 25 bp, Homo sapien
actgaacaaacagttgttcttactc

SEQ ID NO: 1839116 - DNA, 25 bp, Homo sapien
aggaatgggtttcaagcaatggtca

SEQ ID NO: 1839117 - DNA, 25 bp, Homo sapien
ttatgtgcctacctgtattacgtac

SEQ ID NO: 1839118 - DNA, 25 bp, Homo sapien
gtgcctacctgtattacgtaccttc

SEQ ID NO: 1839119 - DNA, 25 bp, Homo sapien
tatgtgcctacctgtattacgtacc

SEQ ID NO: 1839120 - DNA, 25 bp, Homo sapien
tgtgcctacctgtattacgtacctt

SEQ ID NO: 1839121 - DNA, 25 bp, Homo sapien
tatgcagattgactccagccctaga

SEQ ID NO: 1839122 - DNA, 25 bp, Homo sapien
tggatagaattactgcccggaaacc

SEQ ID NO: 1839123 - DNA, 25 bp, Homo sapien
tgctgaatacccaaacagggccttg

SEQ ID NO: 1839124 - DNA, 25 bp, Homo sapien
tagaaaaggacgctgacaatctggc

SEQ ID NO: 1839125 - DNA, 25 bp, Homo sapien
ttggaaaggcaacttgcggatcagc

SEQ ID NO: 1839126 - DNA, 25 bp, Homo sapien
tttgccaccggtggacttgcgtgca

SEQ ID NO: 1839127 - DNA, 25 bp, Homo sapien
ccaggcgttggaaaggcaacttgcg

SEQ ID NO: 1839128 - DNA, 25 bp, Homo sapien
ctcgcaccaggcgttggaaaggcaa

SEQ ID NO: 1839129 - DNA, 25 bp, Homo sapien
ccagattcggaggaccacgttttga

SEQ ID NO: 1839130 - DNA, 25 bp, Homo sapien
ttctcaagctgtagtccgtaaacga

SEQ ID NO: 1839131 - DNA, 25 bp, Homo sapien
tgattttcaaaagacccgcgcaaca

SEQ ID NO: 1839132 - DNA, 25 bp, Homo sapien
gactgctgctagctggaaacctttg

SEQ ID NO: 1839133 - DNA, 25 bp, Homo sapien
cacttgtatagacagggcaacagca

SEQ ID NO: 1839134 - DNA, 25 bp, Homo sapien
tcacttgtatagacagggcaacagc

SEQ ID NO: 1839135 - DNA, 25 bp, Homo sapien
acttgtatagacagggcaacagcac

SEQ ID NO: 1839136 - DNA, 25 bp, Homo sapien
aagagtgcgttttagccttggcgcg

SEQ ID NO: 1839137 - DNA, 25 bp, Homo sapien
gcgatagtaactttgcccaacagct

SEQ ID NO: 1839138 - DNA, 25 bp, Homo sapien
actcggcccacagaaaactggagac

SEQ ID NO: 1839139 - DNA, 25 bp, Homo sapien
ttgagcttctcgtcgtggatggcga

SEQ ID NO: 1839140 - DNA, 25 bp, Homo sapien
cactatcccaacagctccaagggag

SEQ ID NO: 1839141 - DNA, 25 bp, Homo sapien
aaggcatcttacatggtggtgcaga

SEQ ID NO: 1839142 - DNA, 25 bp, Homo sapien
gggccccagccaatgaatttcagat

SEQ ID NO: 1839143 - DNA, 25 bp, Homo sapien
tttaattggctcataaaaccacagg

SEQ ID NO: 1839144 - DNA, 25 bp, Homo sapien
cagtcagattggattcagacccacc

SEQ ID NO: 1839145 - DNA, 25 bp, Homo sapien
gactcttaagattaaccctgtgggc

SEQ ID NO: 1839146 - DNA, 25 bp, Homo sapien
tctccatggtgtgtcgataactgtc

SEQ ID NO: 1839147 - DNA, 25 bp, Homo sapien
caattctggaggctacgactcttaa

SEQ ID NO: 1839148 - DNA, 25 bp, Homo sapien
aaaattggaaatatgtagaagagca

SEQ ID NO: 1839149 - DNA, 25 bp, Homo sapien
taggttttatcaggcccggcacagt

SEQ ID NO: 1839150 - DNA, 25 bp, Homo sapien
gaagagcaagagtttcactaaaaat

SEQ ID NO: 1839151 - DNA, 25 bp, Homo sapien
tacaaaatcctattctattgattct

SEQ ID NO: 1839152 - DNA, 25 bp, Homo sapien
acagcaagtttgaggctagcggagc

SEQ ID NO: 1839153 - DNA, 25 bp, Homo sapien
tgagttgcccacacaaagggaactg

SEQ ID NO: 1839154 - DNA, 25 bp, Homo sapien
cttaaatctagaagctgagttgccc

SEQ ID NO: 1839155 - DNA, 25 bp, Homo sapien
gaaaaatatagtgggaaggccgtga

SEQ ID NO: 1839156 - DNA, 25 bp, Homo sapien
tgttggcagtggcttgaccagagca

SEQ ID NO: 1839157 - DNA, 25 bp, Homo sapien
tctgtgggacagaactaggcaatga

SEQ ID NO: 1839158 - DNA, 25 bp, Homo sapien
gatgtcaagtaagtagcagggtctc

SEQ ID NO: 1839159 - DNA, 25 bp, Homo sapien
tgtgggctagtgacttaacgtctgc

SEQ ID NO: 1839160 - DNA, 25 bp, Homo sapien
tcacggattcgccttggtttaaggc

SEQ ID NO: 1839161 - DNA, 25 bp, Homo sapien
gatgtgttgcgctcacggattcgcc

SEQ ID NO: 1839162 - DNA, 25 bp, Homo sapien
ccgtctgggtgcgagctttctttgt

SEQ ID NO: 1839163 - DNA, 25 bp, Homo sapien
aaagggtaacttgcagtctctccgc

SEQ ID NO: 1839164 - DNA, 25 bp, Homo sapien
aacatgcgagattaagcacgagtaa

SEQ ID NO: 1839165 - DNA, 25 bp, Homo sapien
gagattaagcacgagtaattaaacg

SEQ ID NO: 1839166 - DNA, 25 bp, Homo sapien
catgcgagattaagcacgagtaatt

SEQ ID NO: 1839167 - DNA, 25 bp, Homo sapien
tgcgagattaagcacgagtaattaa

SEQ ID NO: 1839168 - DNA, 25 bp, Homo sapien
aataagagtgcagcaagcaggagcc

SEQ ID NO: 1839169 - DNA, 25 bp, Homo sapien
aatgaaaataagagtgcagcaagca

SEQ ID NO: 1839170 - DNA, 25 bp, Homo sapien
ggaacaaagcaggataacaagatgt

SEQ ID NO: 1839171 - DNA, 25 bp, Homo sapien
caaagcaggataacaagatgtctgc

SEQ ID NO: 1839172 - DNA, 25 bp, Homo sapien
ggaacaccttcagaacaccacgagt

SEQ ID NO: 1839173 - DNA, 25 bp, Homo sapien
aaggccagaaattcgcttgacaccg

SEQ ID NO: 1839174 - DNA, 25 bp, Homo sapien
gatagctggcttagtgatgccctgg

SEQ ID NO: 1839175 - DNA, 25 bp, Homo sapien
gccctggatgttatcgcgcaaaacc

SEQ ID NO: 1839176 - DNA, 25 bp, Homo sapien
gaaacctaaacgccaaggcaaagca

SEQ ID NO: 1839177 - DNA, 25 bp, Homo sapien
cacaatggattagcagtccatcgcc

SEQ ID NO: 1839178 - DNA, 25 bp, Homo sapien
agcacaatggattagcagtccatcg

SEQ ID NO: 1839179 - DNA, 25 bp, Homo sapien
gcacaatggattagcagtccatcgc

SEQ ID NO: 1839180 - DNA, 25 bp, Homo sapien
atggattagcagtccatcgccttaa

SEQ ID NO: 1839181 - DNA, 25 bp, Homo sapien
caggtcccaccgagatttgaactcg

SEQ ID NO: 1839182 - DNA, 25 bp, Homo sapien
gagtgctaaccattacaccatgggg

SEQ ID NO: 1839183 - DNA, 25 bp, Homo sapien
aactcggatcgctggattcaaagtc

SEQ ID NO: 1839184 - DNA, 25 bp, Homo sapien
tcccaccgagatttgaactcggatc

SEQ ID NO: 1839185 - DNA, 25 bp, Homo sapien
tttgaactcggatcgctggattcaa

SEQ ID NO: 1839186 - DNA, 25 bp, Homo sapien
aactcggatcgctggattcaaagtc

SEQ ID NO: 1839187 - DNA, 25 bp, Homo sapien
gagtgctaaccattacaccatgggg

SEQ ID NO: 1839188 - DNA, 25 bp, Homo sapien
taggtcccaccgagatttgaactcg

SEQ ID NO: 1839189 - DNA, 25 bp, Homo sapien
agaccccaatggatttcaagtccat

SEQ ID NO: 1839190 - DNA, 25 bp, Homo sapien
atggatttcaagtccatcgccttaa

SEQ ID NO: 1839191 - DNA, 25 bp, Homo sapien
ccgtagtcggcaggattcgaacctg

SEQ ID NO: 1839192 - DNA, 25 bp, Homo sapien
cgcggggagaccccaatggatttca

SEQ ID NO: 1839193 - DNA, 25 bp, Homo sapien
tgggcccagcacgcttccgctgcgc

SEQ ID NO: 1839194 - DNA, 25 bp, Homo sapien
cccagcacgcttccgctgcgccact

SEQ ID NO: 1839195 - DNA, 25 bp, Homo sapien
gggcccagcacgcttccgctgcgcc

SEQ ID NO: 1839196 - DNA, 25 bp, Homo sapien
ggcccagcacgcttccgctgcgcca

SEQ ID NO: 1839197 - DNA, 25 bp, Homo sapien
caaccttctgatctggagtcagacg

SEQ ID NO: 1839198 - DNA, 25 bp, Homo sapien
atgaccccgacgtgatttgaacacg

SEQ ID NO: 1839199 - DNA, 25 bp, Homo sapien
acgcgctaccgttgcgccacgaggt

SEQ ID NO: 1839200 - DNA, 25 bp, Homo sapien
gatctggagtcagacgcgctaccgt

SEQ ID NO: 1839201 - DNA, 25 bp, Homo sapien
tcacttgcaaagcaactatagctgc

SEQ ID NO: 1839202 - DNA, 25 bp, Homo sapien
ggcctcacttgcaaagcaactatag

SEQ ID NO: 1839203 - DNA, 25 bp, Homo sapien
ataggcctcacttgcaaagcaacta

SEQ ID NO: 1839204 - DNA, 25 bp, Homo sapien
cttgcaaagcaactatagctgctct

SEQ ID NO: 1839205 - DNA, 25 bp, Homo sapien
agtgggagcactcttgcgagaggct

SEQ ID NO: 1839206 - DNA, 25 bp, Homo sapien
cagtagtgggagcactcttgcgaga

SEQ ID NO: 1839207 - DNA, 25 bp, Homo sapien
tgggagcactcttgcgagaggcttt

SEQ ID NO: 1839208 - DNA, 25 bp, Homo sapien
gtagtgggagcactcttgcgagagg

SEQ ID NO: 1839209 - DNA, 25 bp, Homo sapien
accggtcgatttgccggtcgatttg

SEQ ID NO: 1839210 - DNA, 25 bp, Homo sapien
gtcggctttctacgagccgtggtat

SEQ ID NO: 1839211 - DNA, 25 bp, Homo sapien
caccggtcgatttgccggtcgattt

SEQ ID NO: 1839212 - DNA, 25 bp, Homo sapien
ggctttctacgagccgtggtataga

SEQ ID NO: 1839213 - DNA, 25 bp, Homo sapien
ggagagcgacggcaggacggctgcg

SEQ ID NO: 1839214 - DNA, 25 bp, Homo sapien
gagagcgacggcaggacggctgcgg

SEQ ID NO: 1839215 - DNA, 25 bp, Homo sapien
ggtgttctatatcacaatgtctgca

SEQ ID NO: 1839216 - DNA, 25 bp, Homo sapien
ggtgatgagtatacagataattgcc

SEQ ID NO: 1839217 - DNA, 25 bp, Homo sapien
gatgaggctaagacggcaaaatgtt

SEQ ID NO: 1839218 - DNA, 25 bp, Homo sapien
gcaagtgagtttcatatgattcagt

SEQ ID NO: 1839219 - DNA, 25 bp, Homo sapien
gatcttctcgctaggccacagggta

SEQ ID NO: 1839220 - DNA, 25 bp, Homo sapien
gggctggtcctttcacttctcagga

SEQ ID NO: 1839221 - DNA, 25 bp, Homo sapien
gagctgaaaaggtcggacagatgca

SEQ ID NO: 1839222 - DNA, 25 bp, Homo sapien
gaaacccgcaccatctgagataggg

SEQ ID NO: 1839223 - DNA, 25 bp, Homo sapien
tcaactacatttccggtgttatctc

SEQ ID NO: 1839224 - DNA, 25 bp, Homo sapien
actacatttccggtgttatctctca

SEQ ID NO: 1839225 - DNA, 25 bp, Homo sapien
gccctcaactacatttccggtgtta

SEQ ID NO: 1839226 - DNA, 25 bp, Homo sapien
taatctgccctcaactacatttccg

SEQ ID NO: 1839227 - DNA, 25 bp, Homo sapien
aatcctttagaaatctcgctctcca

SEQ ID NO: 1839228 - DNA, 25 bp, Homo sapien
tcacttgcactcagttgttttattg

SEQ ID NO: 1839229 - DNA, 25 bp, Homo sapien
ggctgcacttctcacttgcactcag

SEQ ID NO: 1839230 - DNA, 25 bp, Homo sapien
cttctgtaatcctttagaaatctcg

SEQ ID NO: 1839231 - DNA, 25 bp, Homo sapien
tcttctgttcatagagttgggccat

SEQ ID NO: 1839232 - DNA, 25 bp, Homo sapien
ccttcttctgttcatagagttgggc

SEQ ID NO: 1839233 - DNA, 25 bp, Homo sapien
cttcttctgttcatagagttgggcc

SEQ ID NO: 1839234 - DNA, 25 bp, Homo sapien
ttcttctgttcatagagttgggcca

SEQ ID NO: 1839235 - DNA, 25 bp, Homo sapien
gcaggacgtgaactcagctattaaa

SEQ ID NO: 1839236 - DNA, 25 bp, Homo sapien
ttttgttggcaggacgtgaactcag

SEQ ID NO: 1839237 - DNA, 25 bp, Homo sapien
ggacgtgaactcagctattaaattc

SEQ ID NO: 1839238 - DNA, 25 bp, Homo sapien
gttggcaggacgtgaactcagctat

SEQ ID NO: 1839239 - DNA, 25 bp, Homo sapien
cccagcacgcttccgctgcgccact

SEQ ID NO: 1839240 - DNA, 25 bp, Homo sapien
tgggcccagcacgcttccgctgcgc

SEQ ID NO: 1839241 - DNA, 25 bp, Homo sapien
ggcccagcacgcttccgctgcgcca

SEQ ID NO: 1839242 - DNA, 25 bp, Homo sapien
gggcccagcacgcttccgctgcgcc

SEQ ID NO: 1839243 - DNA, 25 bp, Homo sapien
tgaccccgacgtgatttgaacacgc

SEQ ID NO: 1839244 - DNA, 25 bp, Homo sapien
acgcgctaccgttgcgccacgaggt

SEQ ID NO: 1839245 - DNA, 25 bp, Homo sapien
cgacgtgatttgaacacgcaacctt

SEQ ID NO: 1839246 - DNA, 25 bp, Homo sapien
gatctggagtcagacgcgctaccgt

SEQ ID NO: 1839247 - DNA, 25 bp, Homo sapien
tgttgaaggtcagtcgctttggaat

SEQ ID NO: 1839248 - DNA, 25 bp, Homo sapien
gaggaggtagcgaagagggaataat

SEQ ID NO: 1839249 - DNA, 25 bp, Homo sapien
agaaatacattctgttgaaggtcag

SEQ ID NO: 1839250 - DNA, 25 bp, Homo sapien
tatagacgtcttgggagtttcgttg

SEQ ID NO: 1839251 - DNA, 25 bp, Homo sapien
tgcaggtcacaaccagtgtttccgt

SEQ ID NO: 1839252 - DNA, 25 bp, Homo sapien
agataacggcgcctccctgtagcct

SEQ ID NO: 1839253 - DNA, 25 bp, Homo sapien
ttaacgaattcacgcgggggctggc

SEQ ID NO: 1839254 - DNA, 25 bp, Homo sapien
tgcatcttttctgagagataacggc

SEQ ID NO: 1839255 - DNA, 25 bp, Homo sapien
tcagatcgctggacctgaaactgac

SEQ ID NO: 1839256 - DNA, 25 bp, Homo sapien
caccccgataattcttcaaaatcag

SEQ ID NO: 1839257 - DNA, 25 bp, Homo sapien
tcttcaaaatcagatcgctggacct

SEQ ID NO: 1839258 - DNA, 25 bp, Homo sapien
gttgatttcacaccccgataattct

SEQ ID NO: 1839259 - DNA, 25 bp, Homo sapien
accttatttggatatagctttggga

SEQ ID NO: 1839260 - DNA, 25 bp, Homo sapien
taaccttatttggatatagctttgg

SEQ ID NO: 1839261 - DNA, 25 bp, Homo sapien
gtaaccttatttggatatagctttg

SEQ ID NO: 1839262 - DNA, 25 bp, Homo sapien
aaccttatttggatatagctttggg

SEQ ID NO: 1839263 - DNA, 25 bp, Homo sapien
tgtgaatgtggctgacgggttcaga

SEQ ID NO: 1839264 - DNA, 25 bp, Homo sapien
tgtggctgacgggttcagaggctga

SEQ ID NO: 1839265 - DNA, 25 bp, Homo sapien
tctgggtgtgaatgtggctgacggg

SEQ ID NO: 1839266 - DNA, 25 bp, Homo sapien
ggttcctctgggtgtgaatgtggct

SEQ ID NO: 1839267 - DNA, 25 bp, Homo sapien
ggcagatgccctagtggacagacga

SEQ ID NO: 1839268 - DNA, 25 bp, Homo sapien
ggccagcggttcttctccatgcgtg

SEQ ID NO: 1839269 - DNA, 25 bp, Homo sapien
catgcgtggacacaggagcggtctt

SEQ ID NO: 1839270 - DNA, 25 bp, Homo sapien
gagcggtcttctcttcatgtccaaa

SEQ ID NO: 1839271 - DNA, 25 bp, Homo sapien
tttggacagcccttaaccatctgga

SEQ ID NO: 1839272 - DNA, 25 bp, Homo sapien
ggcaggaccctctagttacaggtaa

SEQ ID NO: 1839273 - DNA, 25 bp, Homo sapien
aagggaggcagaatggcaatccccg

SEQ ID NO: 1839274 - DNA, 25 bp, Homo sapien
gagacagagaagctaacctttggac

SEQ ID NO: 1839275 - DNA, 25 bp, Homo sapien
tgataatgactggaagagactgaaa

SEQ ID NO: 1839276 - DNA, 25 bp, Homo sapien
taggcagcttattcatcccctgaaa

SEQ ID NO: 1839277 - DNA, 25 bp, Homo sapien
gcacttgcaccatgacagttgacaa

SEQ ID NO: 1839278 - DNA, 25 bp, Homo sapien
tctaatccagtttccatgctaaatg

SEQ ID NO: 1839279 - DNA, 25 bp, Homo sapien
ggcaaggcccttatctgtttcacat

SEQ ID NO: 1839280 - DNA, 25 bp, Homo sapien
caggacctgctgactttttaacact

SEQ ID NO: 1839281 - DNA, 25 bp, Homo sapien
ggtactcagtttcacatacccagga

SEQ ID NO: 1839282 - DNA, 25 bp, Homo sapien
gaagtttgacttcacgatatccagt

SEQ ID NO: 1839283 - DNA, 25 bp, Homo sapien
cagttctgttttctgcagtttgagt

SEQ ID NO: 1839284 - DNA, 25 bp, Homo sapien
gttctgttttctgcagtttgagttg

SEQ ID NO: 1839285 - DNA, 25 bp, Homo sapien
cacagttctgttttctgcagtttga

SEQ ID NO: 1839286 - DNA, 25 bp, Homo sapien
cttatccacagttctgttttctgca

SEQ ID NO: 1839287 - DNA, 25 bp, Homo sapien
gggaccatgctaatcatctctatat

SEQ ID NO: 1839288 - DNA, 25 bp, Homo sapien
cagtatatgtgctgctgaagcaagc

SEQ ID NO: 1839289 - DNA, 25 bp, Homo sapien
atcatctctatatcattccaatttc

SEQ ID NO: 1839290 - DNA, 25 bp, Homo sapien
agtatatgtgctgctgaagcaagca

SEQ ID NO: 1839291 - DNA, 25 bp, Homo sapien
ctggtatgatggctgcaggcctcat

SEQ ID NO: 1839292 - DNA, 25 bp, Homo sapien
cagaccttgttctcagaggccattc

SEQ ID NO: 1839293 - DNA, 25 bp, Homo sapien
cagctggtatgatggctgcaggcct

SEQ ID NO: 1839294 - DNA, 25 bp, Homo sapien
ctccatctgcagaccttgttctcag

SEQ ID NO: 1839295 - DNA, 25 bp, Homo sapien
gtggtcttggatccctttacccaga

SEQ ID NO: 1839296 - DNA, 25 bp, Homo sapien
tattttccagcccataagtcatagc

SEQ ID NO: 1839297 - DNA, 25 bp, Homo sapien
catgtcttcctatcctcgctttgag

SEQ ID NO: 1839298 - DNA, 25 bp, Homo sapien
tcgctttgagcaccttgatgactct

SEQ ID NO: 1839299 - DNA, 25 bp, Homo sapien
cacggatggatctcatatctacaca

SEQ ID NO: 1839300 - DNA, 25 bp, Homo sapien
ggacatatctcgttctacaatgcca

SEQ ID NO: 1839301 - DNA, 25 bp, Homo sapien
actgccctgaccgtttgcccaatac

SEQ ID NO: 1839302 - DNA, 25 bp, Homo sapien
tctacaatgccacggatggatctca

SEQ ID NO: 1839303 - DNA, 25 bp, Homo sapien
actgaccccaggcttagctaatgaa

SEQ ID NO: 1839304 - DNA, 25 bp, Homo sapien
tcaccctccacaacagccagtcaga

SEQ ID NO: 1839305 - DNA, 25 bp, Homo sapien
cacaacagccagtcagaaccataaa

SEQ ID NO: 1839306 - DNA, 25 bp, Homo sapien
tgaccccaggcttagctaatgaaag

SEQ ID NO: 1839307 - DNA, 25 bp, Homo sapien
tgggccttgtaaggagagaagaatc

SEQ ID NO: 1839308 - DNA, 25 bp, Homo sapien
agaatcacatcctgcagaagtctgt

SEQ ID NO: 1839309 - DNA, 25 bp, Homo sapien
gtctgtcctgaggaacaggtactcc

SEQ ID NO: 1839310 - DNA, 25 bp, Homo sapien
gaggaacaggtactccagtcacagc

SEQ ID NO: 1839311 - DNA, 25 bp, Homo sapien
gagtccgcaactccaaacatcgcga

SEQ ID NO: 1839312 - DNA, 25 bp, Homo sapien
cccatgggtgagttgtatcggaaaa

SEQ ID NO: 1839313 - DNA, 25 bp, Homo sapien
catcgcgattaataggaggtgaaca

SEQ ID NO: 1839314 - DNA, 25 bp, Homo sapien
gagaacaggtcccagataccgagtc

SEQ ID NO: 1839315 - DNA, 25 bp, Homo sapien
ctggactatgagactggagatatct

SEQ ID NO: 1839316 - DNA, 25 bp, Homo sapien
tggactatgagactggagatatctc

SEQ ID NO: 1839317 - DNA, 25 bp, Homo sapien
ggactatgagactggagatatctca

SEQ ID NO: 1839318 - DNA, 25 bp, Homo sapien
gagtgctgatcattccctagagaca

SEQ ID NO: 1839319 - DNA, 25 bp, Homo sapien
gactatttgtccagcgtgaaaagaa

SEQ ID NO: 1839320 - DNA, 25 bp, Homo sapien
tcctccaattctgaccgagtgctga

SEQ ID NO: 1839321 - DNA, 25 bp, Homo sapien
cctgtcgggtagtctcatttagcaa

SEQ ID NO: 1839322 - DNA, 25 bp, Homo sapien
gccttcgtggaaatggcccctacat

SEQ ID NO: 1839323 - DNA, 25 bp, Homo sapien
gggatcccgctgcagctttctgaga

SEQ ID NO: 1839324 - DNA, 25 bp, Homo sapien
ggtcatccctatctcttcgtgtcag

SEQ ID NO: 1839325 - DNA, 25 bp, Homo sapien
gaagtgtgacattggacccctccag

SEQ ID NO: 1839326 - DNA, 25 bp, Homo sapien
gagacttagacccagcactccttgg

SEQ ID NO: 1839327 - DNA, 25 bp, Homo sapien
cactgtatcccctctacttggcaag

SEQ ID NO: 1839328 - DNA, 25 bp, Homo sapien
tagaggccacacttgataaatcatg

SEQ ID NO: 1839329 - DNA, 25 bp, Homo sapien
cctttcaactgctgcctgctaggga

SEQ ID NO: 1839330 - DNA, 25 bp, Homo sapien
tgcataaagggcaataccgggccgt

SEQ ID NO: 1839331 - DNA, 25 bp, Homo sapien
tgcttgtaactatgggatgggatcc

SEQ ID NO: 1839332 - DNA, 25 bp, Homo sapien
gaagagggcctgacacttcacagag

SEQ ID NO: 1839333 - DNA, 25 bp, Homo sapien
tcacagccatgtagacaagccctgg

SEQ ID NO: 1839334 - DNA, 25 bp, Homo sapien
cattgaataaccaagagtccaggtg

SEQ ID NO: 1839335 - DNA, 25 bp, Homo sapien
tcatggtcacaaaagggctgcccag

SEQ ID NO: 1839336 - DNA, 25 bp, Homo sapien
caggtgagacctcaaggctggagat

SEQ ID NO: 1839337 - DNA, 25 bp, Homo sapien
gcttgaaatgtcatacatgccccag

SEQ ID NO: 1839338 - DNA, 25 bp, Homo sapien
tctcaaatcatcaggagcttccagg

SEQ ID NO: 1839339 - DNA, 25 bp, Homo sapien
tccagaaaggtcgaagatggcagtt

SEQ ID NO: 1839340 - DNA, 25 bp, Homo sapien
tgctgagcgggtctgtagagcccat

SEQ ID NO: 1839341 - DNA, 25 bp, Homo sapien
taggctgaagctcctgacagactca

SEQ ID NO: 1839342 - DNA, 25 bp, Homo sapien
tgatcagttgatgttttgtaggcga

SEQ ID NO: 1839343 - DNA, 25 bp, Homo sapien
gacgtccaggttatttctaaggtga

SEQ ID NO: 1839344 - DNA, 25 bp, Homo sapien
gattcagatagtaacagtcctccag

SEQ ID NO: 1839345 - DNA, 25 bp, Homo sapien
ttcttgtgcctgattgatcagttga

SEQ ID NO: 1839346 - DNA, 25 bp, Homo sapien
gctctgggtgctgagatttaacctc

SEQ ID NO: 1839347 - DNA, 25 bp, Homo sapien
gaaactggctcgatcttgtgcaggt

SEQ ID NO: 1839348 - DNA, 25 bp, Homo sapien
tcttcacaccactatacaaaggagg

SEQ ID NO: 1839349 - DNA, 25 bp, Homo sapien
cgctcgaactccttagttggctcaa

SEQ ID NO: 1839350 - DNA, 25 bp, Homo sapien
agttgaagtgactctggacccaaac

SEQ ID NO: 1839351 - DNA, 25 bp, Homo sapien
tctttctctccagttgaagtgactc

SEQ ID NO: 1839352 - DNA, 25 bp, Homo sapien
cagttgaagtgactctggacccaaa

SEQ ID NO: 1839353 - DNA, 25 bp, Homo sapien
tgtggtcatgcgataaaaagcccct

SEQ ID NO: 1839354 - DNA, 25 bp, Homo sapien
tgtaaatgggtactgggccctctcc

SEQ ID NO: 1839355 - DNA, 25 bp, Homo sapien
gaccacctgcccaattgttgatgga

SEQ ID NO: 1839356 - DNA, 25 bp, Homo sapien
gagatgtgactcctggccctgtgtg

SEQ ID NO: 1839357 - DNA, 25 bp, Homo sapien
ctctcacatgtgtgcattggagttt

SEQ ID NO: 1839358 - DNA, 25 bp, Homo sapien
tgtaagtgcttgccgaagggagcac

SEQ ID NO: 1839359 - DNA, 25 bp, Homo sapien
ttagtgtaagtgcttgccgaaggga

SEQ ID NO: 1839360 - DNA, 25 bp, Homo sapien
agtgtaagtgcttgccgaagggagc

SEQ ID NO: 1839361 - DNA, 25 bp, Homo sapien
tttagtgtaagtgcttgccgaaggg

SEQ ID NO: 1839362 - DNA, 25 bp, Homo sapien
tcactcgggagacgccgctctgtgg

SEQ ID NO: 1839363 - DNA, 25 bp, Homo sapien
tctgtggcccggacaaccggtccta

SEQ ID NO: 1839364 - DNA, 25 bp, Homo sapien
atgcagcgccgtccgaggcagttcg

SEQ ID NO: 1839365 - DNA, 25 bp, Homo sapien
ggcagttcgcggagaggcggcttac

SEQ ID NO: 1839366 - DNA, 25 bp, Homo sapien
tctcccagtccggaccctgccggcc

SEQ ID NO: 1839367 - DNA, 25 bp, Homo sapien
cggagggcgttagggcatggagggc

SEQ ID NO: 1839368 - DNA, 25 bp, Homo sapien
ccagatctgggtcccgggtgaccac

SEQ ID NO: 1839369 - DNA, 25 bp, Homo sapien
gggtggcggcgggagtagcgtgccg

SEQ ID NO: 1839370 - DNA, 25 bp, Homo sapien
caaatggtagaatgacaggccacgt

SEQ ID NO: 1839371 - DNA, 25 bp, Homo sapien
acggttagcggcgatcgggcggttg

SEQ ID NO: 1839372 - DNA, 25 bp, Homo sapien
ccgtactaccagaccttgctgtcgg

SEQ ID NO: 1839373 - DNA, 25 bp, Homo sapien
gacaggccacgtttggcccgttgga

SEQ ID NO: 1839374 - DNA, 25 bp, Homo sapien
aaagaggttgccgacgtatgataga

SEQ ID NO: 1839375 - DNA, 25 bp, Homo sapien
ttgccgacgtatgatagagttagaa

SEQ ID NO: 1839376 - DNA, 25 bp, Homo sapien
catctagcccttctagatggaaaga

SEQ ID NO: 1839377 - DNA, 25 bp, Homo sapien
gattcacaggccgtttacggaaggc

SEQ ID NO: 1839378 - DNA, 25 bp, Homo sapien
attctctgagaagtacacgttatga

SEQ ID NO: 1839379 - DNA, 25 bp, Homo sapien
tgtgtttatgatgaggcacattgac

SEQ ID NO: 1839380 - DNA, 25 bp, Homo sapien
tgtttatgatgaggcacattgacca

SEQ ID NO: 1839381 - DNA, 25 bp, Homo sapien
tacacgttatgatatttgtgctggt

SEQ ID NO: 1839382 - DNA, 25 bp, Homo sapien
cgctttaaccagctaagccacggag

SEQ ID NO: 1839383 - DNA, 25 bp, Homo sapien
ctttaaccagctaagccacggagcc

SEQ ID NO: 1839384 - DNA, 25 bp, Homo sapien
ggcgctttaaccagctaagccacgg

SEQ ID NO: 1839385 - DNA, 25 bp, Homo sapien
actagacaggcgctttaaccagcta

SEQ ID NO: 1839386 - DNA, 25 bp, Homo sapien
agaggatgcaggtggctgtgtcaca

SEQ ID NO: 1839387 - DNA, 25 bp, Homo sapien
ggctccgctccacacgtctgaaatt

SEQ ID NO: 1839388 - DNA, 25 bp, Homo sapien
aaacaatgtgagagtggcagatggt

SEQ ID NO: 1839389 - DNA, 25 bp, Homo sapien
cacagactgccgacagtcatgtaaa

SEQ ID NO: 1839390 - DNA, 25 bp, Homo sapien
cttcctgttcctggcggagccgggc

SEQ ID NO: 1839391 - DNA, 25 bp, Homo sapien
tcctgttcctggcggagccgggctc

SEQ ID NO: 1839392 - DNA, 25 bp, Homo sapien
ctgttcctggcggagccgggctccg

SEQ ID NO: 1839393 - DNA, 25 bp, Homo sapien
tgttcctggcggagccgggctccgc

SEQ ID NO: 1839394 - DNA, 25 bp, Homo sapien
catgtgacctcttgcttctgtagca

SEQ ID NO: 1839395 - DNA, 25 bp, Homo sapien
catgctgcgtctctaatactttgga

SEQ ID NO: 1839396 - DNA, 25 bp, Homo sapien
aaacgccctggagagtgactgacac

SEQ ID NO: 1839397 - DNA, 25 bp, Homo sapien
aacctccgtggaaactcatgctgcg

SEQ ID NO: 1839398 - DNA, 25 bp, Homo sapien
gtggccttggcaaccctaaaatcag

SEQ ID NO: 1839399 - DNA, 25 bp, Homo sapien
caggctttctgttgatgacatcgag

SEQ ID NO: 1839400 - DNA, 25 bp, Homo sapien
tagacttgacttccttaaaccgaga

SEQ ID NO: 1839401 - DNA, 25 bp, Homo sapien
tgtcagccactttggcacggaagcc

SEQ ID NO: 1839402 - DNA, 25 bp, Homo sapien
tcttgtagcagtacagtacagtcct

SEQ ID NO: 1839403 - DNA, 25 bp, Homo sapien
tgtctttagtctgtcctgaactgat

SEQ ID NO: 1839404 - DNA, 25 bp, Homo sapien
catattcgaagtggttgtctctgca

SEQ ID NO: 1839405 - DNA, 25 bp, Homo sapien
gcaactttaggaaaaggtctgataa

SEQ ID NO: 1839406 - DNA, 25 bp, Homo sapien
tagccaactgttcctccatattact

SEQ ID NO: 1839407 - DNA, 25 bp, Homo sapien
gaatatggtacagctcttcatttac

SEQ ID NO: 1839408 - DNA, 25 bp, Homo sapien
caaacccaagagcattgaaattttg

SEQ ID NO: 1839409 - DNA, 25 bp, Homo sapien
aaaccatgtcatctttacaatgttg

SEQ ID NO: 1839410 - DNA, 25 bp, Homo sapien
tccatggccatactgactgagctac

SEQ ID NO: 1839411 - DNA, 25 bp, Homo sapien
catggccatactgactgagctacca

SEQ ID NO: 1839412 - DNA, 25 bp, Homo sapien
ggacttgaaacctggttcctcagat

SEQ ID NO: 1839413 - DNA, 25 bp, Homo sapien
ggccatactgactgagctaccaagc

SEQ ID NO: 1839414 - DNA, 25 bp, Homo sapien
ctggtgggaattactcggagcaact

SEQ ID NO: 1839415 - DNA, 25 bp, Homo sapien
cgttgcgagtcagttacaagctgaa

SEQ ID NO: 1839416 - DNA, 25 bp, Homo sapien
gaaccactagcgtctgaaccctata

SEQ ID NO: 1839417 - DNA, 25 bp, Homo sapien
cagagttctgaatcgttgcgagtca

SEQ ID NO: 1839418 - DNA, 25 bp, Homo sapien
ctggagaatgcgggcatcgatcccg

SEQ ID NO: 1839419 - DNA, 25 bp, Homo sapien
agcgagcgctctaccatttgagcta

SEQ ID NO: 1839420 - DNA, 25 bp, Homo sapien
gctaagcgagcgctctaccatttga

SEQ ID NO: 1839421 - DNA, 25 bp, Homo sapien
agcgctctaccatttgagctaattc

SEQ ID NO: 1839422 - DNA, 25 bp, Homo sapien
tcagcatgacttccgcccctcagcg

SEQ ID NO: 1839423 - DNA, 25 bp, Homo sapien
ccctcagcgccatctataacctgtt

SEQ ID NO: 1839424 - DNA, 25 bp, Homo sapien
tgacttccgcccctcagcgccatct

SEQ ID NO: 1839425 - DNA, 25 bp, Homo sapien
ttccgcccctcagcgccatctataa

SEQ ID NO: 1839426 - DNA, 25 bp, Homo sapien
cgggaagagtttaacactggaatca

SEQ ID NO: 1839427 - DNA, 25 bp, Homo sapien
gaagagtttaacactggaatcacat

SEQ ID NO: 1839428 - DNA, 25 bp, Homo sapien
ggaggcgaagtccatagaaacagct

SEQ ID NO: 1839429 - DNA, 25 bp, Homo sapien
gggaggcgaagtccatagaaacagc

SEQ ID NO: 1839430 - DNA, 25 bp, Homo sapien
ctgcgtagatgaaaagcagcgtttc

SEQ ID NO: 1839431 - DNA, 25 bp, Homo sapien
cgtttccaggaagtctgaggcttca

SEQ ID NO: 1839432 - DNA, 25 bp, Homo sapien
ttccaggaagtctgaggcttcactt

SEQ ID NO: 1839433 - DNA, 25 bp, Homo sapien
aagcagcgtttccaggaagtctgag

SEQ ID NO: 1839434 - DNA, 25 bp, Homo sapien
tggctggctcttggtttctcgatgc

SEQ ID NO: 1839435 - DNA, 25 bp, Homo sapien
ctcgcaacactcttcacctccactc

SEQ ID NO: 1839436 - DNA, 25 bp, Homo sapien
cctccctgagtctcctgctggctgg

SEQ ID NO: 1839437 - DNA, 25 bp, Homo sapien
ctggctcttggtttctcgatgccat

SEQ ID NO: 1839438 - DNA, 25 bp, Homo sapien
gatggctgttgttattctgagttat

SEQ ID NO: 1839439 - DNA, 25 bp, Homo sapien
ttaacagtgtatgtcctccaacttt

SEQ ID NO: 1839440 - DNA, 25 bp, Homo sapien
tgaatccataaattaaccggaggga

SEQ ID NO: 1839441 - DNA, 25 bp, Homo sapien
aacttaacagtgtatgtcctccaac

SEQ ID NO: 1839442 - DNA, 25 bp, Homo sapien
gaagaactgaaacgcctcaagggtg

SEQ ID NO: 1839443 - DNA, 25 bp, Homo sapien
ggattacttgtacgcggttcccagc

SEQ ID NO: 1839444 - DNA, 25 bp, Homo sapien
ccctcgggcgacgataagagactga

SEQ ID NO: 1839445 - DNA, 25 bp, Homo sapien
ttgatagtcatcaaactcgccccgg

SEQ ID NO: 1839446 - DNA, 25 bp, Homo sapien
tcgccagaattggaggcttgtgcgc

SEQ ID NO: 1839447 - DNA, 25 bp, Homo sapien
agagcagaaataagcgcgccgccgg

SEQ ID NO: 1839448 - DNA, 25 bp, Homo sapien
tgtgatctgatagggaatctgagga

SEQ ID NO: 1839449 - DNA, 25 bp, Homo sapien
gcgcctctgacaagtatttgcaaca

SEQ ID NO: 1839450 - DNA, 25 bp, Homo sapien
ggcccgtaaagcagcacggccaggg

SEQ ID NO: 1839451 - DNA, 25 bp, Homo sapien
gccagggggacgtgaacgggctcgc

SEQ ID NO: 1839452 - DNA, 25 bp, Homo sapien
gggcccgtaaagcagcacggccagg

SEQ ID NO: 1839453 - DNA, 25 bp, Homo sapien
cgtgaacgggctcgcctggcaactg

SEQ ID NO: 1839454 - DNA, 25 bp, Homo sapien
tcttggctgcctacgtctgtagggt

SEQ ID NO: 1839455 - DNA, 25 bp, Homo sapien
cgaactcctgtatgtgcctggctga

SEQ ID NO: 1839456 - DNA, 25 bp, Homo sapien
ctagaatgatcgtgactacccgggc

SEQ ID NO: 1839457 - DNA, 25 bp, Homo sapien
gaccaagtgtctactgatggcccaa

SEQ ID NO: 1839458 - DNA, 25 bp, Homo sapien
acatgggcactagggaccactgagg

SEQ ID NO: 1839459 - DNA, 25 bp, Homo sapien
gtatagcgacaaccccaaagagcgt

SEQ ID NO: 1839460 - DNA, 25 bp, Homo sapien
catttatcacttgccttagcgaggg

SEQ ID NO: 1839461 - DNA, 25 bp, Homo sapien
gaatgatgtgcacgggtcttccgcg

SEQ ID NO: 1839462 - DNA, 25 bp, Homo sapien
ccgccggacggtgtgtttaatcgat

SEQ ID NO: 1839463 - DNA, 25 bp, Homo sapien
cctgacttgttttcgtgccgccgga

SEQ ID NO: 1839464 - DNA, 25 bp, Homo sapien
tctagtttgaggacccagcgacagg

SEQ ID NO: 1839465 - DNA, 25 bp, Homo sapien
tgtggtgccaagatccagactgcct

SEQ ID NO: 1839466 - DNA, 25 bp, Homo sapien
ttgcagcgcgctagcccaggagcgc

SEQ ID NO: 1839467 - DNA, 25 bp, Homo sapien
gagcgccgcgctgtctggggactgt

SEQ ID NO: 1839468 - DNA, 25 bp, Homo sapien
ctttgggaattgcagcgcgctagcc

SEQ ID NO: 1839469 - DNA, 25 bp, Homo sapien
ttgggaattgcagcgcgctagccca

SEQ ID NO: 1839470 - DNA, 25 bp, Homo sapien
tttctctgtctttgcgggcggcgct

SEQ ID NO: 1839471 - DNA, 25 bp, Homo sapien
gcggcctttccgagactacccgaga

SEQ ID NO: 1839472 - DNA, 25 bp, Homo sapien
tctccaggtcaaatgctcggcgcgg

SEQ ID NO: 1839473 - DNA, 25 bp, Homo sapien
aagaagcgtaggagcgctgaccgcc

SEQ ID NO: 1839474 - DNA, 25 bp, Homo sapien
acagcggcgtggtagcggccttcca

SEQ ID NO: 1839475 - DNA, 25 bp, Homo sapien
ccagggaactgcctctcgggagagg

SEQ ID NO: 1839476 - DNA, 25 bp, Homo sapien
gacggtgagcgccagacagcggcgt

SEQ ID NO: 1839477 - DNA, 25 bp, Homo sapien
ccttggcccctctcattccctgagt

SEQ ID NO: 1839478 - DNA, 25 bp, Homo sapien
ggtgaggaaggatttagcagcagga

SEQ ID NO: 1839479 - DNA, 25 bp, Homo sapien
gggtgaggaaggatttagcagcagg

SEQ ID NO: 1839480 - DNA, 25 bp, Homo sapien
aggacatcaacaccggggcgagcag

SEQ ID NO: 1839481 - DNA, 25 bp, Homo sapien
atttagcagcaggacatcaacaccg

SEQ ID NO: 1839482 - DNA, 25 bp, Homo sapien
cattgcaaagaagtaccacagggct

SEQ ID NO: 1839483 - DNA, 25 bp, Homo sapien
gggtcaaaatgatcgtctctttagt

SEQ ID NO: 1839484 - DNA, 25 bp, Homo sapien
gatgcccaaaatctgtggaggtggt

SEQ ID NO: 1839485 - DNA, 25 bp, Homo sapien
tctctttagttgctttcatcccagg

SEQ ID NO: 1839486 - DNA, 25 bp, Homo sapien
ttgtctaacagatggaaaggccacg

SEQ ID NO: 1839487 - DNA, 25 bp, Homo sapien
gccatgaacgtgagaaagaatcacc

SEQ ID NO: 1839488 - DNA, 25 bp, Homo sapien
taacatgtggaccaatgagaagtgg

SEQ ID NO: 1839489 - DNA, 25 bp, Homo sapien
tattagtaggcatatgggcctctgc

SEQ ID NO: 1839490 - DNA, 25 bp, Homo sapien
ttggcactgcttcaagggaacctcc

SEQ ID NO: 1839491 - DNA, 25 bp, Homo sapien
cctgaggtagatttaggttggcact

SEQ ID NO: 1839492 - DNA, 25 bp, Homo sapien
ctagttttggttacaggctcccaag

SEQ ID NO: 1839493 - DNA, 25 bp, Homo sapien
gaacctccgtccatcccagaagtta

SEQ ID NO: 1839494 - DNA, 25 bp, Homo sapien
tgccctgttaatgataccaactttg

SEQ ID NO: 1839495 - DNA, 25 bp, Homo sapien
gactaacaagtagccgtaaggacta

SEQ ID NO: 1839496 - DNA, 25 bp, Homo sapien
catgttctctctaatgactaacaag

SEQ ID NO: 1839497 - DNA, 25 bp, Homo sapien
gagacaactaccagtaagatcagtt

SEQ ID NO: 1839498 - DNA, 25 bp, Homo sapien
acatgtcagatcaaataaacttcca

SEQ ID NO: 1839499 - DNA, 25 bp, Homo sapien
ctttttatgatacaagagctatttc

SEQ ID NO: 1839500 - DNA, 25 bp, Homo sapien
tgtgtgtcttatactgggcaacttt

SEQ ID NO: 1839501 - DNA, 25 bp, Homo sapien
aaaaaatacatcttgtgtgtcttat

SEQ ID NO: 1839502 - DNA, 25 bp, Homo sapien
tagagccatacacaaggtagcagtg

SEQ ID NO: 1839503 - DNA, 25 bp, Homo sapien
gcagtgtagcagttcgccaactcca

SEQ ID NO: 1839504 - DNA, 25 bp, Homo sapien
tcattaggatcaaagcttagagcca

SEQ ID NO: 1839505 - DNA, 25 bp, Homo sapien
cactatgagctatattcactggccc

SEQ ID NO: 1839506 - DNA, 25 bp, Homo sapien
aatcagaggatttggactagcaaca

SEQ ID NO: 1839507 - DNA, 25 bp, Homo sapien
tagaattctgcattccacgccatat

SEQ ID NO: 1839508 - DNA, 25 bp, Homo sapien
gatgaatctgccaactacttttccc

SEQ ID NO: 1839509 - DNA, 25 bp, Homo sapien
tattcactagtctacaaagtcccaa

SEQ ID NO: 1839510 - DNA, 25 bp, Homo sapien
tgattgcaatcctttccctgggatt

SEQ ID NO: 1839511 - DNA, 25 bp, Homo sapien
attgcaatcctttccctgggattaa

SEQ ID NO: 1839512 - DNA, 25 bp, Homo sapien
ttgcaatcctttccctgggattaaa

SEQ ID NO: 1839513 - DNA, 25 bp, Homo sapien
gattgcaatcctttccctgggatta

SEQ ID NO: 1839514 - DNA, 25 bp, Homo sapien
aacttttgagagtatgcctcaactg

SEQ ID NO: 1839515 - DNA, 25 bp, Homo sapien
tatgcctcaactgacactaagtaaa

SEQ ID NO: 1839516 - DNA, 25 bp, Homo sapien
caaataccagtaataacttgaaaga

SEQ ID NO: 1839517 - DNA, 25 bp, Homo sapien
ttgagagtatgcctcaactgacact

SEQ ID NO: 1839518 - DNA, 25 bp, Homo sapien
agcaatcattaagtagttcagataa

SEQ ID NO: 1839519 - DNA, 25 bp, Homo sapien
taaagcaatcattaagtagttcaga

SEQ ID NO: 1839520 - DNA, 25 bp, Homo sapien
agtaaaagtaaagcaatcattaagt

SEQ ID NO: 1839521 - DNA, 25 bp, Homo sapien
aagtaaagcaatcattaagtagttc

SEQ ID NO: 1839522 - DNA, 25 bp, Homo sapien
caagcttctgggtatctaaaaaact

SEQ ID NO: 1839523 - DNA, 25 bp, Homo sapien
tctctaccatatgagtcaactaact

SEQ ID NO: 1839524 - DNA, 25 bp, Homo sapien
tactgatttcatgtaaagtcctctc

SEQ ID NO: 1839525 - DNA, 25 bp, Homo sapien
cctgagttacccatcaggtctactc

SEQ ID NO: 1839526 - DNA, 25 bp, Homo sapien
taagacaggagcttctaccaaaggt

SEQ ID NO: 1839527 - DNA, 25 bp, Homo sapien
gatcaaatttgagctcagacggtaa

SEQ ID NO: 1839528 - DNA, 25 bp, Homo sapien
tcttacaacgagaagggctgagcat

SEQ ID NO: 1839529 - DNA, 25 bp, Homo sapien
tctggtccccactgaattctgagct

SEQ ID NO: 1839530 - DNA, 25 bp, Homo sapien
atggggagggctaagctcaagacct

SEQ ID NO: 1839531 - DNA, 25 bp, Homo sapien
taagctcaagacctttttcactcac

SEQ ID NO: 1839532 - DNA, 25 bp, Homo sapien
acatctgtgaggcttctgacgcatg

SEQ ID NO: 1839533 - DNA, 25 bp, Homo sapien
atctgtgaggcttctgacgcatggg

SEQ ID NO: 1839534 - DNA, 25 bp, Homo sapien
cctaattaggttggcactccgagta

SEQ ID NO: 1839535 - DNA, 25 bp, Homo sapien
gcaacaaagtccattcctaggagga

SEQ ID NO: 1839536 - DNA, 25 bp, Homo sapien
tacaatgaaggctgaacggtgtcgg

SEQ ID NO: 1839537 - DNA, 25 bp, Homo sapien
actctctggtgcacgataaggtctg

SEQ ID NO: 1839538 - DNA, 25 bp, Homo sapien
taagagctaagttttcacagaagtt

SEQ ID NO: 1839539 - DNA, 25 bp, Homo sapien
agaagttttgcttgcattcaaggca

SEQ ID NO: 1839540 - DNA, 25 bp, Homo sapien
aataagagctaagttttcacagaag

SEQ ID NO: 1839541 - DNA, 25 bp, Homo sapien
acagaagttttgcttgcattcaagg

SEQ ID NO: 1839542 - DNA, 25 bp, Homo sapien
tgaccatctatctgaataatctcat

SEQ ID NO: 1839543 - DNA, 25 bp, Homo sapien
ctggtatatatgaccatctatctga

SEQ ID NO: 1839544 - DNA, 25 bp, Homo sapien
ggtatatatgaccatctatctgaat

SEQ ID NO: 1839545 - DNA, 25 bp, Homo sapien
ccatctatctgaataatctcatgca

SEQ ID NO: 1839546 - DNA, 25 bp, Homo sapien
ttttgagttctctgattacatttct

SEQ ID NO: 1839547 - DNA, 25 bp, Homo sapien
tttgagttctctgattacatttctc

SEQ ID NO: 1839548 - DNA, 25 bp, Homo sapien
tggtcttcttgacccatcgttgccc

SEQ ID NO: 1839549 - DNA, 25 bp, Homo sapien
tctcctagggagttttccgctggtc

SEQ ID NO: 1839550 - DNA, 25 bp, Homo sapien
tacatctgtttcaggcctttcaatc

SEQ ID NO: 1839551 - DNA, 25 bp, Homo sapien
gagcctctacaagtttccagcatca

SEQ ID NO: 1839552 - DNA, 25 bp, Homo sapien
agaatccagatggaagaaaacatac

SEQ ID NO: 1839553 - DNA, 25 bp, Homo sapien
acattcctgatcctgacaatttgac

SEQ ID NO: 1839554 - DNA, 25 bp, Homo sapien
tttgacttctcaaagaagatagcat

SEQ ID NO: 1839555 - DNA, 25 bp, Homo sapien
aaaacatacattcctgatcctgaca

SEQ ID NO: 1839556 - DNA, 25 bp, Homo sapien
attggttcaaaattagactatcttt

SEQ ID NO: 1839557 - DNA, 25 bp, Homo sapien
tataataccccatatgaacagacct

SEQ ID NO: 1839558 - DNA, 25 bp, Homo sapien
tgaggaaatccactaaatataatac

SEQ ID NO: 1839559 - DNA, 25 bp, Homo sapien
tatctccatagatagtgaaagaacc

SEQ ID NO: 1839560 - DNA, 25 bp, Homo sapien
cacaatagagaccagatagccacca

SEQ ID NO: 1839561 - DNA, 25 bp, Homo sapien
gacctggaagtattaatcaatgcaa

SEQ ID NO: 1839562 - DNA, 25 bp, Homo sapien
ggaacaaggcaagtatggccaatac

SEQ ID NO: 1839563 - DNA, 25 bp, Homo sapien
tatgaagatgttccctcctaagatt

SEQ ID NO: 1839564 - DNA, 25 bp, Homo sapien
ttggtttcaaaaggtctctagttca

SEQ ID NO: 1839565 - DNA, 25 bp, Homo sapien
gttcagaactattcacaacactcaa

SEQ ID NO: 1839566 - DNA, 25 bp, Homo sapien
tttcaaaaggtctctagttcagaac

SEQ ID NO: 1839567 - DNA, 25 bp, Homo sapien
tctagttcagaactattcacaacac

SEQ ID NO: 1839568 - DNA, 25 bp, Homo sapien
cactggtagccatcagttccgacca

SEQ ID NO: 1839569 - DNA, 25 bp, Homo sapien
tggtagccatcagttccgaccagct

SEQ ID NO: 1839570 - DNA, 25 bp, Homo sapien
gccactggtagccatcagttccgac

SEQ ID NO: 1839571 - DNA, 25 bp, Homo sapien
ctgccactggtagccatcagttccg

SEQ ID NO: 1839572 - DNA, 25 bp, Homo sapien
tctccggacactcgaatctgggctt

SEQ ID NO: 1839573 - DNA, 25 bp, Homo sapien
atctgggcttcctggcggccgcaga

SEQ ID NO: 1839574 - DNA, 25 bp, Homo sapien
gggacagcacttccggttactctcc

SEQ ID NO: 1839575 - DNA, 25 bp, Homo sapien
tccggttactctccggacactcgaa

SEQ ID NO: 1839576 - DNA, 25 bp, Homo sapien
aaatactgtagatccttcctgcaca

SEQ ID NO: 1839577 - DNA, 25 bp, Homo sapien
gacaaatactgtagatccttcctgc

SEQ ID NO: 1839578 - DNA, 25 bp, Homo sapien
cccaatgtcttgacaaatactgtag

SEQ ID NO: 1839579 - DNA, 25 bp, Homo sapien
tccacccaatgtcttgacaaatact

SEQ ID NO: 1839580 - DNA, 25 bp, Homo sapien
agcgtgaagttttcccgttgtgact

SEQ ID NO: 1839581 - DNA, 25 bp, Homo sapien
tctgtcccggaatactctaaacttg

SEQ ID NO: 1839582 - DNA, 25 bp, Homo sapien
agacaatgagtagccactgctgttt

SEQ ID NO: 1839583 - DNA, 25 bp, Homo sapien
ttgcagacaatgagtagccactgct

SEQ ID NO: 1839584 - DNA, 25 bp, Homo sapien
tgcagacaatgagtagccactgctg

SEQ ID NO: 1839585 - DNA, 25 bp, Homo sapien
cagacaatgagtagccactgctgtt

SEQ ID NO: 1839586 - DNA, 25 bp, Homo sapien
ctttggttcaagacgtaggagcagc

SEQ ID NO: 1839587 - DNA, 25 bp, Homo sapien
tggtagagcgcttgcttagcacgca

SEQ ID NO: 1839588 - DNA, 25 bp, Homo sapien
tatgaaaagtgcagcgcagagccac

SEQ ID NO: 1839589 - DNA, 25 bp, Homo sapien
gaaccggccaaagtatgagacccat

SEQ ID NO: 1839590 - DNA, 25 bp, Homo sapien
gctgctttcacgttcctcaccactg

SEQ ID NO: 1839591 - DNA, 25 bp, Homo sapien
tcaagaagaccatgaatcttttcat

SEQ ID NO: 1839592 - DNA, 25 bp, Homo sapien
tgacacttcaagaagaccatgaatc

SEQ ID NO: 1839593 - DNA, 25 bp, Homo sapien
actgaggtcaaggacccgaggctgg

SEQ ID NO: 1839594 - DNA, 25 bp, Homo sapien
cacgatttcataacggatagaggac

SEQ ID NO: 1839595 - DNA, 25 bp, Homo sapien
aaatcatcacgagcgaggcgaagca

SEQ ID NO: 1839596 - DNA, 25 bp, Homo sapien
gaatgcaccgggaaccctagtcaag

SEQ ID NO: 1839597 - DNA, 25 bp, Homo sapien
tgggagacgagaccttcactcagga

SEQ ID NO: 1839598 - DNA, 25 bp, Homo sapien
catcttgatagctcctcatttttaa

SEQ ID NO: 1839599 - DNA, 25 bp, Homo sapien
tttttaaatgtaactgtggatacca

SEQ ID NO: 1839600 - DNA, 25 bp, Homo sapien
ctttgagcaaggcatcttgatagct

SEQ ID NO: 1839601 - DNA, 25 bp, Homo sapien
ttttaaatgtaactgtggataccac

SEQ ID NO: 1839602 - DNA, 25 bp, Homo sapien
cagaagaaagctttccctctgcatg

SEQ ID NO: 1839603 - DNA, 25 bp, Homo sapien
cacagaagaaagctttccctctgca

SEQ ID NO: 1839604 - DNA, 25 bp, Homo sapien
aacacacagaagaaagctttccctc

SEQ ID NO: 1839605 - DNA, 25 bp, Homo sapien
gaaagctttccctctgcatgtcact

SEQ ID NO: 1839606 - DNA, 25 bp, Homo sapien
aagcctcgagactgcacaccaaagt

SEQ ID NO: 1839607 - DNA, 25 bp, Homo sapien
gactgacggcagagccaaatatgaa

SEQ ID NO: 1839608 - DNA, 25 bp, Homo sapien
cttttttctcaagcctcgagactgc

SEQ ID NO: 1839609 - DNA, 25 bp, Homo sapien
accaaagtcccaagcaatcaaggaa

SEQ ID NO: 1839610 - DNA, 25 bp, Homo sapien
caccagacttttccagtgtccactt

SEQ ID NO: 1839611 - DNA, 25 bp, Homo sapien
agaaatggtgggtagtcgcgcacat

SEQ ID NO: 1839612 - DNA, 25 bp, Homo sapien
tggtgggtagtcgcgcacatctact

SEQ ID NO: 1839613 - DNA, 25 bp, Homo sapien
atggtgggtagtcgcgcacatctac

SEQ ID NO: 1839614 - DNA, 25 bp, Homo sapien
gaaatggtgggtagtcgcgcacatc

SEQ ID NO: 1839615 - DNA, 25 bp, Homo sapien
gaaaacgaggaagtaccagccatct

SEQ ID NO: 1839616 - DNA, 25 bp, Homo sapien
cgaggaagtaccagccatcttgaat

SEQ ID NO: 1839617 - DNA, 25 bp, Homo sapien
tgtcgaagaaaacgaggaagtacca

SEQ ID NO: 1839618 - DNA, 25 bp, Homo sapien
atcttgaatgcttcactggtaaaag

SEQ ID NO: 1839619 - DNA, 25 bp, Homo sapien
tatggaggacgtagtctgcaccaca

SEQ ID NO: 1839620 - DNA, 25 bp, Homo sapien
gcactggagctacggaaagactcat

SEQ ID NO: 1839621 - DNA, 25 bp, Homo sapien
gtttctcttgcccattctaccacgt

SEQ ID NO: 1839622 - DNA, 25 bp, Homo sapien
tgcaccacaaagtataatgggcact

SEQ ID NO: 1839623 - DNA, 25 bp, Homo sapien
gagagcctcatcagaatatccgtgg

SEQ ID NO: 1839624 - DNA, 25 bp, Homo sapien
tacagattgagggtagaacccagca

SEQ ID NO: 1839625 - DNA, 25 bp, Homo sapien
tcttggaaagaataggcttccctct

SEQ ID NO: 1839626 - DNA, 25 bp, Homo sapien
tctagatggttaagcagagagcctc

SEQ ID NO: 1839627 - DNA, 25 bp, Homo sapien
agtgtttacggaggatgtgttctgc

SEQ ID NO: 1839628 - DNA, 25 bp, Homo sapien
taaagtagatccttcctgtacaacg

SEQ ID NO: 1839629 - DNA, 25 bp, Homo sapien
catgaagtgtcgtgggcactagctc

SEQ ID NO: 1839630 - DNA, 25 bp, Homo sapien
tgtacaacgtctccagaatcttttc

SEQ ID NO: 1839631 - DNA, 25 bp, Homo sapien
gttttcttcaccatgaagtgtgaag

SEQ ID NO: 1839632 - DNA, 25 bp, Homo sapien
ttctttatccatgctatgatgttca

SEQ ID NO: 1839633 - DNA, 25 bp, Homo sapien
tttcttcaccatgaagtgtgaaggg

SEQ ID NO: 1839634 - DNA, 25 bp, Homo sapien
tctttatccatgctatgatgttcat

SEQ ID NO: 1839635 - DNA, 25 bp, Homo sapien
acccgcgaccttggcgttattagca

SEQ ID NO: 1839636 - DNA, 25 bp, Homo sapien
cgttattagcaccacgctctgacca

SEQ ID NO: 1839637 - DNA, 25 bp, Homo sapien
ttggcgttattagcaccacgctctg

SEQ ID NO: 1839638 - DNA, 25 bp, Homo sapien
gatcgaacccgcgaccttggcgtta

SEQ ID NO: 1839639 - DNA, 25 bp, Homo sapien
ctctctgaggctcgaactcaggacc

SEQ ID NO: 1839640 - DNA, 25 bp, Homo sapien
ctgccctctctgaggctcgaactca

SEQ ID NO: 1839641 - DNA, 25 bp, Homo sapien
tgagactgacgcgctgcccgctgcg

SEQ ID NO: 1839642 - DNA, 25 bp, Homo sapien
acgcgctgcccgctgcgctaagagg

SEQ ID NO: 1839643 - DNA, 25 bp, Homo sapien
gatcgaacccgcgaccttagcgtta

SEQ ID NO: 1839644 - DNA, 25 bp, Homo sapien
ctggccagtacggggatcgaacccg

SEQ ID NO: 1839645 - DNA, 25 bp, Homo sapien
ccttagcgttattagcaccacgctc

SEQ ID NO: 1839646 - DNA, 25 bp, Homo sapien
acccgcgaccttagcgttattagca

SEQ ID NO: 1839647 - DNA, 25 bp, Homo sapien
tgctattgaagatgcggctatgccg

SEQ ID NO: 1839648 - DNA, 25 bp, Homo sapien
tttggcgacacaaagcaccggcatg

SEQ ID NO: 1839649 - DNA, 25 bp, Homo sapien
aggtgacgatcacaactctagagcg

SEQ ID NO: 1839650 - DNA, 25 bp, Homo sapien
tagagcgtgctggaatagctgtgcc

SEQ ID NO: 1839651 - DNA, 25 bp, Homo sapien
ttctggtaattattttgttcagcaa

SEQ ID NO: 1839652 - DNA, 25 bp, Homo sapien
ctaaatgttgatttctttctggtaa

SEQ ID NO: 1839653 - DNA, 25 bp, Homo sapien
ttctttctggtaattattttgttca

SEQ ID NO: 1839654 - DNA, 25 bp, Homo sapien
taaatgttgatttctttctggtaat

SEQ ID NO: 1839655 - DNA, 25 bp, Homo sapien
gccgcaaaactttccgggatatctg

SEQ ID NO: 1839656 - DNA, 25 bp, Homo sapien
gatatctgtgctacttaatctggca

SEQ ID NO: 1839657 - DNA, 25 bp, Homo sapien
gtcttgcccccggtgtgacgtgctc

SEQ ID NO: 1839658 - DNA, 25 bp, Homo sapien
gacgtgctctcttccatgaaattaa

SEQ ID NO: 1839659 - DNA, 25 bp, Homo sapien
ctctgagatgtttggtagttatttg

SEQ ID NO: 1839660 - DNA, 25 bp, Homo sapien
tgggtccttacttgaccttcgtggc

SEQ ID NO: 1839661 - DNA, 25 bp, Homo sapien
gagaagaaagtgaccaccccagccc

SEQ ID NO: 1839662 - DNA, 25 bp, Homo sapien
tgtccctcgtcgctccttggttttc

SEQ ID NO: 1839663 - DNA, 25 bp, Homo sapien
tgagcacctgctcggagttcctgtc

SEQ ID NO: 1839664 - DNA, 25 bp, Homo sapien
ggttttccctcatcgactacataca

SEQ ID NO: 1839665 - DNA, 25 bp, Homo sapien
ttttcgggaccactcaacattcctg

SEQ ID NO: 1839666 - DNA, 25 bp, Homo sapien
ctggattttcgggaccactcaacat

SEQ ID NO: 1839667 - DNA, 25 bp, Homo sapien
ggattttcgggaccactcaacattc

SEQ ID NO: 1839668 - DNA, 25 bp, Homo sapien
gggaccactcaacattcctgagctc

SEQ ID NO: 1839669 - DNA, 25 bp, Homo sapien
ctctctgaggctcgaactcaggacc

SEQ ID NO: 1839670 - DNA, 25 bp, Homo sapien
acgcgctgcccgctgcgctaagagg

SEQ ID NO: 1839671 - DNA, 25 bp, Homo sapien
tgagactgacgcgctgcccgctgcg

SEQ ID NO: 1839672 - DNA, 25 bp, Homo sapien
ctgccctctctgaggctcgaactca

SEQ ID NO: 1839673 - DNA, 25 bp, Homo sapien
ttccgatgggctaaaaaggagccta

SEQ ID NO: 1839674 - DNA, 25 bp, Homo sapien
tgaggttcttccgatgggctaaaaa

SEQ ID NO: 1839675 - DNA, 25 bp, Homo sapien
cgattgtgaggttcttccgatgggc

SEQ ID NO: 1839676 - DNA, 25 bp, Homo sapien
ctatggcttccgattgtgaggttct

SEQ ID NO: 1839677 - DNA, 25 bp, Homo sapien
ctattggaaataatcttggaaaact

SEQ ID NO: 1839678 - DNA, 25 bp, Homo sapien
tggaaataatcttggaaaactagcg

SEQ ID NO: 1839679 - DNA, 25 bp, Homo sapien
attggaaataatcttggaaaactag

SEQ ID NO: 1839680 - DNA, 25 bp, Homo sapien
gaaataatcttggaaaactagcgac

SEQ ID NO: 1839681 - DNA, 25 bp, Homo sapien
cttcccggcacttgtgatagctgta

SEQ ID NO: 1839682 - DNA, 25 bp, Homo sapien
tcaagcaagtggaaccgtgtcgggc

SEQ ID NO: 1839683 - DNA, 25 bp, Homo sapien
tgatagctgtaacccgtattccctt

SEQ ID NO: 1839684 - DNA, 25 bp, Homo sapien
tgggtgctcgtttgacacgcgctcc

SEQ ID NO: 1839685 - DNA, 25 bp, Homo sapien
gttagcggaatttgtaacccgctca

SEQ ID NO: 1839686 - DNA, 25 bp, Homo sapien
ttagcggaatttgtaacccgctcac

SEQ ID NO: 1839687 - DNA, 25 bp, Homo sapien
tagtccggaaaaatcccccacatgc

SEQ ID NO: 1839688 - DNA, 25 bp, Homo sapien
cccacatgcctcaaatagccaatag

SEQ ID NO: 1839689 - DNA, 25 bp, Homo sapien
agggtccgcgtcctcatcctccggc

SEQ ID NO: 1839690 - DNA, 25 bp, Homo sapien
tgggtgggcaacagtcgcttcccag

SEQ ID NO: 1839691 - DNA, 25 bp, Homo sapien
ctgggtgggcaacagtcgcttccca

SEQ ID NO: 1839692 - DNA, 25 bp, Homo sapien
gtgggcaacagtcgcttcccagttg

SEQ ID NO: 1839693 - DNA, 25 bp, Homo sapien
ggtgggcaacagtcgcttcccagtt

SEQ ID NO: 1839694 - DNA, 25 bp, Homo sapien
tttttatggtacacagacgacaggg

SEQ ID NO: 1839695 - DNA, 25 bp, Homo sapien
ggtgtagatgtcgaatacattgatc

SEQ ID NO: 1839696 - DNA, 25 bp, Homo sapien
cagacgacagggaatcattgggcat

SEQ ID NO: 1839697 - DNA, 25 bp, Homo sapien
tatggtacacagacgacagggaatc

SEQ ID NO: 1839698 - DNA, 25 bp, Homo sapien
tataaataaatcaggtctgtttttc

SEQ ID NO: 1839699 - DNA, 25 bp, Homo sapien
ctttgaagtataaataaatcaggtc

SEQ ID NO: 1839700 - DNA, 25 bp, Homo sapien
gaagtataaataaatcaggtctgtt

SEQ ID NO: 1839701 - DNA, 25 bp, Homo sapien
caaacggttcccacggcaggggctg

SEQ ID NO: 1839702 - DNA, 25 bp, Homo sapien
gctacacggcgagtgggagggtggg

SEQ ID NO: 1839703 - DNA, 25 bp, Homo sapien
gcaggtgctcaaagacgaagaaaat

SEQ ID NO: 1839704 - DNA, 25 bp, Homo sapien
tcagagatgcagagtgctacacggc

SEQ ID NO: 1839705 - DNA, 25 bp, Homo sapien
gcgggaactccgagcaggtgctcaa

SEQ ID NO: 1839706 - DNA, 25 bp, Homo sapien
tctggaggagacgatatttgtgaag

SEQ ID NO: 1839707 - DNA, 25 bp, Homo sapien
gggcatcacttttagctgtacttgt

SEQ ID NO: 1839708 - DNA, 25 bp, Homo sapien
aattgagagatcgtgtgggcatcac

SEQ ID NO: 1839709 - DNA, 25 bp, Homo sapien
tgtagtaggaattgagagatcgtgt

SEQ ID NO: 1839710 - DNA, 25 bp, Homo sapien
aatgcgggcgtcgatcccgctacct

SEQ ID NO: 1839711 - DNA, 25 bp, Homo sapien
cgcatgctaagcgagcgctctaccg

SEQ ID NO: 1839712 - DNA, 25 bp, Homo sapien
agcgagcgctctaccgcctgagcta

SEQ ID NO: 1839713 - DNA, 25 bp, Homo sapien
ctggagaatgcgggcgtcgatcccg

SEQ ID NO: 1839714 - DNA, 25 bp, Homo sapien
caaagttctacgagcctgagagtgt

SEQ ID NO: 1839715 - DNA, 25 bp, Homo sapien
tcctggttatcaggagcctgccggt

SEQ ID NO: 1839716 - DNA, 25 bp, Homo sapien
ctgccggtactttgggccgccaaat

SEQ ID NO: 1839717 - DNA, 25 bp, Homo sapien
cgccaaatccctggcaggacaagat

SEQ ID NO: 1839718 - DNA, 25 bp, Homo sapien
tgcagcccgctctagagctgtgatc

SEQ ID NO: 1839719 - DNA, 25 bp, Homo sapien
tctcggaagtagagagcacgttcca

SEQ ID NO: 1839720 - DNA, 25 bp, Homo sapien
gcttgcgggcacagctattgcagcc

SEQ ID NO: 1839721 - DNA, 25 bp, Homo sapien
cacgttccagttggagaagcaccac

SEQ ID NO: 1839722 - DNA, 25 bp, Homo sapien
gaacttcacgccatacgcgccgcat

SEQ ID NO: 1839723 - DNA, 25 bp, Homo sapien
tgcaggcaaggccgcccggaagtag

SEQ ID NO: 1839724 - DNA, 25 bp, Homo sapien
aggcaaggccgcccggaagtagtgg

SEQ ID NO: 1839725 - DNA, 25 bp, Homo sapien
agccccagaacttcacgccatacgc

SEQ ID NO: 1839726 - DNA, 25 bp, Homo sapien
aggcgtcgatcctgctacctcttgc

SEQ ID NO: 1839727 - DNA, 25 bp, Homo sapien
gagagtgcaggcgtcgatcctgcta

SEQ ID NO: 1839728 - DNA, 25 bp, Homo sapien
tgctacctcttgcatgctaagcaag

SEQ ID NO: 1839729 - DNA, 25 bp, Homo sapien
gagtgcaggcgtcgatcctgctacc

SEQ ID NO: 1839730 - DNA, 25 bp, Homo sapien
cgaggaatgaagtttctgggagaca

SEQ ID NO: 1839731 - DNA, 25 bp, Homo sapien
gaacttccctaccaaggcgaagcga

SEQ ID NO: 1839732 - DNA, 25 bp, Homo sapien
ttctgggagacagcctcagacctgg

SEQ ID NO: 1839733 - DNA, 25 bp, Homo sapien
ccaaggcgaagcgaggaatgaagtt

SEQ ID NO: 1839734 - DNA, 25 bp, Homo sapien
ttatgtcgtgagacactcaggactc

SEQ ID NO: 1839735 - DNA, 25 bp, Homo sapien
gatgggatctggcatgcgtttgtca

SEQ ID NO: 1839736 - DNA, 25 bp, Homo sapien
tgagctttaaagacagatgggatct

SEQ ID NO: 1839737 - DNA, 25 bp, Homo sapien
cgtgtctaacgtcacacattgagct

SEQ ID NO: 1839738 - DNA, 25 bp, Homo sapien
ctcgcccttgggcaagtgcagaatc

SEQ ID NO: 1839739 - DNA, 25 bp, Homo sapien
cctcgcccttgggcaagtgcagaat

SEQ ID NO: 1839740 - DNA, 25 bp, Homo sapien
ggagagagctcctatccctgccgtc

SEQ ID NO: 1839741 - DNA, 25 bp, Homo sapien
tgtggcgcggagagagctcctatcc

SEQ ID NO: 1839742 - DNA, 25 bp, Homo sapien
tgccgtccatctacgtctcaggctt

SEQ ID NO: 1839743 - DNA, 25 bp, Homo sapien
ggcttggcccctggcgtgcagaaaa

SEQ ID NO: 1839744 - DNA, 25 bp, Homo sapien
tctaaaggtcatgagtcgggctgca

SEQ ID NO: 1839745 - DNA, 25 bp, Homo sapien
tttgggacagaaggcatcaacctcg

SEQ ID NO: 1839746 - DNA, 25 bp, Homo sapien
tattcaaccaccttgtcgacgctgc

SEQ ID NO: 1839747 - DNA, 25 bp, Homo sapien
tactgtgggtgttcctgcgtattca

SEQ ID NO: 1839748 - DNA, 25 bp, Homo sapien
aggaactggcggcaattccttccgt

SEQ ID NO: 1839749 - DNA, 25 bp, Homo sapien
aaggaactggcggcaattccttccg

SEQ ID NO: 1839750 - DNA, 25 bp, Homo sapien
tggccttgacggcccgtggaaagga

SEQ ID NO: 1839751 - DNA, 25 bp, Homo sapien
gaaaggaactggcggcaattccttc

SEQ ID NO: 1839752 - DNA, 25 bp, Homo sapien
gggttgcgtttgcagttcagtgttc

SEQ ID NO: 1839753 - DNA, 25 bp, Homo sapien
cgctgaatcgtagggttgcgtttgc

SEQ ID NO: 1839754 - DNA, 25 bp, Homo sapien
aatcgtagggttgcgtttgcagttc

SEQ ID NO: 1839755 - DNA, 25 bp, Homo sapien
acgtagttcgctgaatcgtagggtt

SEQ ID NO: 1839756 - DNA, 25 bp, Homo sapien
ctgcaagagcagatgacgaagagag

SEQ ID NO: 1839757 - DNA, 25 bp, Homo sapien
gatccaggtacgcatttgttttagc

SEQ ID NO: 1839758 - DNA, 25 bp, Homo sapien
tccaggtacgcatttgttttagcgg

SEQ ID NO: 1839759 - DNA, 25 bp, Homo sapien
ggagatccaggtacgcatttgtttt

SEQ ID NO: 1839760 - DNA, 25 bp, Homo sapien
gagatccaggtacgcatttgtttta

SEQ ID NO: 1839761 - DNA, 25 bp, Homo sapien
aatcactcttacacctcctatggtg

SEQ ID NO: 1839762 - DNA, 25 bp, Homo sapien
agatcttaatcactcttacacctcc

SEQ ID NO: 1839763 - DNA, 25 bp, Homo sapien
tcactcttacacctcctatggtgtc

SEQ ID NO: 1839764 - DNA, 25 bp, Homo sapien
cagagatcttaatcactcttacacc

SEQ ID NO: 1839765 - DNA, 25 bp, Homo sapien
tcaatcccactacctctcacatgct

SEQ ID NO: 1839766 - DNA, 25 bp, Homo sapien
gagcactccaccacttgagctactt

SEQ ID NO: 1839767 - DNA, 25 bp, Homo sapien
tctcacatgctaagcgagcactcca

SEQ ID NO: 1839768 - DNA, 25 bp, Homo sapien
ctggagaatgtgggcatcaatccca

SEQ ID NO: 1839769 - DNA, 25 bp, Homo sapien
ggaagtatagacaccctagacctca

SEQ ID NO: 1839770 - DNA, 25 bp, Homo sapien
taagtctaccaattaccgagagagg

SEQ ID NO: 1839771 - DNA, 25 bp, Homo sapien
cacttgggacaatattcccctggaa

SEQ ID NO: 1839772 - DNA, 25 bp, Homo sapien
ggtgtcacgggatctgcccatctcg

SEQ ID NO: 1839773 - DNA, 25 bp, Homo sapien
tatgatatgtcttgcaatgggtttc

SEQ ID NO: 1839774 - DNA, 25 bp, Homo sapien
tggctcctgggttcccgatgagaaa

SEQ ID NO: 1839775 - DNA, 25 bp, Homo sapien
ggtttatcctgcttgacatttactg

SEQ ID NO: 1839776 - DNA, 25 bp, Homo sapien
gaagatacttttgctccacatacca

SEQ ID NO: 1839777 - DNA, 25 bp, Homo sapien
cccactacctcttgcatgctaagca

SEQ ID NO: 1839778 - DNA, 25 bp, Homo sapien
actacctcttgcatgctaagcaagc

SEQ ID NO: 1839779 - DNA, 25 bp, Homo sapien
gaatgtgggcatcgatcccactacc

SEQ ID NO: 1839780 - DNA, 25 bp, Homo sapien
gagaatgtgggcatcgatcccacta

SEQ ID NO: 1839781 - DNA, 25 bp, Homo sapien
cttgttccttgtagctgagactctc

SEQ ID NO: 1839782 - DNA, 25 bp, Homo sapien
gactctctgggggttgtgagatggt

SEQ ID NO: 1839783 - DNA, 25 bp, Homo sapien
tctctgggggttgtgagatggtcca

SEQ ID NO: 1839784 - DNA, 25 bp, Homo sapien
tcacttgttccttgtagctgagact

SEQ ID NO: 1839785 - DNA, 25 bp, Homo sapien
aactggatggtgctgctacttccca

SEQ ID NO: 1839786 - DNA, 25 bp, Homo sapien
ccagggtctatttgaaaccttagag

SEQ ID NO: 1839787 - DNA, 25 bp, Homo sapien
taacctcaatctgtaaatccactgg

SEQ ID NO: 1839788 - DNA, 25 bp, Homo sapien
gagaaagcgctatggtcattgctgg

SEQ ID NO: 1839789 - DNA, 25 bp, Homo sapien
cttgaactgtagttctgacaacccc

SEQ ID NO: 1839790 - DNA, 25 bp, Homo sapien
caggtccaatgcttaactctcaaat

SEQ ID NO: 1839791 - DNA, 25 bp, Homo sapien
caagcacttcctaatgttgtcttaa

SEQ ID NO: 1839792 - DNA, 25 bp, Homo sapien
taacagcatgagaatagacttacac

SEQ ID NO: 1839793 - DNA, 25 bp, Homo sapien
ctctcctagagatctgttaaacttt

SEQ ID NO: 1839794 - DNA, 25 bp, Homo sapien
tattgtgaactgtagtaaaggtcac

SEQ ID NO: 1839795 - DNA, 25 bp, Homo sapien
gagataagttagggcatctggcagg

SEQ ID NO: 1839796 - DNA, 25 bp, Homo sapien
cctctcctagagatctgttaaactt

SEQ ID NO: 1839797 - DNA, 25 bp, Homo sapien
tggagaatggaaccacaagccagtc

SEQ ID NO: 1839798 - DNA, 25 bp, Homo sapien
atttcagatctcctagtgtacccag

SEQ ID NO: 1839799 - DNA, 25 bp, Homo sapien
gccaacccaaggatctggagaatgg

SEQ ID NO: 1839800 - DNA, 25 bp, Homo sapien
tggtggcctgagagcatttcagatc

SEQ ID NO: 1839801 - DNA, 25 bp, Homo sapien
gctcaatgtgggcaactgtgcaatt

SEQ ID NO: 1839802 - DNA, 25 bp, Homo sapien
tcaatgtgggcaactgtgcaattgg

SEQ ID NO: 1839803 - DNA, 25 bp, Homo sapien
caatgtgggcaactgtgcaattggc

SEQ ID NO: 1839804 - DNA, 25 bp, Homo sapien
aatgtgggcaactgtgcaattggca

SEQ ID NO: 1839805 - DNA, 25 bp, Homo sapien
gatgctatacattagttgaattgct

SEQ ID NO: 1839806 - DNA, 25 bp, Homo sapien
tcaggtgaactatctggattctgct

SEQ ID NO: 1839807 - DNA, 25 bp, Homo sapien
tgcaaattcttagcatggtatggtt

SEQ ID NO: 1839808 - DNA, 25 bp, Homo sapien
catgcattgtgtctcctttgggtac

SEQ ID NO: 1839809 - DNA, 25 bp, Homo sapien
caagcgagcaagaatgggccaaact

SEQ ID NO: 1839810 - DNA, 25 bp, Homo sapien
catctggtgagtgcctacattctct

SEQ ID NO: 1839811 - DNA, 25 bp, Homo sapien
cattacattgagaattaggtttcca

SEQ ID NO: 1839812 - DNA, 25 bp, Homo sapien
gaaccatggttcgtggttctggaga

SEQ ID NO: 1839813 - DNA, 25 bp, Homo sapien
tacccttttctttgcagctgaaatt

SEQ ID NO: 1839814 - DNA, 25 bp, Homo sapien
ctacccttttctttgcagctgaaat

SEQ ID NO: 1839815 - DNA, 25 bp, Homo sapien
ccttttctttgcagctgaaatttca

SEQ ID NO: 1839816 - DNA, 25 bp, Homo sapien
tttctttgcagctgaaatttcaatg

SEQ ID NO: 1839817 - DNA, 25 bp, Homo sapien
tagatttatggtccaccataaggga

SEQ ID NO: 1839818 - DNA, 25 bp, Homo sapien
gaggatggacatttaattacaattt

SEQ ID NO: 1839819 - DNA, 25 bp, Homo sapien
tggtccaccataagggaaataacat

SEQ ID NO: 1839820 - DNA, 25 bp, Homo sapien
caattttagatttatggtccaccat

SEQ ID NO: 1839821 - DNA, 25 bp, Homo sapien
tggtcaggggtatggataaaacaaa

SEQ ID NO: 1839822 - DNA, 25 bp, Homo sapien
gggacacccaccctcaatgcgggtg

SEQ ID NO: 1839823 - DNA, 25 bp, Homo sapien
agaattcagtgcctatatcacagtt

SEQ ID NO: 1839824 - DNA, 25 bp, Homo sapien
catagttcagatggatcttaccaga

SEQ ID NO: 1839825 - DNA, 25 bp, Homo sapien
gacttggagaaagctactctactct

SEQ ID NO: 1839826 - DNA, 25 bp, Homo sapien
tcttctcaagatcccacgacaatgg

SEQ ID NO: 1839827 - DNA, 25 bp, Homo sapien
gagttataccatcagtttccctagt

SEQ ID NO: 1839828 - DNA, 25 bp, Homo sapien
taaaacagatcctctagccaggaag

SEQ ID NO: 1839829 - DNA, 25 bp, Homo sapien
catacctagatcatataaatttgtg

SEQ ID NO: 1839830 - DNA, 25 bp, Homo sapien
cagctaaacctaatgaagaccaaat

SEQ ID NO: 1839831 - DNA, 25 bp, Homo sapien
tttgtgaaggttttgccatcacaag

SEQ ID NO: 1839832 - DNA, 25 bp, Homo sapien
gggaataatgaacatcaactatcct

SEQ ID NO: 1839833 - DNA, 25 bp, Homo sapien
tgtgtgagggatttatttggataaa

SEQ ID NO: 1839834 - DNA, 25 bp, Homo sapien
gatgtgtgagggatttatttggata

SEQ ID NO: 1839835 - DNA, 25 bp, Homo sapien
gtgtgagggatttatttggataaac

SEQ ID NO: 1839836 - DNA, 25 bp, Homo sapien
tgtgagggatttatttggataaaca

SEQ ID NO: 1839837 - DNA, 25 bp, Homo sapien
ggaggtgaaatcctttgggaaatga

SEQ ID NO: 1839838 - DNA, 25 bp, Homo sapien
tcccaatgcaacagtgggaggaggt

SEQ ID NO: 1839839 - DNA, 25 bp, Homo sapien
ggtggcatcctcataaatgaattaa

SEQ ID NO: 1839840 - DNA, 25 bp, Homo sapien
gaaatgattatgtcatgatggtggc

SEQ ID NO: 1839841 - DNA, 25 bp, Homo sapien
aacaaagtgctctcttagacgcaga

SEQ ID NO: 1839842 - DNA, 25 bp, Homo sapien
caaagtgctctcttagacgcagaca

SEQ ID NO: 1839843 - DNA, 25 bp, Homo sapien
aaagtgctctcttagacgcagacac

SEQ ID NO: 1839844 - DNA, 25 bp, Homo sapien
gtgctctcttagacgcagacactga

SEQ ID NO: 1839845 - DNA, 25 bp, Homo sapien
caactgcagttaaacagtgtccacc

SEQ ID NO: 1839846 - DNA, 25 bp, Homo sapien
tatttaaaatgggttccaggcacac

SEQ ID NO: 1839847 - DNA, 25 bp, Homo sapien
tactccaactatcccagagatcgag

SEQ ID NO: 1839848 - DNA, 25 bp, Homo sapien
gatcgagggaggtctcagtaactta

SEQ ID NO: 1839849 - DNA, 25 bp, Homo sapien
aagtaatgtattgtaactcccgcca

SEQ ID NO: 1839850 - DNA, 25 bp, Homo sapien
catatccttctccaaccaaccaaac

SEQ ID NO: 1839851 - DNA, 25 bp, Homo sapien
ccatcaccatatccttctccaacca

SEQ ID NO: 1839852 - DNA, 25 bp, Homo sapien
tgtattgtaactcccgccatcacca

SEQ ID NO: 1839853 - DNA, 25 bp, Homo sapien
ctgccatattcaagacacgttgaaa

SEQ ID NO: 1839854 - DNA, 25 bp, Homo sapien
ctttttgactgtatgtgggaagcgg

SEQ ID NO: 1839855 - DNA, 25 bp, Homo sapien
aagaaaaaggcaagctagccatttc

SEQ ID NO: 1839856 - DNA, 25 bp, Homo sapien
tttccatctcactatagcagactct

SEQ ID NO: 1839857 - DNA, 25 bp, Homo sapien
tcttacagccaaaatgtccagaatg

SEQ ID NO: 1839858 - DNA, 25 bp, Homo sapien
caatattcttacagccaaaatgtcc

SEQ ID NO: 1839859 - DNA, 25 bp, Homo sapien
tattcttacagccaaaatgtccaga

SEQ ID NO: 1839860 - DNA, 25 bp, Homo sapien
tccaatattcttacagccaaaatgt

SEQ ID NO: 1839861 - DNA, 25 bp, Homo sapien
acgggtacattatcccatgcgctaa

SEQ ID NO: 1839862 - DNA, 25 bp, Homo sapien
ggtacattatcccatgcgctaaact

SEQ ID NO: 1839863 - DNA, 25 bp, Homo sapien
cgggtacattatcccatgcgctaaa

SEQ ID NO: 1839864 - DNA, 25 bp, Homo sapien
tacattatcccatgcgctaaactgc

SEQ ID NO: 1839865 - DNA, 25 bp, Homo sapien
gctctagcagacttttctggtactc

SEQ ID NO: 1839866 - DNA, 25 bp, Homo sapien
agatgagctctccaaccacgtattt

SEQ ID NO: 1839867 - DNA, 25 bp, Homo sapien
catgaaatcggcaaaattccagatg

SEQ ID NO: 1839868 - DNA, 25 bp, Homo sapien
cagacccagatggtactgctctagc

SEQ ID NO: 1839869 - DNA, 25 bp, Homo sapien
ggctgtctggaaacaaggccagtaa

SEQ ID NO: 1839870 - DNA, 25 bp, Homo sapien
aggctgtctggaaacaaggccagta

SEQ ID NO: 1839871 - DNA, 25 bp, Homo sapien
ctgtctggaaacaaggccagtaagg

SEQ ID NO: 1839872 - DNA, 25 bp, Homo sapien
acagggtagcgggaggtgagcccaa

SEQ ID NO: 1839873 - DNA, 25 bp, Homo sapien
aacgtggacagggtagcgggaggtg

SEQ ID NO: 1839874 - DNA, 25 bp, Homo sapien
gtggacagggtagcgggaggtgagc

SEQ ID NO: 1839875 - DNA, 25 bp, Homo sapien
agggtagcgggaggtgagcccaaag

SEQ ID NO: 1839876 - DNA, 25 bp, Homo sapien
tgaaaccctataagcgtttccactc

SEQ ID NO: 1839877 - DNA, 25 bp, Homo sapien
ccctataagcgtttccactccatac

SEQ ID NO: 1839878 - DNA, 25 bp, Homo sapien
aaccctataagcgtttccactccat

SEQ ID NO: 1839879 - DNA, 25 bp, Homo sapien
tggtgaaaccctataagcgtttcca

SEQ ID NO: 1839880 - DNA, 25 bp, Homo sapien
gaataatgggattgtgatgtcttac

SEQ ID NO: 1839881 - DNA, 25 bp, Homo sapien
aataatgggattgtgatgtcttaca

SEQ ID NO: 1839882 - DNA, 25 bp, Homo sapien
gaatcaactccaggtgcccgtagtt

SEQ ID NO: 1839883 - DNA, 25 bp, Homo sapien
cacggatcacatccacatacagagc

SEQ ID NO: 1839884 - DNA, 25 bp, Homo sapien
agtagtagctgttcacacggatcac

SEQ ID NO: 1839885 - DNA, 25 bp, Homo sapien
tagttgcgataccaagagtagtagc

SEQ ID NO: 1839886 - DNA, 25 bp, Homo sapien
ccccttgtctgctgcgtaggtggag

SEQ ID NO: 1839887 - DNA, 25 bp, Homo sapien
cccttgtctgctgcgtaggtggagt

SEQ ID NO: 1839888 - DNA, 25 bp, Homo sapien
aatgaggttcgcttcctgaaataac

SEQ ID NO: 1839889 - DNA, 25 bp, Homo sapien
gaatccaattcccccagaggcgtag

SEQ ID NO: 1839890 - DNA, 25 bp, Homo sapien
ggcgtagccaccctgccaggtacac

SEQ ID NO: 1839891 - DNA, 25 bp, Homo sapien
cactgccaaaaatgaggttcgcttc

SEQ ID NO: 1839892 - DNA, 25 bp, Homo sapien
tgacaggcacagtgcggagccccac

SEQ ID NO: 1839893 - DNA, 25 bp, Homo sapien
ctcggtgacaggcacagtgcggagc

SEQ ID NO: 1839894 - DNA, 25 bp, Homo sapien
cggtgacaggcacagtgcggagccc

SEQ ID NO: 1839895 - DNA, 25 bp, Homo sapien
caggcacagtgcggagccccacagg

SEQ ID NO: 1839896 - DNA, 25 bp, Homo sapien
cgacagcctgaaccccatctggcct

SEQ ID NO: 1839897 - DNA, 25 bp, Homo sapien
atgacagccaaagcgccaggtgtga

SEQ ID NO: 1839898 - DNA, 25 bp, Homo sapien
ggtgtgagcgccccgacagcctgaa

SEQ ID NO: 1839899 - DNA, 25 bp, Homo sapien
ctatgacagccaaagcgccaggtgt

SEQ ID NO: 1839900 - DNA, 25 bp, Homo sapien
ctgcccgttcacctgtcctaggctc

SEQ ID NO: 1839901 - DNA, 25 bp, Homo sapien
ccgttcacctgtcctaggctcctgc

SEQ ID NO: 1839902 - DNA, 25 bp, Homo sapien
ccagggctaccagatgggggcaaaa

SEQ ID NO: 1839903 - DNA, 25 bp, Homo sapien
gttcacctgtcctaggctcctgctg

SEQ ID NO: 1839904 - DNA, 25 bp, Homo sapien
acggccaccagaggttggcacccag

SEQ ID NO: 1839905 - DNA, 25 bp, Homo sapien
ggtgttcgtgcatcaggtacggcca

SEQ ID NO: 1839906 - DNA, 25 bp, Homo sapien
ccacgagtacaggtaggcggggtgt

SEQ ID NO: 1839907 - DNA, 25 bp, Homo sapien
tcaggtacggccaccagaggttggc

SEQ ID NO: 1839908 - DNA, 25 bp, Homo sapien
gtcccagcctggttgtccacgactt

SEQ ID NO: 1839909 - DNA, 25 bp, Homo sapien
tggttactgcacttgacggagatct

SEQ ID NO: 1839910 - DNA, 25 bp, Homo sapien
aactggttactgcacttgacggaga

SEQ ID NO: 1839911 - DNA, 25 bp, Homo sapien
gtccacgactttgttttctgcattc

SEQ ID NO: 1839912 - DNA, 25 bp, Homo sapien
gagaccagggcttagggacggacat

SEQ ID NO: 1839913 - DNA, 25 bp, Homo sapien
gcaagagagaccagggcttagggac

SEQ ID NO: 1839914 - DNA, 25 bp, Homo sapien
gagagaccagggcttagggacggac

SEQ ID NO: 1839915 - DNA, 25 bp, Homo sapien
aagagagaccagggcttagggacgg

SEQ ID NO: 1839916 - DNA, 25 bp, Homo sapien
acttcttgcatcacctagatgtgac

SEQ ID NO: 1839917 - DNA, 25 bp, Homo sapien
cacttcttgcatcacctagatgtga

SEQ ID NO: 1839918 - DNA, 25 bp, Homo sapien
ccacttcttgcatcacctagatgtg

SEQ ID NO: 1839919 - DNA, 25 bp, Homo sapien
ttcttgcatcacctagatgtgacac

SEQ ID NO: 1839920 - DNA, 25 bp, Homo sapien
ctgtttgggccaaggccgaggacct

SEQ ID NO: 1839921 - DNA, 25 bp, Homo sapien
gtgcccctcattcctgtttgggcca

SEQ ID NO: 1839922 - DNA, 25 bp, Homo sapien
ccttgcgcgggtacctggctgcgct

SEQ ID NO: 1839923 - DNA, 25 bp, Homo sapien
tgtcactggtgccattatgtgctca

SEQ ID NO: 1839924 - DNA, 25 bp, Homo sapien
cggtctacagttcggcccctgcggt

SEQ ID NO: 1839925 - DNA, 25 bp, Homo sapien
gtctacagttcggcccctgcggtac

SEQ ID NO: 1839926 - DNA, 25 bp, Homo sapien
ctacagttcggcccctgcggtacaa

SEQ ID NO: 1839927 - DNA, 25 bp, Homo sapien
acagttcggcccctgcggtacaatg

SEQ ID NO: 1839928 - DNA, 25 bp, Homo sapien
taaatattaccaaatattggcaagc

SEQ ID NO: 1839929 - DNA, 25 bp, Homo sapien
gaatactaagaagagctgttcaccc

SEQ ID NO: 1839930 - DNA, 25 bp, Homo sapien
atactaagaagagctgttcacccag

SEQ ID NO: 1839931 - DNA, 25 bp, Homo sapien
acagaatactaagaagagctgttca

SEQ ID NO: 1839932 - DNA, 25 bp, Homo sapien
tatcaactctagatcactcataata

SEQ ID NO: 1839933 - DNA, 25 bp, Homo sapien
atatcaactctagatcactcataat

SEQ ID NO: 1839934 - DNA, 25 bp, Homo sapien
catatcaactctagatcactcataa

SEQ ID NO: 1839935 - DNA, 25 bp, Homo sapien
aaacatcactctatattgtaacaaa

SEQ ID NO: 1839936 - DNA, 25 bp, Homo sapien
cacattttacatatccaagatatat

SEQ ID NO: 1839937 - DNA, 25 bp, Homo sapien
ctcatattcccattgcttagtttca

SEQ ID NO: 1839938 - DNA, 25 bp, Homo sapien
caaataatttactactcatattccc

SEQ ID NO: 1839939 - DNA, 25 bp, Homo sapien
atgagtcaactgcacttaaggagcc

SEQ ID NO: 1839940 - DNA, 25 bp, Homo sapien
gctgggaaatgtggtattgtgcgca

SEQ ID NO: 1839941 - DNA, 25 bp, Homo sapien
ctccctaatgagtcaactgcactta

SEQ ID NO: 1839942 - DNA, 25 bp, Homo sapien
taatgagtcaactgcacttaaggag

SEQ ID NO: 1839943 - DNA, 25 bp, Homo sapien
atagtctaaggctggttttacaggg

SEQ ID NO: 1839944 - DNA, 25 bp, Homo sapien
aatagtctaaggctggttttacagg

SEQ ID NO: 1839945 - DNA, 25 bp, Homo sapien
aaatagtctaaggctggttttacag

SEQ ID NO: 1839946 - DNA, 25 bp, Homo sapien
ggaagcttcaggactacaccaaaga

SEQ ID NO: 1839947 - DNA, 25 bp, Homo sapien
gaagcttcaggactacaccaaagaa

SEQ ID NO: 1839948 - DNA, 25 bp, Homo sapien
cattgtgtggagtgcaggccatcat

SEQ ID NO: 1839949 - DNA, 25 bp, Homo sapien
ttaggaagcttcaggactacaccaa

SEQ ID NO: 1839950 - DNA, 25 bp, Homo sapien
acaatgaaacatctcctcatggagc

SEQ ID NO: 1839951 - DNA, 25 bp, Homo sapien
gaaacatctcctcatggagcttgag

SEQ ID NO: 1839952 - DNA, 25 bp, Homo sapien
aacatctcctcatggagcttgagtt

SEQ ID NO: 1839953 - DNA, 25 bp, Homo sapien
tgacaatgaaacatctcctcatgga

SEQ ID NO: 1839954 - DNA, 25 bp, Homo sapien
tgctgatgaatccttctttactcat

SEQ ID NO: 1839955 - DNA, 25 bp, Homo sapien
tgagtgcccacatttccttgatcca

SEQ ID NO: 1839956 - DNA, 25 bp, Homo sapien
accttgctgatgaatccttctttac

SEQ ID NO: 1839957 - DNA, 25 bp, Homo sapien
ctctgagtgcccacatttccttgat

SEQ ID NO: 1839958 - DNA, 25 bp, Homo sapien
tattaggctagccactggccatcgc

SEQ ID NO: 1839959 - DNA, 25 bp, Homo sapien
ccagaatggctcctaggaaagggcc

SEQ ID NO: 1839960 - DNA, 25 bp, Homo sapien
actacagctagttccccagaatggc

SEQ ID NO: 1839961 - DNA, 25 bp, Homo sapien
gagacctgtggcctagaacacctaa

SEQ ID NO: 1839962 - DNA, 25 bp, Homo sapien
catctgtagtcttcaagagactcat

SEQ ID NO: 1839963 - DNA, 25 bp, Homo sapien
ctggcccaaaataaggggatggaga

SEQ ID NO: 1839964 - DNA, 25 bp, Homo sapien
actggcccaaaataaggggatggag

SEQ ID NO: 1839965 - DNA, 25 bp, Homo sapien
tgcccgccagtctctggcgcgctcc

SEQ ID NO: 1839966 - DNA, 25 bp, Homo sapien
tttgcctagtgcatcccggccgcgg

SEQ ID NO: 1839967 - DNA, 25 bp, Homo sapien
cctccagctagacgtaataagttct

SEQ ID NO: 1839968 - DNA, 25 bp, Homo sapien
ggctttgcctagtgcatcccggccg

SEQ ID NO: 1839969 - DNA, 25 bp, Homo sapien
tgatctaagaggtatttccccgact

SEQ ID NO: 1839970 - DNA, 25 bp, Homo sapien
taaaaactggaatgtccctgtggtc

SEQ ID NO: 1839971 - DNA, 25 bp, Homo sapien
taaggatctttgcagctgacagcag

SEQ ID NO: 1839972 - DNA, 25 bp, Homo sapien
caaccattgtggtcattaggccata

SEQ ID NO: 1839973 - DNA, 25 bp, Homo sapien
caagatatctaatgcactcaaggac

SEQ ID NO: 1839974 - DNA, 25 bp, Homo sapien
tcagagtagttcctgaaaggattcc

SEQ ID NO: 1839975 - DNA, 25 bp, Homo sapien
cagttacattcttgccacgctccga

SEQ ID NO: 1839976 - DNA, 25 bp, Homo sapien
gttaaatggctatacagctctccca

SEQ ID NO: 1839977 - DNA, 25 bp, Homo sapien
gacatccatgcatgaagggccttct

SEQ ID NO: 1839978 - DNA, 25 bp, Homo sapien
tggtgatactggctattgctgggaa

SEQ ID NO: 1839979 - DNA, 25 bp, Homo sapien
tattgctggtatggacaaatactca

SEQ ID NO: 1839980 - DNA, 25 bp, Homo sapien
tttggccccagaagcttattgctgg

SEQ ID NO: 1839981 - DNA, 25 bp, Homo sapien
attacactcagctttgtgtaactga

SEQ ID NO: 1839982 - DNA, 25 bp, Homo sapien
ttgtgtaactgaataccaaataaca

SEQ ID NO: 1839983 - DNA, 25 bp, Homo sapien
tttgtgtaactgaataccaaataac

SEQ ID NO: 1839984 - DNA, 25 bp, Homo sapien
ttcatttgagtgagaaggcgagcgc

SEQ ID NO: 1839985 - DNA, 25 bp, Homo sapien
tcatttgagtgagaaggcgagcgcc

SEQ ID NO: 1839986 - DNA, 25 bp, Homo sapien
aattttcatttgagtgagaaggcga

SEQ ID NO: 1839987 - DNA, 25 bp, Homo sapien
ttttcatttgagtgagaaggcgagc

SEQ ID NO: 1839988 - DNA, 25 bp, Homo sapien
caaaacactctgaagcacaaggtct

SEQ ID NO: 1839989 - DNA, 25 bp, Homo sapien
tgtccacccataagaaagacgcccg

SEQ ID NO: 1839990 - DNA, 25 bp, Homo sapien
ccagggctgtttctcgcagactagc

SEQ ID NO: 1839991 - DNA, 25 bp, Homo sapien
cactgtttgggattaaaagcccagc

SEQ ID NO: 1839992 - DNA, 25 bp, Homo sapien
gaccagagcaaacacgccggatgtt

SEQ ID NO: 1839993 - DNA, 25 bp, Homo sapien
aggaaccggtgctgtgacgaccaga

SEQ ID NO: 1839994 - DNA, 25 bp, Homo sapien
gaagtattcgctttcgtttccgcaa

SEQ ID NO: 1839995 - DNA, 25 bp, Homo sapien
gtttccgcaaacaaagcatgctccg

SEQ ID NO: 1839996 - DNA, 25 bp, Homo sapien
agatctagcagcttctatcaactga

SEQ ID NO: 1839997 - DNA, 25 bp, Homo sapien
actgagaaacagcacctggtgtcct

SEQ ID NO: 1839998 - DNA, 25 bp, Homo sapien
ggaagatctagcagcttctatcaac

SEQ ID NO: 1839999 - DNA, 25 bp, Homo sapien
caactgagaaacagcacctggtgtc

SEQ ID NO: 1840000 - DNA, 25 bp, Homo sapien
gcagacatctctgctgatcagcaca

SEQ ID NO: 1840001 - DNA, 25 bp, Homo sapien
agtttcctaggtgagcactccagca

SEQ ID NO: 1840002 - DNA, 25 bp, Homo sapien
gctctgaaggtaggagacacaattg

SEQ ID NO: 1840003 - DNA, 25 bp, Homo sapien
ggctgagactggcataaccaaacat

SEQ ID NO: 1840004 - DNA, 25 bp, Homo sapien
caagcaaccctccctaaataaactg

SEQ ID NO: 1840005 - DNA, 25 bp, Homo sapien
cagatggaaaggccccaagcaaccc

SEQ ID NO: 1840006 - DNA, 25 bp, Homo sapien
gatggaaaggccccaagcaaccctc

SEQ ID NO: 1840007 - DNA, 25 bp, Homo sapien
agatggaaaggccccaagcaaccct

SEQ ID NO: 1840008 - DNA, 25 bp, Homo sapien
tgaagaaggataagttctatgtgct

SEQ ID NO: 1840009 - DNA, 25 bp, Homo sapien
tgacaaaagaatatacatgtcttat

SEQ ID NO: 1840010 - DNA, 25 bp, Homo sapien
aagaaggataagttctatgtgcttt

SEQ ID NO: 1840011 - DNA, 25 bp, Homo sapien
caaaagaatatacatgtcttataaa

SEQ ID NO: 1840012 - DNA, 25 bp, Homo sapien
ctgcctttcgaagagatccttctat

SEQ ID NO: 1840013 - DNA, 25 bp, Homo sapien
ttcgaagagatccttctatgtattc

SEQ ID NO: 1840014 - DNA, 25 bp, Homo sapien
ctttcgaagagatccttctatgtat

SEQ ID NO: 1840015 - DNA, 25 bp, Homo sapien
gcctttcgaagagatccttctatgt

SEQ ID NO: 1840016 - DNA, 25 bp, Homo sapien
tgtttagataacaccctggacccaa

SEQ ID NO: 1840017 - DNA, 25 bp, Homo sapien
gttgtgtcattgaagccatgcctgc

SEQ ID NO: 1840018 - DNA, 25 bp, Homo sapien
tggttctacggactccaggcaaaga

SEQ ID NO: 1840019 - DNA, 25 bp, Homo sapien
ggacagtggctaccagctaagttga

SEQ ID NO: 1840020 - DNA, 25 bp, Homo sapien
ttccacaagtgacaaaggacctcag

SEQ ID NO: 1840021 - DNA, 25 bp, Homo sapien
ggctcccttgtggaccagaaagaag

SEQ ID NO: 1840022 - DNA, 25 bp, Homo sapien
ggagttgggaaatgatcagccacct

SEQ ID NO: 1840023 - DNA, 25 bp, Homo sapien
aaacactgctgtacaatggctctgg

SEQ ID NO: 1840024 - DNA, 25 bp, Homo sapien
tggcctgtaccacactgaggagaca

SEQ ID NO: 1840025 - DNA, 25 bp, Homo sapien
cagatgataagccatggacccactt

SEQ ID NO: 1840026 - DNA, 25 bp, Homo sapien
caggcagtccgtagtttgaccacga

SEQ ID NO: 1840027 - DNA, 25 bp, Homo sapien
cattgcattagtaaaagccaggcgg

SEQ ID NO: 1840028 - DNA, 25 bp, Homo sapien
agcatgctagcttgggtttctcttc

SEQ ID NO: 1840029 - DNA, 25 bp, Homo sapien
taatccattcacgaacacagagccc

SEQ ID NO: 1840030 - DNA, 25 bp, Homo sapien
gagaaatccaaggtcaaatggccac

SEQ ID NO: 1840031 - DNA, 25 bp, Homo sapien
tctgatgaacactttttgctggtgg

SEQ ID NO: 1840032 - DNA, 25 bp, Homo sapien
tctgtacaatgtcaatccctgggta

SEQ ID NO: 1840033 - DNA, 25 bp, Homo sapien
cactggtgtcacaatgtcaatgtca

SEQ ID NO: 1840034 - DNA, 25 bp, Homo sapien
gaggctcgataatttgctgggccca

SEQ ID NO: 1840035 - DNA, 25 bp, Homo sapien
agtgctcatgggcaactcccactgg

SEQ ID NO: 1840036 - DNA, 25 bp, Homo sapien
tttgcttttccagtcccatttgttg

SEQ ID NO: 1840037 - DNA, 25 bp, Homo sapien
tgcttttccagtcccatttgttgtt

SEQ ID NO: 1840038 - DNA, 25 bp, Homo sapien
ttagctcataaaaatggagggttct

SEQ ID NO: 1840039 - DNA, 25 bp, Homo sapien
agctcataaaaatggagggttcttt

SEQ ID NO: 1840040 - DNA, 25 bp, Homo sapien
actgcaaactgccaacgttcatcgg

SEQ ID NO: 1840041 - DNA, 25 bp, Homo sapien
aaggtgacgctcgtcctgtccaggc

SEQ ID NO: 1840042 - DNA, 25 bp, Homo sapien
ttcatcggtagagcaaggtgacgct

SEQ ID NO: 1840043 - DNA, 25 bp, Homo sapien
gccaacgttcatcggtagagcaagg

SEQ ID NO: 1840044 - DNA, 25 bp, Homo sapien
agatgaccctagaaatgcttgagca

SEQ ID NO: 1840045 - DNA, 25 bp, Homo sapien
aggggaccatttccagaagatgacc

SEQ ID NO: 1840046 - DNA, 25 bp, Homo sapien
gaagatgaccctagaaatgcttgag

SEQ ID NO: 1840047 - DNA, 25 bp, Homo sapien
gaaggggaccatttccagaagatga

SEQ ID NO: 1840048 - DNA, 25 bp, Homo sapien
gccatttctaagtggctcgttggtc

SEQ ID NO: 1840049 - DNA, 25 bp, Homo sapien
ggtaatttaagctaccagcagacca

SEQ ID NO: 1840050 - DNA, 25 bp, Homo sapien
tctcgcttcgggtgtgagaggtccc

SEQ ID NO: 1840051 - DNA, 25 bp, Homo sapien
gcccacttcattttcgcccaataag

SEQ ID NO: 1840052 - DNA, 25 bp, Homo sapien
taaagtatttccccaaatagtcata

SEQ ID NO: 1840053 - DNA, 25 bp, Homo sapien
cttctaagggcagacaccggaatgt

SEQ ID NO: 1840054 - DNA, 25 bp, Homo sapien
accggaatgttgatgcggctgcagc

SEQ ID NO: 1840055 - DNA, 25 bp, Homo sapien
tctaagcaggcgagtactgaatccg

SEQ ID NO: 1840056 - DNA, 25 bp, Homo sapien
actgaatccggacttcttctaaggg

SEQ ID NO: 1840057 - DNA, 25 bp, Homo sapien
tatgacatgtcacccttcagtgctg

SEQ ID NO: 1840058 - DNA, 25 bp, Homo sapien
ggtgattactctctgactcctagtg

SEQ ID NO: 1840059 - DNA, 25 bp, Homo sapien
tgcagtcgactgttagggtgtcaca

SEQ ID NO: 1840060 - DNA, 25 bp, Homo sapien
tcttcaacggatgcatagccaatga

SEQ ID NO: 1840061 - DNA, 25 bp, Homo sapien
atattgctagcccaggttcgtctaa

SEQ ID NO: 1840062 - DNA, 25 bp, Homo sapien
catgatgacgcgttttgagaaagta

SEQ ID NO: 1840063 - DNA, 25 bp, Homo sapien
gggctgactattgactcttgggaat

SEQ ID NO: 1840064 - DNA, 25 bp, Homo sapien
aattcccatggaagtatatagcacc

SEQ ID NO: 1840065 - DNA, 25 bp, Homo sapien
aagggccactgagtatgaagatgca

SEQ ID NO: 1840066 - DNA, 25 bp, Homo sapien
gggccactgagtatgaagatgcaca

SEQ ID NO: 1840067 - DNA, 25 bp, Homo sapien
ttaagggccactgagtatgaagatg

SEQ ID NO: 1840068 - DNA, 25 bp, Homo sapien
gtatgaagatgcacatccttattca

SEQ ID NO: 1840069 - DNA, 25 bp, Homo sapien
ctgacgccccaggtcgacagcaaac

SEQ ID NO: 1840070 - DNA, 25 bp, Homo sapien
aggtcgacagcaaaccccgtgcgcc

SEQ ID NO: 1840071 - DNA, 25 bp, Homo sapien
cgcagcctgctcaggcgcctcctgc

SEQ ID NO: 1840072 - DNA, 25 bp, Homo sapien
cgttggcccggtcacgcccgcagcc

SEQ ID NO: 1840073 - DNA, 25 bp, Homo sapien
gatgactgcaaaaacgccttcgagc

SEQ ID NO: 1840074 - DNA, 25 bp, Homo sapien
ctgatgactgcaaaaacgccttcga

SEQ ID NO: 1840075 - DNA, 25 bp, Homo sapien
tgatgactgcaaaaacgccttcgag

SEQ ID NO: 1840076 - DNA, 25 bp, Homo sapien
agaaaggggagagggcaatagagag

SEQ ID NO: 1840077 - DNA, 25 bp, Homo sapien
gagaggagaggaaggtgacggtggg

SEQ ID NO: 1840078 - DNA, 25 bp, Homo sapien
gggagagggcaatagagaggagagg

SEQ ID NO: 1840079 - DNA, 25 bp, Homo sapien
aaggggagagggcaatagagaggag

SEQ ID NO: 1840080 - DNA, 25 bp, Homo sapien
aggcgggccgttcacttcatgtcaa

SEQ ID NO: 1840081 - DNA, 25 bp, Homo sapien
cactgacactttgacgcaggatagg

SEQ ID NO: 1840082 - DNA, 25 bp, Homo sapien
tactgcgcatgtgcactcagaggac

SEQ ID NO: 1840083 - DNA, 25 bp, Homo sapien
aaaacacaccgctggctggagattt

SEQ ID NO: 1840084 - DNA, 25 bp, Homo sapien
cttactgctccttagagtgaagtta

SEQ ID NO: 1840085 - DNA, 25 bp, Homo sapien
ttactgctccttagagtgaagttac

SEQ ID NO: 1840086 - DNA, 25 bp, Homo sapien
caggcgtgtgccaccaggcatgcta

SEQ ID NO: 1840087 - DNA, 25 bp, Homo sapien
ggcgtgtgccaccaggcatgctaat

SEQ ID NO: 1840088 - DNA, 25 bp, Homo sapien
acaggcgtgtgccaccaggcatgct

SEQ ID NO: 1840089 - DNA, 25 bp, Homo sapien
aggcgtgtgccaccaggcatgctaa

SEQ ID NO: 1840090 - DNA, 25 bp, Homo sapien
gcagtctgaagatgtggatcctcat

SEQ ID NO: 1840091 - DNA, 25 bp, Homo sapien
aagcagtctgaagatgtggatcctc

SEQ ID NO: 1840092 - DNA, 25 bp, Homo sapien
tccttaactccctttgccttataga

SEQ ID NO: 1840093 - DNA, 25 bp, Homo sapien
cctttgccttatagaaagacataga

SEQ ID NO: 1840094 - DNA, 25 bp, Homo sapien
gaacaaacattacacttgatgttag

SEQ ID NO: 1840095 - DNA, 25 bp, Homo sapien
ataagaacaaacattacacttgatg

SEQ ID NO: 1840096 - DNA, 25 bp, Homo sapien
aaacattacacttgatgttagccaa

SEQ ID NO: 1840097 - DNA, 25 bp, Homo sapien
taagaacaaacattacacttgatgt

SEQ ID NO: 1840098 - DNA, 25 bp, Homo sapien
ttgctggaaagcctaaacacaatgt

SEQ ID NO: 1840099 - DNA, 25 bp, Homo sapien
ccattatcaatcttacatactatta

SEQ ID NO: 1840100 - DNA, 25 bp, Homo sapien
aattggccaggtatagtcccaggta

SEQ ID NO: 1840101 - DNA, 25 bp, Homo sapien
aagctattgacttgtcccattatca

SEQ ID NO: 1840102 - DNA, 25 bp, Homo sapien
tgttttgagcaggaaacatatcaag

SEQ ID NO: 1840103 - DNA, 25 bp, Homo sapien
gaaacatatcaagacaaacttcctt

SEQ ID NO: 1840104 - DNA, 25 bp, Homo sapien
cacaccagaagaattttagagtttg

SEQ ID NO: 1840105 - DNA, 25 bp, Homo sapien
aacttccttcatactagacagtatt

SEQ ID NO: 1840106 - DNA, 25 bp, Homo sapien
tgagatgacatctagctctgtcacc

SEQ ID NO: 1840107 - DNA, 25 bp, Homo sapien
acaatcttggttcactgcaacctcc

SEQ ID NO: 1840108 - DNA, 25 bp, Homo sapien
cttgagatgacatctagctctgtca

SEQ ID NO: 1840109 - DNA, 25 bp, Homo sapien
caatcttggttcactgcaacctccg

SEQ ID NO: 1840110 - DNA, 25 bp, Homo sapien
gacagcagttaaagaaggcctcact

SEQ ID NO: 1840111 - DNA, 25 bp, Homo sapien
ggaatagtgttgacagcgcagccct

SEQ ID NO: 1840112 - DNA, 25 bp, Homo sapien
caggccatgtggttgcaagtgcaga

SEQ ID NO: 1840113 - DNA, 25 bp, Homo sapien
tacatagccctgaatagatggcggt

SEQ ID NO: 1840114 - DNA, 25 bp, Homo sapien
tagatgcgcctgctgagaagtttca

SEQ ID NO: 1840115 - DNA, 25 bp, Homo sapien
aagatgagcatcagtctcgtcttca

SEQ ID NO: 1840116 - DNA, 25 bp, Homo sapien
agggtttctctcctcaggtcactag

SEQ ID NO: 1840117 - DNA, 25 bp, Homo sapien
tcaggtcactagtgtagatgcgcct

SEQ ID NO: 1840118 - DNA, 25 bp, Homo sapien
ataagaaagacagttaatgagaaaa

SEQ ID NO: 1840119 - DNA, 25 bp, Homo sapien
aataagaaagacagttaatgagaaa

SEQ ID NO: 1840120 - DNA, 25 bp, Homo sapien
agaaagacagttaatgagaaaagca

SEQ ID NO: 1840121 - DNA, 25 bp, Homo sapien
aaggtggccacctagtccagaagag

SEQ ID NO: 1840122 - DNA, 25 bp, Homo sapien
gagggccctatcttcagacgttgac

SEQ ID NO: 1840123 - DNA, 25 bp, Homo sapien
gaagccgcctagagtttggtcaaaa

SEQ ID NO: 1840124 - DNA, 25 bp, Homo sapien
cagtaaattcctttggcggcatcaa

SEQ ID NO: 1840125 - DNA, 25 bp, Homo sapien
cgcagcgcttcctgacgttccgtta

SEQ ID NO: 1840126 - DNA, 25 bp, Homo sapien
acggaggcagggtgcggcccggaga

SEQ ID NO: 1840127 - DNA, 25 bp, Homo sapien
gcttcctgacgttccgttagttcag

SEQ ID NO: 1840128 - DNA, 25 bp, Homo sapien
acgttccgttagttcagtctcctga

SEQ ID NO: 1840129 - DNA, 25 bp, Homo sapien
gaatcctgcacttcccaagtctcgt

SEQ ID NO: 1840130 - DNA, 25 bp, Homo sapien
tttgtttcattatccgcacccacac

SEQ ID NO: 1840131 - DNA, 25 bp, Homo sapien
tcgtcgcacaggcttcaacaattac

SEQ ID NO: 1840132 - DNA, 25 bp, Homo sapien
cactgacagatgagggagtctaaaa

SEQ ID NO: 1840133 - DNA, 25 bp, Homo sapien
acattatccaatacctagcccttaa

SEQ ID NO: 1840134 - DNA, 25 bp, Homo sapien
ccataatctgggtgggaattctcac

SEQ ID NO: 1840135 - DNA, 25 bp, Homo sapien
gaaaatcctgaattgtctcaaatat

SEQ ID NO: 1840136 - DNA, 25 bp, Homo sapien
tagatttacccaagtctccaagtag

SEQ ID NO: 1840137 - DNA, 25 bp, Homo sapien
gagggtgctaaatgactacatgcca

SEQ ID NO: 1840138 - DNA, 25 bp, Homo sapien
gttgatagcctcctctgaagagtgg

SEQ ID NO: 1840139 - DNA, 25 bp, Homo sapien
tatgggacacttagcagcagcagta

SEQ ID NO: 1840140 - DNA, 25 bp, Homo sapien
tactctgggaccattctgggaaatt

SEQ ID NO: 1840141 - DNA, 25 bp, Homo sapien
aaggggacaccagcaagatgaaaat

SEQ ID NO: 1840142 - DNA, 25 bp, Homo sapien
ttaaggggacaccagcaagatgaaa

SEQ ID NO: 1840143 - DNA, 25 bp, Homo sapien
gggtcccaccagcacatcaggctaa

SEQ ID NO: 1840144 - DNA, 25 bp, Homo sapien
ggtcccaccagcacatcaggctaat

SEQ ID NO: 1840145 - DNA, 25 bp, Homo sapien
tacaacaaaccagatagcaattcag

SEQ ID NO: 1840146 - DNA, 25 bp, Homo sapien
ccttagtacgggatgattatggtga

SEQ ID NO: 1840147 - DNA, 25 bp, Homo sapien
ttatggtgaaggaaaagaacttgag

SEQ ID NO: 1840148 - DNA, 25 bp, Homo sapien
gtaatttaagttctgtttattcaca

SEQ ID NO: 1840149 - DNA, 25 bp, Homo sapien
tagggttgagagtttgcaaccaact

SEQ ID NO: 1840150 - DNA, 25 bp, Homo sapien
ggttgagagtttgcaaccaactcac

SEQ ID NO: 1840151 - DNA, 25 bp, Homo sapien
aagagccgttagggttgagagtttg

SEQ ID NO: 1840152 - DNA, 25 bp, Homo sapien
gccgttagggttgagagtttgcaac

SEQ ID NO: 1840153 - DNA, 25 bp, Homo sapien
ggcgtgcttggccaactccccaggc

SEQ ID NO: 1840154 - DNA, 25 bp, Homo sapien
tgtacttggtgacggccttagtacc

SEQ ID NO: 1840155 - DNA, 25 bp, Homo sapien
tgacggccttagtaccctcggacac

SEQ ID NO: 1840156 - DNA, 25 bp, Homo sapien
cttggtgacggccttagtaccctcg

SEQ ID NO: 1840157 - DNA, 25 bp, Homo sapien
gttcacaaacgaattcatgatgccc

SEQ ID NO: 1840158 - DNA, 25 bp, Homo sapien
cgttcacaaacgaattcatgatgcc

SEQ ID NO: 1840159 - DNA, 25 bp, Homo sapien
aatgtcgttcacaaacgaattcatg

SEQ ID NO: 1840160 - DNA, 25 bp, Homo sapien
aaaatgtcgttcacaaacgaattca

SEQ ID NO: 1840161 - DNA, 25 bp, Homo sapien
gctataaagcgccaacgaaaaggaa

SEQ ID NO: 1840162 - DNA, 25 bp, Homo sapien
tgtgtagctataaagcgccaacgaa

SEQ ID NO: 1840163 - DNA, 25 bp, Homo sapien
tgtagctataaagcgccaacgaaaa

SEQ ID NO: 1840164 - DNA, 25 bp, Homo sapien
tagctataaagcgccaacgaaaagg

SEQ ID NO: 1840165 - DNA, 25 bp, Homo sapien
gctcttctagggccggtctccagtt

SEQ ID NO: 1840166 - DNA, 25 bp, Homo sapien
tcgctatgtctggacgtggcaagca

SEQ ID NO: 1840167 - DNA, 25 bp, Homo sapien
tttgtggttgctcgtagtgagttgc

SEQ ID NO: 1840168 - DNA, 25 bp, Homo sapien
aaagcccgcgctaaggccaagactc

SEQ ID NO: 1840169 - DNA, 25 bp, Homo sapien
tatactgaattcagctacagcaagt

SEQ ID NO: 1840170 - DNA, 25 bp, Homo sapien
cagcaagttacagccagtcatatca

SEQ ID NO: 1840171 - DNA, 25 bp, Homo sapien
ccttaccctctttacaacatatact

SEQ ID NO: 1840172 - DNA, 25 bp, Homo sapien
caattaacctatgctaccttaccct

SEQ ID NO: 1840173 - DNA, 25 bp, Homo sapien
gataataagttcctcaaatcagtgg

SEQ ID NO: 1840174 - DNA, 25 bp, Homo sapien
catatcaggaactgctactggtgca

SEQ ID NO: 1840175 - DNA, 25 bp, Homo sapien
agaaaatcaccaaatgggccgggtg

SEQ ID NO: 1840176 - DNA, 25 bp, Homo sapien
tgtattgtgctgactaaccaactga

SEQ ID NO: 1840177 - DNA, 25 bp, Homo sapien
taggtatggttgcattctcgtcttc

SEQ ID NO: 1840178 - DNA, 25 bp, Homo sapien
tctgcagtagataatgaggtaaccg

SEQ ID NO: 1840179 - DNA, 25 bp, Homo sapien
aatttattaaggtacagggctgagg

SEQ ID NO: 1840180 - DNA, 25 bp, Homo sapien
gaagcttatatactctttctcagag

SEQ ID NO: 1840181 - DNA, 25 bp, Homo sapien
acaggacaaagttagagggaccttg

SEQ ID NO: 1840182 - DNA, 25 bp, Homo sapien
ccaagctcgatatttggggggataa

SEQ ID NO: 1840183 - DNA, 25 bp, Homo sapien
cccaccattaccaagctcgatattt

SEQ ID NO: 1840184 - DNA, 25 bp, Homo sapien
accattaccaagctcgatatttggg

SEQ ID NO: 1840185 - DNA, 25 bp, Homo sapien
tctatgaggagacccgcggagtgtt

SEQ ID NO: 1840186 - DNA, 25 bp, Homo sapien
gctgcgcgacaacatccagggtatc

SEQ ID NO: 1840187 - DNA, 25 bp, Homo sapien
attttgaagcccagtcattctctaa

SEQ ID NO: 1840188 - DNA, 25 bp, Homo sapien
tggcttcggcggctaaatggcattt

SEQ ID NO: 1840189 - DNA, 25 bp, Homo sapien
gaacatacactcactcaaacctgta

SEQ ID NO: 1840190 - DNA, 25 bp, Homo sapien
gatgcaaaacctgcttgtcacttaa

SEQ ID NO: 1840191 - DNA, 25 bp, Homo sapien
gatagataagccatcacagagagta

SEQ ID NO: 1840192 - DNA, 25 bp, Homo sapien
cagagagtagtagtggtgctagtcc

SEQ ID NO: 1840193 - DNA, 25 bp, Homo sapien
caaataggatacactattaaaatta

SEQ ID NO: 1840194 - DNA, 25 bp, Homo sapien
tgactatatgctgaaactatatttt

SEQ ID NO: 1840195 - DNA, 25 bp, Homo sapien
tacattctgtattgactatatgctg

SEQ ID NO: 1840196 - DNA, 25 bp, Homo sapien
tttggagacgaactctcgctttcgt

SEQ ID NO: 1840197 - DNA, 25 bp, Homo sapien
tcatctagggtagaaagccatgcca

SEQ ID NO: 1840198 - DNA, 25 bp, Homo sapien
taaattctgtgctatcagccgggcg

SEQ ID NO: 1840199 - DNA, 25 bp, Homo sapien
caaagactagaacaatgcgtggcca

SEQ ID NO: 1840200 - DNA, 25 bp, Homo sapien
tggaccaattgacgctgaacatgcc

SEQ ID NO: 1840201 - DNA, 25 bp, Homo sapien
gcgccttagtcacggctttcttcga

SEQ ID NO: 1840202 - DNA, 25 bp, Homo sapien
tagtcacggctttcttcgagccctt

SEQ ID NO: 1840203 - DNA, 25 bp, Homo sapien
ccttagtcacggctttcttcgagcc

SEQ ID NO: 1840204 - DNA, 25 bp, Homo sapien
ctgcgccttagtcacggctttcttc

SEQ ID NO: 1840205 - DNA, 25 bp, Homo sapien
aagtaatgggagcaaggtaccagga

SEQ ID NO: 1840206 - DNA, 25 bp, Homo sapien
taatgggagcaaggtaccaggagtc

SEQ ID NO: 1840207 - DNA, 25 bp, Homo sapien
gcagatcgagaaaacgggaagtaat

SEQ ID NO: 1840208 - DNA, 25 bp, Homo sapien
acgagcagcagatcgagaaaacggg

SEQ ID NO: 1840209 - DNA, 25 bp, Homo sapien
gcacacaccaccacgaccggctagt

SEQ ID NO: 1840210 - DNA, 25 bp, Homo sapien
tagtggagacggggttccaccatgg

SEQ ID NO: 1840211 - DNA, 25 bp, Homo sapien
tggagacggggttccaccatggtgg

SEQ ID NO: 1840212 - DNA, 25 bp, Homo sapien
gatggagtctccaacaggctggagt

SEQ ID NO: 1840213 - DNA, 25 bp, Homo sapien
tgcatagctggtattgctctttgac

SEQ ID NO: 1840214 - DNA, 25 bp, Homo sapien
caatgttaagtaaggtctatgatag

SEQ ID NO: 1840215 - DNA, 25 bp, Homo sapien
ctgtgagactgactttagcatgcat

SEQ ID NO: 1840216 - DNA, 25 bp, Homo sapien
tagcatgcataagtgcatagctggt

SEQ ID NO: 1840217 - DNA, 25 bp, Homo sapien
tataagagatatttggtgccgacca

SEQ ID NO: 1840218 - DNA, 25 bp, Homo sapien
tccaatcagattctcaattagtagg

SEQ ID NO: 1840219 - DNA, 25 bp, Homo sapien
gccgaccacttatgggctacatatg

SEQ ID NO: 1840220 - DNA, 25 bp, Homo sapien
ttctcacaaccttttgaggtgggta

SEQ ID NO: 1840221 - DNA, 25 bp, Homo sapien
tcgttgtcatgcattccttgtaagg

SEQ ID NO: 1840222 - DNA, 25 bp, Homo sapien
cctattacagatggagtcgttgtca

SEQ ID NO: 1840223 - DNA, 25 bp, Homo sapien
tcttcatacctattacagatggagt

SEQ ID NO: 1840224 - DNA, 25 bp, Homo sapien
tacagatggagtcgttgtcatgcat

SEQ ID NO: 1840225 - DNA, 25 bp, Homo sapien
ttctggcacctgtcgagatgccaga

SEQ ID NO: 1840226 - DNA, 25 bp, Homo sapien
cccgaagattctgactagtttggca

SEQ ID NO: 1840227 - DNA, 25 bp, Homo sapien
gtcgagatgccagattccatgccaa

SEQ ID NO: 1840228 - DNA, 25 bp, Homo sapien
ttgttgccaaagatctgaggaccac

SEQ ID NO: 1840229 - DNA, 25 bp, Homo sapien
ttgatgtcgcctcaatttctcaacg

SEQ ID NO: 1840230 - DNA, 25 bp, Homo sapien
caatttctcaacgtactgagcagta

SEQ ID NO: 1840231 - DNA, 25 bp, Homo sapien
gacgtcgcctcaatttttcaacata

SEQ ID NO: 1840232 - DNA, 25 bp, Homo sapien
ctgagcagtaccttgacgtcgcctc

SEQ ID NO: 1840233 - DNA, 25 bp, Homo sapien
cacaaaaaacactagtattcatcat

SEQ ID NO: 1840234 - DNA, 25 bp, Homo sapien
tgtaaatggcttggtaagggccgca

SEQ ID NO: 1840235 - DNA, 25 bp, Homo sapien
tggtatgggccacatcgagaacagc

SEQ ID NO: 1840236 - DNA, 25 bp, Homo sapien
cagaaagcaacgtcacaagtctggc

SEQ ID NO: 1840237 - DNA, 25 bp, Homo sapien
taagcctaaggctaaccacggatct

SEQ ID NO: 1840238 - DNA, 25 bp, Homo sapien
cgctctaaccaactgagctaaccgg

SEQ ID NO: 1840239 - DNA, 25 bp, Homo sapien
gatcgaacccgcgaccttggcgtta

SEQ ID NO: 1840240 - DNA, 25 bp, Homo sapien
acccgcgaccttggcgttattagca

SEQ ID NO: 1840241 - DNA, 25 bp, Homo sapien
tggcgttattagcaccacgctctaa

SEQ ID NO: 1840242 - DNA, 25 bp, Homo sapien
tcggcgtaaatgaaaggaccagcgg

SEQ ID NO: 1840243 - DNA, 25 bp, Homo sapien
gcttgcagctccacaaacgataaaa

SEQ ID NO: 1840244 - DNA, 25 bp, Homo sapien
taaaatcagacttggccctgcagtg

SEQ ID NO: 1840245 - DNA, 25 bp, Homo sapien
cagcgggacggctcctttcaagagt

SEQ ID NO: 1840246 - DNA, 25 bp, Homo sapien
cgaaagtaagtaacaaccatgcccg

SEQ ID NO: 1840247 - DNA, 25 bp, Homo sapien
ttaaaggcggagctgttcttgcatt

SEQ ID NO: 1840248 - DNA, 25 bp, Homo sapien
tttctcttacactcttccaaggacc

SEQ ID NO: 1840249 - DNA, 25 bp, Homo sapien
tcaaagaaatccagattccgaaagt

SEQ ID NO: 1840250 - DNA, 25 bp, Homo sapien
tgtgaggcgaacgtgataaccactc

SEQ ID NO: 1840251 - DNA, 25 bp, Homo sapien
tgaggcgaacgtgataaccactcca

SEQ ID NO: 1840252 - DNA, 25 bp, Homo sapien
gaggcgaacgtgataaccactccac

SEQ ID NO: 1840253 - DNA, 25 bp, Homo sapien
gcgaacgtgataaccactccactac

SEQ ID NO: 1840254 - DNA, 25 bp, Homo sapien
gccatcagcactttctgccatagct

SEQ ID NO: 1840255 - DNA, 25 bp, Homo sapien
caggagatgattggaggccatcagc

SEQ ID NO: 1840256 - DNA, 25 bp, Homo sapien
aaccatgaaggagcgacctgagacc

SEQ ID NO: 1840257 - DNA, 25 bp, Homo sapien
tttatctgcaaaacccgccccgata

SEQ ID NO: 1840258 - DNA, 25 bp, Homo sapien
tgtttgcagtcaaataactagaagt

SEQ ID NO: 1840259 - DNA, 25 bp, Homo sapien
tttgtttgcagtcaaataactagaa

SEQ ID NO: 1840260 - DNA, 25 bp, Homo sapien
ttgtttgcagtcaaataactagaag

SEQ ID NO: 1840261 - DNA, 25 bp, Homo sapien
gccaggagtcgaacctagaatcttc

SEQ ID NO: 1840262 - DNA, 25 bp, Homo sapien
ggagtcgaacctagaatcttctgat

SEQ ID NO: 1840263 - DNA, 25 bp, Homo sapien
cagccaggagtcgaacctagaatct

SEQ ID NO: 1840264 - DNA, 25 bp, Homo sapien
agccagccaggagtcgaacctagaa

SEQ ID NO: 1840265 - DNA, 25 bp, Homo sapien
tgagcaagatcgcagagcagtgccc

SEQ ID NO: 1840266 - DNA, 25 bp, Homo sapien
tgagtgatccatatatgtgctgttg

SEQ ID NO: 1840267 - DNA, 25 bp, Homo sapien
aaaactgctaagtaggtaccatcaa

SEQ ID NO: 1840268 - DNA, 25 bp, Homo sapien
gtatcttccaactcataacacactg

SEQ ID NO: 1840269 - DNA, 25 bp, Homo sapien
agatttccagaaatcaacttccagt

SEQ ID NO: 1840270 - DNA, 25 bp, Homo sapien
cagtaagagggttgggcagatttcc

SEQ ID NO: 1840271 - DNA, 25 bp, Homo sapien
aagagggttgggcagatttccagaa

SEQ ID NO: 1840272 - DNA, 25 bp, Homo sapien
acttccagtcaacccggagatcata

SEQ ID NO: 1840273 - DNA, 25 bp, Homo sapien
cgcggacacctgtccattggatctt

SEQ ID NO: 1840274 - DNA, 25 bp, Homo sapien
cggacacctgtccattggatcttaa

SEQ ID NO: 1840275 - DNA, 25 bp, Homo sapien
ccacgcggacacctgtccattggat

SEQ ID NO: 1840276 - DNA, 25 bp, Homo sapien
ggctcgaacccacgcggacacctgt

SEQ ID NO: 1840277 - DNA, 25 bp, Homo sapien
tatttccgatgtatagctggatgtg

SEQ ID NO: 1840278 - DNA, 25 bp, Homo sapien
ttagaggagtgcaagactgaaatgg

SEQ ID NO: 1840279 - DNA, 25 bp, Homo sapien
gaaatggcatcatttaattccgact

SEQ ID NO: 1840280 - DNA, 25 bp, Homo sapien
ttccgactttaaattgaagaagctg

SEQ ID NO: 1840281 - DNA, 25 bp, Homo sapien
cgctctaaccaactgagctaaccgg

SEQ ID NO: 1840282 - DNA, 25 bp, Homo sapien
gatcgaacccgcgaccttggcgtta

SEQ ID NO: 1840283 - DNA, 25 bp, Homo sapien
acccgcgaccttggcgttattagca

SEQ ID NO: 1840284 - DNA, 25 bp, Homo sapien
tggcgttattagcaccacgctctaa

SEQ ID NO: 1840285 - DNA, 25 bp, Homo sapien
caacaaaggactttgtgcatacctt

SEQ ID NO: 1840286 - DNA, 25 bp, Homo sapien
gaggtctccgttctccaacaaagga

SEQ ID NO: 1840287 - DNA, 25 bp, Homo sapien
gctcggaggtctccgttctccaaca

SEQ ID NO: 1840288 - DNA, 25 bp, Homo sapien
cctttaataacagctcggaggtctc

SEQ ID NO: 1840289 - DNA, 25 bp, Homo sapien
gctctaaattttcgggccacttgga

SEQ ID NO: 1840290 - DNA, 25 bp, Homo sapien
gaggtttctcggatttctattttga

SEQ ID NO: 1840291 - DNA, 25 bp, Homo sapien
caatggtatccacgagcgagtgctc

SEQ ID NO: 1840292 - DNA, 25 bp, Homo sapien
aagacgataacgctagcctccatga

SEQ ID NO: 1840293 - DNA, 25 bp, Homo sapien
cattcactccacggccccagtacgc

SEQ ID NO: 1840294 - DNA, 25 bp, Homo sapien
acggccccagtacgctacccgtcat

SEQ ID NO: 1840295 - DNA, 25 bp, Homo sapien
ctccacggccccagtacgctacccg

SEQ ID NO: 1840296 - DNA, 25 bp, Homo sapien
ttcactccacggccccagtacgcta

SEQ ID NO: 1840297 - DNA, 25 bp, Homo sapien
attcccaacttaaagtgctttattg

SEQ ID NO: 1840298 - DNA, 25 bp, Homo sapien
taattggcatgtgtctgcaaacatc

SEQ ID NO: 1840299 - DNA, 25 bp, Homo sapien
tcccaggaattggaattcagcacct

SEQ ID NO: 1840300 - DNA, 25 bp, Homo sapien
tcagcacctgttccgcacgtaattg

SEQ ID NO: 1840301 - DNA, 25 bp, Homo sapien
gtgtgtctcctagtcactttctttc

SEQ ID NO: 1840302 - DNA, 25 bp, Homo sapien
tcttcctgtcacttaatcttttcct

SEQ ID NO: 1840303 - DNA, 25 bp, Homo sapien
ctcttatttagtcttccttccacac

SEQ ID NO: 1840304 - DNA, 25 bp, Homo sapien
tcttttcccacaatcaaatatcact

SEQ ID NO: 1840305 - DNA, 25 bp, Homo sapien
taaagaaaaagtgcgtggatgccac

SEQ ID NO: 1840306 - DNA, 25 bp, Homo sapien
gatgccacgtaccagttcatgtcca

SEQ ID NO: 1840307 - DNA, 25 bp, Homo sapien
gaaggatatctactggtggctacag

SEQ ID NO: 1840308 - DNA, 25 bp, Homo sapien
agaagatgcccatagagccccgagg

SEQ ID NO: 1840309 - DNA, 25 bp, Homo sapien
ggcagagggcccaagatcgggagtc

SEQ ID NO: 1840310 - DNA, 25 bp, Homo sapien
gggcagagggcccaagatcgggagt

SEQ ID NO: 1840311 - DNA, 25 bp, Homo sapien
tctcctcaggtaaagttcttattct

SEQ ID NO: 1840312 - DNA, 25 bp, Homo sapien
ctacatctcctcaggtaaagttctt

SEQ ID NO: 1840313 - DNA, 25 bp, Homo sapien
gcgaatttggaccatctgagagcat

SEQ ID NO: 1840314 - DNA, 25 bp, Homo sapien
tggcagcgaatttggaccatctgag

SEQ ID NO: 1840315 - DNA, 25 bp, Homo sapien
accatctgagagcattgtttattac

SEQ ID NO: 1840316 - DNA, 25 bp, Homo sapien
gaaatgatggcagcgaatttggacc

SEQ ID NO: 1840317 - DNA, 25 bp, Homo sapien
tagcccttcgctggctgaaaaccga

SEQ ID NO: 1840318 - DNA, 25 bp, Homo sapien
gatttgcatcgttaattatccgtag

SEQ ID NO: 1840319 - DNA, 25 bp, Homo sapien
gctgaaaaccgacgatttgcatcgt

SEQ ID NO: 1840320 - DNA, 25 bp, Homo sapien
taattatccgtagcccttcgctggc

SEQ ID NO: 1840321 - DNA, 25 bp, Homo sapien
gctctaaccaactgagctaaccagc

SEQ ID NO: 1840322 - DNA, 25 bp, Homo sapien
tggcgttattagcaccacgctctaa

SEQ ID NO: 1840323 - DNA, 25 bp, Homo sapien
gccagtacggggatcgaacccgcga

SEQ ID NO: 1840324 - DNA, 25 bp, Homo sapien
acccgcgaccttggcgttattagca

SEQ ID NO: 1840325 - DNA, 25 bp, Homo sapien
ctaggagagtacaacacgggcagaa

SEQ ID NO: 1840326 - DNA, 25 bp, Homo sapien
ttggcctgagtgcagtaatctccga

SEQ ID NO: 1840327 - DNA, 25 bp, Homo sapien
taatctccgagctggactctgagtc

SEQ ID NO: 1840328 - DNA, 25 bp, Homo sapien
tcccggtagggaggaaagctcagca

SEQ ID NO: 1840329 - DNA, 25 bp, Homo sapien
caaatcttcctgtagcgtcctgagt

SEQ ID NO: 1840330 - DNA, 25 bp, Homo sapien
agcagcgagtgagcgactggagccc

SEQ ID NO: 1840331 - DNA, 25 bp, Homo sapien
gagcagcgagtgagcgactggagcc

SEQ ID NO: 1840332 - DNA, 25 bp, Homo sapien
gcgagtgagcgactggagcccagcc

SEQ ID NO: 1840333 - DNA, 25 bp, Homo sapien
cagcgagtgagcgactggagcccag

SEQ ID NO: 1840334 - DNA, 25 bp, Homo sapien
gttgcctgcgaaccaagtccttgag

SEQ ID NO: 1840335 - DNA, 25 bp, Homo sapien
aagggtggctttcggcaaagtctcg

SEQ ID NO: 1840336 - DNA, 25 bp, Homo sapien
tttcggcaaagtctcggcctcgcct

SEQ ID NO: 1840337 - DNA, 25 bp, Homo sapien
aaaatgttcctgagcggaaagatcg

SEQ ID NO: 1840338 - DNA, 25 bp, Homo sapien
ctttgtggggatcaggcgatgagag

SEQ ID NO: 1840339 - DNA, 25 bp, Homo sapien
tttgtggggatcaggcgatgagagc

SEQ ID NO: 1840340 - DNA, 25 bp, Homo sapien
cgtgataaccactacactacagaag

SEQ ID NO: 1840341 - DNA, 25 bp, Homo sapien
ctttcgcgtgtgaggcgaacgtgat

SEQ ID NO: 1840342 - DNA, 25 bp, Homo sapien
gggacctttcgcgtgtgaggcgaac

SEQ ID NO: 1840343 - DNA, 25 bp, Homo sapien
gtgataaccactacactacagaagc

SEQ ID NO: 1840344 - DNA, 25 bp, Homo sapien
tcggaaagctacagtgaatcagaca

SEQ ID NO: 1840345 - DNA, 25 bp, Homo sapien
aaatgcttgcatcccctcgttgtgg

SEQ ID NO: 1840346 - DNA, 25 bp, Homo sapien
tcgggattggacagaaaatgcttgc

SEQ ID NO: 1840347 - DNA, 25 bp, Homo sapien
gatccaaccactgaactagtcgtcg

SEQ ID NO: 1840348 - DNA, 25 bp, Homo sapien
tgcagaaaaaccttccttgctcctt

SEQ ID NO: 1840349 - DNA, 25 bp, Homo sapien
gtatgcagaaaaaccttccttgctc

SEQ ID NO: 1840350 - DNA, 25 bp, Homo sapien
accgtatgcagaaaaaccttccttg

SEQ ID NO: 1840351 - DNA, 25 bp, Homo sapien
ccgtatgcagaaaaaccttccttgc

SEQ ID NO: 1840352 - DNA, 25 bp, Homo sapien
gagtccagacattgtagagaaaaac

SEQ ID NO: 1840353 - DNA, 25 bp, Homo sapien
gtccagacattgtagagaaaaacat

SEQ ID NO: 1840354 - DNA, 25 bp, Homo sapien
agtccagacattgtagagaaaaaca

SEQ ID NO: 1840355 - DNA, 25 bp, Homo sapien
agagtccagacattgtagagaaaaa

SEQ ID NO: 1840356 - DNA, 25 bp, Homo sapien
tggaggaagagcaccatctcactgt

SEQ ID NO: 1840357 - DNA, 25 bp, Homo sapien
tcagagattcataagcggcactgtc

SEQ ID NO: 1840358 - DNA, 25 bp, Homo sapien
caatccaagttttagctgccaagag

SEQ ID NO: 1840359 - DNA, 25 bp, Homo sapien
gactcaagatcttgctaactgggaa

SEQ ID NO: 1840360 - DNA, 25 bp, Homo sapien
aaagacgtcagggattagggtcgca

SEQ ID NO: 1840361 - DNA, 25 bp, Homo sapien
tgcgtcgcctgtttctccacgatca

SEQ ID NO: 1840362 - DNA, 25 bp, Homo sapien
ggtcgcaggcgccttgtttaatggc

SEQ ID NO: 1840363 - DNA, 25 bp, Homo sapien
ttgatggtcccgatcgccacaaaga

SEQ ID NO: 1840364 - DNA, 25 bp, Homo sapien
catcgtctctccacaatctatactg

SEQ ID NO: 1840365 - DNA, 25 bp, Homo sapien
ccacaatctatactgttgctcatac

SEQ ID NO: 1840366 - DNA, 25 bp, Homo sapien
cgtctctccacaatctatactgttg

SEQ ID NO: 1840367 - DNA, 25 bp, Homo sapien
tcaaatccccatcgtctctccacaa

SEQ ID NO: 1840368 - DNA, 25 bp, Homo sapien
tctcttgagcggagtatctttagct

SEQ ID NO: 1840369 - DNA, 25 bp, Homo sapien
tcctggtatttccacgtcacatctc

SEQ ID NO: 1840370 - DNA, 25 bp, Homo sapien
tccacgtcacatctcttgagcggag

SEQ ID NO: 1840371 - DNA, 25 bp, Homo sapien
tcactcgaccaaattttattcctgg

SEQ ID NO: 1840372 - DNA, 25 bp, Homo sapien
agtcgctcgagtcctgctggaactg

SEQ ID NO: 1840373 - DNA, 25 bp, Homo sapien
tgcacgaggcagtcgctcgagtcct

SEQ ID NO: 1840374 - DNA, 25 bp, Homo sapien
ggaaatgcacgaggcagtcgctcga

SEQ ID NO: 1840375 - DNA, 25 bp, Homo sapien
caaaaggaaatgcacgaggcagtcg

SEQ ID NO: 1840376 - DNA, 25 bp, Homo sapien
tggttttggagagaggcggggacga

SEQ ID NO: 1840377 - DNA, 25 bp, Homo sapien
tttggagagaggcggggacgaaaga

SEQ ID NO: 1840378 - DNA, 25 bp, Homo sapien
tggagagaggcggggacgaaagaag

SEQ ID NO: 1840379 - DNA, 25 bp, Homo sapien
tgctggggcggtttggttttggaga

SEQ ID NO: 1840380 - DNA, 25 bp, Homo sapien
gaacaactggaaatgctggtgtctc

SEQ ID NO: 1840381 - DNA, 25 bp, Homo sapien
gaaatgctggtgtctccaaagtctt

SEQ ID NO: 1840382 - DNA, 25 bp, Homo sapien
caactggaaatgctggtgtctccaa

SEQ ID NO: 1840383 - DNA, 25 bp, Homo sapien
ggaaatgctggtgtctccaaagtct

SEQ ID NO: 1840384 - DNA, 25 bp, Homo sapien
tgagttgctctcagaaaagttatat

SEQ ID NO: 1840385 - DNA, 25 bp, Homo sapien
taaccaggtttttgtcgcaggtctg

SEQ ID NO: 1840386 - DNA, 25 bp, Homo sapien
aaaagttatatagattatctacagc

SEQ ID NO: 1840387 - DNA, 25 bp, Homo sapien
ttgtcgcaggtctgagttgctctca

SEQ ID NO: 1840388 - DNA, 25 bp, Homo sapien
tctctcgaccatctatcagttttat

SEQ ID NO: 1840389 - DNA, 25 bp, Homo sapien
tctcgaccatctatcagttttattt

SEQ ID NO: 1840390 - DNA, 25 bp, Homo sapien
cgaccatctatcagttttatttcct

SEQ ID NO: 1840391 - DNA, 25 bp, Homo sapien
ttctctcgaccatctatcagtttta

SEQ ID NO: 1840392 - DNA, 25 bp, Homo sapien
tagattacaatttactacatccggc

SEQ ID NO: 1840393 - DNA, 25 bp, Homo sapien
caatttactacatccggcacgtggg

SEQ ID NO: 1840394 - DNA, 25 bp, Homo sapien
gaattcttgaggatctgagtggaat

SEQ ID NO: 1840395 - DNA, 25 bp, Homo sapien
ggatctgagtggaattactctccat

SEQ ID NO: 1840396 - DNA, 25 bp, Homo sapien
tcttagccaagatgtccgcatggtg

SEQ ID NO: 1840397 - DNA, 25 bp, Homo sapien
tgaagggctcttagccaagatgtcc

SEQ ID NO: 1840398 - DNA, 25 bp, Homo sapien
ttgctccactcacatagtgcctcat

SEQ ID NO: 1840399 - DNA, 25 bp, Homo sapien
ggtgcaatggatcccttgctccact

SEQ ID NO: 1840400 - DNA, 25 bp, Homo sapien
ctagccaaggatggcttcgatccat

SEQ ID NO: 1840401 - DNA, 25 bp, Homo sapien
aaggatggcttcgatccattgacct

SEQ ID NO: 1840402 - DNA, 25 bp, Homo sapien
ccaaggatggcttcgatccattgac

SEQ ID NO: 1840403 - DNA, 25 bp, Homo sapien
agccaaggatggcttcgatccattg

SEQ ID NO: 1840404 - DNA, 25 bp, Homo sapien
tgttctaattgatagacattcaact

SEQ ID NO: 1840405 - DNA, 25 bp, Homo sapien
ctgacacagagaagagtggacagga

SEQ ID NO: 1840406 - DNA, 25 bp, Homo sapien
tggatattatagatcctgctgctgt

SEQ ID NO: 1840407 - DNA, 25 bp, Homo sapien
tggcaggatgtacgaaaagatgttc

SEQ ID NO: 1840408 - DNA, 25 bp, Homo sapien
gcatgatgccttcgggaatgccctt

SEQ ID NO: 1840409 - DNA, 25 bp, Homo sapien
ggatcatggtgttagtggtcccact

SEQ ID NO: 1840410 - DNA, 25 bp, Homo sapien
ggctgatgatctaaaaggtcctctc

SEQ ID NO: 1840411 - DNA, 25 bp, Homo sapien
ccaaaagtgaaaggttgtggagctc

SEQ ID NO: 1840412 - DNA, 25 bp, Homo sapien
gaaaagaactactgacacttggcat

SEQ ID NO: 1840413 - DNA, 25 bp, Homo sapien
ccagtttgtggatactagggcagag

SEQ ID NO: 1840414 - DNA, 25 bp, Homo sapien
aggtggccttgagcttgatcccaag

SEQ ID NO: 1840415 - DNA, 25 bp, Homo sapien
tgtcaaacaccccaaggctgactgt

SEQ ID NO: 1840416 - DNA, 25 bp, Homo sapien
tctaggggatatctgtacaacactg

SEQ ID NO: 1840417 - DNA, 25 bp, Homo sapien
taggggatatctgtacaacactgga

SEQ ID NO: 1840418 - DNA, 25 bp, Homo sapien
atatctgtacaacactggaaaggac

SEQ ID NO: 1840419 - DNA, 25 bp, Homo sapien
gggatatctgtacaacactggaaag

SEQ ID NO: 1840420 - DNA, 25 bp, Homo sapien
aaaacagagtctttagatgtgctgg

SEQ ID NO: 1840421 - DNA, 25 bp, Homo sapien
tgaagtcggccctgaaggcctgagc

SEQ ID NO: 1840422 - DNA, 25 bp, Homo sapien
taagtgttgcctacggcactggtga

SEQ ID NO: 1840423 - DNA, 25 bp, Homo sapien
ggtaaacatggtgactgtatgcaca

SEQ ID NO: 1840424 - DNA, 25 bp, Homo sapien
gagcttccaatctcgctgttgtgca

SEQ ID NO: 1840425 - DNA, 25 bp, Homo sapien
catgggagacctgtcagcctgagag

SEQ ID NO: 1840426 - DNA, 25 bp, Homo sapien
gagaatgggccacactggttgcctc

SEQ ID NO: 1840427 - DNA, 25 bp, Homo sapien
aagatgggatgttgggctactcacc

SEQ ID NO: 1840428 - DNA, 25 bp, Homo sapien
tgctccctgggttagatctgtttct

SEQ ID NO: 1840429 - DNA, 25 bp, Homo sapien
gtatcttctcctgcgttgttgctta

SEQ ID NO: 1840430 - DNA, 25 bp, Homo sapien
caagccaagtctcagggaaagggtc

SEQ ID NO: 1840431 - DNA, 25 bp, Homo sapien
ggccagtggacctagagacttctgc

SEQ ID NO: 1840432 - DNA, 25 bp, Homo sapien
caaaatctgataccagtgggactgg

SEQ ID NO: 1840433 - DNA, 25 bp, Homo sapien
taaatgccgatggtctggtctctgg

SEQ ID NO: 1840434 - DNA, 25 bp, Homo sapien
tctcgaatgatacactgggaacact

SEQ ID NO: 1840435 - DNA, 25 bp, Homo sapien
gaacatggatctgcgagctcctcag

SEQ ID NO: 1840436 - DNA, 25 bp, Homo sapien
gagaccaaatagtccgctttaagta

SEQ ID NO: 1840437 - DNA, 25 bp, Homo sapien
tcgaagagaccaaatagtccgcttt

SEQ ID NO: 1840438 - DNA, 25 bp, Homo sapien
atgtcgaagagaccaaatagtccgc

SEQ ID NO: 1840439 - DNA, 25 bp, Homo sapien
gaagagaccaaatagtccgctttaa

SEQ ID NO: 1840440 - DNA, 25 bp, Homo sapien
gacgagggcgaaagttccagtttgc

SEQ ID NO: 1840441 - DNA, 25 bp, Homo sapien
gaactgaacccgatgaacttggtga

SEQ ID NO: 1840442 - DNA, 25 bp, Homo sapien
tttcgtgggcctctcgggcaagtcg

SEQ ID NO: 1840443 - DNA, 25 bp, Homo sapien
ttcttcatgggaaagcgcctccagg

SEQ ID NO: 1840444 - DNA, 25 bp, Homo sapien
gaatcggacagagtcgaagagcgca

SEQ ID NO: 1840445 - DNA, 25 bp, Homo sapien
cgggcagtgagttcaagcacggttt

SEQ ID NO: 1840446 - DNA, 25 bp, Homo sapien
ggtttcggacgtctgcagaatcgga

SEQ ID NO: 1840447 - DNA, 25 bp, Homo sapien
ttcggttgacggttgggattcacgc

SEQ ID NO: 1840448 - DNA, 25 bp, Homo sapien
ctaggaaagcgcgagtctcagggtg

SEQ ID NO: 1840449 - DNA, 25 bp, Homo sapien
agtctcagggtgcttagcactctcc

SEQ ID NO: 1840450 - DNA, 25 bp, Homo sapien
gtctcagggtgcttagcactctcca

SEQ ID NO: 1840451 - DNA, 25 bp, Homo sapien
aggaaagcgcgagtctcagggtgct

SEQ ID NO: 1840452 - DNA, 25 bp, Homo sapien
gggcggtcagacctctgctgtctcc

SEQ ID NO: 1840453 - DNA, 25 bp, Homo sapien
gacacgcgggacttcggcagtccca

SEQ ID NO: 1840454 - DNA, 25 bp, Homo sapien
gctgtctccgcagcgagttgcagta

SEQ ID NO: 1840455 - DNA, 25 bp, Homo sapien
tcggcagtcccagtaacttgctttg

SEQ ID NO: 1840456 - DNA, 25 bp, Homo sapien
ggaccctgtggtccggattcaccaa

SEQ ID NO: 1840457 - DNA, 25 bp, Homo sapien
gaatcgagtgggtgcacagtttcca

SEQ ID NO: 1840458 - DNA, 25 bp, Homo sapien
actcgagaggaagctcactgcgcct

SEQ ID NO: 1840459 - DNA, 25 bp, Homo sapien
gattcaccaagtggcgcagagctgg

SEQ ID NO: 1840460 - DNA, 25 bp, Homo sapien
ctcgaaggtacaggctcaggcggct

SEQ ID NO: 1840461 - DNA, 25 bp, Homo sapien
cgaaggtacaggctcaggcggctca

SEQ ID NO: 1840462 - DNA, 25 bp, Homo sapien
aggtacaggctcaggcggctcaggg

SEQ ID NO: 1840463 - DNA, 25 bp, Homo sapien
tacaggctcaggcggctcagggccc

SEQ ID NO: 1840464 - DNA, 25 bp, Homo sapien
ggcccgcgggatccccggagtctga

SEQ ID NO: 1840465 - DNA, 25 bp, Homo sapien
cggcccgcgggatccccggagtctg

SEQ ID NO: 1840466 - DNA, 25 bp, Homo sapien
ctgtcggcccgcgggatccccggag

SEQ ID NO: 1840467 - DNA, 25 bp, Homo sapien
tctgagtggggagcactatccgcac

SEQ ID NO: 1840468 - DNA, 25 bp, Homo sapien
tgcgggcggctttcgcaggtgctca

SEQ ID NO: 1840469 - DNA, 25 bp, Homo sapien
tggctgtgccgcccggatggcattt

SEQ ID NO: 1840470 - DNA, 25 bp, Homo sapien
tggagatctggaccggtggctgtgc

SEQ ID NO: 1840471 - DNA, 25 bp, Homo sapien
cccgtagagtgagtgcgggcggctt

SEQ ID NO: 1840472 - DNA, 25 bp, Homo sapien
cagctgattgaggatttccgcgttt

SEQ ID NO: 1840473 - DNA, 25 bp, Homo sapien
tctctttttttgcagatcgtgacgc

SEQ ID NO: 1840474 - DNA, 25 bp, Homo sapien
cgtgacgccgccagtaggtgtcagt

SEQ ID NO: 1840475 - DNA, 25 bp, Homo sapien
agctgattgaggatttccgcgtttc

SEQ ID NO: 1840476 - DNA, 25 bp, Homo sapien
tccggagtgggcgaatgggaaatcg

SEQ ID NO: 1840477 - DNA, 25 bp, Homo sapien
ttggagaactcatgcagattgccgt

SEQ ID NO: 1840478 - DNA, 25 bp, Homo sapien
tcaggagtggcctcagagatccgga

SEQ ID NO: 1840479 - DNA, 25 bp, Homo sapien
gattgccgtcaggagtggcctcaga

SEQ ID NO: 1840480 - DNA, 25 bp, Homo sapien
cttgcaacttgttttaccccaatag

SEQ ID NO: 1840481 - DNA, 25 bp, Homo sapien
caacttgttttaccccaatagtcat

SEQ ID NO: 1840482 - DNA, 25 bp, Homo sapien
tgcaacttgttttaccccaatagtc

SEQ ID NO: 1840483 - DNA, 25 bp, Homo sapien
gcaacttgttttaccccaatagtca

SEQ ID NO: 1840484 - DNA, 25 bp, Homo sapien
cccagcacgcttccgctgcgccact

SEQ ID NO: 1840485 - DNA, 25 bp, Homo sapien
tgggcccagcacgcttccgctgcgc

SEQ ID NO: 1840486 - DNA, 25 bp, Homo sapien
ggcccagcacgcttccgctgcgcca

SEQ ID NO: 1840487 - DNA, 25 bp, Homo sapien
gggcccagcacgcttccgctgcgcc

SEQ ID NO: 1840488 - DNA, 25 bp, Homo sapien
ttgaaccctggaccctcagattaaa

SEQ ID NO: 1840489 - DNA, 25 bp, Homo sapien
cgcctggacagggacttgaaccctg

SEQ ID NO: 1840490 - DNA, 25 bp, Homo sapien
gatgctctaccgactgagctaccca

SEQ ID NO: 1840491 - DNA, 25 bp, Homo sapien
cctcagattaaaagtctgatgctct

SEQ ID NO: 1840492 - DNA, 25 bp, Homo sapien
ttcagtccctccatctctacgcagt

SEQ ID NO: 1840493 - DNA, 25 bp, Homo sapien
agaagcaggtgtcttcagtccctcc

SEQ ID NO: 1840494 - DNA, 25 bp, Homo sapien
atctctacgcagtcccaatctgtca

SEQ ID NO: 1840495 - DNA, 25 bp, Homo sapien
gcagtcccaatctgtcaaatatttg

SEQ ID NO: 1840496 - DNA, 25 bp, Homo sapien
agtgcccagcagagtacttgtgatg

SEQ ID NO: 1840497 - DNA, 25 bp, Homo sapien
tcctcaaatgtcaggcatactcctg

SEQ ID NO: 1840498 - DNA, 25 bp, Homo sapien
gggacttctcctgttcgacatcttt

SEQ ID NO: 1840499 - DNA, 25 bp, Homo sapien
caaagtgcttctagtggcctgtgag

SEQ ID NO: 1840500 - DNA, 25 bp, Homo sapien
gcaggtattgatccgcgtaatccct

SEQ ID NO: 1840501 - DNA, 25 bp, Homo sapien
ggagctgcaggtattgatccgcgta

SEQ ID NO: 1840502 - DNA, 25 bp, Homo sapien
agaaacaaacactgactcctgagct

SEQ ID NO: 1840503 - DNA, 25 bp, Homo sapien
gatccgcgtaatccctaattctttc

SEQ ID NO: 1840504 - DNA, 25 bp, Homo sapien
tccaggcctgccagttccattcatg

SEQ ID NO: 1840505 - DNA, 25 bp, Homo sapien
tagcttagcttaggtgtacaatagg

SEQ ID NO: 1840506 - DNA, 25 bp, Homo sapien
tacaataggctatttcgtctaggtt

SEQ ID NO: 1840507 - DNA, 25 bp, Homo sapien
gttagtgtcctatataggcgtacca

SEQ ID NO: 1840508 - DNA, 25 bp, Homo sapien
taaggcattcagagaatctctccag

SEQ ID NO: 1840509 - DNA, 25 bp, Homo sapien
taaagatatgaagtgacttacccca

SEQ ID NO: 1840510 - DNA, 25 bp, Homo sapien
tgggaagggtctccatattaaccaa

SEQ ID NO: 1840511 - DNA, 25 bp, Homo sapien
taagtagtcaacagttttcacgatc

SEQ ID NO: 1840512 - DNA, 25 bp, Homo sapien
gtaagatatgtgctctggctaaagg

SEQ ID NO: 1840513 - DNA, 25 bp, Homo sapien
tgacattgaataagaccagagcagt

SEQ ID NO: 1840514 - DNA, 25 bp, Homo sapien
ttgaggtctgtactccaactgaagg

SEQ ID NO: 1840515 - DNA, 25 bp, Homo sapien
gccacatttaccgtattcataaggt

SEQ ID NO: 1840516 - DNA, 25 bp, Homo sapien
acattcagtacatttatacggtttt

SEQ ID NO: 1840517 - DNA, 25 bp, Homo sapien
tccacattcagtacatttatacggt

SEQ ID NO: 1840518 - DNA, 25 bp, Homo sapien
cattcagtacatttatacggttttt

SEQ ID NO: 1840519 - DNA, 25 bp, Homo sapien
cacattcagtacatttatacggttt

SEQ ID NO: 1840520 - DNA, 25 bp, Homo sapien
cagtgttgagttatctgatgttgaa

SEQ ID NO: 1840521 - DNA, 25 bp, Homo sapien
tgttgagttatctgatgttgaacaa

SEQ ID NO: 1840522 - DNA, 25 bp, Homo sapien
ctccagtgttgagttatctgatgtt

SEQ ID NO: 1840523 - DNA, 25 bp, Homo sapien
ccagtgttgagttatctgatgttga

SEQ ID NO: 1840524 - DNA, 25 bp, Homo sapien
catttactggtatgaaggtacagtc

SEQ ID NO: 1840525 - DNA, 25 bp, Homo sapien
aaggtacagtcagggcttctttctg

SEQ ID NO: 1840526 - DNA, 25 bp, Homo sapien
acagtcagggcttctttctggtatg

SEQ ID NO: 1840527 - DNA, 25 bp, Homo sapien
actggtatgaaggtacagtcagggc

SEQ ID NO: 1840528 - DNA, 25 bp, Homo sapien
ataagagctgagtgatcatggaagg

SEQ ID NO: 1840529 - DNA, 25 bp, Homo sapien
tatgtgcttctgctaaaggcttttc

SEQ ID NO: 1840530 - DNA, 25 bp, Homo sapien
tcctgagcagtcactaaaagctttt

SEQ ID NO: 1840531 - DNA, 25 bp, Homo sapien
gatgaacaatcactaaaggcattcc

SEQ ID NO: 1840532 - DNA, 25 bp, Homo sapien
aagatgtgcactctgactaaaggac

SEQ ID NO: 1840533 - DNA, 25 bp, Homo sapien
tgagtaagatgtgcactctgactaa

SEQ ID NO: 1840534 - DNA, 25 bp, Homo sapien
agtaagatgtgcactctgactaaag

SEQ ID NO: 1840535 - DNA, 25 bp, Homo sapien
gttgagtaagatgtgcactctgact

SEQ ID NO: 1840536 - DNA, 25 bp, Homo sapien
tgctgagtaaggtatgtactacgac

SEQ ID NO: 1840537 - DNA, 25 bp, Homo sapien
gctgagtaaggtatgtactacgact

SEQ ID NO: 1840538 - DNA, 25 bp, Homo sapien
atgctgagtaaggtatgtactacga

SEQ ID NO: 1840539 - DNA, 25 bp, Homo sapien
tgagtaaggtatgtactacgactga

SEQ ID NO: 1840540 - DNA, 25 bp, Homo sapien
cactcagtacatttacagggtctct

SEQ ID NO: 1840541 - DNA, 25 bp, Homo sapien
acactcagtacatttacagggtctc

SEQ ID NO: 1840542 - DNA, 25 bp, Homo sapien
gttctcccacattcactatatttac

SEQ ID NO: 1840543 - DNA, 25 bp, Homo sapien
gaaggttctcccacattcactatat

SEQ ID NO: 1840544 - DNA, 25 bp, Homo sapien
ggttctcccacattcactatattta

SEQ ID NO: 1840545 - DNA, 25 bp, Homo sapien
cccacattcactatatttacaaggt

SEQ ID NO: 1840546 - DNA, 25 bp, Homo sapien
tttctttgtataattaaatctgagt

SEQ ID NO: 1840547 - DNA, 25 bp, Homo sapien
actttctttgtataattaaatctga

SEQ ID NO: 1840548 - DNA, 25 bp, Homo sapien
ctttctttgtataattaaatctgag

SEQ ID NO: 1840549 - DNA, 25 bp, Homo sapien
ttctttgtataattaaatctgagtt

SEQ ID NO: 1840550 - DNA, 25 bp, Homo sapien
tgttctgcaacaagtattgatctta

SEQ ID NO: 1840551 - DNA, 25 bp, Homo sapien
ctgttctgcaacaagtattgatctt

SEQ ID NO: 1840552 - DNA, 25 bp, Homo sapien
tctgttctgcaacaagtattgatct

SEQ ID NO: 1840553 - DNA, 25 bp, Homo sapien
tcttccggtacagactttctctttg

SEQ ID NO: 1840554 - DNA, 25 bp, Homo sapien
gatttcttccggtacagactttctc

SEQ ID NO: 1840555 - DNA, 25 bp, Homo sapien
aggaatttttgtgcaggtagctatc

SEQ ID NO: 1840556 - DNA, 25 bp, Homo sapien
ctcttgccctagattattctccttg

SEQ ID NO: 1840557 - DNA, 25 bp, Homo sapien
ctgctctactcttgatgtcttggcc

SEQ ID NO: 1840558 - DNA, 25 bp, Homo sapien
tgctctactcttgatgtcttggccc

SEQ ID NO: 1840559 - DNA, 25 bp, Homo sapien
ctctactcttgatgtcttggcccca

SEQ ID NO: 1840560 - DNA, 25 bp, Homo sapien
gctctactcttgatgtcttggcccc

SEQ ID NO: 1840561 - DNA, 25 bp, Homo sapien
tatcagggcttttatgccaaccact

SEQ ID NO: 1840562 - DNA, 25 bp, Homo sapien
gacttggactcaggtctcctctcca

SEQ ID NO: 1840563 - DNA, 25 bp, Homo sapien
ccctatttatatggcgaatggcctc

SEQ ID NO: 1840564 - DNA, 25 bp, Homo sapien
gagccaccacattacgcttgccatg

SEQ ID NO: 1840565 - DNA, 25 bp, Homo sapien
caacatgtttctgtatatggacttc

SEQ ID NO: 1840566 - DNA, 25 bp, Homo sapien
tctgtatatggacttctgaacagtg

SEQ ID NO: 1840567 - DNA, 25 bp, Homo sapien
ggacttctgaacagtgtccatttgc

SEQ ID NO: 1840568 - DNA, 25 bp, Homo sapien
atagccacctcttccaacgtctttg

SEQ ID NO: 1840569 - DNA, 25 bp, Homo sapien
actgtgtgttacacattataatcta

SEQ ID NO: 1840570 - DNA, 25 bp, Homo sapien
tccaaagtaatagatgaaggtaacc

SEQ ID NO: 1840571 - DNA, 25 bp, Homo sapien
tatatttgcattaacaccagaagca

SEQ ID NO: 1840572 - DNA, 25 bp, Homo sapien
aaatttgagacattatccttgcttt

SEQ ID NO: 1840573 - DNA, 25 bp, Homo sapien
gctgtacaggaagcacacctgggga

SEQ ID NO: 1840574 - DNA, 25 bp, Homo sapien
tacaggaagcacacctggggaggcc

SEQ ID NO: 1840575 - DNA, 25 bp, Homo sapien
aaggggaagcaggcatgccttacat

SEQ ID NO: 1840576 - DNA, 25 bp, Homo sapien
gtgaaggggaagcaggcatgcctta

SEQ ID NO: 1840577 - DNA, 25 bp, Homo sapien
tacccattgcccatagaagacacgg

SEQ ID NO: 1840578 - DNA, 25 bp, Homo sapien
gaaggcaggtggcaatagacaacca

SEQ ID NO: 1840579 - DNA, 25 bp, Homo sapien
gacaatgcctaattgagagcctacc

SEQ ID NO: 1840580 - DNA, 25 bp, Homo sapien
taactccttggttagacaaggctgc

SEQ ID NO: 1840581 - DNA, 25 bp, Homo sapien
aaagggcctagcagtcattctctct

SEQ ID NO: 1840582 - DNA, 25 bp, Homo sapien
taaagggcctagcagtcattctctc

SEQ ID NO: 1840583 - DNA, 25 bp, Homo sapien
cataaagggcctagcagtcattctc

SEQ ID NO: 1840584 - DNA, 25 bp, Homo sapien
gccataaagggcctagcagtcattc

SEQ ID NO: 1840585 - DNA, 25 bp, Homo sapien
cttgaagccgtcaccagaagtagat

SEQ ID NO: 1840586 - DNA, 25 bp, Homo sapien
taatgggaagctttggatcacggcg

SEQ ID NO: 1840587 - DNA, 25 bp, Homo sapien
taagtaggttccagataacaagagc

SEQ ID NO: 1840588 - DNA, 25 bp, Homo sapien
gatcacggcggtgaatccctcatga

SEQ ID NO: 1840589 - DNA, 25 bp, Homo sapien
tacgtacatttgaagtgacccagag

SEQ ID NO: 1840590 - DNA, 25 bp, Homo sapien
tgttctagaacagtatgccccacca

SEQ ID NO: 1840591 - DNA, 25 bp, Homo sapien
tttgttatacaaagagcccgcttgg

SEQ ID NO: 1840592 - DNA, 25 bp, Homo sapien
gcgcccggccatgagctagttatta

SEQ ID NO: 1840593 - DNA, 25 bp, Homo sapien
gaattttatgaccagcgcccgctgg

SEQ ID NO: 1840594 - DNA, 25 bp, Homo sapien
tggctctcggagagttcgcctcgtc

SEQ ID NO: 1840595 - DNA, 25 bp, Homo sapien
ttaatgtcagtagccacagtcgccg

SEQ ID NO: 1840596 - DNA, 25 bp, Homo sapien
tcttgcaggagagtccctggtccca

SEQ ID NO: 1840597 - DNA, 25 bp, Homo sapien
ttggaatcagcgacagacgcaggta

SEQ ID NO: 1840598 - DNA, 25 bp, Homo sapien
taagacgtgcaactgacactcagcg

SEQ ID NO: 1840599 - DNA, 25 bp, Homo sapien
gcaaggcacccctagaagcttcagg

SEQ ID NO: 1840600 - DNA, 25 bp, Homo sapien
gacgcaggtataaaagagagcctcc

SEQ ID NO: 1840601 - DNA, 25 bp, Homo sapien
gagaactgcgcttgcatggctctgg

SEQ ID NO: 1840602 - DNA, 25 bp, Homo sapien
ctgtccgaagagaactgcgcttgca

SEQ ID NO: 1840603 - DNA, 25 bp, Homo sapien
ggccggctggctcttgtccgcagac

SEQ ID NO: 1840604 - DNA, 25 bp, Homo sapien
tcttgtccgcagactacatttccca

SEQ ID NO: 1840605 - DNA, 25 bp, Homo sapien
taaaactctgtgaaccaccggtcta

SEQ ID NO: 1840606 - DNA, 25 bp, Homo sapien
gaaaatgcaatgttccgggccaacg

SEQ ID NO: 1840607 - DNA, 25 bp, Homo sapien
caactagattgtgcaacggagccag

SEQ ID NO: 1840608 - DNA, 25 bp, Homo sapien
caccggtctaggctatactttgcag

SEQ ID NO: 1840609 - DNA, 25 bp, Homo sapien
ggagacttaggtccaggcgactgcc

SEQ ID NO: 1840610 - DNA, 25 bp, Homo sapien
gcgaccgctgctgatacgttgctca

SEQ ID NO: 1840611 - DNA, 25 bp, Homo sapien
ggcgactgcccagacaatgactggt

SEQ ID NO: 1840612 - DNA, 25 bp, Homo sapien
tgttttgcaactggtcgtccgcgtc

SEQ ID NO: 1840613 - DNA, 25 bp, Homo sapien
tgatcagcagcagtctgagtggaag

SEQ ID NO: 1840614 - DNA, 25 bp, Homo sapien
agagcatgatcagcagcagtctgag

SEQ ID NO: 1840615 - DNA, 25 bp, Homo sapien
cgagcagagcatgatcagcagcagt

SEQ ID NO: 1840616 - DNA, 25 bp, Homo sapien
atgatcagcagcagtctgagtggaa

SEQ ID NO: 1840617 - DNA, 25 bp, Homo sapien
tgatgggcgttggagcagcggttcg

SEQ ID NO: 1840618 - DNA, 25 bp, Homo sapien
cgacgcatgggtttctctttaatcc

SEQ ID NO: 1840619 - DNA, 25 bp, Homo sapien
tgatcttagggaacctgatgggcgt

SEQ ID NO: 1840620 - DNA, 25 bp, Homo sapien
tcaggttccgctccaagtgcgggac

SEQ ID NO: 1840621 - DNA, 25 bp, Homo sapien
cggaggcggccggtgagtgaggctt

SEQ ID NO: 1840622 - DNA, 25 bp, Homo sapien
ggaggcggccggtgagtgaggctta

SEQ ID NO: 1840623 - DNA, 25 bp, Homo sapien
gaggcggccggtgagtgaggcttac

SEQ ID NO: 1840624 - DNA, 25 bp, Homo sapien
cgaaagggtcgcgtgtggtttggct

SEQ ID NO: 1840625 - DNA, 25 bp, Homo sapien
tgggtgctcttagaggttctggaaa

SEQ ID NO: 1840626 - DNA, 25 bp, Homo sapien
tggtttggctgcaggtcgggtcagg

SEQ ID NO: 1840627 - DNA, 25 bp, Homo sapien
tcaggaggcacctccacggttggga

SEQ ID NO: 1840628 - DNA, 25 bp, Homo sapien
tcgtctcactggcgggccagcctag

SEQ ID NO: 1840629 - DNA, 25 bp, Homo sapien
agcgctcgtctcactggcgggccag

SEQ ID NO: 1840630 - DNA, 25 bp, Homo sapien
gtctcactggcgggccagcctagtc

SEQ ID NO: 1840631 - DNA, 25 bp, Homo sapien
ccccagcgctcgtctcactggcggg

SEQ ID NO: 1840632 - DNA, 25 bp, Homo sapien
gagactcataaatcctctgacagca

SEQ ID NO: 1840633 - DNA, 25 bp, Homo sapien
tgtgagatgagcacagcaatagcat

SEQ ID NO: 1840634 - DNA, 25 bp, Homo sapien
ctgctgaagggagactcataaatcc

SEQ ID NO: 1840635 - DNA, 25 bp, Homo sapien
agaatgcatctctccatgctctaga

SEQ ID NO: 1840636 - DNA, 25 bp, Homo sapien
ggatgccttggactatgacctttgc

SEQ ID NO: 1840637 - DNA, 25 bp, Homo sapien
ggcctcccaatcattacttcttaat

SEQ ID NO: 1840638 - DNA, 25 bp, Homo sapien
tactagacagaggttctggatgcct

SEQ ID NO: 1840639 - DNA, 25 bp, Homo sapien
taatccttagggttgcattcaacag

SEQ ID NO: 1840640 - DNA, 25 bp, Homo sapien
taggtatccgatagctttggaccaa

SEQ ID NO: 1840641 - DNA, 25 bp, Homo sapien
tttcatctgaaacacggaccttgag

SEQ ID NO: 1840642 - DNA, 25 bp, Homo sapien
tgagatcttacatgtctccgaggat

SEQ ID NO: 1840643 - DNA, 25 bp, Homo sapien
ttagatgagtctgccaaattttgcc

SEQ ID NO: 1840644 - DNA, 25 bp, Homo sapien
gggtaagccatccacacgactgtaa

SEQ ID NO: 1840645 - DNA, 25 bp, Homo sapien
catctagtttaaatgggcaccctgg

SEQ ID NO: 1840646 - DNA, 25 bp, Homo sapien
tattgataatcctgactgccccgct

SEQ ID NO: 1840647 - DNA, 25 bp, Homo sapien
cacaggcagtcagttagggatacaa

SEQ ID NO: 1840648 - DNA, 25 bp, Homo sapien
tccaaaccagcaaaagaactagagg

SEQ ID NO: 1840649 - DNA, 25 bp, Homo sapien
aacggtccatcaagtccatgacagg

SEQ ID NO: 1840650 - DNA, 25 bp, Homo sapien
ctggagcaatgctgattgagaagaa

SEQ ID NO: 1840651 - DNA, 25 bp, Homo sapien
gaactagaggttaacataacatcat

SEQ ID NO: 1840652 - DNA, 25 bp, Homo sapien
tcatagctgtctatgcagccttccc

SEQ ID NO: 1840653 - DNA, 25 bp, Homo sapien
ccagtggattgccaagtccatatat

SEQ ID NO: 1840654 - DNA, 25 bp, Homo sapien
ggttgtctggtatcccctaccaagc

SEQ ID NO: 1840655 - DNA, 25 bp, Homo sapien
tatggcctttggttgtctggtatcc

SEQ ID NO: 1840656 - DNA, 25 bp, Homo sapien
gagtttggtgattgcgtggtcccct

SEQ ID NO: 1840657 - DNA, 25 bp, Homo sapien
tgaaccgtccgaggcaactatgcat

SEQ ID NO: 1840658 - DNA, 25 bp, Homo sapien
gatatatgacgctaatcaagcccct

SEQ ID NO: 1840659 - DNA, 25 bp, Homo sapien
tgggagcagctggtatatggaacat

SEQ ID NO: 1840660 - DNA, 25 bp, Homo sapien
tccctgggcatgttagtatatactt

SEQ ID NO: 1840661 - DNA, 25 bp, Homo sapien
tctctggtttcaggaataacgctgc

SEQ ID NO: 1840662 - DNA, 25 bp, Homo sapien
gagcgttacaactcctaaagtggca

SEQ ID NO: 1840663 - DNA, 25 bp, Homo sapien
aaaacaccgctcagatcatccctgg

SEQ ID NO: 1840664 - DNA, 25 bp, Homo sapien
aaatgaattttcacctccgctgtca

SEQ ID NO: 1840665 - DNA, 25 bp, Homo sapien
gttcaggtcgttcttggtcactgct

SEQ ID NO: 1840666 - DNA, 25 bp, Homo sapien
aggtcgttcttggtcactgctcaaa

SEQ ID NO: 1840667 - DNA, 25 bp, Homo sapien
tcgttcttggtcactgctcaaatga

SEQ ID NO: 1840668 - DNA, 25 bp, Homo sapien
tgagcaccagacagacatcatggga

SEQ ID NO: 1840669 - DNA, 25 bp, Homo sapien
tcatgggacagagacaaactatgcc

SEQ ID NO: 1840670 - DNA, 25 bp, Homo sapien
gaaactcagttaagatgtcacctca

SEQ ID NO: 1840671 - DNA, 25 bp, Homo sapien
ccagatatgtaattgagtgagccta

SEQ ID NO: 1840672 - DNA, 25 bp, Homo sapien
cgtgaccagctcagtacatttttct

SEQ ID NO: 1840673 - DNA, 25 bp, Homo sapien
tattacaactaggatcgtgaccagc

SEQ ID NO: 1840674 - DNA, 25 bp, Homo sapien
ggaacactgctttgtttattacaac

SEQ ID NO: 1840675 - DNA, 25 bp, Homo sapien
gccaagaaatggcaatttggcaatg

SEQ ID NO: 1840676 - DNA, 25 bp, Homo sapien
cttactgagttaggctattatatgc

SEQ ID NO: 1840677 - DNA, 25 bp, Homo sapien
tactgagttaggctattatatgcaa

SEQ ID NO: 1840678 - DNA, 25 bp, Homo sapien
ttcttactgagttaggctattatat

SEQ ID NO: 1840679 - DNA, 25 bp, Homo sapien
gagttaggctattatatgcaattga

SEQ ID NO: 1840680 - DNA, 25 bp, Homo sapien
gatccccgatctagttactgaagca

SEQ ID NO: 1840681 - DNA, 25 bp, Homo sapien
gtcacagagtggcttaataacaatt

SEQ ID NO: 1840682 - DNA, 25 bp, Homo sapien
gaccaggagcatactagatccccga

SEQ ID NO: 1840683 - DNA, 25 bp, Homo sapien
taacaattggattagttcagcccaa

SEQ ID NO: 1840684 - DNA, 25 bp, Homo sapien
agtctctgatgtttgttgagagcag

SEQ ID NO: 1840685 - DNA, 25 bp, Homo sapien
tcatatgccaggatgcagtctctga

SEQ ID NO: 1840686 - DNA, 25 bp, Homo sapien
cctatgctgaataagggatgaacca

SEQ ID NO: 1840687 - DNA, 25 bp, Homo sapien
tgaacaatgtcgaaaggctttacca

SEQ ID NO: 1840688 - DNA, 25 bp, Homo sapien
tatgtgctctggctaaaagtctttc

SEQ ID NO: 1840689 - DNA, 25 bp, Homo sapien
tgttcagtcagatgagtgctccggc

SEQ ID NO: 1840690 - DNA, 25 bp, Homo sapien
tgctgaacaagatgggtcctctgac

SEQ ID NO: 1840691 - DNA, 25 bp, Homo sapien
tttataaggttttcactccggctga

SEQ ID NO: 1840692 - DNA, 25 bp, Homo sapien
gatgacggataaaagttgagggccc

SEQ ID NO: 1840693 - DNA, 25 bp, Homo sapien
aagagatggaccctcaatgaagcct

SEQ ID NO: 1840694 - DNA, 25 bp, Homo sapien
tgaacaataactaaaggctttccca

SEQ ID NO: 1840695 - DNA, 25 bp, Homo sapien
taactaaaggctttcccacattcat

SEQ ID NO: 1840696 - DNA, 25 bp, Homo sapien
taaaggctttcccacattcattgca

SEQ ID NO: 1840697 - DNA, 25 bp, Homo sapien
actaaaggctttcccacattcattg

SEQ ID NO: 1840698 - DNA, 25 bp, Homo sapien
tccactattacctctggagatagct

SEQ ID NO: 1840699 - DNA, 25 bp, Homo sapien
ttagtagaggtctcttctggagatg

SEQ ID NO: 1840700 - DNA, 25 bp, Homo sapien
cagtgtctgttggtttgcctgctgt

SEQ ID NO: 1840701 - DNA, 25 bp, Homo sapien
tctagcaagttggaactccaagaat

SEQ ID NO: 1840702 - DNA, 25 bp, Homo sapien
gctctggggctgacacactattttc

SEQ ID NO: 1840703 - DNA, 25 bp, Homo sapien
acatcaggtttagaaacttggagtc

SEQ ID NO: 1840704 - DNA, 25 bp, Homo sapien
atgatccatggctctgtcccttgct

SEQ ID NO: 1840705 - DNA, 25 bp, Homo sapien
tccatgatccatggctctgtccctt

SEQ ID NO: 1840706 - DNA, 25 bp, Homo sapien
atcacatcaggtttagaaacttgga

SEQ ID NO: 1840707 - DNA, 25 bp, Homo sapien
caggtgtgtataattttccaatgtc

SEQ ID NO: 1840708 - DNA, 25 bp, Homo sapien
agtccactatcacatccttgaaagt

SEQ ID NO: 1840709 - DNA, 25 bp, Homo sapien
caaatatcgaaatgtcacctattgt

SEQ ID NO: 1840710 - DNA, 25 bp, Homo sapien
taatccctccagaccacatacattt

SEQ ID NO: 1840711 - DNA, 25 bp, Homo sapien
ccatcctccatgaaactctcctaat

SEQ ID NO: 1840712 - DNA, 25 bp, Homo sapien
ttgttcaaatatcgaaatgtcacct

SEQ ID NO: 1840713 - DNA, 25 bp, Homo sapien
aaaactggctgatgagagtagatta

SEQ ID NO: 1840714 - DNA, 25 bp, Homo sapien
ctggctgatgagagtagattatgtc

SEQ ID NO: 1840715 - DNA, 25 bp, Homo sapien
agagtagattatgtcccccttggag

SEQ ID NO: 1840716 - DNA, 25 bp, Homo sapien
gctgatgagagtagattatgtcccc

SEQ ID NO: 1840717 - DNA, 25 bp, Homo sapien
aacttgaacaccagggttcgccagg

SEQ ID NO: 1840718 - DNA, 25 bp, Homo sapien
ttcagctggtatctcggtctaggac

SEQ ID NO: 1840719 - DNA, 25 bp, Homo sapien
ggtatctcggtctaggactcagatg

SEQ ID NO: 1840720 - DNA, 25 bp, Homo sapien
ggagctcatcccgttcctctggaac

SEQ ID NO: 1840721 - DNA, 25 bp, Homo sapien
ctgcaacacgctgaggttgtctacc

SEQ ID NO: 1840722 - DNA, 25 bp, Homo sapien
aaaacagagtggagatcgggtacgc

SEQ ID NO: 1840723 - DNA, 25 bp, Homo sapien
ttggtgcccaccctagaatctggcc

SEQ ID NO: 1840724 - DNA, 25 bp, Homo sapien
tgctacacaagagaagtgccccaag

SEQ ID NO: 1840725 - DNA, 25 bp, Homo sapien
gcactagagaggtgtgtggcactcc

SEQ ID NO: 1840726 - DNA, 25 bp, Homo sapien
tctgtgcacacttgtgactcacacc

SEQ ID NO: 1840727 - DNA, 25 bp, Homo sapien
tgtgttccctctgtgcacacttgtg

SEQ ID NO: 1840728 - DNA, 25 bp, Homo sapien
gagctcggataacacgaagacacac

SEQ ID NO: 1840729 - DNA, 25 bp, Homo sapien
gactcacacccctgcgagctcggat

SEQ ID NO: 1840730 - DNA, 25 bp, Homo sapien
aaagccctccaagggatcagggcgg

SEQ ID NO: 1840731 - DNA, 25 bp, Homo sapien
cgcgaaatcagaagggtgacgtcac

SEQ ID NO: 1840732 - DNA, 25 bp, Homo sapien
gcagaggcctctaagcgcgaaatca

SEQ ID NO: 1840733 - DNA, 25 bp, Homo sapien
tcagaagggtgacgtcacgagtccg

SEQ ID NO: 1840734 - DNA, 25 bp, Homo sapien
cccctatagcgatccacacactctg

SEQ ID NO: 1840735 - DNA, 25 bp, Homo sapien
acacactctgatcccgggtccggaa

SEQ ID NO: 1840736 - DNA, 25 bp, Homo sapien
ggaagcgcattgaccgccaccagac

SEQ ID NO: 1840737 - DNA, 25 bp, Homo sapien
atcccgggtccggaagcgcattgac

SEQ ID NO: 1840738 - DNA, 25 bp, Homo sapien
agcaactggacttccagcgcgccaa

SEQ ID NO: 1840739 - DNA, 25 bp, Homo sapien
gaagcaactggacttccagcgcgcc

SEQ ID NO: 1840740 - DNA, 25 bp, Homo sapien
caactggacttccagcgcgccaacc

SEQ ID NO: 1840741 - DNA, 25 bp, Homo sapien
ccgaagcaactggacttccagcgcg

SEQ ID NO: 1840742 - DNA, 25 bp, Homo sapien
gcgcaggtattggtcccacctctgc

SEQ ID NO: 1840743 - DNA, 25 bp, Homo sapien
actcctatgttagctagggctccaa

SEQ ID NO: 1840744 - DNA, 25 bp, Homo sapien
tgaaaccaaccgatgcacctttcgg

SEQ ID NO: 1840745 - DNA, 25 bp, Homo sapien
cctttcgggatttgtaactcctatg

SEQ ID NO: 1840746 - DNA, 25 bp, Homo sapien
tcgttaacactattgaacagtagag

SEQ ID NO: 1840747 - DNA, 25 bp, Homo sapien
tcatcgtggataagaactataaagc

SEQ ID NO: 1840748 - DNA, 25 bp, Homo sapien
cacctaacattgaatctcgtttgtc

SEQ ID NO: 1840749 - DNA, 25 bp, Homo sapien
cagtagagtgattgatgcctcatcc

SEQ ID NO: 1840750 - DNA, 25 bp, Homo sapien
tggatctacctatgtaaaaccacat

SEQ ID NO: 1840751 - DNA, 25 bp, Homo sapien
gctgaatcaacaggatatacaaagg

SEQ ID NO: 1840752 - DNA, 25 bp, Homo sapien
tacaatgcaattcaatcagggaaag

SEQ ID NO: 1840753 - DNA, 25 bp, Homo sapien
aatgtgggcactgacgtcttcctta

SEQ ID NO: 1840754 - DNA, 25 bp, Homo sapien
gagccttcctagaccagaggctaga

SEQ ID NO: 1840755 - DNA, 25 bp, Homo sapien
tctgggaaggccctctattttggca

SEQ ID NO: 1840756 - DNA, 25 bp, Homo sapien
caactcttgcagttagggttctggg

SEQ ID NO: 1840757 - DNA, 25 bp, Homo sapien
tcagcttcaacatctgtacagggta

SEQ ID NO: 1840758 - DNA, 25 bp, Homo sapien
ggaacaacaacagcctcgatggaga

SEQ ID NO: 1840759 - DNA, 25 bp, Homo sapien
ttgattgtgggaacaacaacagcct

SEQ ID NO: 1840760 - DNA, 25 bp, Homo sapien
caacagcctcgatggagactatttc

SEQ ID NO: 1840761 - DNA, 25 bp, Homo sapien
gagttcctactttcttgattgtggg

SEQ ID NO: 1840762 - DNA, 25 bp, Homo sapien
ctggaagtccgaacaccccggatca

SEQ ID NO: 1840763 - DNA, 25 bp, Homo sapien
gaacaccgtcgttcaccgaggagct

SEQ ID NO: 1840764 - DNA, 25 bp, Homo sapien
tcgttcaccgaggagctttgggctc

SEQ ID NO: 1840765 - DNA, 25 bp, Homo sapien
gaagtccgaacaccccggatcagag

SEQ ID NO: 1840766 - DNA, 25 bp, Homo sapien
cagcgtgccagtgatcccaacatta

SEQ ID NO: 1840767 - DNA, 25 bp, Homo sapien
cattcaaacctctactgccactggg

SEQ ID NO: 1840768 - DNA, 25 bp, Homo sapien
gcgtgccagtgatcccaacattact

SEQ ID NO: 1840769 - DNA, 25 bp, Homo sapien
ttgacttgtccagatgcctcgctca

SEQ ID NO: 1840770 - DNA, 25 bp, Homo sapien
ccgtagccgacaggattcgaacctg

SEQ ID NO: 1840771 - DNA, 25 bp, Homo sapien
gaaaccccaatggatttcaagtcca

SEQ ID NO: 1840772 - DNA, 25 bp, Homo sapien
cctgcgcggggaaaccccaatggat

SEQ ID NO: 1840773 - DNA, 25 bp, Homo sapien
atggatttcaagtccatcgccttaa

SEQ ID NO: 1840774 - DNA, 25 bp, Homo sapien
ggagtcacgaaactctaccactacg

SEQ ID NO: 1840775 - DNA, 25 bp, Homo sapien
tccgccccgaagctgaaaaatagtg

SEQ ID NO: 1840776 - DNA, 25 bp, Homo sapien
ggtgaccttcgaaagcgacatcgag

SEQ ID NO: 1840777 - DNA, 25 bp, Homo sapien
gctgtcacgaagtttccactgcaca

SEQ ID NO: 1840778 - DNA, 25 bp, Homo sapien
tcaggaatatacacccgaagagccc

SEQ ID NO: 1840779 - DNA, 25 bp, Homo sapien
tctcagtagaggtccaataaccctg

SEQ ID NO: 1840780 - DNA, 25 bp, Homo sapien
taaccctgtgataaatatgcgcctg

SEQ ID NO: 1840781 - DNA, 25 bp, Homo sapien
tagtcatgagggttgcacctggaag

SEQ ID NO: 1840782 - DNA, 25 bp, Homo sapien
tatctgcccctggaaacagatttgc

SEQ ID NO: 1840783 - DNA, 25 bp, Homo sapien
cttatctgcccctggaaacagattt

SEQ ID NO: 1840784 - DNA, 25 bp, Homo sapien
tctgcccctggaaacagatttgctc

SEQ ID NO: 1840785 - DNA, 25 bp, Homo sapien
ttatctgcccctggaaacagatttg

SEQ ID NO: 1840786 - DNA, 25 bp, Homo sapien
gtgggaatggctataacagatttga

SEQ ID NO: 1840787 - DNA, 25 bp, Homo sapien
ggtggtagatagggtggcagtggga

SEQ ID NO: 1840788 - DNA, 25 bp, Homo sapien
gctataacagatttgataatgatgg

SEQ ID NO: 1840789 - DNA, 25 bp, Homo sapien
taacagatttgataatgatggaagc

SEQ ID NO: 1840790 - DNA, 25 bp, Homo sapien
tcgtagtcggcaggattcgaacctg

SEQ ID NO: 1840791 - DNA, 25 bp, Homo sapien
gaaaccccaatggatttctagtcca

SEQ ID NO: 1840792 - DNA, 25 bp, Homo sapien
cctgcgcggggaaaccccaatggat

SEQ ID NO: 1840793 - DNA, 25 bp, Homo sapien
atggatttctagtccatcgccttaa

SEQ ID NO: 1840794 - DNA, 25 bp, Homo sapien
caggttccaccgagacttgaactcg

SEQ ID NO: 1840795 - DNA, 25 bp, Homo sapien
cttgaactcggatcgctggattcag

SEQ ID NO: 1840796 - DNA, 25 bp, Homo sapien
gagtgctaaccattacaccatggaa

SEQ ID NO: 1840797 - DNA, 25 bp, Homo sapien
tggattcagagtccagagtgctaac

SEQ ID NO: 1840798 - DNA, 25 bp, Homo sapien
accccaatgggtttctagtccatca

SEQ ID NO: 1840799 - DNA, 25 bp, Homo sapien
cccaatgggtttctagtccatcacc

SEQ ID NO: 1840800 - DNA, 25 bp, Homo sapien
gtttctagtccatcaccttaaccac

SEQ ID NO: 1840801 - DNA, 25 bp, Homo sapien
tgggtttctagtccatcaccttaac

SEQ ID NO: 1840802 - DNA, 25 bp, Homo sapien
tgtgccccgaaacccgtgataagta

SEQ ID NO: 1840803 - DNA, 25 bp, Homo sapien
aagttctgagaaagcgatgccggcc

SEQ ID NO: 1840804 - DNA, 25 bp, Homo sapien
taacctgggcttcgaggctctaggg

SEQ ID NO: 1840805 - DNA, 25 bp, Homo sapien
cagtgtggtccgtggaagaaaccaa

SEQ ID NO: 1840806 - DNA, 25 bp, Homo sapien
gagaaaagctcattccatgccgggt

SEQ ID NO: 1840807 - DNA, 25 bp, Homo sapien
tccgtagtcatgcaaacttacaagt

SEQ ID NO: 1840808 - DNA, 25 bp, Homo sapien
tgcaaagagttactggccccaaatg

SEQ ID NO: 1840809 - DNA, 25 bp, Homo sapien
ccatgccgggtttagaaaaatctga

SEQ ID NO: 1840810 - DNA, 25 bp, Homo sapien
aaattctctacggtgtttaggacat

SEQ ID NO: 1840811 - DNA, 25 bp, Homo sapien
ttctctacggtgtttaggacatcct

SEQ ID NO: 1840812 - DNA, 25 bp, Homo sapien
tctacggtgtttaggacatcctgtc

SEQ ID NO: 1840813 - DNA, 25 bp, Homo sapien
tacggtgtttaggacatcctgtcac

SEQ ID NO: 1840814 - DNA, 25 bp, Homo sapien
gtttctctgcccttccggtgcctgc

SEQ ID NO: 1840815 - DNA, 25 bp, Homo sapien
gagtgcacttgtatgtccacgggtt

SEQ ID NO: 1840816 - DNA, 25 bp, Homo sapien
cttgtatgtccacgggttgcagctg

SEQ ID NO: 1840817 - DNA, 25 bp, Homo sapien
gtgcctgcagagtgcacttgtatgt

SEQ ID NO: 1840818 - DNA, 25 bp, Homo sapien
tgtcctctgaggcgcagatcttcct

SEQ ID NO: 1840819 - DNA, 25 bp, Homo sapien
cctctgaggcgcagatcttcctggg

SEQ ID NO: 1840820 - DNA, 25 bp, Homo sapien
gcccttctgatgatagcgctgtcct

SEQ ID NO: 1840821 - DNA, 25 bp, Homo sapien
cttcaccgccctccaatagcttgac

SEQ ID NO: 1840822 - DNA, 25 bp, Homo sapien
cctgcggttccgaggggacggtgca

SEQ ID NO: 1840823 - DNA, 25 bp, Homo sapien
ctaggagaccatgtagggcacctgc

SEQ ID NO: 1840824 - DNA, 25 bp, Homo sapien
acggtgcagggcaagtccacatcct

SEQ ID NO: 1840825 - DNA, 25 bp, Homo sapien
cacctcccatgttgcgggcgccagg

SEQ ID NO: 1840826 - DNA, 25 bp, Homo sapien
tgtcgaccacagacctgctgtattt

SEQ ID NO: 1840827 - DNA, 25 bp, Homo sapien
aaagataccttcttgtcgaccacag

SEQ ID NO: 1840828 - DNA, 25 bp, Homo sapien
ttgtggagggtgagaaatagaggaa

SEQ ID NO: 1840829 - DNA, 25 bp, Homo sapien
aatccagattgcctgccatcaggtg

SEQ ID NO: 1840830 - DNA, 25 bp, Homo sapien
cccgcgtgacagacggggacactca

SEQ ID NO: 1840831 - DNA, 25 bp, Homo sapien
tcccgcgtgacagacggggacactc

SEQ ID NO: 1840832 - DNA, 25 bp, Homo sapien
gacagacggggacactcaccactat

SEQ ID NO: 1840833 - DNA, 25 bp, Homo sapien
acggggacactcaccactatactaa

SEQ ID NO: 1840834 - DNA, 25 bp, Homo sapien
cctcagattaaaagtctgatgctct

SEQ ID NO: 1840835 - DNA, 25 bp, Homo sapien
tcgcctgaacagggacttgaaccct

SEQ ID NO: 1840836 - DNA, 25 bp, Homo sapien
tgctctaccgactgagctatccagg

SEQ ID NO: 1840837 - DNA, 25 bp, Homo sapien
cttgaaccctggaccctcagattaa

SEQ ID NO: 1840838 - DNA, 25 bp, Homo sapien
ggcccagcacgcttccgctgcgcca

SEQ ID NO: 1840839 - DNA, 25 bp, Homo sapien
tgggcccagcacgcttccgctgcgc

SEQ ID NO: 1840840 - DNA, 25 bp, Homo sapien
gggcccagcacgcttccgctgcgcc

SEQ ID NO: 1840841 - DNA, 25 bp, Homo sapien
cccagcacgcttccgctgcgccact

SEQ ID NO: 1840842 - DNA, 25 bp, Homo sapien
taggatcttgcaatagctgtttgcc

SEQ ID NO: 1840843 - DNA, 25 bp, Homo sapien
ggattgtcttctgcgtgtatgttcg

SEQ ID NO: 1840844 - DNA, 25 bp, Homo sapien
tcacccctgatcgttgggtacataa

SEQ ID NO: 1840845 - DNA, 25 bp, Homo sapien
gctgtttgccagtacattcgagtat

SEQ ID NO: 1840846 - DNA, 25 bp, Homo sapien
tccatgcggagaccagaagccccaa

SEQ ID NO: 1840847 - DNA, 25 bp, Homo sapien
atgcggagaccagaagccccaaacc

SEQ ID NO: 1840848 - DNA, 25 bp, Homo sapien
acctgggaagtagcaacttgagtct

SEQ ID NO: 1840849 - DNA, 25 bp, Homo sapien
aacctgggaagtagcaacttgagtc

SEQ ID NO: 1840850 - DNA, 25 bp, Homo sapien
gctggtcagatcaatgtccgactcc

SEQ ID NO: 1840851 - DNA, 25 bp, Homo sapien
cagttgctggtcagatcaatgtccg

SEQ ID NO: 1840852 - DNA, 25 bp, Homo sapien
gagtttacgacagttgctggtcaga

SEQ ID NO: 1840853 - DNA, 25 bp, Homo sapien
ctagagcggtgtgagtttacgacag

SEQ ID NO: 1840854 - DNA, 25 bp, Homo sapien
tggtttgatgtaagagagatgcctc

SEQ ID NO: 1840855 - DNA, 25 bp, Homo sapien
gaactattgtggcattccttggcga

SEQ ID NO: 1840856 - DNA, 25 bp, Homo sapien
gagaccctgtttggcgaacatcggt

SEQ ID NO: 1840857 - DNA, 25 bp, Homo sapien
tcttggaggtagaaacggctgaact

SEQ ID NO: 1840858 - DNA, 25 bp, Homo sapien
gacccgaacacaggaagcagtaagc

SEQ ID NO: 1840859 - DNA, 25 bp, Homo sapien
tccatacggagaccagaagacccga

SEQ ID NO: 1840860 - DNA, 25 bp, Homo sapien
aggaagcagtaagcttgagtctggc

SEQ ID NO: 1840861 - DNA, 25 bp, Homo sapien
gagaccagaagacccgaacacagga

SEQ ID NO: 1840862 - DNA, 25 bp, Homo sapien
tgacttaagtcctgatgcagtagct

SEQ ID NO: 1840863 - DNA, 25 bp, Homo sapien
tgtgacttaagtcctgatgcagtag

SEQ ID NO: 1840864 - DNA, 25 bp, Homo sapien
gtgacttaagtcctgatgcagtagc

SEQ ID NO: 1840865 - DNA, 25 bp, Homo sapien
tctgtatgcactgataactttgagt

SEQ ID NO: 1840866 - DNA, 25 bp, Homo sapien
tctggaggatgattagaacttccat

SEQ ID NO: 1840867 - DNA, 25 bp, Homo sapien
gttcttctggaggatgattagaact

SEQ ID NO: 1840868 - DNA, 25 bp, Homo sapien
tgtatgcactgataactttgagttc

SEQ ID NO: 1840869 - DNA, 25 bp, Homo sapien
cttctaaaaacctgtaagagctgca

SEQ ID NO: 1840870 - DNA, 25 bp, Homo sapien
gatttgccttctggcacaagctcca

SEQ ID NO: 1840871 - DNA, 25 bp, Homo sapien
aagtataattaaatgcactgctgcc

SEQ ID NO: 1840872 - DNA, 25 bp, Homo sapien
tggtatggtaagataagcttgcacc

SEQ ID NO: 1840873 - DNA, 25 bp, Homo sapien
ttcctattgtttgcgtttataccac

SEQ ID NO: 1840874 - DNA, 25 bp, Homo sapien
taccacttccggtcacacgggcatt

SEQ ID NO: 1840875 - DNA, 25 bp, Homo sapien
cacgggcattgttttgccggtatga

SEQ ID NO: 1840876 - DNA, 25 bp, Homo sapien
gccgcgttaatatgcccttccattt

SEQ ID NO: 1840877 - DNA, 25 bp, Homo sapien
ctcagtggagaagtagaaacatggc

SEQ ID NO: 1840878 - DNA, 25 bp, Homo sapien
ttggatttcggtgtcgctcagtgga

SEQ ID NO: 1840879 - DNA, 25 bp, Homo sapien
gtttctttgctacagcgccgttgga

SEQ ID NO: 1840880 - DNA, 25 bp, Homo sapien
tgtccgagccgaatctcaaatagct

SEQ ID NO: 1840881 - DNA, 25 bp, Homo sapien
catgcagagcataaggggagggagc

SEQ ID NO: 1840882 - DNA, 25 bp, Homo sapien
ccatgcagagcataaggggagggag

SEQ ID NO: 1840883 - DNA, 25 bp, Homo sapien
aggccatgcagagcataaggggagg

SEQ ID NO: 1840884 - DNA, 25 bp, Homo sapien
tgcagagcataaggggagggagctg

SEQ ID NO: 1840885 - DNA, 25 bp, Homo sapien
tttccgcctggttttgatccaggga

SEQ ID NO: 1840886 - DNA, 25 bp, Homo sapien
ttccgcctggttttgatccagggac

SEQ ID NO: 1840887 - DNA, 25 bp, Homo sapien
ttgtttccgcctggttttgatccag

SEQ ID NO: 1840888 - DNA, 25 bp, Homo sapien
tgtttccgcctggttttgatccagg

SEQ ID NO: 1840889 - DNA, 25 bp, Homo sapien
agccttcaagatggatgcccctgct

SEQ ID NO: 1840890 - DNA, 25 bp, Homo sapien
gatgcccctgctggccgcaaagtgg

SEQ ID NO: 1840891 - DNA, 25 bp, Homo sapien
aaagtgggtctcattgctccccgcc

SEQ ID NO: 1840892 - DNA, 25 bp, Homo sapien
tgctggccgcaaagtgggtctcatt

SEQ ID NO: 1840893 - DNA, 25 bp, Homo sapien
tagagagatagttcctgacgctgca

SEQ ID NO: 1840894 - DNA, 25 bp, Homo sapien
tgaaaaacatcgaagctcctggtgg

SEQ ID NO: 1840895 - DNA, 25 bp, Homo sapien
taattccttgcgaccggtgaagagg

SEQ ID NO: 1840896 - DNA, 25 bp, Homo sapien
cagtcagaatgtgcaagagggatcc

SEQ ID NO: 1840897 - DNA, 25 bp, Homo sapien
tatcttcgccgattacatcagtgct

SEQ ID NO: 1840898 - DNA, 25 bp, Homo sapien
tactatgtaattccggtactgctgg

SEQ ID NO: 1840899 - DNA, 25 bp, Homo sapien
tttcggcggcgttgtcttgaaccaa

SEQ ID NO: 1840900 - DNA, 25 bp, Homo sapien
cagtgcttatgtttgtgacttcaga

SEQ ID NO: 1840901 - DNA, 25 bp, Homo sapien
ctgagatgcagagcgaagatccaag

SEQ ID NO: 1840902 - DNA, 25 bp, Homo sapien
gccacatattaagatgctcttttgg

SEQ ID NO: 1840903 - DNA, 25 bp, Homo sapien
tccaagctacacgttcggaaaccga

SEQ ID NO: 1840904 - DNA, 25 bp, Homo sapien
attttcccccgcttgactgtggttg

SEQ ID NO: 1840905 - DNA, 25 bp, Homo sapien
gccaggagtcgaacctagaatcttc

SEQ ID NO: 1840906 - DNA, 25 bp, Homo sapien
cagccaggagtcgaacctagaatct

SEQ ID NO: 1840907 - DNA, 25 bp, Homo sapien
ggagtcgaacctagaatcttctgat

SEQ ID NO: 1840908 - DNA, 25 bp, Homo sapien
agccagccaggagtcgaacctagaa

SEQ ID NO: 1840909 - DNA, 25 bp, Homo sapien
ctgtgagcaggatttgaacctgcgc

SEQ ID NO: 1840910 - DNA, 25 bp, Homo sapien
tggatttcgagtccaacaccttaac

SEQ ID NO: 1840911 - DNA, 25 bp, Homo sapien
gaacccccattggatttcgagtcca

SEQ ID NO: 1840912 - DNA, 25 bp, Homo sapien
caggatttgaacctgcgcggggaac

SEQ ID NO: 1840913 - DNA, 25 bp, Homo sapien
aacactacgctgattccagaaatgg

SEQ ID NO: 1840914 - DNA, 25 bp, Homo sapien
gctgggagctcatttcgaaccgagc

SEQ ID NO: 1840915 - DNA, 25 bp, Homo sapien
gaaccgagctgaacgctcattgctg

SEQ ID NO: 1840916 - DNA, 25 bp, Homo sapien
tccgagaaatctcgcaaacggcgtg

SEQ ID NO: 1840917 - DNA, 25 bp, Homo sapien
agtcctgggccgtgggcgtctcctg

SEQ ID NO: 1840918 - DNA, 25 bp, Homo sapien
gtgggcgtctcctgggattgacacc

SEQ ID NO: 1840919 - DNA, 25 bp, Homo sapien
tgggattgacacctcctagggttct

SEQ ID NO: 1840920 - DNA, 25 bp, Homo sapien
ctgagctgcgtaggccgagtcctgg

SEQ ID NO: 1840921 - DNA, 25 bp, Homo sapien
ccgcggacctttcgcgtgttaggcg

SEQ ID NO: 1840922 - DNA, 25 bp, Homo sapien
ttcgcgtgttaggcgaacgtgataa

SEQ ID NO: 1840923 - DNA, 25 bp, Homo sapien
cgcgtgttaggcgaacgtgataacc

SEQ ID NO: 1840924 - DNA, 25 bp, Homo sapien
cgtgttaggcgaacgtgataaccac

SEQ ID NO: 1840925 - DNA, 25 bp, Homo sapien
gcgttcgccaaatatatcgactata

SEQ ID NO: 1840926 - DNA, 25 bp, Homo sapien
tattgttcggagtgttcagagtagc

SEQ ID NO: 1840927 - DNA, 25 bp, Homo sapien
cacataccgatgacagatacgagca

SEQ ID NO: 1840928 - DNA, 25 bp, Homo sapien
gatacgagcagaaatgcgttcgcca

SEQ ID NO: 1840929 - DNA, 25 bp, Homo sapien
ggcgctttaaccagctaagccacgg

SEQ ID NO: 1840930 - DNA, 25 bp, Homo sapien
ctttaaccagctaagccacggagcc

SEQ ID NO: 1840931 - DNA, 25 bp, Homo sapien
cgctttaaccagctaagccacggag

SEQ ID NO: 1840932 - DNA, 25 bp, Homo sapien
actagacaggcgctttaaccagcta

SEQ ID NO: 1840933 - DNA, 25 bp, Homo sapien
ctgtgaatttggtgcgccctcgctt

SEQ ID NO: 1840934 - DNA, 25 bp, Homo sapien
cgagaaaacggatctgtgaatttgg

SEQ ID NO: 1840935 - DNA, 25 bp, Homo sapien
tgtgaatttggtgcgccctcgctta

SEQ ID NO: 1840936 - DNA, 25 bp, Homo sapien
actttgccccgagaaaacggatctg

SEQ ID NO: 1840937 - DNA, 25 bp, Homo sapien
aaggcatacccacatcctacccgta

SEQ ID NO: 1840938 - DNA, 25 bp, Homo sapien
ggcatacccacatcctacccgtaaa

SEQ ID NO: 1840939 - DNA, 25 bp, Homo sapien
gcatacccacatcctacccgtaaaa

SEQ ID NO: 1840940 - DNA, 25 bp, Homo sapien
ccaaggcatacccacatcctacccg

SEQ ID NO: 1840941 - DNA, 25 bp, Homo sapien
tctggaagtgggcttccgcgatcgc

SEQ ID NO: 1840942 - DNA, 25 bp, Homo sapien
gccaggttttttgatgcggatcgaa

SEQ ID NO: 1840943 - DNA, 25 bp, Homo sapien
gggaccaacgccctgagctcttgtg

SEQ ID NO: 1840944 - DNA, 25 bp, Homo sapien
tgttagtggtcgagtttttctggaa

SEQ ID NO: 1840945 - DNA, 25 bp, Homo sapien
gaagagctctatactgttgactaga

SEQ ID NO: 1840946 - DNA, 25 bp, Homo sapien
tgactagagatttgtattttgggtc

SEQ ID NO: 1840947 - DNA, 25 bp, Homo sapien
taaataggatgaatgcggaagactt

SEQ ID NO: 1840948 - DNA, 25 bp, Homo sapien
attttgggtctgtgacaaatacacc

SEQ ID NO: 1840949 - DNA, 25 bp, Homo sapien
tggtcttccctcgtctcttcctggg

SEQ ID NO: 1840950 - DNA, 25 bp, Homo sapien
tatctgtaatttcccggctaccaca

SEQ ID NO: 1840951 - DNA, 25 bp, Homo sapien
tgaacagggccatgatccttatctg

SEQ ID NO: 1840952 - DNA, 25 bp, Homo sapien
tcctgggtagaaacaactacctgga

SEQ ID NO: 1840953 - DNA, 25 bp, Homo sapien
taagacgatgtgttggatgcccaaa

SEQ ID NO: 1840954 - DNA, 25 bp, Homo sapien
tggtaagacgatgtgttggatgccc

SEQ ID NO: 1840955 - DNA, 25 bp, Homo sapien
ctgcagtggtaagacgatgtgttgg

SEQ ID NO: 1840956 - DNA, 25 bp, Homo sapien
cgatgtgttggatgcccaaacacaa

SEQ ID NO: 1840957 - DNA, 25 bp, Homo sapien
tgctgacatccaccaaactttacta

SEQ ID NO: 1840958 - DNA, 25 bp, Homo sapien
atgtgacctttagaactgggggact

SEQ ID NO: 1840959 - DNA, 25 bp, Homo sapien
gctgacatccaccaaactttactat

SEQ ID NO: 1840960 - DNA, 25 bp, Homo sapien
tccggtcaaatagcctcagaggttc

SEQ ID NO: 1840961 - DNA, 25 bp, Homo sapien
tgtggccttccggtcaaatagcctc

SEQ ID NO: 1840962 - DNA, 25 bp, Homo sapien
caaatagcctcagaggttcagttcc

SEQ ID NO: 1840963 - DNA, 25 bp, Homo sapien
atagcctcagaggttcagttcctgg

SEQ ID NO: 1840964 - DNA, 25 bp, Homo sapien
acgcgggcaccagcccattggatct

SEQ ID NO: 1840965 - DNA, 25 bp, Homo sapien
gggcaccagcccattggatcttaag

SEQ ID NO: 1840966 - DNA, 25 bp, Homo sapien
cacgcgggcaccagcccattggatc

SEQ ID NO: 1840967 - DNA, 25 bp, Homo sapien
gcgggcaccagcccattggatctta

SEQ ID NO: 1840968 - DNA, 25 bp, Homo sapien
gcaccacaatatgcaaaggttgtgt

SEQ ID NO: 1840969 - DNA, 25 bp, Homo sapien
caatatgcaaaggttgtgtggtctg

SEQ ID NO: 1840970 - DNA, 25 bp, Homo sapien
cacaatatgcaaaggttgtgtggtc

SEQ ID NO: 1840971 - DNA, 25 bp, Homo sapien
ggaaagcaccacaatatgcaaaggt

SEQ ID NO: 1840972 - DNA, 25 bp, Homo sapien
ggttctgtctctggccagatcaagg

SEQ ID NO: 1840973 - DNA, 25 bp, Homo sapien
catgggaaaggaatggacccctgaa

SEQ ID NO: 1840974 - DNA, 25 bp, Homo sapien
ctgtctctggccagatcaaggttcc

SEQ ID NO: 1840975 - DNA, 25 bp, Homo sapien
tgaagccatgggaaaggaatggacc

SEQ ID NO: 1840976 - DNA, 25 bp, Homo sapien
caagaactgacttgaggatgggaat

SEQ ID NO: 1840977 - DNA, 25 bp, Homo sapien
gatacggcctgagagattcccgctt

SEQ ID NO: 1840978 - DNA, 25 bp, Homo sapien
aaattcaggtctcttgctgctgggg

SEQ ID NO: 1840979 - DNA, 25 bp, Homo sapien
taccaaacactgaaggaaattcagg

SEQ ID NO: 1840980 - DNA, 25 bp, Homo sapien
cgtctggaggtgttcttgacattta

SEQ ID NO: 1840981 - DNA, 25 bp, Homo sapien
tggccgccagagcttatcgtctgga

SEQ ID NO: 1840982 - DNA, 25 bp, Homo sapien
tgttcttgacatttagagcagtttc

SEQ ID NO: 1840983 - DNA, 25 bp, Homo sapien
cagagcttatcgtctggaggtgttc

SEQ ID NO: 1840984 - DNA, 25 bp, Homo sapien
tattcgtagtactgagttacacagc

SEQ ID NO: 1840985 - DNA, 25 bp, Homo sapien
gaagagagcaagtcgtattcgtagt

SEQ ID NO: 1840986 - DNA, 25 bp, Homo sapien
cagcgtaaaccacttacaagcgtat

SEQ ID NO: 1840987 - DNA, 25 bp, Homo sapien
agagcgtgagtcctaaaaacggtcg

SEQ ID NO: 1840988 - DNA, 25 bp, Homo sapien
ctgtaaattttaggaagacaagcgg

SEQ ID NO: 1840989 - DNA, 25 bp, Homo sapien
atgttcccgcctgatttcgaaccgg

SEQ ID NO: 1840990 - DNA, 25 bp, Homo sapien
ttctcctctgttgttgataggtccc

SEQ ID NO: 1840991 - DNA, 25 bp, Homo sapien
ataggtccctcgttcaggcccttca

SEQ ID NO: 1840992 - DNA, 25 bp, Homo sapien
gttgttgataggtccctcgttcagg

SEQ ID NO: 1840993 - DNA, 25 bp, Homo sapien
tcctctgttgttgataggtccctcg

SEQ ID NO: 1840994 - DNA, 25 bp, Homo sapien
taaaagaacgtggtatgagcaatcc

SEQ ID NO: 1840995 - DNA, 25 bp, Homo sapien
gaaagctatgaccacctccatgtga

SEQ ID NO: 1840996 - DNA, 25 bp, Homo sapien
ttcagattagaagcgcagaggagac

SEQ ID NO: 1840997 - DNA, 25 bp, Homo sapien
catgacagtcaatctcaagggaaag

SEQ ID NO: 1840998 - DNA, 25 bp, Homo sapien
tttcagaaaaagctgcctgcttagt

SEQ ID NO: 1840999 - DNA, 25 bp, Homo sapien
tcagaaaaagctgcctgcttagttc

SEQ ID NO: 1841000 - DNA, 25 bp, Homo sapien
aaaaagctgcctgcttagttcttcc

SEQ ID NO: 1841001 - DNA, 25 bp, Homo sapien
agaaaaagctgcctgcttagttctt

SEQ ID NO: 1841002 - DNA, 25 bp, Homo sapien
agaatcctgatggtttgttatgcac

SEQ ID NO: 1841003 - DNA, 25 bp, Homo sapien
tactttctatcattccccagaatcc

SEQ ID NO: 1841004 - DNA, 25 bp, Homo sapien
gagtaagtggtaatactttctatca

SEQ ID NO: 1841005 - DNA, 25 bp, Homo sapien
ctgttgagtaagtggtaatactttc

SEQ ID NO: 1841006 - DNA, 25 bp, Homo sapien
cctttctggaacatcgttctctgtg

SEQ ID NO: 1841007 - DNA, 25 bp, Homo sapien
ccctttctggaacatcgttctctgt

SEQ ID NO: 1841008 - DNA, 25 bp, Homo sapien
cccctttctggaacatcgttctctg

SEQ ID NO: 1841009 - DNA, 25 bp, Homo sapien
agaaaggagggccatgagagtaact

SEQ ID NO: 1841010 - DNA, 25 bp, Homo sapien
atcaaagtgtatgtgcagtagacgg

SEQ ID NO: 1841011 - DNA, 25 bp, Homo sapien
gtgtatgtgcagtagacggcaccaa

SEQ ID NO: 1841012 - DNA, 25 bp, Homo sapien
tgcagtagacggcaccaaatccaga

SEQ ID NO: 1841013 - DNA, 25 bp, Homo sapien
aaaacagataaaggtcaaccacaag

SEQ ID NO: 1841014 - DNA, 25 bp, Homo sapien
aacagataaaggtcaaccacaagag

SEQ ID NO: 1841015 - DNA, 25 bp, Homo sapien
gataaaggtcaaccacaagagacag

SEQ ID NO: 1841016 - DNA, 25 bp, Homo sapien
cagataaaggtcaaccacaagagac

SEQ ID NO: 1841017 - DNA, 25 bp, Homo sapien
aatagccagtttaaaaacgcaccat

SEQ ID NO: 1841018 - DNA, 25 bp, Homo sapien
gccagtttaaaaacgcaccatgaaa

SEQ ID NO: 1841019 - DNA, 25 bp, Homo sapien
caaaagtagtcggatgttgctcaca

SEQ ID NO: 1841020 - DNA, 25 bp, Homo sapien
tagccagtttaaaaacgcaccatga

SEQ ID NO: 1841021 - DNA, 25 bp, Homo sapien
tagggactgcggctcgtcagcctga

SEQ ID NO: 1841022 - DNA, 25 bp, Homo sapien
tccagtaaaaataacgacagctgct

SEQ ID NO: 1841023 - DNA, 25 bp, Homo sapien
ggtaatcacgatgctggaatcaatc

SEQ ID NO: 1841024 - DNA, 25 bp, Homo sapien
gacagctgctactcaatactccaaa

SEQ ID NO: 1841025 - DNA, 25 bp, Homo sapien
ctttctttcacgtcaaagtaattct

SEQ ID NO: 1841026 - DNA, 25 bp, Homo sapien
tcgcttttcaagtggagtctccttc

SEQ ID NO: 1841027 - DNA, 25 bp, Homo sapien
tctttcacgtcaaagtaattctgtg

SEQ ID NO: 1841028 - DNA, 25 bp, Homo sapien
aatcattgttctctcgcttttcaag

SEQ ID NO: 1841029 - DNA, 25 bp, Homo sapien
gttggagaatagtagctccttgtca

SEQ ID NO: 1841030 - DNA, 25 bp, Homo sapien
gagaatagtagctccttgtcactac

SEQ ID NO: 1841031 - DNA, 25 bp, Homo sapien
tagtagctccttgtcactactgcag

SEQ ID NO: 1841032 - DNA, 25 bp, Homo sapien
ctagttggagaatagtagctccttg

SEQ ID NO: 1841033 - DNA, 25 bp, Homo sapien
tgtaagacagctgtgtagcactggc

SEQ ID NO: 1841034 - DNA, 25 bp, Homo sapien
taagacagctgtgtagcactggccc

SEQ ID NO: 1841035 - DNA, 25 bp, Homo sapien
cttttgtaagacagctgtgtagcac

SEQ ID NO: 1841036 - DNA, 25 bp, Homo sapien
tttgtaagacagctgtgtagcactg

SEQ ID NO: 1841037 - DNA, 25 bp, Homo sapien
gggtcactcagacggagatcagaaa

SEQ ID NO: 1841038 - DNA, 25 bp, Homo sapien
gcctattgggattgacaccaccggg

SEQ ID NO: 1841039 - DNA, 25 bp, Homo sapien
tggagttctgggactccggtgccta

SEQ ID NO: 1841040 - DNA, 25 bp, Homo sapien
tgtgacgcgggattcagcgccacgt

SEQ ID NO: 1841041 - DNA, 25 bp, Homo sapien
agtacagaagttgagggttcacgtg

SEQ ID NO: 1841042 - DNA, 25 bp, Homo sapien
tgacggaaggagtacagaagttgag

SEQ ID NO: 1841043 - DNA, 25 bp, Homo sapien
aaggagtacagaagttgagggttca

SEQ ID NO: 1841044 - DNA, 25 bp, Homo sapien
ctgggtgacggaaggagtacagaag

SEQ ID NO: 1841045 - DNA, 25 bp, Homo sapien
acctttcgcgtgttaggcgaacgtg

SEQ ID NO: 1841046 - DNA, 25 bp, Homo sapien
ctttcgcgtgttaggcgaacgtgat

SEQ ID NO: 1841047 - DNA, 25 bp, Homo sapien
cgtgttaggcgaacgtgataaccac

SEQ ID NO: 1841048 - DNA, 25 bp, Homo sapien
cgcgtgttaggcgaacgtgataacc

SEQ ID NO: 1841049 - DNA, 25 bp, Homo sapien
tactttgattgctataaagagtaga

SEQ ID NO: 1841050 - DNA, 25 bp, Homo sapien
tttgcaaagaaattgggcgcatggg

SEQ ID NO: 1841051 - DNA, 25 bp, Homo sapien
gggcgcatgggtgaatactttgatt

SEQ ID NO: 1841052 - DNA, 25 bp, Homo sapien
gagtttggccgttgattttagtaca

SEQ ID NO: 1841053 - DNA, 25 bp, Homo sapien
ttctggacccaatctgcgtggcgca

SEQ ID NO: 1841054 - DNA, 25 bp, Homo sapien
ccttctggacccaatctgcgtggcg

SEQ ID NO: 1841055 - DNA, 25 bp, Homo sapien
tggacccaatctgcgtggcgcagtg

SEQ ID NO: 1841056 - DNA, 25 bp, Homo sapien
gacccaatctgcgtggcgcagtggc

SEQ ID NO: 1841057 - DNA, 25 bp, Homo sapien
gcattgcaatatcctattatcctac

SEQ ID NO: 1841058 - DNA, 25 bp, Homo sapien
tagtaaatacaaggttaggcattgc

SEQ ID NO: 1841059 - DNA, 25 bp, Homo sapien
caaaattctcctggcccgaggaagg

SEQ ID NO: 1841060 - DNA, 25 bp, Homo sapien
gagagggcttgacgctccaaaattc

SEQ ID NO: 1841061 - DNA, 25 bp, Homo sapien
tgtgaacatgtttggtgacagagtc

SEQ ID NO: 1841062 - DNA, 25 bp, Homo sapien
cagtgggaggcgtgcatatctttca

SEQ ID NO: 1841063 - DNA, 25 bp, Homo sapien
ggtcattagagtaggctccttcctc

SEQ ID NO: 1841064 - DNA, 25 bp, Homo sapien
gctgcactggtgtttattatggtca

SEQ ID NO: 1841065 - DNA, 25 bp, Homo sapien
ttcttctaaagtgtcggatccttta

SEQ ID NO: 1841066 - DNA, 25 bp, Homo sapien
ctttcttctaaagtgtcggatcctt

SEQ ID NO: 1841067 - DNA, 25 bp, Homo sapien
tcttctaaagtgtcggatcctttac

SEQ ID NO: 1841068 - DNA, 25 bp, Homo sapien
tctcatccccaatatccacaactac

SEQ ID NO: 1841069 - DNA, 25 bp, Homo sapien
tcagttctcatccccaatatccaca

SEQ ID NO: 1841070 - DNA, 25 bp, Homo sapien
agttctcatccccaatatccacaac

SEQ ID NO: 1841071 - DNA, 25 bp, Homo sapien
ttctcatccccaatatccacaacta

SEQ ID NO: 1841072 - DNA, 25 bp, Homo sapien
atccacctagctttgcgaggactgc

SEQ ID NO: 1841073 - DNA, 25 bp, Homo sapien
gatccacctagctttgcgaggactg

SEQ ID NO: 1841074 - DNA, 25 bp, Homo sapien
tgatccacctagctttgcgaggact

SEQ ID NO: 1841075 - DNA, 25 bp, Homo sapien
ttgatccacctagctttgcgaggac

SEQ ID NO: 1841076 - DNA, 25 bp, Homo sapien
caacttgcaattgttgtggacgaac

SEQ ID NO: 1841077 - DNA, 25 bp, Homo sapien
atcatgccgtgaccagggtagatgg

SEQ ID NO: 1841078 - DNA, 25 bp, Homo sapien
catgccgtgaccagggtagatgggc

SEQ ID NO: 1841079 - DNA, 25 bp, Homo sapien
tagatgggccctgaacagaaataac

SEQ ID NO: 1841080 - DNA, 25 bp, Homo sapien
cagaaataacacttctcaatacaca

SEQ ID NO: 1841081 - DNA, 25 bp, Homo sapien
tgggtcccaccgagatttgaactcg

SEQ ID NO: 1841082 - DNA, 25 bp, Homo sapien
gagtgctgaccattacaccatgggg

SEQ ID NO: 1841083 - DNA, 25 bp, Homo sapien
tttgaactcggatcgctggattcag

SEQ ID NO: 1841084 - DNA, 25 bp, Homo sapien
tgaactcggatcgctggattcagag

SEQ ID NO: 1841085 - DNA, 25 bp, Homo sapien
tcagaaacttggtgccccctcgggc

SEQ ID NO: 1841086 - DNA, 25 bp, Homo sapien
aacttggtgccccctcgggcttctg

SEQ ID NO: 1841087 - DNA, 25 bp, Homo sapien
tccagggggttcagaaacttggtgc

SEQ ID NO: 1841088 - DNA, 25 bp, Homo sapien
cttggtgccccctcgggcttctgtt

SEQ ID NO: 1841089 - DNA, 25 bp, Homo sapien
ggaaatatgcgcaggggagactccc

SEQ ID NO: 1841090 - DNA, 25 bp, Homo sapien
caacgggaaatatgcgcaggggaga

SEQ ID NO: 1841091 - DNA, 25 bp, Homo sapien
gcaggggagactcccaaacggacac

SEQ ID NO: 1841092 - DNA, 25 bp, Homo sapien
tatgcgcaggggagactcccaaacg

SEQ ID NO: 1841093 - DNA, 25 bp, Homo sapien
ctggaagtggtcttcgaggaccgca

SEQ ID NO: 1841094 - DNA, 25 bp, Homo sapien
tggaagtggtcttcgaggaccgcat

SEQ ID NO: 1841095 - DNA, 25 bp, Homo sapien
cactctggaagtggtcttcgaggac

SEQ ID NO: 1841096 - DNA, 25 bp, Homo sapien
cgacactctggaagtggtcttcgag

SEQ ID NO: 1841097 - DNA, 25 bp, Homo sapien
ctggatttctttgcaacggaatttt

SEQ ID NO: 1841098 - DNA, 25 bp, Homo sapien
tgcaacggaatttttgcaactggct

SEQ ID NO: 1841099 - DNA, 25 bp, Homo sapien
gtaactctccctgcaaatacaggct

SEQ ID NO: 1841100 - DNA, 25 bp, Homo sapien
cagttcccaacgccaaacaaacaag

SEQ ID NO: 1841101 - DNA, 25 bp, Homo sapien
aaggtcccaccgagatttgaactcg

SEQ ID NO: 1841102 - DNA, 25 bp, Homo sapien
aactcggatcgctggattcaaagtc

SEQ ID NO: 1841103 - DNA, 25 bp, Homo sapien
gagtgctaaccattacaccatgggg

SEQ ID NO: 1841104 - DNA, 25 bp, Homo sapien
tcccaccgagatttgaactcggatc

SEQ ID NO: 1841105 - DNA, 25 bp, Homo sapien
cagtctgtagtcttcttgtccatac

SEQ ID NO: 1841106 - DNA, 25 bp, Homo sapien
gatagtctggactgtgctaactgct

SEQ ID NO: 1841107 - DNA, 25 bp, Homo sapien
caggtcaacacatttgatagtctgg

SEQ ID NO: 1841108 - DNA, 25 bp, Homo sapien
ggaatttagtgttgtaggcctcaag

SEQ ID NO: 1841109 - DNA, 25 bp, Homo sapien
cctttgggttggacaagagcttgag

SEQ ID NO: 1841110 - DNA, 25 bp, Homo sapien
taggaagagcgaaccagctcttctt

SEQ ID NO: 1841111 - DNA, 25 bp, Homo sapien
ttgggttggacaagagcttgagaat

SEQ ID NO: 1841112 - DNA, 25 bp, Homo sapien
ttagataatagtgagtggctctgaa

SEQ ID NO: 1841113 - DNA, 25 bp, Homo sapien
gtgcttggccagctcccccggaagc

SEQ ID NO: 1841114 - DNA, 25 bp, Homo sapien
tgcttggccagctcccccggaagca

SEQ ID NO: 1841115 - DNA, 25 bp, Homo sapien
ctcccccggaagcagcaggcgcacg

SEQ ID NO: 1841116 - DNA, 25 bp, Homo sapien
cagctcccccggaagcagcaggcgc

SEQ ID NO: 1841117 - DNA, 25 bp, Homo sapien
ttcggggcgggagcagacttggcca

SEQ ID NO: 1841118 - DNA, 25 bp, Homo sapien
gagcagacttggccagctcgggcat

SEQ ID NO: 1841119 - DNA, 25 bp, Homo sapien
gttcatgattcccatggccttagaa

SEQ ID NO: 1841120 - DNA, 25 bp, Homo sapien
gcgggagcagacttggccagctcgg

SEQ ID NO: 1841121 - DNA, 25 bp, Homo sapien
acaatagtggcaaaaccaaaacaag

SEQ ID NO: 1841122 - DNA, 25 bp, Homo sapien
aatgaaacaatagtggcaaaaccaa

SEQ ID NO: 1841123 - DNA, 25 bp, Homo sapien
tgaaacaatagtggcaaaaccaaaa

SEQ ID NO: 1841124 - DNA, 25 bp, Homo sapien
atgaaacaatagtggcaaaaccaaa

SEQ ID NO: 1841125 - DNA, 25 bp, Homo sapien
cgtatagataataggccttttgcca

SEQ ID NO: 1841126 - DNA, 25 bp, Homo sapien
tatagataataggccttttgccatg

SEQ ID NO: 1841127 - DNA, 25 bp, Homo sapien
gtatagataataggccttttgccat

SEQ ID NO: 1841128 - DNA, 25 bp, Homo sapien
gagcctttgtttttatgcgcttttc

SEQ ID NO: 1841129 - DNA, 25 bp, Homo sapien
aagagcctttgtttttatgcgcttt

SEQ ID NO: 1841130 - DNA, 25 bp, Homo sapien
agagcctttgtttttatgcgctttt

SEQ ID NO: 1841131 - DNA, 25 bp, Homo sapien
agttttctttggcagcagcacggcc

SEQ ID NO: 1841132 - DNA, 25 bp, Homo sapien
ggacgccaccctgtgcgatggtgac

SEQ ID NO: 1841133 - DNA, 25 bp, Homo sapien
ttacttagtcttgtggtggctctca

SEQ ID NO: 1841134 - DNA, 25 bp, Homo sapien
gatgttgggcaggacgccaccctgt

SEQ ID NO: 1841135 - DNA, 25 bp, Homo sapien
atggccagctggaggtgacgcggga

SEQ ID NO: 1841136 - DNA, 25 bp, Homo sapien
gaggtgacgcgggatgatgcgagtc

SEQ ID NO: 1841137 - DNA, 25 bp, Homo sapien
tttgcccagaagcttgttgagctcc

SEQ ID NO: 1841138 - DNA, 25 bp, Homo sapien
ctggaggtgacgcgggatgatgcga

SEQ ID NO: 1841139 - DNA, 25 bp, Homo sapien
ccgccaggtacaccggcgctccagc

SEQ ID NO: 1841140 - DNA, 25 bp, Homo sapien
gccaggtacaccggcgctccagcac

SEQ ID NO: 1841141 - DNA, 25 bp, Homo sapien
gccgccaggtacaccggcgctccag

SEQ ID NO: 1841142 - DNA, 25 bp, Homo sapien
ccgccgccaggtacaccggcgctcc

SEQ ID NO: 1841143 - DNA, 25 bp, Homo sapien
caggcgatgcactcggcctacggga

SEQ ID NO: 1841144 - DNA, 25 bp, Homo sapien
aggcgatgcactcggcctacgggaa

SEQ ID NO: 1841145 - DNA, 25 bp, Homo sapien
ggatggaaagaagcgcaaacgcagc

SEQ ID NO: 1841146 - DNA, 25 bp, Homo sapien
catctttgagcgtatcgccggagaa

SEQ ID NO: 1841147 - DNA, 25 bp, Homo sapien
tgctccagtccctaaaaaaggctcc

SEQ ID NO: 1841148 - DNA, 25 bp, Homo sapien
gaaggccattaacaaggctcagaag

SEQ ID NO: 1841149 - DNA, 25 bp, Homo sapien
aagagtgtctcctaaagtgtaagcg

SEQ ID NO: 1841150 - DNA, 25 bp, Homo sapien
gaattggttaacactgtagcaggca

SEQ ID NO: 1841151 - DNA, 25 bp, Homo sapien
gctattttgctcacgcagatctcaa

SEQ ID NO: 1841152 - DNA, 25 bp, Homo sapien
gattccctttggcaaaccaccttga

SEQ ID NO: 1841153 - DNA, 25 bp, Homo sapien
aagtactgcgcgacaatatccaggg

SEQ ID NO: 1841154 - DNA, 25 bp, Homo sapien
caactgtcgtataaaggcgctgcct

SEQ ID NO: 1841155 - DNA, 25 bp, Homo sapien
acaaagcgttgggtgagactcctct

SEQ ID NO: 1841156 - DNA, 25 bp, Homo sapien
gcgctaagcgccaccgtaaagtact

SEQ ID NO: 1841157 - DNA, 25 bp, Homo sapien
gacggacaggagacagttgccttgc

SEQ ID NO: 1841158 - DNA, 25 bp, Homo sapien
ggagtggtgataggcggtgataggt

SEQ ID NO: 1841159 - DNA, 25 bp, Homo sapien
gataggtgagataggcggtttttcc

SEQ ID NO: 1841160 - DNA, 25 bp, Homo sapien
acaggagacagttgccttgctcttg

SEQ ID NO: 1841161 - DNA, 25 bp, Homo sapien
gcctgcaattgcaggcactccgcag

SEQ ID NO: 1841162 - DNA, 25 bp, Homo sapien
tgggcagccaggcagaggggctcct

SEQ ID NO: 1841163 - DNA, 25 bp, Homo sapien
actgggcagccaggcagaggggctc

SEQ ID NO: 1841164 - DNA, 25 bp, Homo sapien
gactgggcagccaggcagaggggct

SEQ ID NO: 1841165 - DNA, 25 bp, Homo sapien
gccttttgttgatagaaagggacgc

SEQ ID NO: 1841166 - DNA, 25 bp, Homo sapien
cctggatattgtcgcgcagtacttt

SEQ ID NO: 1841167 - DNA, 25 bp, Homo sapien
gatgccctggatattgtcgcgcagt

SEQ ID NO: 1841168 - DNA, 25 bp, Homo sapien
gatattgtcgcgcagtactttacgg

SEQ ID NO: 1841169 - DNA, 25 bp, Homo sapien
attgtcgcgcagtactttacggtgg

SEQ ID NO: 1841170 - DNA, 25 bp, Homo sapien
acagttggcggaccgaactgagaac

SEQ ID NO: 1841171 - DNA, 25 bp, Homo sapien
tctggcctgaggcagcgcctttata

SEQ ID NO: 1841172 - DNA, 25 bp, Homo sapien
tgaggcagcgcctttatacgacagt

SEQ ID NO: 1841173 - DNA, 25 bp, Homo sapien
cctttatacgacagttggcggaccg

SEQ ID NO: 1841174 - DNA, 25 bp, Homo sapien
tttgagtttgcataaataacaccca

SEQ ID NO: 1841175 - DNA, 25 bp, Homo sapien
catgattaaatggtggttcttggga

SEQ ID NO: 1841176 - DNA, 25 bp, Homo sapien
tcaacttcaatgatcataacagcat

SEQ ID NO: 1841177 - DNA, 25 bp, Homo sapien
gaattttacttctggaactcacgaa

SEQ ID NO: 1841178 - DNA, 25 bp, Homo sapien
tagaaggccctctctatagctagga

SEQ ID NO: 1841179 - DNA, 25 bp, Homo sapien
gagacgccaggcacggttagttatt

SEQ ID NO: 1841180 - DNA, 25 bp, Homo sapien
aataggtaggccaaacacacacggg

SEQ ID NO: 1841181 - DNA, 25 bp, Homo sapien
taggactacaggctatgagacgcca

SEQ ID NO: 1841182 - DNA, 25 bp, Homo sapien
cattatctcttttgtttcggctgca

SEQ ID NO: 1841183 - DNA, 25 bp, Homo sapien
tatgtagcccatatgcatgaacctt

SEQ ID NO: 1841184 - DNA, 25 bp, Homo sapien
ggtttgttccagatcttgccggcca

SEQ ID NO: 1841185 - DNA, 25 bp, Homo sapien
catacgggcttttgttaaggatact

SEQ ID NO: 1841186 - DNA, 25 bp, Homo sapien
gtatgagtaatgaactgctccagcc

SEQ ID NO: 1841187 - DNA, 25 bp, Homo sapien
aactgaacacagctctacttggtga

SEQ ID NO: 1841188 - DNA, 25 bp, Homo sapien
tttcagctgtattgcaggcgcgagc

SEQ ID NO: 1841189 - DNA, 25 bp, Homo sapien
gctgccgcgcctaaatttcttgatg

SEQ ID NO: 1841190 - DNA, 25 bp, Homo sapien
tgaagaacgggtcttagccttggcg

SEQ ID NO: 1841191 - DNA, 25 bp, Homo sapien
accctgggcgatggtcactttacca

SEQ ID NO: 1841192 - DNA, 25 bp, Homo sapien
gaactgaagacccgcccttgaagaa

SEQ ID NO: 1841193 - DNA, 25 bp, Homo sapien
accaccctgggcgatggtcacttta

SEQ ID NO: 1841194 - DNA, 25 bp, Homo sapien
tggtgttgtactttggcagtggtca

SEQ ID NO: 1841195 - DNA, 25 bp, Homo sapien
tgtcctcgggtaattctgcaatcta

SEQ ID NO: 1841196 - DNA, 25 bp, Homo sapien
gctggatccaatccctgaagaccat

SEQ ID NO: 1841197 - DNA, 25 bp, Homo sapien
tccctttcagctaccttcatgtctt

SEQ ID NO: 1841198 - DNA, 25 bp, Homo sapien
ctttctgagaagttgaacaaagaag

SEQ ID NO: 1841199 - DNA, 25 bp, Homo sapien
agaagtaatgacacatgtggagtgc

SEQ ID NO: 1841200 - DNA, 25 bp, Homo sapien
agtaatgacacatgtggagtgcctt

SEQ ID NO: 1841201 - DNA, 25 bp, Homo sapien
ttctgagaagttgaacaaagaagta

SEQ ID NO: 1841202 - DNA, 25 bp, Homo sapien
tggttacggctttggtgctctcgga

SEQ ID NO: 1841203 - DNA, 25 bp, Homo sapien
gaaggtgttcaagatccccattgct

SEQ ID NO: 1841204 - DNA, 25 bp, Homo sapien
tcggacacagcatgcgtgacaggcg

SEQ ID NO: 1841205 - DNA, 25 bp, Homo sapien
cccgcaatacgctcgaagatggcat

SEQ ID NO: 1841206 - DNA, 25 bp, Homo sapien
gttgcggttttcacacgccagcttc

SEQ ID NO: 1841207 - DNA, 25 bp, Homo sapien
ttgttgcggttttcacacgccagct

SEQ ID NO: 1841208 - DNA, 25 bp, Homo sapien
tgttgcggttttcacacgccagctt

SEQ ID NO: 1841209 - DNA, 25 bp, Homo sapien
tttgttgcggttttcacacgccagc

SEQ ID NO: 1841210 - DNA, 25 bp, Homo sapien
taaggccttcttaagggctgccaaa

SEQ ID NO: 1841211 - DNA, 25 bp, Homo sapien
ctgtctcggcaggagcggtttccga

SEQ ID NO: 1841212 - DNA, 25 bp, Homo sapien
cttcttagctttagcggcgcctgcc

SEQ ID NO: 1841213 - DNA, 25 bp, Homo sapien
ttttcggtttggcagcggccttggc

SEQ ID NO: 1841214 - DNA, 25 bp, Homo sapien
aagagaataagctcgaaatctaaag

SEQ ID NO: 1841215 - DNA, 25 bp, Homo sapien
gaataagctcgaaatctaaagagca

SEQ ID NO: 1841216 - DNA, 25 bp, Homo sapien
aataagctcgaaatctaaagagcag

SEQ ID NO: 1841217 - DNA, 25 bp, Homo sapien
gagaataagctcgaaatctaaagag

SEQ ID NO: 1841218 - DNA, 25 bp, Homo sapien
cagacttcttgggctgataggaata

SEQ ID NO: 1841219 - DNA, 25 bp, Homo sapien
ggacagacttcttgggctgatagga

SEQ ID NO: 1841220 - DNA, 25 bp, Homo sapien
agacttcttgggctgataggaatat

SEQ ID NO: 1841221 - DNA, 25 bp, Homo sapien
gacagacttcttgggctgataggaa

SEQ ID NO: 1841222 - DNA, 25 bp, Homo sapien
caagcgctgaaaaggtagcttccgg

SEQ ID NO: 1841223 - DNA, 25 bp, Homo sapien
tctttaggcataatagtgacgcgtt

SEQ ID NO: 1841224 - DNA, 25 bp, Homo sapien
gcgagctgtttgctttgttcgtgcc

SEQ ID NO: 1841225 - DNA, 25 bp, Homo sapien
agtcctgtgcgatctcccgtaccaa

SEQ ID NO: 1841226 - DNA, 25 bp, Homo sapien
tactcaacacaaatgagagaaaaaa

SEQ ID NO: 1841227 - DNA, 25 bp, Homo sapien
acacaaatgagagaaaaaaactgat

SEQ ID NO: 1841228 - DNA, 25 bp, Homo sapien
caaatgagagaaaaaaactgatcat

SEQ ID NO: 1841229 - DNA, 25 bp, Homo sapien
ctactcaacacaaatgagagaaaaa

SEQ ID NO: 1841230 - DNA, 25 bp, Homo sapien
tgagaagggcctttgaggaaccgtg

SEQ ID NO: 1841231 - DNA, 25 bp, Homo sapien
gccctgaatgttgtcgcgcagaact

SEQ ID NO: 1841232 - DNA, 25 bp, Homo sapien
cactttaagaactccgcgtgtctcc

SEQ ID NO: 1841233 - DNA, 25 bp, Homo sapien
taaggcctgagatgcgcttaacgcc

SEQ ID NO: 1841234 - DNA, 25 bp, Homo sapien
gctccgtgtaggtaactgcatcgcg

SEQ ID NO: 1841235 - DNA, 25 bp, Homo sapien
ttgcccagacccttcccgcctttgc

SEQ ID NO: 1841236 - DNA, 25 bp, Homo sapien
cccttcccgcctttgccgcgcccag

SEQ ID NO: 1841237 - DNA, 25 bp, Homo sapien
cttcccgcctttgccgcgcccagac

SEQ ID NO: 1841238 - DNA, 25 bp, Homo sapien
tcccgcctttgccgcgcccagacat

SEQ ID NO: 1841239 - DNA, 25 bp, Homo sapien
aatggcgccatctctagaggggtaa

SEQ ID NO: 1841240 - DNA, 25 bp, Homo sapien
ctcttagcatcgattgttctagtgc

SEQ ID NO: 1841241 - DNA, 25 bp, Homo sapien
gggtaatcacagtcgtttcgggcat

SEQ ID NO: 1841242 - DNA, 25 bp, Homo sapien
tagcatcgattgttctagtgctttg

SEQ ID NO: 1841243 - DNA, 25 bp, Homo sapien
ttgtgaaggtgccgcttgagctccc

SEQ ID NO: 1841244 - DNA, 25 bp, Homo sapien
gaaggtgccgcttgagctccctcat

SEQ ID NO: 1841245 - DNA, 25 bp, Homo sapien
cctgtatttccttagaattgtgaag

SEQ ID NO: 1841246 - DNA, 25 bp, Homo sapien
ttagaattgtgaaggtgccgcttga

SEQ ID NO: 1841247 - DNA, 25 bp, Homo sapien
atctgtaagcaaggtagtcagaatc

SEQ ID NO: 1841248 - DNA, 25 bp, Homo sapien
aaacagacacttaatggcgtcctgc

SEQ ID NO: 1841249 - DNA, 25 bp, Homo sapien
cagacacttaatggcgtcctgcatt

SEQ ID NO: 1841250 - DNA, 25 bp, Homo sapien
tcaaaccatgaatctgtaagcaagg

SEQ ID NO: 1841251 - DNA, 25 bp, Homo sapien
ttccaaactggtcctgtatccaaag

SEQ ID NO: 1841252 - DNA, 25 bp, Homo sapien
ctgacccttttccaaactggtcctg

SEQ ID NO: 1841253 - DNA, 25 bp, Homo sapien
tccaaactggtcctgtatccaaagc

SEQ ID NO: 1841254 - DNA, 25 bp, Homo sapien
cttttccaaactggtcctgtatcca

SEQ ID NO: 1841255 - DNA, 25 bp, Homo sapien
atgcagatgcagcagggacactccc

SEQ ID NO: 1841256 - DNA, 25 bp, Homo sapien
cttctctggggcaagtgggaatggc

SEQ ID NO: 1841257 - DNA, 25 bp, Homo sapien
caagaaatgataccggtgggctagg

SEQ ID NO: 1841258 - DNA, 25 bp, Homo sapien
catgctcaaggaagggaagtgcagg

SEQ ID NO: 1841259 - DNA, 25 bp, Homo sapien
tcaaggaagggaagtgcaggcttac

SEQ ID NO: 1841260 - DNA, 25 bp, Homo sapien
cagtactccaagaaatgataccggt

SEQ ID NO: 1841261 - DNA, 25 bp, Homo sapien
gcaattaagaaacccaagatagagc

SEQ ID NO: 1841262 - DNA, 25 bp, Homo sapien
ttaagaaacccaagatagagcaggg

SEQ ID NO: 1841263 - DNA, 25 bp, Homo sapien
ttggaagcaattaagaaacccaaga

SEQ ID NO: 1841264 - DNA, 25 bp, Homo sapien
gaagcaattaagaaacccaagatag

SEQ ID NO: 1841265 - DNA, 25 bp, Homo sapien
atgctcgctcgccacggatacgacg

SEQ ID NO: 1841266 - DNA, 25 bp, Homo sapien
cacgcttggcgtgaatagcacagag

SEQ ID NO: 1841267 - DNA, 25 bp, Homo sapien
aatagtgacacgcttggcgtgaata

SEQ ID NO: 1841268 - DNA, 25 bp, Homo sapien
ccacggatacgacgcgcaagctgga

SEQ ID NO: 1841269 - DNA, 25 bp, Homo sapien
ttccgcggtgccttgccgccggtag

SEQ ID NO: 1841270 - DNA, 25 bp, Homo sapien
caccgccagtcgctggagcgctttt

SEQ ID NO: 1841271 - DNA, 25 bp, Homo sapien
ttgcgagctgtctgcttcgtccggg

SEQ ID NO: 1841272 - DNA, 25 bp, Homo sapien
ataacggcggatctcacgcaaggcc

SEQ ID NO: 1841273 - DNA, 25 bp, Homo sapien
aagcaagcagctgaatgagcagtgg

SEQ ID NO: 1841274 - DNA, 25 bp, Homo sapien
ctctgaaagcaagcagctgaatgag

SEQ ID NO: 1841275 - DNA, 25 bp, Homo sapien
tctgaaagcaagcagctgaatgagc

SEQ ID NO: 1841276 - DNA, 25 bp, Homo sapien
tgaaagcaagcagctgaatgagcag

SEQ ID NO: 1841277 - DNA, 25 bp, Homo sapien
ccttcatgttataaggtagcagttg

SEQ ID NO: 1841278 - DNA, 25 bp, Homo sapien
tgctaaggacgcataaaccaccgcg

SEQ ID NO: 1841279 - DNA, 25 bp, Homo sapien
tagcagttggatagtatttactagg

SEQ ID NO: 1841280 - DNA, 25 bp, Homo sapien
tcgaactccaggtccctagagattt

SEQ ID NO: 1841281 - DNA, 25 bp, Homo sapien
aataggaaagtaatggcctcagtgc

SEQ ID NO: 1841282 - DNA, 25 bp, Homo sapien
ataggaaagtaatggcctcagtgct

SEQ ID NO: 1841283 - DNA, 25 bp, Homo sapien
caataggaaagtaatggcctcagtg

SEQ ID NO: 1841284 - DNA, 25 bp, Homo sapien
ccaataggaaagtaatggcctcagt

SEQ ID NO: 1841285 - DNA, 25 bp, Homo sapien
ttccgtagaaatggtgggtggctct

SEQ ID NO: 1841286 - DNA, 25 bp, Homo sapien
gtgctcagttcttccgtagaaatgg

SEQ ID NO: 1841287 - DNA, 25 bp, Homo sapien
gagccttttgtcttgtaagtttaca

SEQ ID NO: 1841288 - DNA, 25 bp, Homo sapien
ataggtttggagaacagagtgctca

SEQ ID NO: 1841289 - DNA, 25 bp, Homo sapien
cagctctagaggagcgggttttggc

SEQ ID NO: 1841290 - DNA, 25 bp, Homo sapien
ggtgcactcgtcctacaggaaattg

SEQ ID NO: 1841291 - DNA, 25 bp, Homo sapien
ctagaggagcgggttttggccttgg

SEQ ID NO: 1841292 - DNA, 25 bp, Homo sapien
cggtgcactcgtcctacaggaaatt

SEQ ID NO: 1841293 - DNA, 25 bp, Homo sapien
aaaacgacctgtggcctaagtcaga

SEQ ID NO: 1841294 - DNA, 25 bp, Homo sapien
gtaaaacgacctgtggcctaagtca

SEQ ID NO: 1841295 - DNA, 25 bp, Homo sapien
cctgtggcctaagtcagaaagtgag

SEQ ID NO: 1841296 - DNA, 25 bp, Homo sapien
acgacctgtggcctaagtcagaaag

SEQ ID NO: 1841297 - DNA, 25 bp, Homo sapien
gcgcggccgggttattctttcagtg

SEQ ID NO: 1841298 - DNA, 25 bp, Homo sapien
cttactgcagttgtacggatcctgg

SEQ ID NO: 1841299 - DNA, 25 bp, Homo sapien
tatctgcaggagtgcatcggactct

SEQ ID NO: 1841300 - DNA, 25 bp, Homo sapien
gaataggcatctcgtctggcatcgc

SEQ ID NO: 1841301 - DNA, 25 bp, Homo sapien
tgagagagtacgtgtggccttctcc

SEQ ID NO: 1841302 - DNA, 25 bp, Homo sapien
tgattatcctccgagtgggtgagag

SEQ ID NO: 1841303 - DNA, 25 bp, Homo sapien
ttttcgagattcgtttctccctgcc

SEQ ID NO: 1841304 - DNA, 25 bp, Homo sapien
ccatcccgcgtccttgagagaacat

SEQ ID NO: 1841305 - DNA, 25 bp, Homo sapien
tgaatacttccatttgctgtcactt

SEQ ID NO: 1841306 - DNA, 25 bp, Homo sapien
gtgaatacttccatttgctgtcact

SEQ ID NO: 1841307 - DNA, 25 bp, Homo sapien
tgggcccagcacgcttccgctgcgc

SEQ ID NO: 1841308 - DNA, 25 bp, Homo sapien
ggcccagcacgcttccgctgcgcca

SEQ ID NO: 1841309 - DNA, 25 bp, Homo sapien
gggcccagcacgcttccgctgcgcc

SEQ ID NO: 1841310 - DNA, 25 bp, Homo sapien
cccagcacgcttccgctgcgccact

SEQ ID NO: 1841311 - DNA, 25 bp, Homo sapien
cgaacccgggcctcccgcgtggcag

SEQ ID NO: 1841312 - DNA, 25 bp, Homo sapien
gaattctaccactgaaccaccaatg

SEQ ID NO: 1841313 - DNA, 25 bp, Homo sapien
cgcgtggcaggcgagaattctacca

SEQ ID NO: 1841314 - DNA, 25 bp, Homo sapien
tcgaacccgggcctcccgcgtggca

SEQ ID NO: 1841315 - DNA, 25 bp, Homo sapien
gtaaggtaagtaagcactgtgtctt

SEQ ID NO: 1841316 - DNA, 25 bp, Homo sapien
caaaaataggacaacttgcggagaa

SEQ ID NO: 1841317 - DNA, 25 bp, Homo sapien
ttttctttgagggagattacaatag

SEQ ID NO: 1841318 - DNA, 25 bp, Homo sapien
tttgagggagattacaatagttttc

SEQ ID NO: 1841319 - DNA, 25 bp, Homo sapien
cactgatgaagaatagttcagcctc

SEQ ID NO: 1841320 - DNA, 25 bp, Homo sapien
tgtccaggtggactgtaatactgaa

SEQ ID NO: 1841321 - DNA, 25 bp, Homo sapien
catctttccccggtctttggagctg

SEQ ID NO: 1841322 - DNA, 25 bp, Homo sapien
tattagaaggaatagcacactgatg

SEQ ID NO: 1841323 - DNA, 25 bp, Homo sapien
cctggtgttgcatatgtttaccagc

SEQ ID NO: 1841324 - DNA, 25 bp, Homo sapien
caggaaaatgaaaagctgggccaca

SEQ ID NO: 1841325 - DNA, 25 bp, Homo sapien
cataactgattactttcctggtgtt

SEQ ID NO: 1841326 - DNA, 25 bp, Homo sapien
ttctgtggaacccaaggccaggaaa

SEQ ID NO: 1841327 - DNA, 25 bp, Homo sapien
aaactaacagaatgaactcctgtgg

SEQ ID NO: 1841328 - DNA, 25 bp, Homo sapien
catcacaaagggtggaatctctagc

SEQ ID NO: 1841329 - DNA, 25 bp, Homo sapien
tggtatagcaaaggtccaggagtga

SEQ ID NO: 1841330 - DNA, 25 bp, Homo sapien
caagaattattgtcagattgccaaa

SEQ ID NO: 1841331 - DNA, 25 bp, Homo sapien
gattcatatccctaattttaggatt

SEQ ID NO: 1841332 - DNA, 25 bp, Homo sapien
tctgattcatatccctaattttagg

SEQ ID NO: 1841333 - DNA, 25 bp, Homo sapien
ttcatatccctaattttaggattaa

SEQ ID NO: 1841334 - DNA, 25 bp, Homo sapien
tgattcatatccctaattttaggat

SEQ ID NO: 1841335 - DNA, 25 bp, Homo sapien
tcttacctgtgtattggttgacctt

SEQ ID NO: 1841336 - DNA, 25 bp, Homo sapien
ttcttacctgtgtattggttgacct

SEQ ID NO: 1841337 - DNA, 25 bp, Homo sapien
cctgtgtattggttgaccttatgtt

SEQ ID NO: 1841338 - DNA, 25 bp, Homo sapien
tgtattggttgaccttatgtttgtc

SEQ ID NO: 1841339 - DNA, 25 bp, Homo sapien
ggcagtgaacagatggcttaaccac

SEQ ID NO: 1841340 - DNA, 25 bp, Homo sapien
tgagaaaactgtcatgtcactgtgt

SEQ ID NO: 1841341 - DNA, 25 bp, Homo sapien
gatcagctgcttcactataattaaa

SEQ ID NO: 1841342 - DNA, 25 bp, Homo sapien
taaccactttgaatcggaatgaaaa

SEQ ID NO: 1841343 - DNA, 25 bp, Homo sapien
gactatgaagctgccacgatgtgga

SEQ ID NO: 1841344 - DNA, 25 bp, Homo sapien
taccttgtgaccttagtgggcaaca

SEQ ID NO: 1841345 - DNA, 25 bp, Homo sapien
gagagcactgttttcaccttatcgg

SEQ ID NO: 1841346 - DNA, 25 bp, Homo sapien
ggcaagactatcagccacacgggct

SEQ ID NO: 1841347 - DNA, 25 bp, Homo sapien
tggagtcgtagttcttccagagcac

SEQ ID NO: 1841348 - DNA, 25 bp, Homo sapien
tcatctggagtcgtagttcttccag

SEQ ID NO: 1841349 - DNA, 25 bp, Homo sapien
tctggagtcgtagttcttccagagc

SEQ ID NO: 1841350 - DNA, 25 bp, Homo sapien
catctggagtcgtagttcttccaga

SEQ ID NO: 1841351 - DNA, 25 bp, Homo sapien
gctggaggtaagcatagatagctgt

SEQ ID NO: 1841352 - DNA, 25 bp, Homo sapien
tcatgggtgtaatgatggtgtagaa

SEQ ID NO: 1841353 - DNA, 25 bp, Homo sapien
gaacttgccctgatcctgagagtag

SEQ ID NO: 1841354 - DNA, 25 bp, Homo sapien
tagctgtgccgtagaacagggaaac

SEQ ID NO: 1841355 - DNA, 25 bp, Homo sapien
gactgccctgacaatctgactatag

SEQ ID NO: 1841356 - DNA, 25 bp, Homo sapien
tctgcaatagggagttggcaaaacc

SEQ ID NO: 1841357 - DNA, 25 bp, Homo sapien
tggaggaacctcacaaagaaagtgt

SEQ ID NO: 1841358 - DNA, 25 bp, Homo sapien
taaaagcaagatgagcaccgtctgc

SEQ ID NO: 1841359 - DNA, 25 bp, Homo sapien
tacagacaagggtgcatgactactg

SEQ ID NO: 1841360 - DNA, 25 bp, Homo sapien
cagcacatacagacaagggtgcatg

SEQ ID NO: 1841361 - DNA, 25 bp, Homo sapien
gcaaacagctgcatagcggtcaaat

SEQ ID NO: 1841362 - DNA, 25 bp, Homo sapien
caaacagctgcatagcggtcaaatg

SEQ ID NO: 1841363 - DNA, 25 bp, Homo sapien
gaacaatgccggttgtgtaacacag

SEQ ID NO: 1841364 - DNA, 25 bp, Homo sapien
gatcccaagcctagagagatgtaca

SEQ ID NO: 1841365 - DNA, 25 bp, Homo sapien
taagagaacgcattctgtagatccc

SEQ ID NO: 1841366 - DNA, 25 bp, Homo sapien
taaccaggagctgtggaacaatgcc

SEQ ID NO: 1841367 - DNA, 25 bp, Homo sapien
gaagatatagaagatcaaaaaacca

SEQ ID NO: 1841368 - DNA, 25 bp, Homo sapien
tcaaaaaaccacaaagaggactagc

SEQ ID NO: 1841369 - DNA, 25 bp, Homo sapien
agatatagaagatcaaaaaaccaca

SEQ ID NO: 1841370 - DNA, 25 bp, Homo sapien
caaagaggactagctccagctgagg

SEQ ID NO: 1841371 - DNA, 25 bp, Homo sapien
agaaacccagtaggataaatccagt

SEQ ID NO: 1841372 - DNA, 25 bp, Homo sapien
atccagtgaaagaacttccattttt

SEQ ID NO: 1841373 - DNA, 25 bp, Homo sapien
gagaaacccagtaggataaatccag

SEQ ID NO: 1841374 - DNA, 25 bp, Homo sapien
aggataaatccagtgaaagaacttc

SEQ ID NO: 1841375 - DNA, 25 bp, Homo sapien
tagacattatttagggccaaataca

SEQ ID NO: 1841376 - DNA, 25 bp, Homo sapien
ttatagacattatttagggccaaat

SEQ ID NO: 1841377 - DNA, 25 bp, Homo sapien
agacattatttagggccaaatacaa

SEQ ID NO: 1841378 - DNA, 25 bp, Homo sapien
ccaaatacaaaccaaaatgtaacat

SEQ ID NO: 1841379 - DNA, 25 bp, Homo sapien
ctgctttaattatttctgggagttc

SEQ ID NO: 1841380 - DNA, 25 bp, Homo sapien
tgcagcctatgaaaaactgctttaa

SEQ ID NO: 1841381 - DNA, 25 bp, Homo sapien
cagcctatgaaaaactgctttaatt

SEQ ID NO: 1841382 - DNA, 25 bp, Homo sapien
tctgggagttcccaggaaattccca

SEQ ID NO: 1841383 - DNA, 25 bp, Homo sapien
atgagctccacattcaccagagtct

SEQ ID NO: 1841384 - DNA, 25 bp, Homo sapien
caccagagtctaaaatgccaaagcc

SEQ ID NO: 1841385 - DNA, 25 bp, Homo sapien
cacattcaccagagtctaaaatgcc

SEQ ID NO: 1841386 - DNA, 25 bp, Homo sapien
cagagtctaaaatgccaaagccttc

SEQ ID NO: 1841387 - DNA, 25 bp, Homo sapien
aaagtcatccaacggagtccttcag

SEQ ID NO: 1841388 - DNA, 25 bp, Homo sapien
ggtgtctcacatcccttggcatgca

SEQ ID NO: 1841389 - DNA, 25 bp, Homo sapien
gatagagaaccagtcatagagttgc

SEQ ID NO: 1841390 - DNA, 25 bp, Homo sapien
catgcagctcattccatccaaaaaa

SEQ ID NO: 1841391 - DNA, 25 bp, Homo sapien
tgacagttaatctgggtcctgaaca

SEQ ID NO: 1841392 - DNA, 25 bp, Homo sapien
ttacaaggtcaaatacagcttcagg

SEQ ID NO: 1841393 - DNA, 25 bp, Homo sapien
tagtcttccaagaattgtctggcgt

SEQ ID NO: 1841394 - DNA, 25 bp, Homo sapien
caatttgtctgtattcccacgtgta

SEQ ID NO: 1841395 - DNA, 25 bp, Homo sapien
caaggatgctctcgagttgcataga

SEQ ID NO: 1841396 - DNA, 25 bp, Homo sapien
tacagcaaggatgctctcgagttgc

SEQ ID NO: 1841397 - DNA, 25 bp, Homo sapien
cagcaaggatgctctcgagttgcat

SEQ ID NO: 1841398 - DNA, 25 bp, Homo sapien
ttacagcaaggatgctctcgagttg

SEQ ID NO: 1841399 - DNA, 25 bp, Homo sapien
tcagttgcaaccctgctgcgtgggc

SEQ ID NO: 1841400 - DNA, 25 bp, Homo sapien
taaggggatgaatcaaacaaggcct

SEQ ID NO: 1841401 - DNA, 25 bp, Homo sapien
gaagtttcagttgcaaccctgctgc

SEQ ID NO: 1841402 - DNA, 25 bp, Homo sapien
ttgcaaccctgctgcgtgggcttca

SEQ ID NO: 1841403 - DNA, 25 bp, Homo sapien
acacagggtgtcaccgcgtaaacca

SEQ ID NO: 1841404 - DNA, 25 bp, Homo sapien
cacagggtgtcaccgcgtaaaccag

SEQ ID NO: 1841405 - DNA, 25 bp, Homo sapien
gtcaccgcgtaaaccaggatagtct

SEQ ID NO: 1841406 - DNA, 25 bp, Homo sapien
gggtgtcaccgcgtaaaccaggata

SEQ ID NO: 1841407 - DNA, 25 bp, Homo sapien
gatcttcaggactttggcgaaaagt

SEQ ID NO: 1841408 - DNA, 25 bp, Homo sapien
ttagcaagacacactactacaatgg

SEQ ID NO: 1841409 - DNA, 25 bp, Homo sapien
ctccttcaagccctgagatcttcag

SEQ ID NO: 1841410 - DNA, 25 bp, Homo sapien
tttagcaagacacactactacaatg

SEQ ID NO: 1841411 - DNA, 25 bp, Homo sapien
tgtggacggaattcttgaagtgtag

SEQ ID NO: 1841412 - DNA, 25 bp, Homo sapien
agtgtagcgccgctcagtccttcca

SEQ ID NO: 1841413 - DNA, 25 bp, Homo sapien
cggaagtgtccgatcggaatcagcc

SEQ ID NO: 1841414 - DNA, 25 bp, Homo sapien
tcagtccttccaccggaagtgtccg

SEQ ID NO: 1841415 - DNA, 25 bp, Homo sapien
ccgggtttggggatccagatgtcca

SEQ ID NO: 1841416 - DNA, 25 bp, Homo sapien
tccaaacatccagtccctctcatat

SEQ ID NO: 1841417 - DNA, 25 bp, Homo sapien
tgtccgagaggtgagtccgggtttg

SEQ ID NO: 1841418 - DNA, 25 bp, Homo sapien
aaacatccagtccctctcatattgc

SEQ ID NO: 1841419 - DNA, 25 bp, Homo sapien
tggccctcagaggaatcccggagaa

SEQ ID NO: 1841420 - DNA, 25 bp, Homo sapien
catttagtgagggtttggcggtctc

SEQ ID NO: 1841421 - DNA, 25 bp, Homo sapien
tagaaccagcttcggcgttgggaac

SEQ ID NO: 1841422 - DNA, 25 bp, Homo sapien
ggtcactggtaagaggagttgccca

SEQ ID NO: 1841423 - DNA, 25 bp, Homo sapien
aactgctgcgaggaccatccccaat

SEQ ID NO: 1841424 - DNA, 25 bp, Homo sapien
tgtctgcgaaaagaaactgctgcga

SEQ ID NO: 1841425 - DNA, 25 bp, Homo sapien
ctgctgcgaggaccatccccaatcc

SEQ ID NO: 1841426 - DNA, 25 bp, Homo sapien
tctgcgaaaagaaactgctgcgagg

SEQ ID NO: 1841427 - DNA, 25 bp, Homo sapien
gaaaagatagcgcttgtacaccaca

SEQ ID NO: 1841428 - DNA, 25 bp, Homo sapien
tcccagaagcattagcagaggagcc

SEQ ID NO: 1841429 - DNA, 25 bp, Homo sapien
cgctggccgtatgaaggtgtctccc

SEQ ID NO: 1841430 - DNA, 25 bp, Homo sapien
aaatcttgtaaggagctgcgacccg

SEQ ID NO: 1841431 - DNA, 25 bp, Homo sapien
cttatctacatggaagtttgatgcc

SEQ ID NO: 1841432 - DNA, 25 bp, Homo sapien
tcatagtttctcgactgtgtgaagt

SEQ ID NO: 1841433 - DNA, 25 bp, Homo sapien
tggtactgaataagcccggcacttt

SEQ ID NO: 1841434 - DNA, 25 bp, Homo sapien
tataggacctcacttcgacgtagat

SEQ ID NO: 1841435 - DNA, 25 bp, Homo sapien
ctaacagtgagagggttttaagcag

SEQ ID NO: 1841436 - DNA, 25 bp, Homo sapien
cgtccgagtctctttagtcaacaca

SEQ ID NO: 1841437 - DNA, 25 bp, Homo sapien
caagctggtatggtgagattattgc

SEQ ID NO: 1841438 - DNA, 25 bp, Homo sapien
cgaagatttgaattcactgtctcac

SEQ ID NO: 1841439 - DNA, 25 bp, Homo sapien
tgaatgtgacaagcgtggaaaggcc

SEQ ID NO: 1841440 - DNA, 25 bp, Homo sapien
gaatccacggtagagagaagcccta

SEQ ID NO: 1841441 - DNA, 25 bp, Homo sapien
aaagaagccccggtgatgtcaagcg

SEQ ID NO: 1841442 - DNA, 25 bp, Homo sapien
tgagacaccaaagaacccacactgg

SEQ ID NO: 1841443 - DNA, 25 bp, Homo sapien
gacctgtggcaggtgtcatccagaa

SEQ ID NO: 1841444 - DNA, 25 bp, Homo sapien
cacctaagctgaggatagagccagg

SEQ ID NO: 1841445 - DNA, 25 bp, Homo sapien
tgctccaaggtgctagccagttgat

SEQ ID NO: 1841446 - DNA, 25 bp, Homo sapien
tctgcaacagtgattgggagcctcc

SEQ ID NO: 1841447 - DNA, 25 bp, Homo sapien
ccagagtgggagagtgttctaaagc

SEQ ID NO: 1841448 - DNA, 25 bp, Homo sapien
tatctgttcagttgcctatgaggga

SEQ ID NO: 1841449 - DNA, 25 bp, Homo sapien
tgataatacactgtgcactaaaggg

SEQ ID NO: 1841450 - DNA, 25 bp, Homo sapien
ggaaattactaagcatcgtctggat

SEQ ID NO: 1841451 - DNA, 25 bp, Homo sapien
tgttaggcattcaagtttcccaatt

SEQ ID NO: 1841452 - DNA, 25 bp, Homo sapien
tggataattccaagaagctaagttg

SEQ ID NO: 1841453 - DNA, 25 bp, Homo sapien
taaatagtgcttctttgtacatacg

SEQ ID NO: 1841454 - DNA, 25 bp, Homo sapien
ggcttagtatcatattgtcagaggc

SEQ ID NO: 1841455 - DNA, 25 bp, Homo sapien
aaccccttcacattcaagtctactg

SEQ ID NO: 1841456 - DNA, 25 bp, Homo sapien
agctgtgtcttttagatgtgtggca

SEQ ID NO: 1841457 - DNA, 25 bp, Homo sapien
tctactgttaacatagcagccaaaa

SEQ ID NO: 1841458 - DNA, 25 bp, Homo sapien
tatatcaggaaaatcagctgtgtct

SEQ ID NO: 1841459 - DNA, 25 bp, Homo sapien
aatgagccatgctgggtagctcaca

SEQ ID NO: 1841460 - DNA, 25 bp, Homo sapien
tctcaaatgagccatgctgggtagc

SEQ ID NO: 1841461 - DNA, 25 bp, Homo sapien
aatcatgttacttctctactcagaa

SEQ ID NO: 1841462 - DNA, 25 bp, Homo sapien
ctcagaaatctcaaatgagccatgc

SEQ ID NO: 1841463 - DNA, 25 bp, Homo sapien
gtctgggtgacagagtgagacccat

SEQ ID NO: 1841464 - DNA, 25 bp, Homo sapien
aagctatgatcgcaccactcactgc

SEQ ID NO: 1841465 - DNA, 25 bp, Homo sapien
agtaagctatgatcgcaccactcac

SEQ ID NO: 1841466 - DNA, 25 bp, Homo sapien
actccagtctgggtgacagagtgag

SEQ ID NO: 1841467 - DNA, 25 bp, Homo sapien
tcctgagcattcttcctaaagacct

SEQ ID NO: 1841468 - DNA, 25 bp, Homo sapien
gcaagcatgggtgcgtgcacaccat

SEQ ID NO: 1841469 - DNA, 25 bp, Homo sapien
cagattttagacctgctggtgctag

SEQ ID NO: 1841470 - DNA, 25 bp, Homo sapien
gctgaggccagaatgccacaccaag

SEQ ID NO: 1841471 - DNA, 25 bp, Homo sapien
tgattccaaattgccaccacagtgc

SEQ ID NO: 1841472 - DNA, 25 bp, Homo sapien
aacagtcagtgggatctaggataac

SEQ ID NO: 1841473 - DNA, 25 bp, Homo sapien
tagagtcctgcacccttaaaggctg

SEQ ID NO: 1841474 - DNA, 25 bp, Homo sapien
gtagtctggagcactataaccattg

SEQ ID NO: 1841475 - DNA, 25 bp, Homo sapien
gctgagtgaggcaaatgtcccctga

SEQ ID NO: 1841476 - DNA, 25 bp, Homo sapien
gagaacccctgctctataggaaaat

SEQ ID NO: 1841477 - DNA, 25 bp, Homo sapien
ccatcatggtcagggtctctactaa

SEQ ID NO: 1841478 - DNA, 25 bp, Homo sapien
agaaatgctacatgtggccgggcac

SEQ ID NO: 1841479 - DNA, 25 bp, Homo sapien
gaccttgcggacttacggagacgaa

SEQ ID NO: 1841480 - DNA, 25 bp, Homo sapien
tagaagagcggtcctacagagctgc

SEQ ID NO: 1841481 - DNA, 25 bp, Homo sapien
catctgatttgaacgaggctcggcg

SEQ ID NO: 1841482 - DNA, 25 bp, Homo sapien
ccttttcgcaaagtaggcccactgc

SEQ ID NO: 1841483 - DNA, 25 bp, Homo sapien
tacatgggtgaatgaggacctacct

SEQ ID NO: 1841484 - DNA, 25 bp, Homo sapien
cattgtgagatccacagaggtgctc

SEQ ID NO: 1841485 - DNA, 25 bp, Homo sapien
caaagagaaataggtgcagagtgcc

SEQ ID NO: 1841486 - DNA, 25 bp, Homo sapien
gagtgccggcactagaattctttaa

SEQ ID NO: 1841487 - DNA, 25 bp, Homo sapien
ctgaggcccaggttactgtaattct

SEQ ID NO: 1841488 - DNA, 25 bp, Homo sapien
gcttttcatgtagatctgaggccca

SEQ ID NO: 1841489 - DNA, 25 bp, Homo sapien
ccaggatccccatcttgtataaagt

SEQ ID NO: 1841490 - DNA, 25 bp, Homo sapien
taaacaggcctcattgcgtaattcc

SEQ ID NO: 1841491 - DNA, 25 bp, Homo sapien
tatggagcagtggtgttccaaattc

SEQ ID NO: 1841492 - DNA, 25 bp, Homo sapien
gtaacacccagtagataattcctat

SEQ ID NO: 1841493 - DNA, 25 bp, Homo sapien
tagataattcctatggagcagtggt

SEQ ID NO: 1841494 - DNA, 25 bp, Homo sapien
ttcactaagtaacacccagtagata

SEQ ID NO: 1841495 - DNA, 25 bp, Homo sapien
ttacaggaaaagctgcatgactgca

SEQ ID NO: 1841496 - DNA, 25 bp, Homo sapien
tgcatgactgcatctttagaggaga

SEQ ID NO: 1841497 - DNA, 25 bp, Homo sapien
ccagcagcccagttgacagtggctg

SEQ ID NO: 1841498 - DNA, 25 bp, Homo sapien
gagatggtttcgctggttccaagga

SEQ ID NO: 1841499 - DNA, 25 bp, Homo sapien
tagcctgttctgctgatttattcat

SEQ ID NO: 1841500 - DNA, 25 bp, Homo sapien
ctccctggaattagcctgttctgct

SEQ ID NO: 1841501 - DNA, 25 bp, Homo sapien
ggaattagcctgttctgctgattta

SEQ ID NO: 1841502 - DNA, 25 bp, Homo sapien
cctggaattagcctgttctgctgat

SEQ ID NO: 1841503 - DNA, 25 bp, Homo sapien
gcaaagggatgcacagtttccgtga

SEQ ID NO: 1841504 - DNA, 25 bp, Homo sapien
tattggagtagtgcctacagccctg

SEQ ID NO: 1841505 - DNA, 25 bp, Homo sapien
gaagctctgagccaacttgtggcca

SEQ ID NO: 1841506 - DNA, 25 bp, Homo sapien
cagtaggcactaaggtcagagacac

SEQ ID NO: 1841507 - DNA, 25 bp, Homo sapien
tctttggcaattgaaggagactagg

SEQ ID NO: 1841508 - DNA, 25 bp, Homo sapien
tttacagacagtcatctgggtggag

SEQ ID NO: 1841509 - DNA, 25 bp, Homo sapien
cacccttttgggatcagcactgaaa

SEQ ID NO: 1841510 - DNA, 25 bp, Homo sapien
gcactgaaagtgacgccatatccca

SEQ ID NO: 1841511 - DNA, 25 bp, Homo sapien
ctccagtactggttcgatttccgca

SEQ ID NO: 1841512 - DNA, 25 bp, Homo sapien
tcgatttccgcaaagtccttcttgc

SEQ ID NO: 1841513 - DNA, 25 bp, Homo sapien
ttccgcaaagtccttcttgcatcca

SEQ ID NO: 1841514 - DNA, 25 bp, Homo sapien
ctggttcgatttccgcaaagtcctt

SEQ ID NO: 1841515 - DNA, 25 bp, Homo sapien
taattctctaggagacggtggtccg

SEQ ID NO: 1841516 - DNA, 25 bp, Homo sapien
cgcgtagaactgattgtaaacccaa

SEQ ID NO: 1841517 - DNA, 25 bp, Homo sapien
gagtagcgtcattcgaaagccaccg

SEQ ID NO: 1841518 - DNA, 25 bp, Homo sapien
tattctccgtgcgtgcagggacatg

SEQ ID NO: 1841519 - DNA, 25 bp, Homo sapien
ggtcttcagaaggctttgttctccg

SEQ ID NO: 1841520 - DNA, 25 bp, Homo sapien
ttgatatttgggaaactgggtccta

SEQ ID NO: 1841521 - DNA, 25 bp, Homo sapien
tggtcttcagaaggctttgttctcc

SEQ ID NO: 1841522 - DNA, 25 bp, Homo sapien
tgggtcctaaaagtggcttctggtc

SEQ ID NO: 1841523 - DNA, 25 bp, Homo sapien
ctgttgctgatttatcatagactga

SEQ ID NO: 1841524 - DNA, 25 bp, Homo sapien
gatttatcatagactgatcaacacc

SEQ ID NO: 1841525 - DNA, 25 bp, Homo sapien
atcatagactgatcaacaccaactc

SEQ ID NO: 1841526 - DNA, 25 bp, Homo sapien
gctgatttatcatagactgatcaac

SEQ ID NO: 1841527 - DNA, 25 bp, Homo sapien
tgggagcactacacagacgaagaaa

SEQ ID NO: 1841528 - DNA, 25 bp, Homo sapien
tggagccgggtcaacaaaaaagcag

SEQ ID NO: 1841529 - DNA, 25 bp, Homo sapien
gaatgccggcactggttcaacctat

SEQ ID NO: 1841530 - DNA, 25 bp, Homo sapien
catgtttctacaagactcactggga

SEQ ID NO: 1841531 - DNA, 25 bp, Homo sapien
tcagtaggacactcttattagcttt

SEQ ID NO: 1841532 - DNA, 25 bp, Homo sapien
atcagtaggacactcttattagctt

SEQ ID NO: 1841533 - DNA, 25 bp, Homo sapien
cagtaggacactcttattagctttc

SEQ ID NO: 1841534 - DNA, 25 bp, Homo sapien
catcagtaggacactcttattagct

SEQ ID NO: 1841535 - DNA, 25 bp, Homo sapien
aaaagtatctattccaggctcaggg

SEQ ID NO: 1841536 - DNA, 25 bp, Homo sapien
gcttagccatagtggtgtgacccca

SEQ ID NO: 1841537 - DNA, 25 bp, Homo sapien
cacacatcagaagggtcgaagtcca

SEQ ID NO: 1841538 - DNA, 25 bp, Homo sapien
tcaggtctatttcggtcacagggcc

SEQ ID NO: 1841539 - DNA, 25 bp, Homo sapien
gttgtagctgaggtcttccatgaag

SEQ ID NO: 1841540 - DNA, 25 bp, Homo sapien
tgaggtcttccatgaagggtgcctt

SEQ ID NO: 1841541 - DNA, 25 bp, Homo sapien
gactaggatattgcatggtgttcag

SEQ ID NO: 1841542 - DNA, 25 bp, Homo sapien
gcaccacggactggaacggttgact

SEQ ID NO: 1841543 - DNA, 25 bp, Homo sapien
tccaggaagaggcggtggcaccacc

SEQ ID NO: 1841544 - DNA, 25 bp, Homo sapien
ggaagaggcggtggcaccacctcca

SEQ ID NO: 1841545 - DNA, 25 bp, Homo sapien
caggaagaggcggtggcaccacctc

SEQ ID NO: 1841546 - DNA, 25 bp, Homo sapien
ctccaggaagaggcggtggcaccac

SEQ ID NO: 1841547 - DNA, 25 bp, Homo sapien
gccaccactgttgtacttgagactg

SEQ ID NO: 1841548 - DNA, 25 bp, Homo sapien
tcgggtgtcactaccctggccattg

SEQ ID NO: 1841549 - DNA, 25 bp, Homo sapien
caacaagctgttggtgttgaagcgg

SEQ ID NO: 1841550 - DNA, 25 bp, Homo sapien
ccggttggccgggatgaagttcaat

SEQ ID NO: 1841551 - DNA, 25 bp, Homo sapien
ctaccacttgttgccccacccctct

SEQ ID NO: 1841552 - DNA, 25 bp, Homo sapien
ctgcttcaccgctggctgcacccct

SEQ ID NO: 1841553 - DNA, 25 bp, Homo sapien
tggctgcacccctaccacttgttgc

SEQ ID NO: 1841554 - DNA, 25 bp, Homo sapien
ctggctgcacccctaccacttgttg

SEQ ID NO: 1841555 - DNA, 25 bp, Homo sapien
aggtgatgggctgggcgaggcagag

SEQ ID NO: 1841556 - DNA, 25 bp, Homo sapien
gaaggtgatgggctgggcgaggcag

SEQ ID NO: 1841557 - DNA, 25 bp, Homo sapien
ctaatttggtggcagcaaaggagtc

SEQ ID NO: 1841558 - DNA, 25 bp, Homo sapien
tggcagcaaaggagtccatggtgaa

SEQ ID NO: 1841559 - DNA, 25 bp, Homo sapien
tgggtgatgggcaaagcatagcgac

SEQ ID NO: 1841560 - DNA, 25 bp, Homo sapien
catctggtcgtcaggagtgaaactg

SEQ ID NO: 1841561 - DNA, 25 bp, Homo sapien
gtcaggccacttcgcttagcggcca

SEQ ID NO: 1841562 - DNA, 25 bp, Homo sapien
cactgtcaggccacttcgcttagcg

SEQ ID NO: 1841563 - DNA, 25 bp, Homo sapien
gaaggggtcaatccatatgctcagc

SEQ ID NO: 1841564 - DNA, 25 bp, Homo sapien
gggtcaatccatatgctcagctcct

SEQ ID NO: 1841565 - DNA, 25 bp, Homo sapien
agaaggcttccggtctccaccgcgg

SEQ ID NO: 1841566 - DNA, 25 bp, Homo sapien
agtggtttgtcagggtaccagtggg

SEQ ID NO: 1841567 - DNA, 25 bp, Homo sapien
gcagctatggtcatgactcccaaaa

SEQ ID NO: 1841568 - DNA, 25 bp, Homo sapien
tgtcagggtaccagtgggcttctta

SEQ ID NO: 1841569 - DNA, 25 bp, Homo sapien
accgcgggacggtcctgtcctcctg

SEQ ID NO: 1841570 - DNA, 25 bp, Homo sapien
tcagcgcttaggaggttgggcggct

SEQ ID NO: 1841571 - DNA, 25 bp, Homo sapien
ggagcggaagaaggaccgggctgtg

SEQ ID NO: 1841572 - DNA, 25 bp, Homo sapien
ccctgcgtctctcgagctgctggct

SEQ ID NO: 1841573 - DNA, 25 bp, Homo sapien
ttgagtccgaagcaaggtgaacgcc

SEQ ID NO: 1841574 - DNA, 25 bp, Homo sapien
tgaacgccggacatcgagacatgga

SEQ ID NO: 1841575 - DNA, 25 bp, Homo sapien
ggcccacacacgtatgacattctga

SEQ ID NO: 1841576 - DNA, 25 bp, Homo sapien
gagacatggaatcctagaccggccc

SEQ ID NO: 1841577 - DNA, 25 bp, Homo sapien
tcacctcggtgaataacgacaacag

SEQ ID NO: 1841578 - DNA, 25 bp, Homo sapien
gactgcgaggctgaagggtcacctc

SEQ ID NO: 1841579 - DNA, 25 bp, Homo sapien
tggcagccttcacgatggagaacct

SEQ ID NO: 1841580 - DNA, 25 bp, Homo sapien
gacaacaggcttaggactcagggaa

SEQ ID NO: 1841581 - DNA, 25 bp, Homo sapien
gatttctgcgctgcttcagttacag

SEQ ID NO: 1841582 - DNA, 25 bp, Homo sapien
gaaatagaatggcagactagtcacc

SEQ ID NO: 1841583 - DNA, 25 bp, Homo sapien
attataaaatatcatggctccccag

SEQ ID NO: 1841584 - DNA, 25 bp, Homo sapien
tctggcactgaaggcccctacaatg

SEQ ID NO: 1841585 - DNA, 25 bp, Homo sapien
taataggcacttgagcacttcggaa

SEQ ID NO: 1841586 - DNA, 25 bp, Homo sapien
gaaatcagtctttaagcatcgcagg

SEQ ID NO: 1841587 - DNA, 25 bp, Homo sapien
ggatagacaagaacacgatgctggt

SEQ ID NO: 1841588 - DNA, 25 bp, Homo sapien
catcgcaggtgatttgggtgaaagc

SEQ ID NO: 1841589 - DNA, 25 bp, Homo sapien
gatgtgagtttctatcctcataggc

SEQ ID NO: 1841590 - DNA, 25 bp, Homo sapien
taggctgcctctaacctgatcttcc

SEQ ID NO: 1841591 - DNA, 25 bp, Homo sapien
gttatgaatcttcggacctggagaa

SEQ ID NO: 1841592 - DNA, 25 bp, Homo sapien
aaatatttgttatgaatcttcggac

SEQ ID NO: 1841593 - DNA, 25 bp, Homo sapien
ctccagggtggcttcagttcagtga

SEQ ID NO: 1841594 - DNA, 25 bp, Homo sapien
taaatacactgggtgagaacaaact

SEQ ID NO: 1841595 - DNA, 25 bp, Homo sapien
gcaattaacaagtccagaaggccat

SEQ ID NO: 1841596 - DNA, 25 bp, Homo sapien
gaagataactcatcgtctcagccag

SEQ ID NO: 1841597 - DNA, 25 bp, Homo sapien
gactccccgtgctcaggattctgaa

SEQ ID NO: 1841598 - DNA, 25 bp, Homo sapien
catttataagacacgggagcctcag

SEQ ID NO: 1841599 - DNA, 25 bp, Homo sapien
aataatgtcgcctactccctatggc

SEQ ID NO: 1841600 - DNA, 25 bp, Homo sapien
ggagcctcagtattttcccactggc

SEQ ID NO: 1841601 - DNA, 25 bp, Homo sapien
ctggaagcttcttgactggaggcaa

SEQ ID NO: 1841602 - DNA, 25 bp, Homo sapien
tggaagcttcttgactggaggcaag

SEQ ID NO: 1841603 - DNA, 25 bp, Homo sapien
ggaagcttcttgactggaggcaagt

SEQ ID NO: 1841604 - DNA, 25 bp, Homo sapien
ctgaaacaacaaatggccggcaact

SEQ ID NO: 1841605 - DNA, 25 bp, Homo sapien
caaatggccggcaactgtgggttat

SEQ ID NO: 1841606 - DNA, 25 bp, Homo sapien
acaaatggccggcaactgtgggtta

SEQ ID NO: 1841607 - DNA, 25 bp, Homo sapien
atggccggcaactgtgggttatgcc

SEQ ID NO: 1841608 - DNA, 25 bp, Homo sapien
tctgtagaggttcacctgagatgaa

SEQ ID NO: 1841609 - DNA, 25 bp, Homo sapien
atctctgtagaggttcacctgagat

SEQ ID NO: 1841610 - DNA, 25 bp, Homo sapien
tagaggttcacctgagatgaatcca

SEQ ID NO: 1841611 - DNA, 25 bp, Homo sapien
aggttcacctgagatgaatccagct

SEQ ID NO: 1841612 - DNA, 25 bp, Homo sapien
accctggagtgagcctggaagctac

SEQ ID NO: 1841613 - DNA, 25 bp, Homo sapien
ctgggaccctggagtgagcctggaa

SEQ ID NO: 1841614 - DNA, 25 bp, Homo sapien
gcctggaagctaccattgcatcttc

SEQ ID NO: 1841615 - DNA, 25 bp, Homo sapien
cctggaagctaccattgcatcttct

SEQ ID NO: 1841616 - DNA, 25 bp, Homo sapien
atcgtgtaagggctgggatcccaga

SEQ ID NO: 1841617 - DNA, 25 bp, Homo sapien
ggctggcactggctactttgagacc

SEQ ID NO: 1841618 - DNA, 25 bp, Homo sapien
cactggctactttgagacccttgag

SEQ ID NO: 1841619 - DNA, 25 bp, Homo sapien
tggcactggctactttgagaccctt

SEQ ID NO: 1841620 - DNA, 25 bp, Homo sapien
tacagggcttgcgtgcaatagacct

SEQ ID NO: 1841621 - DNA, 25 bp, Homo sapien
aaataggcccactttctaccagagg

SEQ ID NO: 1841622 - DNA, 25 bp, Homo sapien
tgacatcacctaacacagggcctgg

SEQ ID NO: 1841623 - DNA, 25 bp, Homo sapien
cagaatgactccagatcccgtgttc

SEQ ID NO: 1841624 - DNA, 25 bp, Homo sapien
cacagcgctcagatactaaacctgt

SEQ ID NO: 1841625 - DNA, 25 bp, Homo sapien
ccacagcgctcagatactaaacctg

SEQ ID NO: 1841626 - DNA, 25 bp, Homo sapien
acagcgctcagatactaaacctgtt

SEQ ID NO: 1841627 - DNA, 25 bp, Homo sapien
cagcgctcagatactaaacctgttc

SEQ ID NO: 1841628 - DNA, 25 bp, Homo sapien
acctccgccgtcaaggcggaggctt

SEQ ID NO: 1841629 - DNA, 25 bp, Homo sapien
tgcagccattgtccgcagagttctc

SEQ ID NO: 1841630 - DNA, 25 bp, Homo sapien
ggagccccgtctggtcttctgcaga

SEQ ID NO: 1841631 - DNA, 25 bp, Homo sapien
cagggctgcgttttttctcggttct

SEQ ID NO: 1841632 - DNA, 25 bp, Homo sapien
ccacagtaagtatcaccaaaggatg

SEQ ID NO: 1841633 - DNA, 25 bp, Homo sapien
ctgaggcgcagctgcacagatctct

SEQ ID NO: 1841634 - DNA, 25 bp, Homo sapien
tactcgggtctcactctagttgcga

SEQ ID NO: 1841635 - DNA, 25 bp, Homo sapien
tatagtccgtgcctttgcagggtcg

SEQ ID NO: 1841636 - DNA, 25 bp, Homo sapien
gacagacttataaaagccaacaggc

SEQ ID NO: 1841637 - DNA, 25 bp, Homo sapien
gaaagcctctgtggatatgtgacag

SEQ ID NO: 1841638 - DNA, 25 bp, Homo sapien
cactatggctggtactgaggataaa

SEQ ID NO: 1841639 - DNA, 25 bp, Homo sapien
tatgatgtgaaaaaagtaacgggct

SEQ ID NO: 1841640 - DNA, 25 bp, Homo sapien
ggaaaagtcaccgtagcccactgtg

SEQ ID NO: 1841641 - DNA, 25 bp, Homo sapien
ggcacattgactagcaaacagcact

SEQ ID NO: 1841642 - DNA, 25 bp, Homo sapien
caaaggtcaggtctttttcaacatc

SEQ ID NO: 1841643 - DNA, 25 bp, Homo sapien
ggagaagccttcaggcaaaggtcag

SEQ ID NO: 1841644 - DNA, 25 bp, Homo sapien
tgggaggccacgtttcctacagacc

SEQ ID NO: 1841645 - DNA, 25 bp, Homo sapien
tcagtccgatgagtaaggccaggcc

SEQ ID NO: 1841646 - DNA, 25 bp, Homo sapien
acagcccaggccgttgctgcagaga

SEQ ID NO: 1841647 - DNA, 25 bp, Homo sapien
gagtctgactcggaggaacctctgt

SEQ ID NO: 1841648 - DNA, 25 bp, Homo sapien
tgatcatattatcagcaaacagcaa

SEQ ID NO: 1841649 - DNA, 25 bp, Homo sapien
ggtatatgatcatattatcagcaaa

SEQ ID NO: 1841650 - DNA, 25 bp, Homo sapien
tatatcctgaaactttggtgaattc

SEQ ID NO: 1841651 - DNA, 25 bp, Homo sapien
aattttatatcctgaaactttggtg

SEQ ID NO: 1841652 - DNA, 25 bp, Homo sapien
ggttcttatgcccaagaagtgttga

SEQ ID NO: 1841653 - DNA, 25 bp, Homo sapien
cccaagaagtgttgagatctgccca

SEQ ID NO: 1841654 - DNA, 25 bp, Homo sapien
atagagggttcttatgcccaagaag

SEQ ID NO: 1841655 - DNA, 25 bp, Homo sapien
gatctgcccaaacgcattgccacat

SEQ ID NO: 1841656 - DNA, 25 bp, Homo sapien
ctgaaagtttcgtggcagccgctgc

SEQ ID NO: 1841657 - DNA, 25 bp, Homo sapien
tgctgcaagcgggttaagctcctta

SEQ ID NO: 1841658 - DNA, 25 bp, Homo sapien
agctccttaggaagcgcttgcggca

SEQ ID NO: 1841659 - DNA, 25 bp, Homo sapien
cagcgtttgcttgcgtagggcctgc

SEQ ID NO: 1841660 - DNA, 25 bp, Homo sapien
tccccttggcgcactcttatggtct

SEQ ID NO: 1841661 - DNA, 25 bp, Homo sapien
ggatctggaggtcacgtgaaccttt

SEQ ID NO: 1841662 - DNA, 25 bp, Homo sapien
tgattcgaggtctgcataggattgc

SEQ ID NO: 1841663 - DNA, 25 bp, Homo sapien
agacggttaactgccggaggcatgc

SEQ ID NO: 1841664 - DNA, 25 bp, Homo sapien
tggaccatgcatttataaaagccat

SEQ ID NO: 1841665 - DNA, 25 bp, Homo sapien
taggaacagtggagtaagggccaaa

SEQ ID NO: 1841666 - DNA, 25 bp, Homo sapien
cacttgctaggaacagtggagtaag

SEQ ID NO: 1841667 - DNA, 25 bp, Homo sapien
gaacagtggagtaagggccaaaata

SEQ ID NO: 1841668 - DNA, 25 bp, Homo sapien
tgctaggaacagtggagtaagggcc

SEQ ID NO: 1841669 - DNA, 25 bp, Homo sapien
cttcaaagccaaaggtttagggcag

SEQ ID NO: 1841670 - DNA, 25 bp, Homo sapien
ttcaaagccaaaggtttagggcaga

SEQ ID NO: 1841671 - DNA, 25 bp, Homo sapien
tcaaagccaaaggtttagggcagaa

SEQ ID NO: 1841672 - DNA, 25 bp, Homo sapien
ttaagctgaacttttatttcctctc

SEQ ID NO: 1841673 - DNA, 25 bp, Homo sapien
tgaaatattctgattcaggttttga

SEQ ID NO: 1841674 - DNA, 25 bp, Homo sapien
ttcctctcttttgaaatattctgat

SEQ ID NO: 1841675 - DNA, 25 bp, Homo sapien
tatttcctctcttttgaaatattct

SEQ ID NO: 1841676 - DNA, 25 bp, Homo sapien
aatgctattatttcgtatgtaaatc

SEQ ID NO: 1841677 - DNA, 25 bp, Homo sapien
aagagtaacaagaatgtcagcagag

SEQ ID NO: 1841678 - DNA, 25 bp, Homo sapien
tcgtatgtaaatcataatgcatatt

SEQ ID NO: 1841679 - DNA, 25 bp, Homo sapien
cagcagaggcatttcgtatcctaat

SEQ ID NO: 1841680 - DNA, 25 bp, Homo sapien
cagagcatatgtttaaccctggcaa

SEQ ID NO: 1841681 - DNA, 25 bp, Homo sapien
gctggtctccccagtaagcagcaag

SEQ ID NO: 1841682 - DNA, 25 bp, Homo sapien
gatgctgcttgcaatggcactcaaa

SEQ ID NO: 1841683 - DNA, 25 bp, Homo sapien
tatgcagtattgctcaaaaacagcc

SEQ ID NO: 1841684 - DNA, 25 bp, Homo sapien
agacggccccatttaggggtctgag

SEQ ID NO: 1841685 - DNA, 25 bp, Homo sapien
cagttctgctggaacagtatggatt

SEQ ID NO: 1841686 - DNA, 25 bp, Homo sapien
cctaataaggttgcaatgatgactg

SEQ ID NO: 1841687 - DNA, 25 bp, Homo sapien
catttaggggtctgagggtccacag

SEQ ID NO: 1841688 - DNA, 25 bp, Homo sapien
ttctgatgtttcttaagaagtgtcc

SEQ ID NO: 1841689 - DNA, 25 bp, Homo sapien
ctaaagagtttactgcactgactgc

SEQ ID NO: 1841690 - DNA, 25 bp, Homo sapien
aagagtttactgcactgactgcact

SEQ ID NO: 1841691 - DNA, 25 bp, Homo sapien
agaagtgtccgcttactaaagagtt

SEQ ID NO: 1841692 - DNA, 25 bp, Homo sapien
tctgtgtcgagtgaggccattgctg

SEQ ID NO: 1841693 - DNA, 25 bp, Homo sapien
gattcttctgtgtcgagtgaggcca

SEQ ID NO: 1841694 - DNA, 25 bp, Homo sapien
tgctgaacaaggcatgagctgagga

SEQ ID NO: 1841695 - DNA, 25 bp, Homo sapien
cacactcacgacactgatagcgctt

SEQ ID NO: 1841696 - DNA, 25 bp, Homo sapien
tggctccgccgatgttcattcaggc

SEQ ID NO: 1841697 - DNA, 25 bp, Homo sapien
gtgtggctccgccgatgttcattca

SEQ ID NO: 1841698 - DNA, 25 bp, Homo sapien
tccagtgtggctccgccgatgttca

SEQ ID NO: 1841699 - DNA, 25 bp, Homo sapien
ctccagtgtggctccgccgatgttc

SEQ ID NO: 1841700 - DNA, 25 bp, Homo sapien
tcattgcacctgtggcgtctctctc

SEQ ID NO: 1841701 - DNA, 25 bp, Homo sapien
tacatctctttggagtttgctatcc

SEQ ID NO: 1841702 - DNA, 25 bp, Homo sapien
tgccttgctgtctcgtttacaagtt

SEQ ID NO: 1841703 - DNA, 25 bp, Homo sapien
tacaagtttctctgtacttagaatc

SEQ ID NO: 1841704 - DNA, 25 bp, Homo sapien
ttcttgctttgatgccaactcctgg

SEQ ID NO: 1841705 - DNA, 25 bp, Homo sapien
tggttctcaggtatactttcaccat

SEQ ID NO: 1841706 - DNA, 25 bp, Homo sapien
ttgatgccaactcctggttctcagg

SEQ ID NO: 1841707 - DNA, 25 bp, Homo sapien
ttgctttgatgccaactcctggttc

SEQ ID NO: 1841708 - DNA, 25 bp, Homo sapien
gaggcaaaaagattcatatctgagc

SEQ ID NO: 1841709 - DNA, 25 bp, Homo sapien
tggtggaggcaaaaagattcatatc

SEQ ID NO: 1841710 - DNA, 25 bp, Homo sapien
cttgaaattggtggaggcaaaaaga

SEQ ID NO: 1841711 - DNA, 25 bp, Homo sapien
caaaaagattcatatctgagctgtg

SEQ ID NO: 1841712 - DNA, 25 bp, Homo sapien
tgaccttcagatgttccacatcctc

SEQ ID NO: 1841713 - DNA, 25 bp, Homo sapien
gcttgaccttcagatgttccacatc

SEQ ID NO: 1841714 - DNA, 25 bp, Homo sapien
tccaagagcacttcagaatgtccat

SEQ ID NO: 1841715 - DNA, 25 bp, Homo sapien
cctgcttgaccttcagatgttccac

SEQ ID NO: 1841716 - DNA, 25 bp, Homo sapien
ttaatgtctagaagtccatctttct

SEQ ID NO: 1841717 - DNA, 25 bp, Homo sapien
aatgtctagaagtccatctttctcc

SEQ ID NO: 1841718 - DNA, 25 bp, Homo sapien
tagaagtccatctttctcctctcac

SEQ ID NO: 1841719 - DNA, 25 bp, Homo sapien
tgtctagaagtccatctttctcctc

SEQ ID NO: 1841720 - DNA, 25 bp, Homo sapien
gagtctcttggtaacaaaactgcct

SEQ ID NO: 1841721 - DNA, 25 bp, Homo sapien
gatcgtactgttcctctgttgaagc

SEQ ID NO: 1841722 - DNA, 25 bp, Homo sapien
cagaaaagttgttccctcgaaggtg

SEQ ID NO: 1841723 - DNA, 25 bp, Homo sapien
ggttccctggctcactaagctcttg

SEQ ID NO: 1841724 - DNA, 25 bp, Homo sapien
tctgatttaatcttccttaggagaa

SEQ ID NO: 1841725 - DNA, 25 bp, Homo sapien
tttaatcttccttaggagaagacac

SEQ ID NO: 1841726 - DNA, 25 bp, Homo sapien
ctttaagtaaagggataactgtgat

SEQ ID NO: 1841727 - DNA, 25 bp, Homo sapien
taagtaaagggataactgtgattta

SEQ ID NO: 1841728 - DNA, 25 bp, Homo sapien
cgagaagctctgctactggatggag

SEQ ID NO: 1841729 - DNA, 25 bp, Homo sapien
gacaaggctgaattctgtaccgaga

SEQ ID NO: 1841730 - DNA, 25 bp, Homo sapien
gaagagcactctggactatccaaag

SEQ ID NO: 1841731 - DNA, 25 bp, Homo sapien
tggcaagccaagcaggagtcagatc

SEQ ID NO: 1841732 - DNA, 25 bp, Homo sapien
gaactccgggcgttatctcagacaa

SEQ ID NO: 1841733 - DNA, 25 bp, Homo sapien
tcctttatcgtcttggaggcaggac

SEQ ID NO: 1841734 - DNA, 25 bp, Homo sapien
ttctgggaacctggcgggtcgcgac

SEQ ID NO: 1841735 - DNA, 25 bp, Homo sapien
gggcttcaggccagtgaatgtgtag

SEQ ID NO: 1841736 - DNA, 25 bp, Homo sapien
ggcaccggcaagctacggaacaggt

SEQ ID NO: 1841737 - DNA, 25 bp, Homo sapien
tcgagacccaaaacattagagccgg

SEQ ID NO: 1841738 - DNA, 25 bp, Homo sapien
atgaccgatcaaccgcaaaggccgg

SEQ ID NO: 1841739 - DNA, 25 bp, Homo sapien
gccggaaatgcgtcagccgttctga

SEQ ID NO: 1841740 - DNA, 25 bp, Homo sapien
tggggacgagaatacagagttgttt

SEQ ID NO: 1841741 - DNA, 25 bp, Homo sapien
tattcttccccgagtctgtccactt

SEQ ID NO: 1841742 - DNA, 25 bp, Homo sapien
tgtgttttacactcaaacctctgtc

SEQ ID NO: 1841743 - DNA, 25 bp, Homo sapien
tctggtctctttgacatcacaaagg

SEQ ID NO: 1841744 - DNA, 25 bp, Homo sapien
taagtcaggtgtaatagctcacgcc

SEQ ID NO: 1841745 - DNA, 25 bp, Homo sapien
cttaagtcaggtgtaatagctcacg

SEQ ID NO: 1841746 - DNA, 25 bp, Homo sapien
gagacttaagtcaggtgtaatagct

SEQ ID NO: 1841747 - DNA, 25 bp, Homo sapien
atggagacttaagtcaggtgtaata

SEQ ID NO: 1841748 - DNA, 25 bp, Homo sapien
atggaactgtcatggtttggatgcc

SEQ ID NO: 1841749 - DNA, 25 bp, Homo sapien
ggaactgtcatggtttggatgcctg

SEQ ID NO: 1841750 - DNA, 25 bp, Homo sapien
aactgtcatggtttggatgcctggg

SEQ ID NO: 1841751 - DNA, 25 bp, Homo sapien
tgatggaactgtcatggtttggatg

SEQ ID NO: 1841752 - DNA, 25 bp, Homo sapien
tattatagtcagaagggatctggac

SEQ ID NO: 1841753 - DNA, 25 bp, Homo sapien
taacagattaatatgacctcaggta

SEQ ID NO: 1841754 - DNA, 25 bp, Homo sapien
cctcaggtatataatgtgtagtcat

SEQ ID NO: 1841755 - DNA, 25 bp, Homo sapien
tatgttggaggccttgataagatac

SEQ ID NO: 1841756 - DNA, 25 bp, Homo sapien
cattctggatttggtcgattgcttc

SEQ ID NO: 1841757 - DNA, 25 bp, Homo sapien
tctaatctatgacagttcccattcc

SEQ ID NO: 1841758 - DNA, 25 bp, Homo sapien
gggtccgaatatggttcaccatttg

SEQ ID NO: 1841759 - DNA, 25 bp, Homo sapien
taacttattagatctcaaactcagc

SEQ ID NO: 1841760 - DNA, 25 bp, Homo sapien
ctggagtgcaggtgcagtggtgcga

SEQ ID NO: 1841761 - DNA, 25 bp, Homo sapien
gagactataggcgcatgccatcacg

SEQ ID NO: 1841762 - DNA, 25 bp, Homo sapien
tgcgatcttggctcattgcaacctc

SEQ ID NO: 1841763 - DNA, 25 bp, Homo sapien
gctgagactataggcgcatgccatc

SEQ ID NO: 1841764 - DNA, 25 bp, Homo sapien
tccctcttagatcaggcccaggtct

SEQ ID NO: 1841765 - DNA, 25 bp, Homo sapien
aaaatctagtcccagctggttcaca

SEQ ID NO: 1841766 - DNA, 25 bp, Homo sapien
cttccctcttagatcaggcccaggt

SEQ ID NO: 1841767 - DNA, 25 bp, Homo sapien
gctggttcacaggaatctcaggttt

SEQ ID NO: 1841768 - DNA, 25 bp, Homo sapien
ctgtcatgccaagtgtcaggttcca

SEQ ID NO: 1841769 - DNA, 25 bp, Homo sapien
ccgaggggagttgttggatgggtgg

SEQ ID NO: 1841770 - DNA, 25 bp, Homo sapien
cactgtcatgccaagtgtcaggttc

SEQ ID NO: 1841771 - DNA, 25 bp, Homo sapien
aggggagttgttggatgggtggcag

SEQ ID NO: 1841772 - DNA, 25 bp, Homo sapien
gcccttctcagcaaacggctctgtg

SEQ ID NO: 1841773 - DNA, 25 bp, Homo sapien
tgtactccttggcatgcttgttaat

SEQ ID NO: 1841774 - DNA, 25 bp, Homo sapien
gctgtactccttggcatgcttgtta

SEQ ID NO: 1841775 - DNA, 25 bp, Homo sapien
ctcagcaaacggctctgtggctcct

SEQ ID NO: 1841776 - DNA, 25 bp, Homo sapien
ccagttctctcttacagggtcagca

SEQ ID NO: 1841777 - DNA, 25 bp, Homo sapien
tggccagttctctcttacagggtca

SEQ ID NO: 1841778 - DNA, 25 bp, Homo sapien
ggccagttctctcttacagggtcag

SEQ ID NO: 1841779 - DNA, 25 bp, Homo sapien
gccagttctctcttacagggtcagc

SEQ ID NO: 1841780 - DNA, 25 bp, Homo sapien
tattgggtaagtcatgcgcgcgacg

SEQ ID NO: 1841781 - DNA, 25 bp, Homo sapien
caggctgtcacgagtctaaagggca

SEQ ID NO: 1841782 - DNA, 25 bp, Homo sapien
caggaaggtggtttcagccgcatca

SEQ ID NO: 1841783 - DNA, 25 bp, Homo sapien
tgtgtgatgccataagccccagtca

SEQ ID NO: 1841784 - DNA, 25 bp, Homo sapien
taatctttgagctggaacgctccgg

SEQ ID NO: 1841785 - DNA, 25 bp, Homo sapien
gctctgcccggaaacttattcaggt

SEQ ID NO: 1841786 - DNA, 25 bp, Homo sapien
ttagggaccagtggcttgccgagtc

SEQ ID NO: 1841787 - DNA, 25 bp, Homo sapien
tattgcctttggttgtccggtgtcc

SEQ ID NO: 1841788 - DNA, 25 bp, Homo sapien
gcccagattcctacatgtgcagaag

SEQ ID NO: 1841789 - DNA, 25 bp, Homo sapien
agttttgctcaaagctcaggcctga

SEQ ID NO: 1841790 - DNA, 25 bp, Homo sapien
gaccttatcaagcatcagagaaccc

SEQ ID NO: 1841791 - DNA, 25 bp, Homo sapien
catgggaagatatcgtgccacctga

SEQ ID NO: 1841792 - DNA, 25 bp, Homo sapien
tatgctagtttccaaggcttggtcc

SEQ ID NO: 1841793 - DNA, 25 bp, Homo sapien
caaacttttgtgtaagcgcttcacc

SEQ ID NO: 1841794 - DNA, 25 bp, Homo sapien
cagtcgcagctcaggtcttatcaaa

SEQ ID NO: 1841795 - DNA, 25 bp, Homo sapien
gagaaccctcaatgggagaagcctt

SEQ ID NO: 1841796 - DNA, 25 bp, Homo sapien
ttgggttacaattcagtatggtaac

SEQ ID NO: 1841797 - DNA, 25 bp, Homo sapien
ttgtaacctaggagtaacagcctaa

SEQ ID NO: 1841798 - DNA, 25 bp, Homo sapien
ggtaacatgctctatgggtttgtaa

SEQ ID NO: 1841799 - DNA, 25 bp, Homo sapien
gagtaacagcctaagtttgtgtaag

SEQ ID NO: 1841800 - DNA, 25 bp, Homo sapien
cagtgaatgacacaagtagctgccc

SEQ ID NO: 1841801 - DNA, 25 bp, Homo sapien
gtgatttttgcccatacctagttaa

SEQ ID NO: 1841802 - DNA, 25 bp, Homo sapien
gcccattgttggacactctacagca

SEQ ID NO: 1841803 - DNA, 25 bp, Homo sapien
taagcaaccttgtgagtgagggtgc

SEQ ID NO: 1841804 - DNA, 25 bp, Homo sapien
cctatcatgggtagagattgggcta

SEQ ID NO: 1841805 - DNA, 25 bp, Homo sapien
tgggctacattatcaacttgttgac

SEQ ID NO: 1841806 - DNA, 25 bp, Homo sapien
tgcaaaaaatttagggatgtacagc

SEQ ID NO: 1841807 - DNA, 25 bp, Homo sapien
gatgtacagcagagggacacctaga

SEQ ID NO: 1841808 - DNA, 25 bp, Homo sapien
tcatccaggagacagatcacaaatc

SEQ ID NO: 1841809 - DNA, 25 bp, Homo sapien
gaagggacacctacacggtcttgtg

SEQ ID NO: 1841810 - DNA, 25 bp, Homo sapien
tgcttacacatatagacccctctgg

SEQ ID NO: 1841811 - DNA, 25 bp, Homo sapien
tgtcctagggtaccaatacaagcct

SEQ ID NO: 1841812 - DNA, 25 bp, Homo sapien
tctggtgcacagtcagtcctggctt

SEQ ID NO: 1841813 - DNA, 25 bp, Homo sapien
cattgatgttgcagttctacagaca

SEQ ID NO: 1841814 - DNA, 25 bp, Homo sapien
gcttctgggtgaaggtcttcctaca

SEQ ID NO: 1841815 - DNA, 25 bp, Homo sapien
agagattctcttcatcgtggactcc

SEQ ID NO: 1841816 - DNA, 25 bp, Homo sapien
catttttgtgaaggcacgtggcagg

SEQ ID NO: 1841817 - DNA, 25 bp, Homo sapien
catctggtggatcctaaagttcagg

SEQ ID NO: 1841818 - DNA, 25 bp, Homo sapien
tcccagagatgcacctaaataacag

SEQ ID NO: 1841819 - DNA, 25 bp, Homo sapien
cccaatatagaaagaggaggtccca

SEQ ID NO: 1841820 - DNA, 25 bp, Homo sapien
agcatcatcgattgcctcgtctcca

SEQ ID NO: 1841821 - DNA, 25 bp, Homo sapien
ttttccagcatcatcgattgcctcg

SEQ ID NO: 1841822 - DNA, 25 bp, Homo sapien
gattgcctcgtctccacattctgga

SEQ ID NO: 1841823 - DNA, 25 bp, Homo sapien
tttcccatcggtggtttgtccttca

SEQ ID NO: 1841824 - DNA, 25 bp, Homo sapien
tatatctgcagcttcacaagtaggg

SEQ ID NO: 1841825 - DNA, 25 bp, Homo sapien
aggggccagggcctgttccagcacc

SEQ ID NO: 1841826 - DNA, 25 bp, Homo sapien
tccagcacctgcttcataatatgta

SEQ ID NO: 1841827 - DNA, 25 bp, Homo sapien
ccagcacctgcttcataatatgtat

SEQ ID NO: 1841828 - DNA, 25 bp, Homo sapien
tactggcaaagcttcctaagtcttc

SEQ ID NO: 1841829 - DNA, 25 bp, Homo sapien
tcaggaactactggcaaagcttcct

SEQ ID NO: 1841830 - DNA, 25 bp, Homo sapien
ttttccaatgctggcaaaccttccc

SEQ ID NO: 1841831 - DNA, 25 bp, Homo sapien
tgacagctctgtaaagtccaggtag

SEQ ID NO: 1841832 - DNA, 25 bp, Homo sapien
agacctgtgatttctttgccagcct

SEQ ID NO: 1841833 - DNA, 25 bp, Homo sapien
tttgttctaggcacagccttcttcc

SEQ ID NO: 1841834 - DNA, 25 bp, Homo sapien
tctccagagagtagcaatttaaagt

SEQ ID NO: 1841835 - DNA, 25 bp, Homo sapien
ttgccagcctgattctttgttctag

SEQ ID NO: 1841836 - DNA, 25 bp, Homo sapien
gagctcaggagaagattcactccag

SEQ ID NO: 1841837 - DNA, 25 bp, Homo sapien
caagattgccattctggaatgagag

SEQ ID NO: 1841838 - DNA, 25 bp, Homo sapien
gaatgagagagctcaggagaagatt

SEQ ID NO: 1841839 - DNA, 25 bp, Homo sapien
gatctctcctgaaacaagattgcca

SEQ ID NO: 1841840 - DNA, 25 bp, Homo sapien
gacacttataatctcactgacagag

SEQ ID NO: 1841841 - DNA, 25 bp, Homo sapien
tgtactcagcgtcgatcttgggaaa

SEQ ID NO: 1841842 - DNA, 25 bp, Homo sapien
ttcaaaatacccatataaacggcag

SEQ ID NO: 1841843 - DNA, 25 bp, Homo sapien
agatcatgaccctcttcccttggct

SEQ ID NO: 1841844 - DNA, 25 bp, Homo sapien
agtcatccttaacttcccctggcag

SEQ ID NO: 1841845 - DNA, 25 bp, Homo sapien
tggaagtcatccttaacttcccctg

SEQ ID NO: 1841846 - DNA, 25 bp, Homo sapien
aagtcatccttaacttcccctggca

SEQ ID NO: 1841847 - DNA, 25 bp, Homo sapien
gaagtcatccttaacttcccctggc

SEQ ID NO: 1841848 - DNA, 25 bp, Homo sapien
cgcctccaaaggtccgtcacaaagg

SEQ ID NO: 1841849 - DNA, 25 bp, Homo sapien
aaggtccgtcacaaaggccagaaag

SEQ ID NO: 1841850 - DNA, 25 bp, Homo sapien
agagacactgaaaggccggagcgca

SEQ ID NO: 1841851 - DNA, 25 bp, Homo sapien
gagcgcacgaatctgaaaccacccg

SEQ ID NO: 1841852 - DNA, 25 bp, Homo sapien
ccgtcaacggctgtctcagcattca

SEQ ID NO: 1841853 - DNA, 25 bp, Homo sapien
agctgagcagtcaggtaaccccagg

SEQ ID NO: 1841854 - DNA, 25 bp, Homo sapien
gctgagcagcgcaagttccagctga

SEQ ID NO: 1841855 - DNA, 25 bp, Homo sapien
taggattctggaggctttctcctct

SEQ ID NO: 1841856 - DNA, 25 bp, Homo sapien
agaacgtcggaagagcagctcggaa

SEQ ID NO: 1841857 - DNA, 25 bp, Homo sapien
gtcagacccgtgcgaggccggcctt

SEQ ID NO: 1841858 - DNA, 25 bp, Homo sapien
tcggaaggcaaacttcggatagcag

SEQ ID NO: 1841859 - DNA, 25 bp, Homo sapien
tccagctgcagaacgtcggaagagc

SEQ ID NO: 1841860 - DNA, 25 bp, Homo sapien
tgtgaggactccttaccaaacgcac

SEQ ID NO: 1841861 - DNA, 25 bp, Homo sapien
tatgctggccaaacctcatccaaga

SEQ ID NO: 1841862 - DNA, 25 bp, Homo sapien
cacacagaacgtttgagagggagag

SEQ ID NO: 1841863 - DNA, 25 bp, Homo sapien
tattacctgaggtgtttggactcca

SEQ ID NO: 1841864 - DNA, 25 bp, Homo sapien
acttggctcttccccaacctctcca

SEQ ID NO: 1841865 - DNA, 25 bp, Homo sapien
cttggctcttccccaacctctccat

SEQ ID NO: 1841866 - DNA, 25 bp, Homo sapien
cattactttagaaacttggctcttc

SEQ ID NO: 1841867 - DNA, 25 bp, Homo sapien
ctcacttttcattactttagaaact

SEQ ID NO: 1841868 - DNA, 25 bp, Homo sapien
ttgccttaaacacttaatgtcttgt

SEQ ID NO: 1841869 - DNA, 25 bp, Homo sapien
tgccttaaacacttaatgtcttgtt

SEQ ID NO: 1841870 - DNA, 25 bp, Homo sapien
tttgccttaaacacttaatgtcttg

SEQ ID NO: 1841871 - DNA, 25 bp, Homo sapien
tgcttcagaggtttctggtttccta

SEQ ID NO: 1841872 - DNA, 25 bp, Homo sapien
aggtttctggtttcctaggatcttg

SEQ ID NO: 1841873 - DNA, 25 bp, Homo sapien
cttggacctgcttcgcttttatatt

SEQ ID NO: 1841874 - DNA, 25 bp, Homo sapien
acctgcttcgcttttatattcttcg

SEQ ID NO: 1841875 - DNA, 25 bp, Homo sapien
ccacattgtcaagatggtctcaacc

SEQ ID NO: 1841876 - DNA, 25 bp, Homo sapien
accacattgtcaagatggtctcaac

SEQ ID NO: 1841877 - DNA, 25 bp, Homo sapien
acattgtcaagatggtctcaacctc

SEQ ID NO: 1841878 - DNA, 25 bp, Homo sapien
cacattgtcaagatggtctcaacct

SEQ ID NO: 1841879 - DNA, 25 bp, Homo sapien
caaagagctgatggcacatgttccc

SEQ ID NO: 1841880 - DNA, 25 bp, Homo sapien
cttgtgctaaaagtctgcagtggcc

SEQ ID NO: 1841881 - DNA, 25 bp, Homo sapien
tcagaagcccaagggatagtatctc

SEQ ID NO: 1841882 - DNA, 25 bp, Homo sapien
ttataggactgtgttcaggcttccc

SEQ ID NO: 1841883 - DNA, 25 bp, Homo sapien
tgaagttttgccccaataattgtaa

SEQ ID NO: 1841884 - DNA, 25 bp, Homo sapien
tatctgaggtttccttataacaatg

SEQ ID NO: 1841885 - DNA, 25 bp, Homo sapien
taacaatggtgactgaagttttgcc

SEQ ID NO: 1841886 - DNA, 25 bp, Homo sapien
tccttataacaatggtgactgaagt

SEQ ID NO: 1841887 - DNA, 25 bp, Homo sapien
tgaactctgtgagataacttccctg

SEQ ID NO: 1841888 - DNA, 25 bp, Homo sapien
ctgaactctgtgagataacttccct

SEQ ID NO: 1841889 - DNA, 25 bp, Homo sapien
ctttacatacataggtaccacgtct

SEQ ID NO: 1841890 - DNA, 25 bp, Homo sapien
ccacgtctattatggattctctggt

SEQ ID NO: 1841891 - DNA, 25 bp, Homo sapien
ctcctttgtggatagtctgatgttg

SEQ ID NO: 1841892 - DNA, 25 bp, Homo sapien
cctttgtggatagtctgatgttgag

SEQ ID NO: 1841893 - DNA, 25 bp, Homo sapien
ctgatgttccgtgaggactgatctt

SEQ ID NO: 1841894 - DNA, 25 bp, Homo sapien
ggtgattcctcggaaggcattccca

SEQ ID NO: 1841895 - DNA, 25 bp, Homo sapien
ccgtgaggactgatctttgagtaaa

SEQ ID NO: 1841896 - DNA, 25 bp, Homo sapien
tgatgttctgtaagacttgtccttt

SEQ ID NO: 1841897 - DNA, 25 bp, Homo sapien
ttctttgtggtggatttcctgatgg

SEQ ID NO: 1841898 - DNA, 25 bp, Homo sapien
tgctgagtaagtatggaacgccgac

SEQ ID NO: 1841899 - DNA, 25 bp, Homo sapien
tattacactgagtgcactgataagg

SEQ ID NO: 1841900 - DNA, 25 bp, Homo sapien
cttggcgccggtatgaactccttga

SEQ ID NO: 1841901 - DNA, 25 bp, Homo sapien
cttgatatggtgaaagaggcctgct

SEQ ID NO: 1841902 - DNA, 25 bp, Homo sapien
gcacagttctcccacggaaagcttt

SEQ ID NO: 1841903 - DNA, 25 bp, Homo sapien
tgtgagtgctgactaaaagcttttc

SEQ ID NO: 1841904 - DNA, 25 bp, Homo sapien
ctgatgttctatgaggtgtgagtgc

SEQ ID NO: 1841905 - DNA, 25 bp, Homo sapien
ttttgtgtcgaataagcacagttct

SEQ ID NO: 1841906 - DNA, 25 bp, Homo sapien
tctcagtcaggcttactccattttc

SEQ ID NO: 1841907 - DNA, 25 bp, Homo sapien
cacaggtaggttgtttatcttctct

SEQ ID NO: 1841908 - DNA, 25 bp, Homo sapien
ttcaggttcacgagtttctccacac

SEQ ID NO: 1841909 - DNA, 25 bp, Homo sapien
gatgttcagtatggtcagagttctc

SEQ ID NO: 1841910 - DNA, 25 bp, Homo sapien
tagcagacttggacatatcattttc

SEQ ID NO: 1841911 - DNA, 25 bp, Homo sapien
gcagacttggacatatcattttcaa

SEQ ID NO: 1841912 - DNA, 25 bp, Homo sapien
ctagcagacttggacatatcatttt

SEQ ID NO: 1841913 - DNA, 25 bp, Homo sapien
agcagacttggacatatcattttca

SEQ ID NO: 1841914 - DNA, 25 bp, Homo sapien
aaatgcaagagtctaccatcttagt

SEQ ID NO: 1841915 - DNA, 25 bp, Homo sapien
aatgcaagagtctaccatcttagtg

SEQ ID NO: 1841916 - DNA, 25 bp, Homo sapien
aaaatgcaagagtctaccatcttag

SEQ ID NO: 1841917 - DNA, 25 bp, Homo sapien
tatctggaaggacacacgaaaaatt

SEQ ID NO: 1841918 - DNA, 25 bp, Homo sapien
aaaaatatctggaaggacacacgaa

SEQ ID NO: 1841919 - DNA, 25 bp, Homo sapien
tggaaggacacacgaaaaattagta

SEQ ID NO: 1841920 - DNA, 25 bp, Homo sapien
acatatgcatcaaaaaaatatctgg

SEQ ID NO: 1841921 - DNA, 25 bp, Homo sapien
tagaaataaggtagcggatctttca

SEQ ID NO: 1841922 - DNA, 25 bp, Homo sapien
agaaataaggtagcggatctttcac

SEQ ID NO: 1841923 - DNA, 25 bp, Homo sapien
aataaggtagcggatctttcacaca

SEQ ID NO: 1841924 - DNA, 25 bp, Homo sapien
taaggtagcggatctttcacacatt

SEQ ID NO: 1841925 - DNA, 25 bp, Homo sapien
cagaaaggatatagtgcaagtggaa

SEQ ID NO: 1841926 - DNA, 25 bp, Homo sapien
taatggagcaaaggcttatttagtg

SEQ ID NO: 1841927 - DNA, 25 bp, Homo sapien
ttgtctgataggataaaggctaaaa

SEQ ID NO: 1841928 - DNA, 25 bp, Homo sapien
caagtggaagatagaggtattgtct

SEQ ID NO: 1841929 - DNA, 25 bp, Homo sapien
ggagattcatactttggctgggctt

SEQ ID NO: 1841930 - DNA, 25 bp, Homo sapien
gtctcctgcaagaacatttcctgtt

SEQ ID NO: 1841931 - DNA, 25 bp, Homo sapien
ttcatggactggagggacatactgg

SEQ ID NO: 1841932 - DNA, 25 bp, Homo sapien
cttttcgtagacgtaccgtctcctg

SEQ ID NO: 1841933 - DNA, 25 bp, Homo sapien
ctgaggaaaatgagatgtagctgac

SEQ ID NO: 1841934 - DNA, 25 bp, Homo sapien
aaagttctcggagtcggctcaaagc

SEQ ID NO: 1841935 - DNA, 25 bp, Homo sapien
caggtcccaatcctgtctggtggta

SEQ ID NO: 1841936 - DNA, 25 bp, Homo sapien
ctgacggaagacctctctgctatgg

SEQ ID NO: 1841937 - DNA, 25 bp, Homo sapien
tatgggtgttgtttttacgcaggtc

SEQ ID NO: 1841938 - DNA, 25 bp, Homo sapien
ctttacttccaaaggttcatcctgg

SEQ ID NO: 1841939 - DNA, 25 bp, Homo sapien
ctctatctttacttccaaaggttca

SEQ ID NO: 1841940 - DNA, 25 bp, Homo sapien
tatctttacttccaaaggttcatcc

SEQ ID NO: 1841941 - DNA, 25 bp, Homo sapien
acttccaaaggttcatcctggtcca

SEQ ID NO: 1841942 - DNA, 25 bp, Homo sapien
gtgtttcaagtaagatctcacctgg

SEQ ID NO: 1841943 - DNA, 25 bp, Homo sapien
caagtaagatctcacctggaaactg

SEQ ID NO: 1841944 - DNA, 25 bp, Homo sapien
tttagctgtgctagaactaccggtg

SEQ ID NO: 1841945 - DNA, 25 bp, Homo sapien
gtgctagaactaccggtgtttcaag

SEQ ID NO: 1841946 - DNA, 25 bp, Homo sapien
ctgacctccggattaatgtacaata

SEQ ID NO: 1841947 - DNA, 25 bp, Homo sapien
ctgagaacttaactatgacctttga

SEQ ID NO: 1841948 - DNA, 25 bp, Homo sapien
tatgacctttgaaatctgacctccg

SEQ ID NO: 1841949 - DNA, 25 bp, Homo sapien
aactccaccataaagtaaaactgca

SEQ ID NO: 1841950 - DNA, 25 bp, Homo sapien
agttgtttcaggacttaagagtaag

SEQ ID NO: 1841951 - DNA, 25 bp, Homo sapien
tgtttcaggacttaagagtaagact

SEQ ID NO: 1841952 - DNA, 25 bp, Homo sapien
gacttgttggtaaacttattctcat

SEQ ID NO: 1841953 - DNA, 25 bp, Homo sapien
agacttgttggtaaacttattctca

SEQ ID NO: 1841954 - DNA, 25 bp, Homo sapien
ctaaatgaaagacaaatggaataaa

SEQ ID NO: 1841955 - DNA, 25 bp, Homo sapien
ggacgccggcgagcgtctgtgaccc

SEQ ID NO: 1841956 - DNA, 25 bp, Homo sapien
taggacgccggcgagcgtctgtgac

SEQ ID NO: 1841957 - DNA, 25 bp, Homo sapien
ctaggacgccggcgagcgtctgtga

SEQ ID NO: 1841958 - DNA, 25 bp, Homo sapien
acgccggcgagcgtctgtgacccac

SEQ ID NO: 1841959 - DNA, 25 bp, Homo sapien
gggagccaaaccctcatcctaatgt

SEQ ID NO: 1841960 - DNA, 25 bp, Homo sapien
tcgcagcgtacagagcacaacatcg

SEQ ID NO: 1841961 - DNA, 25 bp, Homo sapien
gcaaacgcggaaggtatgggcctta

SEQ ID NO: 1841962 - DNA, 25 bp, Homo sapien
ggtaagcgctgaacccaaggataca

SEQ ID NO: 1841963 - DNA, 25 bp, Homo sapien
cccagggccagaagagaactccctc

SEQ ID NO: 1841964 - DNA, 25 bp, Homo sapien
ctgcggcccccagggccagaagaga

SEQ ID NO: 1841965 - DNA, 25 bp, Homo sapien
ggcccccagggccagaagagaactc

SEQ ID NO: 1841966 - DNA, 25 bp, Homo sapien
ccccagggccagaagagaactccct

SEQ ID NO: 1841967 - DNA, 25 bp, Homo sapien
aggcaagaggcctcgaacccttttg

SEQ ID NO: 1841968 - DNA, 25 bp, Homo sapien
tcaactcggtagtgtttccgcgcgt

SEQ ID NO: 1841969 - DNA, 25 bp, Homo sapien
ttcaactcggtagtgtttccgcgcg

SEQ ID NO: 1841970 - DNA, 25 bp, Homo sapien
tcattgcaataacagtgctcctctc

SEQ ID NO: 1841971 - DNA, 25 bp, Homo sapien
tttgtactcagagatggtaaaacag

SEQ ID NO: 1841972 - DNA, 25 bp, Homo sapien
taagggctaacaactggcaggatgc

SEQ ID NO: 1841973 - DNA, 25 bp, Homo sapien
gaaatgttcgccacactcattgcaa

SEQ ID NO: 1841974 - DNA, 25 bp, Homo sapien
taggagccagatcatcttaatctgg

SEQ ID NO: 1841975 - DNA, 25 bp, Homo sapien
taaagtttacataggagccagatca

SEQ ID NO: 1841976 - DNA, 25 bp, Homo sapien
cccggctaagataaagtttacatag

SEQ ID NO: 1841977 - DNA, 25 bp, Homo sapien
ctaagataaagtttacataggagcc

SEQ ID NO: 1841978 - DNA, 25 bp, Homo sapien
gaataaggaatgaacgttaaagaga

SEQ ID NO: 1841979 - DNA, 25 bp, Homo sapien
tgaataaggaatgaacgttaaagag

SEQ ID NO: 1841980 - DNA, 25 bp, Homo sapien
ctgaaagggtttctttccaacatgg

SEQ ID NO: 1841981 - DNA, 25 bp, Homo sapien
tgaaagggtttctttccaacatgga

SEQ ID NO: 1841982 - DNA, 25 bp, Homo sapien
actgaaagggtttctttccaacatg

SEQ ID NO: 1841983 - DNA, 25 bp, Homo sapien
cactgaaagggtttctttccaacat

SEQ ID NO: 1841984 - DNA, 25 bp, Homo sapien
ctgatatgatgaaaaagctgaattc

SEQ ID NO: 1841985 - DNA, 25 bp, Homo sapien
gctgaattctgactgtgaactttac

SEQ ID NO: 1841986 - DNA, 25 bp, Homo sapien
gaaaaagctgaattctgactgtgaa

SEQ ID NO: 1841987 - DNA, 25 bp, Homo sapien
tatgatgaaaaagctgaattctgac

SEQ ID NO: 1841988 - DNA, 25 bp, Homo sapien
tcttaacgatgaatgagtccagtgt

SEQ ID NO: 1841989 - DNA, 25 bp, Homo sapien
taacatatctccctggtgtgaagcc

SEQ ID NO: 1841990 - DNA, 25 bp, Homo sapien
ctggttgaggactgaccactggcca

SEQ ID NO: 1841991 - DNA, 25 bp, Homo sapien
tatcttatttgcatgaagcctacac

SEQ ID NO: 1841992 - DNA, 25 bp, Homo sapien
tgaattaggacagagttctgagcaa

SEQ ID NO: 1841993 - DNA, 25 bp, Homo sapien
ctgaattaggacagagttctgagca

SEQ ID NO: 1841994 - DNA, 25 bp, Homo sapien
taggacagagttctgagcaaaaatt

SEQ ID NO: 1841995 - DNA, 25 bp, Homo sapien
aattaggacagagttctgagcaaaa

SEQ ID NO: 1841996 - DNA, 25 bp, Homo sapien
gcatgcatgcgtgctttcccagtaa

SEQ ID NO: 1841997 - DNA, 25 bp, Homo sapien
gcaaaacccatgctgtgtgcaactc

SEQ ID NO: 1841998 - DNA, 25 bp, Homo sapien
tacactatttgcgttgggacacttc

SEQ ID NO: 1841999 - DNA, 25 bp, Homo sapien
ttgaccctttactggctggagccgg

SEQ ID NO: 1842000 - DNA, 25 bp, Homo sapien
gatggtcaggatcagtagttccaag

SEQ ID NO: 1842001 - DNA, 25 bp, Homo sapien
cagcagtgcgtatgcttcaggctga

SEQ ID NO: 1842002 - DNA, 25 bp, Homo sapien
tgcattcctgggtgaaacagctcag

SEQ ID NO: 1842003 - DNA, 25 bp, Homo sapien
tgggatgctcctatacccaggcctg

SEQ ID NO: 1842004 - DNA, 25 bp, Homo sapien
taggaccctgctgtggattaggctg

SEQ ID NO: 1842005 - DNA, 25 bp, Homo sapien
cattagctcctatcaagaaaggcag

SEQ ID NO: 1842006 - DNA, 25 bp, Homo sapien
gccagcatgatccttaaggactcta

SEQ ID NO: 1842007 - DNA, 25 bp, Homo sapien
taacttgctgcagtgtctacactaa

SEQ ID NO: 1842008 - DNA, 25 bp, Homo sapien
caaactttcaatttgcagaaaacac

SEQ ID NO: 1842009 - DNA, 25 bp, Homo sapien
gaaacacgaagtgtgcacatgatgt

SEQ ID NO: 1842010 - DNA, 25 bp, Homo sapien
aaactttcaatttgcagaaaacaca

SEQ ID NO: 1842011 - DNA, 25 bp, Homo sapien
aacacgaagtgtgcacatgatgttg

SEQ ID NO: 1842012 - DNA, 25 bp, Homo sapien
tcactctgcccccaagggtcaaatg

SEQ ID NO: 1842013 - DNA, 25 bp, Homo sapien
caagggtcaaatgcaataatcaaca

SEQ ID NO: 1842014 - DNA, 25 bp, Homo sapien
tgcccccaagggtcaaatgcaataa

SEQ ID NO: 1842015 - DNA, 25 bp, Homo sapien
ccccaagggtcaaatgcaataatca

SEQ ID NO: 1842016 - DNA, 25 bp, Homo sapien
actgcaagctctgatccagtactct

SEQ ID NO: 1842017 - DNA, 25 bp, Homo sapien
gtttgccttaacactgcaagctctg

SEQ ID NO: 1842018 - DNA, 25 bp, Homo sapien
tgtttgccttaacactgcaagctct

SEQ ID NO: 1842019 - DNA, 25 bp, Homo sapien
tctgatccagtactctatcttctca

SEQ ID NO: 1842020 - DNA, 25 bp, Homo sapien
tcttctacagtataaggttgaacac

SEQ ID NO: 1842021 - DNA, 25 bp, Homo sapien
cactgaaacactcctgtgcttccag

SEQ ID NO: 1842022 - DNA, 25 bp, Homo sapien
catcggtccctataccactgaaaca

SEQ ID NO: 1842023 - DNA, 25 bp, Homo sapien
aaggttgaacactgtactccatcgg

SEQ ID NO: 1842024 - DNA, 25 bp, Homo sapien
tgttgtttgcagatgcctacagtgg

SEQ ID NO: 1842025 - DNA, 25 bp, Homo sapien
gtttgcagatgcctacagtgggtct

SEQ ID NO: 1842026 - DNA, 25 bp, Homo sapien
ttgtttgcagatgcctacagtgggt

SEQ ID NO: 1842027 - DNA, 25 bp, Homo sapien
tttgcagatgcctacagtgggtctc

SEQ ID NO: 1842028 - DNA, 25 bp, Homo sapien
tatttgttatgaggagccactgagc

SEQ ID NO: 1842029 - DNA, 25 bp, Homo sapien
cactgagctgctaataacatatggc

SEQ ID NO: 1842030 - DNA, 25 bp, Homo sapien
gaaactaggtctacagcatacatga

SEQ ID NO: 1842031 - DNA, 25 bp, Homo sapien
tggtgatataatgcctccagtggct

SEQ ID NO: 1842032 - DNA, 25 bp, Homo sapien
cacaaacactgcactggtagcgctt

SEQ ID NO: 1842033 - DNA, 25 bp, Homo sapien
tccaaggagctagcttgattcagcc

SEQ ID NO: 1842034 - DNA, 25 bp, Homo sapien
gcttaatgaggactgaacgtcgact

SEQ ID NO: 1842035 - DNA, 25 bp, Homo sapien
tctctggtgctggaataggcctgac

SEQ ID NO: 1842036 - DNA, 25 bp, Homo sapien
caagaacttgtataagagatttcac

SEQ ID NO: 1842037 - DNA, 25 bp, Homo sapien
ttttccaagaacttgtataagagat

SEQ ID NO: 1842038 - DNA, 25 bp, Homo sapien
cttgtataagagatttcacttcctg

SEQ ID NO: 1842039 - DNA, 25 bp, Homo sapien
gaacttgtataagagatttcacttc

SEQ ID NO: 1842040 - DNA, 25 bp, Homo sapien
gctaactccacattccaagtcccag

SEQ ID NO: 1842041 - DNA, 25 bp, Homo sapien
ctccacattccaagtcccagccttg

SEQ ID NO: 1842042 - DNA, 25 bp, Homo sapien
tcttcctgttcatgagcatggctca

SEQ ID NO: 1842043 - DNA, 25 bp, Homo sapien
aaattatacccaagttgctcttcca

SEQ ID NO: 1842044 - DNA, 25 bp, Homo sapien
tgggcacacctctcgcaaattatac

SEQ ID NO: 1842045 - DNA, 25 bp, Homo sapien
catttgatgactcctgagctgctcc

SEQ ID NO: 1842046 - DNA, 25 bp, Homo sapien
aggtacaaatccctgttctcccatc

SEQ ID NO: 1842047 - DNA, 25 bp, Homo sapien
ataggtacaaatccctgttctccca

SEQ ID NO: 1842048 - DNA, 25 bp, Homo sapien
acaaatccctgttctcccatcttct

SEQ ID NO: 1842049 - DNA, 25 bp, Homo sapien
ttataggtacaaatccctgttctcc

SEQ ID NO: 1842050 - DNA, 25 bp, Homo sapien
tctcctgggtcatccagctctctct

SEQ ID NO: 1842051 - DNA, 25 bp, Homo sapien
ctctccactcacaggacggtgctgt

SEQ ID NO: 1842052 - DNA, 25 bp, Homo sapien
tccactcacaggacggtgctgtctg

SEQ ID NO: 1842053 - DNA, 25 bp, Homo sapien
aatcctccagcacagtcactgcctc

SEQ ID NO: 1842054 - DNA, 25 bp, Homo sapien
gaactgcctgaagcgtctacgaaag

SEQ ID NO: 1842055 - DNA, 25 bp, Homo sapien
tggagtctttgaagagcctcccggg

SEQ ID NO: 1842056 - DNA, 25 bp, Homo sapien
tatgagggttatttcttgacaggcc

SEQ ID NO: 1842057 - DNA, 25 bp, Homo sapien
gaaagatctctctggtatgagggtt

SEQ ID NO: 1842058 - DNA, 25 bp, Homo sapien
tctattcttgataattctcccttga

SEQ ID NO: 1842059 - DNA, 25 bp, Homo sapien
taatctattcttgataattctccct

SEQ ID NO: 1842060 - DNA, 25 bp, Homo sapien
tgataattctcccttgatcttttct

SEQ ID NO: 1842061 - DNA, 25 bp, Homo sapien
tcttgataattctcccttgatcttt

SEQ ID NO: 1842062 - DNA, 25 bp, Homo sapien
ctgcagcttgattcaaatctcacat

SEQ ID NO: 1842063 - DNA, 25 bp, Homo sapien
tctgcagcttgattcaaatctcaca

SEQ ID NO: 1842064 - DNA, 25 bp, Homo sapien
catgaaccatagtgccaggccatct

SEQ ID NO: 1842065 - DNA, 25 bp, Homo sapien
tcccttagggccaagactgtaatct

SEQ ID NO: 1842066 - DNA, 25 bp, Homo sapien
gatgagtgggtgaaaacatgcacac

SEQ ID NO: 1842067 - DNA, 25 bp, Homo sapien
caggccatctgtgaattttaacgca

SEQ ID NO: 1842068 - DNA, 25 bp, Homo sapien
gaagagctcaggaacagacataggg

SEQ ID NO: 1842069 - DNA, 25 bp, Homo sapien
gggcaacgacgctgacttttggtta

SEQ ID NO: 1842070 - DNA, 25 bp, Homo sapien
cagatacggagagttcagagtgcca

SEQ ID NO: 1842071 - DNA, 25 bp, Homo sapien
agttagactaagaaaggctgtggca

SEQ ID NO: 1842072 - DNA, 25 bp, Homo sapien
agaggagatgccacctagcgcagat

SEQ ID NO: 1842073 - DNA, 25 bp, Homo sapien
ccttgacaaccgcagcccaaagaat

SEQ ID NO: 1842074 - DNA, 25 bp, Homo sapien
tgccacctagcgcagatcacatctg

SEQ ID NO: 1842075 - DNA, 25 bp, Homo sapien
acaaccgcagcccaaagaatgataa

SEQ ID NO: 1842076 - DNA, 25 bp, Homo sapien
catcatagcagaaatgctccactgt

SEQ ID NO: 1842077 - DNA, 25 bp, Homo sapien
ctaccctttagagaattggcacctt

SEQ ID NO: 1842078 - DNA, 25 bp, Homo sapien
acagagtctaccctttagagaattg

SEQ ID NO: 1842079 - DNA, 25 bp, Homo sapien
gagtctaccctttagagaattggca

SEQ ID NO: 1842080 - DNA, 25 bp, Homo sapien
taccttggaggcttacagacagcca

SEQ ID NO: 1842081 - DNA, 25 bp, Homo sapien
gccacgatgccaagaaggacacatt

SEQ ID NO: 1842082 - DNA, 25 bp, Homo sapien
cacatagcagtctaaggccacgatg

SEQ ID NO: 1842083 - DNA, 25 bp, Homo sapien
ccagccatggatatttgacaaagcc

SEQ ID NO: 1842084 - DNA, 25 bp, Homo sapien
ctttaaccaactaagccatagagcc

SEQ ID NO: 1842085 - DNA, 25 bp, Homo sapien
tacaagacaggcgctttaaccaact

SEQ ID NO: 1842086 - DNA, 25 bp, Homo sapien
ccaggatctcctgtttacaagacag

SEQ ID NO: 1842087 - DNA, 25 bp, Homo sapien
aaggctctactgggattcgaaccca

SEQ ID NO: 1842088 - DNA, 25 bp, Homo sapien
taatccagcgtcttagaccactcgg

SEQ ID NO: 1842089 - DNA, 25 bp, Homo sapien
agagactggagccttaatccagcgt

SEQ ID NO: 1842090 - DNA, 25 bp, Homo sapien
ccttaatccagcgtcttagaccact

SEQ ID NO: 1842091 - DNA, 25 bp, Homo sapien
agccttaatccagcgtcttagacca

SEQ ID NO: 1842092 - DNA, 25 bp, Homo sapien
tgaggactctgagatcgagtctcca

SEQ ID NO: 1842093 - DNA, 25 bp, Homo sapien
taggccgacgcagcacggggactct

SEQ ID NO: 1842094 - DNA, 25 bp, Homo sapien
ctccagtttgtcagctgcgtttggg

SEQ ID NO: 1842095 - DNA, 25 bp, Homo sapien
cccggaactcgcgtcttggtttatg

SEQ ID NO: 1842096 - DNA, 25 bp, Homo sapien
aatcatggggaattgaggctgtcct

SEQ ID NO: 1842097 - DNA, 25 bp, Homo sapien
caaattatctccctgaaggcatgga

SEQ ID NO: 1842098 - DNA, 25 bp, Homo sapien
tccaggtgaggacacgtggttgtca

SEQ ID NO: 1842099 - DNA, 25 bp, Homo sapien
catgccccatgggagatggcgttag

SEQ ID NO: 1842100 - DNA, 25 bp, Homo sapien
ctttaaccaactaagccatagagcc

SEQ ID NO: 1842101 - DNA, 25 bp, Homo sapien
tacgagacaggcgctttaaccaact

SEQ ID NO: 1842102 - DNA, 25 bp, Homo sapien
aggccccactgggagtcgaacccag

SEQ ID NO: 1842103 - DNA, 25 bp, Homo sapien
caggccccactgggagtcgaaccca

SEQ ID NO: 1842104 - DNA, 25 bp, Homo sapien
ttagggtacgtgaagctgccaaatt

SEQ ID NO: 1842105 - DNA, 25 bp, Homo sapien
gggtacgtgaagctgccaaatttat

SEQ ID NO: 1842106 - DNA, 25 bp, Homo sapien
gtacgtgaagctgccaaatttatca

SEQ ID NO: 1842107 - DNA, 25 bp, Homo sapien
gtgaagctgccaaatttatcagaga

SEQ ID NO: 1842108 - DNA, 25 bp, Homo sapien
cattctttcggggacctgcaaggag

SEQ ID NO: 1842109 - DNA, 25 bp, Homo sapien
aaccgatttcggctccgcgtccagg

SEQ ID NO: 1842110 - DNA, 25 bp, Homo sapien
ccgcccgcaggctttgaaccgattt

SEQ ID NO: 1842111 - DNA, 25 bp, Homo sapien
cgcaggctttgaaccgatttcggct

SEQ ID NO: 1842112 - DNA, 25 bp, Homo sapien
gggactgagacgactgagggttgag

SEQ ID NO: 1842113 - DNA, 25 bp, Homo sapien
aattcaggtgcgtctgcggggccca

SEQ ID NO: 1842114 - DNA, 25 bp, Homo sapien
gcaggcggggactgagacgactgag

SEQ ID NO: 1842115 - DNA, 25 bp, Homo sapien
ggccgggggaattcaggtgcgtctg

SEQ ID NO: 1842116 - DNA, 25 bp, Homo sapien
tctctgggcccggtagtatgcgaag

SEQ ID NO: 1842117 - DNA, 25 bp, Homo sapien
gcccggtagtatgcgaagacacgca

SEQ ID NO: 1842118 - DNA, 25 bp, Homo sapien
cgcccagaacgctttcgtggggttg

SEQ ID NO: 1842119 - DNA, 25 bp, Homo sapien
agcctctctgggcccggtagtatgc

SEQ ID NO: 1842120 - DNA, 25 bp, Homo sapien
aaaaagcaggcactcgaatcctagg

SEQ ID NO: 1842121 - DNA, 25 bp, Homo sapien
taactctctgctgcctactcctaaa

SEQ ID NO: 1842122 - DNA, 25 bp, Homo sapien
tttccacgtctttcatagtaaggac

SEQ ID NO: 1842123 - DNA, 25 bp, Homo sapien
aaacgcagccggcaaaaatgagacg

SEQ ID NO: 1842124 - DNA, 25 bp, Homo sapien
tgcagagggacctgacacgaagaga

SEQ ID NO: 1842125 - DNA, 25 bp, Homo sapien
tatgtgccaaggaaagttctagagc

SEQ ID NO: 1842126 - DNA, 25 bp, Homo sapien
gctctgagcaaccagttccagccgt

SEQ ID NO: 1842127 - DNA, 25 bp, Homo sapien
ccagccgtgcttttatatgtgccaa

SEQ ID NO: 1842128 - DNA, 25 bp, Homo sapien
cataatatgggactgggaaaacacc

SEQ ID NO: 1842129 - DNA, 25 bp, Homo sapien
tacatgagaactactgggtggcagg

SEQ ID NO: 1842130 - DNA, 25 bp, Homo sapien
tcattcagaatacagggacacccct

SEQ ID NO: 1842131 - DNA, 25 bp, Homo sapien
tgaatgcactaagggacaggcacca

SEQ ID NO: 1842132 - DNA, 25 bp, Homo sapien
ctagtgggtattgaactgctttagg

SEQ ID NO: 1842133 - DNA, 25 bp, Homo sapien
gatgtctgacttgactgtgctgact

SEQ ID NO: 1842134 - DNA, 25 bp, Homo sapien
tggtggaaccaatgcatgacaggga

SEQ ID NO: 1842135 - DNA, 25 bp, Homo sapien
atgcatgacagggactccatcgggc

SEQ ID NO: 1842136 - DNA, 25 bp, Homo sapien
tgctgactggagcctggtggaacca

SEQ ID NO: 1842137 - DNA, 25 bp, Homo sapien
ttccagcggatatcatggaccttca

SEQ ID NO: 1842138 - DNA, 25 bp, Homo sapien
tcatgggctcccagaagagttggct

SEQ ID NO: 1842139 - DNA, 25 bp, Homo sapien
gttccagcggatatcatggaccttc

SEQ ID NO: 1842140 - DNA, 25 bp, Homo sapien
cccagaagagttggcttgatgagcc

SEQ ID NO: 1842141 - DNA, 25 bp, Homo sapien
gtccaaccacaaccctagacatgag

SEQ ID NO: 1842142 - DNA, 25 bp, Homo sapien
aggagtccaaccacaaccctagaca

SEQ ID NO: 1842143 - DNA, 25 bp, Homo sapien
caaggagtccaaccacaaccctaga

SEQ ID NO: 1842144 - DNA, 25 bp, Homo sapien
gagtccaaccacaaccctagacatg

SEQ ID NO: 1842145 - DNA, 25 bp, Homo sapien
gagcatttctagctaacccatccat

SEQ ID NO: 1842146 - DNA, 25 bp, Homo sapien
agctaacccatccatgccaggttta

SEQ ID NO: 1842147 - DNA, 25 bp, Homo sapien
ttcagagcatttctagctaacccat

SEQ ID NO: 1842148 - DNA, 25 bp, Homo sapien
ccatgccaggtttatactcatgcac

SEQ ID NO: 1842149 - DNA, 25 bp, Homo sapien
aactggggacaaagccactacctgg

SEQ ID NO: 1842150 - DNA, 25 bp, Homo sapien
tggggacaaagccactacctggaca

SEQ ID NO: 1842151 - DNA, 25 bp, Homo sapien
actggggacaaagccactacctgga

SEQ ID NO: 1842152 - DNA, 25 bp, Homo sapien
gggacaaagccactacctggacaca

SEQ ID NO: 1842153 - DNA, 25 bp, Homo sapien
tgacaccaaaattcttcagctcctc

SEQ ID NO: 1842154 - DNA, 25 bp, Homo sapien
ctggttgcagggaaaggccaacaca

SEQ ID NO: 1842155 - DNA, 25 bp, Homo sapien
gaaaggccaacacaatgacaccaaa

SEQ ID NO: 1842156 - DNA, 25 bp, Homo sapien
cttcagctcctcctgtagtgcattc

SEQ ID NO: 1842157 - DNA, 25 bp, Homo sapien
cccactcatacaatgtcccatggtg

SEQ ID NO: 1842158 - DNA, 25 bp, Homo sapien
tcccatggtgacacaaccagacact

SEQ ID NO: 1842159 - DNA, 25 bp, Homo sapien
ccaggagtactccttggtgctccac

SEQ ID NO: 1842160 - DNA, 25 bp, Homo sapien
caggagtactccttggtgctccacc

SEQ ID NO: 1842161 - DNA, 25 bp, Homo sapien
tatagttcttcggttgctatcgaaa

SEQ ID NO: 1842162 - DNA, 25 bp, Homo sapien
gctatcgaaactcatctctctctta

SEQ ID NO: 1842163 - DNA, 25 bp, Homo sapien
tgtttttctatagttcttcggttgc

SEQ ID NO: 1842164 - DNA, 25 bp, Homo sapien
tcggttgctatcgaaactcatctct

SEQ ID NO: 1842165 - DNA, 25 bp, Homo sapien
ctgagctgccaagcctcaataggcg

SEQ ID NO: 1842166 - DNA, 25 bp, Homo sapien
caggatactgagctgccaagcctca

SEQ ID NO: 1842167 - DNA, 25 bp, Homo sapien
tactgagctgccaagcctcaatagg

SEQ ID NO: 1842168 - DNA, 25 bp, Homo sapien
gctgccaagcctcaataggcggcca

SEQ ID NO: 1842169 - DNA, 25 bp, Homo sapien
ttgaattggatgtactcctcgccgt

SEQ ID NO: 1842170 - DNA, 25 bp, Homo sapien
gggctccatactcatagatggtgcc

SEQ ID NO: 1842171 - DNA, 25 bp, Homo sapien
ctgttacccctttgttgcaatccac

SEQ ID NO: 1842172 - DNA, 25 bp, Homo sapien
attgacaaacaggacgtgcttgcct

SEQ ID NO: 1842173 - DNA, 25 bp, Homo sapien
caagacaggaggcctggaactgctg

SEQ ID NO: 1842174 - DNA, 25 bp, Homo sapien
gaggctttagggtctgctgagcaaa

SEQ ID NO: 1842175 - DNA, 25 bp, Homo sapien
cctattttgaggctttagggtctgc

SEQ ID NO: 1842176 - DNA, 25 bp, Homo sapien
gctgagcaaagccaaccaggaaaaa

SEQ ID NO: 1842177 - DNA, 25 bp, Homo sapien
gctaggagttttagacgactctgag

SEQ ID NO: 1842178 - DNA, 25 bp, Homo sapien
ggctaggagttttagacgactctga

SEQ ID NO: 1842179 - DNA, 25 bp, Homo sapien
ctaggagttttagacgactctgagg

SEQ ID NO: 1842180 - DNA, 25 bp, Homo sapien
taggagttttagacgactctgaggt

SEQ ID NO: 1842181 - DNA, 25 bp, Homo sapien
gccaggaagacagccaacatttgtc

SEQ ID NO: 1842182 - DNA, 25 bp, Homo sapien
tgatgcctttcacaagttgccacag

SEQ ID NO: 1842183 - DNA, 25 bp, Homo sapien
ctgtaaatattgtctgccccttctg

SEQ ID NO: 1842184 - DNA, 25 bp, Homo sapien
ggtgtttctatatcaaaacctggtg

SEQ ID NO: 1842185 - DNA, 25 bp, Homo sapien
gcctcagtgaaggctcaggtttagg

SEQ ID NO: 1842186 - DNA, 25 bp, Homo sapien
cttcaggaagtctgcgtgtcagggc

SEQ ID NO: 1842187 - DNA, 25 bp, Homo sapien
ttggcataaacaagagacccttcag

SEQ ID NO: 1842188 - DNA, 25 bp, Homo sapien
gctgcctcagtgaaggctcaggttt

SEQ ID NO: 1842189 - DNA, 25 bp, Homo sapien
caggtctctgttaacaccttggttc

SEQ ID NO: 1842190 - DNA, 25 bp, Homo sapien
gagaaagaagcttccggtcaacgac

SEQ ID NO: 1842191 - DNA, 25 bp, Homo sapien
aattcgccccgcgacgtgagggaga

SEQ ID NO: 1842192 - DNA, 25 bp, Homo sapien
tattgcggacagtctaattcgcccc

SEQ ID NO: 1842193 - DNA, 25 bp, Homo sapien
cctcaatcttctgatccgaagtcag

SEQ ID NO: 1842194 - DNA, 25 bp, Homo sapien
cgaagggattcgaaccctcaatctt

SEQ ID NO: 1842195 - DNA, 25 bp, Homo sapien
gaagtcagacgccttatccattagg

SEQ ID NO: 1842196 - DNA, 25 bp, Homo sapien
ccacgaagggattcgaaccctcaat

SEQ ID NO: 1842197 - DNA, 25 bp, Homo sapien
caaaactaggccctgctgaatagtc

SEQ ID NO: 1842198 - DNA, 25 bp, Homo sapien
accttctcagcttggcgtccaattc

SEQ ID NO: 1842199 - DNA, 25 bp, Homo sapien
ggcctggctccgcttggtaaccaaa

SEQ ID NO: 1842200 - DNA, 25 bp, Homo sapien
aatagaggcatcttcctaggcctgg

SEQ ID NO: 1842201 - DNA, 25 bp, Homo sapien
tgtgggtccatacagcttgatggaa

SEQ ID NO: 1842202 - DNA, 25 bp, Homo sapien
ggatcagaatcaagtccgtagaagg

SEQ ID NO: 1842203 - DNA, 25 bp, Homo sapien
ttagtgtgggtccatacagcttgat

SEQ ID NO: 1842204 - DNA, 25 bp, Homo sapien
agtccgtagaaggaatctttcagcc

SEQ ID NO: 1842205 - DNA, 25 bp, Homo sapien
tgagcagcagccttgtcactactcc

SEQ ID NO: 1842206 - DNA, 25 bp, Homo sapien
gcagccttgtcactactcctggctt

SEQ ID NO: 1842207 - DNA, 25 bp, Homo sapien
tgtcactactcctggctttgaactg

SEQ ID NO: 1842208 - DNA, 25 bp, Homo sapien
gccttgtcactactcctggctttga

SEQ ID NO: 1842209 - DNA, 25 bp, Homo sapien
tgggttgttcccaatatgggttata

SEQ ID NO: 1842210 - DNA, 25 bp, Homo sapien
cccaagattctcagtaagcattcat

SEQ ID NO: 1842211 - DNA, 25 bp, Homo sapien
tatatatacccactacttaatcaag

SEQ ID NO: 1842212 - DNA, 25 bp, Homo sapien
caaagacatggctcctcacaatgca

SEQ ID NO: 1842213 - DNA, 25 bp, Homo sapien
cagaagtagggtcagtggccagact

SEQ ID NO: 1842214 - DNA, 25 bp, Homo sapien
atagccctcagtcaggtagcccacg

SEQ ID NO: 1842215 - DNA, 25 bp, Homo sapien
catgtgcggttaagctctggtcgat

SEQ ID NO: 1842216 - DNA, 25 bp, Homo sapien
gacgccactgaccaggcctgaatgt

SEQ ID NO: 1842217 - DNA, 25 bp, Homo sapien
tggcaatttgaaaaatttgctctcc

SEQ ID NO: 1842218 - DNA, 25 bp, Homo sapien
gaaaaatttgctctcccaaagagat

SEQ ID NO: 1842219 - DNA, 25 bp, Homo sapien
gatttcagccacaaattcatttgca

SEQ ID NO: 1842220 - DNA, 25 bp, Homo sapien
tctgctttcaagtggaagaagaaaa

SEQ ID NO: 1842221 - DNA, 25 bp, Homo sapien
cacatatgtcagaatacaaagcaca

SEQ ID NO: 1842222 - DNA, 25 bp, Homo sapien
tatataattttaatgagccgaaggt

SEQ ID NO: 1842223 - DNA, 25 bp, Homo sapien
tgcaatccataacaacctcaggctt

SEQ ID NO: 1842224 - DNA, 25 bp, Homo sapien
tataactcctattactctctcaatc

SEQ ID NO: 1842225 - DNA, 25 bp, Homo sapien
tccataactgtaactagacagaaag

SEQ ID NO: 1842226 - DNA, 25 bp, Homo sapien
gcatactttgaaccaataccttaca

SEQ ID NO: 1842227 - DNA, 25 bp, Homo sapien
tgtttcactcataacttctcatact

SEQ ID NO: 1842228 - DNA, 25 bp, Homo sapien
gaaatagcaaattcctcacactcaa

SEQ ID NO: 1842229 - DNA, 25 bp, Homo sapien
gcaagttccttaatctgggttacca

SEQ ID NO: 1842230 - DNA, 25 bp, Homo sapien
gaccacatgggtttcttgccttgca

SEQ ID NO: 1842231 - DNA, 25 bp, Homo sapien
gattttcaatccttcgtcggtagcc

SEQ ID NO: 1842232 - DNA, 25 bp, Homo sapien
taaccaccgtatctcagcatgcagt

SEQ ID NO: 1842233 - DNA, 25 bp, Homo sapien
atctacggcagatattcaatcttac

SEQ ID NO: 1842234 - DNA, 25 bp, Homo sapien
tcatctacggcagatattcaatctt

SEQ ID NO: 1842235 - DNA, 25 bp, Homo sapien
catctacggcagatattcaatctta

SEQ ID NO: 1842236 - DNA, 25 bp, Homo sapien
gagcatgtgcaacttccgtaggcct

SEQ ID NO: 1842237 - DNA, 25 bp, Homo sapien
cagattgtaggacactgggtgctcc

SEQ ID NO: 1842238 - DNA, 25 bp, Homo sapien
tacaagttatttgccgaccacagcc

SEQ ID NO: 1842239 - DNA, 25 bp, Homo sapien
tcaaatctagccaagcgacggtagt

SEQ ID NO: 1842240 - DNA, 25 bp, Homo sapien
catttgaggagtaagttccaaccta

SEQ ID NO: 1842241 - DNA, 25 bp, Homo sapien
ggaggaacctcagcaagacaataat

SEQ ID NO: 1842242 - DNA, 25 bp, Homo sapien
tcagtcaggttagctattacatcaa

SEQ ID NO: 1842243 - DNA, 25 bp, Homo sapien
tttagggctattaactacaaactca

SEQ ID NO: 1842244 - DNA, 25 bp, Homo sapien
tacagtgtccacgtattgatttatg

SEQ ID NO: 1842245 - DNA, 25 bp, Homo sapien
tatgacctgtaagccccttctctga

SEQ ID NO: 1842246 - DNA, 25 bp, Homo sapien
gaggactgaactccaaccgctgctt

SEQ ID NO: 1842247 - DNA, 25 bp, Homo sapien
gcctggaagaagtcacacccgcaag

SEQ ID NO: 1842248 - DNA, 25 bp, Homo sapien
tgtggctctggagattcacattcca

SEQ ID NO: 1842249 - DNA, 25 bp, Homo sapien
tcctgcccatatgtgccctgtgaga

SEQ ID NO: 1842250 - DNA, 25 bp, Homo sapien
gactgaagctgggtgcctaaagact

SEQ ID NO: 1842251 - DNA, 25 bp, Homo sapien
tgcagaatccagagggatcatttct

SEQ ID NO: 1842252 - DNA, 25 bp, Homo sapien
gtaggtgcatttggtaaacaataca

SEQ ID NO: 1842253 - DNA, 25 bp, Homo sapien
ctgtggacaagtaggtgcatttggt

SEQ ID NO: 1842254 - DNA, 25 bp, Homo sapien
caatacaaataattgtagtttgtca

SEQ ID NO: 1842255 - DNA, 25 bp, Homo sapien
tgtagtttgtcatagctaaacttgt

SEQ ID NO: 1842256 - DNA, 25 bp, Homo sapien
atcctgtgtgtcagattgcagcagc

SEQ ID NO: 1842257 - DNA, 25 bp, Homo sapien
cctgtgtgtcagattgcagcagctc

SEQ ID NO: 1842258 - DNA, 25 bp, Homo sapien
agcagctccgcattatcctcactag

SEQ ID NO: 1842259 - DNA, 25 bp, Homo sapien
tatcctcactagcaacttcttcaaa

SEQ ID NO: 1842260 - DNA, 25 bp, Homo sapien
taacactggcagttgttccagctag

SEQ ID NO: 1842261 - DNA, 25 bp, Homo sapien
catcaacttgctgggaaaactcata

SEQ ID NO: 1842262 - DNA, 25 bp, Homo sapien
tgtaaataagtgcttccaagacagc

SEQ ID NO: 1842263 - DNA, 25 bp, Homo sapien
tgtgctcagctacatcagatactct

SEQ ID NO: 1842264 - DNA, 25 bp, Homo sapien
gaagatggcacctccaatttctcac

SEQ ID NO: 1842265 - DNA, 25 bp, Homo sapien
cagggtttccaaccaccagcgcgaa

SEQ ID NO: 1842266 - DNA, 25 bp, Homo sapien
ccagcgcgaaattactcccattact

SEQ ID NO: 1842267 - DNA, 25 bp, Homo sapien
ttctggatccatgcacccaaattct

SEQ ID NO: 1842268 - DNA, 25 bp, Homo sapien
ttctccactctcaggattatgctcc

SEQ ID NO: 1842269 - DNA, 25 bp, Homo sapien
tgctgtctaggttcatcaagctccc

SEQ ID NO: 1842270 - DNA, 25 bp, Homo sapien
tatgctcccgcacccaagactggag

SEQ ID NO: 1842271 - DNA, 25 bp, Homo sapien
cactgacggcaaagttcccgcagtt

SEQ ID NO: 1842272 - DNA, 25 bp, Homo sapien
tgaagcgctgacgagagagttccct

SEQ ID NO: 1842273 - DNA, 25 bp, Homo sapien
tgatcccaagtgtggtcttcttctt

SEQ ID NO: 1842274 - DNA, 25 bp, Homo sapien
tataagacaaattcctacgtagggc

SEQ ID NO: 1842275 - DNA, 25 bp, Homo sapien
gagagagttccctggtataagacaa

SEQ ID NO: 1842276 - DNA, 25 bp, Homo sapien
caaggctgggaagaccctagagact

SEQ ID NO: 1842277 - DNA, 25 bp, Homo sapien
tgggaagaccctagagactgcttcc

SEQ ID NO: 1842278 - DNA, 25 bp, Homo sapien
ggaagaccctagagactgcttccat

SEQ ID NO: 1842279 - DNA, 25 bp, Homo sapien
gccaaggctgggaagaccctagaga

SEQ ID NO: 1842280 - DNA, 25 bp, Homo sapien
cccgagcttagacagctcaggcaaa

SEQ ID NO: 1842281 - DNA, 25 bp, Homo sapien
cttagacagctcaggcaaaggttct

SEQ ID NO: 1842282 - DNA, 25 bp, Homo sapien
gacagctcaggcaaaggttctctcc

SEQ ID NO: 1842283 - DNA, 25 bp, Homo sapien
cagctcaggcaaaggttctctccag

SEQ ID NO: 1842284 - DNA, 25 bp, Homo sapien
tgttcttggtcaggaaagtttttga

SEQ ID NO: 1842285 - DNA, 25 bp, Homo sapien
ctaggcaaatgggtgattttacttg

SEQ ID NO: 1842286 - DNA, 25 bp, Homo sapien
caacacaggacaactacagactcag

SEQ ID NO: 1842287 - DNA, 25 bp, Homo sapien
tgattttacttgagctccttttttg

SEQ ID NO: 1842288 - DNA, 25 bp, Homo sapien
cagttactcgggcaattccattgaa

SEQ ID NO: 1842289 - DNA, 25 bp, Homo sapien
caacacagggcagttactcgggcaa

SEQ ID NO: 1842290 - DNA, 25 bp, Homo sapien
cagggcagttactcgggcaattcca

SEQ ID NO: 1842291 - DNA, 25 bp, Homo sapien
gacaacacagggcagttactcgggc

SEQ ID NO: 1842292 - DNA, 25 bp, Homo sapien
gatacttgcgagacagaaaaccgag

SEQ ID NO: 1842293 - DNA, 25 bp, Homo sapien
tctacagctcaggtggaggttccgc

SEQ ID NO: 1842294 - DNA, 25 bp, Homo sapien
taaagcctgggtgtatgagcctagg

SEQ ID NO: 1842295 - DNA, 25 bp, Homo sapien
cctaggcaaggaaacgaagatcgga

SEQ ID NO: 1842296 - DNA, 25 bp, Homo sapien
cagctgtgcccgtaggttccggccg

SEQ ID NO: 1842297 - DNA, 25 bp, Homo sapien
gcagctgtgcccgtaggttccggcc

SEQ ID NO: 1842298 - DNA, 25 bp, Homo sapien
ccgcagctgtgcccgtaggttccgg

SEQ ID NO: 1842299 - DNA, 25 bp, Homo sapien
agctgtgcccgtaggttccggccgg

SEQ ID NO: 1842300 - DNA, 25 bp, Homo sapien
ttccggtccgctctaggattccagg

SEQ ID NO: 1842301 - DNA, 25 bp, Homo sapien
gattccaggtggtgccgtcttctca

SEQ ID NO: 1842302 - DNA, 25 bp, Homo sapien
tgtgcaaacacctacggtaccagta

SEQ ID NO: 1842303 - DNA, 25 bp, Homo sapien
gccgtcttctcactggttgtgcaaa

SEQ ID NO: 1842304 - DNA, 25 bp, Homo sapien
ctctggtagcgcagagatgcccaag

SEQ ID NO: 1842305 - DNA, 25 bp, Homo sapien
tatttgttgaattgctgcctggttc

SEQ ID NO: 1842306 - DNA, 25 bp, Homo sapien
gagatgcccaaggaatatttgttga

SEQ ID NO: 1842307 - DNA, 25 bp, Homo sapien
ggttcccttctccattctctgtttc

SEQ ID NO: 1842308 - DNA, 25 bp, Homo sapien
cgctgtggaccttgcgccccgggtt

SEQ ID NO: 1842309 - DNA, 25 bp, Homo sapien
ttttcgctgtggaccttgcgccccg

SEQ ID NO: 1842310 - DNA, 25 bp, Homo sapien
ttcgctgtggaccttgcgccccggg

SEQ ID NO: 1842311 - DNA, 25 bp, Homo sapien
gctgtggaccttgcgccccgggtta

SEQ ID NO: 1842312 - DNA, 25 bp, Homo sapien
tgctttctctagtcccctgtacttc

SEQ ID NO: 1842313 - DNA, 25 bp, Homo sapien
atcccccatcttgatgagacaattc

SEQ ID NO: 1842314 - DNA, 25 bp, Homo sapien
tgtacttcttagtctctccgctcac

SEQ ID NO: 1842315 - DNA, 25 bp, Homo sapien
tgagacaattcaccctcatctgctt

SEQ ID NO: 1842316 - DNA, 25 bp, Homo sapien
cgactgcaacgtctggaaatccctc

SEQ ID NO: 1842317 - DNA, 25 bp, Homo sapien
gtatccacggcgtcgagtcttccag

SEQ ID NO: 1842318 - DNA, 25 bp, Homo sapien
tcttccagccggagagaaaaactca

SEQ ID NO: 1842319 - DNA, 25 bp, Homo sapien
gagggctcgggtccctggtatccac

SEQ ID NO: 1842320 - DNA, 25 bp, Homo sapien
cgaagcatccgggaaacagtccctt

SEQ ID NO: 1842321 - DNA, 25 bp, Homo sapien
gcatccgggaaacagtcccttggag

SEQ ID NO: 1842322 - DNA, 25 bp, Homo sapien
actaccaaacactcggtccgaagca

SEQ ID NO: 1842323 - DNA, 25 bp, Homo sapien
gtccgaagcatccgggaaacagtcc

SEQ ID NO: 1842324 - DNA, 25 bp, Homo sapien
acagaaaatgtagccgctatcttgc

SEQ ID NO: 1842325 - DNA, 25 bp, Homo sapien
gaacagaaaatgtagccgctatctt

SEQ ID NO: 1842326 - DNA, 25 bp, Homo sapien
gaaaatgtagccgctatcttgcctc

SEQ ID NO: 1842327 - DNA, 25 bp, Homo sapien
aaatgtagccgctatcttgcctccc

SEQ ID NO: 1842328 - DNA, 25 bp, Homo sapien
gcctgtttgggatgcttataagtcc

SEQ ID NO: 1842329 - DNA, 25 bp, Homo sapien
ctaatggcctaacagcctcttctgc

SEQ ID NO: 1842330 - DNA, 25 bp, Homo sapien
gcttataagtccagccatccttccg

SEQ ID NO: 1842331 - DNA, 25 bp, Homo sapien
atccttccgaccaacaccatagcct

SEQ ID NO: 1842332 - DNA, 25 bp, Homo sapien
gaggaagaattgtccctgagatttg

SEQ ID NO: 1842333 - DNA, 25 bp, Homo sapien
gttgctgaggaagaattgtccctga

SEQ ID NO: 1842334 - DNA, 25 bp, Homo sapien
aagtatgatcaatgttgctgaggaa

SEQ ID NO: 1842335 - DNA, 25 bp, Homo sapien
gatttgagagaatcttgtactcaga

SEQ ID NO: 1842336 - DNA, 25 bp, Homo sapien
agcacaatggattagcagtccatcg

SEQ ID NO: 1842337 - DNA, 25 bp, Homo sapien
gcacaatggattagcagtccatcgc

SEQ ID NO: 1842338 - DNA, 25 bp, Homo sapien
atggattagcagtccatcgccttaa

SEQ ID NO: 1842339 - DNA, 25 bp, Homo sapien
cacaatggattagcagtccatcgcc

SEQ ID NO: 1842340 - DNA, 25 bp, Homo sapien
gctatgctgatagtgcagataatgc

SEQ ID NO: 1842341 - DNA, 25 bp, Homo sapien
gctatgggaactatggctatgctga

SEQ ID NO: 1842342 - DNA, 25 bp, Homo sapien
catgcaggcctgagtgaaggagtac

SEQ ID NO: 1842343 - DNA, 25 bp, Homo sapien
gaaggagtaccttctggcagctatg

SEQ ID NO: 1842344 - DNA, 25 bp, Homo sapien
tgaactctaatcgtatatacttcag

SEQ ID NO: 1842345 - DNA, 25 bp, Homo sapien
tcctgaactctaatcgtatatactt

SEQ ID NO: 1842346 - DNA, 25 bp, Homo sapien
aactctaatcgtatatacttcagaa

SEQ ID NO: 1842347 - DNA, 25 bp, Homo sapien
cctgaactctaatcgtatatacttc

SEQ ID NO: 1842348 - DNA, 25 bp, Homo sapien
ggatctgggtgcctacgtgatgcct

SEQ ID NO: 1842349 - DNA, 25 bp, Homo sapien
actactctagacgtgcggatctggg

SEQ ID NO: 1842350 - DNA, 25 bp, Homo sapien
tgggtgcctacgtgatgcctctcac

SEQ ID NO: 1842351 - DNA, 25 bp, Homo sapien
ctcagagttttgtcggaggtaaact

SEQ ID NO: 1842352 - DNA, 25 bp, Homo sapien
ccagatttccagtttgtccttgtga

SEQ ID NO: 1842353 - DNA, 25 bp, Homo sapien
ccagtttgtccttgtgattgattca

SEQ ID NO: 1842354 - DNA, 25 bp, Homo sapien
tttccagtttgtccttgtgattgat

SEQ ID NO: 1842355 - DNA, 25 bp, Homo sapien
gatttccagtttgtccttgtgattg

SEQ ID NO: 1842356 - DNA, 25 bp, Homo sapien
tacatcaagcacttctaaatagctg

SEQ ID NO: 1842357 - DNA, 25 bp, Homo sapien
acaatatgcgcagtatagcaaagtt

SEQ ID NO: 1842358 - DNA, 25 bp, Homo sapien
tcaacgaacaagtagagagcacact

SEQ ID NO: 1842359 - DNA, 25 bp, Homo sapien
gcacataacatataaggcaatggat

SEQ ID NO: 1842360 - DNA, 25 bp, Homo sapien
tcttagtctatcatacatcggcagc

SEQ ID NO: 1842361 - DNA, 25 bp, Homo sapien
gtctatcatacatcggcagcttctt

SEQ ID NO: 1842362 - DNA, 25 bp, Homo sapien
catacatcggcagcttctttacatc

SEQ ID NO: 1842363 - DNA, 25 bp, Homo sapien
gatattcttagtctatcatacatcg

SEQ ID NO: 1842364 - DNA, 25 bp, Homo sapien
tggtgggcatctccaaagcgccaaa

SEQ ID NO: 1842365 - DNA, 25 bp, Homo sapien
cttatacactcgggccttctataaa

SEQ ID NO: 1842366 - DNA, 25 bp, Homo sapien
tctataaacgctggtacatcttccc

SEQ ID NO: 1842367 - DNA, 25 bp, Homo sapien
caaagcgtggtgggcatctccaaag

SEQ ID NO: 1842368 - DNA, 25 bp, Homo sapien
ccgttctactcgtcctcatccggga

SEQ ID NO: 1842369 - DNA, 25 bp, Homo sapien
ccatggccgttaccgttctactcgt

SEQ ID NO: 1842370 - DNA, 25 bp, Homo sapien
tcgtcctcatccgggactgcgctga

SEQ ID NO: 1842371 - DNA, 25 bp, Homo sapien
cccatggccgttaccgttctactcg

SEQ ID NO: 1842372 - DNA, 25 bp, Homo sapien
tctggccgttaaagccgttatccac

SEQ ID NO: 1842373 - DNA, 25 bp, Homo sapien
gaccaggtagtctcgcccaactggg

SEQ ID NO: 1842374 - DNA, 25 bp, Homo sapien
cactgttatcaggaccaggtagtct

SEQ ID NO: 1842375 - DNA, 25 bp, Homo sapien
gagcggtcgcccgaggaccggatct

SEQ ID NO: 1842376 - DNA, 25 bp, Homo sapien
aggcatacagcgtcagtgtgatacc

SEQ ID NO: 1842377 - DNA, 25 bp, Homo sapien
cagcgtcagtgtgataccagtaatt

SEQ ID NO: 1842378 - DNA, 25 bp, Homo sapien
catacagcgtcagtgtgataccagt

SEQ ID NO: 1842379 - DNA, 25 bp, Homo sapien
tacagcgtcagtgtgataccagtaa

SEQ ID NO: 1842380 - DNA, 25 bp, Homo sapien
tgcaaagcgcgcgttctaccactaa

SEQ ID NO: 1842381 - DNA, 25 bp, Homo sapien
gcgttctaccactaaactacatcca

SEQ ID NO: 1842382 - DNA, 25 bp, Homo sapien
tcatacatgcaaagcgcgcgttcta

SEQ ID NO: 1842383 - DNA, 25 bp, Homo sapien
gcgcgcgttctaccactaaactaca

SEQ ID NO: 1842384 - DNA, 25 bp, Homo sapien
atcttccgctcactgttattgccaa

SEQ ID NO: 1842385 - DNA, 25 bp, Homo sapien
tagcgctgattcttgttcaacgtac

SEQ ID NO: 1842386 - DNA, 25 bp, Homo sapien
ccgctcactgttattgccaaggtct

SEQ ID NO: 1842387 - DNA, 25 bp, Homo sapien
ttcaacgtacgtgctgctgagcaaa

SEQ ID NO: 1842388 - DNA, 25 bp, Homo sapien
tagcacagtctgaataaggcccata

SEQ ID NO: 1842389 - DNA, 25 bp, Homo sapien
gacattttagggacaattagcacag

SEQ ID NO: 1842390 - DNA, 25 bp, Homo sapien
aatagcagactaacccaaatagagg

SEQ ID NO: 1842391 - DNA, 25 bp, Homo sapien
ggctacagaacatgacaattcaaca

SEQ ID NO: 1842392 - DNA, 25 bp, Homo sapien
aggcgctttagccaactaagccaca

SEQ ID NO: 1842393 - DNA, 25 bp, Homo sapien
ctttagccaactaagccacagagcc

SEQ ID NO: 1842394 - DNA, 25 bp, Homo sapien
cgctttagccaactaagccacagag

SEQ ID NO: 1842395 - DNA, 25 bp, Homo sapien
acgagacaggcgctttagccaacta

SEQ ID NO: 1842396 - DNA, 25 bp, Homo sapien
tctagacgtggcgagagcagttttt

SEQ ID NO: 1842397 - DNA, 25 bp, Homo sapien
gatgaaccatgttcccagcggagga

SEQ ID NO: 1842398 - DNA, 25 bp, Homo sapien
cttagaacaatgtcagcgcgtccca

SEQ ID NO: 1842399 - DNA, 25 bp, Homo sapien
gaagaggcatcggtctctagacgtg

SEQ ID NO: 1842400 - DNA, 25 bp, Homo sapien
gttttgtatttcaaatccaaagaga

SEQ ID NO: 1842401 - DNA, 25 bp, Homo sapien
gtatttcaaatccaaagagactttg

SEQ ID NO: 1842402 - DNA, 25 bp, Homo sapien
tgtatttcaaatccaaagagacttt

SEQ ID NO: 1842403 - DNA, 25 bp, Homo sapien
tttgtatttcaaatccaaagagact

SEQ ID NO: 1842404 - DNA, 25 bp, Homo sapien
ctgctcgaggcttgtgttcccgcgg

SEQ ID NO: 1842405 - DNA, 25 bp, Homo sapien
ctcgaggcttgtgttcccgcggctc

SEQ ID NO: 1842406 - DNA, 25 bp, Homo sapien
gctcgaggcttgtgttcccgcggct

SEQ ID NO: 1842407 - DNA, 25 bp, Homo sapien
tgctcgaggcttgtgttcccgcggc

SEQ ID NO: 1842408 - DNA, 25 bp, Homo sapien
gacagggtctttcctaattctgcct

SEQ ID NO: 1842409 - DNA, 25 bp, Homo sapien
caagcttcaattagatgtttcctaa

SEQ ID NO: 1842410 - DNA, 25 bp, Homo sapien
aatatcttccttatggatccgcacc

SEQ ID NO: 1842411 - DNA, 25 bp, Homo sapien
cttatggatccgcaccttgtagaag

SEQ ID NO: 1842412 - DNA, 25 bp, Homo sapien
ctttcgtatgttcggatacacaaat

SEQ ID NO: 1842413 - DNA, 25 bp, Homo sapien
tgccgacggtattcagttcagcaac

SEQ ID NO: 1842414 - DNA, 25 bp, Homo sapien
tcgtatgttcggatacacaaatacc

SEQ ID NO: 1842415 - DNA, 25 bp, Homo sapien
taccactgtattgcaattgccgacg

SEQ ID NO: 1842416 - DNA, 25 bp, Homo sapien
aaagatggcagctctaccttagtgc

SEQ ID NO: 1842417 - DNA, 25 bp, Homo sapien
gcagctctaccttagtgcttccaga

SEQ ID NO: 1842418 - DNA, 25 bp, Homo sapien
ccagcatagtaagtgcatgaagtaa

SEQ ID NO: 1842419 - DNA, 25 bp, Homo sapien
gacagaagccttagtcaaagatggc

SEQ ID NO: 1842420 - DNA, 25 bp, Homo sapien
ggacctcatgcatgctaagcatgcg

SEQ ID NO: 1842421 - DNA, 25 bp, Homo sapien
tcgaacccgggacctcatgcatgct

SEQ ID NO: 1842422 - DNA, 25 bp, Homo sapien
cgaacccgggacctcatgcatgcta

SEQ ID NO: 1842423 - DNA, 25 bp, Homo sapien
ccgggacctcatgcatgctaagcat

SEQ ID NO: 1842424 - DNA, 25 bp, Homo sapien
tgcgtagagagtgcagaagtcctcg

SEQ ID NO: 1842425 - DNA, 25 bp, Homo sapien
agagaaggctttatacctgcgtaga

SEQ ID NO: 1842426 - DNA, 25 bp, Homo sapien
tatacctgcgtagagagtgcagaag

SEQ ID NO: 1842427 - DNA, 25 bp, Homo sapien
aagtcctcggttacagtcacctgtg

SEQ ID NO: 1842428 - DNA, 25 bp, Homo sapien
tcgaacccggggcctcatacatgcg

SEQ ID NO: 1842429 - DNA, 25 bp, Homo sapien
ggcctcatacatgcgaagcatgcgc

SEQ ID NO: 1842430 - DNA, 25 bp, Homo sapien
ccggggcctcatacatgcgaagcat

SEQ ID NO: 1842431 - DNA, 25 bp, Homo sapien
ttggagatgccggggatcgaacccg

SEQ ID NO: 1842432 - DNA, 25 bp, Homo sapien
cagcaagggattgaaccctgaatcc

SEQ ID NO: 1842433 - DNA, 25 bp, Homo sapien
acgccccagcaagggattgaaccct

SEQ ID NO: 1842434 - DNA, 25 bp, Homo sapien
gaatcctcaggctaaaagtctgata

SEQ ID NO: 1842435 - DNA, 25 bp, Homo sapien
cctcaggctaaaagtctgatagctc

SEQ ID NO: 1842436 - DNA, 25 bp, Homo sapien
atggaggtaccagggattgaaccag

SEQ ID NO: 1842437 - DNA, 25 bp, Homo sapien
caaaggcttatgtattgcaacttgc

SEQ ID NO: 1842438 - DNA, 25 bp, Homo sapien
accattgcctatgctgacaaaggct

SEQ ID NO: 1842439 - DNA, 25 bp, Homo sapien
cttttggtgatgtttattccactcc

SEQ ID NO: 1842440 - DNA, 25 bp, Homo sapien
cacacacatctttaaaccgtactta

SEQ ID NO: 1842441 - DNA, 25 bp, Homo sapien
ttaaatgctgatggtgtttcgagtc

SEQ ID NO: 1842442 - DNA, 25 bp, Homo sapien
ctgatggtgtttcgagtcccctgcc

SEQ ID NO: 1842443 - DNA, 25 bp, Homo sapien
cttgttcttcttcgtctttcgctgc

SEQ ID NO: 1842444 - DNA, 25 bp, Homo sapien
ttcgtctttcgctgcttcatctctt

SEQ ID NO: 1842445 - DNA, 25 bp, Homo sapien
cttttgtgctccaggaacacagggt

SEQ ID NO: 1842446 - DNA, 25 bp, Homo sapien
tttgtgctccaggaacacagggtct

SEQ ID NO: 1842447 - DNA, 25 bp, Homo sapien
ctccaggaacacagggtctgaggac

SEQ ID NO: 1842448 - DNA, 25 bp, Homo sapien
gtgctccaggaacacagggtctgag

SEQ ID NO: 1842449 - DNA, 25 bp, Homo sapien
tcttggacagaatgccgcttccacg

SEQ ID NO: 1842450 - DNA, 25 bp, Homo sapien
ggtgaaagtcgcctggagctgtttt

SEQ ID NO: 1842451 - DNA, 25 bp, Homo sapien
gcttccacgcttccgtagacgctgg

SEQ ID NO: 1842452 - DNA, 25 bp, Homo sapien
tctagggatctcagccagtgagcag

SEQ ID NO: 1842453 - DNA, 25 bp, Homo sapien
gaattgaaccagtctcctttagatc

SEQ ID NO: 1842454 - DNA, 25 bp, Homo sapien
tgatgccctcccaaccgagctatct

SEQ ID NO: 1842455 - DNA, 25 bp, Homo sapien
gccaaaacccagaattgaaccagtc

SEQ ID NO: 1842456 - DNA, 25 bp, Homo sapien
tcttcaggctgatgccctcccaacc

SEQ ID NO: 1842457 - DNA, 25 bp, Homo sapien
aatgttaagcatacgctctaccact

SEQ ID NO: 1842458 - DNA, 25 bp, Homo sapien
tgaatgttaagcatacgctctacca

SEQ ID NO: 1842459 - DNA, 25 bp, Homo sapien
catgaatgttaagcatacgctctac

SEQ ID NO: 1842460 - DNA, 25 bp, Homo sapien
gaatgttaagcatacgctctaccac

SEQ ID NO: 1842461 - DNA, 25 bp, Homo sapien
gaccacgaagggactcgaaccctca

SEQ ID NO: 1842462 - DNA, 25 bp, Homo sapien
cgaaccctcaatcttctgatccgga

SEQ ID NO: 1842463 - DNA, 25 bp, Homo sapien
tcaatcttctgatccggaatcagac

SEQ ID NO: 1842464 - DNA, 25 bp, Homo sapien
ggaatcagacgccttatccattagg

SEQ ID NO: 1842465 - DNA, 25 bp, Homo sapien
cgaacccggggcctcacacatgcaa

SEQ ID NO: 1842466 - DNA, 25 bp, Homo sapien
gggcctcacacatgcaaagcatgtg

SEQ ID NO: 1842467 - DNA, 25 bp, Homo sapien
gggatcgaacccggggcctcacaca

SEQ ID NO: 1842468 - DNA, 25 bp, Homo sapien
aacccggggcctcacacatgcaaag

SEQ ID NO: 1842469 - DNA, 25 bp, Homo sapien
cgctctcccaactgagctatttcag

SEQ ID NO: 1842470 - DNA, 25 bp, Homo sapien
tggctgaaacccagggttgaaccag

SEQ ID NO: 1842471 - DNA, 25 bp, Homo sapien
aaccagggaactttaagatcttcag

SEQ ID NO: 1842472 - DNA, 25 bp, Homo sapien
tgaaccagggaactttaagatcttc

SEQ ID NO: 1842473 - DNA, 25 bp, Homo sapien
cagaatttgtcggtctctaatggaa

SEQ ID NO: 1842474 - DNA, 25 bp, Homo sapien
gcaatcatcagccacttgtagtgga

SEQ ID NO: 1842475 - DNA, 25 bp, Homo sapien
tgaaagcttgcaggacttttgcaac

SEQ ID NO: 1842476 - DNA, 25 bp, Homo sapien
taatggaaaaagtgaccaccagcac

SEQ ID NO: 1842477 - DNA, 25 bp, Homo sapien
ttgaacgcaggacctcacgcatgct

SEQ ID NO: 1842478 - DNA, 25 bp, Homo sapien
gaaatactggaagttgaacgcagga

SEQ ID NO: 1842479 - DNA, 25 bp, Homo sapien
acgcatgctaaccacgtgctctgtc

SEQ ID NO: 1842480 - DNA, 25 bp, Homo sapien
ggacctcacgcatgctaaccacgtg

SEQ ID NO: 1842481 - DNA, 25 bp, Homo sapien
acctcccagagaatgtccatttgca

SEQ ID NO: 1842482 - DNA, 25 bp, Homo sapien
cttgggctatggtatgccccacctc

SEQ ID NO: 1842483 - DNA, 25 bp, Homo sapien
ccacctcccagagaatgtccatttg

SEQ ID NO: 1842484 - DNA, 25 bp, Homo sapien
ccttgggctatggtatgccccacct

SEQ ID NO: 1842485 - DNA, 25 bp, Homo sapien
tcttcctgggatgctttatggaact

SEQ ID NO: 1842486 - DNA, 25 bp, Homo sapien
cctgggatgctttatggaacttttt

SEQ ID NO: 1842487 - DNA, 25 bp, Homo sapien
tgggatgctttatggaactttttct

SEQ ID NO: 1842488 - DNA, 25 bp, Homo sapien
gctgctcttgccagccgcctcttca

SEQ ID NO: 1842489 - DNA, 25 bp, Homo sapien
tgtggcctgactcttcggtgtcatt

SEQ ID NO: 1842490 - DNA, 25 bp, Homo sapien
ctgtggcctgactcttcggtgtcat

SEQ ID NO: 1842491 - DNA, 25 bp, Homo sapien
tggcctgactcttcggtgtcattaa

SEQ ID NO: 1842492 - DNA, 25 bp, Homo sapien
ggcctgactcttcggtgtcattaac

SEQ ID NO: 1842493 - DNA, 25 bp, Homo sapien
gccagcggtctcttcaagatcgcta

SEQ ID NO: 1842494 - DNA, 25 bp, Homo sapien
gactggtgctgccagcggtctcttc

SEQ ID NO: 1842495 - DNA, 25 bp, Homo sapien
gtctcttcaagatcgctactcatca

SEQ ID NO: 1842496 - DNA, 25 bp, Homo sapien
tcaagatcgctactcatcaactcct

SEQ ID NO: 1842497 - DNA, 25 bp, Homo sapien
tttggagaaagagatagatgggtct

SEQ ID NO: 1842498 - DNA, 25 bp, Homo sapien
agaaagagatagatgggtcttccat

SEQ ID NO: 1842499 - DNA, 25 bp, Homo sapien
tggagaaagagatagatgggtcttc

SEQ ID NO: 1842500 - DNA, 25 bp, Homo sapien
cttgggtttggagaaagagatagat

SEQ ID NO: 1842501 - DNA, 25 bp, Homo sapien
gatgaatctcctggggcttttgctt

SEQ ID NO: 1842502 - DNA, 25 bp, Homo sapien
tgaatctcctggggcttttgctttt

SEQ ID NO: 1842503 - DNA, 25 bp, Homo sapien
atctcctggggcttttgctttttct

SEQ ID NO: 1842504 - DNA, 25 bp, Homo sapien
ctgatgaatctcctggggcttttgc

SEQ ID NO: 1842505 - DNA, 25 bp, Homo sapien
aggaggagcgaagtggacgagcacc

SEQ ID NO: 1842506 - DNA, 25 bp, Homo sapien
ggaggaggagcgaagtggacgagca

SEQ ID NO: 1842507 - DNA, 25 bp, Homo sapien
ggaggagcgaagtggacgagcaccc

SEQ ID NO: 1842508 - DNA, 25 bp, Homo sapien
gaggaggagcgaagtggacgagcac

SEQ ID NO: 1842509 - DNA, 25 bp, Homo sapien
tgtccacgataggtgagagggctca

SEQ ID NO: 1842510 - DNA, 25 bp, Homo sapien
cctcggtgtccacgataggtgagag

SEQ ID NO: 1842511 - DNA, 25 bp, Homo sapien
ttcctcggtgtccacgataggtgag

SEQ ID NO: 1842512 - DNA, 25 bp, Homo sapien
cacgataggtgagagggctcattcc

SEQ ID NO: 1842513 - DNA, 25 bp, Homo sapien
tattggattacacttgtggctgtgc

SEQ ID NO: 1842514 - DNA, 25 bp, Homo sapien
aatcagtggacagatgctttcgctc

SEQ ID NO: 1842515 - DNA, 25 bp, Homo sapien
tctttgttcggtcatccagcgtcct

SEQ ID NO: 1842516 - DNA, 25 bp, Homo sapien
tgctttctgcgcaggttgacaggga

SEQ ID NO: 1842517 - DNA, 25 bp, Homo sapien
cgaacccgggacctcatacatgcaa

SEQ ID NO: 1842518 - DNA, 25 bp, Homo sapien
atacatgcaaagcatgcgctctacc

SEQ ID NO: 1842519 - DNA, 25 bp, Homo sapien
gggatcgaacccgggacctcataca

SEQ ID NO: 1842520 - DNA, 25 bp, Homo sapien
atcgaacccgggacctcatacatgc

SEQ ID NO: 1842521 - DNA, 25 bp, Homo sapien
ctgccgaaacccgggatcgaaccag

SEQ ID NO: 1842522 - DNA, 25 bp, Homo sapien
atcgaaccagggacctttagatctt

SEQ ID NO: 1842523 - DNA, 25 bp, Homo sapien
cagggacctttagatcttcagtcta

SEQ ID NO: 1842524 - DNA, 25 bp, Homo sapien
cgctctcccaactgagctatttcgg

SEQ ID NO: 1842525 - DNA, 25 bp, Homo sapien
tccgtcgctcagcagaccggctgaa

SEQ ID NO: 1842526 - DNA, 25 bp, Homo sapien
tggaggagagagtgatactgggttt

SEQ ID NO: 1842527 - DNA, 25 bp, Homo sapien
ctatttccgtcgctcagcagaccgg

SEQ ID NO: 1842528 - DNA, 25 bp, Homo sapien
tcgctcagcagaccggctgaactct

SEQ ID NO: 1842529 - DNA, 25 bp, Homo sapien
cacgcgctctaccactgagctatac

SEQ ID NO: 1842530 - DNA, 25 bp, Homo sapien
aagcacgcgctctaccactgagcta

SEQ ID NO: 1842531 - DNA, 25 bp, Homo sapien
gcacgcgctctaccactgagctata

SEQ ID NO: 1842532 - DNA, 25 bp, Homo sapien
taagcacgcgctctaccactgagct

SEQ ID NO: 1842533 - DNA, 25 bp, Homo sapien
cttttactctgcatgtattttccat

SEQ ID NO: 1842534 - DNA, 25 bp, Homo sapien
gaggtgtcggggatcgaaccgaggc

SEQ ID NO: 1842535 - DNA, 25 bp, Homo sapien
ggagcttgcagcgcgcgccactgca

SEQ ID NO: 1842536 - DNA, 25 bp, Homo sapien
gagcgagactccgtcacacacacaa

SEQ ID NO: 1842537 - DNA, 25 bp, Homo sapien
aggcggagcttgcagcgcgcgccac

SEQ ID NO: 1842538 - DNA, 25 bp, Homo sapien
agcgagactccgtcacacacacaaa

SEQ ID NO: 1842539 - DNA, 25 bp, Homo sapien
ctgccgaaacccgggattgaaccag

SEQ ID NO: 1842540 - DNA, 25 bp, Homo sapien
attgaaccagggacctttagatctt

SEQ ID NO: 1842541 - DNA, 25 bp, Homo sapien
ctaacgctctcccaactgagctatc

SEQ ID NO: 1842542 - DNA, 25 bp, Homo sapien
gctctcccaactgagctatctcggc

SEQ ID NO: 1842543 - DNA, 25 bp, Homo sapien
tcttcctggcgtttgcaacgagctc

SEQ ID NO: 1842544 - DNA, 25 bp, Homo sapien
tggcgtttgcaacgagctcctttac

SEQ ID NO: 1842545 - DNA, 25 bp, Homo sapien
gaaactcttcctggcgtttgcaacg

SEQ ID NO: 1842546 - DNA, 25 bp, Homo sapien
tcctggcgtttgcaacgagctcctt

SEQ ID NO: 1842547 - DNA, 25 bp, Homo sapien
taacgtccagctcttggctcaggac

SEQ ID NO: 1842548 - DNA, 25 bp, Homo sapien
tcctaacgtccagctcttggctcag

SEQ ID NO: 1842549 - DNA, 25 bp, Homo sapien
cctaacgtccagctcttggctcagg

SEQ ID NO: 1842550 - DNA, 25 bp, Homo sapien
ctaacgtccagctcttggctcagga

SEQ ID NO: 1842551 - DNA, 25 bp, Homo sapien
gcgtcacagctgttgcagaaaggcg

SEQ ID NO: 1842552 - DNA, 25 bp, Homo sapien
cagaaaggcgaagtcgaggtacaat

SEQ ID NO: 1842553 - DNA, 25 bp, Homo sapien
cgaagtcgaggtacaatcggtgtta

SEQ ID NO: 1842554 - DNA, 25 bp, Homo sapien
tgttaactacgtgtgcagccaccgt

SEQ ID NO: 1842555 - DNA, 25 bp, Homo sapien
gcacgcgctctaccgctgagctata

SEQ ID NO: 1842556 - DNA, 25 bp, Homo sapien
taagcacgcgctctaccgctgagct

SEQ ID NO: 1842557 - DNA, 25 bp, Homo sapien
tgctaagcacgcgctctaccgctga

SEQ ID NO: 1842558 - DNA, 25 bp, Homo sapien
agcacgcgctctaccgctgagctat

SEQ ID NO: 1842559 - DNA, 25 bp, Homo sapien
catggatttcgtcttggggacgcta

SEQ ID NO: 1842560 - DNA, 25 bp, Homo sapien
ttggggacgctatggctccagttct

SEQ ID NO: 1842561 - DNA, 25 bp, Homo sapien
acactcaagaaacgatggatggaga

SEQ ID NO: 1842562 - DNA, 25 bp, Homo sapien
ccatggtcgcgaaacccagcatgga

SEQ ID NO: 1842563 - DNA, 25 bp, Homo sapien
tcgaaaagagttcgagagggaagca

SEQ ID NO: 1842564 - DNA, 25 bp, Homo sapien
cttcgaaaagagttcgagagggaag

SEQ ID NO: 1842565 - DNA, 25 bp, Homo sapien
agcagggacgcggtggggtgcgcac

SEQ ID NO: 1842566 - DNA, 25 bp, Homo sapien
agggaagcagggacgcggtggggtg

SEQ ID NO: 1842567 - DNA, 25 bp, Homo sapien
ggatctgggtgggccggaaggcgga

SEQ ID NO: 1842568 - DNA, 25 bp, Homo sapien
aaggcggagtgcagcccggaagccc

SEQ ID NO: 1842569 - DNA, 25 bp, Homo sapien
ggtgggccggaaggcggagtgcagc

SEQ ID NO: 1842570 - DNA, 25 bp, Homo sapien
ccggaaggcggagtgcagcccggaa

SEQ ID NO: 1842571 - DNA, 25 bp, Homo sapien
tttcctcgctgtccgcgataagcga

SEQ ID NO: 1842572 - DNA, 25 bp, Homo sapien
ctgtccgcgataagcgagagggctc

SEQ ID NO: 1842573 - DNA, 25 bp, Homo sapien
tgcttttcctcgctgtccgcgataa

SEQ ID NO: 1842574 - DNA, 25 bp, Homo sapien
ctcgctgtccgcgataagcgagagg

SEQ ID NO: 1842575 - DNA, 25 bp, Homo sapien
tcggggatcgaacccgaggcctcat

SEQ ID NO: 1842576 - DNA, 25 bp, Homo sapien
aaagcatgcgctctaccactgagct

SEQ ID NO: 1842577 - DNA, 25 bp, Homo sapien
tggaggtgtcggggatcgaacccga

SEQ ID NO: 1842578 - DNA, 25 bp, Homo sapien
gaggcctcatacatgcaaagcatgc

SEQ ID NO: 1842579 - DNA, 25 bp, Homo sapien
ctgccgaaacccgggattgaaccag

SEQ ID NO: 1842580 - DNA, 25 bp, Homo sapien
ctttaagatcttcggtctaacgctc

SEQ ID NO: 1842581 - DNA, 25 bp, Homo sapien
gattgaaccagggacctttaagatc

SEQ ID NO: 1842582 - DNA, 25 bp, Homo sapien
cgctctcccaactgagctatttcgg

SEQ ID NO: 1842583 - DNA, 25 bp, Homo sapien
tttctctccctcttgtaaggcccga

SEQ ID NO: 1842584 - DNA, 25 bp, Homo sapien
tatccccgccgcctgacgtctctcc

SEQ ID NO: 1842585 - DNA, 25 bp, Homo sapien
tgtaaggcccgaacctccccagaca

SEQ ID NO: 1842586 - DNA, 25 bp, Homo sapien
ctccaggtttatccccgccgcctga

SEQ ID NO: 1842587 - DNA, 25 bp, Homo sapien
ttaaaagcggaatctgccgacagct

SEQ ID NO: 1842588 - DNA, 25 bp, Homo sapien
tccatcgctcgatagacaggctagg

SEQ ID NO: 1842589 - DNA, 25 bp, Homo sapien
ggttcttttcgtccagactgccacg

SEQ ID NO: 1842590 - DNA, 25 bp, Homo sapien
tgagcaggacagtggaaacgtctaa

SEQ ID NO: 1842591 - DNA, 25 bp, Homo sapien
tggggaatcagcccaagacctcgtg

SEQ ID NO: 1842592 - DNA, 25 bp, Homo sapien
ccaagacctcgtgcatgataagtac

SEQ ID NO: 1842593 - DNA, 25 bp, Homo sapien
atgataagtacactctctaccactg

SEQ ID NO: 1842594 - DNA, 25 bp, Homo sapien
tcgtgcatgataagtacactctcta

SEQ ID NO: 1842595 - DNA, 25 bp, Homo sapien
cagggagcctgcagacatgcgaatg

SEQ ID NO: 1842596 - DNA, 25 bp, Homo sapien
catactcaattactctgctcaggga

SEQ ID NO: 1842597 - DNA, 25 bp, Homo sapien
gacatgcgaatgacatctctagaca

SEQ ID NO: 1842598 - DNA, 25 bp, Homo sapien
ttcatactcaattactctgctcagg

SEQ ID NO: 1842599 - DNA, 25 bp, Homo sapien
gagagaagattgtaactggttgagt

SEQ ID NO: 1842600 - DNA, 25 bp, Homo sapien
gaagattgtaactggttgagtactg

SEQ ID NO: 1842601 - DNA, 25 bp, Homo sapien
gattgtaactggttgagtactgttt

SEQ ID NO: 1842602 - DNA, 25 bp, Homo sapien
gagaagattgtaactggttgagtac

SEQ ID NO: 1842603 - DNA, 25 bp, Homo sapien
tgtgacgcctctacattcattgatg

SEQ ID NO: 1842604 - DNA, 25 bp, Homo sapien
tcagtccgtgaactttgagatcttc

SEQ ID NO: 1842605 - DNA, 25 bp, Homo sapien
caatttcccagtttggaaggctttg

SEQ ID NO: 1842606 - DNA, 25 bp, Homo sapien
agtggagctatttcggcagaagtgt

SEQ ID NO: 1842607 - DNA, 25 bp, Homo sapien
atttggcgacgccattgaagttttg

SEQ ID NO: 1842608 - DNA, 25 bp, Homo sapien
tgaagttttggaatccggagccgtc

SEQ ID NO: 1842609 - DNA, 25 bp, Homo sapien
taacaatactccaaaggttaatgag

SEQ ID NO: 1842610 - DNA, 25 bp, Homo sapien
taatgagctcgtcaatttggcgacg

SEQ ID NO: 1842611 - DNA, 25 bp, Homo sapien
gctaagcacgcgctctaccactgag

SEQ ID NO: 1842612 - DNA, 25 bp, Homo sapien
cgctctaccactgagctacaccccc

SEQ ID NO: 1842613 - DNA, 25 bp, Homo sapien
gcgctctaccactgagctacacccc

SEQ ID NO: 1842614 - DNA, 25 bp, Homo sapien
cacgcgctctaccactgagctacac

SEQ ID NO: 1842615 - DNA, 25 bp, Homo sapien
ttccttcgtaggagggccgtaggca

SEQ ID NO: 1842616 - DNA, 25 bp, Homo sapien
tacagaaaggtagtcgccatctcaa

SEQ ID NO: 1842617 - DNA, 25 bp, Homo sapien
ccagaactttgatgtgcctcgcaca

SEQ ID NO: 1842618 - DNA, 25 bp, Homo sapien
ggttgtgcctaagtcattccccaga

SEQ ID NO: 1842619 - DNA, 25 bp, Homo sapien
ccgcagaatcaaggcccggcaagcc

SEQ ID NO: 1842620 - DNA, 25 bp, Homo sapien
ggcccggcaagccaaagggcgctgc

SEQ ID NO: 1842621 - DNA, 25 bp, Homo sapien
cccggcaagccaaagggcgctgcat

SEQ ID NO: 1842622 - DNA, 25 bp, Homo sapien
agatccgcagaatcaaggcccggca

SEQ ID NO: 1842623 - DNA, 25 bp, Homo sapien
tttcgctagtctccgcatggccggt

SEQ ID NO: 1842624 - DNA, 25 bp, Homo sapien
gttatcacatcaaggtgcgcgccgg

SEQ ID NO: 1842625 - DNA, 25 bp, Homo sapien
aatgcttggcggcaatgctcggctc

SEQ ID NO: 1842626 - DNA, 25 bp, Homo sapien
tgtaaggagaaagcccgagtcatca

SEQ ID NO: 1842627 - DNA, 25 bp, Homo sapien
tctaaaatcggacgaacaagaggac

SEQ ID NO: 1842628 - DNA, 25 bp, Homo sapien
taaaatcggacgaacaagaggacac

SEQ ID NO: 1842629 - DNA, 25 bp, Homo sapien
caaagtctaaaatcggacgaacaag

SEQ ID NO: 1842630 - DNA, 25 bp, Homo sapien
agtctaaaatcggacgaacaagagg

SEQ ID NO: 1842631 - DNA, 25 bp, Homo sapien
tgggcttgttaatttggtgccttgc

SEQ ID NO: 1842632 - DNA, 25 bp, Homo sapien
tgcttgatcttcgataatactggga

SEQ ID NO: 1842633 - DNA, 25 bp, Homo sapien
attctgccagtctgtgcttccgcgg

SEQ ID NO: 1842634 - DNA, 25 bp, Homo sapien
tgtaaccaatgtgattgggcttgtt

SEQ ID NO: 1842635 - DNA, 25 bp, Homo sapien
gctaagcacgcgctctaccactgag

SEQ ID NO: 1842636 - DNA, 25 bp, Homo sapien
cacgcgctctaccactgagctacac

SEQ ID NO: 1842637 - DNA, 25 bp, Homo sapien
gcgctctaccactgagctacacccc

SEQ ID NO: 1842638 - DNA, 25 bp, Homo sapien
cgctctaccactgagctacaccccc

SEQ ID NO: 1842639 - DNA, 25 bp, Homo sapien
tgaaatagcagttgtaaggagcaac

SEQ ID NO: 1842640 - DNA, 25 bp, Homo sapien
cagtgactgcaattctagtggtggc

SEQ ID NO: 1842641 - DNA, 25 bp, Homo sapien
tggtggcaggttatatcaaggaata

SEQ ID NO: 1842642 - DNA, 25 bp, Homo sapien
ggagcaactcctactaacacacaat

SEQ ID NO: 1842643 - DNA, 25 bp, Homo sapien
cctccaggtactagagaagaatgaa

SEQ ID NO: 1842644 - DNA, 25 bp, Homo sapien
ctccaggtactagagaagaatgaat

SEQ ID NO: 1842645 - DNA, 25 bp, Homo sapien
taaatgctcacacaagaggcaaggc

SEQ ID NO: 1842646 - DNA, 25 bp, Homo sapien
gaaactgtcataaggaagccaaccc

SEQ ID NO: 1842647 - DNA, 25 bp, Homo sapien
gaagttcgttagtcacatacagctg

SEQ ID NO: 1842648 - DNA, 25 bp, Homo sapien
tgagtctctgaatgggctcagcatt

SEQ ID NO: 1842649 - DNA, 25 bp, Homo sapien
ttattggatatagtgagcatctttt

SEQ ID NO: 1842650 - DNA, 25 bp, Homo sapien
tattggatatagtgagcatcttttc

SEQ ID NO: 1842651 - DNA, 25 bp, Homo sapien
cctgtatgaatgttgggatagttaa

SEQ ID NO: 1842652 - DNA, 25 bp, Homo sapien
tgaagtgtgagctctcaatgcagac

SEQ ID NO: 1842653 - DNA, 25 bp, Homo sapien
ctgatgggaaataagaccttcattt

SEQ ID NO: 1842654 - DNA, 25 bp, Homo sapien
ttttccatattcagggcaatgagga

SEQ ID NO: 1842655 - DNA, 25 bp, Homo sapien
gatgtcaggcctccattgtgactaa

SEQ ID NO: 1842656 - DNA, 25 bp, Homo sapien
ctccattgtgactaaagctttctcc

SEQ ID NO: 1842657 - DNA, 25 bp, Homo sapien
tgtgcagtctctcatacgatgtcag

SEQ ID NO: 1842658 - DNA, 25 bp, Homo sapien
tcttgtgtgcagtctctcatacgat

SEQ ID NO: 1842659 - DNA, 25 bp, Homo sapien
ctatgatgcttaagaaagagtgggc

SEQ ID NO: 1842660 - DNA, 25 bp, Homo sapien
tctctgatgtttgagatggtcagaa

SEQ ID NO: 1842661 - DNA, 25 bp, Homo sapien
gctttcccatgcataagatatttgt

SEQ ID NO: 1842662 - DNA, 25 bp, Homo sapien
tcagaattctgaaggtcttattgca

SEQ ID NO: 1842663 - DNA, 25 bp, Homo sapien
tttactaagatctgagctccaaatg

SEQ ID NO: 1842664 - DNA, 25 bp, Homo sapien
tggatcttctggagatagaggctag

SEQ ID NO: 1842665 - DNA, 25 bp, Homo sapien
tgaaggcccttctatgctcatcaca

SEQ ID NO: 1842666 - DNA, 25 bp, Homo sapien
gatagaggctagtgttcccactgaa

SEQ ID NO: 1842667 - DNA, 25 bp, Homo sapien
tataatgcaggctttcacagtgaag

SEQ ID NO: 1842668 - DNA, 25 bp, Homo sapien
ctgtctacattcatcacttttacaa

SEQ ID NO: 1842669 - DNA, 25 bp, Homo sapien
ctctttcccataagtattttgttca

SEQ ID NO: 1842670 - DNA, 25 bp, Homo sapien
tgtctacattcatcacttttacaac

SEQ ID NO: 1842671 - DNA, 25 bp, Homo sapien
ttacatttgcgagaggaacgtacag

SEQ ID NO: 1842672 - DNA, 25 bp, Homo sapien
aaagaataagtgttccacatggaaa

SEQ ID NO: 1842673 - DNA, 25 bp, Homo sapien
gaaagaacccaagatatattaagtg

SEQ ID NO: 1842674 - DNA, 25 bp, Homo sapien
acccggccagcaatatttcttctgt

SEQ ID NO: 1842675 - DNA, 25 bp, Homo sapien
caccgcggaggaagcttagcttgag

SEQ ID NO: 1842676 - DNA, 25 bp, Homo sapien
accgcggaggaagcttagcttgagt

SEQ ID NO: 1842677 - DNA, 25 bp, Homo sapien
ccaccgcggaggaagcttagcttga

SEQ ID NO: 1842678 - DNA, 25 bp, Homo sapien
ccgcggaggaagcttagcttgagtc

SEQ ID NO: 1842679 - DNA, 25 bp, Homo sapien
ctgcataaaactggatcaagtctct

SEQ ID NO: 1842680 - DNA, 25 bp, Homo sapien
aaagcaaaagggttcgcaggactag

SEQ ID NO: 1842681 - DNA, 25 bp, Homo sapien
gaaacgcgatgacgtcagggttgct

SEQ ID NO: 1842682 - DNA, 25 bp, Homo sapien
aagccacttgtggattgaaaaagca

SEQ ID NO: 1842683 - DNA, 25 bp, Homo sapien
actgccttgccactcgtcgaagttt

SEQ ID NO: 1842684 - DNA, 25 bp, Homo sapien
gggaaactccgcgagcgacgcgctc

SEQ ID NO: 1842685 - DNA, 25 bp, Homo sapien
tcttgggctctaaaagtggtagccg

SEQ ID NO: 1842686 - DNA, 25 bp, Homo sapien
tccttgtcgctctcggatgttcccg

SEQ ID NO: 1842687 - DNA, 25 bp, Homo sapien
agtttttaaggggagtgcaccacat

SEQ ID NO: 1842688 - DNA, 25 bp, Homo sapien
tagtttttaaggggagtgcaccaca

SEQ ID NO: 1842689 - DNA, 25 bp, Homo sapien
tgccaggtcggggaacacagcggta

SEQ ID NO: 1842690 - DNA, 25 bp, Homo sapien
caggtcggggaacacagcggtagtt

SEQ ID NO: 1842691 - DNA, 25 bp, Homo sapien
actataggcgcccgtcacgacgccc

SEQ ID NO: 1842692 - DNA, 25 bp, Homo sapien
gactataggcgcccgtcacgacgcc

SEQ ID NO: 1842693 - DNA, 25 bp, Homo sapien
ctataggcgcccgtcacgacgcccg

SEQ ID NO: 1842694 - DNA, 25 bp, Homo sapien
ccctaaaatgggtttggcaatcaca

SEQ ID NO: 1842695 - DNA, 25 bp, Homo sapien
tacattactgtggtctgcaatgagg

SEQ ID NO: 1842696 - DNA, 25 bp, Homo sapien
tcttagtctcaagaaaaagggcact

SEQ ID NO: 1842697 - DNA, 25 bp, Homo sapien
gctagtgggcaagtctcttagtctc

SEQ ID NO: 1842698 - DNA, 25 bp, Homo sapien
taggctgttacatgcattctctcat

SEQ ID NO: 1842699 - DNA, 25 bp, Homo sapien
ctaaaggaattagcaaatggctctc

SEQ ID NO: 1842700 - DNA, 25 bp, Homo sapien
cgtgatttccacgtatactctttgg

SEQ ID NO: 1842701 - DNA, 25 bp, Homo sapien
ttgctgggaggagatacgtgatttc

SEQ ID NO: 1842702 - DNA, 25 bp, Homo sapien
gctactttctatagccctggttcta

SEQ ID NO: 1842703 - DNA, 25 bp, Homo sapien
gctaatctagcctcatggaagctac

SEQ ID NO: 1842704 - DNA, 25 bp, Homo sapien
taggacatgatatcaccaactcatg

SEQ ID NO: 1842705 - DNA, 25 bp, Homo sapien
catttagatctcagaatattcagca

SEQ ID NO: 1842706 - DNA, 25 bp, Homo sapien
gtccaacactactttcttagcacca

SEQ ID NO: 1842707 - DNA, 25 bp, Homo sapien
aagaactgtaggctatgaatgtcca

SEQ ID NO: 1842708 - DNA, 25 bp, Homo sapien
tagcaccactagaaagtagtgacat

SEQ ID NO: 1842709 - DNA, 25 bp, Homo sapien
gaaagtagtgacatggcactgagaa

SEQ ID NO: 1842710 - DNA, 25 bp, Homo sapien
cacaaatgtgactggtaagggatct

SEQ ID NO: 1842711 - DNA, 25 bp, Homo sapien
tccttccagggatggtatacgactg

SEQ ID NO: 1842712 - DNA, 25 bp, Homo sapien
tgcacttaagcatggtcaattcccc

SEQ ID NO: 1842713 - DNA, 25 bp, Homo sapien
gaacattatctcataacagaggtgg

SEQ ID NO: 1842714 - DNA, 25 bp, Homo sapien
cagaggtactgttcccagacggaaa

SEQ ID NO: 1842715 - DNA, 25 bp, Homo sapien
tgttagaaaggagccctagcccaga

SEQ ID NO: 1842716 - DNA, 25 bp, Homo sapien
aactatggcacattgggaatcaggg

SEQ ID NO: 1842717 - DNA, 25 bp, Homo sapien
gaagtatcttgaacggctctccaaa

SEQ ID NO: 1842718 - DNA, 25 bp, Homo sapien
catggtaaggatacccagctgtgac

SEQ ID NO: 1842719 - DNA, 25 bp, Homo sapien
caagatgccttgtgcctggcgtagg

SEQ ID NO: 1842720 - DNA, 25 bp, Homo sapien
gcgtaggattacagccaacagccct

SEQ ID NO: 1842721 - DNA, 25 bp, Homo sapien
cactgcaagggcgtggaacatggta

SEQ ID NO: 1842722 - DNA, 25 bp, Homo sapien
caaggggaggtctccatggaatgac

SEQ ID NO: 1842723 - DNA, 25 bp, Homo sapien
ggtctccatggaatgaccatgattc

SEQ ID NO: 1842724 - DNA, 25 bp, Homo sapien
gaggtctccatggaatgaccatgat

SEQ ID NO: 1842725 - DNA, 25 bp, Homo sapien
gggaggtctccatggaatgaccatg

SEQ ID NO: 1842726 - DNA, 25 bp, Homo sapien
acatggccagaaaacccatctatcc

SEQ ID NO: 1842727 - DNA, 25 bp, Homo sapien
tgcacttttccctcccgagtaactc

SEQ ID NO: 1842728 - DNA, 25 bp, Homo sapien
actcagactgaagtagggccggaca

SEQ ID NO: 1842729 - DNA, 25 bp, Homo sapien
tgagagaaagtgaaggtgtgacacc

SEQ ID NO: 1842730 - DNA, 25 bp, Homo sapien
ccggcgatgaagcatggagagccca

SEQ ID NO: 1842731 - DNA, 25 bp, Homo sapien
actgagtcttcacagacacctatgg

SEQ ID NO: 1842732 - DNA, 25 bp, Homo sapien
gaggtaagagcccaatattctttcc

SEQ ID NO: 1842733 - DNA, 25 bp, Homo sapien
tcccaataatgtctcccggcgatga

SEQ ID NO: 1842734 - DNA, 25 bp, Homo sapien
gcagattatcagagaggatcaggct

SEQ ID NO: 1842735 - DNA, 25 bp, Homo sapien
gaggtaactgtaccgcacttgccgc

SEQ ID NO: 1842736 - DNA, 25 bp, Homo sapien
cgcacttgccgcagattatcagaga

SEQ ID NO: 1842737 - DNA, 25 bp, Homo sapien
caggcaggtcctgttggaggtaact

SEQ ID NO: 1842738 - DNA, 25 bp, Homo sapien
aaggaagacagtcagccgtgggcca

SEQ ID NO: 1842739 - DNA, 25 bp, Homo sapien
tctaaaactgtgtatgacccatgtc

SEQ ID NO: 1842740 - DNA, 25 bp, Homo sapien
gggccccaagtttcatagaattcag

SEQ ID NO: 1842741 - DNA, 25 bp, Homo sapien
ccactggaggttgcacgtattttat

SEQ ID NO: 1842742 - DNA, 25 bp, Homo sapien
tattttagaacacccagcgcctttc

SEQ ID NO: 1842743 - DNA, 25 bp, Homo sapien
gagtataactgagcctctcttaatt

SEQ ID NO: 1842744 - DNA, 25 bp, Homo sapien
tgagtataactgagcctctcttaat

SEQ ID NO: 1842745 - DNA, 25 bp, Homo sapien
gatgtatggctctatcatccaacca

SEQ ID NO: 1842746 - DNA, 25 bp, Homo sapien
tcatcataaagcagtggtctccacc

SEQ ID NO: 1842747 - DNA, 25 bp, Homo sapien
agggataaccacatgcctgagactg

SEQ ID NO: 1842748 - DNA, 25 bp, Homo sapien
tagaatatgggataaaactgagcca

SEQ ID NO: 1842749 - DNA, 25 bp, Homo sapien
tggattttctccatatctgactgca

SEQ ID NO: 1842750 - DNA, 25 bp, Homo sapien
cttggattttctccatatctgactg

SEQ ID NO: 1842751 - DNA, 25 bp, Homo sapien
gattttctccatatctgactgcatt

SEQ ID NO: 1842752 - DNA, 25 bp, Homo sapien
ttttctccatatctgactgcatttt

SEQ ID NO: 1842753 - DNA, 25 bp, Homo sapien
gctttagactctccgtcaagaatag

SEQ ID NO: 1842754 - DNA, 25 bp, Homo sapien
gaactgctttagactctccgtcaag

SEQ ID NO: 1842755 - DNA, 25 bp, Homo sapien
ctgtgaactgctttagactctccgt

SEQ ID NO: 1842756 - DNA, 25 bp, Homo sapien
gactctccgtcaagaatagacattt

SEQ ID NO: 1842757 - DNA, 25 bp, Homo sapien
tatgaggctgactttgccagaaagc

SEQ ID NO: 1842758 - DNA, 25 bp, Homo sapien
gatgtctatagcaaagactgccagt

SEQ ID NO: 1842759 - DNA, 25 bp, Homo sapien
gttaaactgtctagcgtacacggac

SEQ ID NO: 1842760 - DNA, 25 bp, Homo sapien
tatggtgggcaattaacccgaattc

SEQ ID NO: 1842761 - DNA, 25 bp, Homo sapien
gcacccaacctgcacatttctttta

SEQ ID NO: 1842762 - DNA, 25 bp, Homo sapien
acccaacctgcacatttcttttatt

SEQ ID NO: 1842763 - DNA, 25 bp, Homo sapien
cacccaacctgcacatttcttttat

SEQ ID NO: 1842764 - DNA, 25 bp, Homo sapien
tatgtaaatgcaggccagtcacacc

SEQ ID NO: 1842765 - DNA, 25 bp, Homo sapien
gagtaagaataagagccagaatcca

SEQ ID NO: 1842766 - DNA, 25 bp, Homo sapien
catggaagtgtcctcatacccctaa

SEQ ID NO: 1842767 - DNA, 25 bp, Homo sapien
tgtatactagtgactctcttcaggg

SEQ ID NO: 1842768 - DNA, 25 bp, Homo sapien
gtcactttggactataaaataggcc

SEQ ID NO: 1842769 - DNA, 25 bp, Homo sapien
tgggatatccatcacatcgttaaat

SEQ ID NO: 1842770 - DNA, 25 bp, Homo sapien
aattattctcctctagtcactttgg

SEQ ID NO: 1842771 - DNA, 25 bp, Homo sapien
ccgtatcagttcataggtatcattc

SEQ ID NO: 1842772 - DNA, 25 bp, Homo sapien
tctagtgatctatcccagctttttt

SEQ ID NO: 1842773 - DNA, 25 bp, Homo sapien
gcctccagtattgccccattaagta

SEQ ID NO: 1842774 - DNA, 25 bp, Homo sapien
gatactgggcatccggcctgtttct

SEQ ID NO: 1842775 - DNA, 25 bp, Homo sapien
tgacctcaatgggaatgcctccagt

SEQ ID NO: 1842776 - DNA, 25 bp, Homo sapien
ctggcatatgaaggctgctgatttc

SEQ ID NO: 1842777 - DNA, 25 bp, Homo sapien
ccttaattatggtgcttgcttcagc

SEQ ID NO: 1842778 - DNA, 25 bp, Homo sapien
tcctcaaatgggaaccatgcacaga

SEQ ID NO: 1842779 - DNA, 25 bp, Homo sapien
ttaaagccttaattatggtgcttgc

SEQ ID NO: 1842780 - DNA, 25 bp, Homo sapien
gcacagattagcatggctcctgcac

SEQ ID NO: 1842781 - DNA, 25 bp, Homo sapien
gatggccaagtctagctcctcaagg

SEQ ID NO: 1842782 - DNA, 25 bp, Homo sapien
gggccaggaggcgatactcatgctc

SEQ ID NO: 1842783 - DNA, 25 bp, Homo sapien
tcttctagctgagcgatcaggctgc

SEQ ID NO: 1842784 - DNA, 25 bp, Homo sapien
tcctttaaggagtgatacagctgct

SEQ ID NO: 1842785 - DNA, 25 bp, Homo sapien
ctctttttaaatggtcgagctggtt

SEQ ID NO: 1842786 - DNA, 25 bp, Homo sapien
caagagttcagctcgtgcctgttcc

SEQ ID NO: 1842787 - DNA, 25 bp, Homo sapien
agagttcagctcgtgcctgttcccc

SEQ ID NO: 1842788 - DNA, 25 bp, Homo sapien
taaatggtcgagctggttctggatt

SEQ ID NO: 1842789 - DNA, 25 bp, Homo sapien
gagtttctagaccaggacggattgc

SEQ ID NO: 1842790 - DNA, 25 bp, Homo sapien
taattgtgtacgcattcctgaagcc

SEQ ID NO: 1842791 - DNA, 25 bp, Homo sapien
ttagctgtgccagttcacaaagggc

SEQ ID NO: 1842792 - DNA, 25 bp, Homo sapien
gatgtctccgtgtacaatgtgtccg

SEQ ID NO: 1842793 - DNA, 25 bp, Homo sapien
gctttaccagttgggtcacgttggc

SEQ ID NO: 1842794 - DNA, 25 bp, Homo sapien
catcatgggctctgcgaagtactgc

SEQ ID NO: 1842795 - DNA, 25 bp, Homo sapien
cactgcgggcacgacacgttagtct

SEQ ID NO: 1842796 - DNA, 25 bp, Homo sapien
caacagatgttatggccgcagtcga

SEQ ID NO: 1842797 - DNA, 25 bp, Homo sapien
aactctccggcgctctctccggttc

SEQ ID NO: 1842798 - DNA, 25 bp, Homo sapien
tccggcgctctctccggttcgctgt

SEQ ID NO: 1842799 - DNA, 25 bp, Homo sapien
tctccggcgctctctccggttcgct

SEQ ID NO: 1842800 - DNA, 25 bp, Homo sapien
ccggcgctctctccggttcgctgtt

SEQ ID NO: 1842801 - DNA, 25 bp, Homo sapien
ctcccgggcccgtatcccagacgcg

SEQ ID NO: 1842802 - DNA, 25 bp, Homo sapien
gacgcgcccgcgcaccgaaggcttg

SEQ ID NO: 1842803 - DNA, 25 bp, Homo sapien
aaggcttggagtggccgggccgatg

SEQ ID NO: 1842804 - DNA, 25 bp, Homo sapien
agaggcaccgggcggacggagggcg

SEQ ID NO: 1842805 - DNA, 25 bp, Homo sapien
aagcgagagcgggaatacggccggc

SEQ ID NO: 1842806 - DNA, 25 bp, Homo sapien
agcgagagcgggaatacggccggct

SEQ ID NO: 1842807 - DNA, 25 bp, Homo sapien
gagagcgggaatacggccggctcac

SEQ ID NO: 1842808 - DNA, 25 bp, Homo sapien
ctaagcgagagcgggaatacggccg

SEQ ID NO: 1842809 - DNA, 25 bp, Homo sapien
gcttccagcgagtgacaaggtttcg

SEQ ID NO: 1842810 - DNA, 25 bp, Homo sapien
tctatcctagggcactggtcgcaag

SEQ ID NO: 1842811 - DNA, 25 bp, Homo sapien
gcctacaaacttcagcggctgccgg

SEQ ID NO: 1842812 - DNA, 25 bp, Homo sapien
tcctttggactggtcgcgctgaagc

SEQ ID NO: 1842813 - DNA, 25 bp, Homo sapien
atttcggctcagtgctgacacttcc

SEQ ID NO: 1842814 - DNA, 25 bp, Homo sapien
tgacacttccttcatgctactctgg

SEQ ID NO: 1842815 - DNA, 25 bp, Homo sapien
tgcttcgcttcaggtctacattgcc

SEQ ID NO: 1842816 - DNA, 25 bp, Homo sapien
gagcctgtttgactagttctgggaa

SEQ ID NO: 1842817 - DNA, 25 bp, Homo sapien
tttgaactcggatcgctggattcag

SEQ ID NO: 1842818 - DNA, 25 bp, Homo sapien
gattcagagtccagagtgctaacca

SEQ ID NO: 1842819 - DNA, 25 bp, Homo sapien
tgaactcggatcgctggattcagag

SEQ ID NO: 1842820 - DNA, 25 bp, Homo sapien
aaggttccaccgagatttgaactcg

SEQ ID NO: 1842821 - DNA, 25 bp, Homo sapien
gagactggagccttaatccagcgcc

SEQ ID NO: 1842822 - DNA, 25 bp, Homo sapien
cccgaagagactggagccttaatcc

SEQ ID NO: 1842823 - DNA, 25 bp, Homo sapien
agagactggagccttaatccagcgc

SEQ ID NO: 1842824 - DNA, 25 bp, Homo sapien
acgcccccgaagagactggagcctt

SEQ ID NO: 1842825 - DNA, 25 bp, Homo sapien
gacgcgctgcctactgcgctaagga

SEQ ID NO: 1842826 - DNA, 25 bp, Homo sapien
cgcgctgcctactgcgctaaggagg

SEQ ID NO: 1842827 - DNA, 25 bp, Homo sapien
ctgccccctctgaggttcgaactca

SEQ ID NO: 1842828 - DNA, 25 bp, Homo sapien
ctgaggttcgaactcaggaccttca

SEQ ID NO: 1842829 - DNA, 25 bp, Homo sapien
cttttgcccctcttattctgaactg

SEQ ID NO: 1842830 - DNA, 25 bp, Homo sapien
gatgaagaaagtcgctgctgatccc

SEQ ID NO: 1842831 - DNA, 25 bp, Homo sapien
tgatcccgctgcttttgcccctctt

SEQ ID NO: 1842832 - DNA, 25 bp, Homo sapien
gaagaaagtcgctgctgatcccgct

SEQ ID NO: 1842833 - DNA, 25 bp, Homo sapien
agacaccactttgccatccactcac

SEQ ID NO: 1842834 - DNA, 25 bp, Homo sapien
ttgatgtctcagaactttggtgtcc

SEQ ID NO: 1842835 - DNA, 25 bp, Homo sapien
tggtgtccttggtctcagacaccac

SEQ ID NO: 1842836 - DNA, 25 bp, Homo sapien
gatgtctcagaactttggtgtcctt

SEQ ID NO: 1842837 - DNA, 25 bp, Homo sapien
gggcatcacgaaggctgaagtcctc

SEQ ID NO: 1842838 - DNA, 25 bp, Homo sapien
catcacgaaggctgaagtcctcgcc

SEQ ID NO: 1842839 - DNA, 25 bp, Homo sapien
tcacgaaggctgaagtcctcgccat

SEQ ID NO: 1842840 - DNA, 25 bp, Homo sapien
tgtccagggcatcacgaaggctgaa

SEQ ID NO: 1842841 - DNA, 25 bp, Homo sapien
gtctgccccggtctgtgtcagctct

SEQ ID NO: 1842842 - DNA, 25 bp, Homo sapien
atccgtctgccccggtctgtgtcag

SEQ ID NO: 1842843 - DNA, 25 bp, Homo sapien
ccgtctgccccggtctgtgtcagct

SEQ ID NO: 1842844 - DNA, 25 bp, Homo sapien
ctatccgtctgccccggtctgtgtc

SEQ ID NO: 1842845 - DNA, 25 bp, Homo sapien
gactggactgtatatctctgctccg

SEQ ID NO: 1842846 - DNA, 25 bp, Homo sapien
ctgtatatctctgctccgtgagcgt

SEQ ID NO: 1842847 - DNA, 25 bp, Homo sapien
gactgtatatctctgctccgtgagc

SEQ ID NO: 1842848 - DNA, 25 bp, Homo sapien
gtatatctctgctccgtgagcgtca

SEQ ID NO: 1842849 - DNA, 25 bp, Homo sapien
tcggttcttccaagacagctcgtct

SEQ ID NO: 1842850 - DNA, 25 bp, Homo sapien
tgaccactgtggtgcactctcaatc

SEQ ID NO: 1842851 - DNA, 25 bp, Homo sapien
actctcaatctgctgaggccagtgc

SEQ ID NO: 1842852 - DNA, 25 bp, Homo sapien
aagacagctcgtcttattgggccca

SEQ ID NO: 1842853 - DNA, 25 bp, Homo sapien
cagccgagtgacattggtatcatca

SEQ ID NO: 1842854 - DNA, 25 bp, Homo sapien
tccacggtcaacccagagatggcaa

SEQ ID NO: 1842855 - DNA, 25 bp, Homo sapien
ctcttcttggttcttcttcaggaag

SEQ ID NO: 1842856 - DNA, 25 bp, Homo sapien
tcctcttcttggttcttcttcagga

SEQ ID NO: 1842857 - DNA, 25 bp, Homo sapien
acccatggatgtcgctctccacaga

SEQ ID NO: 1842858 - DNA, 25 bp, Homo sapien
gcggaacccatggatgtcgctctcc

SEQ ID NO: 1842859 - DNA, 25 bp, Homo sapien
aacccatggatgtcgctctccacag

SEQ ID NO: 1842860 - DNA, 25 bp, Homo sapien
cttgcggaacccatggatgtcgctc

SEQ ID NO: 1842861 - DNA, 25 bp, Homo sapien
ctcacactcgactctgaagtcaaca

SEQ ID NO: 1842862 - DNA, 25 bp, Homo sapien
tcacactcgactctgaagtcaacag

SEQ ID NO: 1842863 - DNA, 25 bp, Homo sapien
aaccccagccatccctgccgccagg

SEQ ID NO: 1842864 - DNA, 25 bp, Homo sapien
gccagaaccccagccatccctgccg

SEQ ID NO: 1842865 - DNA, 25 bp, Homo sapien
ctgccgccaggcctccagaccccat

SEQ ID NO: 1842866 - DNA, 25 bp, Homo sapien
ttggtctccatgcttctcactctgt

SEQ ID NO: 1842867 - DNA, 25 bp, Homo sapien
tggctgggaaccgtagctgggcgcc

SEQ ID NO: 1842868 - DNA, 25 bp, Homo sapien
ccgcgctgcagactggctgggaacc

SEQ ID NO: 1842869 - DNA, 25 bp, Homo sapien
tggccgcgctgcagactggctggga

SEQ ID NO: 1842870 - DNA, 25 bp, Homo sapien
tgcagactggctgggaaccgtagct

SEQ ID NO: 1842871 - DNA, 25 bp, Homo sapien
ctgtccggggaggagagcgagagga

SEQ ID NO: 1842872 - DNA, 25 bp, Homo sapien
aggagagcgagaggacaggactcag

SEQ ID NO: 1842873 - DNA, 25 bp, Homo sapien
ccggggaggagagcgagaggacagg

SEQ ID NO: 1842874 - DNA, 25 bp, Homo sapien
tccggggaggagagcgagaggacag

SEQ ID NO: 1842875 - DNA, 25 bp, Homo sapien
atcgaaccagggacctttagatctt

SEQ ID NO: 1842876 - DNA, 25 bp, Homo sapien
atgccgaaacccgggatcgaaccag

SEQ ID NO: 1842877 - DNA, 25 bp, Homo sapien
cgctctcccaactgagctatttcgg

SEQ ID NO: 1842878 - DNA, 25 bp, Homo sapien
cagggacctttagatcttcagtcta

SEQ ID NO: 1842879 - DNA, 25 bp, Homo sapien
tccaggtagctgggcctaccggcgc

SEQ ID NO: 1842880 - DNA, 25 bp, Homo sapien
agcctccaggtagctgggcctaccg

SEQ ID NO: 1842881 - DNA, 25 bp, Homo sapien
ctccaggtagctgggcctaccggcg

SEQ ID NO: 1842882 - DNA, 25 bp, Homo sapien
gcctccaggtagctgggcctaccgg

SEQ ID NO: 1842883 - DNA, 25 bp, Homo sapien
ctcagtcttccctccgggaggtagg

SEQ ID NO: 1842884 - DNA, 25 bp, Homo sapien
ttctcagtcttccctccgggaggta

SEQ ID NO: 1842885 - DNA, 25 bp, Homo sapien
cctgaccccttcaggattctcagtc

SEQ ID NO: 1842886 - DNA, 25 bp, Homo sapien
tgaccccttcaggattctcagtctt

SEQ ID NO: 1842887 - DNA, 25 bp, Homo sapien
cattcgtgaatttctccaagcaggc

SEQ ID NO: 1842888 - DNA, 25 bp, Homo sapien
gcaggcctttccagatcgacactaa

SEQ ID NO: 1842889 - DNA, 25 bp, Homo sapien
gacactaagttccaatcccgagctg

SEQ ID NO: 1842890 - DNA, 25 bp, Homo sapien
tgtgtgacccagcaccaattcagtc

SEQ ID NO: 1842891 - DNA, 25 bp, Homo sapien
tgtcaaaaagtggtctccctcaagt

SEQ ID NO: 1842892 - DNA, 25 bp, Homo sapien
cttgaaggttaaagctgtcaaaaag

SEQ ID NO: 1842893 - DNA, 25 bp, Homo sapien
caaaaagtggtctccctcaagttcg

SEQ ID NO: 1842894 - DNA, 25 bp, Homo sapien
ctgtcaaaaagtggtctccctcaag

SEQ ID NO: 1842895 - DNA, 25 bp, Homo sapien
cttcataaacagcaaggactgcgct

SEQ ID NO: 1842896 - DNA, 25 bp, Homo sapien
ttgaaactcgctcagcggcgtcggg

SEQ ID NO: 1842897 - DNA, 25 bp, Homo sapien
aaggactgcgctctttcgcacggcg

SEQ ID NO: 1842898 - DNA, 25 bp, Homo sapien
ccacttgaaactcgctcagcggcgt

SEQ ID NO: 1842899 - DNA, 25 bp, Homo sapien
tgggggtctccgtccgcgtggccgc

SEQ ID NO: 1842900 - DNA, 25 bp, Homo sapien
ctgggggtctccgtccgcgtggccg

SEQ ID NO: 1842901 - DNA, 25 bp, Homo sapien
gggtctccgtccgcgtggccgcttc

SEQ ID NO: 1842902 - DNA, 25 bp, Homo sapien
actgctcccatcagtgcgaaagcaa

SEQ ID NO: 1842903 - DNA, 25 bp, Homo sapien
ggtgtgtggcggctgaacagctgcc

SEQ ID NO: 1842904 - DNA, 25 bp, Homo sapien
atcagtgcgaaagcaacgtgttggg

SEQ ID NO: 1842905 - DNA, 25 bp, Homo sapien
agggaagggcgtctaggatccgccg

SEQ ID NO: 1842906 - DNA, 25 bp, Homo sapien
taccacggagccagagataaccgtc

SEQ ID NO: 1842907 - DNA, 25 bp, Homo sapien
acttctgtttaccacggagccagag

SEQ ID NO: 1842908 - DNA, 25 bp, Homo sapien
gataaccgtccccagaacaatgttc

SEQ ID NO: 1842909 - DNA, 25 bp, Homo sapien
attctcctcttcgacttctgtttac

SEQ ID NO: 1842910 - DNA, 25 bp, Homo sapien
ctcttggaagtaaatgtgctcactg

SEQ ID NO: 1842911 - DNA, 25 bp, Homo sapien
gaaggaccagcctaagaggtaggaa

SEQ ID NO: 1842912 - DNA, 25 bp, Homo sapien
caggaataactaatataagagacag

SEQ ID NO: 1842913 - DNA, 25 bp, Homo sapien
gggaatctcacaattaagggtcagg

SEQ ID NO: 1842914 - DNA, 25 bp, Homo sapien
gggtactccatacttgatgttttct

SEQ ID NO: 1842915 - DNA, 25 bp, Homo sapien
aagttcatgggtactccatacttga

SEQ ID NO: 1842916 - DNA, 25 bp, Homo sapien
ctgaggtctgagaaacagtcactgg

SEQ ID NO: 1842917 - DNA, 25 bp, Homo sapien
catcaagttcatgggtactccatac

SEQ ID NO: 1842918 - DNA, 25 bp, Homo sapien
tcttatgtccagtaagatttgagct

SEQ ID NO: 1842919 - DNA, 25 bp, Homo sapien
cttatgtccagtaagatttgagctc

SEQ ID NO: 1842920 - DNA, 25 bp, Homo sapien
tatgtccagtaagatttgagctcac

SEQ ID NO: 1842921 - DNA, 25 bp, Homo sapien
ttatgtccagtaagatttgagctca

SEQ ID NO: 1842922 - DNA, 25 bp, Homo sapien
gaactcgcttatgtccaatcagagc

SEQ ID NO: 1842923 - DNA, 25 bp, Homo sapien
acggaaggacgtgccacactcactg

SEQ ID NO: 1842924 - DNA, 25 bp, Homo sapien
ttatgtccaatcagagctgagccct

SEQ ID NO: 1842925 - DNA, 25 bp, Homo sapien
ccctgacggaaggacgtgccacact

SEQ ID NO: 1842926 - DNA, 25 bp, Homo sapien
tgatgcatacagagacggttcctgg

SEQ ID NO: 1842927 - DNA, 25 bp, Homo sapien
gattatccggtgcatagaaagctga

SEQ ID NO: 1842928 - DNA, 25 bp, Homo sapien
gagccctgcgcttacagttatgacg

SEQ ID NO: 1842929 - DNA, 25 bp, Homo sapien
gaggtctgaactcccactgaaggcc

SEQ ID NO: 1842930 - DNA, 25 bp, Homo sapien
tcatccagtaggcttctccattttc

SEQ ID NO: 1842931 - DNA, 25 bp, Homo sapien
ccgggaatcaacttttaggagactg

SEQ ID NO: 1842932 - DNA, 25 bp, Homo sapien
aaaatctcttgttgtgaacttgcct

SEQ ID NO: 1842933 - DNA, 25 bp, Homo sapien
gtttctcccttatagatgtttccca

SEQ ID NO: 1842934 - DNA, 25 bp, Homo sapien
tgagagattaaaggaggtttaggaa

SEQ ID NO: 1842935 - DNA, 25 bp, Homo sapien
ttctcgctccagatgagagattaaa

SEQ ID NO: 1842936 - DNA, 25 bp, Homo sapien
ggtaggagcagcttagggactccct

SEQ ID NO: 1842937 - DNA, 25 bp, Homo sapien
gatcctgcacacaggggtctacttc

SEQ ID NO: 1842938 - DNA, 25 bp, Homo sapien
tttgagcgtaggtcagacactgcca

SEQ ID NO: 1842939 - DNA, 25 bp, Homo sapien
tgcctttgagcgtaggtcagacact

SEQ ID NO: 1842940 - DNA, 25 bp, Homo sapien
aagtgataccatgttcccataattt

SEQ ID NO: 1842941 - DNA, 25 bp, Homo sapien
tatagagatgcctttgagcgtaggt

SEQ ID NO: 1842942 - DNA, 25 bp, Homo sapien
cattgatttaggagttgcacagcca

SEQ ID NO: 1842943 - DNA, 25 bp, Homo sapien
cccacaagtggtttatcatgcaaca

SEQ ID NO: 1842944 - DNA, 25 bp, Homo sapien
cagagaacgcagtgaaaacaaggcc

SEQ ID NO: 1842945 - DNA, 25 bp, Homo sapien
cagaagaaaggaatttgcaaggagg

SEQ ID NO: 1842946 - DNA, 25 bp, Homo sapien
tgatatctgcttgcggcaggtttcc

SEQ ID NO: 1842947 - DNA, 25 bp, Homo sapien
aaggcaggatatggagcaggtaata

SEQ ID NO: 1842948 - DNA, 25 bp, Homo sapien
agtgtgatatctgcttgcggcaggt

SEQ ID NO: 1842949 - DNA, 25 bp, Homo sapien
gcttgcggcaggtttccttggcttc

SEQ ID NO: 1842950 - DNA, 25 bp, Homo sapien
agctgggtatcctggcgggtccaaa

SEQ ID NO: 1842951 - DNA, 25 bp, Homo sapien
agggagctgggtatcctggcgggtc

SEQ ID NO: 1842952 - DNA, 25 bp, Homo sapien
atcctggcgggtccaaagcagctgg

SEQ ID NO: 1842953 - DNA, 25 bp, Homo sapien
gtggtcctgaactctcatccaacag

SEQ ID NO: 1842954 - DNA, 25 bp, Homo sapien
tccttgtgatgtatcacagaccctc

SEQ ID NO: 1842955 - DNA, 25 bp, Homo sapien
tccttcttcctccttgtgatgtatc

SEQ ID NO: 1842956 - DNA, 25 bp, Homo sapien
tgtgatgtatcacagaccctcctct

SEQ ID NO: 1842957 - DNA, 25 bp, Homo sapien
ttcctccttgtgatgtatcacagac

SEQ ID NO: 1842958 - DNA, 25 bp, Homo sapien
tactcaggtttctttaacagtcttc

SEQ ID NO: 1842959 - DNA, 25 bp, Homo sapien
tactggtcagatccagttctcaaac

SEQ ID NO: 1842960 - DNA, 25 bp, Homo sapien
cactgctgtcctggtttcttcctac

SEQ ID NO: 1842961 - DNA, 25 bp, Homo sapien
gaagtggctccagttgatgccagcc

SEQ ID NO: 1842962 - DNA, 25 bp, Homo sapien
aacagcgcttgcaatagtatgtgct

SEQ ID NO: 1842963 - DNA, 25 bp, Homo sapien
aaaagaatgggtcaggaggcgacaa

SEQ ID NO: 1842964 - DNA, 25 bp, Homo sapien
tattctcaacgcctaaaacagcgct

SEQ ID NO: 1842965 - DNA, 25 bp, Homo sapien
ctaaaatctaggctcttaggctcca

SEQ ID NO: 1842966 - DNA, 25 bp, Homo sapien
catggagactgcggaatggaaaagc

SEQ ID NO: 1842967 - DNA, 25 bp, Homo sapien
agactgcggaatggaaaagcgttcg

SEQ ID NO: 1842968 - DNA, 25 bp, Homo sapien
ctgcggaatggaaaagcgttcggtt

SEQ ID NO: 1842969 - DNA, 25 bp, Homo sapien
tggagactgcggaatggaaaagcgt

SEQ ID NO: 1842970 - DNA, 25 bp, Homo sapien
cgcgaatggggtcgtggttccttcg

SEQ ID NO: 1842971 - DNA, 25 bp, Homo sapien
gcgaatggggtcgtggttccttcga

SEQ ID NO: 1842972 - DNA, 25 bp, Homo sapien
agccgcgaatggggtcgtggttcct

SEQ ID NO: 1842973 - DNA, 25 bp, Homo sapien
ctagccgcgaatggggtcgtggttc

SEQ ID NO: 1842974 - DNA, 25 bp, Homo sapien
tcgggctatacttgggccacacagc

SEQ ID NO: 1842975 - DNA, 25 bp, Homo sapien
gggcaggtctgcgtggcggcgtcga

SEQ ID NO: 1842976 - DNA, 25 bp, Homo sapien
ctgcgtggcggcgtcgagtccgagc

SEQ ID NO: 1842977 - DNA, 25 bp, Homo sapien
gacggagggcttcgggctatacttg

SEQ ID NO: 1842978 - DNA, 25 bp, Homo sapien
gggagggtcccgccagcagaggcat

SEQ ID NO: 1842979 - DNA, 25 bp, Homo sapien
ggtagggagggtcccgccagcagag

SEQ ID NO: 1842980 - DNA, 25 bp, Homo sapien
tagggagggtcccgccagcagaggc

SEQ ID NO: 1842981 - DNA, 25 bp, Homo sapien
gtgggtagggagggtcccgccagca

SEQ ID NO: 1842982 - DNA, 25 bp, Homo sapien
accagctgcttacactttctaacac

SEQ ID NO: 1842983 - DNA, 25 bp, Homo sapien
tttctaacacgaaggggctgcaact

SEQ ID NO: 1842984 - DNA, 25 bp, Homo sapien
tgcttacactttctaacacgaaggg

SEQ ID NO: 1842985 - DNA, 25 bp, Homo sapien
gctgcttacactttctaacacgaag

SEQ ID NO: 1842986 - DNA, 25 bp, Homo sapien
tattctcgttctcccttccccacac

SEQ ID NO: 1842987 - DNA, 25 bp, Homo sapien
ttattctcgttctcccttccccaca

SEQ ID NO: 1842988 - DNA, 25 bp, Homo sapien
gaggaagacgtcttggtcgccgtta

SEQ ID NO: 1842989 - DNA, 25 bp, Homo sapien
cggagcgccgtcttctgggcgagga

SEQ ID NO: 1842990 - DNA, 25 bp, Homo sapien
aacgccaaggctctaagtggccctg

SEQ ID NO: 1842991 - DNA, 25 bp, Homo sapien
taagagctaaaacgaacgccaaggc

SEQ ID NO: 1842992 - DNA, 25 bp, Homo sapien
ctagtaaatgactggagcactgccg

SEQ ID NO: 1842993 - DNA, 25 bp, Homo sapien
tcagggaacctgtggaacatacctc

SEQ ID NO: 1842994 - DNA, 25 bp, Homo sapien
cactgccggacccaaatgtagaagg

SEQ ID NO: 1842995 - DNA, 25 bp, Homo sapien
gctagaatttcgtgctcagggaacc

SEQ ID NO: 1842996 - DNA, 25 bp, Homo sapien
catcttgggatatggtattctgtgg

SEQ ID NO: 1842997 - DNA, 25 bp, Homo sapien
tgtgatgattgtgtaaaagagtgaa

SEQ ID NO: 1842998 - DNA, 25 bp, Homo sapien
ttttcatccacagtattctcttcag

SEQ ID NO: 1842999 - DNA, 25 bp, Homo sapien
aaagagtgaagaacttcccttcatc

SEQ ID NO: 1843000 - DNA, 25 bp, Homo sapien
gagtgataactccatatgagataag

SEQ ID NO: 1843001 - DNA, 25 bp, Homo sapien
gacttgatcctcattacagcttgag

SEQ ID NO: 1843002 - DNA, 25 bp, Homo sapien
tgggagccacatgtattaaggatct

SEQ ID NO: 1843003 - DNA, 25 bp, Homo sapien
gaaaagaaataccactccgaaagca

SEQ ID NO: 1843004 - DNA, 25 bp, Homo sapien
cttggcaacttcaaagtcaaggagc

SEQ ID NO: 1843005 - DNA, 25 bp, Homo sapien
tcccggtgcccacatcttggcaact

SEQ ID NO: 1843006 - DNA, 25 bp, Homo sapien
tttgaatagacacaagccatcttga

SEQ ID NO: 1843007 - DNA, 25 bp, Homo sapien
agtcaaggagcaaacaattaaggca

SEQ ID NO: 1843008 - DNA, 25 bp, Homo sapien
ctggcaagaccactcaaccaggcag

SEQ ID NO: 1843009 - DNA, 25 bp, Homo sapien
tatggagctgggtgtctagataaga

SEQ ID NO: 1843010 - DNA, 25 bp, Homo sapien
gctagttgtataacagaggtccaag

SEQ ID NO: 1843011 - DNA, 25 bp, Homo sapien
aaagaattggagtacacaccctcca

SEQ ID NO: 1843012 - DNA, 25 bp, Homo sapien
aaaaaatacatgaaggtatggagct

SEQ ID NO: 1843013 - DNA, 25 bp, Homo sapien
tcgatcagaaaaccccagaaggatg

SEQ ID NO: 1843014 - DNA, 25 bp, Homo sapien
tccagaacttacactgcttgtttcc

SEQ ID NO: 1843015 - DNA, 25 bp, Homo sapien
ccactgagatgatgtgctctaattg

SEQ ID NO: 1843016 - DNA, 25 bp, Homo sapien
tagatgatgaagacaaccactgaga

SEQ ID NO: 1843017 - DNA, 25 bp, Homo sapien
tacatcctcccaaagcgtgatggga

SEQ ID NO: 1843018 - DNA, 25 bp, Homo sapien
gctttctcacattatacacgcaggt

SEQ ID NO: 1843019 - DNA, 25 bp, Homo sapien
gggaatctccaaatcgctaaatgtg

SEQ ID NO: 1843020 - DNA, 25 bp, Homo sapien
cgcaggtctcctataaacgccggta

SEQ ID NO: 1843021 - DNA, 25 bp, Homo sapien
aaggtgtaaatgagcgggttgagac

SEQ ID NO: 1843022 - DNA, 25 bp, Homo sapien
atttgtggtgaaatctcatcagttt

SEQ ID NO: 1843023 - DNA, 25 bp, Homo sapien
ttaaggtgtaaatgagcgggttgag

SEQ ID NO: 1843024 - DNA, 25 bp, Homo sapien
taaggtgtaaatgagcgggttgaga

SEQ ID NO: 1843025 - DNA, 25 bp, Homo sapien
gcttttgacttcgttctcagcacag

SEQ ID NO: 1843026 - DNA, 25 bp, Homo sapien
tgagatccacaggtattcattgctt

SEQ ID NO: 1843027 - DNA, 25 bp, Homo sapien
tagacactacagtaagatgagatcc

SEQ ID NO: 1843028 - DNA, 25 bp, Homo sapien
ggaagccctgttacctggttgcagg

SEQ ID NO: 1843029 - DNA, 25 bp, Homo sapien
cataatactacagaattggccaaac

SEQ ID NO: 1843030 - DNA, 25 bp, Homo sapien
gctggcaactcacacaagaaatgat

SEQ ID NO: 1843031 - DNA, 25 bp, Homo sapien
acaagctatcttgaccagagctggc

SEQ ID NO: 1843032 - DNA, 25 bp, Homo sapien
catagatgtgggttcatgactacaa

SEQ ID NO: 1843033 - DNA, 25 bp, Homo sapien
tatagctgtaaaacgatcataggac

SEQ ID NO: 1843034 - DNA, 25 bp, Homo sapien
gatggtcttatcaggtccccacaag

SEQ ID NO: 1843035 - DNA, 25 bp, Homo sapien
aggagaaggcactcaactgagccca

SEQ ID NO: 1843036 - DNA, 25 bp, Homo sapien
tgagcccaaccacatgtaaacatag

SEQ ID NO: 1843037 - DNA, 25 bp, Homo sapien
caggagagatgcaagaatgatggct

SEQ ID NO: 1843038 - DNA, 25 bp, Homo sapien
agtacattggtgtatgaagctggga

SEQ ID NO: 1843039 - DNA, 25 bp, Homo sapien
gatgcaagaatgatggctgtgttac

SEQ ID NO: 1843040 - DNA, 25 bp, Homo sapien
tatgaagctgggaatccaggagaga

SEQ ID NO: 1843041 - DNA, 25 bp, Homo sapien
aagatggcgacaactcctgacagga

SEQ ID NO: 1843042 - DNA, 25 bp, Homo sapien
gcgacaactcctgacaggatcatct

SEQ ID NO: 1843043 - DNA, 25 bp, Homo sapien
taagtagaagatggcgacaactcct

SEQ ID NO: 1843044 - DNA, 25 bp, Homo sapien
caatgtaattaagtagaagatggcg

SEQ ID NO: 1843045 - DNA, 25 bp, Homo sapien
aagaactataattgctttggtccat

SEQ ID NO: 1843046 - DNA, 25 bp, Homo sapien
aaagaactataattgctttggtcca

SEQ ID NO: 1843047 - DNA, 25 bp, Homo sapien
taaagaactataattgctttggtcc

SEQ ID NO: 1843048 - DNA, 25 bp, Homo sapien
tatgtccctgttgctcaaagtgtag

SEQ ID NO: 1843049 - DNA, 25 bp, Homo sapien
gaaccacatgtgttgaagacctcct

SEQ ID NO: 1843050 - DNA, 25 bp, Homo sapien
caggcccatagaggagagatacaat

SEQ ID NO: 1843051 - DNA, 25 bp, Homo sapien
aaagggttaagcataggagtcacca

SEQ ID NO: 1843052 - DNA, 25 bp, Homo sapien
agataattgattagagaacgaggga

SEQ ID NO: 1843053 - DNA, 25 bp, Homo sapien
cagtaagcaaagataattgattaga

SEQ ID NO: 1843054 - DNA, 25 bp, Homo sapien
cagtagctacaatgaatccacagta

SEQ ID NO: 1843055 - DNA, 25 bp, Homo sapien
tcagcacagtagctacaatgaatcc

SEQ ID NO: 1843056 - DNA, 25 bp, Homo sapien
tcctcacaatggagagcatagatac

SEQ ID NO: 1843057 - DNA, 25 bp, Homo sapien
gatcatcgctgagacctcacacaga

SEQ ID NO: 1843058 - DNA, 25 bp, Homo sapien
aaatatcctcacaatggagagcata

SEQ ID NO: 1843059 - DNA, 25 bp, Homo sapien
gaatgtggtgtcaaaacgtgatatc

SEQ ID NO: 1843060 - DNA, 25 bp, Homo sapien
tacctcaagtgtttgcagatggcaa

SEQ ID NO: 1843061 - DNA, 25 bp, Homo sapien
gactgaagtagagttggccaaactg

SEQ ID NO: 1843062 - DNA, 25 bp, Homo sapien
gatgcatgatagctgggtacctcaa

SEQ ID NO: 1843063 - DNA, 25 bp, Homo sapien
caatgtaaggatccaaagacgtcac

SEQ ID NO: 1843064 - DNA, 25 bp, Homo sapien
ctaaaatgatgcatttggtgctccc

SEQ ID NO: 1843065 - DNA, 25 bp, Homo sapien
tggcttctcaatgctagacatgatt

SEQ ID NO: 1843066 - DNA, 25 bp, Homo sapien
ggtgatgagagtagacagtgactct

SEQ ID NO: 1843067 - DNA, 25 bp, Homo sapien
gacatgattggagacctttcattgt

SEQ ID NO: 1843068 - DNA, 25 bp, Homo sapien
tgatgagagtagacagtgactcttg

SEQ ID NO: 1843069 - DNA, 25 bp, Homo sapien
tcttcacttattgcattgttctgtc

SEQ ID NO: 1843070 - DNA, 25 bp, Homo sapien
tcctaaagggccatgttcctctttc

SEQ ID NO: 1843071 - DNA, 25 bp, Homo sapien
agcagaatccctcgccctagccttg

SEQ ID NO: 1843072 - DNA, 25 bp, Homo sapien
ggtgagcgttcagctcctaaagggc

SEQ ID NO: 1843073 - DNA, 25 bp, Homo sapien
ctcaactttagattccatgaggcca

SEQ ID NO: 1843074 - DNA, 25 bp, Homo sapien
gctcaactttagattccatgaggcc

SEQ ID NO: 1843075 - DNA, 25 bp, Homo sapien
ctgcagaatccaccagaaaaacaat

SEQ ID NO: 1843076 - DNA, 25 bp, Homo sapien
cattaattgcttggagataattttt

SEQ ID NO: 1843077 - DNA, 25 bp, Homo sapien
tgcagaatccaccagaaaaacaatc

SEQ ID NO: 1843078 - DNA, 25 bp, Homo sapien
aaacaatctcattaattgcttggag

SEQ ID NO: 1843079 - DNA, 25 bp, Homo sapien
ttgcctgcgttgtccaaaccgaaaa

SEQ ID NO: 1843080 - DNA, 25 bp, Homo sapien
tgcgttgtccaaaccgaaaaataca

SEQ ID NO: 1843081 - DNA, 25 bp, Homo sapien
tgcctgcgttgtccaaaccgaaaaa

SEQ ID NO: 1843082 - DNA, 25 bp, Homo sapien
ttttgcctgcgttgtccaaaccgaa

SEQ ID NO: 1843083 - DNA, 25 bp, Homo sapien
ccattgtagatccactcaaagagga

SEQ ID NO: 1843084 - DNA, 25 bp, Homo sapien
tgctgaagccattgtagatccactc

SEQ ID NO: 1843085 - DNA, 25 bp, Homo sapien
cttgtagagtcctaggaactggagc

SEQ ID NO: 1843086 - DNA, 25 bp, Homo sapien
ttgtagatccactcaaagaggaaag

SEQ ID NO: 1843087 - DNA, 25 bp, Homo sapien
ggagacactctgtagcacctagggc

SEQ ID NO: 1843088 - DNA, 25 bp, Homo sapien
cacagcgtggcatgttaagagtcaa

SEQ ID NO: 1843089 - DNA, 25 bp, Homo sapien
gagttgccgaaaccaatgagccatg

SEQ ID NO: 1843090 - DNA, 25 bp, Homo sapien
gaagtttgggatccagaatgcacac

SEQ ID NO: 1843091 - DNA, 25 bp, Homo sapien
gacacattgccaaatatggtgattg

SEQ ID NO: 1843092 - DNA, 25 bp, Homo sapien
gatggacacattgccaaatatggtg

SEQ ID NO: 1843093 - DNA, 25 bp, Homo sapien
gtatgatattaacaggaccacaaaa

SEQ ID NO: 1843094 - DNA, 25 bp, Homo sapien
gattgtgtatgatattaacaggacc

SEQ ID NO: 1843095 - DNA, 25 bp, Homo sapien
agccaagtagtataaactcttttgg

SEQ ID NO: 1843096 - DNA, 25 bp, Homo sapien
agaagccaagtagtataaactcttt

SEQ ID NO: 1843097 - DNA, 25 bp, Homo sapien
tgagaagccaagtagtataaactct

SEQ ID NO: 1843098 - DNA, 25 bp, Homo sapien
ctgagaagccaagtagtataaactc

SEQ ID NO: 1843099 - DNA, 25 bp, Homo sapien
caacagcacaggttagtaataagcc

SEQ ID NO: 1843100 - DNA, 25 bp, Homo sapien
tctgagtgtcttggtatcagcaaca

SEQ ID NO: 1843101 - DNA, 25 bp, Homo sapien
ggatgagggagaatgcaactctctg

SEQ ID NO: 1843102 - DNA, 25 bp, Homo sapien
gggatgagggagaatgcaactctct

SEQ ID NO: 1843103 - DNA, 25 bp, Homo sapien
tcacttaaagctgaaaatgctcctc

SEQ ID NO: 1843104 - DNA, 25 bp, Homo sapien
acttaaagctgaaaatgctcctcac

SEQ ID NO: 1843105 - DNA, 25 bp, Homo sapien
cacttaaagctgaaaatgctcctca

SEQ ID NO: 1843106 - DNA, 25 bp, Homo sapien
cactccatagaagagggccatgaac

SEQ ID NO: 1843107 - DNA, 25 bp, Homo sapien
ctccatagaagagggccatgaactt

SEQ ID NO: 1843108 - DNA, 25 bp, Homo sapien
gagtgagggagtcaccactccatag

SEQ ID NO: 1843109 - DNA, 25 bp, Homo sapien
taaaagggttgagtgagggagtcac

SEQ ID NO: 1843110 - DNA, 25 bp, Homo sapien
tccaatactagcataggaagcaaga

SEQ ID NO: 1843111 - DNA, 25 bp, Homo sapien
gatcttaaatacagcacttccaata

SEQ ID NO: 1843112 - DNA, 25 bp, Homo sapien
attaagcatagtgggacagctaaca

SEQ ID NO: 1843113 - DNA, 25 bp, Homo sapien
gagagtgtgagctcgttagaaccct

SEQ ID NO: 1843114 - DNA, 25 bp, Homo sapien
tatcagaacaggaatctcacacacc

SEQ ID NO: 1843115 - DNA, 25 bp, Homo sapien
ctttatcagaacaggaatctcacac

SEQ ID NO: 1843116 - DNA, 25 bp, Homo sapien
cagaacaggaatctcacacaccaag

SEQ ID NO: 1843117 - DNA, 25 bp, Homo sapien
tcagaacaggaatctcacacaccaa

SEQ ID NO: 1843118 - DNA, 25 bp, Homo sapien
tggcaattgtaatgtggcagtggcc

SEQ ID NO: 1843119 - DNA, 25 bp, Homo sapien
agtggcaattgtaatgtggcagtgg

SEQ ID NO: 1843120 - DNA, 25 bp, Homo sapien
gtggcaattgtaatgtggcagtggc

SEQ ID NO: 1843121 - DNA, 25 bp, Homo sapien
cagacgcgctgattcatgatgaggg

SEQ ID NO: 1843122 - DNA, 25 bp, Homo sapien
ctgagacagcatagattattccaat

SEQ ID NO: 1843123 - DNA, 25 bp, Homo sapien
gattattccaattagccacacggtg

SEQ ID NO: 1843124 - DNA, 25 bp, Homo sapien
tggaaactaaggatacagacgcgct

SEQ ID NO: 1843125 - DNA, 25 bp, Homo sapien
agcaaacattctgttccccccatta

SEQ ID NO: 1843126 - DNA, 25 bp, Homo sapien
ttccccccattatgtgaaagaaata

SEQ ID NO: 1843127 - DNA, 25 bp, Homo sapien
caaacattctgttccccccattatg

SEQ ID NO: 1843128 - DNA, 25 bp, Homo sapien
aaagcaaacattctgttccccccat

SEQ ID NO: 1843129 - DNA, 25 bp, Homo sapien
gacgagagtctaacctggacatgag

SEQ ID NO: 1843130 - DNA, 25 bp, Homo sapien
gatgtttcccatcacggctataggg

SEQ ID NO: 1843131 - DNA, 25 bp, Homo sapien
aagggcggtctgcaaagcctagcag

SEQ ID NO: 1843132 - DNA, 25 bp, Homo sapien
aacagaggaagctctagccaagggc

SEQ ID NO: 1843133 - DNA, 25 bp, Homo sapien
gagaaccgctttctcactttacaca

SEQ ID NO: 1843134 - DNA, 25 bp, Homo sapien
tctcactttacacacgcagggcctt

SEQ ID NO: 1843135 - DNA, 25 bp, Homo sapien
gggcagttgagaaccgctttctcac

SEQ ID NO: 1843136 - DNA, 25 bp, Homo sapien
gctttctcactttacacacgcaggg

SEQ ID NO: 1843137 - DNA, 25 bp, Homo sapien
tagtgggcatctccaatacgccaaa

SEQ ID NO: 1843138 - DNA, 25 bp, Homo sapien
tctccaatacgccaaatgtggcctg

SEQ ID NO: 1843139 - DNA, 25 bp, Homo sapien
aatacgccaaatgtggcctgttcca

SEQ ID NO: 1843140 - DNA, 25 bp, Homo sapien
ccaaagggtagtgggcatctccaat

SEQ ID NO: 1843141 - DNA, 25 bp, Homo sapien
taatgccgttgttcctgtcgtcagg

SEQ ID NO: 1843142 - DNA, 25 bp, Homo sapien
cttccggccgttgttaatgccgttg

SEQ ID NO: 1843143 - DNA, 25 bp, Homo sapien
ccgttgttcctgtcgtcaggactag

SEQ ID NO: 1843144 - DNA, 25 bp, Homo sapien
gccgttgttaatgccgttgttcctg

SEQ ID NO: 1843145 - DNA, 25 bp, Homo sapien
ggctgcgggaggtcctgaaccccca

SEQ ID NO: 1843146 - DNA, 25 bp, Homo sapien
ctgcagggcagaggctgcgggaggt

SEQ ID NO: 1843147 - DNA, 25 bp, Homo sapien
gagcctgcagggcagaggctgcggg

SEQ ID NO: 1843148 - DNA, 25 bp, Homo sapien
tgcgggaggtcctgaacccccagcc

SEQ ID NO: 1843149 - DNA, 25 bp, Homo sapien
gtctctgttaaataatcgcagtgct

SEQ ID NO: 1843150 - DNA, 25 bp, Homo sapien
tctgttaaataatcgcagtgctcct

SEQ ID NO: 1843151 - DNA, 25 bp, Homo sapien
ctgttaaataatcgcagtgctcctt

SEQ ID NO: 1843152 - DNA, 25 bp, Homo sapien
ttaaataatcgcagtgctcctttca

SEQ ID NO: 1843153 - DNA, 25 bp, Homo sapien
gaccaccttggctatatgtccatag

SEQ ID NO: 1843154 - DNA, 25 bp, Homo sapien
atgtagacagctgtgatggtcccac

SEQ ID NO: 1843155 - DNA, 25 bp, Homo sapien
gggacactactatcaaatgggatcc

SEQ ID NO: 1843156 - DNA, 25 bp, Homo sapien
accaggcctggactgacttgatcct

SEQ ID NO: 1843157 - DNA, 25 bp, Homo sapien
aagagctgaacctcattatcatgga

SEQ ID NO: 1843158 - DNA, 25 bp, Homo sapien
caagaccagtgaagcaacaaagagc

SEQ ID NO: 1843159 - DNA, 25 bp, Homo sapien
gagctgaacctcattatcatggatg

SEQ ID NO: 1843160 - DNA, 25 bp, Homo sapien
aggagcaagaccagtgaagcaacaa

SEQ ID NO: 1843161 - DNA, 25 bp, Homo sapien
gaaatgttggagcaatcggtgtcca

SEQ ID NO: 1843162 - DNA, 25 bp, Homo sapien
agaaatgttggagcaatcggtgtcc

SEQ ID NO: 1843163 - DNA, 25 bp, Homo sapien
aaatgttggagcaatcggtgtccac

SEQ ID NO: 1843164 - DNA, 25 bp, Homo sapien
gaagaaatgttggagcaatcggtgt

SEQ ID NO: 1843165 - DNA, 25 bp, Homo sapien
tgacagtgccctggataagagtgtt

SEQ ID NO: 1843166 - DNA, 25 bp, Homo sapien
ttcattacggcggtatagtggagag

SEQ ID NO: 1843167 - DNA, 25 bp, Homo sapien
tggcacagctgagggttcattacgg

SEQ ID NO: 1843168 - DNA, 25 bp, Homo sapien
gccctggataagagtgtttcccact

SEQ ID NO: 1843169 - DNA, 25 bp, Homo sapien
gcgatcaaaagccattacagccagg

SEQ ID NO: 1843170 - DNA, 25 bp, Homo sapien
cgatcaaaagccattacagccagga

SEQ ID NO: 1843171 - DNA, 25 bp, Homo sapien
gatcaaaagccattacagccaggag

SEQ ID NO: 1843172 - DNA, 25 bp, Homo sapien
ttgtcaggtccttttaggttccaca

SEQ ID NO: 1843173 - DNA, 25 bp, Homo sapien
tgtcaggtccttttaggttccacag

SEQ ID NO: 1843174 - DNA, 25 bp, Homo sapien
tcaggtccttttaggttccacagca

SEQ ID NO: 1843175 - DNA, 25 bp, Homo sapien
gtcaggtccttttaggttccacagc

SEQ ID NO: 1843176 - DNA, 25 bp, Homo sapien
atgggtgtcttgagtttagggtcta

SEQ ID NO: 1843177 - DNA, 25 bp, Homo sapien
gtcttgagtttagggtctacagagc

SEQ ID NO: 1843178 - DNA, 25 bp, Homo sapien
tgagtttagggtctacagagcagat

SEQ ID NO: 1843179 - DNA, 25 bp, Homo sapien
ggtgtcttgagtttagggtctacag

SEQ ID NO: 1843180 - DNA, 25 bp, Homo sapien
gggtaaggagataggatatcaaaac

SEQ ID NO: 1843181 - DNA, 25 bp, Homo sapien
caagggtaaggagataggatatcaa

SEQ ID NO: 1843182 - DNA, 25 bp, Homo sapien
cacaagggtaaggagataggatatc

SEQ ID NO: 1843183 - DNA, 25 bp, Homo sapien
cccacaagggtaaggagataggata

SEQ ID NO: 1843184 - DNA, 25 bp, Homo sapien
caggatgaagtctcccttgacactg

SEQ ID NO: 1843185 - DNA, 25 bp, Homo sapien
gagaaacacattacaagaattcagg

SEQ ID NO: 1843186 - DNA, 25 bp, Homo sapien
caccctgttcagaactaggagaaac

SEQ ID NO: 1843187 - DNA, 25 bp, Homo sapien
ttacaagaattcagggaggataatg

SEQ ID NO: 1843188 - DNA, 25 bp, Homo sapien
gaactaggagaaacacattacaaga

SEQ ID NO: 1843189 - DNA, 25 bp, Homo sapien
tcatgtgcattacggcttttatatt

SEQ ID NO: 1843190 - DNA, 25 bp, Homo sapien
atcatgtgcattacggcttttatat

SEQ ID NO: 1843191 - DNA, 25 bp, Homo sapien
catcatgtgcattacggcttttata

SEQ ID NO: 1843192 - DNA, 25 bp, Homo sapien
gcatcatgtgcattacggcttttat

SEQ ID NO: 1843193 - DNA, 25 bp, Homo sapien
tatatctaacagtcccatagaagat

SEQ ID NO: 1843194 - DNA, 25 bp, Homo sapien
tacatatatctaacagtcccataga

SEQ ID NO: 1843195 - DNA, 25 bp, Homo sapien
cttattccttagtgggatgggttca

SEQ ID NO: 1843196 - DNA, 25 bp, Homo sapien
ccacttgaactccttattccttagt

SEQ ID NO: 1843197 - DNA, 25 bp, Homo sapien
ccatatgacacaagaatgagaagaa

SEQ ID NO: 1843198 - DNA, 25 bp, Homo sapien
tcctccatgactgtggtagccccac

SEQ ID NO: 1843199 - DNA, 25 bp, Homo sapien
tttcctccatgactgtggtagcccc

SEQ ID NO: 1843200 - DNA, 25 bp, Homo sapien
gtttcctccatgactgtggtagccc

SEQ ID NO: 1843201 - DNA, 25 bp, Homo sapien
agtttcctccatgactgtggtagcc

SEQ ID NO: 1843202 - DNA, 25 bp, Homo sapien
atgcaattttgaccattgcagatat

SEQ ID NO: 1843203 - DNA, 25 bp, Homo sapien
ttgaccattgcagatatttcacaaa

SEQ ID NO: 1843204 - DNA, 25 bp, Homo sapien
ggtctccgcatcgaggaagactcac

SEQ ID NO: 1843205 - DNA, 25 bp, Homo sapien
tggtggtctccgcatcgaggaagac

SEQ ID NO: 1843206 - DNA, 25 bp, Homo sapien
tagtgaaaagttgaaaagcacagcc

SEQ ID NO: 1843207 - DNA, 25 bp, Homo sapien
ccgtgcatagcgtcacattagtgaa

SEQ ID NO: 1843208 - DNA, 25 bp, Homo sapien
gaagcatacattcaaccgtgcatag

SEQ ID NO: 1843209 - DNA, 25 bp, Homo sapien
tatggtcatatagtccagaggcttg

SEQ ID NO: 1843210 - DNA, 25 bp, Homo sapien
caggcattgaccaacatctgtggga

SEQ ID NO: 1843211 - DNA, 25 bp, Homo sapien
tgtgggactatatttgtggtgtaac

SEQ ID NO: 1843212 - DNA, 25 bp, Homo sapien
tgtaacaaagatccaagatagccag

SEQ ID NO: 1843213 - DNA, 25 bp, Homo sapien
ggcattgaccaacatctgtgggact

SEQ ID NO: 1843214 - DNA, 25 bp, Homo sapien
gagatgtttatccagtaatggcagc

SEQ ID NO: 1843215 - DNA, 25 bp, Homo sapien
taaggaccatatttcccatcaaaga

SEQ ID NO: 1843216 - DNA, 25 bp, Homo sapien
tgtttatccagtaatggcagcagga

SEQ ID NO: 1843217 - DNA, 25 bp, Homo sapien
gcagcaggataaggaccatatttcc

SEQ ID NO: 1843218 - DNA, 25 bp, Homo sapien
caaccaaagtaactatcattgatca

SEQ ID NO: 1843219 - DNA, 25 bp, Homo sapien
ccaaggagcataagccaaccaaagt

SEQ ID NO: 1843220 - DNA, 25 bp, Homo sapien
agggaacccaaggagcataagccaa

SEQ ID NO: 1843221 - DNA, 25 bp, Homo sapien
ggagcataagccaaccaaagtaact

SEQ ID NO: 1843222 - DNA, 25 bp, Homo sapien
caagaactataatcaggcacatggc

SEQ ID NO: 1843223 - DNA, 25 bp, Homo sapien
gagaagtttgccctcattctgattt

SEQ ID NO: 1843224 - DNA, 25 bp, Homo sapien
ggtgtccacacatgcaatcttgaat

SEQ ID NO: 1843225 - DNA, 25 bp, Homo sapien
ataaattaatgggttcaagctggga

SEQ ID NO: 1843226 - DNA, 25 bp, Homo sapien
atcgaggaagactcgtggcataagg

SEQ ID NO: 1843227 - DNA, 25 bp, Homo sapien
agactcgtggcataaggggaaggta

SEQ ID NO: 1843228 - DNA, 25 bp, Homo sapien
gaagactcgtggcataaggggaagg

SEQ ID NO: 1843229 - DNA, 25 bp, Homo sapien
aggaagactcgtggcataaggggaa

SEQ ID NO: 1843230 - DNA, 25 bp, Homo sapien
catcatggacagaaggatgcattca

SEQ ID NO: 1843231 - DNA, 25 bp, Homo sapien
tatggtcatatgatgcagaggcttg

SEQ ID NO: 1843232 - DNA, 25 bp, Homo sapien
ggcttgcagatagcattgagtcgat

SEQ ID NO: 1843233 - DNA, 25 bp, Homo sapien
caactacccaggagatgaccacaag

SEQ ID NO: 1843234 - DNA, 25 bp, Homo sapien
gtgccacatcaatgaaaagttgaaa

SEQ ID NO: 1843235 - DNA, 25 bp, Homo sapien
atgaaaagttgaaaggcacacccac

SEQ ID NO: 1843236 - DNA, 25 bp, Homo sapien
tacagtgccacatcaatgaaaagtt

SEQ ID NO: 1843237 - DNA, 25 bp, Homo sapien
cagtgccacatcaatgaaaagttga

SEQ ID NO: 1843238 - DNA, 25 bp, Homo sapien
ccaagatggccaaatttctaaggaa

SEQ ID NO: 1843239 - DNA, 25 bp, Homo sapien
gtataacagagatccaagatggcca

SEQ ID NO: 1843240 - DNA, 25 bp, Homo sapien
caagatggccaaatttctaaggaag

SEQ ID NO: 1843241 - DNA, 25 bp, Homo sapien
ggtataacagagatccaagatggcc

SEQ ID NO: 1843242 - DNA, 25 bp, Homo sapien
ggagatggtcatctaggaaagacaa

SEQ ID NO: 1843243 - DNA, 25 bp, Homo sapien
caataggatgatggccatatttccc

SEQ ID NO: 1843244 - DNA, 25 bp, Homo sapien
catatttcccatgaaggcaatagtg

SEQ ID NO: 1843245 - DNA, 25 bp, Homo sapien
gctgccctgtgaatccaaggagtat

SEQ ID NO: 1843246 - DNA, 25 bp, Homo sapien
cccagggatgaagtcgatttgatta

SEQ ID NO: 1843247 - DNA, 25 bp, Homo sapien
atgagttagggaagattccgacttt

SEQ ID NO: 1843248 - DNA, 25 bp, Homo sapien
gggatgaagtcgatttgattatggt

SEQ ID NO: 1843249 - DNA, 25 bp, Homo sapien
atgaagtcgatttgattatggtgga

SEQ ID NO: 1843250 - DNA, 25 bp, Homo sapien
cgattgttatatgaggcctgagtcc

SEQ ID NO: 1843251 - DNA, 25 bp, Homo sapien
taatgtgtcagaatatggagagcca

SEQ ID NO: 1843252 - DNA, 25 bp, Homo sapien
gaatatgtctgcatggttcaagcga

SEQ ID NO: 1843253 - DNA, 25 bp, Homo sapien
gcctgagtccaaggttgcattttaa

SEQ ID NO: 1843254 - DNA, 25 bp, Homo sapien
ggataccgtaactcagatgacacga

SEQ ID NO: 1843255 - DNA, 25 bp, Homo sapien
cacgatttgaaatatagagctggcc

SEQ ID NO: 1843256 - DNA, 25 bp, Homo sapien
gaatatgacatagggcaactgagag

SEQ ID NO: 1843257 - DNA, 25 bp, Homo sapien
gagctggccaactaagtacatgaac

SEQ ID NO: 1843258 - DNA, 25 bp, Homo sapien
atggctaagccaaaatggccaaagt

SEQ ID NO: 1843259 - DNA, 25 bp, Homo sapien
tatgacggagataggtctcttctag

SEQ ID NO: 1843260 - DNA, 25 bp, Homo sapien
gctaagccaaaatggccaaagtgac

SEQ ID NO: 1843261 - DNA, 25 bp, Homo sapien
ggtcttccaatatgacggagatagg

SEQ ID NO: 1843262 - DNA, 25 bp, Homo sapien
tgaaaagtcaaagtttattaccaca

SEQ ID NO: 1843263 - DNA, 25 bp, Homo sapien
gtttattaccacattcacagcttgt

SEQ ID NO: 1843264 - DNA, 25 bp, Homo sapien
gtcaaagtttattaccacattcaca

SEQ ID NO: 1843265 - DNA, 25 bp, Homo sapien
acattcacagcttgtatatcaatac

SEQ ID NO: 1843266 - DNA, 25 bp, Homo sapien
tcaagtaaacagatcagtgcaaatg

SEQ ID NO: 1843267 - DNA, 25 bp, Homo sapien
ttcctgcctcattttagcatgaatg

SEQ ID NO: 1843268 - DNA, 25 bp, Homo sapien
agtgcaaatgagaataagccatttc

SEQ ID NO: 1843269 - DNA, 25 bp, Homo sapien
ttttagcatgaatgtagaaacaaaa

SEQ ID NO: 1843270 - DNA, 25 bp, Homo sapien
gagagcagttaaagaaaatgatcat

SEQ ID NO: 1843271 - DNA, 25 bp, Homo sapien
gtgaggccgtgtactttttggtgct

SEQ ID NO: 1843272 - DNA, 25 bp, Homo sapien
ccagttgagaaattttggctggcca

SEQ ID NO: 1843273 - DNA, 25 bp, Homo sapien
ttccatcaggttagtctcagggttt

SEQ ID NO: 1843274 - DNA, 25 bp, Homo sapien
caggtagcatgagaataatatcttc

SEQ ID NO: 1843275 - DNA, 25 bp, Homo sapien
tatcttccattaactgcccaaaatc

SEQ ID NO: 1843276 - DNA, 25 bp, Homo sapien
ctgcctgtcttcaggtagcatgaga

SEQ ID NO: 1843277 - DNA, 25 bp, Homo sapien
gaataatatcttccattaactgccc

SEQ ID NO: 1843278 - DNA, 25 bp, Homo sapien
tatctgcctcatccaatactatcac

SEQ ID NO: 1843279 - DNA, 25 bp, Homo sapien
atactatcacctggacatgactgac

SEQ ID NO: 1843280 - DNA, 25 bp, Homo sapien
tgcctcatccaatactatcacctgg

SEQ ID NO: 1843281 - DNA, 25 bp, Homo sapien
ctgggacagaaacttatctgcctca

SEQ ID NO: 1843282 - DNA, 25 bp, Homo sapien
cagcctcagtacgtcatctcctgaa

SEQ ID NO: 1843283 - DNA, 25 bp, Homo sapien
gcctcagtacgtcatctcctgaatt

SEQ ID NO: 1843284 - DNA, 25 bp, Homo sapien
agtacgtcatctcctgaattggttc

SEQ ID NO: 1843285 - DNA, 25 bp, Homo sapien
tcagtacgtcatctcctgaattggt

SEQ ID NO: 1843286 - DNA, 25 bp, Homo sapien
tgacctggatgcaaatttgactgac

SEQ ID NO: 1843287 - DNA, 25 bp, Homo sapien
ccactttgactcctcccatgtgttt

SEQ ID NO: 1843288 - DNA, 25 bp, Homo sapien
ccatgtgtttgctgacctggatgca

SEQ ID NO: 1843289 - DNA, 25 bp, Homo sapien
caccactttgactcctcccatgtgt

SEQ ID NO: 1843290 - DNA, 25 bp, Homo sapien
cctgtgggaacaatcactattgttt

SEQ ID NO: 1843291 - DNA, 25 bp, Homo sapien
ggaacaatcactattgtttgtatag

SEQ ID NO: 1843292 - DNA, 25 bp, Homo sapien
cctcctgtgggaacaatcactattg

SEQ ID NO: 1843293 - DNA, 25 bp, Homo sapien
aatcactattgtttgtatagtgtcc

SEQ ID NO: 1843294 - DNA, 25 bp, Homo sapien
ttttaagtaggggaatgtcatgggc

SEQ ID NO: 1843295 - DNA, 25 bp, Homo sapien
aggggaatgtcatgggcactgctct

SEQ ID NO: 1843296 - DNA, 25 bp, Homo sapien
taagtaggggaatgtcatgggcact

SEQ ID NO: 1843297 - DNA, 25 bp, Homo sapien
taggggaatgtcatgggcactgctc

SEQ ID NO: 1843298 - DNA, 25 bp, Homo sapien
atgctctcttcttggaaaggagatg

SEQ ID NO: 1843299 - DNA, 25 bp, Homo sapien
ttccatcccatttcaaaaattctca

SEQ ID NO: 1843300 - DNA, 25 bp, Homo sapien
agataaagcaatgggaatgctctct

SEQ ID NO: 1843301 - DNA, 25 bp, Homo sapien
aatgggaatgctctcttcttggaaa

SEQ ID NO: 1843302 - DNA, 25 bp, Homo sapien
tatcctcttgtagaggtcacatcca

SEQ ID NO: 1843303 - DNA, 25 bp, Homo sapien
tcctcttgtagaggtcacatccaac

SEQ ID NO: 1843304 - DNA, 25 bp, Homo sapien
cctcttgtagaggtcacatccaaca

SEQ ID NO: 1843305 - DNA, 25 bp, Homo sapien
ctcttgtagaggtcacatccaacat

SEQ ID NO: 1843306 - DNA, 25 bp, Homo sapien
tctgcgcttgtggttgagtgctatt

SEQ ID NO: 1843307 - DNA, 25 bp, Homo sapien
caggggacccctcagctgaccattt

SEQ ID NO: 1843308 - DNA, 25 bp, Homo sapien
cgcttgtggttgagtgctattattg

SEQ ID NO: 1843309 - DNA, 25 bp, Homo sapien
cagcgttctctgttctggttgtgct

SEQ ID NO: 1843310 - DNA, 25 bp, Homo sapien
taagtgagtttactatccaaagagg

SEQ ID NO: 1843311 - DNA, 25 bp, Homo sapien
ataagtgagtttactatccaaagag

SEQ ID NO: 1843312 - DNA, 25 bp, Homo sapien
ggcaggcagaatgtcaacactgtat

SEQ ID NO: 1843313 - DNA, 25 bp, Homo sapien
catatgtaaagatggcgctgccata

SEQ ID NO: 1843314 - DNA, 25 bp, Homo sapien
taatgagtaagttgagatgggccgt

SEQ ID NO: 1843315 - DNA, 25 bp, Homo sapien
gagtccaaccaatgaagaccccagt

SEQ ID NO: 1843316 - DNA, 25 bp, Homo sapien
taaaggattgcagattgcaatgtaa

SEQ ID NO: 1843317 - DNA, 25 bp, Homo sapien
aaggattgcagattgcaatgtaacg

SEQ ID NO: 1843318 - DNA, 25 bp, Homo sapien
cttaaaggattgcagattgcaatgt

SEQ ID NO: 1843319 - DNA, 25 bp, Homo sapien
aggattgcagattgcaatgtaacga

SEQ ID NO: 1843320 - DNA, 25 bp, Homo sapien
tcatatgccattgctgccagtagga

SEQ ID NO: 1843321 - DNA, 25 bp, Homo sapien
catatgccattgctgccagtaggag

SEQ ID NO: 1843322 - DNA, 25 bp, Homo sapien
caaagaaaacaaatgcaaaaagttg

SEQ ID NO: 1843323 - DNA, 25 bp, Homo sapien
aacaaatgcaaaaagttgaaccaca

SEQ ID NO: 1843324 - DNA, 25 bp, Homo sapien
ctacaaagaaaacaaatgcaaaaag

SEQ ID NO: 1843325 - DNA, 25 bp, Homo sapien
aaatgcaaaaagttgaaccacacac

SEQ ID NO: 1843326 - DNA, 25 bp, Homo sapien
gctttttttctttgagaggaggtgc

SEQ ID NO: 1843327 - DNA, 25 bp, Homo sapien
tttttttctttgagaggaggtgcac

SEQ ID NO: 1843328 - DNA, 25 bp, Homo sapien
cccacataagaaatgctttttttct

SEQ ID NO: 1843329 - DNA, 25 bp, Homo sapien
atgctttttttctttgagaggaggt

SEQ ID NO: 1843330 - DNA, 25 bp, Homo sapien
gggacattgctggtggtgtagcaga

SEQ ID NO: 1843331 - DNA, 25 bp, Homo sapien
catcatctgggggacattgctggtg

SEQ ID NO: 1843332 - DNA, 25 bp, Homo sapien
ggtgtagcagatgtcaataaaggcc

SEQ ID NO: 1843333 - DNA, 25 bp, Homo sapien
cagatgtcaataaaggccaagttcc

SEQ ID NO: 1843334 - DNA, 25 bp, Homo sapien
gatgaattcagttatagctgtttga

SEQ ID NO: 1843335 - DNA, 25 bp, Homo sapien
gtcacagtcgtcaagataattaata

SEQ ID NO: 1843336 - DNA, 25 bp, Homo sapien
cagaaagaagatggtgaatagtaaa

SEQ ID NO: 1843337 - DNA, 25 bp, Homo sapien
gaagatggtgaatagtaaaaactgc

SEQ ID NO: 1843338 - DNA, 25 bp, Homo sapien
tcctttcaggaattgggcaaagaga

SEQ ID NO: 1843339 - DNA, 25 bp, Homo sapien
atgaatcatatgctgcaatagcatg

SEQ ID NO: 1843340 - DNA, 25 bp, Homo sapien
aatgaatcatatgctgcaatagcat

SEQ ID NO: 1843341 - DNA, 25 bp, Homo sapien
tttcaggaattgggcaaagagaaga

SEQ ID NO: 1843342 - DNA, 25 bp, Homo sapien
agaatctctggtattcatttgcttc

SEQ ID NO: 1843343 - DNA, 25 bp, Homo sapien
agaagaatctctggtattcatttgc

SEQ ID NO: 1843344 - DNA, 25 bp, Homo sapien
gaatctctggtattcatttgcttct

SEQ ID NO: 1843345 - DNA, 25 bp, Homo sapien
aatctctggtattcatttgcttctt

SEQ ID NO: 1843346 - DNA, 25 bp, Homo sapien
tactaaagcatcatgttgtgaagcc

SEQ ID NO: 1843347 - DNA, 25 bp, Homo sapien
caaagagcttgtcacattggcttaa

SEQ ID NO: 1843348 - DNA, 25 bp, Homo sapien
ttttgtcctaggagaaatgccacat

SEQ ID NO: 1843349 - DNA, 25 bp, Homo sapien
tgccaccgaattatcctgacatatg

SEQ ID NO: 1843350 - DNA, 25 bp, Homo sapien
agtggtgttgctgccagtctttaaa

SEQ ID NO: 1843351 - DNA, 25 bp, Homo sapien
aagattttcttcagagccatcatca

SEQ ID NO: 1843352 - DNA, 25 bp, Homo sapien
aaagattttcttcagagccatcatc

SEQ ID NO: 1843353 - DNA, 25 bp, Homo sapien
caaagattttcttcagagccatcat

SEQ ID NO: 1843354 - DNA, 25 bp, Homo sapien
agattttcttcagagccatcatcac

SEQ ID NO: 1843355 - DNA, 25 bp, Homo sapien
tggacagagccttgtggagtattct

SEQ ID NO: 1843356 - DNA, 25 bp, Homo sapien
cttgtggagtattctgcaggacctg

SEQ ID NO: 1843357 - DNA, 25 bp, Homo sapien
cattatccggtcctgaatcatggag

SEQ ID NO: 1843358 - DNA, 25 bp, Homo sapien
ggtgacggcgctatacatgatggcc

SEQ ID NO: 1843359 - DNA, 25 bp, Homo sapien
taagagcggcttgacatcgtagaag

SEQ ID NO: 1843360 - DNA, 25 bp, Homo sapien
cactacaggccaattctaagagcgg

SEQ ID NO: 1843361 - DNA, 25 bp, Homo sapien
ctgcctgtgacaatggaaagaagcc

SEQ ID NO: 1843362 - DNA, 25 bp, Homo sapien
aagaagccattgattgagtaatgtg

SEQ ID NO: 1843363 - DNA, 25 bp, Homo sapien
gccgcagctgccaacagaatacaca

SEQ ID NO: 1843364 - DNA, 25 bp, Homo sapien
ggccgcagctgccaacagaatacac

SEQ ID NO: 1843365 - DNA, 25 bp, Homo sapien
gaatgcatcagagcgtaaaagaagc

SEQ ID NO: 1843366 - DNA, 25 bp, Homo sapien
gcatcagagcgtaaaagaagctgat

SEQ ID NO: 1843367 - DNA, 25 bp, Homo sapien
acagtgtagcgaagaggattgcaga

SEQ ID NO: 1843368 - DNA, 25 bp, Homo sapien
tgatgacagtgtagcgaagaggatt

SEQ ID NO: 1843369 - DNA, 25 bp, Homo sapien
ttgcagatggcaacaaaacggtcaa

SEQ ID NO: 1843370 - DNA, 25 bp, Homo sapien
gcagatggcaacaaaacggtcaaag

SEQ ID NO: 1843371 - DNA, 25 bp, Homo sapien
agtgtagctgggtgatacagcctag

SEQ ID NO: 1843372 - DNA, 25 bp, Homo sapien
tagaaaagatatagccctgcgactg

SEQ ID NO: 1843373 - DNA, 25 bp, Homo sapien
cctctgtgcttcccaaaaagtggaa

SEQ ID NO: 1843374 - DNA, 25 bp, Homo sapien
acgaggtttacgagcagcttgggca

SEQ ID NO: 1843375 - DNA, 25 bp, Homo sapien
agaaatatccagacaagaaaggttt

SEQ ID NO: 1843376 - DNA, 25 bp, Homo sapien
gaaatatccagacaagaaaggtttc

SEQ ID NO: 1843377 - DNA, 25 bp, Homo sapien
tcattcattgtagtgacattctcca

SEQ ID NO: 1843378 - DNA, 25 bp, Homo sapien
agtcaggccaagtagaagaaactca

SEQ ID NO: 1843379 - DNA, 25 bp, Homo sapien
gagtggagttgtggttccaaaacaa

SEQ ID NO: 1843380 - DNA, 25 bp, Homo sapien
aaggctgcagctcctgaacaccagt

SEQ ID NO: 1843381 - DNA, 25 bp, Homo sapien
caataacagaattaatttttctgaa

SEQ ID NO: 1843382 - DNA, 25 bp, Homo sapien
tgctctgggaagcaaatttaacaat

SEQ ID NO: 1843383 - DNA, 25 bp, Homo sapien
tgggaagcaaatttaacaataacag

SEQ ID NO: 1843384 - DNA, 25 bp, Homo sapien
ctctgggaagcaaatttaacaataa

SEQ ID NO: 1843385 - DNA, 25 bp, Homo sapien
tcctcttgggagtgacagacattca

SEQ ID NO: 1843386 - DNA, 25 bp, Homo sapien
ctgcagccttttctcttcgtggttt

SEQ ID NO: 1843387 - DNA, 25 bp, Homo sapien
gcagccttttctcttcgtggttttc

SEQ ID NO: 1843388 - DNA, 25 bp, Homo sapien
tcagtcaccgaatttctcctcttgg

SEQ ID NO: 1843389 - DNA, 25 bp, Homo sapien
agcacggagtccatgttgttcgccg

SEQ ID NO: 1843390 - DNA, 25 bp, Homo sapien
tgctgcactccgtaatgacttctcg

SEQ ID NO: 1843391 - DNA, 25 bp, Homo sapien
gatatctgttactctacggtgacac

SEQ ID NO: 1843392 - DNA, 25 bp, Homo sapien
catctacttcatcagtgtgactggg

SEQ ID NO: 1843393 - DNA, 25 bp, Homo sapien
tcttcttcaagacccgttcttgtag

SEQ ID NO: 1843394 - DNA, 25 bp, Homo sapien
ttgtagcatgctctgtaaagcactg

SEQ ID NO: 1843395 - DNA, 25 bp, Homo sapien
cattatcacttatctcttcttcaag

SEQ ID NO: 1843396 - DNA, 25 bp, Homo sapien
tgtcacggggacaattgccatgggc

SEQ ID NO: 1843397 - DNA, 25 bp, Homo sapien
gaactgcagccttttctcttcgttg

SEQ ID NO: 1843398 - DNA, 25 bp, Homo sapien
tgggagtgacagacattcaagaact

SEQ ID NO: 1843399 - DNA, 25 bp, Homo sapien
gcagccttttctcttcgttgttttc

SEQ ID NO: 1843400 - DNA, 25 bp, Homo sapien
actgcagccttttctcttcgttgtt

SEQ ID NO: 1843401 - DNA, 25 bp, Homo sapien
tcctgggaaacctgtcctgcctgga

SEQ ID NO: 1843402 - DNA, 25 bp, Homo sapien
ggccgtgatggcatttgaccgcttt

SEQ ID NO: 1843403 - DNA, 25 bp, Homo sapien
ctttcttgggatgcataagccaact

SEQ ID NO: 1843404 - DNA, 25 bp, Homo sapien
tgctactccagcgtaacactgccaa

SEQ ID NO: 1843405 - DNA, 25 bp, Homo sapien
ccctctaggcaggggaatatatcaa

SEQ ID NO: 1843406 - DNA, 25 bp, Homo sapien
aacgaccaccaaaccctctaggcag

SEQ ID NO: 1843407 - DNA, 25 bp, Homo sapien
acgaccaccaaaccctctaggcagg

SEQ ID NO: 1843408 - DNA, 25 bp, Homo sapien
ctaggcaggggaatatatcaatagg

SEQ ID NO: 1843409 - DNA, 25 bp, Homo sapien
aagaaaagatgacatctgagttcgc

SEQ ID NO: 1843410 - DNA, 25 bp, Homo sapien
tagggaagaaaagatgacatctgag

SEQ ID NO: 1843411 - DNA, 25 bp, Homo sapien
tttagggaagaaaagatgacatctg

SEQ ID NO: 1843412 - DNA, 25 bp, Homo sapien
aagatgacatctgagttcgcagaag

SEQ ID NO: 1843413 - DNA, 25 bp, Homo sapien
gacacagtgttcagtggaaaaccag

SEQ ID NO: 1843414 - DNA, 25 bp, Homo sapien
gtttagccatacgatgaagcccaga

SEQ ID NO: 1843415 - DNA, 25 bp, Homo sapien
gaattggaggctactatccttcgca

SEQ ID NO: 1843416 - DNA, 25 bp, Homo sapien
gaagagtccccaatggaggtgtccg

SEQ ID NO: 1843417 - DNA, 25 bp, Homo sapien
gagaatcttccgaagtgcctgatgc

SEQ ID NO: 1843418 - DNA, 25 bp, Homo sapien
ttgtttgatacagagaatcttccga

SEQ ID NO: 1843419 - DNA, 25 bp, Homo sapien
gaatcttccgaagtgcctgatgcac

SEQ ID NO: 1843420 - DNA, 25 bp, Homo sapien
gatacagagaatcttccgaagtgcc

SEQ ID NO: 1843421 - DNA, 25 bp, Homo sapien
tatagatcacaggattgaagagagg

SEQ ID NO: 1843422 - DNA, 25 bp, Homo sapien
gatcatgagcgttccatagaatgtg

SEQ ID NO: 1843423 - DNA, 25 bp, Homo sapien
tcactacagctaggtgggaggagca

SEQ ID NO: 1843424 - DNA, 25 bp, Homo sapien
gcagagggtgcaacataaaagatca

SEQ ID NO: 1843425 - DNA, 25 bp, Homo sapien
aagatgtcagaatcagtccaaaagg

SEQ ID NO: 1843426 - DNA, 25 bp, Homo sapien
ccacaattctggcataagatgtcag

SEQ ID NO: 1843427 - DNA, 25 bp, Homo sapien
gaatcagtccaaaaggaatagtgag

SEQ ID NO: 1843428 - DNA, 25 bp, Homo sapien
cagcaggaactctcagcactgccac

SEQ ID NO: 1843429 - DNA, 25 bp, Homo sapien
tccaggaaggacagattcgccaaga

SEQ ID NO: 1843430 - DNA, 25 bp, Homo sapien
gccaggcccacgaaaagcataaagt

SEQ ID NO: 1843431 - DNA, 25 bp, Homo sapien
gagcctctgggagctaaccactgct

SEQ ID NO: 1843432 - DNA, 25 bp, Homo sapien
gcatttttggcatcactgcggaggt

SEQ ID NO: 1843433 - DNA, 25 bp, Homo sapien
tataccaagcctaacgttattagag

SEQ ID NO: 1843434 - DNA, 25 bp, Homo sapien
tgggggagaaattttagcatgtctc

SEQ ID NO: 1843435 - DNA, 25 bp, Homo sapien
ctgcttggcaataattgggggagaa

SEQ ID NO: 1843436 - DNA, 25 bp, Homo sapien
tgtctctgcatcttctataccaagc

SEQ ID NO: 1843437 - DNA, 25 bp, Homo sapien
agcagagaaggaccaaacccagcct

SEQ ID NO: 1843438 - DNA, 25 bp, Homo sapien
gtagtttcatcaagtcattcaggag

SEQ ID NO: 1843439 - DNA, 25 bp, Homo sapien
taatagggaaggaagtaggtgccat

SEQ ID NO: 1843440 - DNA, 25 bp, Homo sapien
gcaagtaggctaagttttgagggcc

SEQ ID NO: 1843441 - DNA, 25 bp, Homo sapien
ggttttcatatgctattcaaagcaa

SEQ ID NO: 1843442 - DNA, 25 bp, Homo sapien
tggaaggttttcatatgctattcaa

SEQ ID NO: 1843443 - DNA, 25 bp, Homo sapien
catatgctattcaaagcaatatgtg

SEQ ID NO: 1843444 - DNA, 25 bp, Homo sapien
gaaggttttcatatgctattcaaag

SEQ ID NO: 1843445 - DNA, 25 bp, Homo sapien
gagtgaatctggcactccctatgtg

SEQ ID NO: 1843446 - DNA, 25 bp, Homo sapien
gtgaatctggcactccctatgtggg

SEQ ID NO: 1843447 - DNA, 25 bp, Homo sapien
gaatctggcactccctatgtgggcc

SEQ ID NO: 1843448 - DNA, 25 bp, Homo sapien
gtgagtgaatctggcactccctatg

SEQ ID NO: 1843449 - DNA, 25 bp, Homo sapien
tgaggcttggagtctttctatagga

SEQ ID NO: 1843450 - DNA, 25 bp, Homo sapien
ggcttggagtctttctataggattc

SEQ ID NO: 1843451 - DNA, 25 bp, Homo sapien
tctgaggcttggagtctttctatag

SEQ ID NO: 1843452 - DNA, 25 bp, Homo sapien
gaggcttggagtctttctataggat

SEQ ID NO: 1843453 - DNA, 25 bp, Homo sapien
tgttggaatttcctaccttcagctc

SEQ ID NO: 1843454 - DNA, 25 bp, Homo sapien
tgttctctaaagacaggactgtgag

SEQ ID NO: 1843455 - DNA, 25 bp, Homo sapien
gaaatatcgaccctgttctctaaag

SEQ ID NO: 1843456 - DNA, 25 bp, Homo sapien
tctgctaagatttgctgaagacttc

SEQ ID NO: 1843457 - DNA, 25 bp, Homo sapien
tagaagtaaatattatccagggcag

SEQ ID NO: 1843458 - DNA, 25 bp, Homo sapien
aagagatagtattcaacccagcagg

SEQ ID NO: 1843459 - DNA, 25 bp, Homo sapien
tacatcatggacctaacccaaaata

SEQ ID NO: 1843460 - DNA, 25 bp, Homo sapien
cagggcagatggtgtatcctattca

SEQ ID NO: 1843461 - DNA, 25 bp, Homo sapien
gcgctgctcgcgaagcgttcttggc

SEQ ID NO: 1843462 - DNA, 25 bp, Homo sapien
tgctcgcgaagcgttcttggcgttg

SEQ ID NO: 1843463 - DNA, 25 bp, Homo sapien
tcaagatggcgctgctcgcgaagcg

SEQ ID NO: 1843464 - DNA, 25 bp, Homo sapien
gatggcgctgctcgcgaagcgttct

SEQ ID NO: 1843465 - DNA, 25 bp, Homo sapien
caataaaacctgcaagggaccctat

SEQ ID NO: 1843466 - DNA, 25 bp, Homo sapien
tacataagaagggtaaaattgcatt

SEQ ID NO: 1843467 - DNA, 25 bp, Homo sapien
aatgacatttagcacctcaattagg

SEQ ID NO: 1843468 - DNA, 25 bp, Homo sapien
gatgtactagaacatctacagtgat

SEQ ID NO: 1843469 - DNA, 25 bp, Homo sapien
agtttctccccatatgtgtgtttcc

SEQ ID NO: 1843470 - DNA, 25 bp, Homo sapien
cacctttaaggtgaggtggatggtc

SEQ ID NO: 1843471 - DNA, 25 bp, Homo sapien
taagtcatgccaggaggagatttct

SEQ ID NO: 1843472 - DNA, 25 bp, Homo sapien
agaccagagctgttcacctaccttc

SEQ ID NO: 1843473 - DNA, 25 bp, Homo sapien
cataagacgatagcattttcttggg

SEQ ID NO: 1843474 - DNA, 25 bp, Homo sapien
aagaagtagatgactaggtgaggca

SEQ ID NO: 1843475 - DNA, 25 bp, Homo sapien
aagtagatgactaggtgaggcatgc

SEQ ID NO: 1843476 - DNA, 25 bp, Homo sapien
atgactaggtgaggcatgctgacca

SEQ ID NO: 1843477 - DNA, 25 bp, Homo sapien
ggcatgctgaccacaatggacagta

SEQ ID NO: 1843478 - DNA, 25 bp, Homo sapien
aatactcatggccaccaggagacag

SEQ ID NO: 1843479 - DNA, 25 bp, Homo sapien
gggcacagagaaagctctcaatact

SEQ ID NO: 1843480 - DNA, 25 bp, Homo sapien
catggcagaggtgtgctctgggcgg

SEQ ID NO: 1843481 - DNA, 25 bp, Homo sapien
gtgctctgggcggtggcagcaccag

SEQ ID NO: 1843482 - DNA, 25 bp, Homo sapien
tatcaacagtggccaggttaaggat

SEQ ID NO: 1843483 - DNA, 25 bp, Homo sapien
atcaacagtggccaggttaaggatg

SEQ ID NO: 1843484 - DNA, 25 bp, Homo sapien
cctgtccaccaaccactcacctccc

SEQ ID NO: 1843485 - DNA, 25 bp, Homo sapien
accagcactgtcagggagaagacca

SEQ ID NO: 1843486 - DNA, 25 bp, Homo sapien
agagggccaccagcactgtcaggga

SEQ ID NO: 1843487 - DNA, 25 bp, Homo sapien
aaccactcacctcccgtatggctca

SEQ ID NO: 1843488 - DNA, 25 bp, Homo sapien
cttgaggttctgagactccttgagt

SEQ ID NO: 1843489 - DNA, 25 bp, Homo sapien
ttgaggttctgagactccttgagtc

SEQ ID NO: 1843490 - DNA, 25 bp, Homo sapien
gaaagccagatcaagctcacactcc

SEQ ID NO: 1843491 - DNA, 25 bp, Homo sapien
ggcaaattcttactgaaagccagat

SEQ ID NO: 1843492 - DNA, 25 bp, Homo sapien
ttcttactgaaagccagatcaagct

SEQ ID NO: 1843493 - DNA, 25 bp, Homo sapien
attggcaaattcttactgaaagcca

SEQ ID NO: 1843494 - DNA, 25 bp, Homo sapien
tcataaccgaagtaagtgaccaatg

SEQ ID NO: 1843495 - DNA, 25 bp, Homo sapien
taaaaacggtgtgcttgacaataac

SEQ ID NO: 1843496 - DNA, 25 bp, Homo sapien
gacctgtccacgagaagtctcatgc

SEQ ID NO: 1843497 - DNA, 25 bp, Homo sapien
gacatgagctacacaatgatgcagt

SEQ ID NO: 1843498 - DNA, 25 bp, Homo sapien
ccattgggtcgatgccagctgcctt

SEQ ID NO: 1843499 - DNA, 25 bp, Homo sapien
gttctccacatgctgagtagagtgt

SEQ ID NO: 1843500 - DNA, 25 bp, Homo sapien
tccacatgctgagtagagtgtggtt

SEQ ID NO: 1843501 - DNA, 25 bp, Homo sapien
tgtggttgctccattgggtcgatgc

SEQ ID NO: 1843502 - DNA, 25 bp, Homo sapien
aaataaatgatagggttggcgctgc

SEQ ID NO: 1843503 - DNA, 25 bp, Homo sapien
taacgcccgttggagaatcactctg

SEQ ID NO: 1843504 - DNA, 25 bp, Homo sapien
gaaattaaataggaggtggtgacaa

SEQ ID NO: 1843505 - DNA, 25 bp, Homo sapien
gctgctgtttataatgaggaacaag

SEQ ID NO: 1843506 - DNA, 25 bp, Homo sapien
taatgagtagagtcagactcgacac

SEQ ID NO: 1843507 - DNA, 25 bp, Homo sapien
ttactatgttgatgcaaaaaggcag

SEQ ID NO: 1843508 - DNA, 25 bp, Homo sapien
tagaaatatgacacatgcctttaca

SEQ ID NO: 1843509 - DNA, 25 bp, Homo sapien
gactcgacacacacatcacaagtga

SEQ ID NO: 1843510 - DNA, 25 bp, Homo sapien
ttgggcggtggcatctgtaccagat

SEQ ID NO: 1843511 - DNA, 25 bp, Homo sapien
tagatgtgtattttgggcggtggca

SEQ ID NO: 1843512 - DNA, 25 bp, Homo sapien
agatgagggtgcagacaacattaga

SEQ ID NO: 1843513 - DNA, 25 bp, Homo sapien
ggtgcagacaacattagatgtgtat

SEQ ID NO: 1843514 - DNA, 25 bp, Homo sapien
tcagggataaaaaacacgactccat

SEQ ID NO: 1843515 - DNA, 25 bp, Homo sapien
ctccatgataagttagcagagtcac

SEQ ID NO: 1843516 - DNA, 25 bp, Homo sapien
agacaatatggccaggaaatcaggg

SEQ ID NO: 1843517 - DNA, 25 bp, Homo sapien
caatatggccaggaaatcagggata

SEQ ID NO: 1843518 - DNA, 25 bp, Homo sapien
tgccgagcagcaaagatagatcacg

SEQ ID NO: 1843519 - DNA, 25 bp, Homo sapien
gccattcaataagaccccacagagg

SEQ ID NO: 1843520 - DNA, 25 bp, Homo sapien
taccatgtagggattcgtggcccca

SEQ ID NO: 1843521 - DNA, 25 bp, Homo sapien
tttgaagaaagacgccacagagctg

SEQ ID NO: 1843522 - DNA, 25 bp, Homo sapien
ctgtggagacaaaggctacatgaga

SEQ ID NO: 1843523 - DNA, 25 bp, Homo sapien
agccctctggctgaaccagcaaatt

SEQ ID NO: 1843524 - DNA, 25 bp, Homo sapien
cctctggctgaaccagcaaattttc

SEQ ID NO: 1843525 - DNA, 25 bp, Homo sapien
caaaggctacatgagagagatatct

SEQ ID NO: 1843526 - DNA, 25 bp, Homo sapien
tcatcccaactgtaggccgagtgac

SEQ ID NO: 1843527 - DNA, 25 bp, Homo sapien
tcaaacagctccacgaggcattttg

SEQ ID NO: 1843528 - DNA, 25 bp, Homo sapien
acagctccacgaggcattttgaaat

SEQ ID NO: 1843529 - DNA, 25 bp, Homo sapien
attcatcccaactgtaggccgagtg

SEQ ID NO: 1843530 - DNA, 25 bp, Homo sapien
tctctgaatctggttcgtcagatgc

SEQ ID NO: 1843531 - DNA, 25 bp, Homo sapien
tggttcgtcagatgcgtgacgcagc

SEQ ID NO: 1843532 - DNA, 25 bp, Homo sapien
gagaccttggggacataattgtccc

SEQ ID NO: 1843533 - DNA, 25 bp, Homo sapien
gacgcagcctgctctcctgttgtgg

SEQ ID NO: 1843534 - DNA, 25 bp, Homo sapien
gataatggggatctcctcacacaca

SEQ ID NO: 1843535 - DNA, 25 bp, Homo sapien
ctgaggataatggggatctcctcac

SEQ ID NO: 1843536 - DNA, 25 bp, Homo sapien
gaggataatggggatctcctcacac

SEQ ID NO: 1843537 - DNA, 25 bp, Homo sapien
ggataatggggatctcctcacacac

SEQ ID NO: 1843538 - DNA, 25 bp, Homo sapien
acagtcttgatgccaacacgaccca

SEQ ID NO: 1843539 - DNA, 25 bp, Homo sapien
ctacgatgacctaggccaccttcgt

SEQ ID NO: 1843540 - DNA, 25 bp, Homo sapien
cagtcttgatgccaacacgacccat

SEQ ID NO: 1843541 - DNA, 25 bp, Homo sapien
ggccaccttcgtcacagtcttgatg

SEQ ID NO: 1843542 - DNA, 25 bp, Homo sapien
ctggtcagagctccgcatagccctg

SEQ ID NO: 1843543 - DNA, 25 bp, Homo sapien
ctccactgtggctttatgtgcccag

SEQ ID NO: 1843544 - DNA, 25 bp, Homo sapien
ccactgtggctttatgtgcccaggc

SEQ ID NO: 1843545 - DNA, 25 bp, Homo sapien
tcctttctcttactctggtcagagc

SEQ ID NO: 1843546 - DNA, 25 bp, Homo sapien
tgggcatggagtcccctggactctc

SEQ ID NO: 1843547 - DNA, 25 bp, Homo sapien
gactctcaatatcttgtgtcctgtt

SEQ ID NO: 1843548 - DNA, 25 bp, Homo sapien
ggactctcaatatcttgtgtcctgt

SEQ ID NO: 1843549 - DNA, 25 bp, Homo sapien
catggagtcccctggactctcaata

SEQ ID NO: 1843550 - DNA, 25 bp, Homo sapien
gtcctgtggcgtagccatggcccat

SEQ ID NO: 1843551 - DNA, 25 bp, Homo sapien
caggtcctgtggcgtagccatggcc

SEQ ID NO: 1843552 - DNA, 25 bp, Homo sapien
ttcaggtcctgtggcgtagccatgg

SEQ ID NO: 1843553 - DNA, 25 bp, Homo sapien
ctattgtgataaaacccttcaggtc

SEQ ID NO: 1843554 - DNA, 25 bp, Homo sapien
aaaatgacagaatgtggtttcgcat

SEQ ID NO: 1843555 - DNA, 25 bp, Homo sapien
ggccatcctcccatagatggagcag

SEQ ID NO: 1843556 - DNA, 25 bp, Homo sapien
aggagcttctcaggaagagctgaga

SEQ ID NO: 1843557 - DNA, 25 bp, Homo sapien
tagtgggttaggatgagctcctcag

SEQ ID NO: 1843558 - DNA, 25 bp, Homo sapien
cacaatttataagattactgagcac

SEQ ID NO: 1843559 - DNA, 25 bp, Homo sapien
cccaggttgaagattgctctctatc

SEQ ID NO: 1843560 - DNA, 25 bp, Homo sapien
caagtcaactagagtggtcaaaccc

SEQ ID NO: 1843561 - DNA, 25 bp, Homo sapien
tacttatgtaggaataaggcccagg

SEQ ID NO: 1843562 - DNA, 25 bp, Homo sapien
ttccttcaaaggtagccagccaaga

SEQ ID NO: 1843563 - DNA, 25 bp, Homo sapien
cattcaacaaagctcttgggagaac

SEQ ID NO: 1843564 - DNA, 25 bp, Homo sapien
ggttgagccatactgactaccatgg

SEQ ID NO: 1843565 - DNA, 25 bp, Homo sapien
caagaagtagatggctggttgagcc

SEQ ID NO: 1843566 - DNA, 25 bp, Homo sapien
atgcccaccacaagacaaataagca

SEQ ID NO: 1843567 - DNA, 25 bp, Homo sapien
atgatcaaagtcaggctggaaatgc

SEQ ID NO: 1843568 - DNA, 25 bp, Homo sapien
aggcagtacaggctcctgatgatca

SEQ ID NO: 1843569 - DNA, 25 bp, Homo sapien
gcatgtgaaatattataaagcctgc

SEQ ID NO: 1843570 - DNA, 25 bp, Homo sapien
ggcccttctcccattactcacaaac

SEQ ID NO: 1843571 - DNA, 25 bp, Homo sapien
tgaaattggtcacatgccaggccct

SEQ ID NO: 1843572 - DNA, 25 bp, Homo sapien
actcacaaacctggctaaccacatg

SEQ ID NO: 1843573 - DNA, 25 bp, Homo sapien
ctgaaattggtcacatgccaggccc

SEQ ID NO: 1843574 - DNA, 25 bp, Homo sapien
tgtcagagaaataggacacaggctc

SEQ ID NO: 1843575 - DNA, 25 bp, Homo sapien
aggctccagaaacatggccacctgc

SEQ ID NO: 1843576 - DNA, 25 bp, Homo sapien
tgtgtcagagaaataggacacaggc

SEQ ID NO: 1843577 - DNA, 25 bp, Homo sapien
tcagagaaataggacacaggctcca

SEQ ID NO: 1843578 - DNA, 25 bp, Homo sapien
agcggccaggttaaggacataggtc

SEQ ID NO: 1843579 - DNA, 25 bp, Homo sapien
atcagcagcggccaggttaaggaca

SEQ ID NO: 1843580 - DNA, 25 bp, Homo sapien
cagcagcggccaggttaaggacata

SEQ ID NO: 1843581 - DNA, 25 bp, Homo sapien
taaggacataggtcacgtaggggct

SEQ ID NO: 1843582 - DNA, 25 bp, Homo sapien
agccagcagaccacaccattgccca

SEQ ID NO: 1843583 - DNA, 25 bp, Homo sapien
aagcagaaaagccagcagaccacac

SEQ ID NO: 1843584 - DNA, 25 bp, Homo sapien
agaaaagccagcagaccacaccatt

SEQ ID NO: 1843585 - DNA, 25 bp, Homo sapien
aaaagccagcagaccacaccattgc

SEQ ID NO: 1843586 - DNA, 25 bp, Homo sapien
tgtttgcccaccaaccactcgcctc

SEQ ID NO: 1843587 - DNA, 25 bp, Homo sapien
tctgtcctgttgtcccaatccagct

SEQ ID NO: 1843588 - DNA, 25 bp, Homo sapien
actcgcctcccgtatgactcatgtt

SEQ ID NO: 1843589 - DNA, 25 bp, Homo sapien
gcctcccgtatgactcatgttcact

SEQ ID NO: 1843590 - DNA, 25 bp, Homo sapien
gggctgccttggctgcctgggcaca

SEQ ID NO: 1843591 - DNA, 25 bp, Homo sapien
gctgccttggctgcctgggcacacc

SEQ ID NO: 1843592 - DNA, 25 bp, Homo sapien
gtgggctgccttggctgcctgggca

SEQ ID NO: 1843593 - DNA, 25 bp, Homo sapien
ggtgggctgccttggctgcctgggc

SEQ ID NO: 1843594 - DNA, 25 bp, Homo sapien
ccaacaccaggtgtgtatccatgca

SEQ ID NO: 1843595 - DNA, 25 bp, Homo sapien
tgctgtgcccaacaccaggtgtgta

SEQ ID NO: 1843596 - DNA, 25 bp, Homo sapien
tcgttcaggtattcttgatgctgtg

SEQ ID NO: 1843597 - DNA, 25 bp, Homo sapien
ccctctctccacctcgttcaggtat

SEQ ID NO: 1843598 - DNA, 25 bp, Homo sapien
ttttttattctcttcacaatgttgt

SEQ ID NO: 1843599 - DNA, 25 bp, Homo sapien
cacaatgttgttcaataacttctcc

SEQ ID NO: 1843600 - DNA, 25 bp, Homo sapien
atggaagatttatcaggttttttat

SEQ ID NO: 1843601 - DNA, 25 bp, Homo sapien
cagaaatccctctgtgggaatggaa

SEQ ID NO: 1843602 - DNA, 25 bp, Homo sapien
aggaccgcagatctggctcagatct

SEQ ID NO: 1843603 - DNA, 25 bp, Homo sapien
gatctggctcagatctaatctggtc

SEQ ID NO: 1843604 - DNA, 25 bp, Homo sapien
tcttggggcttggtaacattggtgc

SEQ ID NO: 1843605 - DNA, 25 bp, Homo sapien
ggctcagatctaatctggtcatagg

SEQ ID NO: 1843606 - DNA, 25 bp, Homo sapien
catcagggtgacctgcagttctgtg

SEQ ID NO: 1843607 - DNA, 25 bp, Homo sapien
aacatcagggtgacctgcagttctg

SEQ ID NO: 1843608 - DNA, 25 bp, Homo sapien
ggaaacatcagggtgacctgcagtt

SEQ ID NO: 1843609 - DNA, 25 bp, Homo sapien
gaaacatcagggtgacctgcagttc

SEQ ID NO: 1843610 - DNA, 25 bp, Homo sapien
ctgctgggactaccctggaaccccg

SEQ ID NO: 1843611 - DNA, 25 bp, Homo sapien
tgctgggactaccctggaaccccga

SEQ ID NO: 1843612 - DNA, 25 bp, Homo sapien
ctaccctggaaccccgaatcctgct

SEQ ID NO: 1843613 - DNA, 25 bp, Homo sapien
gaaaatgatggacgtgatgctcgcc

SEQ ID NO: 1843614 - DNA, 25 bp, Homo sapien
gatcattctgcctaccgagtgttgg

SEQ ID NO: 1843615 - DNA, 25 bp, Homo sapien
tattaagccagaacccaaggatgga

SEQ ID NO: 1843616 - DNA, 25 bp, Homo sapien
ttaggccaactacagcgcagaggag

SEQ ID NO: 1843617 - DNA, 25 bp, Homo sapien
tttgcataaataacaaggtatcaag

SEQ ID NO: 1843618 - DNA, 25 bp, Homo sapien
ataaataacaaggtatcaagacaga

SEQ ID NO: 1843619 - DNA, 25 bp, Homo sapien
aggaaaggagataggagtttttgca

SEQ ID NO: 1843620 - DNA, 25 bp, Homo sapien
taacaaggtatcaagacagaattaa

SEQ ID NO: 1843621 - DNA, 25 bp, Homo sapien
tgttcgttgagtaagagattaaaag

SEQ ID NO: 1843622 - DNA, 25 bp, Homo sapien
catcagaagatgtgttcgttgagta

SEQ ID NO: 1843623 - DNA, 25 bp, Homo sapien
tagagttgggcaatatacttcatcc

SEQ ID NO: 1843624 - DNA, 25 bp, Homo sapien
cacttaattaattgtgttagaatca

SEQ ID NO: 1843625 - DNA, 25 bp, Homo sapien
gggattatacccgtcttagtctcga

SEQ ID NO: 1843626 - DNA, 25 bp, Homo sapien
cactttcagggtaaggtggatggtc

SEQ ID NO: 1843627 - DNA, 25 bp, Homo sapien
cattaaatcccattcctcggaacgg

SEQ ID NO: 1843628 - DNA, 25 bp, Homo sapien
cacgctgtcatatgggttggcatca

SEQ ID NO: 1843629 - DNA, 25 bp, Homo sapien
agaggcaggaagcattgggagccat

SEQ ID NO: 1843630 - DNA, 25 bp, Homo sapien
cagaggcaggaagcattgggagcca

SEQ ID NO: 1843631 - DNA, 25 bp, Homo sapien
tttgttcttgcatgctcccatgaat

SEQ ID NO: 1843632 - DNA, 25 bp, Homo sapien
aaaaggactttgcatgcagcttata

SEQ ID NO: 1843633 - DNA, 25 bp, Homo sapien
taccagagttgagttggaaatcccc

SEQ ID NO: 1843634 - DNA, 25 bp, Homo sapien
gaaatcccctgcctggattgctgtg

SEQ ID NO: 1843635 - DNA, 25 bp, Homo sapien
gagaaaatttatgcccaccactaga

SEQ ID NO: 1843636 - DNA, 25 bp, Homo sapien
tattcccaagtgactcagagtaaaa

SEQ ID NO: 1843637 - DNA, 25 bp, Homo sapien
gcagttgagtcatttcacatacaga

SEQ ID NO: 1843638 - DNA, 25 bp, Homo sapien
ttgaaagacctaaatcacctgactg

SEQ ID NO: 1843639 - DNA, 25 bp, Homo sapien
gccaactgggatccggcggtcgcaa

SEQ ID NO: 1843640 - DNA, 25 bp, Homo sapien
acgccaactgggatccggcggtcgc

SEQ ID NO: 1843641 - DNA, 25 bp, Homo sapien
ttacgccaactgggatccggcggtc

SEQ ID NO: 1843642 - DNA, 25 bp, Homo sapien
ccaactgggatccggcggtcgcaag

SEQ ID NO: 1843643 - DNA, 25 bp, Homo sapien
ttatgaagttagctggaagtaccag

SEQ ID NO: 1843644 - DNA, 25 bp, Homo sapien
tatgaagttagctggaagtaccagg

SEQ ID NO: 1843645 - DNA, 25 bp, Homo sapien
gaagtaccaggcagtgacagccacc

SEQ ID NO: 1843646 - DNA, 25 bp, Homo sapien
ctggaagtaccaggcagtgacagcc

SEQ ID NO: 1843647 - DNA, 25 bp, Homo sapien
tgtgaagacacctcctacaatgaga

SEQ ID NO: 1843648 - DNA, 25 bp, Homo sapien
tacggagccattacctgggcagtgc

SEQ ID NO: 1843649 - DNA, 25 bp, Homo sapien
tgtcttcatcttggttgtgcctctc

SEQ ID NO: 1843650 - DNA, 25 bp, Homo sapien
caggtggctgttgccagtgtcttca

SEQ ID NO: 1843651 - DNA, 25 bp, Homo sapien
aaccacatagcttagaagcactgga

SEQ ID NO: 1843652 - DNA, 25 bp, Homo sapien
acaaaccacatagcttagaagcact

SEQ ID NO: 1843653 - DNA, 25 bp, Homo sapien
caaaccacatagcttagaagcactg

SEQ ID NO: 1843654 - DNA, 25 bp, Homo sapien
cacatagcttagaagcactggaaaa

SEQ ID NO: 1843655 - DNA, 25 bp, Homo sapien
cctcctgctgctgttctgatgccaa

SEQ ID NO: 1843656 - DNA, 25 bp, Homo sapien
tcctgctgctgttctgatgccaact

SEQ ID NO: 1843657 - DNA, 25 bp, Homo sapien
agcctcctgctgctgttctgatgcc

SEQ ID NO: 1843658 - DNA, 25 bp, Homo sapien
cctgctgctgttctgatgccaacta

SEQ ID NO: 1843659 - DNA, 25 bp, Homo sapien
tttcaagtactggtctaagattcaa

SEQ ID NO: 1843660 - DNA, 25 bp, Homo sapien
caagtactggtctaagattcaacca

SEQ ID NO: 1843661 - DNA, 25 bp, Homo sapien
tactggtctaagattcaaccagccc

SEQ ID NO: 1843662 - DNA, 25 bp, Homo sapien
gtactggtctaagattcaaccagcc

SEQ ID NO: 1843663 - DNA, 25 bp, Homo sapien
cagtgaatgacagggcccatccaac

SEQ ID NO: 1843664 - DNA, 25 bp, Homo sapien
gtgaatgacagggcccatccaaccc

SEQ ID NO: 1843665 - DNA, 25 bp, Homo sapien
aggtcagtgaatgacagggcccatc

SEQ ID NO: 1843666 - DNA, 25 bp, Homo sapien
gtcagtgaatgacagggcccatcca

SEQ ID NO: 1843667 - DNA, 25 bp, Homo sapien
ggacagaggctaacattcacgcaac

SEQ ID NO: 1843668 - DNA, 25 bp, Homo sapien
tcaaggaactcattaaacagcaggg

SEQ ID NO: 1843669 - DNA, 25 bp, Homo sapien
ggatgcttaggcacttgctccaggc

SEQ ID NO: 1843670 - DNA, 25 bp, Homo sapien
tagttcctgggaaggagcgtcccta

SEQ ID NO: 1843671 - DNA, 25 bp, Homo sapien
ttaatgccttttcatgaacttggag

SEQ ID NO: 1843672 - DNA, 25 bp, Homo sapien
cataacaatgtgcagggtagggtac

SEQ ID NO: 1843673 - DNA, 25 bp, Homo sapien
ggcacccgagagcacatgtgactga

SEQ ID NO: 1843674 - DNA, 25 bp, Homo sapien
tggatggccccaccaaacatgaatt

SEQ ID NO: 1843675 - DNA, 25 bp, Homo sapien
cacatgagcatgttcagtgggcaca

SEQ ID NO: 1843676 - DNA, 25 bp, Homo sapien
catgtgagaaagtatagaagggcaa

SEQ ID NO: 1843677 - DNA, 25 bp, Homo sapien
gccttggcgaaaagaatgagctccc

SEQ ID NO: 1843678 - DNA, 25 bp, Homo sapien
taagatggaaagagattatgacagt

SEQ ID NO: 1843679 - DNA, 25 bp, Homo sapien
aaagagcacttgttgggagacccct

SEQ ID NO: 1843680 - DNA, 25 bp, Homo sapien
gaagaggtgatacaaaattacatga

SEQ ID NO: 1843681 - DNA, 25 bp, Homo sapien
agagaaaaaggtctgtttcccagag

SEQ ID NO: 1843682 - DNA, 25 bp, Homo sapien
gagacccaaatcagcccagaactca

SEQ ID NO: 1843683 - DNA, 25 bp, Homo sapien
tcacagggggacatgtatttacaag

SEQ ID NO: 1843684 - DNA, 25 bp, Homo sapien
tataaagcaaatgcactcgactccc

SEQ ID NO: 1843685 - DNA, 25 bp, Homo sapien
aaagcaaatgcactcgactcccatc

SEQ ID NO: 1843686 - DNA, 25 bp, Homo sapien
agcaaatgcactcgactcccatcac

SEQ ID NO: 1843687 - DNA, 25 bp, Homo sapien
taaagcaaatgcactcgactcccat

SEQ ID NO: 1843688 - DNA, 25 bp, Homo sapien
agttgatggcgcagttcagagacac

SEQ ID NO: 1843689 - DNA, 25 bp, Homo sapien
tgccgagactggagttgatggcgca

SEQ ID NO: 1843690 - DNA, 25 bp, Homo sapien
agactggagttgatggcgcagttca

SEQ ID NO: 1843691 - DNA, 25 bp, Homo sapien
actggagttgatggcgcagttcaga

SEQ ID NO: 1843692 - DNA, 25 bp, Homo sapien
tgttgttggtcgatgaccctgtctt

SEQ ID NO: 1843693 - DNA, 25 bp, Homo sapien
gtgtcctgcgcctccgactgccatt

SEQ ID NO: 1843694 - DNA, 25 bp, Homo sapien
tggtcgatgaccctgtcttcatggt

SEQ ID NO: 1843695 - DNA, 25 bp, Homo sapien
ccgactgccattcccctcgggtgat

SEQ ID NO: 1843696 - DNA, 25 bp, Homo sapien
aaagagcacaacaagagtgatatag

SEQ ID NO: 1843697 - DNA, 25 bp, Homo sapien
caagagtgatataggaggagaaaac

SEQ ID NO: 1843698 - DNA, 25 bp, Homo sapien
ggacagaatcatggtgacaggagca

SEQ ID NO: 1843699 - DNA, 25 bp, Homo sapien
tgacaggagcagtgatgaggcacag

SEQ ID NO: 1843700 - DNA, 25 bp, Homo sapien
tctgcaggctcagacaagatccaga

SEQ ID NO: 1843701 - DNA, 25 bp, Homo sapien
gtctatgcagacagtttcctggtga

SEQ ID NO: 1843702 - DNA, 25 bp, Homo sapien
tcccatgggagggagtctatgcaga

SEQ ID NO: 1843703 - DNA, 25 bp, Homo sapien
ggaaagacacattgagggagtctca

SEQ ID NO: 1843704 - DNA, 25 bp, Homo sapien
cgatcccagatctagcattgattct

SEQ ID NO: 1843705 - DNA, 25 bp, Homo sapien
tcagcctacagggtcaatgccatgg

SEQ ID NO: 1843706 - DNA, 25 bp, Homo sapien
tagcattgattcttcctagtcctct

SEQ ID NO: 1843707 - DNA, 25 bp, Homo sapien
taagacttctaagcaaccgatccca

SEQ ID NO: 1843708 - DNA, 25 bp, Homo sapien
cacattgtagatagccatgcccaca

SEQ ID NO: 1843709 - DNA, 25 bp, Homo sapien
cagtggacacactcttggtctcata

SEQ ID NO: 1843710 - DNA, 25 bp, Homo sapien
agcagccccttgtaaccatagaaaa

SEQ ID NO: 1843711 - DNA, 25 bp, Homo sapien
tgccacattgtagatagccatgccc

SEQ ID NO: 1843712 - DNA, 25 bp, Homo sapien
ctcctcatagcaaaagagcaactct

SEQ ID NO: 1843713 - DNA, 25 bp, Homo sapien
tcctcatagcaaaagagcaactctc

SEQ ID NO: 1843714 - DNA, 25 bp, Homo sapien
ctcatagcaaaagagcaactctccc

SEQ ID NO: 1843715 - DNA, 25 bp, Homo sapien
cctcatagcaaaagagcaactctcc

SEQ ID NO: 1843716 - DNA, 25 bp, Homo sapien
atagagacgtcaatatcttccttag

SEQ ID NO: 1843717 - DNA, 25 bp, Homo sapien
cagaatagagacgtcaatatcttcc

SEQ ID NO: 1843718 - DNA, 25 bp, Homo sapien
gggcagaatagagacgtcaatatct

SEQ ID NO: 1843719 - DNA, 25 bp, Homo sapien
ttcctggagctgcaatgctccagct

SEQ ID NO: 1843720 - DNA, 25 bp, Homo sapien
aagaaagatggttgccagcctcccc

SEQ ID NO: 1843721 - DNA, 25 bp, Homo sapien
ggcagaaacaaggtcacaagaaaga

SEQ ID NO: 1843722 - DNA, 25 bp, Homo sapien
tcctctcctcaacgcttctcagtct

SEQ ID NO: 1843723 - DNA, 25 bp, Homo sapien
ctcctctcctcaacgcttctcagtc

SEQ ID NO: 1843724 - DNA, 25 bp, Homo sapien
cagggccctgatggccactgagccc

SEQ ID NO: 1843725 - DNA, 25 bp, Homo sapien
gggccctgatggccactgagccctg

SEQ ID NO: 1843726 - DNA, 25 bp, Homo sapien
ccctgatggccactgagccctgctc

SEQ ID NO: 1843727 - DNA, 25 bp, Homo sapien
gatggccactgagccctgctcattc

SEQ ID NO: 1843728 - DNA, 25 bp, Homo sapien
catagcacctcctctccagtggtac

SEQ ID NO: 1843729 - DNA, 25 bp, Homo sapien
cgagagtgaggacatccatgcccac

SEQ ID NO: 1843730 - DNA, 25 bp, Homo sapien
agatggcgagagtgaggacatccat

SEQ ID NO: 1843731 - DNA, 25 bp, Homo sapien
gagggtccacgatctgccagatggc

SEQ ID NO: 1843732 - DNA, 25 bp, Homo sapien
tcaatggtccggtgcagagggtcca

SEQ ID NO: 1843733 - DNA, 25 bp, Homo sapien
tccttctttgtgaagaccgtgtgga

SEQ ID NO: 1843734 - DNA, 25 bp, Homo sapien
accgtgtggacccaccaaatcttgg

SEQ ID NO: 1843735 - DNA, 25 bp, Homo sapien
catggaaccgtagcccagactaaag

SEQ ID NO: 1843736 - DNA, 25 bp, Homo sapien
ttggtgaacatggaaccgtagccca

SEQ ID NO: 1843737 - DNA, 25 bp, Homo sapien
gatgctccctatgcccctgaagtag

SEQ ID NO: 1843738 - DNA, 25 bp, Homo sapien
caatcacgccagcagtgaactgtgt

SEQ ID NO: 1843739 - DNA, 25 bp, Homo sapien
tgaacacttctggatatgacacaga

SEQ ID NO: 1843740 - DNA, 25 bp, Homo sapien
tattttctagccacacgatgctccc

SEQ ID NO: 1843741 - DNA, 25 bp, Homo sapien
ttgttcaggagacctttgagcagat

SEQ ID NO: 1843742 - DNA, 25 bp, Homo sapien
cacagacaagccaccattgttcagg

SEQ ID NO: 1843743 - DNA, 25 bp, Homo sapien
gccatggcaaccttggaactgacaa

SEQ ID NO: 1843744 - DNA, 25 bp, Homo sapien
caaccttggaactgacaagtaaact

SEQ ID NO: 1843745 - DNA, 25 bp, Homo sapien
gcagagaatcataaatcatggaagg

SEQ ID NO: 1843746 - DNA, 25 bp, Homo sapien
gaggaagggcagagaatcataaatc

SEQ ID NO: 1843747 - DNA, 25 bp, Homo sapien
gagagtcacatcctgtaaggaattt

SEQ ID NO: 1843748 - DNA, 25 bp, Homo sapien
tcctgagacgggtgggagagtcaca

SEQ ID NO: 1843749 - DNA, 25 bp, Homo sapien
atgtggtaaccatcgagccccaggg

SEQ ID NO: 1843750 - DNA, 25 bp, Homo sapien
aagacagcagctaaagccagtgagc

SEQ ID NO: 1843751 - DNA, 25 bp, Homo sapien
agacagcagctaaagccagtgagca

SEQ ID NO: 1843752 - DNA, 25 bp, Homo sapien
tcctcccaatgtggtaaccatcgag

SEQ ID NO: 1843753 - DNA, 25 bp, Homo sapien
caaggaaaacgtcagaagagaaact

SEQ ID NO: 1843754 - DNA, 25 bp, Homo sapien
ggcagacaaggaaaacgtcagaaga

SEQ ID NO: 1843755 - DNA, 25 bp, Homo sapien
caggaacatgatcagtatctcagag

SEQ ID NO: 1843756 - DNA, 25 bp, Homo sapien
tgatacatggccatgggagttacac

SEQ ID NO: 1843757 - DNA, 25 bp, Homo sapien
ctggagagaactgagacggagataa

SEQ ID NO: 1843758 - DNA, 25 bp, Homo sapien
gagttgtagatgttaaaggacagac

SEQ ID NO: 1843759 - DNA, 25 bp, Homo sapien
agacaacagctaggacaatgcccag

SEQ ID NO: 1843760 - DNA, 25 bp, Homo sapien
gaatgtcttgatgaccagggtctgg

SEQ ID NO: 1843761 - DNA, 25 bp, Homo sapien
gaaatgctgaggcatgtccccaaag

SEQ ID NO: 1843762 - DNA, 25 bp, Homo sapien
ggacagaggttactgcaggcagaat

SEQ ID NO: 1843763 - DNA, 25 bp, Homo sapien
aggcagaatgctcagtgccactggg

SEQ ID NO: 1843764 - DNA, 25 bp, Homo sapien
gaatggtctatccataggttgggaa

SEQ ID NO: 1843765 - DNA, 25 bp, Homo sapien
catagtagccaatcttcttgtagct

SEQ ID NO: 1843766 - DNA, 25 bp, Homo sapien
atccgagagccgctggcatcaaaca

SEQ ID NO: 1843767 - DNA, 25 bp, Homo sapien
tgccatccgagagccgctggcatca

SEQ ID NO: 1843768 - DNA, 25 bp, Homo sapien
gaagctgctcgataagcgtccatgc

SEQ ID NO: 1843769 - DNA, 25 bp, Homo sapien
ataagcgtccatgccatccgagagc

SEQ ID NO: 1843770 - DNA, 25 bp, Homo sapien
cattgcccggtagatttggtcggta

SEQ ID NO: 1843771 - DNA, 25 bp, Homo sapien
gatggcatcataggccagcggtgcc

SEQ ID NO: 1843772 - DNA, 25 bp, Homo sapien
tcaaaggacgaagagttcattgccc

SEQ ID NO: 1843773 - DNA, 25 bp, Homo sapien
tctggttgttgtagttgaagtcctc

SEQ ID NO: 1843774 - DNA, 25 bp, Homo sapien
taagcagacacataggtggccgtat

SEQ ID NO: 1843775 - DNA, 25 bp, Homo sapien
gctctccaaagcaggtacacacttg

SEQ ID NO: 1843776 - DNA, 25 bp, Homo sapien
acacacttggtgtaataagcagaca

SEQ ID NO: 1843777 - DNA, 25 bp, Homo sapien
gtatcgagcttacccaaaattcctg

SEQ ID NO: 1843778 - DNA, 25 bp, Homo sapien
ggtaacagcccttccactcatcagg

SEQ ID NO: 1843779 - DNA, 25 bp, Homo sapien
taacagcccttccactcatcaggaa

SEQ ID NO: 1843780 - DNA, 25 bp, Homo sapien
ccatggtaacagcccttccactcat

SEQ ID NO: 1843781 - DNA, 25 bp, Homo sapien
atggtaacagcccttccactcatca

SEQ ID NO: 1843782 - DNA, 25 bp, Homo sapien
tagaagggtcgtagatcttgaacca

SEQ ID NO: 1843783 - DNA, 25 bp, Homo sapien
ttgtcagcataccacccaatgagga

SEQ ID NO: 1843784 - DNA, 25 bp, Homo sapien
tcagttgtgatgtggccctccaccg

SEQ ID NO: 1843785 - DNA, 25 bp, Homo sapien
ccaatgaggaaccagacgtacttct

SEQ ID NO: 1843786 - DNA, 25 bp, Homo sapien
gcccctccctcttcagatccaactc

SEQ ID NO: 1843787 - DNA, 25 bp, Homo sapien
cctccctcttcagatccaactccac

SEQ ID NO: 1843788 - DNA, 25 bp, Homo sapien
agtgcccctccctcttcagatccaa

SEQ ID NO: 1843789 - DNA, 25 bp, Homo sapien
ccagtgcccctccctcttcagatcc

SEQ ID NO: 1843790 - DNA, 25 bp, Homo sapien
cccacgatgattcgggcatcctggc

SEQ ID NO: 1843791 - DNA, 25 bp, Homo sapien
gaaaagtcccacgatgattcgggca

SEQ ID NO: 1843792 - DNA, 25 bp, Homo sapien
agtctcatagaaaagtcccacgatg

SEQ ID NO: 1843793 - DNA, 25 bp, Homo sapien
aactttccgggcttcagtctcatag

SEQ ID NO: 1843794 - DNA, 25 bp, Homo sapien
agaagaaactctggcggaaagtaat

SEQ ID NO: 1843795 - DNA, 25 bp, Homo sapien
cttcaggtttttgacgggcacagct

SEQ ID NO: 1843796 - DNA, 25 bp, Homo sapien
ctcgttcctccaggtcgtccagagt

SEQ ID NO: 1843797 - DNA, 25 bp, Homo sapien
cggaaagtaatctcaattccagcct

SEQ ID NO: 1843798 - DNA, 25 bp, Homo sapien
ggatggtagcaatcttcttccagcc

SEQ ID NO: 1843799 - DNA, 25 bp, Homo sapien
ttcacgcgggtagggttgtggagtg

SEQ ID NO: 1843800 - DNA, 25 bp, Homo sapien
tggctgatgggtgcgttcggaagaa

SEQ ID NO: 1843801 - DNA, 25 bp, Homo sapien
aacgctgccggtttgacagggctgg

SEQ ID NO: 1843802 - DNA, 25 bp, Homo sapien
cataaggatgatcttgatagggtcg

SEQ ID NO: 1843803 - DNA, 25 bp, Homo sapien
agagctgcagccaggcataaggatg

SEQ ID NO: 1843804 - DNA, 25 bp, Homo sapien
tagagcagctcatataggtacttgg

SEQ ID NO: 1843805 - DNA, 25 bp, Homo sapien
tgatagggtcgttgtagagcagctc

SEQ ID NO: 1843806 - DNA, 25 bp, Homo sapien
tctcctctttcattaaacttccttc

SEQ ID NO: 1843807 - DNA, 25 bp, Homo sapien
gctcttatctttctcgaacaaatta

SEQ ID NO: 1843808 - DNA, 25 bp, Homo sapien
ctgcaattcctgctcttatctttct

SEQ ID NO: 1843809 - DNA, 25 bp, Homo sapien
tctcaattactcactttcatcatta

SEQ ID NO: 1843810 - DNA, 25 bp, Homo sapien
cgctcatgggaaacagtgccccgat

SEQ ID NO: 1843811 - DNA, 25 bp, Homo sapien
gatgagcttgagctcatagtccggc

SEQ ID NO: 1843812 - DNA, 25 bp, Homo sapien
atgtccctgcggctattcacgtcct

SEQ ID NO: 1843813 - DNA, 25 bp, Homo sapien
catgggaaacagtgccccgatgtac

SEQ ID NO: 1843814 - DNA, 25 bp, Homo sapien
cgccatcacaaccagaagcggcagt

SEQ ID NO: 1843815 - DNA, 25 bp, Homo sapien
atcacaaccagaagcggcagtggcc

SEQ ID NO: 1843816 - DNA, 25 bp, Homo sapien
tgggaggcccacaccggagccaccc

SEQ ID NO: 1843817 - DNA, 25 bp, Homo sapien
ctgccgccatcacaaccagaagcgg

SEQ ID NO: 1843818 - DNA, 25 bp, Homo sapien
gaggcgcctccatccctgattttgt

SEQ ID NO: 1843819 - DNA, 25 bp, Homo sapien
ggagggctgctaagagggtgccggg

SEQ ID NO: 1843820 - DNA, 25 bp, Homo sapien
gcggactctcctcgcggactgactg

SEQ ID NO: 1843821 - DNA, 25 bp, Homo sapien
gcagggaaggttggcttcctacggc

SEQ ID NO: 1843822 - DNA, 25 bp, Homo sapien
ctgacaccggcgaggctcagtctgg

SEQ ID NO: 1843823 - DNA, 25 bp, Homo sapien
ggctctgcctgacaccggcgaggct

SEQ ID NO: 1843824 - DNA, 25 bp, Homo sapien
gagaccgcagcctcgtggaaaaccg

SEQ ID NO: 1843825 - DNA, 25 bp, Homo sapien
agaccgcagcctcgtggaaaaccgg

SEQ ID NO: 1843826 - DNA, 25 bp, Homo sapien
gggatcagagaagagttaccactgg

SEQ ID NO: 1843827 - DNA, 25 bp, Homo sapien
cacacctgtccatgctgaagaccgg

SEQ ID NO: 1843828 - DNA, 25 bp, Homo sapien
aagagttaccactggcgcccagctt

SEQ ID NO: 1843829 - DNA, 25 bp, Homo sapien
acacctgtccatgctgaagaccggg

SEQ ID NO: 1843830 - DNA, 25 bp, Homo sapien
tatgtgaggaaagtaaagcccaagg

SEQ ID NO: 1843831 - DNA, 25 bp, Homo sapien
taagtttcagtagtgtcataagtcc

SEQ ID NO: 1843832 - DNA, 25 bp, Homo sapien
ggccctgtaggtgaggaaccttgaa

SEQ ID NO: 1843833 - DNA, 25 bp, Homo sapien
tatgaacacatatccatcgagccct

SEQ ID NO: 1843834 - DNA, 25 bp, Homo sapien
cctcccccacatttttatagctctc

SEQ ID NO: 1843835 - DNA, 25 bp, Homo sapien
ctcccccacatttttatagctctcc

SEQ ID NO: 1843836 - DNA, 25 bp, Homo sapien
acaagcgtcctcatcagctgcatgc

SEQ ID NO: 1843837 - DNA, 25 bp, Homo sapien
gcatgcaggcagctgttcccctcac

SEQ ID NO: 1843838 - DNA, 25 bp, Homo sapien
gcgtcctcatcagctgcatgcaggc

SEQ ID NO: 1843839 - DNA, 25 bp, Homo sapien
aagcgtcctcatcagctgcatgcag

SEQ ID NO: 1843840 - DNA, 25 bp, Homo sapien
gagctgcccaccagatggaagtcgg

SEQ ID NO: 1843841 - DNA, 25 bp, Homo sapien
gggtgctccactggccctgactaca

SEQ ID NO: 1843842 - DNA, 25 bp, Homo sapien
tcacaccggaaatccacccgggctc

SEQ ID NO: 1843843 - DNA, 25 bp, Homo sapien
gggtcaaataagacttggagcagat

SEQ ID NO: 1843844 - DNA, 25 bp, Homo sapien
gatagccttcacctggtcccgagtc

SEQ ID NO: 1843845 - DNA, 25 bp, Homo sapien
ttggccaggcacttgcggaccttgg

SEQ ID NO: 1843846 - DNA, 25 bp, Homo sapien
ggtgtgtccatatctgtccaggagc

SEQ ID NO: 1843847 - DNA, 25 bp, Homo sapien
tcaatctcatagtccactggcagga

SEQ ID NO: 1843848 - DNA, 25 bp, Homo sapien
gggcggaggaagagtggcgccagta

SEQ ID NO: 1843849 - DNA, 25 bp, Homo sapien
ctgaggtggcgttgggggtctgcgc

SEQ ID NO: 1843850 - DNA, 25 bp, Homo sapien
tggcgttgggggtctgcgccccgcc

SEQ ID NO: 1843851 - DNA, 25 bp, Homo sapien
cggaggaagagtggcgccagtagca

SEQ ID NO: 1843852 - DNA, 25 bp, Homo sapien
cggccatgaggactggaccgagccc

SEQ ID NO: 1843853 - DNA, 25 bp, Homo sapien
atgaggactggaccgagccccgccg

SEQ ID NO: 1843854 - DNA, 25 bp, Homo sapien
ccggcgcggcccgcacccggagact

SEQ ID NO: 1843855 - DNA, 25 bp, Homo sapien
ctaagtgagaggcggccatgaggac

SEQ ID NO: 1843856 - DNA, 25 bp, Homo sapien
cacgctcccggcatcggccgcctca

SEQ ID NO: 1843857 - DNA, 25 bp, Homo sapien
ccacgctcccggcatcggccgcctc

SEQ ID NO: 1843858 - DNA, 25 bp, Homo sapien
ggcatcggccgcctcagcgctcccc

SEQ ID NO: 1843859 - DNA, 25 bp, Homo sapien
ccgcctcagcgctccccgattccat

SEQ ID NO: 1843860 - DNA, 25 bp, Homo sapien
gaagaaggagggtgcaagggaaggc

SEQ ID NO: 1843861 - DNA, 25 bp, Homo sapien
ctctccccgggcctcaaggccccag

SEQ ID NO: 1843862 - DNA, 25 bp, Homo sapien
agagctcccgggcggagggaagaag

SEQ ID NO: 1843863 - DNA, 25 bp, Homo sapien
ctggccagggtctctcccctcctct

SEQ ID NO: 1843864 - DNA, 25 bp, Homo sapien
agattgctctgcatgtaacagctaa

SEQ ID NO: 1843865 - DNA, 25 bp, Homo sapien
ttgctctgcatgtaacagctaagta

SEQ ID NO: 1843866 - DNA, 25 bp, Homo sapien
gattgctctgcatgtaacagctaag

SEQ ID NO: 1843867 - DNA, 25 bp, Homo sapien
tgctctgcatgtaacagctaagtac

SEQ ID NO: 1843868 - DNA, 25 bp, Homo sapien
aaaaagtaatatgcttgtgcacata

SEQ ID NO: 1843869 - DNA, 25 bp, Homo sapien
tagagaaaactatacggtagtagtc

SEQ ID NO: 1843870 - DNA, 25 bp, Homo sapien
catataccagttactttatgtacag

SEQ ID NO: 1843871 - DNA, 25 bp, Homo sapien
tttccgccccgtctccacttgatgt

SEQ ID NO: 1843872 - DNA, 25 bp, Homo sapien
tctgtttcattggttgcccgtcgaa

SEQ ID NO: 1843873 - DNA, 25 bp, Homo sapien
cattggttgcccgtcgaatcggaat

SEQ ID NO: 1843874 - DNA, 25 bp, Homo sapien
ttgcccgtcgaatcggaatctgatc

SEQ ID NO: 1843875 - DNA, 25 bp, Homo sapien
gtttcattggttgcccgtcgaatcg

SEQ ID NO: 1843876 - DNA, 25 bp, Homo sapien
ggcggcagcagtggacaaggggaga

SEQ ID NO: 1843877 - DNA, 25 bp, Homo sapien
ggtccgctccaaacgagcacacaag

SEQ ID NO: 1843878 - DNA, 25 bp, Homo sapien
agaggtaccaggtccgctccaaacg

SEQ ID NO: 1843879 - DNA, 25 bp, Homo sapien
ttgggcttttcttcggccatggcga

SEQ ID NO: 1843880 - DNA, 25 bp, Homo sapien
gcgttatttgtaggtgctgccattt

SEQ ID NO: 1843881 - DNA, 25 bp, Homo sapien
tgcgttatttgtaggtgctgccatt

SEQ ID NO: 1843882 - DNA, 25 bp, Homo sapien
ttgcgttatttgtaggtgctgccat

SEQ ID NO: 1843883 - DNA, 25 bp, Homo sapien
cgttatttgtaggtgctgccatttt

SEQ ID NO: 1843884 - DNA, 25 bp, Homo sapien
cttggacccttggttgccttgatca

SEQ ID NO: 1843885 - DNA, 25 bp, Homo sapien
tgtttgtaattgtgccggttcttgg

SEQ ID NO: 1843886 - DNA, 25 bp, Homo sapien
tgccttgatcatctgctacaactgg

SEQ ID NO: 1843887 - DNA, 25 bp, Homo sapien
cactttctgagggtgccctgctgga

SEQ ID NO: 1843888 - DNA, 25 bp, Homo sapien
cccagccatagtggggacatcatga

SEQ ID NO: 1843889 - DNA, 25 bp, Homo sapien
cttctcctgggggtatggatcctgg

SEQ ID NO: 1843890 - DNA, 25 bp, Homo sapien
ttatttatgtttcaagatgctcact

SEQ ID NO: 1843891 - DNA, 25 bp, Homo sapien
ggggggagattgatcacctccatgc

SEQ ID NO: 1843892 - DNA, 25 bp, Homo sapien
ggttctgggccataggaccctcagt

SEQ ID NO: 1843893 - DNA, 25 bp, Homo sapien
tttgagctcagactggtcccggaag

SEQ ID NO: 1843894 - DNA, 25 bp, Homo sapien
acagagcgtgcaacagaagggcctc

SEQ ID NO: 1843895 - DNA, 25 bp, Homo sapien
tggttcacatccaaaagcccctgga

SEQ ID NO: 1843896 - DNA, 25 bp, Homo sapien
cagactgggatgttgttctcgaagc

SEQ ID NO: 1843897 - DNA, 25 bp, Homo sapien
aggaagaccttgtcatcactagtcc

SEQ ID NO: 1843898 - DNA, 25 bp, Homo sapien
gaagaccttgtcatcactagtcccc

SEQ ID NO: 1843899 - DNA, 25 bp, Homo sapien
tcatctctcagactgggatgttgtt

SEQ ID NO: 1843900 - DNA, 25 bp, Homo sapien
gaaaggccttctgtgtttgggagat

SEQ ID NO: 1843901 - DNA, 25 bp, Homo sapien
ttctgtgtttgggagatggacaaac

SEQ ID NO: 1843902 - DNA, 25 bp, Homo sapien
ccttctgtgtttgggagatggacaa

SEQ ID NO: 1843903 - DNA, 25 bp, Homo sapien
aggccttctgtgtttgggagatgga

SEQ ID NO: 1843904 - DNA, 25 bp, Homo sapien
gcttggtgattagctctggcttatg

SEQ ID NO: 1843905 - DNA, 25 bp, Homo sapien
cttggtgattagctctggcttatgc

SEQ ID NO: 1843906 - DNA, 25 bp, Homo sapien
ttggtgattagctctggcttatgca

SEQ ID NO: 1843907 - DNA, 25 bp, Homo sapien
agcttggtgattagctctggcttat

SEQ ID NO: 1843908 - DNA, 25 bp, Homo sapien
acatcctggtaaaggaccctctggc

SEQ ID NO: 1843909 - DNA, 25 bp, Homo sapien
tggcatctagacagtcccactcttc

SEQ ID NO: 1843910 - DNA, 25 bp, Homo sapien
tagattcttaaaggtttccgacata

SEQ ID NO: 1843911 - DNA, 25 bp, Homo sapien
ctggctggcatctagacagtcccac

SEQ ID NO: 1843912 - DNA, 25 bp, Homo sapien
tgcagggtggcagctacctcgccca

SEQ ID NO: 1843913 - DNA, 25 bp, Homo sapien
ctctttctagctttatccactcctg

SEQ ID NO: 1843914 - DNA, 25 bp, Homo sapien
catgggagcgtcttctgtacaggtt

SEQ ID NO: 1843915 - DNA, 25 bp, Homo sapien
tgtacaggttcgattggcttcagct

SEQ ID NO: 1843916 - DNA, 25 bp, Homo sapien
ttttgttctgctgtccaaattctcc

SEQ ID NO: 1843917 - DNA, 25 bp, Homo sapien
aaaggccccagggtttgatgtggct

SEQ ID NO: 1843918 - DNA, 25 bp, Homo sapien
aattttgcttccctcaaagctgggc

SEQ ID NO: 1843919 - DNA, 25 bp, Homo sapien
gacaaatgtatctgctccaagaggc

SEQ ID NO: 1843920 - DNA, 25 bp, Homo sapien
gtgtctgccctctgttctaccctgc

SEQ ID NO: 1843921 - DNA, 25 bp, Homo sapien
aacaccagcctgggctaggtgtctg

SEQ ID NO: 1843922 - DNA, 25 bp, Homo sapien
cagcctgggctaggtgtctgccctc

SEQ ID NO: 1843923 - DNA, 25 bp, Homo sapien
caccagcctgggctaggtgtctgcc

SEQ ID NO: 1843924 - DNA, 25 bp, Homo sapien
cccagcactggagttccctgctcat

SEQ ID NO: 1843925 - DNA, 25 bp, Homo sapien
ctcagatgcaaacatagctgaactc

SEQ ID NO: 1843926 - DNA, 25 bp, Homo sapien
tttcctgctcagatgcaaacatagc

SEQ ID NO: 1843927 - DNA, 25 bp, Homo sapien
tgctgacagccactcacccacatct

SEQ ID NO: 1843928 - DNA, 25 bp, Homo sapien
tgacgcgcgcagtggaccgcgattt

SEQ ID NO: 1843929 - DNA, 25 bp, Homo sapien
ctgacgcgcgcagtggaccgcgatt

SEQ ID NO: 1843930 - DNA, 25 bp, Homo sapien
cgcgcgcagtggaccgcgatttagg

SEQ ID NO: 1843931 - DNA, 25 bp, Homo sapien
gacgcgcgcagtggaccgcgattta

SEQ ID NO: 1843932 - DNA, 25 bp, Homo sapien
gatcaacagcaggaaagaggattgg

SEQ ID NO: 1843933 - DNA, 25 bp, Homo sapien
ttcatactttctcccaaccgcaggt

SEQ ID NO: 1843934 - DNA, 25 bp, Homo sapien
gcaggttcccaataggcaggtccta

SEQ ID NO: 1843935 - DNA, 25 bp, Homo sapien
gcaggtcctagagcccaaccttggt

SEQ ID NO: 1843936 - DNA, 25 bp, Homo sapien
gatgtccttcactcaaaacaagttt

SEQ ID NO: 1843937 - DNA, 25 bp, Homo sapien
ttgctagtgaatgcggcacaaatgg

SEQ ID NO: 1843938 - DNA, 25 bp, Homo sapien
tttttggagtggaaactcacatggc

SEQ ID NO: 1843939 - DNA, 25 bp, Homo sapien
tgatggttcatattacagcatctca

SEQ ID NO: 1843940 - DNA, 25 bp, Homo sapien
gaacgtggcgttctcaggaattgac

SEQ ID NO: 1843941 - DNA, 25 bp, Homo sapien
cacagcctctgggtagggagttgtc

SEQ ID NO: 1843942 - DNA, 25 bp, Homo sapien
ggactcccctcttggtgtgttactg

SEQ ID NO: 1843943 - DNA, 25 bp, Homo sapien
tgtcctgcacttctggaatcatctt

SEQ ID NO: 1843944 - DNA, 25 bp, Homo sapien
ctgtgtcccccacctgctcatctgc

SEQ ID NO: 1843945 - DNA, 25 bp, Homo sapien
gtgtcccccacctgctcatctgcat

SEQ ID NO: 1843946 - DNA, 25 bp, Homo sapien
tgtgtcccccacctgctcatctgca

SEQ ID NO: 1843947 - DNA, 25 bp, Homo sapien
tgcaaagcactacttagtttttctc

SEQ ID NO: 1843948 - DNA, 25 bp, Homo sapien
ttgagatggacgcaggagtcagcat

SEQ ID NO: 1843949 - DNA, 25 bp, Homo sapien
tcttgaaggtggtggcacgatgccc

SEQ ID NO: 1843950 - DNA, 25 bp, Homo sapien
ggcacgatgcccaggttgagatgga

SEQ ID NO: 1843951 - DNA, 25 bp, Homo sapien
gggtctgccagccactaagaatgct

SEQ ID NO: 1843952 - DNA, 25 bp, Homo sapien
gaagatttgaaccatgctcccagat

SEQ ID NO: 1843953 - DNA, 25 bp, Homo sapien
ggtggaacccacttgacagggaagc

SEQ ID NO: 1843954 - DNA, 25 bp, Homo sapien
tcatggccatgggatccactggttc

SEQ ID NO: 1843955 - DNA, 25 bp, Homo sapien
ccagcggctcattggggatgggcca

SEQ ID NO: 1843956 - DNA, 25 bp, Homo sapien
gatggttgcggggtctgtgtggata

SEQ ID NO: 1843957 - DNA, 25 bp, Homo sapien
gaggtgaggggcacttctgccgggc

SEQ ID NO: 1843958 - DNA, 25 bp, Homo sapien
gtgaggggcacttctgccgggccgc

SEQ ID NO: 1843959 - DNA, 25 bp, Homo sapien
tcaccgtggataacagagggagacc

SEQ ID NO: 1843960 - DNA, 25 bp, Homo sapien
ggcagggggacctctagaggccagg

SEQ ID NO: 1843961 - DNA, 25 bp, Homo sapien
ctgcacttcaccgtggataacagag

SEQ ID NO: 1843962 - DNA, 25 bp, Homo sapien
cacttcaccgtggataacagaggga

SEQ ID NO: 1843963 - DNA, 25 bp, Homo sapien
ttccaaggaataggagattttccca

SEQ ID NO: 1843964 - DNA, 25 bp, Homo sapien
agaggggaacgaggggtcatgtctt

SEQ ID NO: 1843965 - DNA, 25 bp, Homo sapien
aaggcacacgttgcccaccacccca

SEQ ID NO: 1843966 - DNA, 25 bp, Homo sapien
aagaggggaacgaggggtcatgtct

SEQ ID NO: 1843967 - DNA, 25 bp, Homo sapien
tcagatcctccaaaggcacacgttg

SEQ ID NO: 1843968 - DNA, 25 bp, Homo sapien
tatatttggaactagccagcttgac

SEQ ID NO: 1843969 - DNA, 25 bp, Homo sapien
tatttggaactagccagcttgactc

SEQ ID NO: 1843970 - DNA, 25 bp, Homo sapien
tacatatatttggaactagccagct

SEQ ID NO: 1843971 - DNA, 25 bp, Homo sapien
catatatttggaactagccagcttg

SEQ ID NO: 1843972 - DNA, 25 bp, Homo sapien
ctctctccatcagactgaatcagag

SEQ ID NO: 1843973 - DNA, 25 bp, Homo sapien
tccatcagactgaatcagagtgttg

SEQ ID NO: 1843974 - DNA, 25 bp, Homo sapien
tctccatcagactgaatcagagtgt

SEQ ID NO: 1843975 - DNA, 25 bp, Homo sapien
ccatcagactgaatcagagtgttga

SEQ ID NO: 1843976 - DNA, 25 bp, Homo sapien
ctttggccacatcaatgtcacaaac

SEQ ID NO: 1843977 - DNA, 25 bp, Homo sapien
acagcctgtttgatctggtgcttgt

SEQ ID NO: 1843978 - DNA, 25 bp, Homo sapien
gcctgtttgatctggtgcttgttgg

SEQ ID NO: 1843979 - DNA, 25 bp, Homo sapien
ccacatcaatgtcacaaacttcttc

SEQ ID NO: 1843980 - DNA, 25 bp, Homo sapien
acagtgaacacaagtaggctgttgt

SEQ ID NO: 1843981 - DNA, 25 bp, Homo sapien
tttctatcttcttcacagcctactc

SEQ ID NO: 1843982 - DNA, 25 bp, Homo sapien
cacaagtaggctgttgttttctatc

SEQ ID NO: 1843983 - DNA, 25 bp, Homo sapien
tgaacacaagtaggctgttgttttc

SEQ ID NO: 1843984 - DNA, 25 bp, Homo sapien
gtgggtgacatgtggatcttgtttt

SEQ ID NO: 1843985 - DNA, 25 bp, Homo sapien
gggtgacatgtggatcttgtttttt

SEQ ID NO: 1843986 - DNA, 25 bp, Homo sapien
gccttgcaaagccttcgctttggct

SEQ ID NO: 1843987 - DNA, 25 bp, Homo sapien
ggagcttccttcttcgttcttggca

SEQ ID NO: 1843988 - DNA, 25 bp, Homo sapien
ttgcaagacccatgatactagacca

SEQ ID NO: 1843989 - DNA, 25 bp, Homo sapien
gatactagaccactaaatacttcat

SEQ ID NO: 1843990 - DNA, 25 bp, Homo sapien
gattaagatttttgactgagtcatt

SEQ ID NO: 1843991 - DNA, 25 bp, Homo sapien
tatgaaaagggtccagattaagatt

SEQ ID NO: 1843992 - DNA, 25 bp, Homo sapien
gttgatattcatcaggtcagctggg

SEQ ID NO: 1843993 - DNA, 25 bp, Homo sapien
cattacagggcattggatgttgata

SEQ ID NO: 1843994 - DNA, 25 bp, Homo sapien
tactcttctgccaacaggccgcaat

SEQ ID NO: 1843995 - DNA, 25 bp, Homo sapien
gagactgcatgcagaagtgatgata

SEQ ID NO: 1843996 - DNA, 25 bp, Homo sapien
tgaacttcactagtccaagtgttgg

SEQ ID NO: 1843997 - DNA, 25 bp, Homo sapien
ggtacagcgaccatgaaaaacagta

SEQ ID NO: 1843998 - DNA, 25 bp, Homo sapien
gattagataaacgacccatggtgca

SEQ ID NO: 1843999 - DNA, 25 bp, Homo sapien
gataattgtacactcatgctcgtag

SEQ ID NO: 1844000 - DNA, 25 bp, Homo sapien
aaaatgtttaaagcagtctctggtt

SEQ ID NO: 1844001 - DNA, 25 bp, Homo sapien
atgtcagtacaatcacagtatgaca

SEQ ID NO: 1844002 - DNA, 25 bp, Homo sapien
cacttgagtagtctatgaatttatt

SEQ ID NO: 1844003 - DNA, 25 bp, Homo sapien
cagtacaatcacagtatgacagtat

SEQ ID NO: 1844004 - DNA, 25 bp, Homo sapien
tggacaaaccataagtgggccgtgg

SEQ ID NO: 1844005 - DNA, 25 bp, Homo sapien
tcaagttcctgactgaccaagcaac

SEQ ID NO: 1844006 - DNA, 25 bp, Homo sapien
gaacactcaggtaaatagcagccac

SEQ ID NO: 1844007 - DNA, 25 bp, Homo sapien
tatcactcccgtggcagtcaggtgc

SEQ ID NO: 1844008 - DNA, 25 bp, Homo sapien
gagatacattaaaccacaccttggg

SEQ ID NO: 1844009 - DNA, 25 bp, Homo sapien
gatttagccactgaacagcaatggc

SEQ ID NO: 1844010 - DNA, 25 bp, Homo sapien
gatatagtaccatcaatcctcatgg

SEQ ID NO: 1844011 - DNA, 25 bp, Homo sapien
caaaggacaggaaactaccagacaa

SEQ ID NO: 1844012 - DNA, 25 bp, Homo sapien
gcagggctaccttacatctgggtgt

SEQ ID NO: 1844013 - DNA, 25 bp, Homo sapien
tgtccagggtctattctttgaggcc

SEQ ID NO: 1844014 - DNA, 25 bp, Homo sapien
tggcaaccccaggatacttggcagg

SEQ ID NO: 1844015 - DNA, 25 bp, Homo sapien
taaacctgacaggacacagctgagg

SEQ ID NO: 1844016 - DNA, 25 bp, Homo sapien
caatctcgtgcttgttctgctttac

SEQ ID NO: 1844017 - DNA, 25 bp, Homo sapien
tgaagaaacccaggcgcataagagg

SEQ ID NO: 1844018 - DNA, 25 bp, Homo sapien
caggaaagttgactcatactggtgt

SEQ ID NO: 1844019 - DNA, 25 bp, Homo sapien
aacatggtccaatctcgtgcttgtt

SEQ ID NO: 1844020 - DNA, 25 bp, Homo sapien
agagcagagaccactaggaggcacc

SEQ ID NO: 1844021 - DNA, 25 bp, Homo sapien
agagaccactaggaggcaccactgc

SEQ ID NO: 1844022 - DNA, 25 bp, Homo sapien
gagctcagggtggagagatgtcatt

SEQ ID NO: 1844023 - DNA, 25 bp, Homo sapien
gcagagaccactaggaggcaccact

SEQ ID NO: 1844024 - DNA, 25 bp, Homo sapien
tccccggacgatgcttcttgacaca

SEQ ID NO: 1844025 - DNA, 25 bp, Homo sapien
ttcttcaattctagggaggactgtc

SEQ ID NO: 1844026 - DNA, 25 bp, Homo sapien
ttcaattctagggaggactgtcttc

SEQ ID NO: 1844027 - DNA, 25 bp, Homo sapien
cagcccatctggttctccctggttc

SEQ ID NO: 1844028 - DNA, 25 bp, Homo sapien
gtttattgtgttgtcagtagaatga

SEQ ID NO: 1844029 - DNA, 25 bp, Homo sapien
cccataataagtaaacatttacaat

SEQ ID NO: 1844030 - DNA, 25 bp, Homo sapien
ggtttattgtgttgtcagtagaatg

SEQ ID NO: 1844031 - DNA, 25 bp, Homo sapien
cacaccttgtcgcttcagtcaggac

SEQ ID NO: 1844032 - DNA, 25 bp, Homo sapien
tcatagttgttctgaaattgcagga

SEQ ID NO: 1844033 - DNA, 25 bp, Homo sapien
cactggtgagttatactgtctcttt

SEQ ID NO: 1844034 - DNA, 25 bp, Homo sapien
gatgatgagacccagcactggtgag

SEQ ID NO: 1844035 - DNA, 25 bp, Homo sapien
tctggatagatagcccacgattgaa

SEQ ID NO: 1844036 - DNA, 25 bp, Homo sapien
tacacctgtaaacacatctctggat

SEQ ID NO: 1844037 - DNA, 25 bp, Homo sapien
gtttttgacaccaaacgtgaacaca

SEQ ID NO: 1844038 - DNA, 25 bp, Homo sapien
cctcctttactggttgacctgtgaa

SEQ ID NO: 1844039 - DNA, 25 bp, Homo sapien
ctccccagaaggagccgtaaccagg

SEQ ID NO: 1844040 - DNA, 25 bp, Homo sapien
gcagggagttgaattctggccatct

SEQ ID NO: 1844041 - DNA, 25 bp, Homo sapien
tggagccagtagacccaggagttga

SEQ ID NO: 1844042 - DNA, 25 bp, Homo sapien
accgggcgttgatccgggccttgca

SEQ ID NO: 1844043 - DNA, 25 bp, Homo sapien
catgaagatcagcacttgccctgtg

SEQ ID NO: 1844044 - DNA, 25 bp, Homo sapien
ctgaaagggccgcaggactaaatga

SEQ ID NO: 1844045 - DNA, 25 bp, Homo sapien
aaccaataaatgctcccctgggtgc

SEQ ID NO: 1844046 - DNA, 25 bp, Homo sapien
tatgcactctgtaaggactgaaagg

SEQ ID NO: 1844047 - DNA, 25 bp, Homo sapien
catacagaatggctgccattgactc

SEQ ID NO: 1844048 - DNA, 25 bp, Homo sapien
gcagcatacagaatggctgccattg

SEQ ID NO: 1844049 - DNA, 25 bp, Homo sapien
agcatacagaatggctgccattgac

SEQ ID NO: 1844050 - DNA, 25 bp, Homo sapien
cagtagcaatagcagcatacagaat

SEQ ID NO: 1844051 - DNA, 25 bp, Homo sapien
aggacacccctagactgctgggcat

SEQ ID NO: 1844052 - DNA, 25 bp, Homo sapien
tggtgacattgccttctaaggcccc

SEQ ID NO: 1844053 - DNA, 25 bp, Homo sapien
catcctgatgccaggtcagagagat

SEQ ID NO: 1844054 - DNA, 25 bp, Homo sapien
gatattccagggatagaagatggag

SEQ ID NO: 1844055 - DNA, 25 bp, Homo sapien
tgggctcctgggtcgtggggctagg

SEQ ID NO: 1844056 - DNA, 25 bp, Homo sapien
ttgctggaagatgggcctcaggact

SEQ ID NO: 1844057 - DNA, 25 bp, Homo sapien
gggactccggctttgatgctgagga

SEQ ID NO: 1844058 - DNA, 25 bp, Homo sapien
taggcttgctggaagatgggcctca

SEQ ID NO: 1844059 - DNA, 25 bp, Homo sapien
tcaccatagcttttgcatgtagtct

SEQ ID NO: 1844060 - DNA, 25 bp, Homo sapien
accatagcttttgcatgtagtctgc

SEQ ID NO: 1844061 - DNA, 25 bp, Homo sapien
caccatagcttttgcatgtagtctg

SEQ ID NO: 1844062 - DNA, 25 bp, Homo sapien
atcaccatagcttttgcatgtagtc

SEQ ID NO: 1844063 - DNA, 25 bp, Homo sapien
tgcacagggcaatagtgtgtcttgg

SEQ ID NO: 1844064 - DNA, 25 bp, Homo sapien
gcacagggcaatagtgtgtcttggt

SEQ ID NO: 1844065 - DNA, 25 bp, Homo sapien
ctgtcacagagcaggaagagctgac

SEQ ID NO: 1844066 - DNA, 25 bp, Homo sapien
gcaccgtgaggttgtaacaaagact

SEQ ID NO: 1844067 - DNA, 25 bp, Homo sapien
cctgactgcacagatccatcctggg

SEQ ID NO: 1844068 - DNA, 25 bp, Homo sapien
cccttgatatgagccagggtcctcc

SEQ ID NO: 1844069 - DNA, 25 bp, Homo sapien
ctttggcgacagagggaggcgccgt

SEQ ID NO: 1844070 - DNA, 25 bp, Homo sapien
caactttggcgacagagggaggcgc

SEQ ID NO: 1844071 - DNA, 25 bp, Homo sapien
ctccaactttggcgacagagggagg

SEQ ID NO: 1844072 - DNA, 25 bp, Homo sapien
cactccaactttggcgacagaggga

SEQ ID NO: 1844073 - DNA, 25 bp, Homo sapien
ctggggtgcaaaaagggcagtgcgg

SEQ ID NO: 1844074 - DNA, 25 bp, Homo sapien
aaaaagggcagtgcggatcaggaac

SEQ ID NO: 1844075 - DNA, 25 bp, Homo sapien
gtgcaaaaagggcagtgcggatcag

SEQ ID NO: 1844076 - DNA, 25 bp, Homo sapien
gcaaaaagggcagtgcggatcagga

SEQ ID NO: 1844077 - DNA, 25 bp, Homo sapien
ctttgctttcctcgcagtggctcaa

SEQ ID NO: 1844078 - DNA, 25 bp, Homo sapien
ggcccagactttgctttcctcgcag

SEQ ID NO: 1844079 - DNA, 25 bp, Homo sapien
ccagactttgctttcctcgcagtgg

SEQ ID NO: 1844080 - DNA, 25 bp, Homo sapien
gcagtggctcaagcggctgccaacc

SEQ ID NO: 1844081 - DNA, 25 bp, Homo sapien
aatgctatgaatcccaggcagtggg

SEQ ID NO: 1844082 - DNA, 25 bp, Homo sapien
atgatgacggtgagcagaatggtca

SEQ ID NO: 1844083 - DNA, 25 bp, Homo sapien
aacatagtcagacacggaggtctcg

SEQ ID NO: 1844084 - DNA, 25 bp, Homo sapien
gatcaacactaggatgatgacggtg

SEQ ID NO: 1844085 - DNA, 25 bp, Homo sapien
aatctattgcgcacagcagggactg

SEQ ID NO: 1844086 - DNA, 25 bp, Homo sapien
cctaaagattacaagagtagtgagg

SEQ ID NO: 1844087 - DNA, 25 bp, Homo sapien
tgatcatcataatctattgcgcaca

SEQ ID NO: 1844088 - DNA, 25 bp, Homo sapien
ggattatttacactcctaaagatta

SEQ ID NO: 1844089 - DNA, 25 bp, Homo sapien
gggcacagaggcgactttctcctca

SEQ ID NO: 1844090 - DNA, 25 bp, Homo sapien
gaactccggggcacagaggcgactt

SEQ ID NO: 1844091 - DNA, 25 bp, Homo sapien
ggcacagaggcgactttctcctcac

SEQ ID NO: 1844092 - DNA, 25 bp, Homo sapien
tccggggcacagaggcgactttctc

SEQ ID NO: 1844093 - DNA, 25 bp, Homo sapien
gcggttctgacggaaactggctcct

SEQ ID NO: 1844094 - DNA, 25 bp, Homo sapien
tccgcctgcaggaaaactcacaact

SEQ ID NO: 1844095 - DNA, 25 bp, Homo sapien
gaggacggagttgccttcaggcttc

SEQ ID NO: 1844096 - DNA, 25 bp, Homo sapien
cacagctgccgctatgaaaatgcag

SEQ ID NO: 1844097 - DNA, 25 bp, Homo sapien
ttggcaacagcttttcgttatcatc

SEQ ID NO: 1844098 - DNA, 25 bp, Homo sapien
caacagcttttcgttatcatctcca

SEQ ID NO: 1844099 - DNA, 25 bp, Homo sapien
ttaatttggcaacagcttttcgtta

SEQ ID NO: 1844100 - DNA, 25 bp, Homo sapien
cagcttttcgttatcatctccactt

SEQ ID NO: 1844101 - DNA, 25 bp, Homo sapien
cagaaagtcatagattggacaggcc

SEQ ID NO: 1844102 - DNA, 25 bp, Homo sapien
tctggtttgccttgtccctttgtaa

SEQ ID NO: 1844103 - DNA, 25 bp, Homo sapien
tttgccttgtccctttgtaaatgtg

SEQ ID NO: 1844104 - DNA, 25 bp, Homo sapien
ttgccttgtccctttgtaaatgtga

SEQ ID NO: 1844105 - DNA, 25 bp, Homo sapien
ccttctggtttgccttgtccctttg

SEQ ID NO: 1844106 - DNA, 25 bp, Homo sapien
gctgggctgattctttgatggcccc

SEQ ID NO: 1844107 - DNA, 25 bp, Homo sapien
tgactttaggctgggtttatcctgc

SEQ ID NO: 1844108 - DNA, 25 bp, Homo sapien
gatttagcagatataactaagggcc

SEQ ID NO: 1844109 - DNA, 25 bp, Homo sapien
tattcaagcaactctagtgtagatg

SEQ ID NO: 1844110 - DNA, 25 bp, Homo sapien
cattaggagttaccaagattctgct

SEQ ID NO: 1844111 - DNA, 25 bp, Homo sapien
tacagagccttgcagggtgatcttt

SEQ ID NO: 1844112 - DNA, 25 bp, Homo sapien
gcattgagtgcttgccactgtgaga

SEQ ID NO: 1844113 - DNA, 25 bp, Homo sapien
cacagtggctaccttgtattaggag

SEQ ID NO: 1844114 - DNA, 25 bp, Homo sapien
gagaagccaatcaatgtagccgcgg

SEQ ID NO: 1844115 - DNA, 25 bp, Homo sapien
tcccagtcgccgaggatggtgtcat

SEQ ID NO: 1844116 - DNA, 25 bp, Homo sapien
gttctcactcccattgagtgtcggg

SEQ ID NO: 1844117 - DNA, 25 bp, Homo sapien
gattccgtgatgcaaagtgaagaga

SEQ ID NO: 1844118 - DNA, 25 bp, Homo sapien
ccgccaaggccaaagcacagtttta

SEQ ID NO: 1844119 - DNA, 25 bp, Homo sapien
gcttcctctccgtgggcgacgtgga

SEQ ID NO: 1844120 - DNA, 25 bp, Homo sapien
gcgacgccacgagtcccaggatgga

SEQ ID NO: 1844121 - DNA, 25 bp, Homo sapien
accctgagcggctactacaaccaga

SEQ ID NO: 1844122 - DNA, 25 bp, Homo sapien
tgggtccgagatccacgccgaggca

SEQ ID NO: 1844123 - DNA, 25 bp, Homo sapien
aaatccccgcaggttggtcctggcg

SEQ ID NO: 1844124 - DNA, 25 bp, Homo sapien
gggtctcacacccatctagaggatg

SEQ ID NO: 1844125 - DNA, 25 bp, Homo sapien
tccgcgggtatcaccagcttgctta

SEQ ID NO: 1844126 - DNA, 25 bp, Homo sapien
ggattacatcgtcctgaacgaggac

SEQ ID NO: 1844127 - DNA, 25 bp, Homo sapien
tggcaaggattacatcgtcctgaac

SEQ ID NO: 1844128 - DNA, 25 bp, Homo sapien
gatggcaaggattacatcgtcctga

SEQ ID NO: 1844129 - DNA, 25 bp, Homo sapien
gcaaggattacatcgtcctgaacga

SEQ ID NO: 1844130 - DNA, 25 bp, Homo sapien
tgtgtccagatacaagcaggtgaga

SEQ ID NO: 1844131 - DNA, 25 bp, Homo sapien
ggcaccctggcaaggagacatttaa

SEQ ID NO: 1844132 - DNA, 25 bp, Homo sapien
gatactcacaggtaatgtcccaagg

SEQ ID NO: 1844133 - DNA, 25 bp, Homo sapien
cagggctgctatcacacaaggaggg

SEQ ID NO: 1844134 - DNA, 25 bp, Homo sapien
tgagcttggcaatgcaaaccacata

SEQ ID NO: 1844135 - DNA, 25 bp, Homo sapien
tgcaaaccacatacttgagacccag

SEQ ID NO: 1844136 - DNA, 25 bp, Homo sapien
caatttagtggcatgttctttaccc

SEQ ID NO: 1844137 - DNA, 25 bp, Homo sapien
tgtaattggtcctgagaactcccac

SEQ ID NO: 1844138 - DNA, 25 bp, Homo sapien
cagtaagggaccccattttatgaca

SEQ ID NO: 1844139 - DNA, 25 bp, Homo sapien
tttgataatgcagtaagggacccca

SEQ ID NO: 1844140 - DNA, 25 bp, Homo sapien
tccctttgataatgcagtaagggac

SEQ ID NO: 1844141 - DNA, 25 bp, Homo sapien
ataatgcagtaagggaccccatttt

SEQ ID NO: 1844142 - DNA, 25 bp, Homo sapien
gacaaccagcttgatgggatctaca

SEQ ID NO: 1844143 - DNA, 25 bp, Homo sapien
cagcttgatgggatctacatcatgt

SEQ ID NO: 1844144 - DNA, 25 bp, Homo sapien
aaccagcttgatgggatctacatca

SEQ ID NO: 1844145 - DNA, 25 bp, Homo sapien
tgatgggatctacatcatgtgcaat

SEQ ID NO: 1844146 - DNA, 25 bp, Homo sapien
tggctgtctggtgcctgggtgaact

SEQ ID NO: 1844147 - DNA, 25 bp, Homo sapien
cagcagagtagctgtttggctgtct

SEQ ID NO: 1844148 - DNA, 25 bp, Homo sapien
gctgtctggtgcctgggtgaactgg

SEQ ID NO: 1844149 - DNA, 25 bp, Homo sapien
cacttatagaggatggttctctgct

SEQ ID NO: 1844150 - DNA, 25 bp, Homo sapien
gctggagccaccttcttctccttgg

SEQ ID NO: 1844151 - DNA, 25 bp, Homo sapien
caggggctggagccaccttcttctc

SEQ ID NO: 1844152 - DNA, 25 bp, Homo sapien
ttcttcacgacagcaggggctggag

SEQ ID NO: 1844153 - DNA, 25 bp, Homo sapien
tcttcacgacagcaggggctggagc

SEQ ID NO: 1844154 - DNA, 25 bp, Homo sapien
ggcacagctgcaaataccccatata

SEQ ID NO: 1844155 - DNA, 25 bp, Homo sapien
tgacagagatgacaggacctcaagg

SEQ ID NO: 1844156 - DNA, 25 bp, Homo sapien
tgggccaggaccaaggagccatcag

SEQ ID NO: 1844157 - DNA, 25 bp, Homo sapien
taatgcaggagagcatgacagagat

SEQ ID NO: 1844158 - DNA, 25 bp, Homo sapien
tcattctgggcctcgtgggtctttt

SEQ ID NO: 1844159 - DNA, 25 bp, Homo sapien
gggccctcattctgggcctcgtggg

SEQ ID NO: 1844160 - DNA, 25 bp, Homo sapien
gggctgtacacatgggggccctcat

SEQ ID NO: 1844161 - DNA, 25 bp, Homo sapien
cctcgtgggtctttttcttgatgtc

SEQ ID NO: 1844162 - DNA, 25 bp, Homo sapien
gtagcattggtatggaggccctgct

SEQ ID NO: 1844163 - DNA, 25 bp, Homo sapien
ggagagcatgttcccagagaccaca

SEQ ID NO: 1844164 - DNA, 25 bp, Homo sapien
cgtgagaagaggagtgtccttctct

SEQ ID NO: 1844165 - DNA, 25 bp, Homo sapien
atcgtgagaagaggagtgtccttct

SEQ ID NO: 1844166 - DNA, 25 bp, Homo sapien
ccattattctatacaggttacgtac

SEQ ID NO: 1844167 - DNA, 25 bp, Homo sapien
tatacaggttacgtacatctgcttt

SEQ ID NO: 1844168 - DNA, 25 bp, Homo sapien
ttccattattctatacaggttacgt

SEQ ID NO: 1844169 - DNA, 25 bp, Homo sapien
tattctatacaggttacgtacatct

SEQ ID NO: 1844170 - DNA, 25 bp, Homo sapien
acaaaggtttgctctgggtaggaga

SEQ ID NO: 1844171 - DNA, 25 bp, Homo sapien
catttgggtcaaagacagaaagtca

SEQ ID NO: 1844172 - DNA, 25 bp, Homo sapien
ccactgaaattagccccagagttgc

SEQ ID NO: 1844173 - DNA, 25 bp, Homo sapien
ggctgatcttggacaatgttctgaa

SEQ ID NO: 1844174 - DNA, 25 bp, Homo sapien
taagccctgcgcttctgggatggag

SEQ ID NO: 1844175 - DNA, 25 bp, Homo sapien
ccttgtagtgtgaggtgtgcccgac

SEQ ID NO: 1844176 - DNA, 25 bp, Homo sapien
gaggaccactggttagagcctgccc

SEQ ID NO: 1844177 - DNA, 25 bp, Homo sapien
tcccttttgggcgagtggcgtgcct

SEQ ID NO: 1844178 - DNA, 25 bp, Homo sapien
ggcaccagatccaatagggaccgcc

SEQ ID NO: 1844179 - DNA, 25 bp, Homo sapien
caggatcgggtccaccgggaccgca

SEQ ID NO: 1844180 - DNA, 25 bp, Homo sapien
gcacaggatcgggtccaccgggacc

SEQ ID NO: 1844181 - DNA, 25 bp, Homo sapien
atccaatagggaccgccgcggctgg

SEQ ID NO: 1844182 - DNA, 25 bp, Homo sapien
ggccgtcggcgtggtcggagggtga

SEQ ID NO: 1844183 - DNA, 25 bp, Homo sapien
tcggcgtggtcggagggtgaggagt

SEQ ID NO: 1844184 - DNA, 25 bp, Homo sapien
tccgggcccatgagcggctgcttct

SEQ ID NO: 1844185 - DNA, 25 bp, Homo sapien
tggccgcgggggctggtaccgctgg

SEQ ID NO: 1844186 - DNA, 25 bp, Homo sapien
ggagtgcccaatgcggccggcaggg

SEQ ID NO: 1844187 - DNA, 25 bp, Homo sapien
cctgggagtgcccaatgcggccggc

SEQ ID NO: 1844188 - DNA, 25 bp, Homo sapien
ggccacagtgacacgggctggccca

SEQ ID NO: 1844189 - DNA, 25 bp, Homo sapien
gcaggcgccggcagtagaggcaggg

SEQ ID NO: 1844190 - DNA, 25 bp, Homo sapien
ccaggagtggccgctgggagggctg

SEQ ID NO: 1844191 - DNA, 25 bp, Homo sapien
aggagtggccgctgggagggctggc

SEQ ID NO: 1844192 - DNA, 25 bp, Homo sapien
acccaggagtggccgctgggagggc

SEQ ID NO: 1844193 - DNA, 25 bp, Homo sapien
ctgacccaggagtggccgctgggag

SEQ ID NO: 1844194 - DNA, 25 bp, Homo sapien
tgcccagggtccgggagtgccgacg

SEQ ID NO: 1844195 - DNA, 25 bp, Homo sapien
ctgggagggacccctggggctggct

SEQ ID NO: 1844196 - DNA, 25 bp, Homo sapien
cctggggctggctggactggctggg

SEQ ID NO: 1844197 - DNA, 25 bp, Homo sapien
gacccctggggctggctggactggc

SEQ ID NO: 1844198 - DNA, 25 bp, Homo sapien
ccctggggctggctggactggctgg

SEQ ID NO: 1844199 - DNA, 25 bp, Homo sapien
ggagcggccccccttctggggagca

SEQ ID NO: 1844200 - DNA, 25 bp, Homo sapien
gagcggccccccttctggggagcac

SEQ ID NO: 1844201 - DNA, 25 bp, Homo sapien
agcggccccccttctggggagcaca

SEQ ID NO: 1844202 - DNA, 25 bp, Homo sapien
gcggccccccttctggggagcacac

SEQ ID NO: 1844203 - DNA, 25 bp, Homo sapien
catcgcaggcgggttcgaggtcctg

SEQ ID NO: 1844204 - DNA, 25 bp, Homo sapien
tccttccgctcatgtggcttcaggg

SEQ ID NO: 1844205 - DNA, 25 bp, Homo sapien
atggcgaagccgtcgatgacctcct

SEQ ID NO: 1844206 - DNA, 25 bp, Homo sapien
ggcttcttgatgagacgacgctccc

SEQ ID NO: 1844207 - DNA, 25 bp, Homo sapien
tgggctcgggctcgtcgcccgacga

SEQ ID NO: 1844208 - DNA, 25 bp, Homo sapien
gctgggctcgggctcgtcgcccgac

SEQ ID NO: 1844209 - DNA, 25 bp, Homo sapien
cgttctccttgccggggctgggctc

SEQ ID NO: 1844210 - DNA, 25 bp, Homo sapien
cgcggaggcccgcgttctccttgcc

SEQ ID NO: 1844211 - DNA, 25 bp, Homo sapien
cgccgccgggctgagtgtgcgccgc

SEQ ID NO: 1844212 - DNA, 25 bp, Homo sapien
gcgccgccgggctgagtgtgcgccg

SEQ ID NO: 1844213 - DNA, 25 bp, Homo sapien
gccgccgggctgagtgtgcgccgcg

SEQ ID NO: 1844214 - DNA, 25 bp, Homo sapien
ggcgccgccgggctgagtgtgcgcc

SEQ ID NO: 1844215 - DNA, 25 bp, Homo sapien
cgaatcagtctgaactgatggcggg

SEQ ID NO: 1844216 - DNA, 25 bp, Homo sapien
tcagtctgaactgatggcgggagat

SEQ ID NO: 1844217 - DNA, 25 bp, Homo sapien
ggagatgctgatgcttgctttattc

SEQ ID NO: 1844218 - DNA, 25 bp, Homo sapien
aactgatggcgggagatgctgatgc

SEQ ID NO: 1844219 - DNA, 25 bp, Homo sapien
gatctgggccttgcagactcatgtg

SEQ ID NO: 1844220 - DNA, 25 bp, Homo sapien
ctgcgagctgacagcggagactgaa

SEQ ID NO: 1844221 - DNA, 25 bp, Homo sapien
gacagcggagactgaaatcccggct

SEQ ID NO: 1844222 - DNA, 25 bp, Homo sapien
gttgatctgggccttgcagactcat

SEQ ID NO: 1844223 - DNA, 25 bp, Homo sapien
catgaaccgtactgtcactggctca

SEQ ID NO: 1844224 - DNA, 25 bp, Homo sapien
atgaaccgtactgtcactggctcac

SEQ ID NO: 1844225 - DNA, 25 bp, Homo sapien
ttacatgaaccgtactgtcactggc

SEQ ID NO: 1844226 - DNA, 25 bp, Homo sapien
tacatgaaccgtactgtcactggct

SEQ ID NO: 1844227 - DNA, 25 bp, Homo sapien
agacataatcttccaacagagaatt

SEQ ID NO: 1844228 - DNA, 25 bp, Homo sapien
ttcccaggtggaggcctcttgcaga

SEQ ID NO: 1844229 - DNA, 25 bp, Homo sapien
ctgtcacttcaccaacaatcgttcc

SEQ ID NO: 1844230 - DNA, 25 bp, Homo sapien
tgcagacataatcttccaacagaga

SEQ ID NO: 1844231 - DNA, 25 bp, Homo sapien
tctaaagacgccatcagagtgagtg

SEQ ID NO: 1844232 - DNA, 25 bp, Homo sapien
cataaagtgggagatctccaggatc

SEQ ID NO: 1844233 - DNA, 25 bp, Homo sapien
tttccccagggccgatgagggcgtc

SEQ ID NO: 1844234 - DNA, 25 bp, Homo sapien
agggcgtcgtatctggtttccagtg

SEQ ID NO: 1844235 - DNA, 25 bp, Homo sapien
actgggctagtgaggagaggatcaa

SEQ ID NO: 1844236 - DNA, 25 bp, Homo sapien
gagaactgggctagtgaggagagga

SEQ ID NO: 1844237 - DNA, 25 bp, Homo sapien
tagtgaggagaggatcaagatgaac

SEQ ID NO: 1844238 - DNA, 25 bp, Homo sapien
ggctagtgaggagaggatcaagatg

SEQ ID NO: 1844239 - DNA, 25 bp, Homo sapien
agcctgtgaggagacggtgccttcc

SEQ ID NO: 1844240 - DNA, 25 bp, Homo sapien
tgttgtgactggaggaaatagccat

SEQ ID NO: 1844241 - DNA, 25 bp, Homo sapien
tagagcaaaagctctgtgcacacac

SEQ ID NO: 1844242 - DNA, 25 bp, Homo sapien
cacacaccgtgcatgtgtgagcctg

SEQ ID NO: 1844243 - DNA, 25 bp, Homo sapien
cagagtcatagattagacaggccca

SEQ ID NO: 1844244 - DNA, 25 bp, Homo sapien
tagaatgcttaaccacgggacacca

SEQ ID NO: 1844245 - DNA, 25 bp, Homo sapien
catctaggtatgttgctttggccca

SEQ ID NO: 1844246 - DNA, 25 bp, Homo sapien
caagcaactatgtggttcgagtgcc

SEQ ID NO: 1844247 - DNA, 25 bp, Homo sapien
tatgtaagccttcagcgtaaaaatg

SEQ ID NO: 1844248 - DNA, 25 bp, Homo sapien
catgtacatcaataggaaaccggtg

SEQ ID NO: 1844249 - DNA, 25 bp, Homo sapien
tcttgcctatgtgcacaggagacat

SEQ ID NO: 1844250 - DNA, 25 bp, Homo sapien
ggcaaaaactggaatcggccacatg

SEQ ID NO: 1844251 - DNA, 25 bp, Homo sapien
aacagcaaaccggtcattagtgttg

SEQ ID NO: 1844252 - DNA, 25 bp, Homo sapien
tacgtatcagaagactcaggatgga

SEQ ID NO: 1844253 - DNA, 25 bp, Homo sapien
caaaccggtcattagtgttgtttct

SEQ ID NO: 1844254 - DNA, 25 bp, Homo sapien
tgaaggaatacaaaggaatacgtat

SEQ ID NO: 1844255 - DNA, 25 bp, Homo sapien
cacttctgatatggcctggttctgt

SEQ ID NO: 1844256 - DNA, 25 bp, Homo sapien
tcatcttgaattgttatgcgaattg

SEQ ID NO: 1844257 - DNA, 25 bp, Homo sapien
ctgagtgtggcttggacttaatgag

SEQ ID NO: 1844258 - DNA, 25 bp, Homo sapien
gtgcatcttaattccctctcctgag

SEQ ID NO: 1844259 - DNA, 25 bp, Homo sapien
cagaagtttctcaagaccgaggtgg

SEQ ID NO: 1844260 - DNA, 25 bp, Homo sapien
aactcagagctatggaatgatggca

SEQ ID NO: 1844261 - DNA, 25 bp, Homo sapien
cctggttgcaaagtacacagtgtgc

SEQ ID NO: 1844262 - DNA, 25 bp, Homo sapien
tgactcctggttgcaactacctggt

SEQ ID NO: 1844263 - DNA, 25 bp, Homo sapien
tattgggaccggaacacacagatct

SEQ ID NO: 1844264 - DNA, 25 bp, Homo sapien
caagcacggactgaacgagagaacc

SEQ ID NO: 1844265 - DNA, 25 bp, Homo sapien
tttcctggatactcacgaagcgggc

SEQ ID NO: 1844266 - DNA, 25 bp, Homo sapien
ttcttctcacaacctgcgacgggtc

SEQ ID NO: 1844267 - DNA, 25 bp, Homo sapien
cgggcgcttcctctgcgggtatgaa

SEQ ID NO: 1844268 - DNA, 25 bp, Homo sapien
cgacgggcgcttcctctgcgggtat

SEQ ID NO: 1844269 - DNA, 25 bp, Homo sapien
tcctctgcgggtatgaacagcacgc

SEQ ID NO: 1844270 - DNA, 25 bp, Homo sapien
catgcaggtgatgtatggctgcgac

SEQ ID NO: 1844271 - DNA, 25 bp, Homo sapien
tcttccccacgctgatctgtgttcc

SEQ ID NO: 1844272 - DNA, 25 bp, Homo sapien
actgcagtgaagtgttatgggtcca

SEQ ID NO: 1844273 - DNA, 25 bp, Homo sapien
gcaaaacgtgtgcactacagaaggt

SEQ ID NO: 1844274 - DNA, 25 bp, Homo sapien
aaatatcaccttaagagatctggac

SEQ ID NO: 1844275 - DNA, 25 bp, Homo sapien
gattaaccttacagagcttcaagag

SEQ ID NO: 1844276 - DNA, 25 bp, Homo sapien
gggaccagacctgcagggtatagaa

SEQ ID NO: 1844277 - DNA, 25 bp, Homo sapien
tcacactgagatgggctaaggagat

SEQ ID NO: 1844278 - DNA, 25 bp, Homo sapien
ggtcccgggcttctaccatgtggaa

SEQ ID NO: 1844279 - DNA, 25 bp, Homo sapien
ggaccaaatttaggacgcagagctt

SEQ ID NO: 1844280 - DNA, 25 bp, Homo sapien
ctcctttcttagggccatcttccca

SEQ ID NO: 1844281 - DNA, 25 bp, Homo sapien
cccagcccacattcctcatcatggg

SEQ ID NO: 1844282 - DNA, 25 bp, Homo sapien
cttcccagcccacattcctcatcat

SEQ ID NO: 1844283 - DNA, 25 bp, Homo sapien
ctttcttagggccatcttcccagcc

SEQ ID NO: 1844284 - DNA, 25 bp, Homo sapien
tgttaaaatctaacgcccactgtgg

SEQ ID NO: 1844285 - DNA, 25 bp, Homo sapien
cacatttgggacaattgggagtaga

SEQ ID NO: 1844286 - DNA, 25 bp, Homo sapien
aatttaccttgcgtctcagatgaga

SEQ ID NO: 1844287 - DNA, 25 bp, Homo sapien
gctggaacaacctaacacatttggg

SEQ ID NO: 1844288 - DNA, 25 bp, Homo sapien
ggtctcagggacatacagcttcact

SEQ ID NO: 1844289 - DNA, 25 bp, Homo sapien
cacaggtatgtgtctctggcagcta

SEQ ID NO: 1844290 - DNA, 25 bp, Homo sapien
tgaagcattgacatctacccctggt

SEQ ID NO: 1844291 - DNA, 25 bp, Homo sapien
taaagtagtgtgactcggcagtcca

SEQ ID NO: 1844292 - DNA, 25 bp, Homo sapien
aagcaactcctcagcttgggccagc

SEQ ID NO: 1844293 - DNA, 25 bp, Homo sapien
tctttagcttttggatcttgagcac

SEQ ID NO: 1844294 - DNA, 25 bp, Homo sapien
tccagctgctgtgcaagcaactcct

SEQ ID NO: 1844295 - DNA, 25 bp, Homo sapien
caccgactccttcccttccaggagg

SEQ ID NO: 1844296 - DNA, 25 bp, Homo sapien
gacaagatgttgtcttcctgcaggt

SEQ ID NO: 1844297 - DNA, 25 bp, Homo sapien
caatgacaagatgttgtcttcctgc

SEQ ID NO: 1844298 - DNA, 25 bp, Homo sapien
tgtgagccaatgacaagatgttgtc

SEQ ID NO: 1844299 - DNA, 25 bp, Homo sapien
catgtgtgagccaatgacaagatgt

SEQ ID NO: 1844300 - DNA, 25 bp, Homo sapien
gacccacttggcaagggaaagattc

SEQ ID NO: 1844301 - DNA, 25 bp, Homo sapien
cacttggcaagggaaagattcagtg

SEQ ID NO: 1844302 - DNA, 25 bp, Homo sapien
caagggaaagattcagtgtttccat

SEQ ID NO: 1844303 - DNA, 25 bp, Homo sapien
tggcaagggaaagattcagtgtttc

SEQ ID NO: 1844304 - DNA, 25 bp, Homo sapien
ctccaaggccgtgcccctgtgctct

SEQ ID NO: 1844305 - DNA, 25 bp, Homo sapien
ccagagaagtgtggacagtatatgc

SEQ ID NO: 1844306 - DNA, 25 bp, Homo sapien
accccattgcaagtgtgagtagaat

SEQ ID NO: 1844307 - DNA, 25 bp, Homo sapien
tcaccagagaagtgtggacagtata

SEQ ID NO: 1844308 - DNA, 25 bp, Homo sapien
ctaatacattttcacaagagaggat

SEQ ID NO: 1844309 - DNA, 25 bp, Homo sapien
acattttcacaagagaggatgtatt

SEQ ID NO: 1844310 - DNA, 25 bp, Homo sapien
cacaagagaggatgtattattacat

SEQ ID NO: 1844311 - DNA, 25 bp, Homo sapien
ttcacaagagaggatgtattattac

SEQ ID NO: 1844312 - DNA, 25 bp, Homo sapien
tacacaggctcaacagactcggaat

SEQ ID NO: 1844313 - DNA, 25 bp, Homo sapien
gatgaaccaggtatgccctcatatg

SEQ ID NO: 1844314 - DNA, 25 bp, Homo sapien
gactcggaatgaattgatatgcaca

SEQ ID NO: 1844315 - DNA, 25 bp, Homo sapien
aactttctgtgatgcaatttaatac

SEQ ID NO: 1844316 - DNA, 25 bp, Homo sapien
aagcttcacaagaccgaggtggagc

SEQ ID NO: 1844317 - DNA, 25 bp, Homo sapien
tagaagcttcacaagaccgaggtgg

SEQ ID NO: 1844318 - DNA, 25 bp, Homo sapien
aatgacacactctgactcacaggag

SEQ ID NO: 1844319 - DNA, 25 bp, Homo sapien
gagcctcgctcagtgttctttgcag

SEQ ID NO: 1844320 - DNA, 25 bp, Homo sapien
taaagtctgtactggctcccggttg

SEQ ID NO: 1844321 - DNA, 25 bp, Homo sapien
ggagatgtcttggactcacccagta

SEQ ID NO: 1844322 - DNA, 25 bp, Homo sapien
caggtaatgggacaatgctagagcc

SEQ ID NO: 1844323 - DNA, 25 bp, Homo sapien
ggtttctagcgaagccaatcggcgt

SEQ ID NO: 1844324 - DNA, 25 bp, Homo sapien
gtacatcgcagtgggctacgtggac

SEQ ID NO: 1844325 - DNA, 25 bp, Homo sapien
tactaccaccagagctaggccggtg

SEQ ID NO: 1844326 - DNA, 25 bp, Homo sapien
cagactgacaagagtgaacctgccc

SEQ ID NO: 1844327 - DNA, 25 bp, Homo sapien
gtaccggcaggacgcctacgacggc

SEQ ID NO: 1844328 - DNA, 25 bp, Homo sapien
catccagataatgtatggctgcgac

SEQ ID NO: 1844329 - DNA, 25 bp, Homo sapien
tgcgctcttggaccgcggcggacat

SEQ ID NO: 1844330 - DNA, 25 bp, Homo sapien
atggcggctcagatcaccaagcgca

SEQ ID NO: 1844331 - DNA, 25 bp, Homo sapien
gggcgcctccctgatcgcctgtaga

SEQ ID NO: 1844332 - DNA, 25 bp, Homo sapien
ggaccaacactagaatatcaccctc

SEQ ID NO: 1844333 - DNA, 25 bp, Homo sapien
caattgggaccaacactagaatatc

SEQ ID NO: 1844334 - DNA, 25 bp, Homo sapien
gaggggagacaattgggaccaacac

SEQ ID NO: 1844335 - DNA, 25 bp, Homo sapien
aattcttgccatgagaggttgatga

SEQ ID NO: 1844336 - DNA, 25 bp, Homo sapien
ccctttgtgacttgaagaaccctga

SEQ ID NO: 1844337 - DNA, 25 bp, Homo sapien
tgagaggcaagagttgttcctgccc

SEQ ID NO: 1844338 - DNA, 25 bp, Homo sapien
catgtgtctgtgttcgtgtaggcat

SEQ ID NO: 1844339 - DNA, 25 bp, Homo sapien
tattggcttctatgtgacccataga

SEQ ID NO: 1844340 - DNA, 25 bp, Homo sapien
gagcctcaattccatgttaacaccc

SEQ ID NO: 1844341 - DNA, 25 bp, Homo sapien
cggtccatgtcggttgagcctcaat

SEQ ID NO: 1844342 - DNA, 25 bp, Homo sapien
tctatcatgagacgaaaacggtcca

SEQ ID NO: 1844343 - DNA, 25 bp, Homo sapien
gccacagccaattgtaaggagccat

SEQ ID NO: 1844344 - DNA, 25 bp, Homo sapien
tattatacggcaccagtcgtgggac

SEQ ID NO: 1844345 - DNA, 25 bp, Homo sapien
taactgcaaagcaccctgattaggc

SEQ ID NO: 1844346 - DNA, 25 bp, Homo sapien
tagattggagttaaccatttccgcc

SEQ ID NO: 1844347 - DNA, 25 bp, Homo sapien
gaagcaggaggtgaggtaaaggaac

SEQ ID NO: 1844348 - DNA, 25 bp, Homo sapien
aagcaggaggtgaggtaaaggaaca

SEQ ID NO: 1844349 - DNA, 25 bp, Homo sapien
gagaagcaggaggtgaggtaaagga

SEQ ID NO: 1844350 - DNA, 25 bp, Homo sapien
tggagaagcaggaggtgaggtaaag

SEQ ID NO: 1844351 - DNA, 25 bp, Homo sapien
gaatgtcccatgaggaatgcaaagt

SEQ ID NO: 1844352 - DNA, 25 bp, Homo sapien
cactgacccagtagtgggatggaca

SEQ ID NO: 1844353 - DNA, 25 bp, Homo sapien
gacaggaccaaatgtaggatgcaga

SEQ ID NO: 1844354 - DNA, 25 bp, Homo sapien
tcaggatggtcccatgaggtggaat

SEQ ID NO: 1844355 - DNA, 25 bp, Homo sapien
gctagcttgccatcacctaagtgca

SEQ ID NO: 1844356 - DNA, 25 bp, Homo sapien
caactaccaataggcgatgcccagg

SEQ ID NO: 1844357 - DNA, 25 bp, Homo sapien
gagggacttgcacactagggaagaa

SEQ ID NO: 1844358 - DNA, 25 bp, Homo sapien
tagggccataagtcaaatgctcaga

SEQ ID NO: 1844359 - DNA, 25 bp, Homo sapien
tgtatcccatggagcagatgaccct

SEQ ID NO: 1844360 - DNA, 25 bp, Homo sapien
tctccttggggaatcctgcaggcca

SEQ ID NO: 1844361 - DNA, 25 bp, Homo sapien
ctggctcaaagacgccccatcctgt

SEQ ID NO: 1844362 - DNA, 25 bp, Homo sapien
taggtcccatcccattggacagaac

SEQ ID NO: 1844363 - DNA, 25 bp, Homo sapien
gagagtgtgtctcagccggcatagc

SEQ ID NO: 1844364 - DNA, 25 bp, Homo sapien
tgcctgcagtctacccatatagggt

SEQ ID NO: 1844365 - DNA, 25 bp, Homo sapien
gttctggaggactgggatactgtcc

SEQ ID NO: 1844366 - DNA, 25 bp, Homo sapien
tacccataagagtaggaatgcctag

SEQ ID NO: 1844367 - DNA, 25 bp, Homo sapien
tatatgccagggcccttctgaggtc

SEQ ID NO: 1844368 - DNA, 25 bp, Homo sapien
tttctgcctgttgaagagcaggaag

SEQ ID NO: 1844369 - DNA, 25 bp, Homo sapien
ttgatatatgccagggcccttctga

SEQ ID NO: 1844370 - DNA, 25 bp, Homo sapien
gatatatgccagggcccttctgagg

SEQ ID NO: 1844371 - DNA, 25 bp, Homo sapien
cccatcttgacaggcagctatttat

SEQ ID NO: 1844372 - DNA, 25 bp, Homo sapien
aaagtctctctcttatgctacccca

SEQ ID NO: 1844373 - DNA, 25 bp, Homo sapien
ttgacttggctcaaaactcaaaaag

SEQ ID NO: 1844374 - DNA, 25 bp, Homo sapien
taccaagagcttagctacatctttg

SEQ ID NO: 1844375 - DNA, 25 bp, Homo sapien
gaatgtttgaccacgggataccaag

SEQ ID NO: 1844376 - DNA, 25 bp, Homo sapien
tagacattttgctttggcccacagt

SEQ ID NO: 1844377 - DNA, 25 bp, Homo sapien
tcttcacagggttaggtaccgattc

SEQ ID NO: 1844378 - DNA, 25 bp, Homo sapien
tcagggctattgtaacacctgtgcc

SEQ ID NO: 1844379 - DNA, 25 bp, Homo sapien
cagtgtgtgcccagataccacttgg

SEQ ID NO: 1844380 - DNA, 25 bp, Homo sapien
tgttcccaacgactgatgggtcata

SEQ ID NO: 1844381 - DNA, 25 bp, Homo sapien
gtgcccagataccacttggtgagaa

SEQ ID NO: 1844382 - DNA, 25 bp, Homo sapien
ctgttcccaacgactgatgggtcat

SEQ ID NO: 1844383 - DNA, 25 bp, Homo sapien
cctaggctgacaactggactgcaac

SEQ ID NO: 1844384 - DNA, 25 bp, Homo sapien
tggccaattgtagctcgaggactcc

SEQ ID NO: 1844385 - DNA, 25 bp, Homo sapien
ctgcaaccttgtgagaggccctgag

SEQ ID NO: 1844386 - DNA, 25 bp, Homo sapien
gccagaagcactcagggaaacctct

SEQ ID NO: 1844387 - DNA, 25 bp, Homo sapien
gacattgtgactgcatcgagcgctt

SEQ ID NO: 1844388 - DNA, 25 bp, Homo sapien
cacataggaacacagtggctacttt

SEQ ID NO: 1844389 - DNA, 25 bp, Homo sapien
tacagagcctcgcagggtgttactt

SEQ ID NO: 1844390 - DNA, 25 bp, Homo sapien
tgactcctggttgcaacacatagga

SEQ ID NO: 1844391 - DNA, 25 bp, Homo sapien
tattgggacctacagacactgggcg

SEQ ID NO: 1844392 - DNA, 25 bp, Homo sapien
cccaggcacagactgaccgagtgaa

SEQ ID NO: 1844393 - DNA, 25 bp, Homo sapien
tctgccgtgaggagcgaaaggtcca

SEQ ID NO: 1844394 - DNA, 25 bp, Homo sapien
cttcattgccgtgggctacgtggac

SEQ ID NO: 1844395 - DNA, 25 bp, Homo sapien
tcatcttcagttgaggccaaaatct

SEQ ID NO: 1844396 - DNA, 25 bp, Homo sapien
aactgggccagggtatcacatcctc

SEQ ID NO: 1844397 - DNA, 25 bp, Homo sapien
aaatctccgcaggttgctagggtcc

SEQ ID NO: 1844398 - DNA, 25 bp, Homo sapien
tccagggaatgtttggctgcgacct

SEQ ID NO: 1844399 - DNA, 25 bp, Homo sapien
gagcctgctcgatctcctgtagatc

SEQ ID NO: 1844400 - DNA, 25 bp, Homo sapien
catggggagcctgctcgatctcctg

SEQ ID NO: 1844401 - DNA, 25 bp, Homo sapien
gggagcctgctcgatctcctgtaga

SEQ ID NO: 1844402 - DNA, 25 bp, Homo sapien
tggggagcctgctcgatctcctgta

SEQ ID NO: 1844403 - DNA, 25 bp, Homo sapien
tgtggtcactggagctgtggtcact

SEQ ID NO: 1844404 - DNA, 25 bp, Homo sapien
ggagctgtggtcactggagctgtgg

SEQ ID NO: 1844405 - DNA, 25 bp, Homo sapien
ctggttctccttggagctgtggtca

SEQ ID NO: 1844406 - DNA, 25 bp, Homo sapien
agctgtggtcactggagctgtggtc

SEQ ID NO: 1844407 - DNA, 25 bp, Homo sapien
ggacagaccttaggagggcagttgg

SEQ ID NO: 1844408 - DNA, 25 bp, Homo sapien
ttctggaaacttctcgaggttccaa

SEQ ID NO: 1844409 - DNA, 25 bp, Homo sapien
ttttcttcccgcagatagaaaagga

SEQ ID NO: 1844410 - DNA, 25 bp, Homo sapien
tccaagactaggaggttcctctagg

SEQ ID NO: 1844411 - DNA, 25 bp, Homo sapien
ctacattccttccccgatcaccttt

SEQ ID NO: 1844412 - DNA, 25 bp, Homo sapien
tacattccttccccgatcacctttc

SEQ ID NO: 1844413 - DNA, 25 bp, Homo sapien
tgttccagagaagtggtgctgggat

SEQ ID NO: 1844414 - DNA, 25 bp, Homo sapien
cattccttccccgatcacctttcct

SEQ ID NO: 1844415 - DNA, 25 bp, Homo sapien
gtctcaacttcatggtgcactgagc

SEQ ID NO: 1844416 - DNA, 25 bp, Homo sapien
cactgagctgtaacttcttacttcc

SEQ ID NO: 1844417 - DNA, 25 bp, Homo sapien
tctctgtctcaacttcatggtgcac

SEQ ID NO: 1844418 - DNA, 25 bp, Homo sapien
tgcactgagctgtaacttcttactt

SEQ ID NO: 1844419 - DNA, 25 bp, Homo sapien
catgggccttgttgcaaatgtgacc

SEQ ID NO: 1844420 - DNA, 25 bp, Homo sapien
gagttgtctacaaggatgtctggga

SEQ ID NO: 1844421 - DNA, 25 bp, Homo sapien
ttggacacctctgtaggcagatgat

SEQ ID NO: 1844422 - DNA, 25 bp, Homo sapien
gctcaagacaatgcttattcttccc

SEQ ID NO: 1844423 - DNA, 25 bp, Homo sapien
aagtgggacatggtagggctcatcc

SEQ ID NO: 1844424 - DNA, 25 bp, Homo sapien
gacacgttgcttaccttgactaggg

SEQ ID NO: 1844425 - DNA, 25 bp, Homo sapien
ttgaagatggactcacagcacttgc

SEQ ID NO: 1844426 - DNA, 25 bp, Homo sapien
gaagaagaatcaaggacacccacag

SEQ ID NO: 1844427 - DNA, 25 bp, Homo sapien
gagacatctatgaggaatgcaggtg

SEQ ID NO: 1844428 - DNA, 25 bp, Homo sapien
gtcacagatcattatgctttctcag

SEQ ID NO: 1844429 - DNA, 25 bp, Homo sapien
gagccagagcactgattctcccctg

SEQ ID NO: 1844430 - DNA, 25 bp, Homo sapien
tgcagctacagattcatcatccaat

SEQ ID NO: 1844431 - DNA, 25 bp, Homo sapien
tattcatcagatcagctagaggccc

SEQ ID NO: 1844432 - DNA, 25 bp, Homo sapien
ggccccaggactaaatgacaagacg

SEQ ID NO: 1844433 - DNA, 25 bp, Homo sapien
tacatcatccagagcagaatcgaga

SEQ ID NO: 1844434 - DNA, 25 bp, Homo sapien
taagtgcagcttctagacccaaggg

SEQ ID NO: 1844435 - DNA, 25 bp, Homo sapien
cactgcatcttacaaatgtgtcagc

SEQ ID NO: 1844436 - DNA, 25 bp, Homo sapien
cactgcaacagatggtgcatcaaca

SEQ ID NO: 1844437 - DNA, 25 bp, Homo sapien
atggtgctcccatgtattaatgctc

SEQ ID NO: 1844438 - DNA, 25 bp, Homo sapien
gagtctgtcagtgaaagccttctca

SEQ ID NO: 1844439 - DNA, 25 bp, Homo sapien
tgactggataaacaacccacggtgc

SEQ ID NO: 1844440 - DNA, 25 bp, Homo sapien
tgagagtatacagtggtgcagccac

SEQ ID NO: 1844441 - DNA, 25 bp, Homo sapien
tatgtgtacactcaggcccatagca

SEQ ID NO: 1844442 - DNA, 25 bp, Homo sapien
cccacggtgcacataagcatggaat

SEQ ID NO: 1844443 - DNA, 25 bp, Homo sapien
aaatgtgcttactgccaccaaattg

SEQ ID NO: 1844444 - DNA, 25 bp, Homo sapien
aatgggcagttatggtttaatgggt

SEQ ID NO: 1844445 - DNA, 25 bp, Homo sapien
tatataaagtagctagaataagcaa

SEQ ID NO: 1844446 - DNA, 25 bp, Homo sapien
ttatatagtatgcatgttttaccac

SEQ ID NO: 1844447 - DNA, 25 bp, Homo sapien
gcacttgcagtcagagcctagaaca

SEQ ID NO: 1844448 - DNA, 25 bp, Homo sapien
gtcagagcctagaacatgtgctgag

SEQ ID NO: 1844449 - DNA, 25 bp, Homo sapien
caagtcagcacttgcagtcagagcc

SEQ ID NO: 1844450 - DNA, 25 bp, Homo sapien
cttgttccttggtttattggctcct

SEQ ID NO: 1844451 - DNA, 25 bp, Homo sapien
aagatccaagaatactcttttgggg

SEQ ID NO: 1844452 - DNA, 25 bp, Homo sapien
caagatccaagaatactcttttggg

SEQ ID NO: 1844453 - DNA, 25 bp, Homo sapien
gaaacacggtaaaggtcagtcagcc

SEQ ID NO: 1844454 - DNA, 25 bp, Homo sapien
tagctggatccgctgactttaaaac

SEQ ID NO: 1844455 - DNA, 25 bp, Homo sapien
tacgtttgatcagcggttacaatcg

SEQ ID NO: 1844456 - DNA, 25 bp, Homo sapien
ggcaccctccaaggaaacacaagag

SEQ ID NO: 1844457 - DNA, 25 bp, Homo sapien
taggtagtcgacatgggtccggcaa

SEQ ID NO: 1844458 - DNA, 25 bp, Homo sapien
tagtcgacatgggtccggcaaaaca

SEQ ID NO: 1844459 - DNA, 25 bp, Homo sapien
tgatgactactaggtagtcgacatg

SEQ ID NO: 1844460 - DNA, 25 bp, Homo sapien
actactaggtagtcgacatgggtcc

SEQ ID NO: 1844461 - DNA, 25 bp, Homo sapien
tctttgtgaagacacttcccttggt

SEQ ID NO: 1844462 - DNA, 25 bp, Homo sapien
tatgctggctctcctattgcctgga

SEQ ID NO: 1844463 - DNA, 25 bp, Homo sapien
cttggtcctgccacacgtggactgg

SEQ ID NO: 1844464 - DNA, 25 bp, Homo sapien
agatcgtcttcacctcatcctgggc

SEQ ID NO: 1844465 - DNA, 25 bp, Homo sapien
tccttcatgacagtgcaaacatcaa

SEQ ID NO: 1844466 - DNA, 25 bp, Homo sapien
gaaatccttgactgatagcctagta

SEQ ID NO: 1844467 - DNA, 25 bp, Homo sapien
tagtggacctgttagatctcctggt

SEQ ID NO: 1844468 - DNA, 25 bp, Homo sapien
ggttatctgctttcatggtaccatg

SEQ ID NO: 1844469 - DNA, 25 bp, Homo sapien
gtagatcacatgattcatcagagga

SEQ ID NO: 1844470 - DNA, 25 bp, Homo sapien
cacatgattcatcagaggacttgaa

SEQ ID NO: 1844471 - DNA, 25 bp, Homo sapien
tcttcagggtctagtagatcacatg

SEQ ID NO: 1844472 - DNA, 25 bp, Homo sapien
ggtctagtagatcacatgattcatc

SEQ ID NO: 1844473 - DNA, 25 bp, Homo sapien
gcattcaatgtggaagtcggaccta

SEQ ID NO: 1844474 - DNA, 25 bp, Homo sapien
aattagctgcggtggtgtttcgtgc

SEQ ID NO: 1844475 - DNA, 25 bp, Homo sapien
tcctggcctagcgaggtgacttata

SEQ ID NO: 1844476 - DNA, 25 bp, Homo sapien
ctaggagttccacccaggagttcga

SEQ ID NO: 1844477 - DNA, 25 bp, Homo sapien
tgtcattgtcctcacaagccctggg

SEQ ID NO: 1844478 - DNA, 25 bp, Homo sapien
aagtctccaatctcctctaggacag

SEQ ID NO: 1844479 - DNA, 25 bp, Homo sapien
gttcttcttcttgtatctgagttct

SEQ ID NO: 1844480 - DNA, 25 bp, Homo sapien
tctaggacagccgtaggagttactt

SEQ ID NO: 1844481 - DNA, 25 bp, Homo sapien
tgtgccagactctacagaacaggct

SEQ ID NO: 1844482 - DNA, 25 bp, Homo sapien
taagcataatattcctgagggcatc

SEQ ID NO: 1844483 - DNA, 25 bp, Homo sapien
aataaaactttcgtgctgcaggtgc

SEQ ID NO: 1844484 - DNA, 25 bp, Homo sapien
taaatgcctcaacagccacgtgtag

SEQ ID NO: 1844485 - DNA, 25 bp, Homo sapien
gacttcttaaaaagggtggcattgc

SEQ ID NO: 1844486 - DNA, 25 bp, Homo sapien
tctgagacttatccataagaatact

SEQ ID NO: 1844487 - DNA, 25 bp, Homo sapien
tctccattctgagacttatccataa

SEQ ID NO: 1844488 - DNA, 25 bp, Homo sapien
ccattctgagacttatccataagaa

SEQ ID NO: 1844489 - DNA, 25 bp, Homo sapien
tctctccattctgagacttatccat

SEQ ID NO: 1844490 - DNA, 25 bp, Homo sapien
aatccgacttctactgcatggttgg

SEQ ID NO: 1844491 - DNA, 25 bp, Homo sapien
caagttctctccctcgaatcatgcg

SEQ ID NO: 1844492 - DNA, 25 bp, Homo sapien
tctcatatgtaagtagctggctctg

SEQ ID NO: 1844493 - DNA, 25 bp, Homo sapien
tctgtgcgttctggatgccatgccc

SEQ ID NO: 1844494 - DNA, 25 bp, Homo sapien
ttttttctagatttcattgcctgtc

SEQ ID NO: 1844495 - DNA, 25 bp, Homo sapien
gaaacagcttgctccctacagagta

SEQ ID NO: 1844496 - DNA, 25 bp, Homo sapien
tggcaagccagtagtcaagagaaac

SEQ ID NO: 1844497 - DNA, 25 bp, Homo sapien
taataagactctgctttggcaagcc

SEQ ID NO: 1844498 - DNA, 25 bp, Homo sapien
tagttccaaactgtatgatgtgaag

SEQ ID NO: 1844499 - DNA, 25 bp, Homo sapien
tctgtgtagttccaaactgtatgat

SEQ ID NO: 1844500 - DNA, 25 bp, Homo sapien
tgtagttccaaactgtatgatgtga

SEQ ID NO: 1844501 - DNA, 25 bp, Homo sapien
ccaaactgtatgatgtgaagataat

SEQ ID NO: 1844502 - DNA, 25 bp, Homo sapien
gtggagactgctgacctgcagcaat

SEQ ID NO: 1844503 - DNA, 25 bp, Homo sapien
tttttccagtggagactgctgacct

SEQ ID NO: 1844504 - DNA, 25 bp, Homo sapien
tttccagtggagactgctgacctgc

SEQ ID NO: 1844505 - DNA, 25 bp, Homo sapien
ccagtggagactgctgacctgcagc

SEQ ID NO: 1844506 - DNA, 25 bp, Homo sapien
tctttagatgatgtaccccaggcca

SEQ ID NO: 1844507 - DNA, 25 bp, Homo sapien
ctttagatgatgtaccccaggccaa

SEQ ID NO: 1844508 - DNA, 25 bp, Homo sapien
gatctttagatgatgtaccccaggc

SEQ ID NO: 1844509 - DNA, 25 bp, Homo sapien
tttagatgatgtaccccaggccaat

SEQ ID NO: 1844510 - DNA, 25 bp, Homo sapien
tcgtatttaagccactgaggatgcc

SEQ ID NO: 1844511 - DNA, 25 bp, Homo sapien
ttaagagttcgataggcggcaggca

SEQ ID NO: 1844512 - DNA, 25 bp, Homo sapien
tgggactaagcattcctcgggcctt

SEQ ID NO: 1844513 - DNA, 25 bp, Homo sapien
tgcagtttcttgatccgggccctct

SEQ ID NO: 1844514 - DNA, 25 bp, Homo sapien
ggacccaaggaacgctagaactata

SEQ ID NO: 1844515 - DNA, 25 bp, Homo sapien
taactacggtgcagccgcaaaaggg

SEQ ID NO: 1844516 - DNA, 25 bp, Homo sapien
cgcaaaagggaaataccggctcagg

SEQ ID NO: 1844517 - DNA, 25 bp, Homo sapien
tttccaagcgcagtgaaccgtccgc

SEQ ID NO: 1844518 - DNA, 25 bp, Homo sapien
ttcagggggatataccccgcgactg

SEQ ID NO: 1844519 - DNA, 25 bp, Homo sapien
ggggatataccccgcgactgcgttc

SEQ ID NO: 1844520 - DNA, 25 bp, Homo sapien
tcagggggatataccccgcgactgc

SEQ ID NO: 1844521 - DNA, 25 bp, Homo sapien
agggggatataccccgcgactgcgt

SEQ ID NO: 1844522 - DNA, 25 bp, Homo sapien
ctgctggaagcgcagcattggttac

SEQ ID NO: 1844523 - DNA, 25 bp, Homo sapien
aaaatctgctggaagcgcagcattg

SEQ ID NO: 1844524 - DNA, 25 bp, Homo sapien
acaaagagaataaatatcccaggat

SEQ ID NO: 1844525 - DNA, 25 bp, Homo sapien
aatatcccaggattgggtgctggtg

SEQ ID NO: 1844526 - DNA, 25 bp, Homo sapien
gccaatcgtcaacgcgaaagcctga

SEQ ID NO: 1844527 - DNA, 25 bp, Homo sapien
gaatagttacgacctctgggacagg

SEQ ID NO: 1844528 - DNA, 25 bp, Homo sapien
gagacgcaatctcccttggaagacg

SEQ ID NO: 1844529 - DNA, 25 bp, Homo sapien
tatatactcctaggtcctgggacag

SEQ ID NO: 1844530 - DNA, 25 bp, Homo sapien
tcaccccagagagaacgaatatgtt

SEQ ID NO: 1844531 - DNA, 25 bp, Homo sapien
taggctgtgagtacgcgtgctgccc

SEQ ID NO: 1844532 - DNA, 25 bp, Homo sapien
taggccacggtagggtcattactat

SEQ ID NO: 1844533 - DNA, 25 bp, Homo sapien
tcttcaaggcgtagcacagtgactg

SEQ ID NO: 1844534 - DNA, 25 bp, Homo sapien
tctctcgagggatctaggcaccttg

SEQ ID NO: 1844535 - DNA, 25 bp, Homo sapien
caaagctggcttgagattggtcact

SEQ ID NO: 1844536 - DNA, 25 bp, Homo sapien
gacagatccaatatagtcccaggga

SEQ ID NO: 1844537 - DNA, 25 bp, Homo sapien
agactttgatttctccggcagccca

SEQ ID NO: 1844538 - DNA, 25 bp, Homo sapien
cctgcaaaagaggtacaaagcttcc

SEQ ID NO: 1844539 - DNA, 25 bp, Homo sapien
gtcaagtatttgaccagcagagcct

SEQ ID NO: 1844540 - DNA, 25 bp, Homo sapien
ttaggagaaacctcagtggacaggc

SEQ ID NO: 1844541 - DNA, 25 bp, Homo sapien
cagggtagcccagtccttagatctg

SEQ ID NO: 1844542 - DNA, 25 bp, Homo sapien
gcctagaatggtttgaatgggagaa

SEQ ID NO: 1844543 - DNA, 25 bp, Homo sapien
ggcgtgtgaatgtgttcccagaaat

SEQ ID NO: 1844544 - DNA, 25 bp, Homo sapien
tgttccccattgcaggcctagaatg

SEQ ID NO: 1844545 - DNA, 25 bp, Homo sapien
tgtgggttgctattaatactcctgc

SEQ ID NO: 1844546 - DNA, 25 bp, Homo sapien
gggccaaacttctagttggagacga

SEQ ID NO: 1844547 - DNA, 25 bp, Homo sapien
cagtggccgggccaaacttctagtt

SEQ ID NO: 1844548 - DNA, 25 bp, Homo sapien
tggccgggccaaacttctagttgga

SEQ ID NO: 1844549 - DNA, 25 bp, Homo sapien
ccaaacttctagttggagacgagac

SEQ ID NO: 1844550 - DNA, 25 bp, Homo sapien
agaacagcgggaagatgcgctcccc

SEQ ID NO: 1844551 - DNA, 25 bp, Homo sapien
tttccgctggtacaatgcggagcgg

SEQ ID NO: 1844552 - DNA, 25 bp, Homo sapien
gagcggagcacgagggtcgcaggtg

SEQ ID NO: 1844553 - DNA, 25 bp, Homo sapien
gctttccgctggtacaatgcggagc

SEQ ID NO: 1844554 - DNA, 25 bp, Homo sapien
ctggaaggcgtaaagcaggtcgagt

SEQ ID NO: 1844555 - DNA, 25 bp, Homo sapien
agtccaggtccacgcgaatgcgccg

SEQ ID NO: 1844556 - DNA, 25 bp, Homo sapien
gggctcaacaccgcccagcagggtg

SEQ ID NO: 1844557 - DNA, 25 bp, Homo sapien
caggtcgagtgagcggccgtcgtag

SEQ ID NO: 1844558 - DNA, 25 bp, Homo sapien
actgcatagtggctctcctcgtcgt

SEQ ID NO: 1844559 - DNA, 25 bp, Homo sapien
gccagttgtacgctgcggcggtcgg

SEQ ID NO: 1844560 - DNA, 25 bp, Homo sapien
tcctccccagaagagtctctgcagg

SEQ ID NO: 1844561 - DNA, 25 bp, Homo sapien
ttgcgttgcactgattccccggccg

SEQ ID NO: 1844562 - DNA, 25 bp, Homo sapien
ggagaggacctcatgagagagtttt

SEQ ID NO: 1844563 - DNA, 25 bp, Homo sapien
tagggtggagaatagtcaacgaaga

SEQ ID NO: 1844564 - DNA, 25 bp, Homo sapien
gaatagtcaacgaagatcacgtaaa

SEQ ID NO: 1844565 - DNA, 25 bp, Homo sapien
gaggacctcatgagagagttttcta

SEQ ID NO: 1844566 - DNA, 25 bp, Homo sapien
tttttgaccactggataatcttcag

SEQ ID NO: 1844567 - DNA, 25 bp, Homo sapien
gcatttttttgaccactggataatc

SEQ ID NO: 1844568 - DNA, 25 bp, Homo sapien
ctgaattagatgacttggatgttgg

SEQ ID NO: 1844569 - DNA, 25 bp, Homo sapien
cagggagatcatcctctgaattaga

SEQ ID NO: 1844570 - DNA, 25 bp, Homo sapien
caggcagcccatggtggggatgcgc

SEQ ID NO: 1844571 - DNA, 25 bp, Homo sapien
catggtggggatgcgcccccctcgg

SEQ ID NO: 1844572 - DNA, 25 bp, Homo sapien
gcagcccatggtggggatgcgcccc

SEQ ID NO: 1844573 - DNA, 25 bp, Homo sapien
ccatggtggggatgcgcccccctcg

SEQ ID NO: 1844574 - DNA, 25 bp, Homo sapien
accgccagccgcacattagacctca

SEQ ID NO: 1844575 - DNA, 25 bp, Homo sapien
caccgccagccgcacattagacctc

SEQ ID NO: 1844576 - DNA, 25 bp, Homo sapien
ccaccgccagccgcacattagacct

SEQ ID NO: 1844577 - DNA, 25 bp, Homo sapien
ctccaccgccagccgcacattagac

SEQ ID NO: 1844578 - DNA, 25 bp, Homo sapien
ccccagcggcgggccagacacgcgc

SEQ ID NO: 1844579 - DNA, 25 bp, Homo sapien
tgggggaagcctcggtgccggtcgc

SEQ ID NO: 1844580 - DNA, 25 bp, Homo sapien
ccagcggcgggccagacacgcgcgg

SEQ ID NO: 1844581 - DNA, 25 bp, Homo sapien
gtcgccggcggagtcccccagcggc

SEQ ID NO: 1844582 - DNA, 25 bp, Homo sapien
agctcgggcgcatccatggaaagcc

SEQ ID NO: 1844583 - DNA, 25 bp, Homo sapien
tggacgccgccccttccgcgaccac

SEQ ID NO: 1844584 - DNA, 25 bp, Homo sapien
ccgggcccagctcgggcgcatccat

SEQ ID NO: 1844585 - DNA, 25 bp, Homo sapien
aggacacgtcgccagctgctccaga

SEQ ID NO: 1844586 - DNA, 25 bp, Homo sapien
ccttctctccgactcccgcattaac

SEQ ID NO: 1844587 - DNA, 25 bp, Homo sapien
gactcccgcattaacttttgccgct

SEQ ID NO: 1844588 - DNA, 25 bp, Homo sapien
tctccgactcccgcattaacttttg

SEQ ID NO: 1844589 - DNA, 25 bp, Homo sapien
tttgccgctttccgcccctctcctg

SEQ ID NO: 1844590 - DNA, 25 bp, Homo sapien
cagagtctcagtctcgtcaaatctc

SEQ ID NO: 1844591 - DNA, 25 bp, Homo sapien
gtctcagtctcgtcaaatctctcca

SEQ ID NO: 1844592 - DNA, 25 bp, Homo sapien
cttcaaccagagtctcagtctcgtc

SEQ ID NO: 1844593 - DNA, 25 bp, Homo sapien
caaccagagtctcagtctcgtcaaa

SEQ ID NO: 1844594 - DNA, 25 bp, Homo sapien
ttgcgtaacgcctcatctggttctc

SEQ ID NO: 1844595 - DNA, 25 bp, Homo sapien
cacgggaggtaaacaccaggccttg

SEQ ID NO: 1844596 - DNA, 25 bp, Homo sapien
caggccttgcgtaacgcctcatctg

SEQ ID NO: 1844597 - DNA, 25 bp, Homo sapien
ggccttgcgtaacgcctcatctggt

SEQ ID NO: 1844598 - DNA, 25 bp, Homo sapien
ggcatgtgcgcccacattgccaagg

SEQ ID NO: 1844599 - DNA, 25 bp, Homo sapien
tccgcctgtggtacgcgcatgggcc

SEQ ID NO: 1844600 - DNA, 25 bp, Homo sapien
cctccgcctgtggtacgcgcatggg

SEQ ID NO: 1844601 - DNA, 25 bp, Homo sapien
cccacattgccaaggtgcgagtcat

SEQ ID NO: 1844602 - DNA, 25 bp, Homo sapien
gtgagatcattaccccagaaggcag

SEQ ID NO: 1844603 - DNA, 25 bp, Homo sapien
actggatccttgaaactgggggcaa

SEQ ID NO: 1844604 - DNA, 25 bp, Homo sapien
gctgaacccgtctggtcagaggcca

SEQ ID NO: 1844605 - DNA, 25 bp, Homo sapien
gagcagagacaacaaggcccttggg

SEQ ID NO: 1844606 - DNA, 25 bp, Homo sapien
agggtgtaaccttcccatagggctg

SEQ ID NO: 1844607 - DNA, 25 bp, Homo sapien
tcaggaggaagcccgaagggtgtaa

SEQ ID NO: 1844608 - DNA, 25 bp, Homo sapien
tcagagaaatcaggactggatcagg

SEQ ID NO: 1844609 - DNA, 25 bp, Homo sapien
tagggctgctggaagcctagcttca

SEQ ID NO: 1844610 - DNA, 25 bp, Homo sapien
cgcggacgcccactttgttcggaca

SEQ ID NO: 1844611 - DNA, 25 bp, Homo sapien
taatccacgcggacgcccactttgt

SEQ ID NO: 1844612 - DNA, 25 bp, Homo sapien
ggacgcccactttgttcggacagac

SEQ ID NO: 1844613 - DNA, 25 bp, Homo sapien
gtaatccacgcggacgcccactttg

SEQ ID NO: 1844614 - DNA, 25 bp, Homo sapien
tcctcgcgggaaccgctctcgatga

SEQ ID NO: 1844615 - DNA, 25 bp, Homo sapien
tcgcgggaaccgctctcgatgagcg

SEQ ID NO: 1844616 - DNA, 25 bp, Homo sapien
gggagatcctcgcgggaaccgctct

SEQ ID NO: 1844617 - DNA, 25 bp, Homo sapien
cgggaaccgctctcgatgagcgcct

SEQ ID NO: 1844618 - DNA, 25 bp, Homo sapien
gggttgccccgcttctgcgaaccgc

SEQ ID NO: 1844619 - DNA, 25 bp, Homo sapien
tcgggggttgccccgcttctgcgaa

SEQ ID NO: 1844620 - DNA, 25 bp, Homo sapien
cgaggttcagcgtcactatctcatc

SEQ ID NO: 1844621 - DNA, 25 bp, Homo sapien
gatgcgaggttcagcgtcactatct

SEQ ID NO: 1844622 - DNA, 25 bp, Homo sapien
aaaggatgagatccgggtgggccga

SEQ ID NO: 1844623 - DNA, 25 bp, Homo sapien
gaaaggatgagatccgggtgggccg

SEQ ID NO: 1844624 - DNA, 25 bp, Homo sapien
aggatgagatccgggtgggccgagg

SEQ ID NO: 1844625 - DNA, 25 bp, Homo sapien
ggaaaggatgagatccgggtgggcc

SEQ ID NO: 1844626 - DNA, 25 bp, Homo sapien
ggtgccttcggtaaacagctgctta

SEQ ID NO: 1844627 - DNA, 25 bp, Homo sapien
taaagttagaagtgtctccatccac

SEQ ID NO: 1844628 - DNA, 25 bp, Homo sapien
tgcgtggtggttccagtctgctaaa

SEQ ID NO: 1844629 - DNA, 25 bp, Homo sapien
tctctggatttcactcctggctgaa

SEQ ID NO: 1844630 - DNA, 25 bp, Homo sapien
aaccgtggtcggtctcagccactca

SEQ ID NO: 1844631 - DNA, 25 bp, Homo sapien
caattccactaagtcaagaaccgtg

SEQ ID NO: 1844632 - DNA, 25 bp, Homo sapien
cttttgctcaagaactcgtccattc

SEQ ID NO: 1844633 - DNA, 25 bp, Homo sapien
aagaactcgtccattccttctccaa

SEQ ID NO: 1844634 - DNA, 25 bp, Homo sapien
tatgctccgaagtccgtggagcacc

SEQ ID NO: 1844635 - DNA, 25 bp, Homo sapien
tctatgctccgaagtccgtggagca

SEQ ID NO: 1844636 - DNA, 25 bp, Homo sapien
gtccgtggagcaccaccgctccccg

SEQ ID NO: 1844637 - DNA, 25 bp, Homo sapien
actctatgctccgaagtccgtggag

SEQ ID NO: 1844638 - DNA, 25 bp, Homo sapien
gcccggatcgctgtcagccactcac

SEQ ID NO: 1844639 - DNA, 25 bp, Homo sapien
aaaccaagcccggatcgctgtcagc

SEQ ID NO: 1844640 - DNA, 25 bp, Homo sapien
aaaaccaagcccggatcgctgtcag

SEQ ID NO: 1844641 - DNA, 25 bp, Homo sapien
ccaagcccggatcgctgtcagccac

SEQ ID NO: 1844642 - DNA, 25 bp, Homo sapien
tcataagaggccaggagacatactg

SEQ ID NO: 1844643 - DNA, 25 bp, Homo sapien
tttggtggccccgatgtagttctgc

SEQ ID NO: 1844644 - DNA, 25 bp, Homo sapien
tcaaatgtcttcgtatcctgagagc

SEQ ID NO: 1844645 - DNA, 25 bp, Homo sapien
aagtgactttcccagcagacgaggc

SEQ ID NO: 1844646 - DNA, 25 bp, Homo sapien
tccattgccagacagcacagctgag

SEQ ID NO: 1844647 - DNA, 25 bp, Homo sapien
agcgggagcacctcggcagcaatcc

SEQ ID NO: 1844648 - DNA, 25 bp, Homo sapien
agaggtcagcgggagcacctcggca

SEQ ID NO: 1844649 - DNA, 25 bp, Homo sapien
caatcctccattgccagacagcaca

SEQ ID NO: 1844650 - DNA, 25 bp, Homo sapien
ccatttagtggaattgggtggatac

SEQ ID NO: 1844651 - DNA, 25 bp, Homo sapien
agtcggagcgccctctgtttcctgg

SEQ ID NO: 1844652 - DNA, 25 bp, Homo sapien
cattttgaccacctgtagacttaga

SEQ ID NO: 1844653 - DNA, 25 bp, Homo sapien
tcaagaaagtacacctgaacaagtc

SEQ ID NO: 1844654 - DNA, 25 bp, Homo sapien
cagaagatgacccgggctctgaggt

SEQ ID NO: 1844655 - DNA, 25 bp, Homo sapien
gaagatgacccgggctctgaggttt

SEQ ID NO: 1844656 - DNA, 25 bp, Homo sapien
aagatgacccgggctctgaggtttt

SEQ ID NO: 1844657 - DNA, 25 bp, Homo sapien
agaagatgacccgggctctgaggtt

SEQ ID NO: 1844658 - DNA, 25 bp, Homo sapien
agctcttcatgtcatttttattcat

SEQ ID NO: 1844659 - DNA, 25 bp, Homo sapien
ttttttcctatcagcctggagttgg

SEQ ID NO: 1844660 - DNA, 25 bp, Homo sapien
tttttcctatcagcctggagttggt

SEQ ID NO: 1844661 - DNA, 25 bp, Homo sapien
gggttgagcaaagaactcactatca

SEQ ID NO: 1844662 - DNA, 25 bp, Homo sapien
tatcacacagcaaggcactaatttg

SEQ ID NO: 1844663 - DNA, 25 bp, Homo sapien
aatttgaaatgcctgggagaagtag

SEQ ID NO: 1844664 - DNA, 25 bp, Homo sapien
ggtatgcaacccttgagagatgccc

SEQ ID NO: 1844665 - DNA, 25 bp, Homo sapien
tagatcggctgagatcatgcccagt

SEQ ID NO: 1844666 - DNA, 25 bp, Homo sapien
gtgcgcctgtaacaccagcgacttg

SEQ ID NO: 1844667 - DNA, 25 bp, Homo sapien
cctgaagagcctagaaaggtgctgg

SEQ ID NO: 1844668 - DNA, 25 bp, Homo sapien
tgggaggagctagacaaagcagagc

SEQ ID NO: 1844669 - DNA, 25 bp, Homo sapien
tcaggctccctgtgatggagtcatg

SEQ ID NO: 1844670 - DNA, 25 bp, Homo sapien
ccctgtgatggagtcatgtcttgat

SEQ ID NO: 1844671 - DNA, 25 bp, Homo sapien
ggctccctgtgatggagtcatgtct

SEQ ID NO: 1844672 - DNA, 25 bp, Homo sapien
gatggagtcatgtcttgattttgct

SEQ ID NO: 1844673 - DNA, 25 bp, Homo sapien
ccagaggaacaggggttgggttgag

SEQ ID NO: 1844674 - DNA, 25 bp, Homo sapien
cagaggaacaggggttgggttgaga

SEQ ID NO: 1844675 - DNA, 25 bp, Homo sapien
taacaaccaaccacgtgctaatatg

SEQ ID NO: 1844676 - DNA, 25 bp, Homo sapien
gactgcatttggatatacgctgaga

SEQ ID NO: 1844677 - DNA, 25 bp, Homo sapien
cccggctgcagcctaaatgtatgaa

SEQ ID NO: 1844678 - DNA, 25 bp, Homo sapien
tatggttggcataggcattccccgg

SEQ ID NO: 1844679 - DNA, 25 bp, Homo sapien
tcatgacccagccagtaaatccgtg

SEQ ID NO: 1844680 - DNA, 25 bp, Homo sapien
gatgcaggagttcaaattctgtgag

SEQ ID NO: 1844681 - DNA, 25 bp, Homo sapien
tcttgagatcgttcaactgtggctc

SEQ ID NO: 1844682 - DNA, 25 bp, Homo sapien
tccgtgatagcaggaaattcttctc

SEQ ID NO: 1844683 - DNA, 25 bp, Homo sapien
tctgcttccagagatcgtgggatgg

SEQ ID NO: 1844684 - DNA, 25 bp, Homo sapien
gcgcagctcggccttaaaaacctgt

SEQ ID NO: 1844685 - DNA, 25 bp, Homo sapien
tacttgcgattctaagaccagcgcg

SEQ ID NO: 1844686 - DNA, 25 bp, Homo sapien
agactgagcagtcagcccgctgtaa

SEQ ID NO: 1844687 - DNA, 25 bp, Homo sapien
ttttgctgcaagacttggatctgct

SEQ ID NO: 1844688 - DNA, 25 bp, Homo sapien
cctgtgtacaccttgtgccttcact

SEQ ID NO: 1844689 - DNA, 25 bp, Homo sapien
cgtgaagacatcgaccctgtgtaca

SEQ ID NO: 1844690 - DNA, 25 bp, Homo sapien
gctgcaagacttggatctgctcttg

SEQ ID NO: 1844691 - DNA, 25 bp, Homo sapien
gcaggttgtacagtaaactcacaag

SEQ ID NO: 1844692 - DNA, 25 bp, Homo sapien
agtaaactcacaagactgggcttga

SEQ ID NO: 1844693 - DNA, 25 bp, Homo sapien
tgcaggttgtacagtaaactcacaa

SEQ ID NO: 1844694 - DNA, 25 bp, Homo sapien
aactcacaagactgggcttgagccc

SEQ ID NO: 1844695 - DNA, 25 bp, Homo sapien
gattcacgacacacaaaacagagga

SEQ ID NO: 1844696 - DNA, 25 bp, Homo sapien
tgtggtccttggattcacgacacac

SEQ ID NO: 1844697 - DNA, 25 bp, Homo sapien
ctgacattatgggatttgtggtcct

SEQ ID NO: 1844698 - DNA, 25 bp, Homo sapien
tctgggcagcttcttcgatcaagct

SEQ ID NO: 1844699 - DNA, 25 bp, Homo sapien
gattccgcaacagcgagttgaacct

SEQ ID NO: 1844700 - DNA, 25 bp, Homo sapien
ggattttctccaccagattccgcaa

SEQ ID NO: 1844701 - DNA, 25 bp, Homo sapien
cctgattgcgttcttccttacggaa

SEQ ID NO: 1844702 - DNA, 25 bp, Homo sapien
aaataatggaacatctcctggtgcc

SEQ ID NO: 1844703 - DNA, 25 bp, Homo sapien
ggagccccggagtccactgtggata

SEQ ID NO: 1844704 - DNA, 25 bp, Homo sapien
acagggctgtttcaagactgtagga

SEQ ID NO: 1844705 - DNA, 25 bp, Homo sapien
tgtaggaagctgtgccaagtctgta

SEQ ID NO: 1844706 - DNA, 25 bp, Homo sapien
ctgtgccaagtctgtaggagccccg

SEQ ID NO: 1844707 - DNA, 25 bp, Homo sapien
ctgggttgagataaagaactgtgga

SEQ ID NO: 1844708 - DNA, 25 bp, Homo sapien
tgggagacatgatacttcaatcaag

SEQ ID NO: 1844709 - DNA, 25 bp, Homo sapien
tgtacatgggttaggttcagaaagg

SEQ ID NO: 1844710 - DNA, 25 bp, Homo sapien
ctcaaagtagggagcttccaggtta

SEQ ID NO: 1844711 - DNA, 25 bp, Homo sapien
tatgaagagcagtcgatatggttcc

SEQ ID NO: 1844712 - DNA, 25 bp, Homo sapien
taaagtccaactcgtcctccattgg

SEQ ID NO: 1844713 - DNA, 25 bp, Homo sapien
cagatttgccaaacagggttgtcag

SEQ ID NO: 1844714 - DNA, 25 bp, Homo sapien
cagttggcctgataccctgtgaccc

SEQ ID NO: 1844715 - DNA, 25 bp, Homo sapien
tcagtgtgacaacggcataaggagt

SEQ ID NO: 1844716 - DNA, 25 bp, Homo sapien
cacagcactagcatttggagaccac

SEQ ID NO: 1844717 - DNA, 25 bp, Homo sapien
tgcagtcagctctagaggccgaaag

SEQ ID NO: 1844718 - DNA, 25 bp, Homo sapien
tactctgtgagaagcccgaggtgcg

SEQ ID NO: 1844719 - DNA, 25 bp, Homo sapien
taagccacttctacactgagacggg

SEQ ID NO: 1844720 - DNA, 25 bp, Homo sapien
ctgagacgggtagcaataacttgac

SEQ ID NO: 1844721 - DNA, 25 bp, Homo sapien
tacatgaaagtgcttatgaaccaca

SEQ ID NO: 1844722 - DNA, 25 bp, Homo sapien
ctctgatgtcaggtgagttatctca

SEQ ID NO: 1844723 - DNA, 25 bp, Homo sapien
ctgtctgatgtgagatgggcaccat

SEQ ID NO: 1844724 - DNA, 25 bp, Homo sapien
taagcttgggcctaagcacgctgtg

SEQ ID NO: 1844725 - DNA, 25 bp, Homo sapien
tacaactggttgacaggctggttca

SEQ ID NO: 1844726 - DNA, 25 bp, Homo sapien
gcattaaaataatcgccaggaccca

SEQ ID NO: 1844727 - DNA, 25 bp, Homo sapien
cagaagtggcaacaccaggaggaag

SEQ ID NO: 1844728 - DNA, 25 bp, Homo sapien
tgtgccaagcacggatggtggtgag

SEQ ID NO: 1844729 - DNA, 25 bp, Homo sapien
acttctgtgccaagcacggatggtg

SEQ ID NO: 1844730 - DNA, 25 bp, Homo sapien
ctgtgccaagcacggatggtggtga

SEQ ID NO: 1844731 - DNA, 25 bp, Homo sapien
ttctgtgccaagcacggatggtggt

SEQ ID NO: 1844732 - DNA, 25 bp, Homo sapien
gattcagccagggatcaagtccaca

SEQ ID NO: 1844733 - DNA, 25 bp, Homo sapien
cttgggttgatatgagtcctgtact

SEQ ID NO: 1844734 - DNA, 25 bp, Homo sapien
tgatcagtagattgagagtcctctc

SEQ ID NO: 1844735 - DNA, 25 bp, Homo sapien
tacttagaggagagtaggtaactgc

SEQ ID NO: 1844736 - DNA, 25 bp, Homo sapien
tcaggagctcagggagaaactggac

SEQ ID NO: 1844737 - DNA, 25 bp, Homo sapien
agagccgagacgaagccccaagcca

SEQ ID NO: 1844738 - DNA, 25 bp, Homo sapien
catagtcaagagacaccctcacctg

SEQ ID NO: 1844739 - DNA, 25 bp, Homo sapien
gaatgaccttcctagtgaaggaggc

SEQ ID NO: 1844740 - DNA, 25 bp, Homo sapien
tagatgggctctcgggtgacagcgt

SEQ ID NO: 1844741 - DNA, 25 bp, Homo sapien
tctcccccctgtgatgccagtgtgg

SEQ ID NO: 1844742 - DNA, 25 bp, Homo sapien
ggtgagttctgccatttgtaggaga

SEQ ID NO: 1844743 - DNA, 25 bp, Homo sapien
ggtcctcggacaagaggagcttggg

SEQ ID NO: 1844744 - DNA, 25 bp, Homo sapien
actgagctcgctggtggtcctcgga

SEQ ID NO: 1844745 - DNA, 25 bp, Homo sapien
ctggctcatagtccaactcaaagca

SEQ ID NO: 1844746 - DNA, 25 bp, Homo sapien
agcgtggaggccactcctaaaccca

SEQ ID NO: 1844747 - DNA, 25 bp, Homo sapien
agtcacacctttcagcagtggagcg

SEQ ID NO: 1844748 - DNA, 25 bp, Homo sapien
gcttaatgaccactaatcagatttg

SEQ ID NO: 1844749 - DNA, 25 bp, Homo sapien
cattgtcacaatatcctaataggca

SEQ ID NO: 1844750 - DNA, 25 bp, Homo sapien
tgctggggaaagtcccgaatcctct

SEQ ID NO: 1844751 - DNA, 25 bp, Homo sapien
tggcccagctctggcgacacagcca

SEQ ID NO: 1844752 - DNA, 25 bp, Homo sapien
agccaccggtttccggcactttctg

SEQ ID NO: 1844753 - DNA, 25 bp, Homo sapien
ggaaagtcccgaatcctctggccca

SEQ ID NO: 1844754 - DNA, 25 bp, Homo sapien
tatcatccttaataatgtctccaga

SEQ ID NO: 1844755 - DNA, 25 bp, Homo sapien
gaattatcatccttaataatgtctc

SEQ ID NO: 1844756 - DNA, 25 bp, Homo sapien
ctgggaattatcatccttaataatg

SEQ ID NO: 1844757 - DNA, 25 bp, Homo sapien
gtctccagactcagctggtcatctt

SEQ ID NO: 1844758 - DNA, 25 bp, Homo sapien
agtttccagcttctcctttccattt

SEQ ID NO: 1844759 - DNA, 25 bp, Homo sapien
aattcagtttccagcttctcctttc

SEQ ID NO: 1844760 - DNA, 25 bp, Homo sapien
gaaattcagtttccagcttctcctt

SEQ ID NO: 1844761 - DNA, 25 bp, Homo sapien
tcagtttccagcttctcctttccat

SEQ ID NO: 1844762 - DNA, 25 bp, Homo sapien
tagccctggataggaaaaggatacc

SEQ ID NO: 1844763 - DNA, 25 bp, Homo sapien
aagtaagtctcataccaaggtctcc

SEQ ID NO: 1844764 - DNA, 25 bp, Homo sapien
taaagatggtgaagtgaccttcccc

SEQ ID NO: 1844765 - DNA, 25 bp, Homo sapien
tctgtggatcagagcccaaagcctt

SEQ ID NO: 1844766 - DNA, 25 bp, Homo sapien
cctcccatctgggatacagagatgt

SEQ ID NO: 1844767 - DNA, 25 bp, Homo sapien
cagagatgtgtgagtcagggagaca

SEQ ID NO: 1844768 - DNA, 25 bp, Homo sapien
tctgacccacctcccatctgggata

SEQ ID NO: 1844769 - DNA, 25 bp, Homo sapien
gagacatggcttaggcaagacaaag

SEQ ID NO: 1844770 - DNA, 25 bp, Homo sapien
caaattcatcccgttgcctcaagat

SEQ ID NO: 1844771 - DNA, 25 bp, Homo sapien
aacttcctcaggtgtgcgaactcag

SEQ ID NO: 1844772 - DNA, 25 bp, Homo sapien
taagagcactaaaccggcagatctc

SEQ ID NO: 1844773 - DNA, 25 bp, Homo sapien
caattgtgctaagaggatgctctgc

SEQ ID NO: 1844774 - DNA, 25 bp, Homo sapien
gtttcaggaagacactggaccctga

SEQ ID NO: 1844775 - DNA, 25 bp, Homo sapien
caaagccctataatctatgttgcct

SEQ ID NO: 1844776 - DNA, 25 bp, Homo sapien
cataataacttcaaagccctataat

SEQ ID NO: 1844777 - DNA, 25 bp, Homo sapien
aatctatgttgcctcagtttcagga

SEQ ID NO: 1844778 - DNA, 25 bp, Homo sapien
caggaggacttgcatccttttattt

SEQ ID NO: 1844779 - DNA, 25 bp, Homo sapien
tagacatttaagacacttatggatt

SEQ ID NO: 1844780 - DNA, 25 bp, Homo sapien
ggaggacttgcatccttttattttc

SEQ ID NO: 1844781 - DNA, 25 bp, Homo sapien
ttttcttagacatttaagacactta

SEQ ID NO: 1844782 - DNA, 25 bp, Homo sapien
gaggagtcccttccttagctgacaa

SEQ ID NO: 1844783 - DNA, 25 bp, Homo sapien
tatcctgtgccattagaggctgtga

SEQ ID NO: 1844784 - DNA, 25 bp, Homo sapien
ctgtactgagtttgatatgccccgc

SEQ ID NO: 1844785 - DNA, 25 bp, Homo sapien
taagactttggatcaggactttccc

SEQ ID NO: 1844786 - DNA, 25 bp, Homo sapien
tcccaggacggaagggttctttgca

SEQ ID NO: 1844787 - DNA, 25 bp, Homo sapien
catggtgtgggtagcgtgctcccca

SEQ ID NO: 1844788 - DNA, 25 bp, Homo sapien
ttgtggccgcagtcgatagtgaccg

SEQ ID NO: 1844789 - DNA, 25 bp, Homo sapien
tcacagtagcgggtaaggcaggccc

SEQ ID NO: 1844790 - DNA, 25 bp, Homo sapien
ggttctattctcctgccaacagcag

SEQ ID NO: 1844791 - DNA, 25 bp, Homo sapien
tataaggaaagtggtgatatgtcag

SEQ ID NO: 1844792 - DNA, 25 bp, Homo sapien
ggcacatactaaatatgcaccagca

SEQ ID NO: 1844793 - DNA, 25 bp, Homo sapien
tgaccttagatgaccataaccaggg

SEQ ID NO: 1844794 - DNA, 25 bp, Homo sapien
taatatgcagaaacgtctcctaggg

SEQ ID NO: 1844795 - DNA, 25 bp, Homo sapien
ctttgagaagcaaatccttaacagc

SEQ ID NO: 1844796 - DNA, 25 bp, Homo sapien
cctcactcactctggtataggtaag

SEQ ID NO: 1844797 - DNA, 25 bp, Homo sapien
ggtccctcccgctgcactttgagaa

SEQ ID NO: 1844798 - DNA, 25 bp, Homo sapien
ggcttcggctgtgcctagggcaaca

SEQ ID NO: 1844799 - DNA, 25 bp, Homo sapien
gacttgagtctcgaacagcggttgt

SEQ ID NO: 1844800 - DNA, 25 bp, Homo sapien
agggcaacagccaacctaggagcca

SEQ ID NO: 1844801 - DNA, 25 bp, Homo sapien
tgcagaaccacagacggcttcggct

SEQ ID NO: 1844802 - DNA, 25 bp, Homo sapien
taagatgtacatgtgactcaggcag

SEQ ID NO: 1844803 - DNA, 25 bp, Homo sapien
tggtcaagtgaccactgaggcccag

SEQ ID NO: 1844804 - DNA, 25 bp, Homo sapien
cactaggtgccatgagaatacaaga

SEQ ID NO: 1844805 - DNA, 25 bp, Homo sapien
tataagatgttatccgccctccagg

SEQ ID NO: 1844806 - DNA, 25 bp, Homo sapien
agtgatcacagcttgtaccccaaag

SEQ ID NO: 1844807 - DNA, 25 bp, Homo sapien
gacagaggcttaacaccctgctggg

SEQ ID NO: 1844808 - DNA, 25 bp, Homo sapien
gaccacagatagctccagggagtcc

SEQ ID NO: 1844809 - DNA, 25 bp, Homo sapien
gctatggaaatatgctcagccctgg

SEQ ID NO: 1844810 - DNA, 25 bp, Homo sapien
gaaaatgctgcatcgggcccttatt

SEQ ID NO: 1844811 - DNA, 25 bp, Homo sapien
gctagggccaaggtcgtggtcaaaa

SEQ ID NO: 1844812 - DNA, 25 bp, Homo sapien
cattagggcagtagatggagcaaca

SEQ ID NO: 1844813 - DNA, 25 bp, Homo sapien
gactccagggtcagaagttccctcg

SEQ ID NO: 1844814 - DNA, 25 bp, Homo sapien
aggtgcttaggccaggcatcccgtc

SEQ ID NO: 1844815 - DNA, 25 bp, Homo sapien
cccgtccccccattgagagtcctgg

SEQ ID NO: 1844816 - DNA, 25 bp, Homo sapien
tccaggtgcttaggccaggcatccc

SEQ ID NO: 1844817 - DNA, 25 bp, Homo sapien
gcatcccgtccccccattgagagtc

SEQ ID NO: 1844818 - DNA, 25 bp, Homo sapien
ccttcataatccagggcgatgccca

SEQ ID NO: 1844819 - DNA, 25 bp, Homo sapien
tcctgtgactctgcgttggtgaaag

SEQ ID NO: 1844820 - DNA, 25 bp, Homo sapien
gaggcgtgttcctggccacttgagc

SEQ ID NO: 1844821 - DNA, 25 bp, Homo sapien
gaaggtgtagatgagttcctgtgac

SEQ ID NO: 1844822 - DNA, 25 bp, Homo sapien
ctggccgcagggagaggtctccctt

SEQ ID NO: 1844823 - DNA, 25 bp, Homo sapien
tccatccccatagccggcctcctct

SEQ ID NO: 1844824 - DNA, 25 bp, Homo sapien
tccgtttcccagtcgtcatatccat

SEQ ID NO: 1844825 - DNA, 25 bp, Homo sapien
tcttcatcgcccaacgattcctcat

SEQ ID NO: 1844826 - DNA, 25 bp, Homo sapien
attcctcatcttcgtccgtttccca

SEQ ID NO: 1844827 - DNA, 25 bp, Homo sapien
tccctctccacttccacttcccagt

SEQ ID NO: 1844828 - DNA, 25 bp, Homo sapien
agccctccctctccacttccacttc

SEQ ID NO: 1844829 - DNA, 25 bp, Homo sapien
ctctccacttccacttcccagtaga

SEQ ID NO: 1844830 - DNA, 25 bp, Homo sapien
cagccctccctctccacttccactt

SEQ ID NO: 1844831 - DNA, 25 bp, Homo sapien
tgccccaggtgaagcccttgctgcc

SEQ ID NO: 1844832 - DNA, 25 bp, Homo sapien
cttgccccaggtgaagcccttgctg

SEQ ID NO: 1844833 - DNA, 25 bp, Homo sapien
ttgccccaggtgaagcccttgctgc

SEQ ID NO: 1844834 - DNA, 25 bp, Homo sapien
gtgcaggtaggcactcttgtacagg

SEQ ID NO: 1844835 - DNA, 25 bp, Homo sapien
tgcaggtaggcactcttgtacaggc

SEQ ID NO: 1844836 - DNA, 25 bp, Homo sapien
gcaggtaggcactcttgtacaggct

SEQ ID NO: 1844837 - DNA, 25 bp, Homo sapien
ctatctctggatctctgggtccaac

SEQ ID NO: 1844838 - DNA, 25 bp, Homo sapien
ctggatctctgggtccaactcatca

SEQ ID NO: 1844839 - DNA, 25 bp, Homo sapien
tcatcattaatatcatccaagtgtg

SEQ ID NO: 1844840 - DNA, 25 bp, Homo sapien
cattaatatcatccaagtgtggatc

SEQ ID NO: 1844841 - DNA, 25 bp, Homo sapien
taactcttgatatgcttcttggtaa

SEQ ID NO: 1844842 - DNA, 25 bp, Homo sapien
tatgcttcttggtaatccggatcag

SEQ ID NO: 1844843 - DNA, 25 bp, Homo sapien
cttgatatgcttcttggtaatccgg

SEQ ID NO: 1844844 - DNA, 25 bp, Homo sapien
tttcaagtaactcttgatatgcttc

SEQ ID NO: 1844845 - DNA, 25 bp, Homo sapien
tgataaagctctcccagaaagggta

SEQ ID NO: 1844846 - DNA, 25 bp, Homo sapien
tgtcatattcagtccgatatctttg

SEQ ID NO: 1844847 - DNA, 25 bp, Homo sapien
aattggcggaaggtgctactctctg

SEQ ID NO: 1844848 - DNA, 25 bp, Homo sapien
tagaaattggcggaaggtgctactc

SEQ ID NO: 1844849 - DNA, 25 bp, Homo sapien
cataggattctctataattagaata

SEQ ID NO: 1844850 - DNA, 25 bp, Homo sapien
ctcataggattctctataattagaa

SEQ ID NO: 1844851 - DNA, 25 bp, Homo sapien
tcctcataggattctctataattag

SEQ ID NO: 1844852 - DNA, 25 bp, Homo sapien
taggattctctataattagaataac

SEQ ID NO: 1844853 - DNA, 25 bp, Homo sapien
cttatattccaagtctctcagcagc

SEQ ID NO: 1844854 - DNA, 25 bp, Homo sapien
tgtcttatattccaagtctctcagc

SEQ ID NO: 1844855 - DNA, 25 bp, Homo sapien
tcttatattccaagtctctcagcag

SEQ ID NO: 1844856 - DNA, 25 bp, Homo sapien
ttatattccaagtctctcagcagct

SEQ ID NO: 1844857 - DNA, 25 bp, Homo sapien
tatctgagaattctccggtcttttt

SEQ ID NO: 1844858 - DNA, 25 bp, Homo sapien
taaccactcgagcaatgggtttccc

SEQ ID NO: 1844859 - DNA, 25 bp, Homo sapien
caacccagaacttcttccgtggata

SEQ ID NO: 1844860 - DNA, 25 bp, Homo sapien
tttaaccactcgagcaatgggtttc

SEQ ID NO: 1844861 - DNA, 25 bp, Homo sapien
tgattatccccaaacaagtgacaga

SEQ ID NO: 1844862 - DNA, 25 bp, Homo sapien
gaaccagggcttcagaacatcagta

SEQ ID NO: 1844863 - DNA, 25 bp, Homo sapien
tcaaatgcacctggtcagaagcggg

SEQ ID NO: 1844864 - DNA, 25 bp, Homo sapien
catgggatgtgagtacctctggcac

SEQ ID NO: 1844865 - DNA, 25 bp, Homo sapien
gataagaagtactggccggatgaag

SEQ ID NO: 1844866 - DNA, 25 bp, Homo sapien
tacctgcgcagagaattgacggata

SEQ ID NO: 1844867 - DNA, 25 bp, Homo sapien
gatgacatgggcaacctctctggga

SEQ ID NO: 1844868 - DNA, 25 bp, Homo sapien
tagtgagaacggcagaggccagact

SEQ ID NO: 1844869 - DNA, 25 bp, Homo sapien
gattataggtgcgcaccatcacgcc

SEQ ID NO: 1844870 - DNA, 25 bp, Homo sapien
attataggtgcgcaccatcacgccc

SEQ ID NO: 1844871 - DNA, 25 bp, Homo sapien
gggattataggtgcgcaccatcacg

SEQ ID NO: 1844872 - DNA, 25 bp, Homo sapien
gctgggattataggtgcgcaccatc

SEQ ID NO: 1844873 - DNA, 25 bp, Homo sapien
aaatgcagtagactttttatgttga

SEQ ID NO: 1844874 - DNA, 25 bp, Homo sapien
aaaaatgcagtagactttttatgtt

SEQ ID NO: 1844875 - DNA, 25 bp, Homo sapien
tgtattaaaaatgcagtagactttt

SEQ ID NO: 1844876 - DNA, 25 bp, Homo sapien
ttaaaaatgcagtagactttttatg

SEQ ID NO: 1844877 - DNA, 25 bp, Homo sapien
acccagccaccctaaacagtgcaag

SEQ ID NO: 1844878 - DNA, 25 bp, Homo sapien
tcttcagggtaagtgtgatccccag

SEQ ID NO: 1844879 - DNA, 25 bp, Homo sapien
agctattgccctgccattagcctgg

SEQ ID NO: 1844880 - DNA, 25 bp, Homo sapien
tgggactccaccttcctagagatcc

SEQ ID NO: 1844881 - DNA, 25 bp, Homo sapien
gctccctcaggaactgatgaccctg

SEQ ID NO: 1844882 - DNA, 25 bp, Homo sapien
gccacaatgtactgcctctggtcct

SEQ ID NO: 1844883 - DNA, 25 bp, Homo sapien
tgatgaccctgctcaaactcagcca

SEQ ID NO: 1844884 - DNA, 25 bp, Homo sapien
cctccagttcggagatgaccagggc

SEQ ID NO: 1844885 - DNA, 25 bp, Homo sapien
tgtctctccttagggtactcaggtg

SEQ ID NO: 1844886 - DNA, 25 bp, Homo sapien
gcgcggccaggatatcagcttctcc

SEQ ID NO: 1844887 - DNA, 25 bp, Homo sapien
cagcgcggccaggatatcagcttct

SEQ ID NO: 1844888 - DNA, 25 bp, Homo sapien
tactcaggtggttcaggattttttc

SEQ ID NO: 1844889 - DNA, 25 bp, Homo sapien
tcccgtcgtcctcacagtagtagtg

SEQ ID NO: 1844890 - DNA, 25 bp, Homo sapien
tagtagtgcagcttctctcggtgtc

SEQ ID NO: 1844891 - DNA, 25 bp, Homo sapien
tctcggtgtcgctcgcacaactttg

SEQ ID NO: 1844892 - DNA, 25 bp, Homo sapien
ccttctccatgaggacggccgtgtg

SEQ ID NO: 1844893 - DNA, 25 bp, Homo sapien
gatggggcggacgtctgtggtgcag

SEQ ID NO: 1844894 - DNA, 25 bp, Homo sapien
tctccttcttaaaaggcttcttgca

SEQ ID NO: 1844895 - DNA, 25 bp, Homo sapien
tgccacacgggtcggatgttctcct

SEQ ID NO: 1844896 - DNA, 25 bp, Homo sapien
agacggggcggctccctgagatggg

SEQ ID NO: 1844897 - DNA, 25 bp, Homo sapien
tcctcttccaggctccgtagtgggg

SEQ ID NO: 1844898 - DNA, 25 bp, Homo sapien
ctgcggcagaagacgtggccacagt

SEQ ID NO: 1844899 - DNA, 25 bp, Homo sapien
gggtcccgcaggtaatcaagacaga

SEQ ID NO: 1844900 - DNA, 25 bp, Homo sapien
aagacagatggagcaggtcacctcc

SEQ ID NO: 1844901 - DNA, 25 bp, Homo sapien
gttcagagaggtctccgttcactgg

SEQ ID NO: 1844902 - DNA, 25 bp, Homo sapien
ttcagagaggtctccgttcactggt

SEQ ID NO: 1844903 - DNA, 25 bp, Homo sapien
gaggtctccgttcactggtgaggac

SEQ ID NO: 1844904 - DNA, 25 bp, Homo sapien
tctccgttcactggtgaggacttct

SEQ ID NO: 1844905 - DNA, 25 bp, Homo sapien
cttggagacgcgacatagagtcagg

SEQ ID NO: 1844906 - DNA, 25 bp, Homo sapien
gacatagagtcaggagcaagcacag

SEQ ID NO: 1844907 - DNA, 25 bp, Homo sapien
gcaagcacagtaaaggggcaaaggt

SEQ ID NO: 1844908 - DNA, 25 bp, Homo sapien
tcagtcaatcgacagacaccaccag

SEQ ID NO: 1844909 - DNA, 25 bp, Homo sapien
tgctctcctatagatccatggaagg

SEQ ID NO: 1844910 - DNA, 25 bp, Homo sapien
tcctatagatccatggaaggcaact

SEQ ID NO: 1844911 - DNA, 25 bp, Homo sapien
aggacttgctctcctatagatccat

SEQ ID NO: 1844912 - DNA, 25 bp, Homo sapien
agatccatggaaggcaactacagca

SEQ ID NO: 1844913 - DNA, 25 bp, Homo sapien
ccagcagggcacagaggtgactgcg

SEQ ID NO: 1844914 - DNA, 25 bp, Homo sapien
gcagggcacagaggtgactgcgagg

SEQ ID NO: 1844915 - DNA, 25 bp, Homo sapien
ctgggaagacaaccagcagggcaca

SEQ ID NO: 1844916 - DNA, 25 bp, Homo sapien
tgggaagacaaccagcagggcacag

SEQ ID NO: 1844917 - DNA, 25 bp, Homo sapien
gactatgaaggctcagctacagctc

SEQ ID NO: 1844918 - DNA, 25 bp, Homo sapien
tcaagccctttatcatgcctctttg

SEQ ID NO: 1844919 - DNA, 25 bp, Homo sapien
tgccaaatggcctagaagtttaaaa

SEQ ID NO: 1844920 - DNA, 25 bp, Homo sapien
tttctttgttgaaggatagcctgtg

SEQ ID NO: 1844921 - DNA, 25 bp, Homo sapien
cgagttgctgcaacaacaggtgcat

SEQ ID NO: 1844922 - DNA, 25 bp, Homo sapien
ctcaggctcccgagttgctgcaaca

SEQ ID NO: 1844923 - DNA, 25 bp, Homo sapien
gtatgagaatgcctatacttcttat

SEQ ID NO: 1844924 - DNA, 25 bp, Homo sapien
tcttaatggtatttactgaggttat

SEQ ID NO: 1844925 - DNA, 25 bp, Homo sapien
ggctcagcagggttaagcaacttgc

SEQ ID NO: 1844926 - DNA, 25 bp, Homo sapien
gagcaataaagtgtccctgttggac

SEQ ID NO: 1844927 - DNA, 25 bp, Homo sapien
tgtgagcagaccagaataaccgctc

SEQ ID NO: 1844928 - DNA, 25 bp, Homo sapien
gatgaggtcatctacatggaagggc

SEQ ID NO: 1844929 - DNA, 25 bp, Homo sapien
tctctgtgatctcaacaggtttcca

SEQ ID NO: 1844930 - DNA, 25 bp, Homo sapien
ccttttatgccgtcagtatattctc

SEQ ID NO: 1844931 - DNA, 25 bp, Homo sapien
tctgcccttttatgccgtcagtata

SEQ ID NO: 1844932 - DNA, 25 bp, Homo sapien
tttccacaataagaggtaacaccat

SEQ ID NO: 1844933 - DNA, 25 bp, Homo sapien
tctagcacacacaggcaagatgtac

SEQ ID NO: 1844934 - DNA, 25 bp, Homo sapien
gggacaattacaaacactgcttcag

SEQ ID NO: 1844935 - DNA, 25 bp, Homo sapien
gactaagcaggccaaactgtttcca

SEQ ID NO: 1844936 - DNA, 25 bp, Homo sapien
tatgagcactcatgatgccccacag

SEQ ID NO: 1844937 - DNA, 25 bp, Homo sapien
tcatcctgatgccagccaatttatg

SEQ ID NO: 1844938 - DNA, 25 bp, Homo sapien
tgaatgacctcctctaattccagag

SEQ ID NO: 1844939 - DNA, 25 bp, Homo sapien
tgaacccaaaggtcatgcctcactg

SEQ ID NO: 1844940 - DNA, 25 bp, Homo sapien
ggagggcaagagatttcatcatgct

SEQ ID NO: 1844941 - DNA, 25 bp, Homo sapien
atacagaccatggactctcttcggg

SEQ ID NO: 1844942 - DNA, 25 bp, Homo sapien
tcaaaccaacttcccattctccgtg

SEQ ID NO: 1844943 - DNA, 25 bp, Homo sapien
agtcattccaagaagcctcaataca

SEQ ID NO: 1844944 - DNA, 25 bp, Homo sapien
ccattctccgtgtcttttctattct

SEQ ID NO: 1844945 - DNA, 25 bp, Homo sapien
taaggcatgcataaacgaatgtcat

SEQ ID NO: 1844946 - DNA, 25 bp, Homo sapien
gaaagcatgacactttggtcaggga

SEQ ID NO: 1844947 - DNA, 25 bp, Homo sapien
cagggagctggattagtcgcctatc

SEQ ID NO: 1844948 - DNA, 25 bp, Homo sapien
gaagtacacacaaatcgtgggtcaa

SEQ ID NO: 1844949 - DNA, 25 bp, Homo sapien
ggctccaagcaaccggacggtcatc

SEQ ID NO: 1844950 - DNA, 25 bp, Homo sapien
tccaagcaaccggacggtcatccag

SEQ ID NO: 1844951 - DNA, 25 bp, Homo sapien
ctccaagcaaccggacggtcatcca

SEQ ID NO: 1844952 - DNA, 25 bp, Homo sapien
caagcaaccggacggtcatccaggc

SEQ ID NO: 1844953 - DNA, 25 bp, Homo sapien
tccgcagactagaatggatgggagt

SEQ ID NO: 1844954 - DNA, 25 bp, Homo sapien
tggttccgcagactagaatggatgg

SEQ ID NO: 1844955 - DNA, 25 bp, Homo sapien
ttacttctggttccgcagactagaa

SEQ ID NO: 1844956 - DNA, 25 bp, Homo sapien
cttctggttccgcagactagaatgg

SEQ ID NO: 1844957 - DNA, 25 bp, Homo sapien
gagctccgggccgcgaatcccggcc

SEQ ID NO: 1844958 - DNA, 25 bp, Homo sapien
cccctcctctctcacggcggtctgt

SEQ ID NO: 1844959 - DNA, 25 bp, Homo sapien
ccgagctccgggccgcgaatcccgg

SEQ ID NO: 1844960 - DNA, 25 bp, Homo sapien
tcctctctcacggcggtctgttccg

SEQ ID NO: 1844961 - DNA, 25 bp, Homo sapien
cacggccccggaagctgacgtcgcc

SEQ ID NO: 1844962 - DNA, 25 bp, Homo sapien
agctgacgtcgccgaagcgtacgcc

SEQ ID NO: 1844963 - DNA, 25 bp, Homo sapien
gacgtcgccgaagcgtacgccgctg

SEQ ID NO: 1844964 - DNA, 25 bp, Homo sapien
gtttccaggaggctcgggcgcgccc

SEQ ID NO: 1844965 - DNA, 25 bp, Homo sapien
tgtgcttttggtaagatctccaaga

SEQ ID NO: 1844966 - DNA, 25 bp, Homo sapien
tctaatcacaacacaggaggtctct

SEQ ID NO: 1844967 - DNA, 25 bp, Homo sapien
caaaagattggaaaaattcatgcac

SEQ ID NO: 1844968 - DNA, 25 bp, Homo sapien
gaagaacgttgtataacaggctacc

SEQ ID NO: 1844969 - DNA, 25 bp, Homo sapien
tgagatccttcactgttcagtctcc

SEQ ID NO: 1844970 - DNA, 25 bp, Homo sapien
gtaaactggacagattgtggacagg

SEQ ID NO: 1844971 - DNA, 25 bp, Homo sapien
caggattctgagtgagatccttcac

SEQ ID NO: 1844972 - DNA, 25 bp, Homo sapien
gtctcctttgcatcagtaagtgtct

SEQ ID NO: 1844973 - DNA, 25 bp, Homo sapien
taaagtaaatggacaagtagaggaa

SEQ ID NO: 1844974 - DNA, 25 bp, Homo sapien
cttaaagtaaatggacaagtagagg

SEQ ID NO: 1844975 - DNA, 25 bp, Homo sapien
ttaaagtaaatggacaagtagagga

SEQ ID NO: 1844976 - DNA, 25 bp, Homo sapien
tttccatatgaattcaaggacctgc

SEQ ID NO: 1844977 - DNA, 25 bp, Homo sapien
tcccttctatgagatcagcttttgc

SEQ ID NO: 1844978 - DNA, 25 bp, Homo sapien
agcttttgcagttccacatatgagt

SEQ ID NO: 1844979 - DNA, 25 bp, Homo sapien
cagtgtacattctcacttgagcgta

SEQ ID NO: 1844980 - DNA, 25 bp, Homo sapien
gacctgtggatgaacctagtgcatt

SEQ ID NO: 1844981 - DNA, 25 bp, Homo sapien
taggtgatacctactgtcatgaaac

SEQ ID NO: 1844982 - DNA, 25 bp, Homo sapien
gattcaagtggtggttcagtaggcc

SEQ ID NO: 1844983 - DNA, 25 bp, Homo sapien
taggccttggtagctccccagagtt

SEQ ID NO: 1844984 - DNA, 25 bp, Homo sapien
aacgtgttctgagtagtgctctgga

SEQ ID NO: 1844985 - DNA, 25 bp, Homo sapien
catatatgagcaccctttgaaatgc

SEQ ID NO: 1844986 - DNA, 25 bp, Homo sapien
ctctggaagggactttggattttga

SEQ ID NO: 1844987 - DNA, 25 bp, Homo sapien
taacattcatctaacactgcaagcc

SEQ ID NO: 1844988 - DNA, 25 bp, Homo sapien
caaaaggaggaacagccgtgtcatc

SEQ ID NO: 1844989 - DNA, 25 bp, Homo sapien
agaagtctcggcagccagcacttga

SEQ ID NO: 1844990 - DNA, 25 bp, Homo sapien
tgatcactgagttggagaagtctcg

SEQ ID NO: 1844991 - DNA, 25 bp, Homo sapien
tcttgctctatgactacggtgtggc

SEQ ID NO: 1844992 - DNA, 25 bp, Homo sapien
gtggccagtcatatattgattgtag

SEQ ID NO: 1844993 - DNA, 25 bp, Homo sapien
gccagtcatatattgattgtagaaa

SEQ ID NO: 1844994 - DNA, 25 bp, Homo sapien
gattgtagaaattgaatgtgtaatc

SEQ ID NO: 1844995 - DNA, 25 bp, Homo sapien
aaatccttctcatataggaaactcc

SEQ ID NO: 1844996 - DNA, 25 bp, Homo sapien
cccccaaaggcacatgtgacccagc

SEQ ID NO: 1844997 - DNA, 25 bp, Homo sapien
ccaaaggcacatgtgacccagcacc

SEQ ID NO: 1844998 - DNA, 25 bp, Homo sapien
aaaggcacatgtgacccagcacccc

SEQ ID NO: 1844999 - DNA, 25 bp, Homo sapien
gcacatgtgacccagcaccccatct

SEQ ID NO: 1845000 - DNA, 25 bp, Homo sapien
accagacccaggacacggagcttgt

SEQ ID NO: 1845001 - DNA, 25 bp, Homo sapien
gaagtgggtggctgtagtggtgcct

SEQ ID NO: 1845002 - DNA, 25 bp, Homo sapien
acccaggacacggagcttgtggaga

SEQ ID NO: 1845003 - DNA, 25 bp, Homo sapien
gcctgcaggggacggaaccttccag

SEQ ID NO: 1845004 - DNA, 25 bp, Homo sapien
ccccatcgtgggcatcgttgctggc

SEQ ID NO: 1845005 - DNA, 25 bp, Homo sapien
agctgtggtcactggagctgtggtt

SEQ ID NO: 1845006 - DNA, 25 bp, Homo sapien
tgctggcctgtttctccttggagct

SEQ ID NO: 1845007 - DNA, 25 bp, Homo sapien
tttcccagagccgtcttctcagccc

SEQ ID NO: 1845008 - DNA, 25 bp, Homo sapien
ccaggtttgaagctacacagccagg

SEQ ID NO: 1845009 - DNA, 25 bp, Homo sapien
aaaccacattggacacagaaccagg

SEQ ID NO: 1845010 - DNA, 25 bp, Homo sapien
cagaaccaggtttgaagctacacag

SEQ ID NO: 1845011 - DNA, 25 bp, Homo sapien
gacacagaaccaggtttgaagctac

SEQ ID NO: 1845012 - DNA, 25 bp, Homo sapien
gatttgggcttacaacaggatggca

SEQ ID NO: 1845013 - DNA, 25 bp, Homo sapien
tcactaagccaaagtgatttgggct

SEQ ID NO: 1845014 - DNA, 25 bp, Homo sapien
tctggaaacctaatgtacagtgtga

SEQ ID NO: 1845015 - DNA, 25 bp, Homo sapien
ccaacttgcagttatagggtgaata

SEQ ID NO: 1845016 - DNA, 25 bp, Homo sapien
ccacgcatggcctgtatgtcttctt

SEQ ID NO: 1845017 - DNA, 25 bp, Homo sapien
gccaccatgcaaaacgctggttttg

SEQ ID NO: 1845018 - DNA, 25 bp, Homo sapien
cagtaggattgttgcatcatatcgc

SEQ ID NO: 1845019 - DNA, 25 bp, Homo sapien
gtgtgaaccactacaactgcctaat

SEQ ID NO: 1845020 - DNA, 25 bp, Homo sapien
caaaaatgagttccctgtgagtgtg

SEQ ID NO: 1845021 - DNA, 25 bp, Homo sapien
ggtgatactggtctcctagaatgac

SEQ ID NO: 1845022 - DNA, 25 bp, Homo sapien
catatctggctattacgttgaggta

SEQ ID NO: 1845023 - DNA, 25 bp, Homo sapien
tttggccagactactgtcctggagg

SEQ ID NO: 1845024 - DNA, 25 bp, Homo sapien
gaattagtcatgaaagatccacccc

SEQ ID NO: 1845025 - DNA, 25 bp, Homo sapien
taatttaacaccacacgggagccac

SEQ ID NO: 1845026 - DNA, 25 bp, Homo sapien
tatgagcacagactaccagaagcag

SEQ ID NO: 1845027 - DNA, 25 bp, Homo sapien
gcatagcggcatctgattctgggaa

SEQ ID NO: 1845028 - DNA, 25 bp, Homo sapien
atgggaccagtctagtgttgatgaa

SEQ ID NO: 1845029 - DNA, 25 bp, Homo sapien
aactcctagatttgcccttaagaag

SEQ ID NO: 1845030 - DNA, 25 bp, Homo sapien
ccttaagcgtttcttatgggaccag

SEQ ID NO: 1845031 - DNA, 25 bp, Homo sapien
taaattggcctggtgttctataacc

SEQ ID NO: 1845032 - DNA, 25 bp, Homo sapien
tatgttccttcaacacaagatggga

SEQ ID NO: 1845033 - DNA, 25 bp, Homo sapien
tgcagagggtccatgtccaagcaca

SEQ ID NO: 1845034 - DNA, 25 bp, Homo sapien
gaaactgccgcatattgcagagggt

SEQ ID NO: 1845035 - DNA, 25 bp, Homo sapien
cagttgtaacggtagtagccacacc

SEQ ID NO: 1845036 - DNA, 25 bp, Homo sapien
agatgtacccccaaggactctctct

SEQ ID NO: 1845037 - DNA, 25 bp, Homo sapien
aagttgtttggtcccctgattatga

SEQ ID NO: 1845038 - DNA, 25 bp, Homo sapien
tgatctcacagcttctccttaggtg

SEQ ID NO: 1845039 - DNA, 25 bp, Homo sapien
tgcccaggccagacagtgtcagtct

SEQ ID NO: 1845040 - DNA, 25 bp, Homo sapien
ctgggaagaggtctatgctcagttc

SEQ ID NO: 1845041 - DNA, 25 bp, Homo sapien
gaagaggtctatgctcagttccagg

SEQ ID NO: 1845042 - DNA, 25 bp, Homo sapien
acatggaaaaggcagtggatgggca

SEQ ID NO: 1845043 - DNA, 25 bp, Homo sapien
ggtctatgctcagttccaggataca

SEQ ID NO: 1845044 - DNA, 25 bp, Homo sapien
gattgttctgcctagagtagccaca

SEQ ID NO: 1845045 - DNA, 25 bp, Homo sapien
taacagattcctaagtgcaagtccc

SEQ ID NO: 1845046 - DNA, 25 bp, Homo sapien
gatcagttcgtaaaaagccaagcac

SEQ ID NO: 1845047 - DNA, 25 bp, Homo sapien
tatgcacggtacagctttccttgag

SEQ ID NO: 1845048 - DNA, 25 bp, Homo sapien
aatcattatcagtgaagtgtcaacc

SEQ ID NO: 1845049 - DNA, 25 bp, Homo sapien
cagatgttagtatacagtttaccca

SEQ ID NO: 1845050 - DNA, 25 bp, Homo sapien
aatgaatcataatctggaacacctg

SEQ ID NO: 1845051 - DNA, 25 bp, Homo sapien
cacagatggcttattattgctagca

SEQ ID NO: 1845052 - DNA, 25 bp, Homo sapien
gaggaacttataccaaccttactca

SEQ ID NO: 1845053 - DNA, 25 bp, Homo sapien
ttgatctgaggaacttataccaacc

SEQ ID NO: 1845054 - DNA, 25 bp, Homo sapien
gaacttataccaaccttactcatca

SEQ ID NO: 1845055 - DNA, 25 bp, Homo sapien
tctgaggaacttataccaaccttac

SEQ ID NO: 1845056 - DNA, 25 bp, Homo sapien
cacatgggcaactacgaagctggca

SEQ ID NO: 1845057 - DNA, 25 bp, Homo sapien
tcaagattcccaggcactagacaga

SEQ ID NO: 1845058 - DNA, 25 bp, Homo sapien
cccatgtgtaggcaggtttcacgaa

SEQ ID NO: 1845059 - DNA, 25 bp, Homo sapien
ctaaaactctaggaagggaggcaca

SEQ ID NO: 1845060 - DNA, 25 bp, Homo sapien
cagccatggtcgcacagcttgtgga

SEQ ID NO: 1845061 - DNA, 25 bp, Homo sapien
caagtggctgaatctctttcgtgac

SEQ ID NO: 1845062 - DNA, 25 bp, Homo sapien
ggttggtccaaatgtcctagcctac

SEQ ID NO: 1845063 - DNA, 25 bp, Homo sapien
gaaatagttcctcacagcaatgccc

SEQ ID NO: 1845064 - DNA, 25 bp, Homo sapien
tctcgcaactggagggaaacaaggt

SEQ ID NO: 1845065 - DNA, 25 bp, Homo sapien
gggatgcagcgatacacaggtcaaa

SEQ ID NO: 1845066 - DNA, 25 bp, Homo sapien
tgcacggactaggtgggagctaact

SEQ ID NO: 1845067 - DNA, 25 bp, Homo sapien
gatgacatgtcaactgagcccagag

SEQ ID NO: 1845068 - DNA, 25 bp, Homo sapien
ggcaggcctgcatcacttggtgcta

SEQ ID NO: 1845069 - DNA, 25 bp, Homo sapien
ccatgactggcaacctgctgggaga

SEQ ID NO: 1845070 - DNA, 25 bp, Homo sapien
tcaagcccatgagtgacaattcagc

SEQ ID NO: 1845071 - DNA, 25 bp, Homo sapien
caaggagccctttcaacagggagac

SEQ ID NO: 1845072 - DNA, 25 bp, Homo sapien
gaacaatgctaggttccacaaggta

SEQ ID NO: 1845073 - DNA, 25 bp, Homo sapien
taggttccacaaggtagtctgtcct

SEQ ID NO: 1845074 - DNA, 25 bp, Homo sapien
acaccagagaacctttggttgactt

SEQ ID NO: 1845075 - DNA, 25 bp, Homo sapien
tagtgctgcagaaggagaacaatgc

SEQ ID NO: 1845076 - DNA, 25 bp, Homo sapien
gtcttcagcaccagctaatgccctg

SEQ ID NO: 1845077 - DNA, 25 bp, Homo sapien
ttggagatccaggctcgccaagcag

SEQ ID NO: 1845078 - DNA, 25 bp, Homo sapien
ggagatccaggctcgccaagcagcc

SEQ ID NO: 1845079 - DNA, 25 bp, Homo sapien
aatgccctgctagtgggcaaagagg

SEQ ID NO: 1845080 - DNA, 25 bp, Homo sapien
tggttcaaggctacaccctaggaga

SEQ ID NO: 1845081 - DNA, 25 bp, Homo sapien
taatgggttcatctaatggcagggc

SEQ ID NO: 1845082 - DNA, 25 bp, Homo sapien
gcagggccggctcaaggcaaaattt

SEQ ID NO: 1845083 - DNA, 25 bp, Homo sapien
tattgagcctctcttggatgccagc

SEQ ID NO: 1845084 - DNA, 25 bp, Homo sapien
gaactccacccgaatcggtctccca

SEQ ID NO: 1845085 - DNA, 25 bp, Homo sapien
gtgtctttaggtagaactatttata

SEQ ID NO: 1845086 - DNA, 25 bp, Homo sapien
cattgcgaatagtgccgcagtgaac

SEQ ID NO: 1845087 - DNA, 25 bp, Homo sapien
tgacctcgccgaactccacccgaat

SEQ ID NO: 1845088 - DNA, 25 bp, Homo sapien
cattcccctaattagggatattaag

SEQ ID NO: 1845089 - DNA, 25 bp, Homo sapien
tgcattcccctaattagggatatta

SEQ ID NO: 1845090 - DNA, 25 bp, Homo sapien
ccctaattagggatattaagcattt

SEQ ID NO: 1845091 - DNA, 25 bp, Homo sapien
ttcccctaattagggatattaagca

SEQ ID NO: 1845092 - DNA, 25 bp, Homo sapien
ggatatagttcccagtaacggcgct

SEQ ID NO: 1845093 - DNA, 25 bp, Homo sapien
catgcacgaagagacgagaccaagt

SEQ ID NO: 1845094 - DNA, 25 bp, Homo sapien
gaatatggatgcaaacctagggccc

SEQ ID NO: 1845095 - DNA, 25 bp, Homo sapien
ccaaggacagggttgcatgcacgaa

SEQ ID NO: 1845096 - DNA, 25 bp, Homo sapien
agcagccacagaaagtgagtaatgg

SEQ ID NO: 1845097 - DNA, 25 bp, Homo sapien
gagagaggccaaaagacacctaggc

SEQ ID NO: 1845098 - DNA, 25 bp, Homo sapien
cacagaaagtgagtaatggaaacaa

SEQ ID NO: 1845099 - DNA, 25 bp, Homo sapien
gagccatggctatcaacctggagag

SEQ ID NO: 1845100 - DNA, 25 bp, Homo sapien
tgagaacctgcccagcaataagtgt

SEQ ID NO: 1845101 - DNA, 25 bp, Homo sapien
tttaaaaacttggtgcaggcctgaa

SEQ ID NO: 1845102 - DNA, 25 bp, Homo sapien
tcaaaatccccagacagtagacgtg

SEQ ID NO: 1845103 - DNA, 25 bp, Homo sapien
cattgattgagcttactgactggac

SEQ ID NO: 1845104 - DNA, 25 bp, Homo sapien
gtatgagcagcagtacaagcctttg

SEQ ID NO: 1845105 - DNA, 25 bp, Homo sapien
tacctctggctcaaatgcactctgg

SEQ ID NO: 1845106 - DNA, 25 bp, Homo sapien
tacctaatgatacagcctagagcgc

SEQ ID NO: 1845107 - DNA, 25 bp, Homo sapien
tagagctcctttacctacgctgcgg

SEQ ID NO: 1845108 - DNA, 25 bp, Homo sapien
ggcttgccagcacctctaggagtaa

SEQ ID NO: 1845109 - DNA, 25 bp, Homo sapien
tctaagcagcagaattcgtgggatg

SEQ ID NO: 1845110 - DNA, 25 bp, Homo sapien
tcctgaaacccctacgatgaatatg

SEQ ID NO: 1845111 - DNA, 25 bp, Homo sapien
cagcagttccatacttaagggtcag

SEQ ID NO: 1845112 - DNA, 25 bp, Homo sapien
tcatcaatggagagtgttcagggaa

SEQ ID NO: 1845113 - DNA, 25 bp, Homo sapien
cagttcacggatctagaaatagcct

SEQ ID NO: 1845114 - DNA, 25 bp, Homo sapien
tacaatagtcaagaggagccctggg

SEQ ID NO: 1845115 - DNA, 25 bp, Homo sapien
gaaatgtgacacctcaacatgctga

SEQ ID NO: 1845116 - DNA, 25 bp, Homo sapien
atcaacacacgggaagggacactga

SEQ ID NO: 1845117 - DNA, 25 bp, Homo sapien
ctattttccttctatgtgcccaaca

SEQ ID NO: 1845118 - DNA, 25 bp, Homo sapien
ttttggtagcttgttaaagcagccc

SEQ ID NO: 1845119 - DNA, 25 bp, Homo sapien
gaacaattagtatcagattagcaac

SEQ ID NO: 1845120 - DNA, 25 bp, Homo sapien
ctctgaaacaagtgcaattccaaat

SEQ ID NO: 1845121 - DNA, 25 bp, Homo sapien
tgcaattccaaatcccttaacccaa

SEQ ID NO: 1845122 - DNA, 25 bp, Homo sapien
aacaagtgcaattccaaatccctta

SEQ ID NO: 1845123 - DNA, 25 bp, Homo sapien
caagtgcaattccaaatcccttaac

SEQ ID NO: 1845124 - DNA, 25 bp, Homo sapien
aagacacttgcggtaagggtcctcg

SEQ ID NO: 1845125 - DNA, 25 bp, Homo sapien
tagagcatagaattcacaggaccgc

SEQ ID NO: 1845126 - DNA, 25 bp, Homo sapien
tcctcgggtttttcactgcaagact

SEQ ID NO: 1845127 - DNA, 25 bp, Homo sapien
tcatgaatgcgctaagaaagggaga

SEQ ID NO: 1845128 - DNA, 25 bp, Homo sapien
tacaagcttggagatatgcatcaga

SEQ ID NO: 1845129 - DNA, 25 bp, Homo sapien
catcacatgtagatagagccagaga

SEQ ID NO: 1845130 - DNA, 25 bp, Homo sapien
tggagacaaaactcaacaacgggct

SEQ ID NO: 1845131 - DNA, 25 bp, Homo sapien
taacgcatcattgtcagcgggaaga

SEQ ID NO: 1845132 - DNA, 25 bp, Homo sapien
atgcatcttggatgctgcagttagc

SEQ ID NO: 1845133 - DNA, 25 bp, Homo sapien
catgcatcttggatgctgcagttag

SEQ ID NO: 1845134 - DNA, 25 bp, Homo sapien
gatcaccagaagctccctactatca

SEQ ID NO: 1845135 - DNA, 25 bp, Homo sapien
ctctggtgtgattatgaggagacca

SEQ ID NO: 1845136 - DNA, 25 bp, Homo sapien
cagtattttctttgacactattaaa

SEQ ID NO: 1845137 - DNA, 25 bp, Homo sapien
gctccctactatcaacacaaattgg

SEQ ID NO: 1845138 - DNA, 25 bp, Homo sapien
cagacctagtgacgtatgtataaaa

SEQ ID NO: 1845139 - DNA, 25 bp, Homo sapien
ttaaccacagacctagtgacgtatg

SEQ ID NO: 1845140 - DNA, 25 bp, Homo sapien
accacagacctagtgacgtatgtat

SEQ ID NO: 1845141 - DNA, 25 bp, Homo sapien
cacagacctagtgacgtatgtataa

SEQ ID NO: 1845142 - DNA, 25 bp, Homo sapien
gaaagagtacttcacgcagaaccag

SEQ ID NO: 1845143 - DNA, 25 bp, Homo sapien
caaaaccgtcttcctgcactgagtc

SEQ ID NO: 1845144 - DNA, 25 bp, Homo sapien
tgtgtgggagatcagtctccccgag

SEQ ID NO: 1845145 - DNA, 25 bp, Homo sapien
cataatcagatgagccactttgggc

SEQ ID NO: 1845146 - DNA, 25 bp, Homo sapien
cgtatacgtcaaaagctaagaatgg

SEQ ID NO: 1845147 - DNA, 25 bp, Homo sapien
cggagtcggcaaactacggtctact

SEQ ID NO: 1845148 - DNA, 25 bp, Homo sapien
tactatcgcttgaaaaataccggat

SEQ ID NO: 1845149 - DNA, 25 bp, Homo sapien
cattattatcctgtccggagtcggc

SEQ ID NO: 1845150 - DNA, 25 bp, Homo sapien
gcagtccctacacaaacactatctg

SEQ ID NO: 1845151 - DNA, 25 bp, Homo sapien
tgctcctgcggagaaactcaagtca

SEQ ID NO: 1845152 - DNA, 25 bp, Homo sapien
aaagcagggaggctgtaatgcaaaa

SEQ ID NO: 1845153 - DNA, 25 bp, Homo sapien
ggctgtaatgcaaaagtccgcagtc

SEQ ID NO: 1845154 - DNA, 25 bp, Homo sapien
ggaccccatgcgaaggagctaagga

SEQ ID NO: 1845155 - DNA, 25 bp, Homo sapien
tccagcgggataggtagataatttc

SEQ ID NO: 1845156 - DNA, 25 bp, Homo sapien
aagagtatttgaagtctaccgcggg

SEQ ID NO: 1845157 - DNA, 25 bp, Homo sapien
ttaacaagcgtttatccagcgcacg

SEQ ID NO: 1845158 - DNA, 25 bp, Homo sapien
ccagactggcccgaagagaggaaaa

SEQ ID NO: 1845159 - DNA, 25 bp, Homo sapien
cactagtcggaagtgacgtgccagc

SEQ ID NO: 1845160 - DNA, 25 bp, Homo sapien
tcttcgtcgactttcagctgcaccg

SEQ ID NO: 1845161 - DNA, 25 bp, Homo sapien
tccggcgagtattgtgtgtcgcgcc

SEQ ID NO: 1845162 - DNA, 25 bp, Homo sapien
gaggatacagtgtctggaactattg

SEQ ID NO: 1845163 - DNA, 25 bp, Homo sapien
tcaagcttagactccagtggattaa

SEQ ID NO: 1845164 - DNA, 25 bp, Homo sapien
tgttagaaacgtatgtcaaacgagg

SEQ ID NO: 1845165 - DNA, 25 bp, Homo sapien
cagtggattaatcataaagctctta

SEQ ID NO: 1845166 - DNA, 25 bp, Homo sapien
caatggtgagaagtgccctaaaatt

SEQ ID NO: 1845167 - DNA, 25 bp, Homo sapien
tgtgtgatcagttgtcctctagcct

SEQ ID NO: 1845168 - DNA, 25 bp, Homo sapien
tagagatcgtaagctcctactactc

SEQ ID NO: 1845169 - DNA, 25 bp, Homo sapien
tgagatactccctaggtagagatcg

SEQ ID NO: 1845170 - DNA, 25 bp, Homo sapien
gctcctgtggctaagggcagtgaaa

SEQ ID NO: 1845171 - DNA, 25 bp, Homo sapien
gatgtggattcaccctgtctagcag

SEQ ID NO: 1845172 - DNA, 25 bp, Homo sapien
tacttagatacgtcaccctgtagag

SEQ ID NO: 1845173 - DNA, 25 bp, Homo sapien
gcttcagagttcaacggcccagtgt

SEQ ID NO: 1845174 - DNA, 25 bp, Homo sapien
aactggcaatgtttgggaaccggca

SEQ ID NO: 1845175 - DNA, 25 bp, Homo sapien
actgtgttgaacctgtaatgaggcc

SEQ ID NO: 1845176 - DNA, 25 bp, Homo sapien
tcactaaggaaacggatggatcccc

SEQ ID NO: 1845177 - DNA, 25 bp, Homo sapien
tcttgaacggcactcaacattggtc

SEQ ID NO: 1845178 - DNA, 25 bp, Homo sapien
gaaaaaatgtttgcaccactagcct

SEQ ID NO: 1845179 - DNA, 25 bp, Homo sapien
tctgaacctcatgcggaaaaaatgt

SEQ ID NO: 1845180 - DNA, 25 bp, Homo sapien
cagtgagatcctcagcgcagaggga

SEQ ID NO: 1845181 - DNA, 25 bp, Homo sapien
ggcccatgctgaaggcagtcagtca

SEQ ID NO: 1845182 - DNA, 25 bp, Homo sapien
ccagatgaagcttatgcaattgcca

SEQ ID NO: 1845183 - DNA, 25 bp, Homo sapien
taataaccatggactccaagtacag

SEQ ID NO: 1845184 - DNA, 25 bp, Homo sapien
aaggcacaggttttagctggtggta

SEQ ID NO: 1845185 - DNA, 25 bp, Homo sapien
gttcccaaaggatatgtggcaaagt

SEQ ID NO: 1845186 - DNA, 25 bp, Homo sapien
tggtggtgctacagtccatcaagta

SEQ ID NO: 1845187 - DNA, 25 bp, Homo sapien
taattcagcctatcgccaaaagaaa

SEQ ID NO: 1845188 - DNA, 25 bp, Homo sapien
ggctatggccacaatggatataata

SEQ ID NO: 1845189 - DNA, 25 bp, Homo sapien
tataggctgcctagtaaatggtgct

SEQ ID NO: 1845190 - DNA, 25 bp, Homo sapien
aatatagactgctacagtcacatca

SEQ ID NO: 1845191 - DNA, 25 bp, Homo sapien
tcaaatatagactgctacagtcaca

SEQ ID NO: 1845192 - DNA, 25 bp, Homo sapien
ttcaaatatagactgctacagtcac

SEQ ID NO: 1845193 - DNA, 25 bp, Homo sapien
caaatatagactgctacagtcacat

SEQ ID NO: 1845194 - DNA, 25 bp, Homo sapien
cgacggcaaggattatctcaccctg

SEQ ID NO: 1845195 - DNA, 25 bp, Homo sapien
ggcaaggattatctcaccctgaatg

SEQ ID NO: 1845196 - DNA, 25 bp, Homo sapien
ttatctcaccctgaatgaggacctg

SEQ ID NO: 1845197 - DNA, 25 bp, Homo sapien
aaggattatctcaccctgaatgagg

SEQ ID NO: 1845198 - DNA, 25 bp, Homo sapien
gagcccgtcaccctgagatggagta

SEQ ID NO: 1845199 - DNA, 25 bp, Homo sapien
tgtgtcctgcctcgttactgggaag

SEQ ID NO: 1845200 - DNA, 25 bp, Homo sapien
tcaagccctaggtaaaagtgtgtcc

SEQ ID NO: 1845201 - DNA, 25 bp, Homo sapien
tctcttctcagggaaagcgggagcc

SEQ ID NO: 1845202 - DNA, 25 bp, Homo sapien
tgaggaggtagagaaacagtccacc

SEQ ID NO: 1845203 - DNA, 25 bp, Homo sapien
aaaagagaactgagctagcatgccc

SEQ ID NO: 1845204 - DNA, 25 bp, Homo sapien
gaggcagcacacgaagtcaaaagag

SEQ ID NO: 1845205 - DNA, 25 bp, Homo sapien
tgtgattggatcgtaaggctgtgcc

SEQ ID NO: 1845206 - DNA, 25 bp, Homo sapien
aagttgtggtaaactgtagcggaag

SEQ ID NO: 1845207 - DNA, 25 bp, Homo sapien
caggaagttgtggtaaactgtagcg

SEQ ID NO: 1845208 - DNA, 25 bp, Homo sapien
accaggaagttgtggtaaactgtag

SEQ ID NO: 1845209 - DNA, 25 bp, Homo sapien
tgtggtaaactgtagcggaagttaa

SEQ ID NO: 1845210 - DNA, 25 bp, Homo sapien
tcaaaagattctcatttatgatatg

SEQ ID NO: 1845211 - DNA, 25 bp, Homo sapien
aaagattctcatttatgatatgtca

SEQ ID NO: 1845212 - DNA, 25 bp, Homo sapien
aagattctcatttatgatatgtcaa

SEQ ID NO: 1845213 - DNA, 25 bp, Homo sapien
gaatcaaaagattctcatttatgat

SEQ ID NO: 1845214 - DNA, 25 bp, Homo sapien
ttctatcagtgaggccaaagagccc

SEQ ID NO: 1845215 - DNA, 25 bp, Homo sapien
taaggtgccctgactcacgagagag

SEQ ID NO: 1845216 - DNA, 25 bp, Homo sapien
cagtgatgctacgacaccggcagat

SEQ ID NO: 1845217 - DNA, 25 bp, Homo sapien
tctgccgaaatgctgaggtgaaacc

SEQ ID NO: 1845218 - DNA, 25 bp, Homo sapien
ttatactgcatgagcccccaggatt

SEQ ID NO: 1845219 - DNA, 25 bp, Homo sapien
agaattatactgcatgagcccccag

SEQ ID NO: 1845220 - DNA, 25 bp, Homo sapien
aactactcgtacacatttaatcaac

SEQ ID NO: 1845221 - DNA, 25 bp, Homo sapien
aatttgtatcaacatgaagtcctag

SEQ ID NO: 1845222 - DNA, 25 bp, Homo sapien
ccaaaaacttgggtgcctgaaggtg

SEQ ID NO: 1845223 - DNA, 25 bp, Homo sapien
caaaagggagctggatttagacctc

SEQ ID NO: 1845224 - DNA, 25 bp, Homo sapien
cattaagagacatcagcttgggaca

SEQ ID NO: 1845225 - DNA, 25 bp, Homo sapien
gcttcaaatttaggtcaggctctgg

SEQ ID NO: 1845226 - DNA, 25 bp, Homo sapien
ctttcccttgcaaagagaatgcatg

SEQ ID NO: 1845227 - DNA, 25 bp, Homo sapien
tgttagcctggaacagccgctctca

SEQ ID NO: 1845228 - DNA, 25 bp, Homo sapien
agctgttagcctggaacagccgctc

SEQ ID NO: 1845229 - DNA, 25 bp, Homo sapien
tggaacagccgctctcacctcagtt

SEQ ID NO: 1845230 - DNA, 25 bp, Homo sapien
tacccccaggtcagtccaaaagcaa

SEQ ID NO: 1845231 - DNA, 25 bp, Homo sapien
atacccccaggtcagtccaaaagca

SEQ ID NO: 1845232 - DNA, 25 bp, Homo sapien
tttattcacaattggggtggcagag

SEQ ID NO: 1845233 - DNA, 25 bp, Homo sapien
acaatctttattcacaattggggtg

SEQ ID NO: 1845234 - DNA, 25 bp, Homo sapien
gggaagatggcgctgggcgaggaac

SEQ ID NO: 1845235 - DNA, 25 bp, Homo sapien
tgggagggaagatggcgctgggcga

SEQ ID NO: 1845236 - DNA, 25 bp, Homo sapien
gagggaagatggcgctgggcgagga

SEQ ID NO: 1845237 - DNA, 25 bp, Homo sapien
gggagggaagatggcgctgggcgag

SEQ ID NO: 1845238 - DNA, 25 bp, Homo sapien
ctcacccagcagggcataagggttt

SEQ ID NO: 1845239 - DNA, 25 bp, Homo sapien
gcataagggtttcggccagccaggc

SEQ ID NO: 1845240 - DNA, 25 bp, Homo sapien
cagggcataagggtttcggccagcc

SEQ ID NO: 1845241 - DNA, 25 bp, Homo sapien
cagcagggcataagggtttcggcca

SEQ ID NO: 1845242 - DNA, 25 bp, Homo sapien
cctcatccgcatcccggtcctcctc

SEQ ID NO: 1845243 - DNA, 25 bp, Homo sapien
cgtggtctctggatgggactcccag

SEQ ID NO: 1845244 - DNA, 25 bp, Homo sapien
tccgtggtctctggatgggactccc

SEQ ID NO: 1845245 - DNA, 25 bp, Homo sapien
gctccgtggtctctggatgggactc

SEQ ID NO: 1845246 - DNA, 25 bp, Homo sapien
tggtctctggatgggactcccaggt

SEQ ID NO: 1845247 - DNA, 25 bp, Homo sapien
tacagaatccaggtttgaccctctc

SEQ ID NO: 1845248 - DNA, 25 bp, Homo sapien
aagtaacagagctagccaacaggta

SEQ ID NO: 1845249 - DNA, 25 bp, Homo sapien
taccctcagtttgcagatcaggaaa

SEQ ID NO: 1845250 - DNA, 25 bp, Homo sapien
actatgctaagggtcaattattacc

SEQ ID NO: 1845251 - DNA, 25 bp, Homo sapien
cgtccactgccagccgcaagagact

SEQ ID NO: 1845252 - DNA, 25 bp, Homo sapien
gccgcaagagactgttggctgctct

SEQ ID NO: 1845253 - DNA, 25 bp, Homo sapien
gctgaggcggccgtccactgccagc

SEQ ID NO: 1845254 - DNA, 25 bp, Homo sapien
tccgagccgccttggctgtcttgta

SEQ ID NO: 1845255 - DNA, 25 bp, Homo sapien
taaccaggtaccagttatactccca

SEQ ID NO: 1845256 - DNA, 25 bp, Homo sapien
actggctatgcaacaaaaatctagg

SEQ ID NO: 1845257 - DNA, 25 bp, Homo sapien
gcagcttcatcaatggcagaatctc

SEQ ID NO: 1845258 - DNA, 25 bp, Homo sapien
cataacacagtccttccagttttcc

SEQ ID NO: 1845259 - DNA, 25 bp, Homo sapien
tgcacgggaattcgggaggccaggt

SEQ ID NO: 1845260 - DNA, 25 bp, Homo sapien
tgaggggtcctcagcctctgggtgg

SEQ ID NO: 1845261 - DNA, 25 bp, Homo sapien
ccaggtagcccacagcagtgtaggg

SEQ ID NO: 1845262 - DNA, 25 bp, Homo sapien
gatctgggcgatagggtagatccct

SEQ ID NO: 1845263 - DNA, 25 bp, Homo sapien
ggtctgaaagtatcgggtatggccc

SEQ ID NO: 1845264 - DNA, 25 bp, Homo sapien
gggttctggagacactcacgacttt

SEQ ID NO: 1845265 - DNA, 25 bp, Homo sapien
tgcaactgcctaggcagaagagatg

SEQ ID NO: 1845266 - DNA, 25 bp, Homo sapien
cattgatcagcgaggactttcccac

SEQ ID NO: 1845267 - DNA, 25 bp, Homo sapien
taattactatgacttggcctggcac

SEQ ID NO: 1845268 - DNA, 25 bp, Homo sapien
gaatacaaatcacgctctgggctgc

SEQ ID NO: 1845269 - DNA, 25 bp, Homo sapien
tctgggctgccagggttaaatcctg

SEQ ID NO: 1845270 - DNA, 25 bp, Homo sapien
tctactctgtgatgggacttggtgc

SEQ ID NO: 1845271 - DNA, 25 bp, Homo sapien
tgaaccccataccacccaatgtgtg

SEQ ID NO: 1845272 - DNA, 25 bp, Homo sapien
catgttccatctgtccttgtttttt

SEQ ID NO: 1845273 - DNA, 25 bp, Homo sapien
gctatcttctttgtaactgtaaact

SEQ ID NO: 1845274 - DNA, 25 bp, Homo sapien
accagacctagttctctgtccgctt

SEQ ID NO: 1845275 - DNA, 25 bp, Homo sapien
cagttgctcaagacaaaaacctgga

SEQ ID NO: 1845276 - DNA, 25 bp, Homo sapien
cctcagggctctacatgatgtgggc

SEQ ID NO: 1845277 - DNA, 25 bp, Homo sapien
gtgccaactgcaagccatcagcgat

SEQ ID NO: 1845278 - DNA, 25 bp, Homo sapien
tgtgggccctggtgatcttgctgac

SEQ ID NO: 1845279 - DNA, 25 bp, Homo sapien
caaagtaactaagactcagagtagc

SEQ ID NO: 1845280 - DNA, 25 bp, Homo sapien
taactcaggctgtcatgatccttcc

SEQ ID NO: 1845281 - DNA, 25 bp, Homo sapien
gcctaatgagacctgatcgccctct

SEQ ID NO: 1845282 - DNA, 25 bp, Homo sapien
ctcaagacctcacagctgagaagag

SEQ ID NO: 1845283 - DNA, 25 bp, Homo sapien
atccttgtagcgctcttgggttggg

SEQ ID NO: 1845284 - DNA, 25 bp, Homo sapien
accccatccttgtagcgctcttggg

SEQ ID NO: 1845285 - DNA, 25 bp, Homo sapien
tggctccattgctgaatcagtctgc

SEQ ID NO: 1845286 - DNA, 25 bp, Homo sapien
cttgtagcgctcttgggttgggcca

SEQ ID NO: 1845287 - DNA, 25 bp, Homo sapien
ccgagcaatcttctcccgccagctg

SEQ ID NO: 1845288 - DNA, 25 bp, Homo sapien
ccagagccattaccccaggtggccc

SEQ ID NO: 1845289 - DNA, 25 bp, Homo sapien
catcccgagcaatcttctcccgcca

SEQ ID NO: 1845290 - DNA, 25 bp, Homo sapien
cccagagccattaccccaggtggcc

SEQ ID NO: 1845291 - DNA, 25 bp, Homo sapien
gccccagggcccgagtccatcctct

SEQ ID NO: 1845292 - DNA, 25 bp, Homo sapien
ccccgcctccgactcttcttcaaga

SEQ ID NO: 1845293 - DNA, 25 bp, Homo sapien
tctcccccgcctccgactcttcttc

SEQ ID NO: 1845294 - DNA, 25 bp, Homo sapien
aggctctcagcaactgctctggccc

SEQ ID NO: 1845295 - DNA, 25 bp, Homo sapien
tactaggatcctgtggggtgcgggg

SEQ ID NO: 1845296 - DNA, 25 bp, Homo sapien
actactaggatcctgtggggtgcgg

SEQ ID NO: 1845297 - DNA, 25 bp, Homo sapien
cactactaggatcctgtggggtgcg

SEQ ID NO: 1845298 - DNA, 25 bp, Homo sapien
ctaggatcctgtggggtgcgggggt

SEQ ID NO: 1845299 - DNA, 25 bp, Homo sapien
tggagctggggatagtgttgatgga

SEQ ID NO: 1845300 - DNA, 25 bp, Homo sapien
gccagtccaagttctccagtcacat

SEQ ID NO: 1845301 - DNA, 25 bp, Homo sapien
ttccaggcaaccacaagagctggcg

SEQ ID NO: 1845302 - DNA, 25 bp, Homo sapien
tcataaagtgctggcgggaaattca

SEQ ID NO: 1845303 - DNA, 25 bp, Homo sapien
agatccaccttgttcaaaaccagca

SEQ ID NO: 1845304 - DNA, 25 bp, Homo sapien
taagcaggacgatgtcagacatctc

SEQ ID NO: 1845305 - DNA, 25 bp, Homo sapien
gatatcagtgataagcaggacgatg

SEQ ID NO: 1845306 - DNA, 25 bp, Homo sapien
cagtgataagcaggacgatgtcaga

SEQ ID NO: 1845307 - DNA, 25 bp, Homo sapien
gatgtcagacatctctaacacccgc

SEQ ID NO: 1845308 - DNA, 25 bp, Homo sapien
gagtttctcagaggagtaagcccca

SEQ ID NO: 1845309 - DNA, 25 bp, Homo sapien
caagatagtcttggaagctccgttc

SEQ ID NO: 1845310 - DNA, 25 bp, Homo sapien
gtaagccccatgaatcttcccaaga

SEQ ID NO: 1845311 - DNA, 25 bp, Homo sapien
tccaaggaggacgtcgaggaaagtc

SEQ ID NO: 1845312 - DNA, 25 bp, Homo sapien
gatgtccagctccaacaactcagca

SEQ ID NO: 1845313 - DNA, 25 bp, Homo sapien
ctgtagaacttgctcccgggctgct

SEQ ID NO: 1845314 - DNA, 25 bp, Homo sapien
caactcagcactgaccggctgtaga

SEQ ID NO: 1845315 - DNA, 25 bp, Homo sapien
ggctgatacacctcccggatgtcca

SEQ ID NO: 1845316 - DNA, 25 bp, Homo sapien
gttggaactggagcgcagcccatct

SEQ ID NO: 1845317 - DNA, 25 bp, Homo sapien
aggtgtcggtctgttcctctcgccg

SEQ ID NO: 1845318 - DNA, 25 bp, Homo sapien
tgctggttaagcctgcggatatgat

SEQ ID NO: 1845319 - DNA, 25 bp, Homo sapien
cgatttgggtcgtagcctcgtggac

SEQ ID NO: 1845320 - DNA, 25 bp, Homo sapien
ttcttccgatgttcagtcctcccag

SEQ ID NO: 1845321 - DNA, 25 bp, Homo sapien
ccctccgcgataggccgcgagggtt

SEQ ID NO: 1845322 - DNA, 25 bp, Homo sapien
tatttgggaccctcccggatgtgcg

SEQ ID NO: 1845323 - DNA, 25 bp, Homo sapien
ccgtgctagctggagggattcccct

SEQ ID NO: 1845324 - DNA, 25 bp, Homo sapien
tcttccgctcccgtttgtcctgcaa

SEQ ID NO: 1845325 - DNA, 25 bp, Homo sapien
tctgcttcacgctgaatggcttctt

SEQ ID NO: 1845326 - DNA, 25 bp, Homo sapien
ttctgcttcacgctgaatggcttct

SEQ ID NO: 1845327 - DNA, 25 bp, Homo sapien
gtttgtcctgcaactgcttcttctt

SEQ ID NO: 1845328 - DNA, 25 bp, Homo sapien
gggtgggctactggcacgtgagagc

SEQ ID NO: 1845329 - DNA, 25 bp, Homo sapien
ggaggaccaggctaactccgtcacg

SEQ ID NO: 1845330 - DNA, 25 bp, Homo sapien
tagtcacttccctccaggagcgagg

SEQ ID NO: 1845331 - DNA, 25 bp, Homo sapien
gggctagcaggtgacgtcagcgggc

SEQ ID NO: 1845332 - DNA, 25 bp, Homo sapien
ggggggcgcgtgtcatcactacctt

SEQ ID NO: 1845333 - DNA, 25 bp, Homo sapien
tgcgctcccgggagaacctaccact

SEQ ID NO: 1845334 - DNA, 25 bp, Homo sapien
gcgcgtgtcatcactaccttgcgct

SEQ ID NO: 1845335 - DNA, 25 bp, Homo sapien
atcactaccttgcgctcccgggaga

SEQ ID NO: 1845336 - DNA, 25 bp, Homo sapien
cagatcataagtgcaaaagcgggcg

SEQ ID NO: 1845337 - DNA, 25 bp, Homo sapien
gacacgctgaggctatactacaaag

SEQ ID NO: 1845338 - DNA, 25 bp, Homo sapien
ccgaggaccggatgtggcgatctta

SEQ ID NO: 1845339 - DNA, 25 bp, Homo sapien
tgaccttagtggaaagccgagactg

SEQ ID NO: 1845340 - DNA, 25 bp, Homo sapien
taatccctgtgttctagtcatctct

SEQ ID NO: 1845341 - DNA, 25 bp, Homo sapien
attctttagttcatacacactagtg

SEQ ID NO: 1845342 - DNA, 25 bp, Homo sapien
catctctggagttgcagatgaagct

SEQ ID NO: 1845343 - DNA, 25 bp, Homo sapien
ctagtgatggggaatgacaaagctt

SEQ ID NO: 1845344 - DNA, 25 bp, Homo sapien
tgtaggcatcaaccagaacaagctg

SEQ ID NO: 1845345 - DNA, 25 bp, Homo sapien
taactgacagccaaagccaatggat

SEQ ID NO: 1845346 - DNA, 25 bp, Homo sapien
gcctgtgggccaggcaatataccaa

SEQ ID NO: 1845347 - DNA, 25 bp, Homo sapien
caagctgccttatgttcaagggcaa

SEQ ID NO: 1845348 - DNA, 25 bp, Homo sapien
agacaagctccaaaggataaacagg

SEQ ID NO: 1845349 - DNA, 25 bp, Homo sapien
gaattttagacaggagtatcatggc

SEQ ID NO: 1845350 - DNA, 25 bp, Homo sapien
aaaatcagcttgtatggagagggcc

SEQ ID NO: 1845351 - DNA, 25 bp, Homo sapien
caccttggacctggaagttaattag

SEQ ID NO: 1845352 - DNA, 25 bp, Homo sapien
tacttcagtagtacaagtgagccat

SEQ ID NO: 1845353 - DNA, 25 bp, Homo sapien
gatccactcgggctccggcagctgc

SEQ ID NO: 1845354 - DNA, 25 bp, Homo sapien
gatgggctcgtgttctctccgtccc

SEQ ID NO: 1845355 - DNA, 25 bp, Homo sapien
tctccgtccccgatccactcgggct

SEQ ID NO: 1845356 - DNA, 25 bp, Homo sapien
cagctgctgcttgggcgccttcggc

SEQ ID NO: 1845357 - DNA, 25 bp, Homo sapien
ctccccccagagtgatgtatccttt

SEQ ID NO: 1845358 - DNA, 25 bp, Homo sapien
tgatcctgatgaatgctaacagact

SEQ ID NO: 1845359 - DNA, 25 bp, Homo sapien
ataacaggcgccagtaaccacaccc

SEQ ID NO: 1845360 - DNA, 25 bp, Homo sapien
cgccattctcaacccacatgttaaa

SEQ ID NO: 1845361 - DNA, 25 bp, Homo sapien
cacgatagccaggataggactgttc

SEQ ID NO: 1845362 - DNA, 25 bp, Homo sapien
tgaccaagaacacatcctagagggc

SEQ ID NO: 1845363 - DNA, 25 bp, Homo sapien
tagagctgggacaatggcctttatc

SEQ ID NO: 1845364 - DNA, 25 bp, Homo sapien
tagatcaagcattagctccagagga

SEQ ID NO: 1845365 - DNA, 25 bp, Homo sapien
tgttcgccaggataaccagctttag

SEQ ID NO: 1845366 - DNA, 25 bp, Homo sapien
gctatagttggcaaaggcagaccag

SEQ ID NO: 1845367 - DNA, 25 bp, Homo sapien
gactaagaatggtgagcccacgctg

SEQ ID NO: 1845368 - DNA, 25 bp, Homo sapien
accggatgcagatacgagttcgcca

SEQ ID NO: 1845369 - DNA, 25 bp, Homo sapien
ggcacagttgttctcatagcggcag

SEQ ID NO: 1845370 - DNA, 25 bp, Homo sapien
cacagttgttctcatagcggcagtt

SEQ ID NO: 1845371 - DNA, 25 bp, Homo sapien
ggcccattgacacccgggtggtaga

SEQ ID NO: 1845372 - DNA, 25 bp, Homo sapien
agttgttctcatagcggcagttgcc

SEQ ID NO: 1845373 - DNA, 25 bp, Homo sapien
cttcatcatgaaatgtcggcagaca

SEQ ID NO: 1845374 - DNA, 25 bp, Homo sapien
caaaacagttagacaggaaatagct

SEQ ID NO: 1845375 - DNA, 25 bp, Homo sapien
cgatggcaaaacagttagacaggaa

SEQ ID NO: 1845376 - DNA, 25 bp, Homo sapien
ggaacgatggcaaaacagttagaca

SEQ ID NO: 1845377 - DNA, 25 bp, Homo sapien
aatagctgagggcaatgccaccctc

SEQ ID NO: 1845378 - DNA, 25 bp, Homo sapien
cccaaaagcttgtatgggacaacca

SEQ ID NO: 1845379 - DNA, 25 bp, Homo sapien
caaaagcttgtatgggacaaccaaa

SEQ ID NO: 1845380 - DNA, 25 bp, Homo sapien
aagcttgtatgggacaaccaaaagg

SEQ ID NO: 1845381 - DNA, 25 bp, Homo sapien
tccccaaaagcttgtatgggacaac

SEQ ID NO: 1845382 - DNA, 25 bp, Homo sapien
gaggtggcggccctcgatggtcatg

SEQ ID NO: 1845383 - DNA, 25 bp, Homo sapien
tggcggccctcgatggtcatggcct

SEQ ID NO: 1845384 - DNA, 25 bp, Homo sapien
ccctcgatggtcatggcctcggtga

SEQ ID NO: 1845385 - DNA, 25 bp, Homo sapien
tggccacggtgctcatgaggtggcg

SEQ ID NO: 1845386 - DNA, 25 bp, Homo sapien
acttccacccatgcttccgccaggg

SEQ ID NO: 1845387 - DNA, 25 bp, Homo sapien
ttcatgggggcgatgcccacttccc

SEQ ID NO: 1845388 - DNA, 25 bp, Homo sapien
ttcgtggggacgatgtcctccaccc

SEQ ID NO: 1845389 - DNA, 25 bp, Homo sapien
ttcgtgggggcgatgtccaccaccg

SEQ ID NO: 1845390 - DNA, 25 bp, Homo sapien
gccttcgtgaggacgatgcccacca

SEQ ID NO: 1845391 - DNA, 25 bp, Homo sapien
tcctccagagcgacctcctctggcg

SEQ ID NO: 1845392 - DNA, 25 bp, Homo sapien
accagggccttcgtgaggacgatgc

SEQ ID NO: 1845393 - DNA, 25 bp, Homo sapien
caccagggccccctcgtccatttgg

SEQ ID NO: 1845394 - DNA, 25 bp, Homo sapien
cgcattgggccaccccgcatagggt

SEQ ID NO: 1845395 - DNA, 25 bp, Homo sapien
gaggacccagaagacgtggacccac

SEQ ID NO: 1845396 - DNA, 25 bp, Homo sapien
cctctatggtatggtccaggacctg

SEQ ID NO: 1845397 - DNA, 25 bp, Homo sapien
cgggccatcccagaagggatcacct

SEQ ID NO: 1845398 - DNA, 25 bp, Homo sapien
ccattggctattgggccagggccta

SEQ ID NO: 1845399 - DNA, 25 bp, Homo sapien
accattggctattgggccagggcct

SEQ ID NO: 1845400 - DNA, 25 bp, Homo sapien
caggtccagggggaaagtgctgcat

SEQ ID NO: 1845401 - DNA, 25 bp, Homo sapien
cagggggaaagtgctgcatgccctt

SEQ ID NO: 1845402 - DNA, 25 bp, Homo sapien
ccatttcttgcctagtggccacagc

SEQ ID NO: 1845403 - DNA, 25 bp, Homo sapien
cccatttcttgcctagtggccacag

SEQ ID NO: 1845404 - DNA, 25 bp, Homo sapien
tcccatttcttgcctagtggccaca

SEQ ID NO: 1845405 - DNA, 25 bp, Homo sapien
gatcttgtccgaatagtctggttgt

SEQ ID NO: 1845406 - DNA, 25 bp, Homo sapien
agtctggttgtttcagtagttcctc

SEQ ID NO: 1845407 - DNA, 25 bp, Homo sapien
tctgcttgatcttgtccgaatagtc

SEQ ID NO: 1845408 - DNA, 25 bp, Homo sapien
ccagcatctgcttgatcttgtccga

SEQ ID NO: 1845409 - DNA, 25 bp, Homo sapien
ttgggggccctttccagcacccatg

SEQ ID NO: 1845410 - DNA, 25 bp, Homo sapien
catgcttcccataagattggccaga

SEQ ID NO: 1845411 - DNA, 25 bp, Homo sapien
tgaggatctcttggacattaatgcc

SEQ ID NO: 1845412 - DNA, 25 bp, Homo sapien
gaggcaacttggagcctcctgcccc

SEQ ID NO: 1845413 - DNA, 25 bp, Homo sapien
tacggagtctcatccatggaacact

SEQ ID NO: 1845414 - DNA, 25 bp, Homo sapien
ttccagagtctcaacatacggagtc

SEQ ID NO: 1845415 - DNA, 25 bp, Homo sapien
caacatacggagtctcatccatgga

SEQ ID NO: 1845416 - DNA, 25 bp, Homo sapien
caggttccagagtctcaacatacgg

SEQ ID NO: 1845417 - DNA, 25 bp, Homo sapien
ctcatatgaaagatgcaccgaattc

SEQ ID NO: 1845418 - DNA, 25 bp, Homo sapien
tatgaaagatgcaccgaattcaatg

SEQ ID NO: 1845419 - DNA, 25 bp, Homo sapien
gaaagatgcaccgaattcaatgacc

SEQ ID NO: 1845420 - DNA, 25 bp, Homo sapien
gatgcaccgaattcaatgaccatca

SEQ ID NO: 1845421 - DNA, 25 bp, Homo sapien
ctcatctagggggatgagtttaggg

SEQ ID NO: 1845422 - DNA, 25 bp, Homo sapien
tatgggctcgtagggctcaggatca

SEQ ID NO: 1845423 - DNA, 25 bp, Homo sapien
gggtatgggctcgtagggctcagga

SEQ ID NO: 1845424 - DNA, 25 bp, Homo sapien
tgagtttagggggtatgggctcgta

SEQ ID NO: 1845425 - DNA, 25 bp, Homo sapien
tgttatcatggctcagacgccgcgc

SEQ ID NO: 1845426 - DNA, 25 bp, Homo sapien
gacgccgcgctgtctcaaatgcatg

SEQ ID NO: 1845427 - DNA, 25 bp, Homo sapien
tcccgctcagcctggatatatcgct

SEQ ID NO: 1845428 - DNA, 25 bp, Homo sapien
tgacagtatctctcgcttagcggcc

SEQ ID NO: 1845429 - DNA, 25 bp, Homo sapien
tcagttggttaggatctccaggact

SEQ ID NO: 1845430 - DNA, 25 bp, Homo sapien
ttccgggtcagttggttaggatctc

SEQ ID NO: 1845431 - DNA, 25 bp, Homo sapien
tcttcctgcctttccgggtcagttg

SEQ ID NO: 1845432 - DNA, 25 bp, Homo sapien
atctccaggactctccactggcttg

SEQ ID NO: 1845433 - DNA, 25 bp, Homo sapien
tgtgcttggttctgtgctcgttttc

SEQ ID NO: 1845434 - DNA, 25 bp, Homo sapien
gacggtctgcgtccattgcctcaga

SEQ ID NO: 1845435 - DNA, 25 bp, Homo sapien
ggtgcctggacggtctgcgtccatt

SEQ ID NO: 1845436 - DNA, 25 bp, Homo sapien
ttctgtgctcgttttcccttcaaag

SEQ ID NO: 1845437 - DNA, 25 bp, Homo sapien
ggcaaaacgcctcttgttgtcctcc

SEQ ID NO: 1845438 - DNA, 25 bp, Homo sapien
caacagttcctatataaaggaagac

SEQ ID NO: 1845439 - DNA, 25 bp, Homo sapien
gcaccagtctatatccaaggcaaaa

SEQ ID NO: 1845440 - DNA, 25 bp, Homo sapien
caaggcaattagtccagggtcccag

SEQ ID NO: 1845441 - DNA, 25 bp, Homo sapien
ggcagccgtaggtgacagtactttt

SEQ ID NO: 1845442 - DNA, 25 bp, Homo sapien
ttggcagccgtaggtgacagtactt

SEQ ID NO: 1845443 - DNA, 25 bp, Homo sapien
tggcagccgtaggtgacagtacttt

SEQ ID NO: 1845444 - DNA, 25 bp, Homo sapien
cttggcagccgtaggtgacagtact

SEQ ID NO: 1845445 - DNA, 25 bp, Homo sapien
aagtttgctcctaattcaaagtaca

SEQ ID NO: 1845446 - DNA, 25 bp, Homo sapien
gctcctaattcaaagtacatcttcc

SEQ ID NO: 1845447 - DNA, 25 bp, Homo sapien
tcctaattcaaagtacatcttcccc

SEQ ID NO: 1845448 - DNA, 25 bp, Homo sapien
gtttgctcctaattcaaagtacatc

SEQ ID NO: 1845449 - DNA, 25 bp, Homo sapien
gctgtggcgggatgatcttcacttt

SEQ ID NO: 1845450 - DNA, 25 bp, Homo sapien
cattaggtgttgtgttgagtggctt

SEQ ID NO: 1845451 - DNA, 25 bp, Homo sapien
ctttgatctctttggtggcattagg

SEQ ID NO: 1845452 - DNA, 25 bp, Homo sapien
ttctctgcagggggagtggcatctc

SEQ ID NO: 1845453 - DNA, 25 bp, Homo sapien
cagagcctgagaatatggtccatac

SEQ ID NO: 1845454 - DNA, 25 bp, Homo sapien
gtgtccacagatccaccccattcag

SEQ ID NO: 1845455 - DNA, 25 bp, Homo sapien
tcctgctcccttgtgtccacagatc

SEQ ID NO: 1845456 - DNA, 25 bp, Homo sapien
agatccaccccattcagagcctgag

SEQ ID NO: 1845457 - DNA, 25 bp, Homo sapien
ctctgacgtttgagggggatgggtt

SEQ ID NO: 1845458 - DNA, 25 bp, Homo sapien
acaggcaccaaggatggtgtctcca

SEQ ID NO: 1845459 - DNA, 25 bp, Homo sapien
taaggttgtacttgtcagaaaccac

SEQ ID NO: 1845460 - DNA, 25 bp, Homo sapien
caggcaccaaggatggtgtctccag

SEQ ID NO: 1845461 - DNA, 25 bp, Homo sapien
tggaacggaacttggcatgactggg

SEQ ID NO: 1845462 - DNA, 25 bp, Homo sapien
aacggaacttggcatgactgggtgc

SEQ ID NO: 1845463 - DNA, 25 bp, Homo sapien
cagtggaacggaacttggcatgact

SEQ ID NO: 1845464 - DNA, 25 bp, Homo sapien
acggaacttggcatgactgggtgct

SEQ ID NO: 1845465 - DNA, 25 bp, Homo sapien
cgctcaggaagggtagttcgacttt

SEQ ID NO: 1845466 - DNA, 25 bp, Homo sapien
tctgtcaaaggtcgctcaggaaggg

SEQ ID NO: 1845467 - DNA, 25 bp, Homo sapien
tcaaaggtcgctcaggaagggtagt

SEQ ID NO: 1845468 - DNA, 25 bp, Homo sapien
ccttcatctttacgtttcttcttat

SEQ ID NO: 1845469 - DNA, 25 bp, Homo sapien
actgtcagaggtgaagcagactggg

SEQ ID NO: 1845470 - DNA, 25 bp, Homo sapien
cactgtcagaggtgaagcagactgg

SEQ ID NO: 1845471 - DNA, 25 bp, Homo sapien
tcagaggtgaagcagactgggagca

SEQ ID NO: 1845472 - DNA, 25 bp, Homo sapien
agaggtgaagcagactgggagcacc

SEQ ID NO: 1845473 - DNA, 25 bp, Homo sapien
catccagtcgctgacaaggactgag

SEQ ID NO: 1845474 - DNA, 25 bp, Homo sapien
aaggactgaggccaatttccggagc

SEQ ID NO: 1845475 - DNA, 25 bp, Homo sapien
tctgagagcggatgacagccatcca

SEQ ID NO: 1845476 - DNA, 25 bp, Homo sapien
tactgctctgagagcggatgacagc

SEQ ID NO: 1845477 - DNA, 25 bp, Homo sapien
ctgcttcaccagtttagctgtgttg

SEQ ID NO: 1845478 - DNA, 25 bp, Homo sapien
atcctcacttgacttgctcagctgc

SEQ ID NO: 1845479 - DNA, 25 bp, Homo sapien
catcctcacttgacttgctcagctg

SEQ ID NO: 1845480 - DNA, 25 bp, Homo sapien
gcttcaccagtttagctgtgttgtt

SEQ ID NO: 1845481 - DNA, 25 bp, Homo sapien
cagccgccacacacctattaaagga

SEQ ID NO: 1845482 - DNA, 25 bp, Homo sapien
catccattagactaaaccaaaaaag

SEQ ID NO: 1845483 - DNA, 25 bp, Homo sapien
catcagtcagtttgagtttttcatc

SEQ ID NO: 1845484 - DNA, 25 bp, Homo sapien
gattacagccacatcagtcagtttg

SEQ ID NO: 1845485 - DNA, 25 bp, Homo sapien
gtttgtagccgccaacgtcaataaa

SEQ ID NO: 1845486 - DNA, 25 bp, Homo sapien
tacgtcagccaattgttaagaagtt

SEQ ID NO: 1845487 - DNA, 25 bp, Homo sapien
ctacagtgagcggtagatgctgcag

SEQ ID NO: 1845488 - DNA, 25 bp, Homo sapien
ctgcagggtcagtagaatttgctgg

SEQ ID NO: 1845489 - DNA, 25 bp, Homo sapien
ccaatatttctggtgaacgggtctg

SEQ ID NO: 1845490 - DNA, 25 bp, Homo sapien
ttgaccaatatttctggtgaacggg

SEQ ID NO: 1845491 - DNA, 25 bp, Homo sapien
tatttctggtgaacgggtctgcagg

SEQ ID NO: 1845492 - DNA, 25 bp, Homo sapien
gaacgggtctgcaggagaatgttca

SEQ ID NO: 1845493 - DNA, 25 bp, Homo sapien
catctttcgtgcttccttcatcaaa

SEQ ID NO: 1845494 - DNA, 25 bp, Homo sapien
ttgacttccccatctcggttaagga

SEQ ID NO: 1845495 - DNA, 25 bp, Homo sapien
ccatctcggttaaggaagctgtcca

SEQ ID NO: 1845496 - DNA, 25 bp, Homo sapien
ccttgagaagttctttggggtctat

SEQ ID NO: 1845497 - DNA, 25 bp, Homo sapien
gaagatcttggaaatcccatccaca

SEQ ID NO: 1845498 - DNA, 25 bp, Homo sapien
ggagtgaggtagcaaccccctggcc

SEQ ID NO: 1845499 - DNA, 25 bp, Homo sapien
gtgaggtagcaaccccctggcctac

SEQ ID NO: 1845500 - DNA, 25 bp, Homo sapien
gactgcagaacatacagaaggtggg

SEQ ID NO: 1845501 - DNA, 25 bp, Homo sapien
cttgactgcagaacatacagaaggt

SEQ ID NO: 1845502 - DNA, 25 bp, Homo sapien
ccagcatagctaaagttattccaca

SEQ ID NO: 1845503 - DNA, 25 bp, Homo sapien
taaaaattctgtgcaagtcagagct

SEQ ID NO: 1845504 - DNA, 25 bp, Homo sapien
caatgaaacaggactgaattggttc

SEQ ID NO: 1845505 - DNA, 25 bp, Homo sapien
gataaacgtctgtgacaccaactcc

SEQ ID NO: 1845506 - DNA, 25 bp, Homo sapien
ggtgattcatcacaaggtcatagct

SEQ ID NO: 1845507 - DNA, 25 bp, Homo sapien
gatgcaaaatgatataccaccctga

SEQ ID NO: 1845508 - DNA, 25 bp, Homo sapien
tggccacaaactacaaggatcaggt

SEQ ID NO: 1845509 - DNA, 25 bp, Homo sapien
aatggatgtggttcccctagtagac

SEQ ID NO: 1845510 - DNA, 25 bp, Homo sapien
tgcaacgccgcttggaagacaaaag

SEQ ID NO: 1845511 - DNA, 25 bp, Homo sapien
tgggtcaagacacaacctgcaacgc

SEQ ID NO: 1845512 - DNA, 25 bp, Homo sapien
gaaagtcgccatattgaagcaggga

SEQ ID NO: 1845513 - DNA, 25 bp, Homo sapien
atttgcaacggaggttcaaccggct

SEQ ID NO: 1845514 - DNA, 25 bp, Homo sapien
tgctgctaaccagaggaaggtaacc

SEQ ID NO: 1845515 - DNA, 25 bp, Homo sapien
taatctggcaaattgaaaggcaccc

SEQ ID NO: 1845516 - DNA, 25 bp, Homo sapien
caagactgtttagacccacaggccc

SEQ ID NO: 1845517 - DNA, 25 bp, Homo sapien
cagtctggaaattggctggattacc

SEQ ID NO: 1845518 - DNA, 25 bp, Homo sapien
ttttgcgacgtcagcacctcgggct

SEQ ID NO: 1845519 - DNA, 25 bp, Homo sapien
tatccaatttttttgcgacgtcagc

SEQ ID NO: 1845520 - DNA, 25 bp, Homo sapien
caaccaggacccaaaactcaattat

SEQ ID NO: 1845521 - DNA, 25 bp, Homo sapien
cgacgtcagcacctcgggctcaggg

SEQ ID NO: 1845522 - DNA, 25 bp, Homo sapien
tatgtagtgacggtccttcggccac

SEQ ID NO: 1845523 - DNA, 25 bp, Homo sapien
tcaagggcttagatgttgctgcggc

SEQ ID NO: 1845524 - DNA, 25 bp, Homo sapien
gatttcaagtcccaagcagcgtggg

SEQ ID NO: 1845525 - DNA, 25 bp, Homo sapien
ggccggcctgtctttctccgagaaa

SEQ ID NO: 1845526 - DNA, 25 bp, Homo sapien
tcagtacgggttgcttcaaaacact

SEQ ID NO: 1845527 - DNA, 25 bp, Homo sapien
cacaagggagaaagatgtaatcagt

SEQ ID NO: 1845528 - DNA, 25 bp, Homo sapien
aagatgtaatcagtacgggttgctt

SEQ ID NO: 1845529 - DNA, 25 bp, Homo sapien
gcttcaaaacactcacaaatgccat

SEQ ID NO: 1845530 - DNA, 25 bp, Homo sapien
tctccgcaaaattttacccactaga

SEQ ID NO: 1845531 - DNA, 25 bp, Homo sapien
cactagacgacaaagtaggcaaact

SEQ ID NO: 1845532 - DNA, 25 bp, Homo sapien
taagccgtggctctcaaatgaaccc

SEQ ID NO: 1845533 - DNA, 25 bp, Homo sapien
cagatccaacgctctccgcaaaatt

SEQ ID NO: 1845534 - DNA, 25 bp, Homo sapien
gcccgctcgggtggagtcttttata

SEQ ID NO: 1845535 - DNA, 25 bp, Homo sapien
gcgagacattatacgcgaggcgtga

SEQ ID NO: 1845536 - DNA, 25 bp, Homo sapien
gaaacgcccttgtcgcgagacatta

SEQ ID NO: 1845537 - DNA, 25 bp, Homo sapien
caacgcgcccaaacgtgctagtgaa

SEQ ID NO: 1845538 - DNA, 25 bp, Homo sapien
catgcgcactgagaggataccgcta

SEQ ID NO: 1845539 - DNA, 25 bp, Homo sapien
tagaaacctaagagcgcatgcgcac

SEQ ID NO: 1845540 - DNA, 25 bp, Homo sapien
gaacatttctcacccaggattggta

SEQ ID NO: 1845541 - DNA, 25 bp, Homo sapien
tctaagagtcgtagtgactggccaa

SEQ ID NO: 1845542 - DNA, 25 bp, Homo sapien
gttcttggtggggcacggtgagata

SEQ ID NO: 1845543 - DNA, 25 bp, Homo sapien
ctctctggaggttcttggtggggca

SEQ ID NO: 1845544 - DNA, 25 bp, Homo sapien
tctggaggttcttggtggggcacgg

SEQ ID NO: 1845545 - DNA, 25 bp, Homo sapien
ggaggttcttggtggggcacggtga

SEQ ID NO: 1845546 - DNA, 25 bp, Homo sapien
cattggccaagcgaagccatgtctc

SEQ ID NO: 1845547 - DNA, 25 bp, Homo sapien
ccaggattgtgaaggccaaattaaa

SEQ ID NO: 1845548 - DNA, 25 bp, Homo sapien
cacttgtagctacttggcattggcc

SEQ ID NO: 1845549 - DNA, 25 bp, Homo sapien
tagttatcaaagtagcatcctggcc

SEQ ID NO: 1845550 - DNA, 25 bp, Homo sapien
ctctgaatgtgtgctagatcaggtg

SEQ ID NO: 1845551 - DNA, 25 bp, Homo sapien
ctccctaccctctgaatgtgtgcta

SEQ ID NO: 1845552 - DNA, 25 bp, Homo sapien
tcagtgttgtctgaataaagtgtga

SEQ ID NO: 1845553 - DNA, 25 bp, Homo sapien
tcttctctcagtgttgtctgaataa

SEQ ID NO: 1845554 - DNA, 25 bp, Homo sapien
aaacctggcccgagaccttgaagag

SEQ ID NO: 1845555 - DNA, 25 bp, Homo sapien
gggacatactcaacgccaggttcat

SEQ ID NO: 1845556 - DNA, 25 bp, Homo sapien
tcttatcgtatgaactggacaccag

SEQ ID NO: 1845557 - DNA, 25 bp, Homo sapien
gaaacctgcaggaacgtcgcagcac

SEQ ID NO: 1845558 - DNA, 25 bp, Homo sapien
tccactcccggaagatcatgtacca

SEQ ID NO: 1845559 - DNA, 25 bp, Homo sapien
tgtcgttgcacccattcagccttca

SEQ ID NO: 1845560 - DNA, 25 bp, Homo sapien
ggccgagagattcgtagccctgctg

SEQ ID NO: 1845561 - DNA, 25 bp, Homo sapien
ggaggctgtaacttgcgcaagcgca

SEQ ID NO: 1845562 - DNA, 25 bp, Homo sapien
catcgtctagataaagtgagtccta

SEQ ID NO: 1845563 - DNA, 25 bp, Homo sapien
gaattcagctttgggaccagtcacc

SEQ ID NO: 1845564 - DNA, 25 bp, Homo sapien
gagccagaacctgacttaaacctgt

SEQ ID NO: 1845565 - DNA, 25 bp, Homo sapien
gcccaggtgatctaatatgtagcag

SEQ ID NO: 1845566 - DNA, 25 bp, Homo sapien
aggtggaggcagccaagaatctcag

SEQ ID NO: 1845567 - DNA, 25 bp, Homo sapien
catctcatgctgtgtaaagctgctg

SEQ ID NO: 1845568 - DNA, 25 bp, Homo sapien
aagtttaactgactatatgagatag

SEQ ID NO: 1845569 - DNA, 25 bp, Homo sapien
catgctgtgtaaagctgctgtgtaa

SEQ ID NO: 1845570 - DNA, 25 bp, Homo sapien
ctggtgtcaggttctgtttacgtcc

SEQ ID NO: 1845571 - DNA, 25 bp, Homo sapien
tgtcaggttctgtttacgtccttct

SEQ ID NO: 1845572 - DNA, 25 bp, Homo sapien
tggtgtcaggttctgtttacgtcct

SEQ ID NO: 1845573 - DNA, 25 bp, Homo sapien
gtgtcaggttctgtttacgtccttc

SEQ ID NO: 1845574 - DNA, 25 bp, Homo sapien
cctagctcttctcgtgttttgccta

SEQ ID NO: 1845575 - DNA, 25 bp, Homo sapien
tagcatggggatcttctagctcctt

SEQ ID NO: 1845576 - DNA, 25 bp, Homo sapien
gcattttcttagcatggggatcttc

SEQ ID NO: 1845577 - DNA, 25 bp, Homo sapien
tagctccttggccttataataatgg

SEQ ID NO: 1845578 - DNA, 25 bp, Homo sapien
cgagtcaaccgtgccgtgtggtaaa

SEQ ID NO: 1845579 - DNA, 25 bp, Homo sapien
gccagcgtggctgttgctcaaagag

SEQ ID NO: 1845580 - DNA, 25 bp, Homo sapien
tgtgcggtagccactccgagtcaac

SEQ ID NO: 1845581 - DNA, 25 bp, Homo sapien
caagttcgtggtagagcagccagcg

SEQ ID NO: 1845582 - DNA, 25 bp, Homo sapien
tcggcgcatcgatctgaactgtaca

SEQ ID NO: 1845583 - DNA, 25 bp, Homo sapien
ctgggaagagtaaccactctcagcc

SEQ ID NO: 1845584 - DNA, 25 bp, Homo sapien
tggcaggaactgagaccaacttcca

SEQ ID NO: 1845585 - DNA, 25 bp, Homo sapien
gttctcatagcaccactgggaagag

SEQ ID NO: 1845586 - DNA, 25 bp, Homo sapien
gagaaagaagttgacacgggcattg

SEQ ID NO: 1845587 - DNA, 25 bp, Homo sapien
catttagcagaaccaggtggtcacc

SEQ ID NO: 1845588 - DNA, 25 bp, Homo sapien
cagcatggacgaccttgtcctttgg

SEQ ID NO: 1845589 - DNA, 25 bp, Homo sapien
cctttggtcggtagaagatggagtt

SEQ ID NO: 1845590 - DNA, 25 bp, Homo sapien
cagaggctaagatcattttggacag

SEQ ID NO: 1845591 - DNA, 25 bp, Homo sapien
ttctcagaggctaagatcattttgg

SEQ ID NO: 1845592 - DNA, 25 bp, Homo sapien
gaggctaagatcattttggacagca

SEQ ID NO: 1845593 - DNA, 25 bp, Homo sapien
ctcagaggctaagatcattttggac

SEQ ID NO: 1845594 - DNA, 25 bp, Homo sapien
tccaggaaatcaaagtgcattaggt

SEQ ID NO: 1845595 - DNA, 25 bp, Homo sapien
tcaaagtgcattaggtcatggatcc

SEQ ID NO: 1845596 - DNA, 25 bp, Homo sapien
caggaaatcaaagtgcattaggtca

SEQ ID NO: 1845597 - DNA, 25 bp, Homo sapien
agcagcagtgtctcatatggtggag

SEQ ID NO: 1845598 - DNA, 25 bp, Homo sapien
tcctcaagctcgtgctgataggccc

SEQ ID NO: 1845599 - DNA, 25 bp, Homo sapien
tatacaggcggaagcacttccctgc

SEQ ID NO: 1845600 - DNA, 25 bp, Homo sapien
taagctcttgagcagcaacacgaca

SEQ ID NO: 1845601 - DNA, 25 bp, Homo sapien
tgctgataggcccaggcggtataca

SEQ ID NO: 1845602 - DNA, 25 bp, Homo sapien
agtgagcgattccatgcctgtgcgg

SEQ ID NO: 1845603 - DNA, 25 bp, Homo sapien
cctcaatggtgagtgatgtctcagc

SEQ ID NO: 1845604 - DNA, 25 bp, Homo sapien
tcagcaatgttcgttgccacaacca

SEQ ID NO: 1845605 - DNA, 25 bp, Homo sapien
tctgcttacagaaccctggatccag

SEQ ID NO: 1845606 - DNA, 25 bp, Homo sapien
ctgagtgataggatatggggtcacc

SEQ ID NO: 1845607 - DNA, 25 bp, Homo sapien
tcctcactggatcatttgcatcagc

SEQ ID NO: 1845608 - DNA, 25 bp, Homo sapien
tagaattcaatccaagccccttaaa

SEQ ID NO: 1845609 - DNA, 25 bp, Homo sapien
tgtaagagcctcctaacgtgtatcc

SEQ ID NO: 1845610 - DNA, 25 bp, Homo sapien
agtggcttcctatcctactctagaa

SEQ ID NO: 1845611 - DNA, 25 bp, Homo sapien
ttttcactactagttgtgggaagca

SEQ ID NO: 1845612 - DNA, 25 bp, Homo sapien
actactagttgtgggaagcataggg

SEQ ID NO: 1845613 - DNA, 25 bp, Homo sapien
ggcacacagctttttcactactagt

SEQ ID NO: 1845614 - DNA, 25 bp, Homo sapien
cagctttttcactactagttgtggg

SEQ ID NO: 1845615 - DNA, 25 bp, Homo sapien
tcccggattttggagcccaggcggc

SEQ ID NO: 1845616 - DNA, 25 bp, Homo sapien
gattggcataaatgggcagcaccag

SEQ ID NO: 1845617 - DNA, 25 bp, Homo sapien
gaagatacgggcctgcatgtcagag

SEQ ID NO: 1845618 - DNA, 25 bp, Homo sapien
caggagctcccggattttggagccc

SEQ ID NO: 1845619 - DNA, 25 bp, Homo sapien
ggtcacatggatctgcaacacagat

SEQ ID NO: 1845620 - DNA, 25 bp, Homo sapien
tctgcaacacagatactacacaagc

SEQ ID NO: 1845621 - DNA, 25 bp, Homo sapien
gatactacacaagcttccaagtagt

SEQ ID NO: 1845622 - DNA, 25 bp, Homo sapien
catggatctgcaacacagatactac

SEQ ID NO: 1845623 - DNA, 25 bp, Homo sapien
ctcaggtcggaagcgagcaacatcc

SEQ ID NO: 1845624 - DNA, 25 bp, Homo sapien
gaagccaccaggaccttgagctcag

SEQ ID NO: 1845625 - DNA, 25 bp, Homo sapien
gatgtccacaggaaacctgcgtccg

SEQ ID NO: 1845626 - DNA, 25 bp, Homo sapien
cagtgtccattgtggctgaagccac

SEQ ID NO: 1845627 - DNA, 25 bp, Homo sapien
gatgtagaggctgcacactgaggcc

SEQ ID NO: 1845628 - DNA, 25 bp, Homo sapien
caatgagggaagagcgctaggcaat

SEQ ID NO: 1845629 - DNA, 25 bp, Homo sapien
gccataccctctagttcagtcaaga

SEQ ID NO: 1845630 - DNA, 25 bp, Homo sapien
taggcaatgcagtatcagacaccag

SEQ ID NO: 1845631 - DNA, 25 bp, Homo sapien
tcttccaagaccagaaattcacagc

SEQ ID NO: 1845632 - DNA, 25 bp, Homo sapien
tgtgatggtgaagtccccagccatt

SEQ ID NO: 1845633 - DNA, 25 bp, Homo sapien
caggctggctcgatgggcaaaaaca

SEQ ID NO: 1845634 - DNA, 25 bp, Homo sapien
tcagacactcttgcgctggctggct

SEQ ID NO: 1845635 - DNA, 25 bp, Homo sapien
ctcagagaggaactcccggagaagc

SEQ ID NO: 1845636 - DNA, 25 bp, Homo sapien
ggctcagagaggaactcccggagaa

SEQ ID NO: 1845637 - DNA, 25 bp, Homo sapien
atctgtcatgtagcggaggacagtt

SEQ ID NO: 1845638 - DNA, 25 bp, Homo sapien
ccatctgtcatgtagcggaggacag

SEQ ID NO: 1845639 - DNA, 25 bp, Homo sapien
cctcaaagcggatgctgtagccaac

SEQ ID NO: 1845640 - DNA, 25 bp, Homo sapien
ctgatgtgcagtcctcaaagcggat

SEQ ID NO: 1845641 - DNA, 25 bp, Homo sapien
tgcagtcctcaaagcggatgctgta

SEQ ID NO: 1845642 - DNA, 25 bp, Homo sapien
ctctgatgtgcagtcctcaaagcgg

SEQ ID NO: 1845643 - DNA, 25 bp, Homo sapien
tggtcaagggaaccattagcaacca

SEQ ID NO: 1845644 - DNA, 25 bp, Homo sapien
ggtcaagggaaccattagcaaccaa

SEQ ID NO: 1845645 - DNA, 25 bp, Homo sapien
ctggtcaagggaaccattagcaacc

SEQ ID NO: 1845646 - DNA, 25 bp, Homo sapien
gtcaagggaaccattagcaaccaag

SEQ ID NO: 1845647 - DNA, 25 bp, Homo sapien
gacctgagggaactgtagactgagt

SEQ ID NO: 1845648 - DNA, 25 bp, Homo sapien
caccaagacttctgctgtagggacc

SEQ ID NO: 1845649 - DNA, 25 bp, Homo sapien
agggaactgtagactgagtcacaga

SEQ ID NO: 1845650 - DNA, 25 bp, Homo sapien
gcaccaagacttctgctgtagggac

SEQ ID NO: 1845651 - DNA, 25 bp, Homo sapien
ggggttgggtgcaggcaatcttcat

SEQ ID NO: 1845652 - DNA, 25 bp, Homo sapien
tgggtgcaggcaatcttcataccct

SEQ ID NO: 1845653 - DNA, 25 bp, Homo sapien
ggcggccacactcatggcagccact

SEQ ID NO: 1845654 - DNA, 25 bp, Homo sapien
gttgggtgcaggcaatcttcatacc

SEQ ID NO: 1845655 - DNA, 25 bp, Homo sapien
cctgagcctgtctcgccttcaatga

SEQ ID NO: 1845656 - DNA, 25 bp, Homo sapien
tctcgaaatgggaacaccgggaggc

SEQ ID NO: 1845657 - DNA, 25 bp, Homo sapien
tttgcaatagcagccaggagctcct

SEQ ID NO: 1845658 - DNA, 25 bp, Homo sapien
gaggacttggtgatttgcaatagca

SEQ ID NO: 1845659 - DNA, 25 bp, Homo sapien
cgggccccaaacttcagggacgctg

SEQ ID NO: 1845660 - DNA, 25 bp, Homo sapien
agtggcccggacaaactcaatggtc

SEQ ID NO: 1845661 - DNA, 25 bp, Homo sapien
ccagcaccagttgatacttgggctc

SEQ ID NO: 1845662 - DNA, 25 bp, Homo sapien
ccactagatccacagctcgggctgg

SEQ ID NO: 1845663 - DNA, 25 bp, Homo sapien
tatttgagctcctgccgctcgtgcc

SEQ ID NO: 1845664 - DNA, 25 bp, Homo sapien
gcttagccaggtactctcggcgaga

SEQ ID NO: 1845665 - DNA, 25 bp, Homo sapien
tcctcgggtttccttgggcatgtgg

SEQ ID NO: 1845666 - DNA, 25 bp, Homo sapien
catgtggtagcgattggtggcctcc

SEQ ID NO: 1845667 - DNA, 25 bp, Homo sapien
taaaacgccatgatgtctaagactc

SEQ ID NO: 1845668 - DNA, 25 bp, Homo sapien
ggtacacactgatgtacttagagat

SEQ ID NO: 1845669 - DNA, 25 bp, Homo sapien
gagcattctgattttagaggacaat

SEQ ID NO: 1845670 - DNA, 25 bp, Homo sapien
tcctgactgtgacaagagcattctg

SEQ ID NO: 1845671 - DNA, 25 bp, Homo sapien
ttccggtcttcctcggccatcttga

SEQ ID NO: 1845672 - DNA, 25 bp, Homo sapien
ctcggccatcttgaggcgcttctga

SEQ ID NO: 1845673 - DNA, 25 bp, Homo sapien
catcttgaggcgcttctgagcctct

SEQ ID NO: 1845674 - DNA, 25 bp, Homo sapien
tcttcctcggccatcttgaggcgct

SEQ ID NO: 1845675 - DNA, 25 bp, Homo sapien
gtccgatccttgtcccgctgtcgaa

SEQ ID NO: 1845676 - DNA, 25 bp, Homo sapien
tctgaccgttccaggacatttcgag

SEQ ID NO: 1845677 - DNA, 25 bp, Homo sapien
gcaaaggcatcacgctcctccaggt

SEQ ID NO: 1845678 - DNA, 25 bp, Homo sapien
gacatttcgagtccgatccttgtcc

SEQ ID NO: 1845679 - DNA, 25 bp, Homo sapien
gcttctctgtctgctgtttactccc

SEQ ID NO: 1845680 - DNA, 25 bp, Homo sapien
ggcttctctgtctgctgtttactcc

SEQ ID NO: 1845681 - DNA, 25 bp, Homo sapien
cttctctgtctgctgtttactcccc

SEQ ID NO: 1845682 - DNA, 25 bp, Homo sapien
ctggcttctctgtctgctgtttact

SEQ ID NO: 1845683 - DNA, 25 bp, Homo sapien
ttcctcacgcttcttcctgaggtgt

SEQ ID NO: 1845684 - DNA, 25 bp, Homo sapien
cttcctcacgcttcttcctgaggtg

SEQ ID NO: 1845685 - DNA, 25 bp, Homo sapien
aacctataagatcggttcttctcca

SEQ ID NO: 1845686 - DNA, 25 bp, Homo sapien
cagtaacctataagatcggttcttc

SEQ ID NO: 1845687 - DNA, 25 bp, Homo sapien
tccagtaacctataagatcggttct

SEQ ID NO: 1845688 - DNA, 25 bp, Homo sapien
cttccagtaacctataagatcggtt

SEQ ID NO: 1845689 - DNA, 25 bp, Homo sapien
cagtgtctcgtaggcgctgcacgaa

SEQ ID NO: 1845690 - DNA, 25 bp, Homo sapien
taccgatcagaaactgggcgacgtg

SEQ ID NO: 1845691 - DNA, 25 bp, Homo sapien
ttccagagtctcagggcgaagtccc

SEQ ID NO: 1845692 - DNA, 25 bp, Homo sapien
aactcctcggcagaggtgcagcgct

SEQ ID NO: 1845693 - DNA, 25 bp, Homo sapien
ggccctgaagcgtcgggcagccgcg

SEQ ID NO: 1845694 - DNA, 25 bp, Homo sapien
ctggagccctcggctggagcctcag

SEQ ID NO: 1845695 - DNA, 25 bp, Homo sapien
ctgctcccggccctgaagcgtcggg

SEQ ID NO: 1845696 - DNA, 25 bp, Homo sapien
cgcgctcactgctgggccggtcaga

SEQ ID NO: 1845697 - DNA, 25 bp, Homo sapien
caaagctgtcttcccgtaccgcgga

SEQ ID NO: 1845698 - DNA, 25 bp, Homo sapien
cttgggacctctaggatcttccgac

SEQ ID NO: 1845699 - DNA, 25 bp, Homo sapien
ggatcttccgacatcccaaagctgt

SEQ ID NO: 1845700 - DNA, 25 bp, Homo sapien
gacatcccaaagctgtcttcccgta

SEQ ID NO: 1845701 - DNA, 25 bp, Homo sapien
ggtacagagttaagagttccagcct

SEQ ID NO: 1845702 - DNA, 25 bp, Homo sapien
aacaggcaattgataaaggcggcac

SEQ ID NO: 1845703 - DNA, 25 bp, Homo sapien
ggacttggcgctcactcttggatga

SEQ ID NO: 1845704 - DNA, 25 bp, Homo sapien
gagagacgagtgcttaaatcccgag

SEQ ID NO: 1845705 - DNA, 25 bp, Homo sapien
ctgaatcttccgggctccaggatct

SEQ ID NO: 1845706 - DNA, 25 bp, Homo sapien
aaggagggaggtatatccctatgtt

SEQ ID NO: 1845707 - DNA, 25 bp, Homo sapien
ggaggtatatccctatgttggaaga

SEQ ID NO: 1845708 - DNA, 25 bp, Homo sapien
ggtatatccctatgttggaagatgg

SEQ ID NO: 1845709 - DNA, 25 bp, Homo sapien
cctcttcgtcgtcgggttgggctgc

SEQ ID NO: 1845710 - DNA, 25 bp, Homo sapien
cttcgtcgtcgggttgggctgctgg

SEQ ID NO: 1845711 - DNA, 25 bp, Homo sapien
ttcgtcgtcgggttgggctgctgga

SEQ ID NO: 1845712 - DNA, 25 bp, Homo sapien
ctcttcgtcgtcgggttgggctgct

SEQ ID NO: 1845713 - DNA, 25 bp, Homo sapien
tattggtacgtggtctccagggctg

SEQ ID NO: 1845714 - DNA, 25 bp, Homo sapien
tctccagggctgtctcgctgaagga

SEQ ID NO: 1845715 - DNA, 25 bp, Homo sapien
gtattggtacgtggtctccagggct

SEQ ID NO: 1845716 - DNA, 25 bp, Homo sapien
gctgtctcgctgaaggagatcttaa

SEQ ID NO: 1845717 - DNA, 25 bp, Homo sapien
tcaatatgacaccagtcaggcatgg

SEQ ID NO: 1845718 - DNA, 25 bp, Homo sapien
catatgaactacttggaaaggtcca

SEQ ID NO: 1845719 - DNA, 25 bp, Homo sapien
cctggcatctgtttgggaagacttg

SEQ ID NO: 1845720 - DNA, 25 bp, Homo sapien
tccctgagtcccctaatgaactgag

SEQ ID NO: 1845721 - DNA, 25 bp, Homo sapien
ggcagggtcctcctatctcctattc

SEQ ID NO: 1845722 - DNA, 25 bp, Homo sapien
tattcctgagccagtgtgttgcagc

SEQ ID NO: 1845723 - DNA, 25 bp, Homo sapien
ttgatggaattagcctgcaaacgag

SEQ ID NO: 1845724 - DNA, 25 bp, Homo sapien
gctgggacaaggcacccagtccctg

SEQ ID NO: 1845725 - DNA, 25 bp, Homo sapien
ggccagggggagtcatcctggctgc

SEQ ID NO: 1845726 - DNA, 25 bp, Homo sapien
ctctcttttgctaccctaaggggag

SEQ ID NO: 1845727 - DNA, 25 bp, Homo sapien
tttgttgcaagtctaacctctgacc

SEQ ID NO: 1845728 - DNA, 25 bp, Homo sapien
atgtgcacagggaagaagtgaggcc

SEQ ID NO: 1845729 - DNA, 25 bp, Homo sapien
cggctgagacggaggtagcccccca

SEQ ID NO: 1845730 - DNA, 25 bp, Homo sapien
cagaaccaagatctcctcggcagtt

SEQ ID NO: 1845731 - DNA, 25 bp, Homo sapien
tcctcggcagttgggtaccgcttct

SEQ ID NO: 1845732 - DNA, 25 bp, Homo sapien
accccttggcaaggcagctgcggct

SEQ ID NO: 1845733 - DNA, 25 bp, Homo sapien
aaggtgtgtccactgcggcgggggg

SEQ ID NO: 1845734 - DNA, 25 bp, Homo sapien
gtcgcagggggcacagaccgccggg

SEQ ID NO: 1845735 - DNA, 25 bp, Homo sapien
tgtgtccactgcggcggggggcccc

SEQ ID NO: 1845736 - DNA, 25 bp, Homo sapien
cacagaccgccgggggttgacggtg

SEQ ID NO: 1845737 - DNA, 25 bp, Homo sapien
ccccatagaacaggcggctcatgag

SEQ ID NO: 1845738 - DNA, 25 bp, Homo sapien
gcggctcatgaggggatccccagga

SEQ ID NO: 1845739 - DNA, 25 bp, Homo sapien
cttcaccccatagaacaggcggctc

SEQ ID NO: 1845740 - DNA, 25 bp, Homo sapien
tgggggctggagctccactgcttcc

SEQ ID NO: 1845741 - DNA, 25 bp, Homo sapien
ccttctcagcctccccttctccagc

SEQ ID NO: 1845742 - DNA, 25 bp, Homo sapien
gggctctcagaggcctgccctgagc

SEQ ID NO: 1845743 - DNA, 25 bp, Homo sapien
tcaggcctccagtcccagcgtcctc

SEQ ID NO: 1845744 - DNA, 25 bp, Homo sapien
agagcagcagttctgcagggctctc

SEQ ID NO: 1845745 - DNA, 25 bp, Homo sapien
cattctcgagccttcccggagttca

SEQ ID NO: 1845746 - DNA, 25 bp, Homo sapien
tctgctgactctggaggttctagtt

SEQ ID NO: 1845747 - DNA, 25 bp, Homo sapien
tgagtttgagcctctatgtccctgg

SEQ ID NO: 1845748 - DNA, 25 bp, Homo sapien
agtttctgagtttgagcctctatgt

SEQ ID NO: 1845749 - DNA, 25 bp, Homo sapien
ccttgtcagggtctcggacagctct

SEQ ID NO: 1845750 - DNA, 25 bp, Homo sapien
cttttggagctacccctggaactgg

SEQ ID NO: 1845751 - DNA, 25 bp, Homo sapien
tgcctccactcctgcggaactgttg

SEQ ID NO: 1845752 - DNA, 25 bp, Homo sapien
tcctgcggaactgttgccttgggcc

SEQ ID NO: 1845753 - DNA, 25 bp, Homo sapien
tccagttgtaccaaactctgttcct

SEQ ID NO: 1845754 - DNA, 25 bp, Homo sapien
tcttccgagtagtcttgtctttctt

SEQ ID NO: 1845755 - DNA, 25 bp, Homo sapien
ctccagttgtaccaaactctgttcc

SEQ ID NO: 1845756 - DNA, 25 bp, Homo sapien
cctccagttgtaccaaactctgttc

SEQ ID NO: 1845757 - DNA, 25 bp, Homo sapien
catttccatgcctctgacagtcggg

SEQ ID NO: 1845758 - DNA, 25 bp, Homo sapien
cgctcctgccggatgaatcggttct

SEQ ID NO: 1845759 - DNA, 25 bp, Homo sapien
gaggcctcaggctcaactcttgggc

SEQ ID NO: 1845760 - DNA, 25 bp, Homo sapien
ggctttgctctcgagactctgctag

SEQ ID NO: 1845761 - DNA, 25 bp, Homo sapien
gccgggctagcagctgtagcttcca

SEQ ID NO: 1845762 - DNA, 25 bp, Homo sapien
gaaggaccgcagactcatccgggtc

SEQ ID NO: 1845763 - DNA, 25 bp, Homo sapien
tgggacaggcgctcccgttctgctt

SEQ ID NO: 1845764 - DNA, 25 bp, Homo sapien
cgggtctggaggtccagcctctaca

SEQ ID NO: 1845765 - DNA, 25 bp, Homo sapien
ggtcgtcttgaggtgagggtaggga

SEQ ID NO: 1845766 - DNA, 25 bp, Homo sapien
gcagcacagggttaatgcgtattaa

SEQ ID NO: 1845767 - DNA, 25 bp, Homo sapien
agtccggattggaggcaatgagggc

SEQ ID NO: 1845768 - DNA, 25 bp, Homo sapien
gaccgtctctaggatgtgagaaaga

SEQ ID NO: 1845769 - DNA, 25 bp, Homo sapien
tgatgtgagaggaagagtccggatt

SEQ ID NO: 1845770 - DNA, 25 bp, Homo sapien
caggaatccctgaaaggaccaggag

SEQ ID NO: 1845771 - DNA, 25 bp, Homo sapien
ggaaggaaggaccaggaatccctga

SEQ ID NO: 1845772 - DNA, 25 bp, Homo sapien
tcagcgataccccagggaggctagt

SEQ ID NO: 1845773 - DNA, 25 bp, Homo sapien
gggcggagagcgaacaggtctagag

SEQ ID NO: 1845774 - DNA, 25 bp, Homo sapien
aagggccggctccatgtctcttctc

SEQ ID NO: 1845775 - DNA, 25 bp, Homo sapien
cgctctcatgaagccgtgacagagc

SEQ ID NO: 1845776 - DNA, 25 bp, Homo sapien
cgctgtagccgcacagactgacaat

SEQ ID NO: 1845777 - DNA, 25 bp, Homo sapien
caatctcggcacaaagaggagacag

SEQ ID NO: 1845778 - DNA, 25 bp, Homo sapien
gaagccagaggttttggatgctccc

SEQ ID NO: 1845779 - DNA, 25 bp, Homo sapien
gactcaggcccctcgtgggactttg

SEQ ID NO: 1845780 - DNA, 25 bp, Homo sapien
tcccttgggtctacaggtcggctgc

SEQ ID NO: 1845781 - DNA, 25 bp, Homo sapien
gcggcgaccgctttgtctaaggaca

SEQ ID NO: 1845782 - DNA, 25 bp, Homo sapien
cttgactaggttggggtctgagccc

SEQ ID NO: 1845783 - DNA, 25 bp, Homo sapien
catcgagttaagagcaggagaatcc

SEQ ID NO: 1845784 - DNA, 25 bp, Homo sapien
aggagaatccccttgactaggttgg

SEQ ID NO: 1845785 - DNA, 25 bp, Homo sapien
gagccccaagtcatcgagttaagag

SEQ ID NO: 1845786 - DNA, 25 bp, Homo sapien
gaagaacagggcttgtaaccagagt

SEQ ID NO: 1845787 - DNA, 25 bp, Homo sapien
taaggatttagaattcagcgggaga

SEQ ID NO: 1845788 - DNA, 25 bp, Homo sapien
ccctgaggcgcagaggcaagtaaca

SEQ ID NO: 1845789 - DNA, 25 bp, Homo sapien
tctaaacagtgaagggacagatgac

SEQ ID NO: 1845790 - DNA, 25 bp, Homo sapien
tcttgctgatcaagcccgtgagcca

SEQ ID NO: 1845791 - DNA, 25 bp, Homo sapien
gccaggcccaggtagagggtaagga

SEQ ID NO: 1845792 - DNA, 25 bp, Homo sapien
ggtccgtgcccagggtaggcaccac

SEQ ID NO: 1845793 - DNA, 25 bp, Homo sapien
cccagccccagcacatggtagtata

SEQ ID NO: 1845794 - DNA, 25 bp, Homo sapien
cacagggcctttgggtatgggctcc

SEQ ID NO: 1845795 - DNA, 25 bp, Homo sapien
catgagctcagcatagtcaaagacg

SEQ ID NO: 1845796 - DNA, 25 bp, Homo sapien
ggtatgggctcccagtaccgcatca

SEQ ID NO: 1845797 - DNA, 25 bp, Homo sapien
caaagacgagaaggatgctaaagat

SEQ ID NO: 1845798 - DNA, 25 bp, Homo sapien
agtgcaggccacatacagtgacctc

SEQ ID NO: 1845799 - DNA, 25 bp, Homo sapien
agtaccgggatgtccatgccttcac

SEQ ID NO: 1845800 - DNA, 25 bp, Homo sapien
gcagtgcaggccacatacagtgacc

SEQ ID NO: 1845801 - DNA, 25 bp, Homo sapien
ccaaagtaccgggatgtccatgcct

SEQ ID NO: 1845802 - DNA, 25 bp, Homo sapien
aaaagatcgaaacagtggcagaatg

SEQ ID NO: 1845803 - DNA, 25 bp, Homo sapien
cttttcggctccctcagtcctcact

SEQ ID NO: 1845804 - DNA, 25 bp, Homo sapien
ccttgagttcctaatttagaactca

SEQ ID NO: 1845805 - DNA, 25 bp, Homo sapien
gtcaccgcccttttcggctccctca

SEQ ID NO: 1845806 - DNA, 25 bp, Homo sapien
cttgagttcctaatttagaactcag

SEQ ID NO: 1845807 - DNA, 25 bp, Homo sapien
accagactccgggatccctccaaga

SEQ ID NO: 1845808 - DNA, 25 bp, Homo sapien
acgaactccactccggtgccaaagg

SEQ ID NO: 1845809 - DNA, 25 bp, Homo sapien
gaggtaaagcgcacgaactccactc

SEQ ID NO: 1845810 - DNA, 25 bp, Homo sapien
cctccaagaagtggccgaagggagg

SEQ ID NO: 1845811 - DNA, 25 bp, Homo sapien
agctgttaagggtagcggctctgca

SEQ ID NO: 1845812 - DNA, 25 bp, Homo sapien
tctgcagccgctcacgtgggttgaa

SEQ ID NO: 1845813 - DNA, 25 bp, Homo sapien
gaatgttagaatcccgagagagagc

SEQ ID NO: 1845814 - DNA, 25 bp, Homo sapien
tgtctctccgtcacagaagggaatg

SEQ ID NO: 1845815 - DNA, 25 bp, Homo sapien
tataaagttgagttgttgactggcc

SEQ ID NO: 1845816 - DNA, 25 bp, Homo sapien
tctttactctaccttgtggagagga

SEQ ID NO: 1845817 - DNA, 25 bp, Homo sapien
ttactctaccttgtggagaggataa

SEQ ID NO: 1845818 - DNA, 25 bp, Homo sapien
ctttactctaccttgtggagaggat

SEQ ID NO: 1845819 - DNA, 25 bp, Homo sapien
tttactctaccttgtggagaggata

SEQ ID NO: 1845820 - DNA, 25 bp, Homo sapien
cggcaatttgggttttgcaggtaca

SEQ ID NO: 1845821 - DNA, 25 bp, Homo sapien
gcttttctggccatcctagccattc

SEQ ID NO: 1845822 - DNA, 25 bp, Homo sapien
ttttctggccatcctagccattcga

SEQ ID NO: 1845823 - DNA, 25 bp, Homo sapien
ttctggccatcctagccattcgaat

SEQ ID NO: 1845824 - DNA, 25 bp, Homo sapien
cttttgaatcatcttttgggcaaat

SEQ ID NO: 1845825 - DNA, 25 bp, Homo sapien
ctttctcgggcctttgatcttcagc

SEQ ID NO: 1845826 - DNA, 25 bp, Homo sapien
ttctcgggcctttgatcttcagctc

SEQ ID NO: 1845827 - DNA, 25 bp, Homo sapien
gcaaatttctttctcgggcctttga

SEQ ID NO: 1845828 - DNA, 25 bp, Homo sapien
ccaaataggaggtaggacaccatga

SEQ ID NO: 1845829 - DNA, 25 bp, Homo sapien
ccagaaaagtacagagacttgccca

SEQ ID NO: 1845830 - DNA, 25 bp, Homo sapien
gacaccatgagtggcatcgagcaat

SEQ ID NO: 1845831 - DNA, 25 bp, Homo sapien
cacagaggtcaagccgaagctctaa

SEQ ID NO: 1845832 - DNA, 25 bp, Homo sapien
caatataccccaatcctttctaacg

SEQ ID NO: 1845833 - DNA, 25 bp, Homo sapien
aatcctttctaacgccctgagttct

SEQ ID NO: 1845834 - DNA, 25 bp, Homo sapien
cttctaattcgtggtctgggaggga

SEQ ID NO: 1845835 - DNA, 25 bp, Homo sapien
gttccaggacaagttgtatcaatat

SEQ ID NO: 1845836 - DNA, 25 bp, Homo sapien
aagtcctgagggcatgtgatcacaa

SEQ ID NO: 1845837 - DNA, 25 bp, Homo sapien
gaggacaaaggcctctggcttggct

SEQ ID NO: 1845838 - DNA, 25 bp, Homo sapien
acccgtagtggaatggagcaatgag

SEQ ID NO: 1845839 - DNA, 25 bp, Homo sapien
gcagcccaacccgtagtggaatgga

SEQ ID NO: 1845840 - DNA, 25 bp, Homo sapien
ttataggaccgaggcatgctgggta

SEQ ID NO: 1845841 - DNA, 25 bp, Homo sapien
aggaccgaggcatgctgggtaggta

SEQ ID NO: 1845842 - DNA, 25 bp, Homo sapien
cttataggaccgaggcatgctgggt

SEQ ID NO: 1845843 - DNA, 25 bp, Homo sapien
ataggaccgaggcatgctgggtagg

SEQ ID NO: 1845844 - DNA, 25 bp, Homo sapien
gtcggtcaccacatattcatccggg

SEQ ID NO: 1845845 - DNA, 25 bp, Homo sapien
ccgagccctgctcagtgcgtcttga

SEQ ID NO: 1845846 - DNA, 25 bp, Homo sapien
aaggctaaagccaaagttcttctct

SEQ ID NO: 1845847 - DNA, 25 bp, Homo sapien
gggtcggtcaccacatattcatccg

SEQ ID NO: 1845848 - DNA, 25 bp, Homo sapien
gatgcgatcagtgaccaggtgggaa

SEQ ID NO: 1845849 - DNA, 25 bp, Homo sapien
caggaacttgactgtccggcggatg

SEQ ID NO: 1845850 - DNA, 25 bp, Homo sapien
aagcctctgccgctgaaccagccag

SEQ ID NO: 1845851 - DNA, 25 bp, Homo sapien
cgagcatccaccactcctgtgaaga

SEQ ID NO: 1845852 - DNA, 25 bp, Homo sapien
tttgggggctgttgattcttggtta

SEQ ID NO: 1845853 - DNA, 25 bp, Homo sapien
ggctgttgattcttggttaagtttg

SEQ ID NO: 1845854 - DNA, 25 bp, Homo sapien
tgttgattcttggttaagtttggtc

SEQ ID NO: 1845855 - DNA, 25 bp, Homo sapien
ttgggggctgttgattcttggttaa

SEQ ID NO: 1845856 - DNA, 25 bp, Homo sapien
cttgcctggttttggagtcacgaca

SEQ ID NO: 1845857 - DNA, 25 bp, Homo sapien
ctgcggcttggtattctgttgggct

SEQ ID NO: 1845858 - DNA, 25 bp, Homo sapien
tgcctggttttggagtcacgacatc

SEQ ID NO: 1845859 - DNA, 25 bp, Homo sapien
ctcttgcctggttttggagtcacga

SEQ ID NO: 1845860 - DNA, 25 bp, Homo sapien
cccagctttgtggtcccaaccctct

SEQ ID NO: 1845861 - DNA, 25 bp, Homo sapien
aaatcttggtgggagtttcagagcc

SEQ ID NO: 1845862 - DNA, 25 bp, Homo sapien
cttggtgggagtttcagagccctga

SEQ ID NO: 1845863 - DNA, 25 bp, Homo sapien
gctttgtggtcccaaccctctcctc

SEQ ID NO: 1845864 - DNA, 25 bp, Homo sapien
gaaccggcatagctcttactgtgga

SEQ ID NO: 1845865 - DNA, 25 bp, Homo sapien
tcttgcctggtcttacgaacggttg

SEQ ID NO: 1845866 - DNA, 25 bp, Homo sapien
taaaaggctcaagatcagaggctgc

SEQ ID NO: 1845867 - DNA, 25 bp, Homo sapien
caccttttggatctgggaggcatga

SEQ ID NO: 1845868 - DNA, 25 bp, Homo sapien
gcaggtggcatcttgcaattcagga

SEQ ID NO: 1845869 - DNA, 25 bp, Homo sapien
ggtggcatcttgcaattcaggaggc

SEQ ID NO: 1845870 - DNA, 25 bp, Homo sapien
aggtggcatcttgcaattcaggagg

SEQ ID NO: 1845871 - DNA, 25 bp, Homo sapien
caggtggcatcttgcaattcaggag

SEQ ID NO: 1845872 - DNA, 25 bp, Homo sapien
tgtgtatcaccttgggttcccctct

SEQ ID NO: 1845873 - DNA, 25 bp, Homo sapien
gtaaacacaaaggtggctgagttcc

SEQ ID NO: 1845874 - DNA, 25 bp, Homo sapien
gttgcccaggggttgattatcacga

SEQ ID NO: 1845875 - DNA, 25 bp, Homo sapien
cagaaagtaaacacaaaggtggctg

SEQ ID NO: 1845876 - DNA, 25 bp, Homo sapien
tctcttctaactcggctggatcgca

SEQ ID NO: 1845877 - DNA, 25 bp, Homo sapien
tctgggtgtctctagctaacaactg

SEQ ID NO: 1845878 - DNA, 25 bp, Homo sapien
cctggtattgccctaggtggagaca

SEQ ID NO: 1845879 - DNA, 25 bp, Homo sapien
cataggcctcaaggtgcgtgtcaaa

SEQ ID NO: 1845880 - DNA, 25 bp, Homo sapien
tggagtcaacatgaaggcctgggta

SEQ ID NO: 1845881 - DNA, 25 bp, Homo sapien
aaggcctgggtaggttcatcctcca

SEQ ID NO: 1845882 - DNA, 25 bp, Homo sapien
tggaagctgcaatgggaagggccaa

SEQ ID NO: 1845883 - DNA, 25 bp, Homo sapien
caacatgaaggcctgggtaggttca

SEQ ID NO: 1845884 - DNA, 25 bp, Homo sapien
ccagaaagcactgggtagcttgtag

SEQ ID NO: 1845885 - DNA, 25 bp, Homo sapien
gggtagcttgtaggtccagatcttc

SEQ ID NO: 1845886 - DNA, 25 bp, Homo sapien
gcactgggtagcttgtaggtccaga

SEQ ID NO: 1845887 - DNA, 25 bp, Homo sapien
gcttgtaggtccagatcttcagaat

SEQ ID NO: 1845888 - DNA, 25 bp, Homo sapien
tcctctagagataccacaagcagct

SEQ ID NO: 1845889 - DNA, 25 bp, Homo sapien
gatgtgccaaagtcagcgctgctga

SEQ ID NO: 1845890 - DNA, 25 bp, Homo sapien
tctgaatgtgctctaacaagggctc

SEQ ID NO: 1845891 - DNA, 25 bp, Homo sapien
tctcttgagatagggaggtcctgct

SEQ ID NO: 1845892 - DNA, 25 bp, Homo sapien
ttaccatacgcctttcagaaagaaa

SEQ ID NO: 1845893 - DNA, 25 bp, Homo sapien
ttttaccatacgcctttcagaaaga

SEQ ID NO: 1845894 - DNA, 25 bp, Homo sapien
tttaccatacgcctttcagaaagaa

SEQ ID NO: 1845895 - DNA, 25 bp, Homo sapien
tgatttttttaccatacgcctttca

SEQ ID NO: 1845896 - DNA, 25 bp, Homo sapien
cttctactgtcagagggccccggga

SEQ ID NO: 1845897 - DNA, 25 bp, Homo sapien
ctcttctactgtcagagggccccgg

SEQ ID NO: 1845898 - DNA, 25 bp, Homo sapien
ctgtcagagggccccgggagacaaa

SEQ ID NO: 1845899 - DNA, 25 bp, Homo sapien
tctactgtcagagggccccgggaga

SEQ ID NO: 1845900 - DNA, 25 bp, Homo sapien
tccaggcgatggtactggcagagca

SEQ ID NO: 1845901 - DNA, 25 bp, Homo sapien
tcaattcctggtccctcagacggtg

SEQ ID NO: 1845902 - DNA, 25 bp, Homo sapien
cacagtctcggaggataggtgcctt

SEQ ID NO: 1845903 - DNA, 25 bp, Homo sapien
gatttgagtaccattaaggctccca

SEQ ID NO: 1845904 - DNA, 25 bp, Homo sapien
taaagatatgtagccgccctactgg

SEQ ID NO: 1845905 - DNA, 25 bp, Homo sapien
tacacctcaaggattcactggattg

SEQ ID NO: 1845906 - DNA, 25 bp, Homo sapien
ccacgttacacctcaaggattcact

SEQ ID NO: 1845907 - DNA, 25 bp, Homo sapien
tcttcaacatcccagtcaatagcct

SEQ ID NO: 1845908 - DNA, 25 bp, Homo sapien
ctgggaaggatacacattatcaatt

SEQ ID NO: 1845909 - DNA, 25 bp, Homo sapien
aaggatacacattatcaattatcct

SEQ ID NO: 1845910 - DNA, 25 bp, Homo sapien
tgggaaggatacacattatcaatta

SEQ ID NO: 1845911 - DNA, 25 bp, Homo sapien
ggaaggatacacattatcaattatc

SEQ ID NO: 1845912 - DNA, 25 bp, Homo sapien
tcttcctgggaatacgtctctgacg

SEQ ID NO: 1845913 - DNA, 25 bp, Homo sapien
gcagtttggagaacagcccgtaggc

SEQ ID NO: 1845914 - DNA, 25 bp, Homo sapien
gagcgactgcgtgtgccgaaaaaga

SEQ ID NO: 1845915 - DNA, 25 bp, Homo sapien
taatgcacgtcgattgggcagctcc

SEQ ID NO: 1845916 - DNA, 25 bp, Homo sapien
ctggggcgcattccaaccttccagc

SEQ ID NO: 1845917 - DNA, 25 bp, Homo sapien
ggatgtggtacggaaggaggcagag

SEQ ID NO: 1845918 - DNA, 25 bp, Homo sapien
ccgagctggttgattctgtcctgga

SEQ ID NO: 1845919 - DNA, 25 bp, Homo sapien
cgccgagctggttgattctgtcctg

SEQ ID NO: 1845920 - DNA, 25 bp, Homo sapien
tgtggtacggaaggaggcagagagc

SEQ ID NO: 1845921 - DNA, 25 bp, Homo sapien
cacaggctctggaatgggcactctc

SEQ ID NO: 1845922 - DNA, 25 bp, Homo sapien
gggcacaggctctggaatgggcact

SEQ ID NO: 1845923 - DNA, 25 bp, Homo sapien
tgacccactcactgggcgggggcac

SEQ ID NO: 1845924 - DNA, 25 bp, Homo sapien
gacccactcactgggcgggggcaca

SEQ ID NO: 1845925 - DNA, 25 bp, Homo sapien
tccgagaagaataccctgatcgcat

SEQ ID NO: 1845926 - DNA, 25 bp, Homo sapien
gaagaataccctgatcgcatcatga

SEQ ID NO: 1845927 - DNA, 25 bp, Homo sapien
agatccgagaagaataccctgatcg

SEQ ID NO: 1845928 - DNA, 25 bp, Homo sapien
gaataccctgatcgcatcatgaata

SEQ ID NO: 1845929 - DNA, 25 bp, Homo sapien
agagaatactgatgagacctattgc

SEQ ID NO: 1845930 - DNA, 25 bp, Homo sapien
tgatgagacctattgcattgacaac

SEQ ID NO: 1845931 - DNA, 25 bp, Homo sapien
tactgatgagacctattgcattgac

SEQ ID NO: 1845932 - DNA, 25 bp, Homo sapien
gaatactgatgagacctattgcatt

SEQ ID NO: 1845933 - DNA, 25 bp, Homo sapien
ggtgtcaccacctgcctccgtttcc

SEQ ID NO: 1845934 - DNA, 25 bp, Homo sapien
cagtgccggaactcacccagcaggt

SEQ ID NO: 1845935 - DNA, 25 bp, Homo sapien
tacggggatctgaaccaccttgtct

SEQ ID NO: 1845936 - DNA, 25 bp, Homo sapien
cagtatcgagctctcacagtgccgg

SEQ ID NO: 1845937 - DNA, 25 bp, Homo sapien
ttccatttgtccagttaatacttcc

SEQ ID NO: 1845938 - DNA, 25 bp, Homo sapien
agctgggtctccagatcccatttag

SEQ ID NO: 1845939 - DNA, 25 bp, Homo sapien
cccctgactctggagtggtgtatac

SEQ ID NO: 1845940 - DNA, 25 bp, Homo sapien
gctctactctggaggagtctgtccc

SEQ ID NO: 1845941 - DNA, 25 bp, Homo sapien
actgtgccgggccaagcattaattt

SEQ ID NO: 1845942 - DNA, 25 bp, Homo sapien
tacttggcatgtttcaccctgcctg

SEQ ID NO: 1845943 - DNA, 25 bp, Homo sapien
tggcatgtttcaccctgcctggcta

SEQ ID NO: 1845944 - DNA, 25 bp, Homo sapien
actactacttggcatgtttcaccct

SEQ ID NO: 1845945 - DNA, 25 bp, Homo sapien
acttacagcaatttatttgggtagc

SEQ ID NO: 1845946 - DNA, 25 bp, Homo sapien
tacagcaatttatttgggtagcaaa

SEQ ID NO: 1845947 - DNA, 25 bp, Homo sapien
caatttatttgggtagcaaagttga

SEQ ID NO: 1845948 - DNA, 25 bp, Homo sapien
cagcaatttatttgggtagcaaagt

SEQ ID NO: 1845949 - DNA, 25 bp, Homo sapien
ctggagttggcaatcatagcagtgt

SEQ ID NO: 1845950 - DNA, 25 bp, Homo sapien
cagaaggctgacatgggaccgctgg

SEQ ID NO: 1845951 - DNA, 25 bp, Homo sapien
ggctgacatgggaccgctggagttg

SEQ ID NO: 1845952 - DNA, 25 bp, Homo sapien
gagttggcaatcatagcagtgtgag

SEQ ID NO: 1845953 - DNA, 25 bp, Homo sapien
aacaggaggatcattcaggcaactt

SEQ ID NO: 1845954 - DNA, 25 bp, Homo sapien
caggcaacttcagctatgaggctgg

SEQ ID NO: 1845955 - DNA, 25 bp, Homo sapien
gggtgggacctcactgtcaatggac

SEQ ID NO: 1845956 - DNA, 25 bp, Homo sapien
agacaaggcacaaactatttggcaa

SEQ ID NO: 1845957 - DNA, 25 bp, Homo sapien
ggctgttctcaaaggcttgtgattc

SEQ ID NO: 1845958 - DNA, 25 bp, Homo sapien
ctgttctcaaaggcttgtgattcac

SEQ ID NO: 1845959 - DNA, 25 bp, Homo sapien
gctgttctcaaaggcttgtgattca

SEQ ID NO: 1845960 - DNA, 25 bp, Homo sapien
aggctgttctcaaaggcttgtgatt

SEQ ID NO: 1845961 - DNA, 25 bp, Homo sapien
gacgaatgggctataggcagaacac

SEQ ID NO: 1845962 - DNA, 25 bp, Homo sapien
ctaggattcgcaacaaaacagtggt

SEQ ID NO: 1845963 - DNA, 25 bp, Homo sapien
taaacatcaatgactcccaggcctg

SEQ ID NO: 1845964 - DNA, 25 bp, Homo sapien
gggtgaccacaagcacaggttgcag

SEQ ID NO: 1845965 - DNA, 25 bp, Homo sapien
gctcacgcctgtgagtctttccaca

SEQ ID NO: 1845966 - DNA, 25 bp, Homo sapien
acactctctggcaggcgagttagaa

SEQ ID NO: 1845967 - DNA, 25 bp, Homo sapien
cactgccgctggacaccagtgtgat

SEQ ID NO: 1845968 - DNA, 25 bp, Homo sapien
gttagaatgtccagtacttccccag

SEQ ID NO: 1845969 - DNA, 25 bp, Homo sapien
agggaccactgatctcctctgccac

SEQ ID NO: 1845970 - DNA, 25 bp, Homo sapien
caagggaccactgatctcctctgcc

SEQ ID NO: 1845971 - DNA, 25 bp, Homo sapien
aagggaccactgatctcctctgcca

SEQ ID NO: 1845972 - DNA, 25 bp, Homo sapien
tcaagggaccactgatctcctctgc

SEQ ID NO: 1845973 - DNA, 25 bp, Homo sapien
tctagcagcatgtccagctgagcag

SEQ ID NO: 1845974 - DNA, 25 bp, Homo sapien
tcgggctcgggcccctatggcaaag

SEQ ID NO: 1845975 - DNA, 25 bp, Homo sapien
ggctcgggcccctatggcaaaggcc

SEQ ID NO: 1845976 - DNA, 25 bp, Homo sapien
tcgggcccctatggcaaaggcctca

SEQ ID NO: 1845977 - DNA, 25 bp, Homo sapien
ctgcctccgcctgcataattagttg

SEQ ID NO: 1845978 - DNA, 25 bp, Homo sapien
gcctccgcctgcataattagttggg

SEQ ID NO: 1845979 - DNA, 25 bp, Homo sapien
ttctgcctccgcctgcataattagt

SEQ ID NO: 1845980 - DNA, 25 bp, Homo sapien
ctccgcctgcataattagttgggac

SEQ ID NO: 1845981 - DNA, 25 bp, Homo sapien
agaggcagacgctcctgaaacctga

SEQ ID NO: 1845982 - DNA, 25 bp, Homo sapien
cagcactccatcttggggtgcctag

SEQ ID NO: 1845983 - DNA, 25 bp, Homo sapien
tgcagaggcagacgctcctgaaacc

SEQ ID NO: 1845984 - DNA, 25 bp, Homo sapien
ttcagcactccatcttggggtgcct

SEQ ID NO: 1845985 - DNA, 25 bp, Homo sapien
taggcgctccagcttgtagcgctcc

SEQ ID NO: 1845986 - DNA, 25 bp, Homo sapien
tctctgcctcggctaggcgctccag

SEQ ID NO: 1845987 - DNA, 25 bp, Homo sapien
gcttgtagcgctccgcttccgctgg

SEQ ID NO: 1845988 - DNA, 25 bp, Homo sapien
tgtagcgctccgcttccgctggctt

SEQ ID NO: 1845989 - DNA, 25 bp, Homo sapien
caatctgctgcttagtcttggccac

SEQ ID NO: 1845990 - DNA, 25 bp, Homo sapien
tcaatctgctgcttagtcttggcca

SEQ ID NO: 1845991 - DNA, 25 bp, Homo sapien
tcaggttcacgctctgagtcagagg

SEQ ID NO: 1845992 - DNA, 25 bp, Homo sapien
aagtcaggttcacgctctgagtcag

SEQ ID NO: 1845993 - DNA, 25 bp, Homo sapien
ggtgaagtcaggttcacgctctgag

SEQ ID NO: 1845994 - DNA, 25 bp, Homo sapien
gagggtgaagtcaggttcacgctct

SEQ ID NO: 1845995 - DNA, 25 bp, Homo sapien
aagtgcaatagtgagaagtaggtaa

SEQ ID NO: 1845996 - DNA, 25 bp, Homo sapien
gaaagactaatcaagtgcaatagtg

SEQ ID NO: 1845997 - DNA, 25 bp, Homo sapien
gtgcaatagtgagaagtaggtaaag

SEQ ID NO: 1845998 - DNA, 25 bp, Homo sapien
caatagtgagaagtaggtaaagagt

SEQ ID NO: 1845999 - DNA, 25 bp, Homo sapien
gcaacctgcgcatcctggctcaagc

SEQ ID NO: 1846000 - DNA, 25 bp, Homo sapien
gtgactacaggcccgagctgccatg

SEQ ID NO: 1846001 - DNA, 25 bp, Homo sapien
ctgtgactacaggcccgagctgcca

SEQ ID NO: 1846002 - DNA, 25 bp, Homo sapien
tgtgactacaggcccgagctgccat

SEQ ID NO: 1846003 - DNA, 25 bp, Homo sapien
ttgacctcgatgtcataggcggcct

SEQ ID NO: 1846004 - DNA, 25 bp, Homo sapien
ggccatctcgatctcactcaggtac

SEQ ID NO: 1846005 - DNA, 25 bp, Homo sapien
ctcaggtactgagcagacacctttt

SEQ ID NO: 1846006 - DNA, 25 bp, Homo sapien
tcttcagttcgtaatctctctgtgc

SEQ ID NO: 1846007 - DNA, 25 bp, Homo sapien
tgcttcttctcagttgtgccacttc

SEQ ID NO: 1846008 - DNA, 25 bp, Homo sapien
tgcctcatgtattttccctgctcac

SEQ ID NO: 1846009 - DNA, 25 bp, Homo sapien
agttgtgccacttctatcccctttc

SEQ ID NO: 1846010 - DNA, 25 bp, Homo sapien
ttcccactaagcaacccccatctct

SEQ ID NO: 1846011 - DNA, 25 bp, Homo sapien
ctttttggacttgagctgttcgagc

SEQ ID NO: 1846012 - DNA, 25 bp, Homo sapien
ccttccccaaagagtgcaaatagtc

SEQ ID NO: 1846013 - DNA, 25 bp, Homo sapien
ttgagctgttcgagccttccccaaa

SEQ ID NO: 1846014 - DNA, 25 bp, Homo sapien
tctgcttctccaatccgtgcatctt

SEQ ID NO: 1846015 - DNA, 25 bp, Homo sapien
ggaaggatcaattgcctagttttac

SEQ ID NO: 1846016 - DNA, 25 bp, Homo sapien
ttagtcctttggagggcttaagaga

SEQ ID NO: 1846017 - DNA, 25 bp, Homo sapien
ggcttaagagatgggagcaaggaag

SEQ ID NO: 1846018 - DNA, 25 bp, Homo sapien
gagagatgtagaaattagtcctttg

SEQ ID NO: 1846019 - DNA, 25 bp, Homo sapien
agtgtagctaaccacactgatgccc

SEQ ID NO: 1846020 - DNA, 25 bp, Homo sapien
cccatgttgaccaggtctgaggagg

SEQ ID NO: 1846021 - DNA, 25 bp, Homo sapien
tggtcatcgtgaatgtccttcagag

SEQ ID NO: 1846022 - DNA, 25 bp, Homo sapien
cttcagagtgtagctaaccacactg

SEQ ID NO: 1846023 - DNA, 25 bp, Homo sapien
ctgtgataacaggatggtggggaga

SEQ ID NO: 1846024 - DNA, 25 bp, Homo sapien
tgtgataacaggatggtggggagaa

SEQ ID NO: 1846025 - DNA, 25 bp, Homo sapien
aggatggtggggagaagggatgtaa

SEQ ID NO: 1846026 - DNA, 25 bp, Homo sapien
gataacaggatggtggggagaaggg

SEQ ID NO: 1846027 - DNA, 25 bp, Homo sapien
gtctctcacagactagtgtgggcct

SEQ ID NO: 1846028 - DNA, 25 bp, Homo sapien
ggattaccgacacccatcaccatac

SEQ ID NO: 1846029 - DNA, 25 bp, Homo sapien
agatggttccctgcccctaggccaa

SEQ ID NO: 1846030 - DNA, 25 bp, Homo sapien
tgcccggccgggatgtatgctcttg

SEQ ID NO: 1846031 - DNA, 25 bp, Homo sapien
caggcggccgccaacatctccttgt

SEQ ID NO: 1846032 - DNA, 25 bp, Homo sapien
tctggtggccctctaacgtctccag

SEQ ID NO: 1846033 - DNA, 25 bp, Homo sapien
aggaacatctgacaggcggccgcca

SEQ ID NO: 1846034 - DNA, 25 bp, Homo sapien
ctaacgtctccagggcaatgtgggc

SEQ ID NO: 1846035 - DNA, 25 bp, Homo sapien
gagagaagggagagccctctaagaa

SEQ ID NO: 1846036 - DNA, 25 bp, Homo sapien
gaagatgtcttaatgtctgggagag

SEQ ID NO: 1846037 - DNA, 25 bp, Homo sapien
aagatgagactagcagaggaacttc

SEQ ID NO: 1846038 - DNA, 25 bp, Homo sapien
ctgtagccagagtaggggtaggaaa

SEQ ID NO: 1846039 - DNA, 25 bp, Homo sapien
ccagtgactgagatggggaccccat

SEQ ID NO: 1846040 - DNA, 25 bp, Homo sapien
ccatggcgagtgtaaaccttttcac

SEQ ID NO: 1846041 - DNA, 25 bp, Homo sapien
ttcactcttgacattgagggtcagt

SEQ ID NO: 1846042 - DNA, 25 bp, Homo sapien
ttgagggtcagtgtgttgagagaga

SEQ ID NO: 1846043 - DNA, 25 bp, Homo sapien
gggacagacagtaagaagaggagga

SEQ ID NO: 1846044 - DNA, 25 bp, Homo sapien
gacagacagtaagaagaggaggaaa

SEQ ID NO: 1846045 - DNA, 25 bp, Homo sapien
gaaaaagaagggacagacagtaaga

SEQ ID NO: 1846046 - DNA, 25 bp, Homo sapien
aagggacagacagtaagaagaggag

SEQ ID NO: 1846047 - DNA, 25 bp, Homo sapien
tgcagggcaggacaaagacacgccc

SEQ ID NO: 1846048 - DNA, 25 bp, Homo sapien
ccaccatgactggggggcttcggca

SEQ ID NO: 1846049 - DNA, 25 bp, Homo sapien
agggcaggacaaagacacgccctcc

SEQ ID NO: 1846050 - DNA, 25 bp, Homo sapien
ctctggatctgttggatgcagggca

SEQ ID NO: 1846051 - DNA, 25 bp, Homo sapien
agtgaggaacggtggcagagcttga

SEQ ID NO: 1846052 - DNA, 25 bp, Homo sapien
ggaacggtggcagagcttgaatgtg

SEQ ID NO: 1846053 - DNA, 25 bp, Homo sapien
gaggaacggtggcagagcttgaatg

SEQ ID NO: 1846054 - DNA, 25 bp, Homo sapien
aacggtggcagagcttgaatgtgga

SEQ ID NO: 1846055 - DNA, 25 bp, Homo sapien
aaactgggcagttcgtggccatcaa

SEQ ID NO: 1846056 - DNA, 25 bp, Homo sapien
actgggcagttcgtggccatcaagg

SEQ ID NO: 1846057 - DNA, 25 bp, Homo sapien
aatcaaactgggcagttcgtggcca

SEQ ID NO: 1846058 - DNA, 25 bp, Homo sapien
cagaggccagactcacaggggttct

SEQ ID NO: 1846059 - DNA, 25 bp, Homo sapien
cctcatttgggccacaagtgaaaaa

SEQ ID NO: 1846060 - DNA, 25 bp, Homo sapien
catttgggccacaagtgaaaaacat

SEQ ID NO: 1846061 - DNA, 25 bp, Homo sapien
tcatttgggccacaagtgaaaaaca

SEQ ID NO: 1846062 - DNA, 25 bp, Homo sapien
ggcctcatttgggccacaagtgaaa

SEQ ID NO: 1846063 - DNA, 25 bp, Homo sapien
cggcccgtcccttctacacccatgg

SEQ ID NO: 1846064 - DNA, 25 bp, Homo sapien
cctcccagtctgcatccgccacggc

SEQ ID NO: 1846065 - DNA, 25 bp, Homo sapien
gcctttgcggatggggaaggcgcgc

SEQ ID NO: 1846066 - DNA, 25 bp, Homo sapien
gcggatggggaaggcgcgctgtggc

SEQ ID NO: 1846067 - DNA, 25 bp, Homo sapien
tcttctccgcctgcgtatggtccct

SEQ ID NO: 1846068 - DNA, 25 bp, Homo sapien
tgataaaggtcccccgcgcccagag

SEQ ID NO: 1846069 - DNA, 25 bp, Homo sapien
cctcgccgctccctttgataaaggt

SEQ ID NO: 1846070 - DNA, 25 bp, Homo sapien
tccgcctgcgtatggtccctccctt

SEQ ID NO: 1846071 - DNA, 25 bp, Homo sapien
ccctctctccctgcttctcggcagc

SEQ ID NO: 1846072 - DNA, 25 bp, Homo sapien
ctctctccctgcttctcggcagccc

SEQ ID NO: 1846073 - DNA, 25 bp, Homo sapien
ctctccctgcttctcggcagcccca

SEQ ID NO: 1846074 - DNA, 25 bp, Homo sapien
tcccctctctccctgcttctcggca

SEQ ID NO: 1846075 - DNA, 25 bp, Homo sapien
gggccgctcgcagaccagctttcct

SEQ ID NO: 1846076 - DNA, 25 bp, Homo sapien
ccgcaccccgttgctgcggcagacg

SEQ ID NO: 1846077 - DNA, 25 bp, Homo sapien
caccctgccgcaccccgttgctgcg

SEQ ID NO: 1846078 - DNA, 25 bp, Homo sapien
cgcaacggactaagcacccccactt

SEQ ID NO: 1846079 - DNA, 25 bp, Homo sapien
gtaaatcaattttatttgtgttcac

SEQ ID NO: 1846080 - DNA, 25 bp, Homo sapien
taaatcaattttatttgtgttcaca

SEQ ID NO: 1846081 - DNA, 25 bp, Homo sapien
acagtaaatcaattttatttgtgtt

SEQ ID NO: 1846082 - DNA, 25 bp, Homo sapien
cagtaaatcaattttatttgtgttc

SEQ ID NO: 1846083 - DNA, 25 bp, Homo sapien
tggcgtctccgctgtagtgttctga

SEQ ID NO: 1846084 - DNA, 25 bp, Homo sapien
cacacagtagacagacggagttgag

SEQ ID NO: 1846085 - DNA, 25 bp, Homo sapien
gttcaagttgcctcggaagtcccag

SEQ ID NO: 1846086 - DNA, 25 bp, Homo sapien
cattcctaatggtccgccgaagtct

SEQ ID NO: 1846087 - DNA, 25 bp, Homo sapien
gtccagagcgtagtccgagggctcc

SEQ ID NO: 1846088 - DNA, 25 bp, Homo sapien
tgctgaggtccagagcgtagtccga

SEQ ID NO: 1846089 - DNA, 25 bp, Homo sapien
agggctccgaagtcagattaaaggg

SEQ ID NO: 1846090 - DNA, 25 bp, Homo sapien
agtccgagggctccgaagtcagatt

SEQ ID NO: 1846091 - DNA, 25 bp, Homo sapien
tgggcgccagggatgcggcgttagg

SEQ ID NO: 1846092 - DNA, 25 bp, Homo sapien
ggatgcggcgttaggggcgtcctct

SEQ ID NO: 1846093 - DNA, 25 bp, Homo sapien
cgttaggggcgtcctctggaggcag

SEQ ID NO: 1846094 - DNA, 25 bp, Homo sapien
ggcgttaggggcgtcctctggaggc

SEQ ID NO: 1846095 - DNA, 25 bp, Homo sapien
ttcctcgactggcagctggcgccgg

SEQ ID NO: 1846096 - DNA, 25 bp, Homo sapien
tcaggatctggcagaagacgatggt

SEQ ID NO: 1846097 - DNA, 25 bp, Homo sapien
gctgggttcggttcctcgactggca

SEQ ID NO: 1846098 - DNA, 25 bp, Homo sapien
atcaggatctggcagaagacgatgg

SEQ ID NO: 1846099 - DNA, 25 bp, Homo sapien
gcctctggagtcgggtcgttcccca

SEQ ID NO: 1846100 - DNA, 25 bp, Homo sapien
gaggcctctggagtcgggtcgttcc

SEQ ID NO: 1846101 - DNA, 25 bp, Homo sapien
ctctggagtcgggtcgttccccagt

SEQ ID NO: 1846102 - DNA, 25 bp, Homo sapien
gtcgaggcctctggagtcgggtcgt

SEQ ID NO: 1846103 - DNA, 25 bp, Homo sapien
gcggctgcgctttcggtgcccgcga

SEQ ID NO: 1846104 - DNA, 25 bp, Homo sapien
caggatggtcatggtcgggtggcag

SEQ ID NO: 1846105 - DNA, 25 bp, Homo sapien
cactcgagggtagagaaccctgcgg

SEQ ID NO: 1846106 - DNA, 25 bp, Homo sapien
tgcgctttcggtgcccgcgagaggc

SEQ ID NO: 1846107 - DNA, 25 bp, Homo sapien
gacttgacatgcacaatcctaggcg

SEQ ID NO: 1846108 - DNA, 25 bp, Homo sapien
catgtcgaggcatgtggcacctgga

SEQ ID NO: 1846109 - DNA, 25 bp, Homo sapien
tatgtgctcctgaaaattgggcggg

SEQ ID NO: 1846110 - DNA, 25 bp, Homo sapien
taggcgcccaactgcacgttgtgag

SEQ ID NO: 1846111 - DNA, 25 bp, Homo sapien
tactgacccagttatatgcacgcat

SEQ ID NO: 1846112 - DNA, 25 bp, Homo sapien
tgcctgcctgagcacacatgaagac

SEQ ID NO: 1846113 - DNA, 25 bp, Homo sapien
tattggagatcaggccatcctgctg

SEQ ID NO: 1846114 - DNA, 25 bp, Homo sapien
ggagaaatgaacacactagcacaca

SEQ ID NO: 1846115 - DNA, 25 bp, Homo sapien
cttaggagcgtgcagaaatattcac

SEQ ID NO: 1846116 - DNA, 25 bp, Homo sapien
aatattcacataaaggctggtgcag

SEQ ID NO: 1846117 - DNA, 25 bp, Homo sapien
cagcaaaactactctcttaggagcg

SEQ ID NO: 1846118 - DNA, 25 bp, Homo sapien
tacaaaggcaataggttagcagcca

SEQ ID NO: 1846119 - DNA, 25 bp, Homo sapien
gggcactggcggaggcagaatgggc

SEQ ID NO: 1846120 - DNA, 25 bp, Homo sapien
cagaacgggggacggcaagaatggg

SEQ ID NO: 1846121 - DNA, 25 bp, Homo sapien
gcaagaatgggcactggcggaggca

SEQ ID NO: 1846122 - DNA, 25 bp, Homo sapien
tgaccacaggcccagaacgggggac

SEQ ID NO: 1846123 - DNA, 25 bp, Homo sapien
catgaagatttagtgtgattttgca

SEQ ID NO: 1846124 - DNA, 25 bp, Homo sapien
agtcagactgtgctgagtaactccc

SEQ ID NO: 1846125 - DNA, 25 bp, Homo sapien
ggaccaggtcctgttgcggaattca

SEQ ID NO: 1846126 - DNA, 25 bp, Homo sapien
tgactggttggcatttgatacatat

SEQ ID NO: 1846127 - DNA, 25 bp, Homo sapien
gagctggaaagatacctgtggtgcc

SEQ ID NO: 1846128 - DNA, 25 bp, Homo sapien
tgaaattgtggatttcctgacccct

SEQ ID NO: 1846129 - DNA, 25 bp, Homo sapien
tacttgaaatctcctatcccgtgcc

SEQ ID NO: 1846130 - DNA, 25 bp, Homo sapien
taagcaggcctcgttttggaagagc

SEQ ID NO: 1846131 - DNA, 25 bp, Homo sapien
tcttctaaatctcggaccacaacct

SEQ ID NO: 1846132 - DNA, 25 bp, Homo sapien
tatagttggaaagttcttctaaatc

SEQ ID NO: 1846133 - DNA, 25 bp, Homo sapien
gaaagttcttctaaatctcggacca

SEQ ID NO: 1846134 - DNA, 25 bp, Homo sapien
tccctcactcgagccacagagtcaa

SEQ ID NO: 1846135 - DNA, 25 bp, Homo sapien
gcatttgagcttctcctattgggtc

SEQ ID NO: 1846136 - DNA, 25 bp, Homo sapien
catttgagcttctcctattgggtcc

SEQ ID NO: 1846137 - DNA, 25 bp, Homo sapien
tgcatttgagcttctcctattgggt

SEQ ID NO: 1846138 - DNA, 25 bp, Homo sapien
tctttgctgcacattgcatgaaact

SEQ ID NO: 1846139 - DNA, 25 bp, Homo sapien
gaaatgcgtaagagacatgttcctg

SEQ ID NO: 1846140 - DNA, 25 bp, Homo sapien
catgttcctgagatgtcggagtgag

SEQ ID NO: 1846141 - DNA, 25 bp, Homo sapien
gaccttccacattagacctgggctg

SEQ ID NO: 1846142 - DNA, 25 bp, Homo sapien
tgatttgaccagatatcgaagcaca

SEQ ID NO: 1846143 - DNA, 25 bp, Homo sapien
gagttggttacgtagagtcctccac

SEQ ID NO: 1846144 - DNA, 25 bp, Homo sapien
gaagggaaatgatagactgccagag

SEQ ID NO: 1846145 - DNA, 25 bp, Homo sapien
cccagtctgagagccaagcatttct

SEQ ID NO: 1846146 - DNA, 25 bp, Homo sapien
aacttacagacggaagcctgctctt

SEQ ID NO: 1846147 - DNA, 25 bp, Homo sapien
tatgtgcttagtgcaagacaaaggc

SEQ ID NO: 1846148 - DNA, 25 bp, Homo sapien
caagtccagtttgttgctaaagcgt

SEQ ID NO: 1846149 - DNA, 25 bp, Homo sapien
taccagctctaggatcaaggaaaaa

SEQ ID NO: 1846150 - DNA, 25 bp, Homo sapien
gaagagtgcattaaaggcctgtcca

SEQ ID NO: 1846151 - DNA, 25 bp, Homo sapien
ttctcaggagcaggatagccactca

SEQ ID NO: 1846152 - DNA, 25 bp, Homo sapien
cactcacgcgtgtgaagcactcagg

SEQ ID NO: 1846153 - DNA, 25 bp, Homo sapien
gctggagtggatcctgtagacgtcc

SEQ ID NO: 1846154 - DNA, 25 bp, Homo sapien
gccaggtatgggactggacccctct

SEQ ID NO: 1846155 - DNA, 25 bp, Homo sapien
tcttctcggcctctatgttgtagca

SEQ ID NO: 1846156 - DNA, 25 bp, Homo sapien
gacagaaagggtatgatctcctgga

SEQ ID NO: 1846157 - DNA, 25 bp, Homo sapien
tatagcccttaaggtggcgcttctg

SEQ ID NO: 1846158 - DNA, 25 bp, Homo sapien
atgcattgatgtaaagctaacttca

SEQ ID NO: 1846159 - DNA, 25 bp, Homo sapien
aatcattttattttcgcactagtgt

SEQ ID NO: 1846160 - DNA, 25 bp, Homo sapien
tgtgtgcacgcacatagatgagagt

SEQ ID NO: 1846161 - DNA, 25 bp, Homo sapien
cttcagaaaaagtctgtgaaaaatc

SEQ ID NO: 1846162 - DNA, 25 bp, Homo sapien
gaaacaactcactctctcggcatca

SEQ ID NO: 1846163 - DNA, 25 bp, Homo sapien
tttaatgtgtagaaagcagcccaca

SEQ ID NO: 1846164 - DNA, 25 bp, Homo sapien
acaagccattgcaggtgcgggctcc

SEQ ID NO: 1846165 - DNA, 25 bp, Homo sapien
taggcactccctgtgataaagcagt

SEQ ID NO: 1846166 - DNA, 25 bp, Homo sapien
tcttctgtggcagacgtagcctgct

SEQ ID NO: 1846167 - DNA, 25 bp, Homo sapien
cacatgactgggtaatgagtcaccg

SEQ ID NO: 1846168 - DNA, 25 bp, Homo sapien
tgaaggcagagcaaccatcttgcac

SEQ ID NO: 1846169 - DNA, 25 bp, Homo sapien
gaaacttgattttgtctgtggcatc

SEQ ID NO: 1846170 - DNA, 25 bp, Homo sapien
ctagcaggagattgcatctctggtg

SEQ ID NO: 1846171 - DNA, 25 bp, Homo sapien
tagcaggagattgcatctctggtga

SEQ ID NO: 1846172 - DNA, 25 bp, Homo sapien
gtgattggagcagctgtatcagctc

SEQ ID NO: 1846173 - DNA, 25 bp, Homo sapien
gcatctctggtgattggagcagctg

SEQ ID NO: 1846174 - DNA, 25 bp, Homo sapien
ccatcaagatcaatgccctggtact

SEQ ID NO: 1846175 - DNA, 25 bp, Homo sapien
tatggtgattcccacttagcagtgg

SEQ ID NO: 1846176 - DNA, 25 bp, Homo sapien
catgggcaagggtcctgtccctaac

SEQ ID NO: 1846177 - DNA, 25 bp, Homo sapien
tcagaccaggaggtttgaacacatt

SEQ ID NO: 1846178 - DNA, 25 bp, Homo sapien
caagggaacactcagtgcctagatg

SEQ ID NO: 1846179 - DNA, 25 bp, Homo sapien
tctaggtgcatagatttgtttattc

SEQ ID NO: 1846180 - DNA, 25 bp, Homo sapien
ttcaaagagctttctaatcttggtt

SEQ ID NO: 1846181 - DNA, 25 bp, Homo sapien
ggcagagttccaactttcaaagagc

SEQ ID NO: 1846182 - DNA, 25 bp, Homo sapien
gtgaggctacgcaaaatcttctggg

SEQ ID NO: 1846183 - DNA, 25 bp, Homo sapien
tcctctggatgccttgccaacttct

SEQ ID NO: 1846184 - DNA, 25 bp, Homo sapien
gggccaggatgtgcaaacgcttcct

SEQ ID NO: 1846185 - DNA, 25 bp, Homo sapien
ctcttggtgaggctacgcaaaatct

SEQ ID NO: 1846186 - DNA, 25 bp, Homo sapien
tccttctacccttagggtggcctca

SEQ ID NO: 1846187 - DNA, 25 bp, Homo sapien
tctgctttatccacgaggtctgaga

SEQ ID NO: 1846188 - DNA, 25 bp, Homo sapien
atggacccaggctcctgtcttctgt

SEQ ID NO: 1846189 - DNA, 25 bp, Homo sapien
gttcctgtcatcttagtgtgcttcc

SEQ ID NO: 1846190 - DNA, 25 bp, Homo sapien
aaaagccaggcgtactcacacacac

SEQ ID NO: 1846191 - DNA, 25 bp, Homo sapien
gctctttgatgaaaagccaggcgta

SEQ ID NO: 1846192 - DNA, 25 bp, Homo sapien
gaaaaggaagcatcaagacggcaaa

SEQ ID NO: 1846193 - DNA, 25 bp, Homo sapien
gcatcaagacggcaaagctctttga

SEQ ID NO: 1846194 - DNA, 25 bp, Homo sapien
gcgggtcttccatgcagagcttctg

SEQ ID NO: 1846195 - DNA, 25 bp, Homo sapien
ggatacaaatcaggaggaccagact

SEQ ID NO: 1846196 - DNA, 25 bp, Homo sapien
ctaatgaagacacacgtagggcggg

SEQ ID NO: 1846197 - DNA, 25 bp, Homo sapien
tgaatcaggttgtgtcaccctcctg

SEQ ID NO: 1846198 - DNA, 25 bp, Homo sapien
cagtatgtgatctcaccgctggagg

SEQ ID NO: 1846199 - DNA, 25 bp, Homo sapien
gcataattcttaagagccagagggt

SEQ ID NO: 1846200 - DNA, 25 bp, Homo sapien
catccggctgcttcttacatgggca

SEQ ID NO: 1846201 - DNA, 25 bp, Homo sapien
tatttatgtcagttggtaaccggga

SEQ ID NO: 1846202 - DNA, 25 bp, Homo sapien
caggtgcagtaaggagccgacaaaa

SEQ ID NO: 1846203 - DNA, 25 bp, Homo sapien
tgagtcctaagtaaatcagacgccg

SEQ ID NO: 1846204 - DNA, 25 bp, Homo sapien
catgggatggcaaaccccgggtatt

SEQ ID NO: 1846205 - DNA, 25 bp, Homo sapien
aaaatggcaccctccgagagagttc

SEQ ID NO: 1846206 - DNA, 25 bp, Homo sapien
tgccattgagcatggtgcctccctt

SEQ ID NO: 1846207 - DNA, 25 bp, Homo sapien
gaggctggtgaatttgaccattaaa

SEQ ID NO: 1846208 - DNA, 25 bp, Homo sapien
tgtttgttctaagccgttgtttatg

SEQ ID NO: 1846209 - DNA, 25 bp, Homo sapien
cttgtcagtctgcttggtatttccc

SEQ ID NO: 1846210 - DNA, 25 bp, Homo sapien
ctccctcagggagcgatccagggga

SEQ ID NO: 1846211 - DNA, 25 bp, Homo sapien
cactcaacacggtgtgaatcacaca

SEQ ID NO: 1846212 - DNA, 25 bp, Homo sapien
gggaagccagtgacactaaaacaag

SEQ ID NO: 1846213 - DNA, 25 bp, Homo sapien
aggatgcactcaacacggtgtgaat

SEQ ID NO: 1846214 - DNA, 25 bp, Homo sapien
ggacatctctagtgtagctgccaca

SEQ ID NO: 1846215 - DNA, 25 bp, Homo sapien
tctaagcctatacgtttctgtggag

SEQ ID NO: 1846216 - DNA, 25 bp, Homo sapien
taatatatggacctagcttgaggca

SEQ ID NO: 1846217 - DNA, 25 bp, Homo sapien
cactggaccccactggctgagaatc

SEQ ID NO: 1846218 - DNA, 25 bp, Homo sapien
tgttcgagaactcggccaagcggct

SEQ ID NO: 1846219 - DNA, 25 bp, Homo sapien
tgaatatggctggatcacactggtg

SEQ ID NO: 1846220 - DNA, 25 bp, Homo sapien
aacatagctcctgagagcgcgggac

SEQ ID NO: 1846221 - DNA, 25 bp, Homo sapien
tatgatagctagcagtgcggtcccg

SEQ ID NO: 1846222 - DNA, 25 bp, Homo sapien
taaaacctcttaaatgacgcctcac

SEQ ID NO: 1846223 - DNA, 25 bp, Homo sapien
gacagatctcattgccctaaggaga

SEQ ID NO: 1846224 - DNA, 25 bp, Homo sapien
cagggttggtactgagtctcccagg

SEQ ID NO: 1846225 - DNA, 25 bp, Homo sapien
caggcatcaaacactgatcatctaa

SEQ ID NO: 1846226 - DNA, 25 bp, Homo sapien
tcagcataccgaattttatttattg

SEQ ID NO: 1846227 - DNA, 25 bp, Homo sapien
tatttattgccgctcaggagggtgg

SEQ ID NO: 1846228 - DNA, 25 bp, Homo sapien
aaagcccgggccaagaaggacacag

SEQ ID NO: 1846229 - DNA, 25 bp, Homo sapien
agcccgggccaagaaggacacaggc

SEQ ID NO: 1846230 - DNA, 25 bp, Homo sapien
gcatggtggagggtgacgctggtcc

SEQ ID NO: 1846231 - DNA, 25 bp, Homo sapien
ggagggtgacgctggtccctgaagg

SEQ ID NO: 1846232 - DNA, 25 bp, Homo sapien
tcatgtgttgcagacaacatggtgt

SEQ ID NO: 1846233 - DNA, 25 bp, Homo sapien
catgtgttgcagacaacatggtgtt

SEQ ID NO: 1846234 - DNA, 25 bp, Homo sapien
taggaggaatttgtcagaaaagact

SEQ ID NO: 1846235 - DNA, 25 bp, Homo sapien
aggaagctggactcataggaggaat

SEQ ID NO: 1846236 - DNA, 25 bp, Homo sapien
attccaggaagctggactcatagga

SEQ ID NO: 1846237 - DNA, 25 bp, Homo sapien
gtcagaaaagactccttcagcttca

SEQ ID NO: 1846238 - DNA, 25 bp, Homo sapien
tgattcctccggagacacagaacct

SEQ ID NO: 1846239 - DNA, 25 bp, Homo sapien
tcaggactggggtgtctctgtcact

SEQ ID NO: 1846240 - DNA, 25 bp, Homo sapien
agaagtacagcttaggacccagcag

SEQ ID NO: 1846241 - DNA, 25 bp, Homo sapien
gtcactctcagggaccatgaagtcc

SEQ ID NO: 1846242 - DNA, 25 bp, Homo sapien
ctgccaaggagggtcaagaggagga

SEQ ID NO: 1846243 - DNA, 25 bp, Homo sapien
gctgccaaggagggtcaagaggagg

SEQ ID NO: 1846244 - DNA, 25 bp, Homo sapien
tggaggagacactgaagtcccggtg

SEQ ID NO: 1846245 - DNA, 25 bp, Homo sapien
ggagacactgaagtcccggtggcct

SEQ ID NO: 1846246 - DNA, 25 bp, Homo sapien
gaggagacactgaagtcccggtggc

SEQ ID NO: 1846247 - DNA, 25 bp, Homo sapien
agacactgaagtcccggtggcctct

SEQ ID NO: 1846248 - DNA, 25 bp, Homo sapien
ccttagcataagtgtttgaggggaa

SEQ ID NO: 1846249 - DNA, 25 bp, Homo sapien
agttctcccagtaagagaggaccca

SEQ ID NO: 1846250 - DNA, 25 bp, Homo sapien
ttctcccagtaagagaggacccagg

SEQ ID NO: 1846251 - DNA, 25 bp, Homo sapien
gaggaggaatctggtcaactggatt

SEQ ID NO: 1846252 - DNA, 25 bp, Homo sapien
gaacaaggagttgggtctataatgg

SEQ ID NO: 1846253 - DNA, 25 bp, Homo sapien
gagttgggtctataatggactgtga

SEQ ID NO: 1846254 - DNA, 25 bp, Homo sapien
caaggagttgggtctataatggact

SEQ ID NO: 1846255 - DNA, 25 bp, Homo sapien
gggtctataatggactgtgaacact

SEQ ID NO: 1846256 - DNA, 25 bp, Homo sapien
cagggcaaagcacgagattatttca

SEQ ID NO: 1846257 - DNA, 25 bp, Homo sapien
taatcctcacattaagctggtgcag

SEQ ID NO: 1846258 - DNA, 25 bp, Homo sapien
tacagtcgagaacatggagcttcag

SEQ ID NO: 1846259 - DNA, 25 bp, Homo sapien
gctgttttcaagaaggtggccacag

SEQ ID NO: 1846260 - DNA, 25 bp, Homo sapien
gctgccagctcctttattcactcaa

SEQ ID NO: 1846261 - DNA, 25 bp, Homo sapien
aaccgctgagggaccgagcctggat

SEQ ID NO: 1846262 - DNA, 25 bp, Homo sapien
cctctgattctttaaggccagtgga

SEQ ID NO: 1846263 - DNA, 25 bp, Homo sapien
aaaatgccctttgcattgctgccag

SEQ ID NO: 1846264 - DNA, 25 bp, Homo sapien
caatgagaaaaccacatcatcctca

SEQ ID NO: 1846265 - DNA, 25 bp, Homo sapien
aaaaccacatcatcctcagcagagc

SEQ ID NO: 1846266 - DNA, 25 bp, Homo sapien
gaaaaccacatcatcctcagcagag

SEQ ID NO: 1846267 - DNA, 25 bp, Homo sapien
tgagaaaaccacatcatcctcagca

SEQ ID NO: 1846268 - DNA, 25 bp, Homo sapien
ccaatgagaagaccacgccatctct

SEQ ID NO: 1846269 - DNA, 25 bp, Homo sapien
ggagacaggactcctttggccaatg

SEQ ID NO: 1846270 - DNA, 25 bp, Homo sapien
aatggacaaaggaccccatttgcca

SEQ ID NO: 1846271 - DNA, 25 bp, Homo sapien
gaccccatttgccaatgagaagacc

SEQ ID NO: 1846272 - DNA, 25 bp, Homo sapien
tgagaccataaaagccccagtaaag

SEQ ID NO: 1846273 - DNA, 25 bp, Homo sapien
gatggctcacagaaaggtatccacg

SEQ ID NO: 1846274 - DNA, 25 bp, Homo sapien
agaatgattcattccctgcatgggc

SEQ ID NO: 1846275 - DNA, 25 bp, Homo sapien
cattacatctagaacgaagctgagt

SEQ ID NO: 1846276 - DNA, 25 bp, Homo sapien
gaggaaccggactcacaatttctat

SEQ ID NO: 1846277 - DNA, 25 bp, Homo sapien
ccacggtgatcttggagtaggcgcc

SEQ ID NO: 1846278 - DNA, 25 bp, Homo sapien
tgcccctttcctggatgaggaaccg

SEQ ID NO: 1846279 - DNA, 25 bp, Homo sapien
gcagaatcttggcatgggccagatc

SEQ ID NO: 1846280 - DNA, 25 bp, Homo sapien
cagagtatggcatcatcactaattg

SEQ ID NO: 1846281 - DNA, 25 bp, Homo sapien
tgctgccaggctcctaaacgtaact

SEQ ID NO: 1846282 - DNA, 25 bp, Homo sapien
ggctcctaaacgtaactccatccag

SEQ ID NO: 1846283 - DNA, 25 bp, Homo sapien
atcactaattgaacaggtgccccag

SEQ ID NO: 1846284 - DNA, 25 bp, Homo sapien
ggcactgtcacagtacggcttccat

SEQ ID NO: 1846285 - DNA, 25 bp, Homo sapien
gcactgtcacagtacggcttccatt

SEQ ID NO: 1846286 - DNA, 25 bp, Homo sapien
gggcactgtcacagtacggcttcca

SEQ ID NO: 1846287 - DNA, 25 bp, Homo sapien
ttcttttttggtcctgcacatggtc

SEQ ID NO: 1846288 - DNA, 25 bp, Homo sapien
ctggccttcaccacggtctctaaca

SEQ ID NO: 1846289 - DNA, 25 bp, Homo sapien
tatcctggcccttgagtccaccctg

SEQ ID NO: 1846290 - DNA, 25 bp, Homo sapien
cacggtctctaacaccaccacatct

SEQ ID NO: 1846291 - DNA, 25 bp, Homo sapien
tgcagtgtctgagccagtgacagcc

SEQ ID NO: 1846292 - DNA, 25 bp, Homo sapien
caaacctctgtgatagctgcagagt

SEQ ID NO: 1846293 - DNA, 25 bp, Homo sapien
tcaaacctctgtgatagctgcagag

SEQ ID NO: 1846294 - DNA, 25 bp, Homo sapien
ggacaactgtagagtctgcgccctc

SEQ ID NO: 1846295 - DNA, 25 bp, Homo sapien
taccacaggctctgagaacaccgga

SEQ ID NO: 1846296 - DNA, 25 bp, Homo sapien
accggacaccacacagtatcatctg

SEQ ID NO: 1846297 - DNA, 25 bp, Homo sapien
acctctaaaatcaccgcaggctctg

SEQ ID NO: 1846298 - DNA, 25 bp, Homo sapien
atggcttccaccacaggctctgagg

SEQ ID NO: 1846299 - DNA, 25 bp, Homo sapien
taatagtatctatgcccacaaccgc

SEQ ID NO: 1846300 - DNA, 25 bp, Homo sapien
tctgccactttcgtgcccaacaagg

SEQ ID NO: 1846301 - DNA, 25 bp, Homo sapien
gatctgagaccactacagccactga

SEQ ID NO: 1846302 - DNA, 25 bp, Homo sapien
tgagtttcttatttcagagtctctg

SEQ ID NO: 1846303 - DNA, 25 bp, Homo sapien
gagtttcttatttcagagtctctga

SEQ ID NO: 1846304 - DNA, 25 bp, Homo sapien
ctgagtttcttatttcagagtctct

SEQ ID NO: 1846305 - DNA, 25 bp, Homo sapien
tccaatggggtcagcatagtcacca

SEQ ID NO: 1846306 - DNA, 25 bp, Homo sapien
tccagaacgacctccaatggggctg

SEQ ID NO: 1846307 - DNA, 25 bp, Homo sapien
cactggatccagtgtgatctccagt

SEQ ID NO: 1846308 - DNA, 25 bp, Homo sapien
caactctgggtccagtgtgacctcc

SEQ ID NO: 1846309 - DNA, 25 bp, Homo sapien
ctccagtggggccggcacagccacc

SEQ ID NO: 1846310 - DNA, 25 bp, Homo sapien
gatcagcacagtcaccaattctgag

SEQ ID NO: 1846311 - DNA, 25 bp, Homo sapien
aactctgagtccagcacagtgtcca

SEQ ID NO: 1846312 - DNA, 25 bp, Homo sapien
gccggcacagccaccaactctgagt

SEQ ID NO: 1846313 - DNA, 25 bp, Homo sapien
cacagtgtccagtgggatcagcaca

SEQ ID NO: 1846314 - DNA, 25 bp, Homo sapien
ccctggtgccgtgggaaatcttcct

SEQ ID NO: 1846315 - DNA, 25 bp, Homo sapien
gcagctctgactggaatgcacacaa

SEQ ID NO: 1846316 - DNA, 25 bp, Homo sapien
caactctgggtccagtgtgacctct

SEQ ID NO: 1846317 - DNA, 25 bp, Homo sapien
tactgcagtgagtgaggcgaagcct

SEQ ID NO: 1846318 - DNA, 25 bp, Homo sapien
tctagtcagcaatgtctcaagcagc

SEQ ID NO: 1846319 - DNA, 25 bp, Homo sapien
tcgcatgctgaggacccaagattaa

SEQ ID NO: 1846320 - DNA, 25 bp, Homo sapien
aagagggcttgcttttgctccaaaa

SEQ ID NO: 1846321 - DNA, 25 bp, Homo sapien
ggaaatatgcgcagacggagcctag

SEQ ID NO: 1846322 - DNA, 25 bp, Homo sapien
tctgcacctcaaggacaacttagag

SEQ ID NO: 1846323 - DNA, 25 bp, Homo sapien
caacttagagcaattgaagagacca

SEQ ID NO: 1846324 - DNA, 25 bp, Homo sapien
ggcagaacttttggtctcggtacaa

SEQ ID NO: 1846325 - DNA, 25 bp, Homo sapien
tcaaagggtattggcaagcacaagg

SEQ ID NO: 1846326 - DNA, 25 bp, Homo sapien
acacagcaacaatctgatttctcta

SEQ ID NO: 1846327 - DNA, 25 bp, Homo sapien
cagcaacaatctgatttctctatct

SEQ ID NO: 1846328 - DNA, 25 bp, Homo sapien
gagtctcccctgtctacttccctct

SEQ ID NO: 1846329 - DNA, 25 bp, Homo sapien
atggagtctcccctgtctacttccc

SEQ ID NO: 1846330 - DNA, 25 bp, Homo sapien
ttcccagtcggggctgccgggcgga

SEQ ID NO: 1846331 - DNA, 25 bp, Homo sapien
gctgagatggtggcagtacagtcca

SEQ ID NO: 1846332 - DNA, 25 bp, Homo sapien
ctgccgggcggaggtgcccctcacc

SEQ ID NO: 1846333 - DNA, 25 bp, Homo sapien
atcctaggcactgggcaggctgaga

SEQ ID NO: 1846334 - DNA, 25 bp, Homo sapien
ggaaatacattgaggcatacactga

SEQ ID NO: 1846335 - DNA, 25 bp, Homo sapien
tccgtctccgtaagaaaggatcttg

SEQ ID NO: 1846336 - DNA, 25 bp, Homo sapien
ggctgtctcatctccgtctccgtaa

SEQ ID NO: 1846337 - DNA, 25 bp, Homo sapien
atacattgaggcatacactgaagca

SEQ ID NO: 1846338 - DNA, 25 bp, Homo sapien
tttgtagcctgacccttcgctgccg

SEQ ID NO: 1846339 - DNA, 25 bp, Homo sapien
gattcttccgtgcttttgtagcctg

SEQ ID NO: 1846340 - DNA, 25 bp, Homo sapien
gcttttgtagcctgacccttcgctg

SEQ ID NO: 1846341 - DNA, 25 bp, Homo sapien
ctgctgattcttccgtgcttttgta

SEQ ID NO: 1846342 - DNA, 25 bp, Homo sapien
agcaggggaggcactgaaaagtggg

SEQ ID NO: 1846343 - DNA, 25 bp, Homo sapien
ggagcaggactctaactcccaatgt

SEQ ID NO: 1846344 - DNA, 25 bp, Homo sapien
atgttgggtttccctctatcgtgct

SEQ ID NO: 1846345 - DNA, 25 bp, Homo sapien
gcgggagcaggactctaactcccaa

SEQ ID NO: 1846346 - DNA, 25 bp, Homo sapien
tattgataccccagattccctcagg

SEQ ID NO: 1846347 - DNA, 25 bp, Homo sapien
tgtggcatcgggagaagactcccca

SEQ ID NO: 1846348 - DNA, 25 bp, Homo sapien
cagaaccctgtggatgagagaccag

SEQ ID NO: 1846349 - DNA, 25 bp, Homo sapien
taagagagttcttcaggcagcgctt

SEQ ID NO: 1846350 - DNA, 25 bp, Homo sapien
aacaccgatgctccgggcaaagagg

SEQ ID NO: 1846351 - DNA, 25 bp, Homo sapien
tgagcttcagaggaacccttgccaa

SEQ ID NO: 1846352 - DNA, 25 bp, Homo sapien
ttagacctagggtccagagcgggct

SEQ ID NO: 1846353 - DNA, 25 bp, Homo sapien
tgtccgagctgaggcaagttggtcc

SEQ ID NO: 1846354 - DNA, 25 bp, Homo sapien
tgaagacagaccaggagcaggccca

SEQ ID NO: 1846355 - DNA, 25 bp, Homo sapien
agctccctgccacgcggccctgcat

SEQ ID NO: 1846356 - DNA, 25 bp, Homo sapien
gatgaagacagaccaggagcaggcc

SEQ ID NO: 1846357 - DNA, 25 bp, Homo sapien
ctgggagatgaagacagaccaggag

SEQ ID NO: 1846358 - DNA, 25 bp, Homo sapien
ggacctcgattcctgccattggctg

SEQ ID NO: 1846359 - DNA, 25 bp, Homo sapien
gctggaccaagggtgattcaatccc

SEQ ID NO: 1846360 - DNA, 25 bp, Homo sapien
caggagactcgaggaaacaccacat

SEQ ID NO: 1846361 - DNA, 25 bp, Homo sapien
gattcaatccctttctggtcaatgt

SEQ ID NO: 1846362 - DNA, 25 bp, Homo sapien
gagcctgctccaacctctgagggtg

SEQ ID NO: 1846363 - DNA, 25 bp, Homo sapien
tactgagccatctgtccaggatcca

SEQ ID NO: 1846364 - DNA, 25 bp, Homo sapien
aattgggagcgaaagcccagtggca

SEQ ID NO: 1846365 - DNA, 25 bp, Homo sapien
cctctagaggcgtaggaagagcacc

SEQ ID NO: 1846366 - DNA, 25 bp, Homo sapien
ggaaactgagctaaccctatgcctg

SEQ ID NO: 1846367 - DNA, 25 bp, Homo sapien
cttcttcaggcgtcagaggtgctct

SEQ ID NO: 1846368 - DNA, 25 bp, Homo sapien
gtgataagagagagtctgcaacctt

SEQ ID NO: 1846369 - DNA, 25 bp, Homo sapien
gggtgttactcaatggaccatttca

SEQ ID NO: 1846370 - DNA, 25 bp, Homo sapien
tggactgtcgagtaactctccttgg

SEQ ID NO: 1846371 - DNA, 25 bp, Homo sapien
ggactgtcgagtaactctccttggg

SEQ ID NO: 1846372 - DNA, 25 bp, Homo sapien
gctggggccccagaggcttcacttg

SEQ ID NO: 1846373 - DNA, 25 bp, Homo sapien
ttatggactgtcgagtaactctcct

SEQ ID NO: 1846374 - DNA, 25 bp, Homo sapien
ttggcaccagcggagggatcaggat

SEQ ID NO: 1846375 - DNA, 25 bp, Homo sapien
tcaaggaggagacagacatgcaagg

SEQ ID NO: 1846376 - DNA, 25 bp, Homo sapien
catgcaagggtgaccagaagagctg

SEQ ID NO: 1846377 - DNA, 25 bp, Homo sapien
tgccacaaggctgaaggatgatttt

SEQ ID NO: 1846378 - DNA, 25 bp, Homo sapien
gcagggtcccttggagcccgtggag

SEQ ID NO: 1846379 - DNA, 25 bp, Homo sapien
tgccgcagggatggtagggtgaacc

SEQ ID NO: 1846380 - DNA, 25 bp, Homo sapien
accggagctgctggaaatgctagaa

SEQ ID NO: 1846381 - DNA, 25 bp, Homo sapien
ctctgggaagcactgccgcagggat

SEQ ID NO: 1846382 - DNA, 25 bp, Homo sapien
gaaccagataactgtcagaggagcc

SEQ ID NO: 1846383 - DNA, 25 bp, Homo sapien
gctggagaagtatttgccctcagag

SEQ ID NO: 1846384 - DNA, 25 bp, Homo sapien
tacccttactgtaggtcatgcctgg

SEQ ID NO: 1846385 - DNA, 25 bp, Homo sapien
tagccaccataggatttgtctacag

SEQ ID NO: 1846386 - DNA, 25 bp, Homo sapien
gcagagcagagccattccctacttg

SEQ ID NO: 1846387 - DNA, 25 bp, Homo sapien
tagtattccgcggtaagagttgtca

SEQ ID NO: 1846388 - DNA, 25 bp, Homo sapien
tggagctgacgctttggccactgct

SEQ ID NO: 1846389 - DNA, 25 bp, Homo sapien
gatgtccgaactacagggacgctgg

SEQ ID NO: 1846390 - DNA, 25 bp, Homo sapien
aggaaccggatgcaccttgtagact

SEQ ID NO: 1846391 - DNA, 25 bp, Homo sapien
actagagccagatccggaggagtag

SEQ ID NO: 1846392 - DNA, 25 bp, Homo sapien
agccagatccggaggagtagctgac

SEQ ID NO: 1846393 - DNA, 25 bp, Homo sapien
gaggaaccggatgcaccttgtagac

SEQ ID NO: 1846394 - DNA, 25 bp, Homo sapien
ccgttcctggcttaaaagatcctgc

SEQ ID NO: 1846395 - DNA, 25 bp, Homo sapien
ccctgggcaatgctggatccgctgg

SEQ ID NO: 1846396 - DNA, 25 bp, Homo sapien
gaaggtgccaatgctcttagccaag

SEQ ID NO: 1846397 - DNA, 25 bp, Homo sapien
tgctggagccactgtagctactgaa

SEQ ID NO: 1846398 - DNA, 25 bp, Homo sapien
ggcaggaggagaccagccagcagca

SEQ ID NO: 1846399 - DNA, 25 bp, Homo sapien
tggcaggaggagaccagccagcagc

SEQ ID NO: 1846400 - DNA, 25 bp, Homo sapien
ctggcaggaggagaccagccagcag

SEQ ID NO: 1846401 - DNA, 25 bp, Homo sapien
catccagggtgcccgagacgagccc

SEQ ID NO: 1846402 - DNA, 25 bp, Homo sapien
tccagggtgcccgagacgagcccat

SEQ ID NO: 1846403 - DNA, 25 bp, Homo sapien
atccagggtgcccgagacgagccca

SEQ ID NO: 1846404 - DNA, 25 bp, Homo sapien
ccatccagggtgcccgagacgagcc

SEQ ID NO: 1846405 - DNA, 25 bp, Homo sapien
acacctgggtcctttatgccagagc

SEQ ID NO: 1846406 - DNA, 25 bp, Homo sapien
actgatggcagctcgaggacacctg

SEQ ID NO: 1846407 - DNA, 25 bp, Homo sapien
cctttatgccagagctggacattcc

SEQ ID NO: 1846408 - DNA, 25 bp, Homo sapien
gggctgcacggcctcctgactgatg

SEQ ID NO: 1846409 - DNA, 25 bp, Homo sapien
ctgtctgtgctgtccgatacggtag

SEQ ID NO: 1846410 - DNA, 25 bp, Homo sapien
ggctgccatctagtcttgctcttga

SEQ ID NO: 1846411 - DNA, 25 bp, Homo sapien
ccacatggagcaagtttaaccacca

SEQ ID NO: 1846412 - DNA, 25 bp, Homo sapien
gctcttgacttgctagtgacactca

SEQ ID NO: 1846413 - DNA, 25 bp, Homo sapien
gcccactcccagtaggggatgtcct

SEQ ID NO: 1846414 - DNA, 25 bp, Homo sapien
ggcccactcccagtaggggatgtcc

SEQ ID NO: 1846415 - DNA, 25 bp, Homo sapien
ctctccttggcgtggaagccagcgc

SEQ ID NO: 1846416 - DNA, 25 bp, Homo sapien
cctcctctccttggcgtggaagcca

SEQ ID NO: 1846417 - DNA, 25 bp, Homo sapien
ggaggggtggactgagtcatccaca

SEQ ID NO: 1846418 - DNA, 25 bp, Homo sapien
cggggaggggtggactgagtcatcc

SEQ ID NO: 1846419 - DNA, 25 bp, Homo sapien
aggggtggactgagtcatccacact

SEQ ID NO: 1846420 - DNA, 25 bp, Homo sapien
ggtggactgagtcatccacactctt

SEQ ID NO: 1846421 - DNA, 25 bp, Homo sapien
agggcacatccccaatcaggtgttc

SEQ ID NO: 1846422 - DNA, 25 bp, Homo sapien
aggagagggcacatccccaatcagg

SEQ ID NO: 1846423 - DNA, 25 bp, Homo sapien
catccccaatcaggtgttccgaaca

SEQ ID NO: 1846424 - DNA, 25 bp, Homo sapien
gcacatccccaatcaggtgttccga

SEQ ID NO: 1846425 - DNA, 25 bp, Homo sapien
ccttgacggctaaagggacacctgt

SEQ ID NO: 1846426 - DNA, 25 bp, Homo sapien
cctgtgtgccttgatggtggaccca

SEQ ID NO: 1846427 - DNA, 25 bp, Homo sapien
gatgacattagtgagggaaagagca

SEQ ID NO: 1846428 - DNA, 25 bp, Homo sapien
tggacccagggagtggatgacatta

SEQ ID NO: 1846429 - DNA, 25 bp, Homo sapien
gctgtcagaggaaaaaacgggcgat

SEQ ID NO: 1846430 - DNA, 25 bp, Homo sapien
agatgcctgggaacagaacggctga

SEQ ID NO: 1846431 - DNA, 25 bp, Homo sapien
aatattgagaacaccaccttacggg

SEQ ID NO: 1846432 - DNA, 25 bp, Homo sapien
aagggaacacagtaccgtagccctg

SEQ ID NO: 1846433 - DNA, 25 bp, Homo sapien
ggtgggtctaggtctggctcctcct

SEQ ID NO: 1846434 - DNA, 25 bp, Homo sapien
gggtgggtctaggtctggctcctcc

SEQ ID NO: 1846435 - DNA, 25 bp, Homo sapien
cggggtgggtctaggtctggctcct

SEQ ID NO: 1846436 - DNA, 25 bp, Homo sapien
ggggtgggtctaggtctggctcctc

SEQ ID NO: 1846437 - DNA, 25 bp, Homo sapien
ggtcctgccggccaagggtcgtcag

SEQ ID NO: 1846438 - DNA, 25 bp, Homo sapien
tcctgccggccaagggtcgtcaggc

SEQ ID NO: 1846439 - DNA, 25 bp, Homo sapien
ctaggcggttcagggggccagactc

SEQ ID NO: 1846440 - DNA, 25 bp, Homo sapien
ggaggttgaggaggatccgttctag

SEQ ID NO: 1846441 - DNA, 25 bp, Homo sapien
ggcgggtaggcggaggatcttcaaa

SEQ ID NO: 1846442 - DNA, 25 bp, Homo sapien
cgggtaggcggaggatcttcaaaga

SEQ ID NO: 1846443 - DNA, 25 bp, Homo sapien
ggtaggcggaggatcttcaaagaga

SEQ ID NO: 1846444 - DNA, 25 bp, Homo sapien
gatcttcaaagagagggggtgcccc

SEQ ID NO: 1846445 - DNA, 25 bp, Homo sapien
caatgttggggagcctgcctcctct

SEQ ID NO: 1846446 - DNA, 25 bp, Homo sapien
gggccctgaggcaatgttggggagc

SEQ ID NO: 1846447 - DNA, 25 bp, Homo sapien
ggcaatgttggggagcctgcctcct

SEQ ID NO: 1846448 - DNA, 25 bp, Homo sapien
ctgaggcaatgttggggagcctgcc

SEQ ID NO: 1846449 - DNA, 25 bp, Homo sapien
cccaggagcttccagttgaggatca

SEQ ID NO: 1846450 - DNA, 25 bp, Homo sapien
gcaggcaaaggaccaggatccccag

SEQ ID NO: 1846451 - DNA, 25 bp, Homo sapien
aaggaccaggatccccaggagcttc

SEQ ID NO: 1846452 - DNA, 25 bp, Homo sapien
ggcaaaggaccaggatccccaggag

SEQ ID NO: 1846453 - DNA, 25 bp, Homo sapien
gctgagtctgggtgcctgggaaccc

SEQ ID NO: 1846454 - DNA, 25 bp, Homo sapien
tgggctgatgtgtcacccctgaagg

SEQ ID NO: 1846455 - DNA, 25 bp, Homo sapien
tggagcagtcaatacccacttggca

SEQ ID NO: 1846456 - DNA, 25 bp, Homo sapien
tatcatgacccagagcctgcgtcac

SEQ ID NO: 1846457 - DNA, 25 bp, Homo sapien
tcagaacagaactggtcaaacccgt

SEQ ID NO: 1846458 - DNA, 25 bp, Homo sapien
caagtacgctgatggggacgccctg

SEQ ID NO: 1846459 - DNA, 25 bp, Homo sapien
gtccaagtacgctgatggggacgcc

SEQ ID NO: 1846460 - DNA, 25 bp, Homo sapien
tgctgcagtccaagtacgctgatgg

SEQ ID NO: 1846461 - DNA, 25 bp, Homo sapien
gctgcagtccaagtacgctgatggg

SEQ ID NO: 1846462 - DNA, 25 bp, Homo sapien
tgtagtcgtctttatttagagcaga

SEQ ID NO: 1846463 - DNA, 25 bp, Homo sapien
actcagctggtatcccccagggcaa

SEQ ID NO: 1846464 - DNA, 25 bp, Homo sapien
tatttagagcagaattcagactcag

SEQ ID NO: 1846465 - DNA, 25 bp, Homo sapien
gaattcagactcagctggtatcccc

SEQ ID NO: 1846466 - DNA, 25 bp, Homo sapien
ggagcatctgtcaaggttgtctcct

SEQ ID NO: 1846467 - DNA, 25 bp, Homo sapien
gctggagcatctgtcaaggttgtct

SEQ ID NO: 1846468 - DNA, 25 bp, Homo sapien
tggagcatctgtcaaggttgtctcc

SEQ ID NO: 1846469 - DNA, 25 bp, Homo sapien
ctggagcatctgtcaaggttgtctc

SEQ ID NO: 1846470 - DNA, 25 bp, Homo sapien
gaaggaccgcagagaacaacactca

SEQ ID NO: 1846471 - DNA, 25 bp, Homo sapien
gctgggcatcgctaaaagaggctaa

SEQ ID NO: 1846472 - DNA, 25 bp, Homo sapien
ggctctttggtccaagctgggcatc

SEQ ID NO: 1846473 - DNA, 25 bp, Homo sapien
gaagtgcgcgcatttgtcccttgtc

SEQ ID NO: 1846474 - DNA, 25 bp, Homo sapien
cttttatggactccctggtgggcac

SEQ ID NO: 1846475 - DNA, 25 bp, Homo sapien
tgcttgtaacgggagaggagacctt

SEQ ID NO: 1846476 - DNA, 25 bp, Homo sapien
aactgtcaacagtcgctgctgcttg

SEQ ID NO: 1846477 - DNA, 25 bp, Homo sapien
tacaggtgcagatgctgaacactct

SEQ ID NO: 1846478 - DNA, 25 bp, Homo sapien
atttcttcttatccagtagggaagg

SEQ ID NO: 1846479 - DNA, 25 bp, Homo sapien
tttcctgggcggctctgcgctgaat

SEQ ID NO: 1846480 - DNA, 25 bp, Homo sapien
tagctcctgcaagcgccgggccagt

SEQ ID NO: 1846481 - DNA, 25 bp, Homo sapien
tggctccgctccttttcctgggcgg

SEQ ID NO: 1846482 - DNA, 25 bp, Homo sapien
tgcgctgaatctggcgcaaggagac

SEQ ID NO: 1846483 - DNA, 25 bp, Homo sapien
gctgatgctctaggagcctgggaat

SEQ ID NO: 1846484 - DNA, 25 bp, Homo sapien
cctgggaatctgaacctaagtatct

SEQ ID NO: 1846485 - DNA, 25 bp, Homo sapien
taaagtgtgatgattgcagctatat

SEQ ID NO: 1846486 - DNA, 25 bp, Homo sapien
ggagatgcggctgaacaacttatgt

SEQ ID NO: 1846487 - DNA, 25 bp, Homo sapien
tgtgataattcatctgtgctactcc

SEQ ID NO: 1846488 - DNA, 25 bp, Homo sapien
tgggtgtgttcacgatgtgataatt

SEQ ID NO: 1846489 - DNA, 25 bp, Homo sapien
ggtgtgttcacgatgtgataattca

SEQ ID NO: 1846490 - DNA, 25 bp, Homo sapien
tgtgctactcctggataccttcatt

SEQ ID NO: 1846491 - DNA, 25 bp, Homo sapien
tggcatgctccctccgagcctcgtt

SEQ ID NO: 1846492 - DNA, 25 bp, Homo sapien
ctgagagttgctcccgcagccgagt

SEQ ID NO: 1846493 - DNA, 25 bp, Homo sapien
gtgtctgagagttgctcccgcagcc

SEQ ID NO: 1846494 - DNA, 25 bp, Homo sapien
agttgctcccgcagccgagtttcca

SEQ ID NO: 1846495 - DNA, 25 bp, Homo sapien
caccctccaagggaagcacccattt

SEQ ID NO: 1846496 - DNA, 25 bp, Homo sapien
ggagctttgattcgcagttcccacc

SEQ ID NO: 1846497 - DNA, 25 bp, Homo sapien
tgaaagtgcagacggggcatatcag

SEQ ID NO: 1846498 - DNA, 25 bp, Homo sapien
gcatatcagcaggagctttgattcg

SEQ ID NO: 1846499 - DNA, 25 bp, Homo sapien
ggccctggcgtgctacctccagctg

SEQ ID NO: 1846500 - DNA, 25 bp, Homo sapien
agccccaagctagccagggactcct

SEQ ID NO: 1846501 - DNA, 25 bp, Homo sapien
gctggccctggcgtgctacctccag

SEQ ID NO: 1846502 - DNA, 25 bp, Homo sapien
ctgctggccctggcgtgctacctcc

SEQ ID NO: 1846503 - DNA, 25 bp, Homo sapien
ggttccgttcttcccgcagctgctg

SEQ ID NO: 1846504 - DNA, 25 bp, Homo sapien
tgcatccaggcggttccgttcttcc

SEQ ID NO: 1846505 - DNA, 25 bp, Homo sapien
tctgcatccaggcggttccgttctt

SEQ ID NO: 1846506 - DNA, 25 bp, Homo sapien
caggcggttccgttcttcccgcagc

SEQ ID NO: 1846507 - DNA, 25 bp, Homo sapien
tcacgaattttcttattttattggt

SEQ ID NO: 1846508 - DNA, 25 bp, Homo sapien
accaataaaataagaaaattcgtga

SEQ ID NO: 1846509 - DNA, 25 bp, Homo sapien
ctgtgaccggtggtggtaggggaca

SEQ ID NO: 1846510 - DNA, 25 bp, Homo sapien
tgtgaccggtggtggtaggggacag

SEQ ID NO: 1846511 - DNA, 25 bp, Homo sapien
gagcaagggcaagctttcgagcaat

SEQ ID NO: 1846512 - DNA, 25 bp, Homo sapien
ctgagcaagggcaagctttcgagca

SEQ ID NO: 1846513 - DNA, 25 bp, Homo sapien
agggcaagctttcgagcaatcaggc

SEQ ID NO: 1846514 - DNA, 25 bp, Homo sapien
caagggcaagctttcgagcaatcag

SEQ ID NO: 1846515 - DNA, 25 bp, Homo sapien
tggtggtctcgagccagatctgaga

SEQ ID NO: 1846516 - DNA, 25 bp, Homo sapien
cagcatagctgagtcggttgttgag

SEQ ID NO: 1846517 - DNA, 25 bp, Homo sapien
ccatggtggtctcgagccagatctg

SEQ ID NO: 1846518 - DNA, 25 bp, Homo sapien
gtggaccttgcggacagcatagctg

SEQ ID NO: 1846519 - DNA, 25 bp, Homo sapien
tctagcaccaatgacgggcaggtcc

SEQ ID NO: 1846520 - DNA, 25 bp, Homo sapien
gggcaggtccacatgctttaccagc

SEQ ID NO: 1846521 - DNA, 25 bp, Homo sapien
aagcccaggagtgtcgatctagcac

SEQ ID NO: 1846522 - DNA, 25 bp, Homo sapien
ccagaagtaggaccaacctggctca

SEQ ID NO: 1846523 - DNA, 25 bp, Homo sapien
tgctgacagcattgaccacaagcct

SEQ ID NO: 1846524 - DNA, 25 bp, Homo sapien
tgctcctcggctgaggctgtctgct

SEQ ID NO: 1846525 - DNA, 25 bp, Homo sapien
agcacggctcagctccaactgcagg

SEQ ID NO: 1846526 - DNA, 25 bp, Homo sapien
ggcctcctgagcacggctcagctcc

SEQ ID NO: 1846527 - DNA, 25 bp, Homo sapien
cacctccacctctgcggctttgtcc

SEQ ID NO: 1846528 - DNA, 25 bp, Homo sapien
tcactttttcctggagtgaggccac

SEQ ID NO: 1846529 - DNA, 25 bp, Homo sapien
gctttgtcctgcagggatcgctgca

SEQ ID NO: 1846530 - DNA, 25 bp, Homo sapien
tgctcctggctctgggatgtcactt

SEQ ID NO: 1846531 - DNA, 25 bp, Homo sapien
aaaagaatgaatgccacgcagggag

SEQ ID NO: 1846532 - DNA, 25 bp, Homo sapien
agggagacagaagcttaggttctga

SEQ ID NO: 1846533 - DNA, 25 bp, Homo sapien
ttccatgtgcccactcgaagatggg

SEQ ID NO: 1846534 - DNA, 25 bp, Homo sapien
cgaagatgggaatagcccttgacac

SEQ ID NO: 1846535 - DNA, 25 bp, Homo sapien
tgtcccttcagctgcttaacagagt

SEQ ID NO: 1846536 - DNA, 25 bp, Homo sapien
tagctgcaccatgagggcaaacacc

SEQ ID NO: 1846537 - DNA, 25 bp, Homo sapien
cacttcctggtaaactcaggctcca

SEQ ID NO: 1846538 - DNA, 25 bp, Homo sapien
actggcacttcctggtaaactcagg

SEQ ID NO: 1846539 - DNA, 25 bp, Homo sapien
cagggcgaggatgtgtgtgaggctc

SEQ ID NO: 1846540 - DNA, 25 bp, Homo sapien
cagctccgcggtggcatgcaggctg

SEQ ID NO: 1846541 - DNA, 25 bp, Homo sapien
tcctgcagggcgaggatgtgtgtga

SEQ ID NO: 1846542 - DNA, 25 bp, Homo sapien
gtgtgaggctctgcacccgcacctg

SEQ ID NO: 1846543 - DNA, 25 bp, Homo sapien
tccagttcccatgtctggctgtgga

SEQ ID NO: 1846544 - DNA, 25 bp, Homo sapien
tctgtcgctccagttcccatgtctg

SEQ ID NO: 1846545 - DNA, 25 bp, Homo sapien
gattctcaaccagggtcacctgagc

SEQ ID NO: 1846546 - DNA, 25 bp, Homo sapien
agaagcttctgtcgctccagttccc

SEQ ID NO: 1846547 - DNA, 25 bp, Homo sapien
taattgctgggctcccgtcggcgtc

SEQ ID NO: 1846548 - DNA, 25 bp, Homo sapien
cacatcactaattgctgggctcccg

SEQ ID NO: 1846549 - DNA, 25 bp, Homo sapien
agtggggcgccctgcagatccacca

SEQ ID NO: 1846550 - DNA, 25 bp, Homo sapien
tgcagatccaccacatcactaattg

SEQ ID NO: 1846551 - DNA, 25 bp, Homo sapien
cttctggtttccagactactcagag

SEQ ID NO: 1846552 - DNA, 25 bp, Homo sapien
tggtttccagactactcagagactt

SEQ ID NO: 1846553 - DNA, 25 bp, Homo sapien
ctcctcgtgagcctgtgtcaaagag

SEQ ID NO: 1846554 - DNA, 25 bp, Homo sapien
tttccagactactcagagacttctc

SEQ ID NO: 1846555 - DNA, 25 bp, Homo sapien
gcccagctctccgttatgaatttga

SEQ ID NO: 1846556 - DNA, 25 bp, Homo sapien
tcactactcatggagggtcttttct

SEQ ID NO: 1846557 - DNA, 25 bp, Homo sapien
tcatggagggtcttttctgcaatac

SEQ ID NO: 1846558 - DNA, 25 bp, Homo sapien
caccaaaggtctcatcactctacta

SEQ ID NO: 1846559 - DNA, 25 bp, Homo sapien
tccgcccgtgccagagcctctagct

SEQ ID NO: 1846560 - DNA, 25 bp, Homo sapien
ctgcagcgaggtctcccgcaggagc

SEQ ID NO: 1846561 - DNA, 25 bp, Homo sapien
agctcttgcagctgccgaacgatca

SEQ ID NO: 1846562 - DNA, 25 bp, Homo sapien
tccaagttcttccggacaacctcag

SEQ ID NO: 1846563 - DNA, 25 bp, Homo sapien
gaaaacggcgtggatggatccctac

SEQ ID NO: 1846564 - DNA, 25 bp, Homo sapien
tgagtacgttctggaaactagggcc

SEQ ID NO: 1846565 - DNA, 25 bp, Homo sapien
gaggaagggtcactagcaagcaagc

SEQ ID NO: 1846566 - DNA, 25 bp, Homo sapien
cagataatacgacagcatggccagc

SEQ ID NO: 1846567 - DNA, 25 bp, Homo sapien
gaaacatcccgttcccacatggtca

SEQ ID NO: 1846568 - DNA, 25 bp, Homo sapien
ccgttcccacatggtcacttgaggt

SEQ ID NO: 1846569 - DNA, 25 bp, Homo sapien
aggtctctgggtgtctagccgcctc

SEQ ID NO: 1846570 - DNA, 25 bp, Homo sapien
gtgtctagccgcctctctgagacat

SEQ ID NO: 1846571 - DNA, 25 bp, Homo sapien
gagttgaaaggggccgagcttgaaa

SEQ ID NO: 1846572 - DNA, 25 bp, Homo sapien
gcagagttgaaaggggccgagcttg

SEQ ID NO: 1846573 - DNA, 25 bp, Homo sapien
tgaaaggggccgagcttgaaagtgg

SEQ ID NO: 1846574 - DNA, 25 bp, Homo sapien
aaggggccgagcttgaaagtgggag

SEQ ID NO: 1846575 - DNA, 25 bp, Homo sapien
acaaagatggtcagtttcccaggca

SEQ ID NO: 1846576 - DNA, 25 bp, Homo sapien
cactccccttgtctggtcccactga

SEQ ID NO: 1846577 - DNA, 25 bp, Homo sapien
actccccttgtctggtcccactgac

SEQ ID NO: 1846578 - DNA, 25 bp, Homo sapien
tctgtcttcagccatctatgttccc

SEQ ID NO: 1846579 - DNA, 25 bp, Homo sapien
ctccacattatttgaaggctctaga

SEQ ID NO: 1846580 - DNA, 25 bp, Homo sapien
cacattatttgaaggctctagattc

SEQ ID NO: 1846581 - DNA, 25 bp, Homo sapien
gctctagattctgtcttcagccatc

SEQ ID NO: 1846582 - DNA, 25 bp, Homo sapien
caggtccacccgatgcttagctctt

SEQ ID NO: 1846583 - DNA, 25 bp, Homo sapien
aattcacttgcttgtctcaacctgg

SEQ ID NO: 1846584 - DNA, 25 bp, Homo sapien
taatccttgaattatagccaggtcc

SEQ ID NO: 1846585 - DNA, 25 bp, Homo sapien
ggaacccaagcaactaactatcaag

SEQ ID NO: 1846586 - DNA, 25 bp, Homo sapien
tttcaggattctgggcagtgccttt

SEQ ID NO: 1846587 - DNA, 25 bp, Homo sapien
tcaggattctgggcagtgcctttac

SEQ ID NO: 1846588 - DNA, 25 bp, Homo sapien
ggcagaaaagccagcgtcctgacat

SEQ ID NO: 1846589 - DNA, 25 bp, Homo sapien
taagtttctatggtccctgctgctc

SEQ ID NO: 1846590 - DNA, 25 bp, Homo sapien
cttgggaatccaggccgcctagatc

SEQ ID NO: 1846591 - DNA, 25 bp, Homo sapien
tgttaaagtgctggcccaaggcctg

SEQ ID NO: 1846592 - DNA, 25 bp, Homo sapien
gttagcccgtgagctctaaggctgt

SEQ ID NO: 1846593 - DNA, 25 bp, Homo sapien
ggctgttctgatctcttcatctgtc

SEQ ID NO: 1846594 - DNA, 25 bp, Homo sapien
ttcacccagttagcccgtgagctct

SEQ ID NO: 1846595 - DNA, 25 bp, Homo sapien
gctgttctgatctcttcatctgtcc

SEQ ID NO: 1846596 - DNA, 25 bp, Homo sapien
gcgagagccccctactgcgctttgg

SEQ ID NO: 1846597 - DNA, 25 bp, Homo sapien
caaccgcgagagccccctactgcgc

SEQ ID NO: 1846598 - DNA, 25 bp, Homo sapien
cccctactgcgctttggccacaccc

SEQ ID NO: 1846599 - DNA, 25 bp, Homo sapien
ccctactgcgctttggccacacccc

SEQ ID NO: 1846600 - DNA, 25 bp, Homo sapien
agatgcagcaacgtcggctcctgcc

SEQ ID NO: 1846601 - DNA, 25 bp, Homo sapien
ttgaagaggaggctactcggagact

SEQ ID NO: 1846602 - DNA, 25 bp, Homo sapien
ggatccgccgcacaggctggcactg

SEQ ID NO: 1846603 - DNA, 25 bp, Homo sapien
ttggctgtcaaacagatgcagcaac

SEQ ID NO: 1846604 - DNA, 25 bp, Homo sapien
gtttgcattgcacggagaccttcct

SEQ ID NO: 1846605 - DNA, 25 bp, Homo sapien
gctcaagtgaggtgccataggacgt

SEQ ID NO: 1846606 - DNA, 25 bp, Homo sapien
caactcaagtttgcatcagactggg

SEQ ID NO: 1846607 - DNA, 25 bp, Homo sapien
tcagactgggaagcgaacttaagcc

SEQ ID NO: 1846608 - DNA, 25 bp, Homo sapien
ccctaatgaactagtggcagagcca

SEQ ID NO: 1846609 - DNA, 25 bp, Homo sapien
cagagtatgcaaaaaccttaagtgg

SEQ ID NO: 1846610 - DNA, 25 bp, Homo sapien
cagtgtgaatcaaaccgcttaaccc

SEQ ID NO: 1846611 - DNA, 25 bp, Homo sapien
cctacctagatttaatgagcccaag

SEQ ID NO: 1846612 - DNA, 25 bp, Homo sapien
aaaaagtgatacatgatgtgggatt

SEQ ID NO: 1846613 - DNA, 25 bp, Homo sapien
tcccccattcctagaagggcaggca

SEQ ID NO: 1846614 - DNA, 25 bp, Homo sapien
gggattaaaatcaagagcatcattg

SEQ ID NO: 1846615 - DNA, 25 bp, Homo sapien
ccttccttagtgaatgaagaactta

SEQ ID NO: 1846616 - DNA, 25 bp, Homo sapien
ctcccatagcctggggtaccaaaat

SEQ ID NO: 1846617 - DNA, 25 bp, Homo sapien
agggctcccatagcctggggtacca

SEQ ID NO: 1846618 - DNA, 25 bp, Homo sapien
ggctcccatagcctggggtaccaaa

SEQ ID NO: 1846619 - DNA, 25 bp, Homo sapien
tgagggctcccatagcctggggtac

SEQ ID NO: 1846620 - DNA, 25 bp, Homo sapien
tgcttgatcgcttgcccttctggcg

SEQ ID NO: 1846621 - DNA, 25 bp, Homo sapien
gatcgcttgcccttctggcgccggt

SEQ ID NO: 1846622 - DNA, 25 bp, Homo sapien
gcttgatcgcttgcccttctggcgc

SEQ ID NO: 1846623 - DNA, 25 bp, Homo sapien
ttgatcgcttgcccttctggcgccg

SEQ ID NO: 1846624 - DNA, 25 bp, Homo sapien
aggttgcctctcactcggttctcga

SEQ ID NO: 1846625 - DNA, 25 bp, Homo sapien
gctttctctttcgggcctgcacgaa

SEQ ID NO: 1846626 - DNA, 25 bp, Homo sapien
ttcgggcctgcacgaaggtttctgc

SEQ ID NO: 1846627 - DNA, 25 bp, Homo sapien
tctctttcgggcctgcacgaaggtt

SEQ ID NO: 1846628 - DNA, 25 bp, Homo sapien
cccacttctgcagcaagggccgcag

SEQ ID NO: 1846629 - DNA, 25 bp, Homo sapien
acccacttctgcagcaagggccgca

SEQ ID NO: 1846630 - DNA, 25 bp, Homo sapien
ttgttgtcagcttcctccacccact

SEQ ID NO: 1846631 - DNA, 25 bp, Homo sapien
ctgaagattttcattgttgtcagct

SEQ ID NO: 1846632 - DNA, 25 bp, Homo sapien
aagctgcagagcctcaaagcggcag

SEQ ID NO: 1846633 - DNA, 25 bp, Homo sapien
cggcagatggtcgtttggctgaata

SEQ ID NO: 1846634 - DNA, 25 bp, Homo sapien
cagatggtcgtttggctgaatacct

SEQ ID NO: 1846635 - DNA, 25 bp, Homo sapien
gcctcaaagcggcagatggtcgttt

SEQ ID NO: 1846636 - DNA, 25 bp, Homo sapien
cttggcaaattgctcgagttctttc

SEQ ID NO: 1846637 - DNA, 25 bp, Homo sapien
gcctgtgtatatcccagggtgatcc

SEQ ID NO: 1846638 - DNA, 25 bp, Homo sapien
ctcttctgcttcaggagcttggcaa

SEQ ID NO: 1846639 - DNA, 25 bp, Homo sapien
gtgagccccacatcggcctgtgtat

SEQ ID NO: 1846640 - DNA, 25 bp, Homo sapien
ttgtaagaacataaacacaccagtt

SEQ ID NO: 1846641 - DNA, 25 bp, Homo sapien
gaacataaacacaccagttatcaat

SEQ ID NO: 1846642 - DNA, 25 bp, Homo sapien
taaacacaccagttatcaatctccc

SEQ ID NO: 1846643 - DNA, 25 bp, Homo sapien
taagaacataaacacaccagttatc

SEQ ID NO: 1846644 - DNA, 25 bp, Homo sapien
cccaaggaatagtctgtagaagtgc

SEQ ID NO: 1846645 - DNA, 25 bp, Homo sapien
tacgtgtggccccaaggaatagtct

SEQ ID NO: 1846646 - DNA, 25 bp, Homo sapien
ctttccattcgggattcaagaacct

SEQ ID NO: 1846647 - DNA, 25 bp, Homo sapien
cattcgggattcaagaacctacgtg

SEQ ID NO: 1846648 - DNA, 25 bp, Homo sapien
agctgcccacctaacttctagaaat

SEQ ID NO: 1846649 - DNA, 25 bp, Homo sapien
tgcccacctaacttctagaaataac

SEQ ID NO: 1846650 - DNA, 25 bp, Homo sapien
tcacccattccctgttcactgactc

SEQ ID NO: 1846651 - DNA, 25 bp, Homo sapien
gctgcccacctaacttctagaaata

SEQ ID NO: 1846652 - DNA, 25 bp, Homo sapien
gctccagcttctccttctccagctt

SEQ ID NO: 1846653 - DNA, 25 bp, Homo sapien
ccagcttctccttctccagcttcac

SEQ ID NO: 1846654 - DNA, 25 bp, Homo sapien
ctcctccgggttttgctccagcttc

SEQ ID NO: 1846655 - DNA, 25 bp, Homo sapien
tcctccgggttttgctccagcttct

SEQ ID NO: 1846656 - DNA, 25 bp, Homo sapien
tgagaggtctccaagccgccttggg

SEQ ID NO: 1846657 - DNA, 25 bp, Homo sapien
tcctgcttcgccctcaggctgagag

SEQ ID NO: 1846658 - DNA, 25 bp, Homo sapien
gggaggccccatcggagttgctctc

SEQ ID NO: 1846659 - DNA, 25 bp, Homo sapien
gaagcttagccaggtccgaggatca

SEQ ID NO: 1846660 - DNA, 25 bp, Homo sapien
aatctgaagccaggtgtcccgccat

SEQ ID NO: 1846661 - DNA, 25 bp, Homo sapien
gagggggcgagaaggcaaaatctga

SEQ ID NO: 1846662 - DNA, 25 bp, Homo sapien
tggagggggcgagaaggcaaaatct

SEQ ID NO: 1846663 - DNA, 25 bp, Homo sapien
gggcgagaaggcaaaatctgaagcc

SEQ ID NO: 1846664 - DNA, 25 bp, Homo sapien
cgctccctggcactctctcaggctc

SEQ ID NO: 1846665 - DNA, 25 bp, Homo sapien
tctactgggccaaagcaatccttct

SEQ ID NO: 1846666 - DNA, 25 bp, Homo sapien
gctcaatgtagcctcgatctactgg

SEQ ID NO: 1846667 - DNA, 25 bp, Homo sapien
tagcctcgatctactgggccaaagc

SEQ ID NO: 1846668 - DNA, 25 bp, Homo sapien
gctctcgacccggtctaggaaacca

SEQ ID NO: 1846669 - DNA, 25 bp, Homo sapien
ttattacagtgcaatgtcaagaccc

SEQ ID NO: 1846670 - DNA, 25 bp, Homo sapien
cctttattattacagtgcaatgtca

SEQ ID NO: 1846671 - DNA, 25 bp, Homo sapien
aaaaactcagttgggaccaatagag

SEQ ID NO: 1846672 - DNA, 25 bp, Homo sapien
taatagcaatttagacaaattcctt

SEQ ID NO: 1846673 - DNA, 25 bp, Homo sapien
tgagggttcaggcttggcccacctt

SEQ ID NO: 1846674 - DNA, 25 bp, Homo sapien
ctcaaatagaggagtcaactctcta

SEQ ID NO: 1846675 - DNA, 25 bp, Homo sapien
caaatagaggagtcaactctctagc

SEQ ID NO: 1846676 - DNA, 25 bp, Homo sapien
gaggagtcaactctctagctgtagc

SEQ ID NO: 1846677 - DNA, 25 bp, Homo sapien
tagaggagtcaactctctagctgta

SEQ ID NO: 1846678 - DNA, 25 bp, Homo sapien
aagaggatttggactcaatgaactc

SEQ ID NO: 1846679 - DNA, 25 bp, Homo sapien
cacctagtaaagaggatttggactc

SEQ ID NO: 1846680 - DNA, 25 bp, Homo sapien
agtttcctcacctagtaaagaggat

SEQ ID NO: 1846681 - DNA, 25 bp, Homo sapien
ggactcaatgaactctaaacttcct

SEQ ID NO: 1846682 - DNA, 25 bp, Homo sapien
ttgacatgggaatgtagacttctct

SEQ ID NO: 1846683 - DNA, 25 bp, Homo sapien
tgacatgggaatgtagacttctctg

SEQ ID NO: 1846684 - DNA, 25 bp, Homo sapien
gacatgggaatgtagacttctctgc

SEQ ID NO: 1846685 - DNA, 25 bp, Homo sapien
aaagctgggagtggtgttcaatgag

SEQ ID NO: 1846686 - DNA, 25 bp, Homo sapien
aatgagaagttggcataggcctccc

SEQ ID NO: 1846687 - DNA, 25 bp, Homo sapien
tgatcaagagatataggaggaggcc

SEQ ID NO: 1846688 - DNA, 25 bp, Homo sapien
tttcccctgaagtttgatcaagaga

SEQ ID NO: 1846689 - DNA, 25 bp, Homo sapien
tatttccggagagggtagacgcagc

SEQ ID NO: 1846690 - DNA, 25 bp, Homo sapien
tcaagtgtgctaagaagggagtcct

SEQ ID NO: 1846691 - DNA, 25 bp, Homo sapien
cacagttgtagtgccagtgtcccca

SEQ ID NO: 1846692 - DNA, 25 bp, Homo sapien
tagacgcagctctaggtcaggaagg

SEQ ID NO: 1846693 - DNA, 25 bp, Homo sapien
tagggtaccgtgaatatttagtgcc

SEQ ID NO: 1846694 - DNA, 25 bp, Homo sapien
tgaaacctcctgcatcctgagtgcc

SEQ ID NO: 1846695 - DNA, 25 bp, Homo sapien
tagtttcaaacagtcagcaagccct

SEQ ID NO: 1846696 - DNA, 25 bp, Homo sapien
tattcccaaacaatcggcaagtctg

SEQ ID NO: 1846697 - DNA, 25 bp, Homo sapien
tattttctgtattgacaggttttcc

SEQ ID NO: 1846698 - DNA, 25 bp, Homo sapien
taagcttcaagtgggagacatggga

SEQ ID NO: 1846699 - DNA, 25 bp, Homo sapien
cctacggccaagtttaagcttcaag

SEQ ID NO: 1846700 - DNA, 25 bp, Homo sapien
attacaggcataaggacctcctacg

SEQ ID NO: 1846701 - DNA, 25 bp, Homo sapien
tgtctaagtggcaggcctatagtat

SEQ ID NO: 1846702 - DNA, 25 bp, Homo sapien
ttttttaggaggtcatttatcatct

SEQ ID NO: 1846703 - DNA, 25 bp, Homo sapien
tttaggaggtcatttatcatctttc

SEQ ID NO: 1846704 - DNA, 25 bp, Homo sapien
tggcaggcctatagtattatataat

SEQ ID NO: 1846705 - DNA, 25 bp, Homo sapien
atagcggcacaagcaccaaatttta

SEQ ID NO: 1846706 - DNA, 25 bp, Homo sapien
cttactatcaatagcggcacaagca

SEQ ID NO: 1846707 - DNA, 25 bp, Homo sapien
tcacgggaggcttaaaatgggtcat

SEQ ID NO: 1846708 - DNA, 25 bp, Homo sapien
tgtgatcacgggaggcttaaaatgg

SEQ ID NO: 1846709 - DNA, 25 bp, Homo sapien
gcctaagagttagctcatctgcttc

SEQ ID NO: 1846710 - DNA, 25 bp, Homo sapien
tgtggggctccaattgcatttaagt

SEQ ID NO: 1846711 - DNA, 25 bp, Homo sapien
ttgcatttaagtagatgtgagaatt

SEQ ID NO: 1846712 - DNA, 25 bp, Homo sapien
ggttttgcctaagagttagctcatc

SEQ ID NO: 1846713 - DNA, 25 bp, Homo sapien
ttcctggtgtcacagtaacatcgta

SEQ ID NO: 1846714 - DNA, 25 bp, Homo sapien
cagtaacatcgtaatctcccttaaa

SEQ ID NO: 1846715 - DNA, 25 bp, Homo sapien
agatgcttatgctactgttctctta

SEQ ID NO: 1846716 - DNA, 25 bp, Homo sapien
cagatgcttatgctactgttctctt

SEQ ID NO: 1846717 - DNA, 25 bp, Homo sapien
cgtcagttacctcgcttcctgttca

SEQ ID NO: 1846718 - DNA, 25 bp, Homo sapien
caccacacgtgcactacaaaacaaa

SEQ ID NO: 1846719 - DNA, 25 bp, Homo sapien
gctgccttggccgtccgtcagttac

SEQ ID NO: 1846720 - DNA, 25 bp, Homo sapien
cacacaatctaagtcaagtcaaaac

SEQ ID NO: 1846721 - DNA, 25 bp, Homo sapien
tgtgtgccgcgcttgccggccagct

SEQ ID NO: 1846722 - DNA, 25 bp, Homo sapien
aaagtaaaaccgagaggtgacagcg

SEQ ID NO: 1846723 - DNA, 25 bp, Homo sapien
gggctgtgtgccgcgcttgccggcc

SEQ ID NO: 1846724 - DNA, 25 bp, Homo sapien
ataaagtaaaaccgagaggtgacag

SEQ ID NO: 1846725 - DNA, 25 bp, Homo sapien
cccgagcctcctcgacgagcaccac

SEQ ID NO: 1846726 - DNA, 25 bp, Homo sapien
cgagcctcctcgacgagcaccaccc

SEQ ID NO: 1846727 - DNA, 25 bp, Homo sapien
ccgagcctcctcgacgagcaccacc

SEQ ID NO: 1846728 - DNA, 25 bp, Homo sapien
ctgtgtatctaactaatctgatggg

SEQ ID NO: 1846729 - DNA, 25 bp, Homo sapien
gcaagaccaaaagcccaccgggaga

SEQ ID NO: 1846730 - DNA, 25 bp, Homo sapien
acctttgtgtccatactgtgtatct

SEQ ID NO: 1846731 - DNA, 25 bp, Homo sapien
cagtggcaacccagtcgggttctcg

SEQ ID NO: 1846732 - DNA, 25 bp, Homo sapien
aggctggactcggaattactgcccc

SEQ ID NO: 1846733 - DNA, 25 bp, Homo sapien
gaatccgccgtggtgtttcaagcga

SEQ ID NO: 1846734 - DNA, 25 bp, Homo sapien
cggctgtcactgcagactttgatgg

SEQ ID NO: 1846735 - DNA, 25 bp, Homo sapien
tcctctgggcgcgaagccagtttcc

SEQ ID NO: 1846736 - DNA, 25 bp, Homo sapien
tggcttctcatctgccaagctcact

SEQ ID NO: 1846737 - DNA, 25 bp, Homo sapien
gccatgcagagcacctggcttctca

SEQ ID NO: 1846738 - DNA, 25 bp, Homo sapien
cttgccatgcagagcacctggcttc

SEQ ID NO: 1846739 - DNA, 25 bp, Homo sapien
catgcagagcacctggcttctcatc

SEQ ID NO: 1846740 - DNA, 25 bp, Homo sapien
aggatacaatatcgaaggggccagt

SEQ ID NO: 1846741 - DNA, 25 bp, Homo sapien
aaggggccagtatactgccctcagg

SEQ ID NO: 1846742 - DNA, 25 bp, Homo sapien
ctgaccataatgttctgcttgtccc

SEQ ID NO: 1846743 - DNA, 25 bp, Homo sapien
tgctgaccataatgttctgcttgtc

SEQ ID NO: 1846744 - DNA, 25 bp, Homo sapien
gagattcacagttcatccaatagac

SEQ ID NO: 1846745 - DNA, 25 bp, Homo sapien
taagttcttacagatgaacaaagct

SEQ ID NO: 1846746 - DNA, 25 bp, Homo sapien
aggactacctactgtaaattactgg

SEQ ID NO: 1846747 - DNA, 25 bp, Homo sapien
tcctacatttccatgattatgagat

SEQ ID NO: 1846748 - DNA, 25 bp, Homo sapien
tgagctggcccaagccaaagagttg

SEQ ID NO: 1846749 - DNA, 25 bp, Homo sapien
ctggcccaagccaaagagttgctgg

SEQ ID NO: 1846750 - DNA, 25 bp, Homo sapien
gcccaagccaaagagttgctggagc

SEQ ID NO: 1846751 - DNA, 25 bp, Homo sapien
gagctggcccaagccaaagagttgc

SEQ ID NO: 1846752 - DNA, 25 bp, Homo sapien
tgctgcccatcacactggatccttg

SEQ ID NO: 1846753 - DNA, 25 bp, Homo sapien
acactggatccttgcatgattctca

SEQ ID NO: 1846754 - DNA, 25 bp, Homo sapien
ggcagctcactaacactgacctcga

SEQ ID NO: 1846755 - DNA, 25 bp, Homo sapien
catctgacacaaacgctgatggcca

SEQ ID NO: 1846756 - DNA, 25 bp, Homo sapien
cgtggcccaataggttggtaaccat

SEQ ID NO: 1846757 - DNA, 25 bp, Homo sapien
gctcatccacttgatgtctatgacg

SEQ ID NO: 1846758 - DNA, 25 bp, Homo sapien
cattgataaaggcaatgctcatcca

SEQ ID NO: 1846759 - DNA, 25 bp, Homo sapien
gatgtctatgacgtggcccaatagg

SEQ ID NO: 1846760 - DNA, 25 bp, Homo sapien
tcttactcactacgaggattgctta

SEQ ID NO: 1846761 - DNA, 25 bp, Homo sapien
tccccatcttactcactacgaggat

SEQ ID NO: 1846762 - DNA, 25 bp, Homo sapien
ttgttacccgatgcttccaagctcc

SEQ ID NO: 1846763 - DNA, 25 bp, Homo sapien
cattgttacccgatgcttccaagct

SEQ ID NO: 1846764 - DNA, 25 bp, Homo sapien
aaactctgcattgactcagaggcac

SEQ ID NO: 1846765 - DNA, 25 bp, Homo sapien
tctgcattgactcagaggcacctac

SEQ ID NO: 1846766 - DNA, 25 bp, Homo sapien
tcaggcaaaactctgcattgactca

SEQ ID NO: 1846767 - DNA, 25 bp, Homo sapien
ggcaaaactctgcattgactcagag

SEQ ID NO: 1846768 - DNA, 25 bp, Homo sapien
atcagagcatcaggctcagtagcaa

SEQ ID NO: 1846769 - DNA, 25 bp, Homo sapien
gcatcaggctcagtagcaattccct

SEQ ID NO: 1846770 - DNA, 25 bp, Homo sapien
caggctcagtagcaattcccttctg

SEQ ID NO: 1846771 - DNA, 25 bp, Homo sapien
gagcatcaggctcagtagcaattcc

SEQ ID NO: 1846772 - DNA, 25 bp, Homo sapien
gaattaagacccactcatatgacct

SEQ ID NO: 1846773 - DNA, 25 bp, Homo sapien
attcctctgcatcagtctatgtcta

SEQ ID NO: 1846774 - DNA, 25 bp, Homo sapien
cacactgggtgacgtaaagaacaga

SEQ ID NO: 1846775 - DNA, 25 bp, Homo sapien
cactagtcacattgaattaagaccc

SEQ ID NO: 1846776 - DNA, 25 bp, Homo sapien
cacagcttccgctggacaagtttcc

SEQ ID NO: 1846777 - DNA, 25 bp, Homo sapien
acagcttccgctggacaagtttcca

SEQ ID NO: 1846778 - DNA, 25 bp, Homo sapien
tcacagcttccgctggacaagtttc

SEQ ID NO: 1846779 - DNA, 25 bp, Homo sapien
atttaattaatccatcaacgcttca

SEQ ID NO: 1846780 - DNA, 25 bp, Homo sapien
aatccatcaacgcttcatagcaaat

SEQ ID NO: 1846781 - DNA, 25 bp, Homo sapien
atttatattcaggttcttaacttca

SEQ ID NO: 1846782 - DNA, 25 bp, Homo sapien
aattaatccatcaacgcttcatagc

SEQ ID NO: 1846783 - DNA, 25 bp, Homo sapien
attatgctaacaggaacgcagacac

SEQ ID NO: 1846784 - DNA, 25 bp, Homo sapien
tatgctaacaggaacgcagacacat

SEQ ID NO: 1846785 - DNA, 25 bp, Homo sapien
ttatgctaacaggaacgcagacaca

SEQ ID NO: 1846786 - DNA, 25 bp, Homo sapien
agacgcctttgcagaaagagatgcc

SEQ ID NO: 1846787 - DNA, 25 bp, Homo sapien
tttgcagaaagagatgccagaggct

SEQ ID NO: 1846788 - DNA, 25 bp, Homo sapien
tcagacgcctttgcagaaagagatg

SEQ ID NO: 1846789 - DNA, 25 bp, Homo sapien
cctttgcagaaagagatgccagagg

SEQ ID NO: 1846790 - DNA, 25 bp, Homo sapien
ggagaggtgtgaagaaatcctgcat

SEQ ID NO: 1846791 - DNA, 25 bp, Homo sapien
ctgcatctcagtcccacacaggcag

SEQ ID NO: 1846792 - DNA, 25 bp, Homo sapien
agaaatcctgcatctcagtcccaca

SEQ ID NO: 1846793 - DNA, 25 bp, Homo sapien
cttgaagtcacaaaggagaggtgtg

SEQ ID NO: 1846794 - DNA, 25 bp, Homo sapien
ttacaagtgatgagagactcatcag

SEQ ID NO: 1846795 - DNA, 25 bp, Homo sapien
tacaagtgatgagagactcatcaga

SEQ ID NO: 1846796 - DNA, 25 bp, Homo sapien
caagtgatgagagactcatcagagc

SEQ ID NO: 1846797 - DNA, 25 bp, Homo sapien
agtgatgagagactcatcagagccc

SEQ ID NO: 1846798 - DNA, 25 bp, Homo sapien
tggagtaggtgagctcctccacacg

SEQ ID NO: 1846799 - DNA, 25 bp, Homo sapien
gatgtgggacaagaggaattatgga

SEQ ID NO: 1846800 - DNA, 25 bp, Homo sapien
aaaaagacctggtcagagcccgcag

SEQ ID NO: 1846801 - DNA, 25 bp, Homo sapien
tccacacgcccgccgccatcactta

SEQ ID NO: 1846802 - DNA, 25 bp, Homo sapien
acgcagcctgagagcagctccctcc

SEQ ID NO: 1846803 - DNA, 25 bp, Homo sapien
cgcagcctgagagcagctccctcct

SEQ ID NO: 1846804 - DNA, 25 bp, Homo sapien
agcctgagagcagctccctcctttt

SEQ ID NO: 1846805 - DNA, 25 bp, Homo sapien
ctgagagcagctccctccttttcca

SEQ ID NO: 1846806 - DNA, 25 bp, Homo sapien
gatggtgcttccagtaacaaggcgg

SEQ ID NO: 1846807 - DNA, 25 bp, Homo sapien
ggatggcccatgtgtggatggtgct

SEQ ID NO: 1846808 - DNA, 25 bp, Homo sapien
cccaacaccataatcatcaaggtga

SEQ ID NO: 1846809 - DNA, 25 bp, Homo sapien
agtttccagaactacgactgcagac

SEQ ID NO: 1846810 - DNA, 25 bp, Homo sapien
tccaaggacagctaggacaaccagg

SEQ ID NO: 1846811 - DNA, 25 bp, Homo sapien
acacatcatagcggtgaccacagct

SEQ ID NO: 1846812 - DNA, 25 bp, Homo sapien
aaggacagctaggacaaccaggaca

SEQ ID NO: 1846813 - DNA, 25 bp, Homo sapien
ctccaaggacagctaggacaaccag

SEQ ID NO: 1846814 - DNA, 25 bp, Homo sapien
aggaggagaaggtgaggggccctga

SEQ ID NO: 1846815 - DNA, 25 bp, Homo sapien
gaggagaaggtgaggggccctgacc

SEQ ID NO: 1846816 - DNA, 25 bp, Homo sapien
ctgacccccaagcctcagccctgac

SEQ ID NO: 1846817 - DNA, 25 bp, Homo sapien
tgaggggccctgacccccaagcctc

SEQ ID NO: 1846818 - DNA, 25 bp, Homo sapien
tgctttctctgataagagatgtgac

SEQ ID NO: 1846819 - DNA, 25 bp, Homo sapien
gcagcccctcgtgctgcatatggca

SEQ ID NO: 1846820 - DNA, 25 bp, Homo sapien
tcttgcagcccctcgtgctgcatat

SEQ ID NO: 1846821 - DNA, 25 bp, Homo sapien
cctcgtgctgcatatggcacgtgta

SEQ ID NO: 1846822 - DNA, 25 bp, Homo sapien
gcatatggcacgtgtatctctgctc

SEQ ID NO: 1846823 - DNA, 25 bp, Homo sapien
ccacttctggaaggttccatctcct

SEQ ID NO: 1846824 - DNA, 25 bp, Homo sapien
tctggaaggttccatctcctgctgg

SEQ ID NO: 1846825 - DNA, 25 bp, Homo sapien
cagctgcccacttctggaaggttcc

SEQ ID NO: 1846826 - DNA, 25 bp, Homo sapien
gcccacttctggaaggttccatctc

SEQ ID NO: 1846827 - DNA, 25 bp, Homo sapien
gtgtcctgggtctggtcctccccat

SEQ ID NO: 1846828 - DNA, 25 bp, Homo sapien
tcatggtcagagagggggtggtggg

SEQ ID NO: 1846829 - DNA, 25 bp, Homo sapien
ctcatggtcagagagggggtggtgg

SEQ ID NO: 1846830 - DNA, 25 bp, Homo sapien
gagggggtggtgggtcacgtgtgtc

SEQ ID NO: 1846831 - DNA, 25 bp, Homo sapien
ggtggtgggtcacgtgtgtctttgg

SEQ ID NO: 1846832 - DNA, 25 bp, Homo sapien
ggtatctgcggagccactccacgca

SEQ ID NO: 1846833 - DNA, 25 bp, Homo sapien
tccaggtatctgcggagccactcca

SEQ ID NO: 1846834 - DNA, 25 bp, Homo sapien
tctgcggagccactccacgcacgtg

SEQ ID NO: 1846835 - DNA, 25 bp, Homo sapien
ctgcggagccactccacgcacgtgc

SEQ ID NO: 1846836 - DNA, 25 bp, Homo sapien
ccgcacgggccgcctccaacttgcg

SEQ ID NO: 1846837 - DNA, 25 bp, Homo sapien
ctccgccgcacgggccgcctccaac

SEQ ID NO: 1846838 - DNA, 25 bp, Homo sapien
gccgcacgggccgcctccaacttgc

SEQ ID NO: 1846839 - DNA, 25 bp, Homo sapien
ccgccgcacgggccgcctccaactt

SEQ ID NO: 1846840 - DNA, 25 bp, Homo sapien
ggtccaggagcgcaggtcctcgttc

SEQ ID NO: 1846841 - DNA, 25 bp, Homo sapien
gatgtaatccttgccgtcgtaggcg

SEQ ID NO: 1846842 - DNA, 25 bp, Homo sapien
caggtcctcgttcagggcgatgtaa

SEQ ID NO: 1846843 - DNA, 25 bp, Homo sapien
tcagggcgatgtaatccttgccgtc

SEQ ID NO: 1846844 - DNA, 25 bp, Homo sapien
cccgcggtcagcccagtcccccgag

SEQ ID NO: 1846845 - DNA, 25 bp, Homo sapien
gcggtcagcccagtcccccgagccc

SEQ ID NO: 1846846 - DNA, 25 bp, Homo sapien
tcagcccagtcccccgagccccgcc

SEQ ID NO: 1846847 - DNA, 25 bp, Homo sapien
gtcagcccagtcccccgagccccgc

SEQ ID NO: 1846848 - DNA, 25 bp, Homo sapien
gtaaaggcgactggggctctctccg

SEQ ID NO: 1846849 - DNA, 25 bp, Homo sapien
cagatccaccttggggtggatctca

SEQ ID NO: 1846850 - DNA, 25 bp, Homo sapien
ggcgactggggctctctccggtcga

SEQ ID NO: 1846851 - DNA, 25 bp, Homo sapien
gggcgggttccgcagatccaccttg

SEQ ID NO: 1846852 - DNA, 25 bp, Homo sapien
tggggaggggtcgtgacctgcgccc

SEQ ID NO: 1846853 - DNA, 25 bp, Homo sapien
gggatggggaggggtcgtgacctgc

SEQ ID NO: 1846854 - DNA, 25 bp, Homo sapien
gatggggaggggtcgtgacctgcgc

SEQ ID NO: 1846855 - DNA, 25 bp, Homo sapien
tgacctgcgccccgggccggggtca

SEQ ID NO: 1846856 - DNA, 25 bp, Homo sapien
gcgcaggttccgcaggctcactcgg

SEQ ID NO: 1846857 - DNA, 25 bp, Homo sapien
cctggcgcttgtagttctgtgtctc

SEQ ID NO: 1846858 - DNA, 25 bp, Homo sapien
cgcaggttccgcaggctcactcggt

SEQ ID NO: 1846859 - DNA, 25 bp, Homo sapien
cagcctgtgcctggcgcttgtagtt

SEQ ID NO: 1846860 - DNA, 25 bp, Homo sapien
cacggcggtgtcgaaatacctcatg

SEQ ID NO: 1846861 - DNA, 25 bp, Homo sapien
ggacacggcggtgtcgaaatacctc

SEQ ID NO: 1846862 - DNA, 25 bp, Homo sapien
cggcggtgtcgaaatacctcatgga

SEQ ID NO: 1846863 - DNA, 25 bp, Homo sapien
tgagatgaagcggggctctccgcgg

SEQ ID NO: 1846864 - DNA, 25 bp, Homo sapien
tgggggcgaggaggggctgagaccc

SEQ ID NO: 1846865 - DNA, 25 bp, Homo sapien
gaggggctgagacccgcccgaccca

SEQ ID NO: 1846866 - DNA, 25 bp, Homo sapien
ggcgaggaggggctgagacccgccc

SEQ ID NO: 1846867 - DNA, 25 bp, Homo sapien
gaggaggggctgagacccgcccgac

SEQ ID NO: 1846868 - DNA, 25 bp, Homo sapien
ccgcagaggccgcttccctcccaac

SEQ ID NO: 1846869 - DNA, 25 bp, Homo sapien
ctctccgcagaggccgcttccctcc

SEQ ID NO: 1846870 - DNA, 25 bp, Homo sapien
tccgcagaggccgcttccctcccaa

SEQ ID NO: 1846871 - DNA, 25 bp, Homo sapien
tctccgcagaggccgcttccctccc

SEQ ID NO: 1846872 - DNA, 25 bp, Homo sapien
tcggtcagggccaggcctcccgaga

SEQ ID NO: 1846873 - DNA, 25 bp, Homo sapien
tcagggccaggcctcccgagagcag

SEQ ID NO: 1846874 - DNA, 25 bp, Homo sapien
gcccaggtctcggtcagggccaggc

SEQ ID NO: 1846875 - DNA, 25 bp, Homo sapien
gccaggcctcccgagagcagcagga

SEQ ID NO: 1846876 - DNA, 25 bp, Homo sapien
tggggagaatgtgagtccgggtggg

SEQ ID NO: 1846877 - DNA, 25 bp, Homo sapien
ggagaatgtgagtccgggtgggtga

SEQ ID NO: 1846878 - DNA, 25 bp, Homo sapien
tcggcctctggggagaatgtgagtc

SEQ ID NO: 1846879 - DNA, 25 bp, Homo sapien
ctctggggagaatgtgagtccgggt

SEQ ID NO: 1846880 - DNA, 25 bp, Homo sapien
ctgggaacagatattgcaactggtg

SEQ ID NO: 1846881 - DNA, 25 bp, Homo sapien
tgcaactggtgggatctcaataaaa

SEQ ID NO: 1846882 - DNA, 25 bp, Homo sapien
aggctcaagcaccaggtacctgtga

SEQ ID NO: 1846883 - DNA, 25 bp, Homo sapien
actgggctggcgagaggctcaagca

SEQ ID NO: 1846884 - DNA, 25 bp, Homo sapien
cgctcttgaggtccatttagggcca

SEQ ID NO: 1846885 - DNA, 25 bp, Homo sapien
ggatgctccatggtgcacactgaga

SEQ ID NO: 1846886 - DNA, 25 bp, Homo sapien
taagtgcacaggattggaacacagc

SEQ ID NO: 1846887 - DNA, 25 bp, Homo sapien
caagcacctgtgctgggagcatcct

SEQ ID NO: 1846888 - DNA, 25 bp, Homo sapien
ctggtgcgtaatagtgacaagattg

SEQ ID NO: 1846889 - DNA, 25 bp, Homo sapien
ggcagagttccctggtgcaaatgct

SEQ ID NO: 1846890 - DNA, 25 bp, Homo sapien
gattgttgttggttacactttcaag

SEQ ID NO: 1846891 - DNA, 25 bp, Homo sapien
gattagatgctcctcttcacgggag

SEQ ID NO: 1846892 - DNA, 25 bp, Homo sapien
aagccgctctttgagccgctgtcca

SEQ ID NO: 1846893 - DNA, 25 bp, Homo sapien
tgaaatctccttgtcgtaggcggac

SEQ ID NO: 1846894 - DNA, 25 bp, Homo sapien
ctagtgcagtgacccatcggggctt

SEQ ID NO: 1846895 - DNA, 25 bp, Homo sapien
tgtgatggatcctccaagccgctct

SEQ ID NO: 1846896 - DNA, 25 bp, Homo sapien
aactcagggcccacgtggtgaaggc

SEQ ID NO: 1846897 - DNA, 25 bp, Homo sapien
ttctcgccgcggctgtggaagctca

SEQ ID NO: 1846898 - DNA, 25 bp, Homo sapien
aggaatcgcgtgtcgcccacgaagg

SEQ ID NO: 1846899 - DNA, 25 bp, Homo sapien
taacacattccctgcggtcttcgag

SEQ ID NO: 1846900 - DNA, 25 bp, Homo sapien
gggacacaggatccggcttctctgg

SEQ ID NO: 1846901 - DNA, 25 bp, Homo sapien
cagttctccctaaggtcagggccca

SEQ ID NO: 1846902 - DNA, 25 bp, Homo sapien
actgataaaggcgtcccatctggac

SEQ ID NO: 1846903 - DNA, 25 bp, Homo sapien
tagaacccgagaccaactgataaag

SEQ ID NO: 1846904 - DNA, 25 bp, Homo sapien
cttgttgatattccccaaacttcat

SEQ ID NO: 1846905 - DNA, 25 bp, Homo sapien
ttcttgttgatattccccaaacttc

SEQ ID NO: 1846906 - DNA, 25 bp, Homo sapien
tcttgttgatattccccaaacttca

SEQ ID NO: 1846907 - DNA, 25 bp, Homo sapien
gaccctgtttcagtggctagagttt

SEQ ID NO: 1846908 - DNA, 25 bp, Homo sapien
ttttacttctactatagctactttg

SEQ ID NO: 1846909 - DNA, 25 bp, Homo sapien
agaccctgtttcagtggctagagtt

SEQ ID NO: 1846910 - DNA, 25 bp, Homo sapien
tggggtgatggtttgaggaagatgt

SEQ ID NO: 1846911 - DNA, 25 bp, Homo sapien
gaccaagtatagcatagggactctg

SEQ ID NO: 1846912 - DNA, 25 bp, Homo sapien
gaaggtgacgcctacttgactcgag

SEQ ID NO: 1846913 - DNA, 25 bp, Homo sapien
tgttgtgagcaccagatagggtcct

SEQ ID NO: 1846914 - DNA, 25 bp, Homo sapien
tgataaggacgtgtgatctccgggt

SEQ ID NO: 1846915 - DNA, 25 bp, Homo sapien
tcacactgagatagaggccgcctat

SEQ ID NO: 1846916 - DNA, 25 bp, Homo sapien
gaaggtgacccagctgaggactaac

SEQ ID NO: 1846917 - DNA, 25 bp, Homo sapien
tgatggactcaacaccaaatgggca

SEQ ID NO: 1846918 - DNA, 25 bp, Homo sapien
gaacagtccttgatgacgggtccaa

SEQ ID NO: 1846919 - DNA, 25 bp, Homo sapien
tcaggtctttatttgctctctcaaa

SEQ ID NO: 1846920 - DNA, 25 bp, Homo sapien
aattaatccatcaacctctcatagc

SEQ ID NO: 1846921 - DNA, 25 bp, Homo sapien
ctctctcaaattccaggaattgact

SEQ ID NO: 1846922 - DNA, 25 bp, Homo sapien
cttatttaattaatccatcaacctc

SEQ ID NO: 1846923 - DNA, 25 bp, Homo sapien
tctctggaacaagaaagatgactgg

SEQ ID NO: 1846924 - DNA, 25 bp, Homo sapien
gaaacacaggtcagcatgggaacag

SEQ ID NO: 1846925 - DNA, 25 bp, Homo sapien
gcacgtaaagttgagacagagatgg

SEQ ID NO: 1846926 - DNA, 25 bp, Homo sapien
gtaagaagttgcagctcagtgcacg

SEQ ID NO: 1846927 - DNA, 25 bp, Homo sapien
aacagggacgcagacacattcaggt

SEQ ID NO: 1846928 - DNA, 25 bp, Homo sapien
acccactctagaccccaagaatctc

SEQ ID NO: 1846929 - DNA, 25 bp, Homo sapien
tgaacaaattctggttagtcatggt

SEQ ID NO: 1846930 - DNA, 25 bp, Homo sapien
acacacgcgaaacatcccaatcaaa

SEQ ID NO: 1846931 - DNA, 25 bp, Homo sapien
caatcaaagaatctccattacccag

SEQ ID NO: 1846932 - DNA, 25 bp, Homo sapien
tcaagctgtgagagacacatcagag

SEQ ID NO: 1846933 - DNA, 25 bp, Homo sapien
cacatcagagccctgggcactgtcg

SEQ ID NO: 1846934 - DNA, 25 bp, Homo sapien
acacatcagagccctgggcactgtc

SEQ ID NO: 1846935 - DNA, 25 bp, Homo sapien
agctgtgagagacacatcagagccc

SEQ ID NO: 1846936 - DNA, 25 bp, Homo sapien
ggtcagagcccgcaggagacgtggg

SEQ ID NO: 1846937 - DNA, 25 bp, Homo sapien
tcagagcccgcaggagacgtgggac

SEQ ID NO: 1846938 - DNA, 25 bp, Homo sapien
gtgggacaggaggaattatggggtg

SEQ ID NO: 1846939 - DNA, 25 bp, Homo sapien
gtcagagcccgcaggagacgtggga

SEQ ID NO: 1846940 - DNA, 25 bp, Homo sapien
cagcctgagagtagctccctccttt

SEQ ID NO: 1846941 - DNA, 25 bp, Homo sapien
gcagcctgagagtagctccctcctt

SEQ ID NO: 1846942 - DNA, 25 bp, Homo sapien
agcctgagagtagctccctcctttt

SEQ ID NO: 1846943 - DNA, 25 bp, Homo sapien
gcctgagagtagctccctccttttc

SEQ ID NO: 1846944 - DNA, 25 bp, Homo sapien
aagcagggccatgagatcttagagg

SEQ ID NO: 1846945 - DNA, 25 bp, Homo sapien
catgagatcttagaggaacctcctc

SEQ ID NO: 1846946 - DNA, 25 bp, Homo sapien
gaagcagggccatgagatcttagag

SEQ ID NO: 1846947 - DNA, 25 bp, Homo sapien
gagatcttagaggaacctcctcgtc

SEQ ID NO: 1846948 - DNA, 25 bp, Homo sapien
cttcattgtcacatgtgctgcacaa

SEQ ID NO: 1846949 - DNA, 25 bp, Homo sapien
caggctgcgttagcccctgtgtgga

SEQ ID NO: 1846950 - DNA, 25 bp, Homo sapien
tcaggaaacacgaggaaagcaagtg

SEQ ID NO: 1846951 - DNA, 25 bp, Homo sapien
accacaaccaccaaggtgatacatc

SEQ ID NO: 1846952 - DNA, 25 bp, Homo sapien
gatcacgaattttcttattttattg

SEQ ID NO: 1846953 - DNA, 25 bp, Homo sapien
caataaaataagaaaattcgtgatc

SEQ ID NO: 1846954 - DNA, 25 bp, Homo sapien
accacagctccgatgaccacaactg

SEQ ID NO: 1846955 - DNA, 25 bp, Homo sapien
gctccgatgaccacaactgctagga

SEQ ID NO: 1846956 - DNA, 25 bp, Homo sapien
acagctccgatgaccacaactgcta

SEQ ID NO: 1846957 - DNA, 25 bp, Homo sapien
cgatgaccacaactgctaggacagc

SEQ ID NO: 1846958 - DNA, 25 bp, Homo sapien
ggaagatgaggggccctgaccctgc

SEQ ID NO: 1846959 - DNA, 25 bp, Homo sapien
gggaagatgaggggccctgaccctg

SEQ ID NO: 1846960 - DNA, 25 bp, Homo sapien
gaagatgaggggccctgaccctgct

SEQ ID NO: 1846961 - DNA, 25 bp, Homo sapien
cctgagaagagatatgacccctcat

SEQ ID NO: 1846962 - DNA, 25 bp, Homo sapien
ttccctgagaagagatatgacccct

SEQ ID NO: 1846963 - DNA, 25 bp, Homo sapien
gagaagagatatgacccctcatccc

SEQ ID NO: 1846964 - DNA, 25 bp, Homo sapien
ctttccctgagaagagatatgaccc

SEQ ID NO: 1846965 - DNA, 25 bp, Homo sapien
gcccctcatgctgtacatggcatgt

SEQ ID NO: 1846966 - DNA, 25 bp, Homo sapien
ttcggcagcccctcatgctgtacat

SEQ ID NO: 1846967 - DNA, 25 bp, Homo sapien
catgctgtacatggcatgtgtatct

SEQ ID NO: 1846968 - DNA, 25 bp, Homo sapien
gggcttcggcagcccctcatgctgt

SEQ ID NO: 1846969 - DNA, 25 bp, Homo sapien
gtgatctccgcagggtagaagccca

SEQ ID NO: 1846970 - DNA, 25 bp, Homo sapien
gggtggtgggtcacgtgtgtctttg

SEQ ID NO: 1846971 - DNA, 25 bp, Homo sapien
ggtggtgggtcacgtgtgtctttgg

SEQ ID NO: 1846972 - DNA, 25 bp, Homo sapien
cctcatggtcagagatggggtggtg

SEQ ID NO: 1846973 - DNA, 25 bp, Homo sapien
tcagggtggcctcatggtcagagat

SEQ ID NO: 1846974 - DNA, 25 bp, Homo sapien
cccatgtgaccagcctgagaatgga

SEQ ID NO: 1846975 - DNA, 25 bp, Homo sapien
ctctcatggcacaccctaggaccac

SEQ ID NO: 1846976 - DNA, 25 bp, Homo sapien
aacccagacaccagcggatgcaggc

SEQ ID NO: 1846977 - DNA, 25 bp, Homo sapien
taggaccacccatgtgaccagcctg

SEQ ID NO: 1846978 - DNA, 25 bp, Homo sapien
ctgagcggggaacagggacttctgc

SEQ ID NO: 1846979 - DNA, 25 bp, Homo sapien
gagcggggaacagggacttctgctc

SEQ ID NO: 1846980 - DNA, 25 bp, Homo sapien
ttggaaagttcgagtctctgagcgg

SEQ ID NO: 1846981 - DNA, 25 bp, Homo sapien
tctctgagcggggaacagggacttc

SEQ ID NO: 1846982 - DNA, 25 bp, Homo sapien
cccctgatcagtattctagggactg

SEQ ID NO: 1846983 - DNA, 25 bp, Homo sapien
ccttaattgtctagagagaagaggg

SEQ ID NO: 1846984 - DNA, 25 bp, Homo sapien
cagtattctagggactgtcttcccc

SEQ ID NO: 1846985 - DNA, 25 bp, Homo sapien
tcagagacgtcatcccttaattgtc

SEQ ID NO: 1846986 - DNA, 25 bp, Homo sapien
ccatccccggcgacctataggagat

SEQ ID NO: 1846987 - DNA, 25 bp, Homo sapien
gaggccatccccggcgacctatagg

SEQ ID NO: 1846988 - DNA, 25 bp, Homo sapien
gccatccccggcgacctataggaga

SEQ ID NO: 1846989 - DNA, 25 bp, Homo sapien
tccccggcgacctataggagatggg

SEQ ID NO: 1846990 - DNA, 25 bp, Homo sapien
ggtatctgcggagccactccacgca

SEQ ID NO: 1846991 - DNA, 25 bp, Homo sapien
tccaggtatctgcggagccactcca

SEQ ID NO: 1846992 - DNA, 25 bp, Homo sapien
tctgcggagccactccacgcacgtg

SEQ ID NO: 1846993 - DNA, 25 bp, Homo sapien
ctgcggagccactccacgcacgtgc

SEQ ID NO: 1846994 - DNA, 25 bp, Homo sapien
cacgtcgcagccgtacatgctctgg

SEQ ID NO: 1846995 - DNA, 25 bp, Homo sapien
cgtcgcagccgtacatgctctggag

SEQ ID NO: 1846996 - DNA, 25 bp, Homo sapien
taggcgtactggttatgcccgcgga

SEQ ID NO: 1846997 - DNA, 25 bp, Homo sapien
gccgtcgtaggcgtactggttatgc

SEQ ID NO: 1846998 - DNA, 25 bp, Homo sapien
cggcctcagggaggcggatctcgga

SEQ ID NO: 1846999 - DNA, 25 bp, Homo sapien
ggctctcgccggtcgagggtctggg

SEQ ID NO: 1847000 - DNA, 25 bp, Homo sapien
ggtaaacgcgcctggggctctcgcc

SEQ ID NO: 1847001 - DNA, 25 bp, Homo sapien
aggcggatctcggacccggagactc

SEQ ID NO: 1847002 - DNA, 25 bp, Homo sapien
ttggtcttgaagatctgtgtgttcc

SEQ ID NO: 1847003 - DNA, 25 bp, Homo sapien
gcgcaggttccgcaggctctctcgg

SEQ ID NO: 1847004 - DNA, 25 bp, Homo sapien
tgtgttggtcttgaagatctgtgtg

SEQ ID NO: 1847005 - DNA, 25 bp, Homo sapien
tgttggtcttgaagatctgtgtgtt

SEQ ID NO: 1847006 - DNA, 25 bp, Homo sapien
cgggacatggcggtgtcgaaatacc

SEQ ID NO: 1847007 - DNA, 25 bp, Homo sapien
gggccgggacatggcggtgtcgaaa

SEQ ID NO: 1847008 - DNA, 25 bp, Homo sapien
gacatggcggtgtcgaaatacctca

SEQ ID NO: 1847009 - DNA, 25 bp, Homo sapien
tggcggtgtcgaaatacctcatgga

SEQ ID NO: 1847010 - DNA, 25 bp, Homo sapien
ggctgagacccgcccgaccctcctc

SEQ ID NO: 1847011 - DNA, 25 bp, Homo sapien
tcccggcgcggctcctcaggtcctg

SEQ ID NO: 1847012 - DNA, 25 bp, Homo sapien
ctcctcccggcgcggctcctcaggt

SEQ ID NO: 1847013 - DNA, 25 bp, Homo sapien
gaccctcctcccggcgcggctcctc

SEQ ID NO: 1847014 - DNA, 25 bp, Homo sapien
catttccctcccgacccgcactcac

SEQ ID NO: 1847015 - DNA, 25 bp, Homo sapien
gcccaggtctcggtcagggccaggg

SEQ ID NO: 1847016 - DNA, 25 bp, Homo sapien
gcaggaggacggttcggggcgccat

SEQ ID NO: 1847017 - DNA, 25 bp, Homo sapien
agcagcaggaggacggttcggggcg

SEQ ID NO: 1847018 - DNA, 25 bp, Homo sapien
gccagggccgccgagagcagcagga

SEQ ID NO: 1847019 - DNA, 25 bp, Homo sapien
cgtcacgagtatcctgggagaagga

SEQ ID NO: 1847020 - DNA, 25 bp, Homo sapien
ctctagatatccgacacccaatggg

SEQ ID NO: 1847021 - DNA, 25 bp, Homo sapien
gtggggaatccccaacgctgcgcct

SEQ ID NO: 1847022 - DNA, 25 bp, Homo sapien
aagtggggatgcgtcacgagtatcc

SEQ ID NO: 1847023 - DNA, 25 bp, Homo sapien
tgagagccccgtccgggacctggga

SEQ ID NO: 1847024 - DNA, 25 bp, Homo sapien
ctacaccaagcctctttgtcacact

SEQ ID NO: 1847025 - DNA, 25 bp, Homo sapien
tgggacttcgtcctgatccctcttc

SEQ ID NO: 1847026 - DNA, 25 bp, Homo sapien
ttctcctacaccaagcctctttgtc

SEQ ID NO: 1847027 - DNA, 25 bp, Homo sapien
ctcttggactcttgtgtagggaaac

SEQ ID NO: 1847028 - DNA, 25 bp, Homo sapien
tagggattctcatagagaccagttt

SEQ ID NO: 1847029 - DNA, 25 bp, Homo sapien
tctctgaaggcaccgcatagggatt

SEQ ID NO: 1847030 - DNA, 25 bp, Homo sapien
gtagcacaatattggtaatccctga

SEQ ID NO: 1847031 - DNA, 25 bp, Homo sapien
aattctccagagcaatgacttttaa

SEQ ID NO: 1847032 - DNA, 25 bp, Homo sapien
ttctccagagcaatgacttttaact

SEQ ID NO: 1847033 - DNA, 25 bp, Homo sapien
ctccagagcaatgacttttaactct

SEQ ID NO: 1847034 - DNA, 25 bp, Homo sapien
gacttttaactcttttagcaatgtc

SEQ ID NO: 1847035 - DNA, 25 bp, Homo sapien
caccgttcacatgcatgccagcagc

SEQ ID NO: 1847036 - DNA, 25 bp, Homo sapien
tcaccgttcacatgcatgccagcag

SEQ ID NO: 1847037 - DNA, 25 bp, Homo sapien
accgttcacatgcatgccagcagct

SEQ ID NO: 1847038 - DNA, 25 bp, Homo sapien
cagttccatttctccgtacctcaat

SEQ ID NO: 1847039 - DNA, 25 bp, Homo sapien
atttctccgtacctcaattgatgat

SEQ ID NO: 1847040 - DNA, 25 bp, Homo sapien
ctcaattgatgatttctgataagac

SEQ ID NO: 1847041 - DNA, 25 bp, Homo sapien
ttccatttctccgtacctcaattga

SEQ ID NO: 1847042 - DNA, 25 bp, Homo sapien
aatcattcttctcatatacttgaaa

SEQ ID NO: 1847043 - DNA, 25 bp, Homo sapien
ttaatcattcttctcatatacttga

SEQ ID NO: 1847044 - DNA, 25 bp, Homo sapien
attcttctcatatacttgaaatttg

SEQ ID NO: 1847045 - DNA, 25 bp, Homo sapien
tcttctcatatacttgaaatttgta

SEQ ID NO: 1847046 - DNA, 25 bp, Homo sapien
cgagagaacgcctggatattctggc

SEQ ID NO: 1847047 - DNA, 25 bp, Homo sapien
ttaatacatccgagagaacgcctgg

SEQ ID NO: 1847048 - DNA, 25 bp, Homo sapien
tacatccgagagaacgcctggatat

SEQ ID NO: 1847049 - DNA, 25 bp, Homo sapien
gaacgcctggatattctggcagaat

SEQ ID NO: 1847050 - DNA, 25 bp, Homo sapien
tttaagatctcatccagacttctgg

SEQ ID NO: 1847051 - DNA, 25 bp, Homo sapien
taagttttaagatctcatccagact

SEQ ID NO: 1847052 - DNA, 25 bp, Homo sapien
gttaagtaagttttaagatctcatc

SEQ ID NO: 1847053 - DNA, 25 bp, Homo sapien
gatctcatccagacttctggcaaga

SEQ ID NO: 1847054 - DNA, 25 bp, Homo sapien
gatgcccatgttctgagacacagcg

SEQ ID NO: 1847055 - DNA, 25 bp, Homo sapien
caaacgaaccatgacagcagcggtg

SEQ ID NO: 1847056 - DNA, 25 bp, Homo sapien
cagcgacgatgcagtttagcaaacg

SEQ ID NO: 1847057 - DNA, 25 bp, Homo sapien
cggtgagctcctccaagcccgctcg

SEQ ID NO: 1847058 - DNA, 25 bp, Homo sapien
tattgtgttgttaatcgctattgct

SEQ ID NO: 1847059 - DNA, 25 bp, Homo sapien
atcaagaggaagaacctcacattgg

SEQ ID NO: 1847060 - DNA, 25 bp, Homo sapien
gttaatcgctattgctgttcaatgg

SEQ ID NO: 1847061 - DNA, 25 bp, Homo sapien
gctattgctgttcaatggttaaatc

SEQ ID NO: 1847062 - DNA, 25 bp, Homo sapien
cccccttccacataaggccctccag

SEQ ID NO: 1847063 - DNA, 25 bp, Homo sapien
cttccacataaggccctccaggacg

SEQ ID NO: 1847064 - DNA, 25 bp, Homo sapien
ttccacataaggccctccaggacgc

SEQ ID NO: 1847065 - DNA, 25 bp, Homo sapien
ccatcccccttccacataaggccct

SEQ ID NO: 1847066 - DNA, 25 bp, Homo sapien
ctgtgagagacacatcacagccctg

SEQ ID NO: 1847067 - DNA, 25 bp, Homo sapien
ctttacaagctgtgagagacacatc

SEQ ID NO: 1847068 - DNA, 25 bp, Homo sapien
gctgtgagagacacatcacagccct

SEQ ID NO: 1847069 - DNA, 25 bp, Homo sapien
caagctgtgagagacacatcacagc

SEQ ID NO: 1847070 - DNA, 25 bp, Homo sapien
tacaaggagtgtacatttcaattca

SEQ ID NO: 1847071 - DNA, 25 bp, Homo sapien
tctgttggcctatgtatgaattttc

SEQ ID NO: 1847072 - DNA, 25 bp, Homo sapien
gcataacatattaccactaactcac

SEQ ID NO: 1847073 - DNA, 25 bp, Homo sapien
tgttatatgcttatctgttggccta

SEQ ID NO: 1847074 - DNA, 25 bp, Homo sapien
cctggtgtgaatgattctcagttca

SEQ ID NO: 1847075 - DNA, 25 bp, Homo sapien
gggtcctccttcaagcttatacaga

SEQ ID NO: 1847076 - DNA, 25 bp, Homo sapien
ttcaaagctcacagcggaggaagcc

SEQ ID NO: 1847077 - DNA, 25 bp, Homo sapien
gttgtgagattgtagtccttgttcc

SEQ ID NO: 1847078 - DNA, 25 bp, Homo sapien
tgaatataagggatgggacatgcag

SEQ ID NO: 1847079 - DNA, 25 bp, Homo sapien
ttccacagtgggtgaatataaggga

SEQ ID NO: 1847080 - DNA, 25 bp, Homo sapien
tacagcaccgtagtgatgtctctga

SEQ ID NO: 1847081 - DNA, 25 bp, Homo sapien
tcttcctactgagaatacagcaccg

SEQ ID NO: 1847082 - DNA, 25 bp, Homo sapien
cagttctggatagtattcatgggag

SEQ ID NO: 1847083 - DNA, 25 bp, Homo sapien
tgtactgagtaaagcaaggactgcc

SEQ ID NO: 1847084 - DNA, 25 bp, Homo sapien
tatctcttctgtccgtgacctttag

SEQ ID NO: 1847085 - DNA, 25 bp, Homo sapien
tagaaatatatgcagatagccctga

SEQ ID NO: 1847086 - DNA, 25 bp, Homo sapien
aatggcctccctatgtactgttgaa

SEQ ID NO: 1847087 - DNA, 25 bp, Homo sapien
tccaagacgcagaagcaactgggct

SEQ ID NO: 1847088 - DNA, 25 bp, Homo sapien
gcaagtgtaaaaacctcaggagtct

SEQ ID NO: 1847089 - DNA, 25 bp, Homo sapien
tctacctgcaggttccacgaagcct

SEQ ID NO: 1847090 - DNA, 25 bp, Homo sapien
tgagggccttgacaccgtgctgttc

SEQ ID NO: 1847091 - DNA, 25 bp, Homo sapien
tcagcttcgctttgtgtaggaagga

SEQ ID NO: 1847092 - DNA, 25 bp, Homo sapien
tctgatgaatataactgtcccagct

SEQ ID NO: 1847093 - DNA, 25 bp, Homo sapien
tccttgccggaatttgacatccatg

SEQ ID NO: 1847094 - DNA, 25 bp, Homo sapien
ggatgtttcctaggcgccaggttta

SEQ ID NO: 1847095 - DNA, 25 bp, Homo sapien
aaatacctactgttgcaagcaatgc

SEQ ID NO: 1847096 - DNA, 25 bp, Homo sapien
taggcgccaggtttagcactttgac

SEQ ID NO: 1847097 - DNA, 25 bp, Homo sapien
aaaagcacaggtgcacaaaatacct

SEQ ID NO: 1847098 - DNA, 25 bp, Homo sapien
gtgagtggaggccattctcttaggc

SEQ ID NO: 1847099 - DNA, 25 bp, Homo sapien
tatgaaatcatagtgagtggaggcc

SEQ ID NO: 1847100 - DNA, 25 bp, Homo sapien
tggttggctccggtatgaaatcata

SEQ ID NO: 1847101 - DNA, 25 bp, Homo sapien
gagtggaggccattctcttaggctg

SEQ ID NO: 1847102 - DNA, 25 bp, Homo sapien
caaatccaagtttacactaaaagat

SEQ ID NO: 1847103 - DNA, 25 bp, Homo sapien
gcttcgagtaagtacaaagacatgt

SEQ ID NO: 1847104 - DNA, 25 bp, Homo sapien
taccttgagttaatagcttcgagta

SEQ ID NO: 1847105 - DNA, 25 bp, Homo sapien
aagataaaattccaacattgtaggg

SEQ ID NO: 1847106 - DNA, 25 bp, Homo sapien
gggactgcgaccagattaattaccc

SEQ ID NO: 1847107 - DNA, 25 bp, Homo sapien
tctttcactgaatatcggtgtctga

SEQ ID NO: 1847108 - DNA, 25 bp, Homo sapien
cccacagggccagatagtcagggca

SEQ ID NO: 1847109 - DNA, 25 bp, Homo sapien
ggccctctggtgcactctttcactg

SEQ ID NO: 1847110 - DNA, 25 bp, Homo sapien
caaagtatgtcccaataagatgatt

SEQ ID NO: 1847111 - DNA, 25 bp, Homo sapien
tgcaaagtatgtcccaataagatga

SEQ ID NO: 1847112 - DNA, 25 bp, Homo sapien
gcatgcaaagtatgtcccaataaga

SEQ ID NO: 1847113 - DNA, 25 bp, Homo sapien
catgcaaagtatgtcccaataagat

SEQ ID NO: 1847114 - DNA, 25 bp, Homo sapien
gcgcagccggtttccatcagaaccg

SEQ ID NO: 1847115 - DNA, 25 bp, Homo sapien
cgcgtccgccgggagcaggtcaggg

SEQ ID NO: 1847116 - DNA, 25 bp, Homo sapien
ccctgggccccttgtatcatttcag

SEQ ID NO: 1847117 - DNA, 25 bp, Homo sapien
tccagtctttcatggaggccaaact

SEQ ID NO: 1847118 - DNA, 25 bp, Homo sapien
gcattttcataacgggcaggtgtga

SEQ ID NO: 1847119 - DNA, 25 bp, Homo sapien
aattcaaaacacatgcggccaaggc

SEQ ID NO: 1847120 - DNA, 25 bp, Homo sapien
aagaaagccggattccagatcgcgc

SEQ ID NO: 1847121 - DNA, 25 bp, Homo sapien
ccagtcctcgcagtgaattccgggc

SEQ ID NO: 1847122 - DNA, 25 bp, Homo sapien
tgaagaagaaacaaagacatctata

SEQ ID NO: 1847123 - DNA, 25 bp, Homo sapien
aagaagaaacaaagacatctataac

SEQ ID NO: 1847124 - DNA, 25 bp, Homo sapien
agtgaagaagaaacaaagacatcta

SEQ ID NO: 1847125 - DNA, 25 bp, Homo sapien
gggagtgaagaagaaacaaagacat

SEQ ID NO: 1847126 - DNA, 25 bp, Homo sapien
cacccagccgtattactcttttaag

SEQ ID NO: 1847127 - DNA, 25 bp, Homo sapien
gcacccagccgtattactcttttaa

SEQ ID NO: 1847128 - DNA, 25 bp, Homo sapien
tgcacccagccgtattactctttta

SEQ ID NO: 1847129 - DNA, 25 bp, Homo sapien
acggggcggctggccaggcagaggg

SEQ ID NO: 1847130 - DNA, 25 bp, Homo sapien
cggggcggctggccaggcagagggg

SEQ ID NO: 1847131 - DNA, 25 bp, Homo sapien
tggttggccaagcaaaggggctcac

SEQ ID NO: 1847132 - DNA, 25 bp, Homo sapien
tgcttttgaggccaacagttgcaga

SEQ ID NO: 1847133 - DNA, 25 bp, Homo sapien
gattcttctgctataggagatctgt

SEQ ID NO: 1847134 - DNA, 25 bp, Homo sapien
tctgctataggagatctgtggttgg

SEQ ID NO: 1847135 - DNA, 25 bp, Homo sapien
agttggtgagcacatccgcatgtcc

SEQ ID NO: 1847136 - DNA, 25 bp, Homo sapien
taaaacgcttgcagtccctcagtga

SEQ ID NO: 1847137 - DNA, 25 bp, Homo sapien
gatcagtgttccagggatttgctcc

SEQ ID NO: 1847138 - DNA, 25 bp, Homo sapien
aggcactttgcactcctcatgggac

SEQ ID NO: 1847139 - DNA, 25 bp, Homo sapien
tcctggttctaaagtcctcgccggc

SEQ ID NO: 1847140 - DNA, 25 bp, Homo sapien
ccattgggtgttgggttcctagatc

SEQ ID NO: 1847141 - DNA, 25 bp, Homo sapien
ggatactcatgatgcggcctcagtt

SEQ ID NO: 1847142 - DNA, 25 bp, Homo sapien
tagatcagccaatcagtgtcgccgc

SEQ ID NO: 1847143 - DNA, 25 bp, Homo sapien
tcctttagaatccaggaccttctac

SEQ ID NO: 1847144 - DNA, 25 bp, Homo sapien
tctctggacacatactgtccaattc

SEQ ID NO: 1847145 - DNA, 25 bp, Homo sapien
cccctgtggcagctgtaatgtgtag

SEQ ID NO: 1847146 - DNA, 25 bp, Homo sapien
taatgtgtagttcaatgggcactca

SEQ ID NO: 1847147 - DNA, 25 bp, Homo sapien
cctaccagggaagatcattgggttc

SEQ ID NO: 1847148 - DNA, 25 bp, Homo sapien
gagtcagtactgttggacccatagg

SEQ ID NO: 1847149 - DNA, 25 bp, Homo sapien
cagtgtctggatctaccttggtagg

SEQ ID NO: 1847150 - DNA, 25 bp, Homo sapien
tatcagggcctacagtaacatgcca

SEQ ID NO: 1847151 - DNA, 25 bp, Homo sapien
tttcctgtggaggctccactcaaag

SEQ ID NO: 1847152 - DNA, 25 bp, Homo sapien
tctgaaggatggtgactgcgccatg

SEQ ID NO: 1847153 - DNA, 25 bp, Homo sapien
gaaggatggtgactgcgccatggcc

SEQ ID NO: 1847154 - DNA, 25 bp, Homo sapien
tgaaggatggtgactgcgccatggc

SEQ ID NO: 1847155 - DNA, 25 bp, Homo sapien
tgtgggtcaaagcaatacacctaca

SEQ ID NO: 1847156 - DNA, 25 bp, Homo sapien
cagtttgtctttcacattggaaggg

SEQ ID NO: 1847157 - DNA, 25 bp, Homo sapien
attggaagggacacccctggatgcc

SEQ ID NO: 1847158 - DNA, 25 bp, Homo sapien
tggatgcccctaaccactagacctg

SEQ ID NO: 1847159 - DNA, 25 bp, Homo sapien
catggtaaccgtgtcctctggcttt

SEQ ID NO: 1847160 - DNA, 25 bp, Homo sapien
taatgagcccaactctgggacatct

SEQ ID NO: 1847161 - DNA, 25 bp, Homo sapien
caccctctccgtggatattaatgag

SEQ ID NO: 1847162 - DNA, 25 bp, Homo sapien
gtcactgccaccacttgttctctat

SEQ ID NO: 1847163 - DNA, 25 bp, Homo sapien
ggtagccactactggtacctctgca

SEQ ID NO: 1847164 - DNA, 25 bp, Homo sapien
gcttttgtggatcagaggcagtaac

SEQ ID NO: 1847165 - DNA, 25 bp, Homo sapien
tacattacactgcttaggtagccac

SEQ ID NO: 1847166 - DNA, 25 bp, Homo sapien
caaatggatgggctaacaaagcagt

SEQ ID NO: 1847167 - DNA, 25 bp, Homo sapien
ctggaacattactaggcgggaagga

SEQ ID NO: 1847168 - DNA, 25 bp, Homo sapien
ctagccatagatttgttgcctcaca

SEQ ID NO: 1847169 - DNA, 25 bp, Homo sapien
tagatttgttgcctcacaatttcat

SEQ ID NO: 1847170 - DNA, 25 bp, Homo sapien
ggtaaagctggaacattactaggcg

SEQ ID NO: 1847171 - DNA, 25 bp, Homo sapien
acagcattctatgcgccccagcgcc

SEQ ID NO: 1847172 - DNA, 25 bp, Homo sapien
ctgggccgcgcaggtcttttatcat

SEQ ID NO: 1847173 - DNA, 25 bp, Homo sapien
tgtcacagcattctatgcgccccag

SEQ ID NO: 1847174 - DNA, 25 bp, Homo sapien
ccctgggccgcgcaggtcttttatc

SEQ ID NO: 1847175 - DNA, 25 bp, Homo sapien
tgaagatgaaacaaaaacatctata

SEQ ID NO: 1847176 - DNA, 25 bp, Homo sapien
gggagtgaagatgaaacaaaaacat

SEQ ID NO: 1847177 - DNA, 25 bp, Homo sapien
gatgaaacaaaaacatctataactg

SEQ ID NO: 1847178 - DNA, 25 bp, Homo sapien
agtgaagatgaaacaaaaacatcta

SEQ ID NO: 1847179 - DNA, 25 bp, Homo sapien
tgagtatcttggtgatgactcctcc

SEQ ID NO: 1847180 - DNA, 25 bp, Homo sapien
ttgttcacgagaagcaagaagcccc

SEQ ID NO: 1847181 - DNA, 25 bp, Homo sapien
gtttcgccaagttgaccagcccagt

SEQ ID NO: 1847182 - DNA, 25 bp, Homo sapien
tgttcagtccaatacagggttgtgg

SEQ ID NO: 1847183 - DNA, 25 bp, Homo sapien
tactgcgagcagatggatggagggt

SEQ ID NO: 1847184 - DNA, 25 bp, Homo sapien
tagatactgcgagcagatggatgga

SEQ ID NO: 1847185 - DNA, 25 bp, Homo sapien
ctgcgagcagatggatggagggtgc

SEQ ID NO: 1847186 - DNA, 25 bp, Homo sapien
attctagatactgcgagcagatgga

SEQ ID NO: 1847187 - DNA, 25 bp, Homo sapien
tagtcaagttgtgtacagtcagcga

SEQ ID NO: 1847188 - DNA, 25 bp, Homo sapien
caagttgtgtacagtcagcgatggt

SEQ ID NO: 1847189 - DNA, 25 bp, Homo sapien
gtcaagttgtgtacagtcagcgatg

SEQ ID NO: 1847190 - DNA, 25 bp, Homo sapien
ttagtcaagttgtgtacagtcagcg

SEQ ID NO: 1847191 - DNA, 25 bp, Homo sapien
gcttgccatccaaccactcagtctt

SEQ ID NO: 1847192 - DNA, 25 bp, Homo sapien
cagtcttggcagtgcagatgaaaaa

SEQ ID NO: 1847193 - DNA, 25 bp, Homo sapien
actcagtcttggcagtgcagatgaa

SEQ ID NO: 1847194 - DNA, 25 bp, Homo sapien
ccttgccaaagaccatgggcttgcc

SEQ ID NO: 1847195 - DNA, 25 bp, Homo sapien
gttgggtccagcatttgccatggac

SEQ ID NO: 1847196 - DNA, 25 bp, Homo sapien
ttgtgttgggtccagcatttgccat

SEQ ID NO: 1847197 - DNA, 25 bp, Homo sapien
tgttgggtccagcatttgccatgga

SEQ ID NO: 1847198 - DNA, 25 bp, Homo sapien
cgggaatcatttgtgttgggtccag

SEQ ID NO: 1847199 - DNA, 25 bp, Homo sapien
tcaccattgacagcgatgttgaagg

SEQ ID NO: 1847200 - DNA, 25 bp, Homo sapien
ccattgacagcgatgttgaaggaca

SEQ ID NO: 1847201 - DNA, 25 bp, Homo sapien
accattgacagcgatgttgaaggac

SEQ ID NO: 1847202 - DNA, 25 bp, Homo sapien
caccattgacagcgatgttgaagga

SEQ ID NO: 1847203 - DNA, 25 bp, Homo sapien
gcccattttggaatgtgaccgtctg

SEQ ID NO: 1847204 - DNA, 25 bp, Homo sapien
gactcgcccattttggaatgtgacc

SEQ ID NO: 1847205 - DNA, 25 bp, Homo sapien
aagactcgcccattttggaatgtga

SEQ ID NO: 1847206 - DNA, 25 bp, Homo sapien
tccttcaggagaggacaccagggtg

SEQ ID NO: 1847207 - DNA, 25 bp, Homo sapien
aatgtgaccgtctgtccttcaggag

SEQ ID NO: 1847208 - DNA, 25 bp, Homo sapien
tcgcccattttggaatgtgaccgtc

SEQ ID NO: 1847209 - DNA, 25 bp, Homo sapien
gacggtcacattccaaaatgggcga

SEQ ID NO: 1847210 - DNA, 25 bp, Homo sapien
cagacggtcacattccaaaatgggc

SEQ ID NO: 1847211 - DNA, 25 bp, Homo sapien
ctcctgaaggacagacggtcacatt

SEQ ID NO: 1847212 - DNA, 25 bp, Homo sapien
tcacattccaaaatgggcgagtctt

SEQ ID NO: 1847213 - DNA, 25 bp, Homo sapien
ggtcacattccaaaatgggcgagtc

SEQ ID NO: 1847214 - DNA, 25 bp, Homo sapien
caccctggtgtcctctcctgaagga

SEQ ID NO: 1847215 - DNA, 25 bp, Homo sapien
cacataggtcatgggcatctgatgc

SEQ ID NO: 1847216 - DNA, 25 bp, Homo sapien
tcctccctgttccttagtgtgtttg

SEQ ID NO: 1847217 - DNA, 25 bp, Homo sapien
agtgtgtttgtcctaaatcccatca

SEQ ID NO: 1847218 - DNA, 25 bp, Homo sapien
gaacccaggcagtacaccagtgtct

SEQ ID NO: 1847219 - DNA, 25 bp, Homo sapien
gccttattctgaccatgctacgttt

SEQ ID NO: 1847220 - DNA, 25 bp, Homo sapien
taatggacacttgactggttcatgc

SEQ ID NO: 1847221 - DNA, 25 bp, Homo sapien
catcagatgcccatgacctatgtga

SEQ ID NO: 1847222 - DNA, 25 bp, Homo sapien
gacactggtgtactgcctgggttca

SEQ ID NO: 1847223 - DNA, 25 bp, Homo sapien
tgatgggatttaggacaaacacact

SEQ ID NO: 1847224 - DNA, 25 bp, Homo sapien
caaacacactaaggaacagggagga

SEQ ID NO: 1847225 - DNA, 25 bp, Homo sapien
gcatgaaccagtcaagtgtccatta

SEQ ID NO: 1847226 - DNA, 25 bp, Homo sapien
aaacgtagcatggtcagaataaggc

SEQ ID NO: 1847227 - DNA, 25 bp, Homo sapien
tgagtactgatctcatgaaaccctt

SEQ ID NO: 1847228 - DNA, 25 bp, Homo sapien
agtactgatctcatgaaacccttta

SEQ ID NO: 1847229 - DNA, 25 bp, Homo sapien
gtactgatctcatgaaaccctttag

SEQ ID NO: 1847230 - DNA, 25 bp, Homo sapien
gagtactgatctcatgaaacccttt

SEQ ID NO: 1847231 - DNA, 25 bp, Homo sapien
aaagggtttcatgagatcagtactc

SEQ ID NO: 1847232 - DNA, 25 bp, Homo sapien
taaagggtttcatgagatcagtact

SEQ ID NO: 1847233 - DNA, 25 bp, Homo sapien
ctaaagggtttcatgagatcagtac

SEQ ID NO: 1847234 - DNA, 25 bp, Homo sapien
aagggtttcatgagatcagtactca

SEQ ID NO: 1847235 - DNA, 25 bp, Homo sapien
ctgatgagatagacatctcctccta

SEQ ID NO: 1847236 - DNA, 25 bp, Homo sapien
gatgagatagacatctcctcctaca

SEQ ID NO: 1847237 - DNA, 25 bp, Homo sapien
tgatgagatagacatctcctcctac

SEQ ID NO: 1847238 - DNA, 25 bp, Homo sapien
taggaggagatgtctatctcatcag

SEQ ID NO: 1847239 - DNA, 25 bp, Homo sapien
gtaggaggagatgtctatctcatca

SEQ ID NO: 1847240 - DNA, 25 bp, Homo sapien
tgtaggaggagatgtctatctcatc

SEQ ID NO: 1847241 - DNA, 25 bp, Homo sapien
ctgatgagatagacatctcctccta

SEQ ID NO: 1847242 - DNA, 25 bp, Homo sapien
gatgagatagacatctcctcctaca

SEQ ID NO: 1847243 - DNA, 25 bp, Homo sapien
gctgcctgatgagatagacatctcc

SEQ ID NO: 1847244 - DNA, 25 bp, Homo sapien
agctgcctgatgagatagacatctc

SEQ ID NO: 1847245 - DNA, 25 bp, Homo sapien
tgatgagatagacatctcctcctac

SEQ ID NO: 1847246 - DNA, 25 bp, Homo sapien
atattagtgagctgcctgatgagat

SEQ ID NO: 1847247 - DNA, 25 bp, Homo sapien
gagatgtctatctcatcaggcagct

SEQ ID NO: 1847248 - DNA, 25 bp, Homo sapien
taggaggagatgtctatctcatcag

SEQ ID NO: 1847249 - DNA, 25 bp, Homo sapien
atctcatcaggcagctcactaatat

SEQ ID NO: 1847250 - DNA, 25 bp, Homo sapien
gtaggaggagatgtctatctcatca

SEQ ID NO: 1847251 - DNA, 25 bp, Homo sapien
tgtaggaggagatgtctatctcatc

SEQ ID NO: 1847252 - DNA, 25 bp, Homo sapien
ggagatgtctatctcatcaggcagc

SEQ ID NO: 1847253 - DNA, 25 bp, Homo sapien
tccgatgagaatgatgccaagatcc

SEQ ID NO: 1847254 - DNA, 25 bp, Homo sapien
gatgccaagatcctcaatgatgtgc

SEQ ID NO: 1847255 - DNA, 25 bp, Homo sapien
ccggtttggcaccaagggcttggct

SEQ ID NO: 1847256 - DNA, 25 bp, Homo sapien
agggcttggctatcacatttgtgtc

SEQ ID NO: 1847257 - DNA, 25 bp, Homo sapien
caatgatgtgcaggatcgctttgag

SEQ ID NO: 1847258 - DNA, 25 bp, Homo sapien
catttgtgtccgatgagaatgatgc

SEQ ID NO: 1847259 - DNA, 25 bp, Homo sapien
tcattctcatcggacacaaatgtga

SEQ ID NO: 1847260 - DNA, 25 bp, Homo sapien
tagccaagcccttggtgccaaaccg

SEQ ID NO: 1847261 - DNA, 25 bp, Homo sapien
cacatcattgaggatcttggcatca

SEQ ID NO: 1847262 - DNA, 25 bp, Homo sapien
gacacaaatgtgatagccaagccct

SEQ ID NO: 1847263 - DNA, 25 bp, Homo sapien
caaagcgatcctgcacatcattgag

SEQ ID NO: 1847264 - DNA, 25 bp, Homo sapien
ggatcttggcatcattctcatcgga

SEQ ID NO: 1847265 - DNA, 25 bp, Homo sapien
aggctgaaaaaatcccactctccca

SEQ ID NO: 1847266 - DNA, 25 bp, Homo sapien
tgggagagtgggattttttcagcct

SEQ ID NO: 1847267 - DNA, 25 bp, Homo sapien
aaaatcccactctcccattcccttg

SEQ ID NO: 1847268 - DNA, 25 bp, Homo sapien
gctgaaaaaatcccactctcccatt

SEQ ID NO: 1847269 - DNA, 25 bp, Homo sapien
tgaaaaaatcccactctcccattcc

SEQ ID NO: 1847270 - DNA, 25 bp, Homo sapien
aggctgaaaaaatcccactctccca

SEQ ID NO: 1847271 - DNA, 25 bp, Homo sapien
gtaaacctcacaggctgaaaaaatc

SEQ ID NO: 1847272 - DNA, 25 bp, Homo sapien
ggctgaaaaaatcccactctcccat

SEQ ID NO: 1847273 - DNA, 25 bp, Homo sapien
atgggagagtgggattttttcagcc

SEQ ID NO: 1847274 - DNA, 25 bp, Homo sapien
acaagggaatgggagagtgggattt

SEQ ID NO: 1847275 - DNA, 25 bp, Homo sapien
aatgggagagtgggattttttcagc

SEQ ID NO: 1847276 - DNA, 25 bp, Homo sapien
gattttttcagcctgtgaggtttac

SEQ ID NO: 1847277 - DNA, 25 bp, Homo sapien
tgggagagtgggattttttcagcct

SEQ ID NO: 1847278 - DNA, 25 bp, Homo sapien
ggaatgggagagtgggattttttca

SEQ ID NO: 1847279 - DNA, 25 bp, Homo sapien
taccaacctatttggccgaggcatg

SEQ ID NO: 1847280 - DNA, 25 bp, Homo sapien
cctatttggccgaggcatggacatc

SEQ ID NO: 1847281 - DNA, 25 bp, Homo sapien
caacgacgaattcttgtggctacca

SEQ ID NO: 1847282 - DNA, 25 bp, Homo sapien
gaggcatggacatcgagcgggtgaa

SEQ ID NO: 1847283 - DNA, 25 bp, Homo sapien
gattttcaacgacgaattcttgtgg

SEQ ID NO: 1847284 - DNA, 25 bp, Homo sapien
tgtggctaccaacctatttggccga

SEQ ID NO: 1847285 - DNA, 25 bp, Homo sapien
gagcgggtgaacattgcttttaatt

SEQ ID NO: 1847286 - DNA, 25 bp, Homo sapien
agcgggtgaacattgcttttaatta

SEQ ID NO: 1847287 - DNA, 25 bp, Homo sapien
ttttaattatgacatgcctgaggat

SEQ ID NO: 1847288 - DNA, 25 bp, Homo sapien
atcctcaggcatgtcataattaaaa

SEQ ID NO: 1847289 - DNA, 25 bp, Homo sapien
taattaaaagcaatgttcacccgct

SEQ ID NO: 1847290 - DNA, 25 bp, Homo sapien
aattaaaagcaatgttcacccgctc

SEQ ID NO: 1847291 - DNA, 25 bp, Homo sapien
cacaagaattcgtcgttgaaaatct

SEQ ID NO: 1847292 - DNA, 25 bp, Homo sapien
gatgtccatgcctcggccaaatagg

SEQ ID NO: 1847293 - DNA, 25 bp, Homo sapien
gccaaataggttggtagccacaaga

SEQ ID NO: 1847294 - DNA, 25 bp, Homo sapien
ttcacccgctcgatgtccatgcctc

SEQ ID NO: 1847295 - DNA, 25 bp, Homo sapien
tggtagccacaagaattcgtcgttg

SEQ ID NO: 1847296 - DNA, 25 bp, Homo sapien
catgcctcggccaaataggttggta

SEQ ID NO: 1847297 - DNA, 25 bp, Homo sapien
gaagatgggaaagatattttgtgtc

SEQ ID NO: 1847298 - DNA, 25 bp, Homo sapien
aagatgggaaagatattttgtgtcc

SEQ ID NO: 1847299 - DNA, 25 bp, Homo sapien
gatgggaaagatattttgtgtcctt

SEQ ID NO: 1847300 - DNA, 25 bp, Homo sapien
agatgggaaagatattttgtgtcct

SEQ ID NO: 1847301 - DNA, 25 bp, Homo sapien
gacacaaaatatctttcccatcttc

SEQ ID NO: 1847302 - DNA, 25 bp, Homo sapien
ggacacaaaatatctttcccatctt

SEQ ID NO: 1847303 - DNA, 25 bp, Homo sapien
aaggacacaaaatatctttcccatc

SEQ ID NO: 1847304 - DNA, 25 bp, Homo sapien
aggacacaaaatatctttcccatct

SEQ ID NO: 1847305 - DNA, 25 bp, Homo sapien
catgttttaaatttcctttctcaca

SEQ ID NO: 1847306 - DNA, 25 bp, Homo sapien
gaagggaatctcaacatgttttaaa

SEQ ID NO: 1847307 - DNA, 25 bp, Homo sapien
gaaagatattttgtgtccttgggag

SEQ ID NO: 1847308 - DNA, 25 bp, Homo sapien
aagatgggaaagatattttgtgtcc

SEQ ID NO: 1847309 - DNA, 25 bp, Homo sapien
tccttgggagaaaaagacagttgag

SEQ ID NO: 1847310 - DNA, 25 bp, Homo sapien
aaaagacagttgagagaagggaatc

SEQ ID NO: 1847311 - DNA, 25 bp, Homo sapien
tgtgagaaaggaaatttaaaacatg

SEQ ID NO: 1847312 - DNA, 25 bp, Homo sapien
tctcaactgtctttttctcccaagg

SEQ ID NO: 1847313 - DNA, 25 bp, Homo sapien
ggacacaaaatatctttcccatctt

SEQ ID NO: 1847314 - DNA, 25 bp, Homo sapien
taaaacatgttgagattcccttctc

SEQ ID NO: 1847315 - DNA, 25 bp, Homo sapien
aaatatctttcccatcttcagctca

SEQ ID NO: 1847316 - DNA, 25 bp, Homo sapien
tctcccaaggacacaaaatatcttt

SEQ ID NO: 1847317 - DNA, 25 bp, Homo sapien
tgtgcagcggtgcattgccttggcc

SEQ ID NO: 1847318 - DNA, 25 bp, Homo sapien
ctgtgcagcggtgcattgccttggc

SEQ ID NO: 1847319 - DNA, 25 bp, Homo sapien
gtgcagcggtgcattgccttggccc

SEQ ID NO: 1847320 - DNA, 25 bp, Homo sapien
attgccttggcccagctactagtgg

SEQ ID NO: 1847321 - DNA, 25 bp, Homo sapien
ggccaaggcaatgcaccgctgcaca

SEQ ID NO: 1847322 - DNA, 25 bp, Homo sapien
gccaaggcaatgcaccgctgcacag

SEQ ID NO: 1847323 - DNA, 25 bp, Homo sapien
ccactagtagctgggccaaggcaat

SEQ ID NO: 1847324 - DNA, 25 bp, Homo sapien
gggccaaggcaatgcaccgctgcac

SEQ ID NO: 1847325 - DNA, 25 bp, Homo sapien
cgtaatgtctctcacacaccatgga

SEQ ID NO: 1847326 - DNA, 25 bp, Homo sapien
gctttctagaattaggatagctccc

SEQ ID NO: 1847327 - DNA, 25 bp, Homo sapien
ggtgagcaggaatatcagttacccc

SEQ ID NO: 1847328 - DNA, 25 bp, Homo sapien
gaattcctgagaacgtaattactag

SEQ ID NO: 1847329 - DNA, 25 bp, Homo sapien
tctggcaattttgatttctgaactc

SEQ ID NO: 1847330 - DNA, 25 bp, Homo sapien
catcctcatctcctagcatgtctgg

SEQ ID NO: 1847331 - DNA, 25 bp, Homo sapien
gagttcagaaatcaaaattgccaga

SEQ ID NO: 1847332 - DNA, 25 bp, Homo sapien
gggtaactgatattcctgctcacca

SEQ ID NO: 1847333 - DNA, 25 bp, Homo sapien
cattaaacctaagggagctatccta

SEQ ID NO: 1847334 - DNA, 25 bp, Homo sapien
taaacattcaagaaccctaacatgc

SEQ ID NO: 1847335 - DNA, 25 bp, Homo sapien
tccatggtgtgtgagagacattacg

SEQ ID NO: 1847336 - DNA, 25 bp, Homo sapien
ccagacatgctaggagatgaggatg

SEQ ID NO: 1847337 - DNA, 25 bp, Homo sapien
gtatgtcctcaataacctcaaggaa

SEQ ID NO: 1847338 - DNA, 25 bp, Homo sapien
ttcaaaaattaagatccttggccag

SEQ ID NO: 1847339 - DNA, 25 bp, Homo sapien
tggcacgggtatgtcctcaataacc

SEQ ID NO: 1847340 - DNA, 25 bp, Homo sapien
cacgggtatgtcctcaataacctca

SEQ ID NO: 1847341 - DNA, 25 bp, Homo sapien
gctggcacgggtatgtcctcaataa

SEQ ID NO: 1847342 - DNA, 25 bp, Homo sapien
gggtatgtcctcaataacctcaagg

SEQ ID NO: 1847343 - DNA, 25 bp, Homo sapien
ttccttgaggttattgaggacatac

SEQ ID NO: 1847344 - DNA, 25 bp, Homo sapien
tgaggttattgaggacatacccgtg

SEQ ID NO: 1847345 - DNA, 25 bp, Homo sapien
tggccaaggatcttaatttttgaag

SEQ ID NO: 1847346 - DNA, 25 bp, Homo sapien
ggttattgaggacatacccgtgcca

SEQ ID NO: 1847347 - DNA, 25 bp, Homo sapien
ttattgaggacatacccgtgccagc

SEQ ID NO: 1847348 - DNA, 25 bp, Homo sapien
ccttgaggttattgaggacataccc

SEQ ID NO: 1847349 - DNA, 25 bp, Homo sapien
tcagttagacgtccagtagggggat

SEQ ID NO: 1847350 - DNA, 25 bp, Homo sapien
gggatgagcattggagcactccagc

SEQ ID NO: 1847351 - DNA, 25 bp, Homo sapien
gaaatcacatgtgtgatgtgggaga

SEQ ID NO: 1847352 - DNA, 25 bp, Homo sapien
tggagcactccagctgtagcagaaa

SEQ ID NO: 1847353 - DNA, 25 bp, Homo sapien
gctgagcatgagtaaggtgggagct

SEQ ID NO: 1847354 - DNA, 25 bp, Homo sapien
tacacttttattgaggaaatcacat

SEQ ID NO: 1847355 - DNA, 25 bp, Homo sapien
gctggagtgctccaatgctcatccc

SEQ ID NO: 1847356 - DNA, 25 bp, Homo sapien
tctcccacatcacacatgtgatttc

SEQ ID NO: 1847357 - DNA, 25 bp, Homo sapien
catgtgatttcctcaataaaagtgt

SEQ ID NO: 1847358 - DNA, 25 bp, Homo sapien
tttctgctacagctggagtgctcca

SEQ ID NO: 1847359 - DNA, 25 bp, Homo sapien
atccccctactggacgtctaactga

SEQ ID NO: 1847360 - DNA, 25 bp, Homo sapien
aataaaagtgtacttaatatccagg

SEQ ID NO: 1847361 - DNA, 25 bp, Homo sapien
ccaatggagatcttcgtggatgatg

SEQ ID NO: 1847362 - DNA, 25 bp, Homo sapien
caatggagatcttcgtggatgatga

SEQ ID NO: 1847363 - DNA, 25 bp, Homo sapien
atgatgagacgaagttgacgctgca

SEQ ID NO: 1847364 - DNA, 25 bp, Homo sapien
tgatgagacgaagttgacgctgcat

SEQ ID NO: 1847365 - DNA, 25 bp, Homo sapien
gatgagacgaagttgacgctgcatg

SEQ ID NO: 1847366 - DNA, 25 bp, Homo sapien
gctgcatgggttgcagcagtactac

SEQ ID NO: 1847367 - DNA, 25 bp, Homo sapien
gtagtactgctgcaacccatgcagc

SEQ ID NO: 1847368 - DNA, 25 bp, Homo sapien
atgcagcgtcaacttcgtctcatca

SEQ ID NO: 1847369 - DNA, 25 bp, Homo sapien
catcatccacgaagatctccattgg

SEQ ID NO: 1847370 - DNA, 25 bp, Homo sapien
tcatcatccacgaagatctccattg

SEQ ID NO: 1847371 - DNA, 25 bp, Homo sapien
tgcagcgtcaacttcgtctcatcat

SEQ ID NO: 1847372 - DNA, 25 bp, Homo sapien
catgcagcgtcaacttcgtctcatc

SEQ ID NO: 1847373 - DNA, 25 bp, Homo sapien
cactctgccctcctcccgttcccca

SEQ ID NO: 1847374 - DNA, 25 bp, Homo sapien
tggggaacgggaggagggcagagtg

SEQ ID NO: 1847375 - DNA, 25 bp, Homo sapien
gacatccactttgctaatgcacacg

SEQ ID NO: 1847376 - DNA, 25 bp, Homo sapien
acctttcctgtaaacctgtagatgg

SEQ ID NO: 1847377 - DNA, 25 bp, Homo sapien
tgttcttagaagcacctctgatgga

SEQ ID NO: 1847378 - DNA, 25 bp, Homo sapien
ggtctgacggcaagtaactcatctt

SEQ ID NO: 1847379 - DNA, 25 bp, Homo sapien
tatttgaggtaatggcatctgtgcc

SEQ ID NO: 1847380 - DNA, 25 bp, Homo sapien
ttagatgtaatgtgagagagaccac

SEQ ID NO: 1847381 - DNA, 25 bp, Homo sapien
aagatgagttacttgccgtcagacc

SEQ ID NO: 1847382 - DNA, 25 bp, Homo sapien
taagagaatctcgtgtgcattagca

SEQ ID NO: 1847383 - DNA, 25 bp, Homo sapien
ccatctacaggtttacaggaaaggt

SEQ ID NO: 1847384 - DNA, 25 bp, Homo sapien
tccatcagaggtgcttctaagaaca

SEQ ID NO: 1847385 - DNA, 25 bp, Homo sapien
gatcagaatgctgcaatggacagtc

SEQ ID NO: 1847386 - DNA, 25 bp, Homo sapien
cagatgccattacctcaaatagagg

SEQ ID NO: 1847387 - DNA, 25 bp, Homo sapien
tgtgctatgattgtgccagtgaata

SEQ ID NO: 1847388 - DNA, 25 bp, Homo sapien
gtgtgctatgattgtgccagtgaat

SEQ ID NO: 1847389 - DNA, 25 bp, Homo sapien
ctatgattgtgccagtgaatagcca

SEQ ID NO: 1847390 - DNA, 25 bp, Homo sapien
tgctatgattgtgccagtgaatagc

SEQ ID NO: 1847391 - DNA, 25 bp, Homo sapien
catggtgagatcctgtcccttaaaa

SEQ ID NO: 1847392 - DNA, 25 bp, Homo sapien
tagtgtgctatgattgtgccagtga

SEQ ID NO: 1847393 - DNA, 25 bp, Homo sapien
gctattcactggcacaatcatagca

SEQ ID NO: 1847394 - DNA, 25 bp, Homo sapien
tcactggcacaatcatagcacacta

SEQ ID NO: 1847395 - DNA, 25 bp, Homo sapien
ttttaagggacaggatctcaccatg

SEQ ID NO: 1847396 - DNA, 25 bp, Homo sapien
tattcactggcacaatcatagcaca

SEQ ID NO: 1847397 - DNA, 25 bp, Homo sapien
tggctattcactggcacaatcatag

SEQ ID NO: 1847398 - DNA, 25 bp, Homo sapien
attcactggcacaatcatagcacac

SEQ ID NO: 1847399 - DNA, 25 bp, Homo sapien
ttaattttaaagatgaatgcagtga

SEQ ID NO: 1847400 - DNA, 25 bp, Homo sapien
ttttaattttaaagatgaatgcagt

SEQ ID NO: 1847401 - DNA, 25 bp, Homo sapien
tttttaattttaaagatgaatgcag

SEQ ID NO: 1847402 - DNA, 25 bp, Homo sapien
ttttttaattttaaagatgaatgca

SEQ ID NO: 1847403 - DNA, 25 bp, Homo sapien
taattttaaagatgaatgcagtgag

SEQ ID NO: 1847404 - DNA, 25 bp, Homo sapien
tttaattttaaagatgaatgcagtg

SEQ ID NO: 1847405 - DNA, 25 bp, Homo sapien
tcactgcattcatctttaaaattaa

SEQ ID NO: 1847406 - DNA, 25 bp, Homo sapien
ctcactgcattcatctttaaaatta

SEQ ID NO: 1847407 - DNA, 25 bp, Homo sapien
ctgcattcatctttaaaattaaaaa

SEQ ID NO: 1847408 - DNA, 25 bp, Homo sapien
actgcattcatctttaaaattaaaa

SEQ ID NO: 1847409 - DNA, 25 bp, Homo sapien
tgcattcatctttaaaattaaaaaa

SEQ ID NO: 1847410 - DNA, 25 bp, Homo sapien
cactgcattcatctttaaaattaaa

SEQ ID NO: 1847411 - DNA, 25 bp, Homo sapien
cagacagatggcagggcatgtccaa

SEQ ID NO: 1847412 - DNA, 25 bp, Homo sapien
tcaaggtggcatcgagcatacagct

SEQ ID NO: 1847413 - DNA, 25 bp, Homo sapien
atgtgagccggcaacagagaagcac

SEQ ID NO: 1847414 - DNA, 25 bp, Homo sapien
cctgcagtgttcttcccgtgggatg

SEQ ID NO: 1847415 - DNA, 25 bp, Homo sapien
gcacccatctggaacctcggttgat

SEQ ID NO: 1847416 - DNA, 25 bp, Homo sapien
taagcagtggagtgtgttcttcccc

SEQ ID NO: 1847417 - DNA, 25 bp, Homo sapien
caaccgaggttccagatgggtgcaa

SEQ ID NO: 1847418 - DNA, 25 bp, Homo sapien
tctaaagagaagttccatggcctcc

SEQ ID NO: 1847419 - DNA, 25 bp, Homo sapien
tgtatgctcgatgccaccttgaggg

SEQ ID NO: 1847420 - DNA, 25 bp, Homo sapien
tttggtgagcagaaggctccagctg

SEQ ID NO: 1847421 - DNA, 25 bp, Homo sapien
ggtgcttctctgttgccggctcaca

SEQ ID NO: 1847422 - DNA, 25 bp, Homo sapien
tcatcccacgggaagaacactgcag

SEQ ID NO: 1847423 - DNA, 25 bp, Homo sapien
ttgtgcccaactgggagtaatgact

SEQ ID NO: 1847424 - DNA, 25 bp, Homo sapien
tcattcaagtgccaagaaggcggct

SEQ ID NO: 1847425 - DNA, 25 bp, Homo sapien
atcgtctcttacatgcaccctacag

SEQ ID NO: 1847426 - DNA, 25 bp, Homo sapien
gcagagacagctagtgttagggcct

SEQ ID NO: 1847427 - DNA, 25 bp, Homo sapien
tgccagggaaactccggaagacttg

SEQ ID NO: 1847428 - DNA, 25 bp, Homo sapien
aatgactccttgaagagacatacag

SEQ ID NO: 1847429 - DNA, 25 bp, Homo sapien
aaaagtcgaacactacccgctctca

SEQ ID NO: 1847430 - DNA, 25 bp, Homo sapien
aagccgccttcttggcacttgaatg

SEQ ID NO: 1847431 - DNA, 25 bp, Homo sapien
ctgtagggtgcatgtaagagacgat

SEQ ID NO: 1847432 - DNA, 25 bp, Homo sapien
caagtcttccggagtttccctggca

SEQ ID NO: 1847433 - DNA, 25 bp, Homo sapien
ggtggtagggcagaaaaatcctgcc

SEQ ID NO: 1847434 - DNA, 25 bp, Homo sapien
cacttgaatgacaagggagtctgag

SEQ ID NO: 1847435 - DNA, 25 bp, Homo sapien
gaagcaggtcatgatgttcagtgct

SEQ ID NO: 1847436 - DNA, 25 bp, Homo sapien
gaccccccacgagaagcaggtcatg

SEQ ID NO: 1847437 - DNA, 25 bp, Homo sapien
caggtcatgatgttcagtgctacct

SEQ ID NO: 1847438 - DNA, 25 bp, Homo sapien
gcaggtcatgatgttcagtgctacc

SEQ ID NO: 1847439 - DNA, 25 bp, Homo sapien
gcatgaccccccacgagaagcaggt

SEQ ID NO: 1847440 - DNA, 25 bp, Homo sapien
aagcaggtcatgatgttcagtgcta

SEQ ID NO: 1847441 - DNA, 25 bp, Homo sapien
gagcaaagagatccgtccagtctgc

SEQ ID NO: 1847442 - DNA, 25 bp, Homo sapien
ttgagcaaagagatccgtccagtct

SEQ ID NO: 1847443 - DNA, 25 bp, Homo sapien
ccttgagcaaagagatccgtccagt

SEQ ID NO: 1847444 - DNA, 25 bp, Homo sapien
cttgagcaaagagatccgtccagtc

SEQ ID NO: 1847445 - DNA, 25 bp, Homo sapien
taccttgagcaaagagatccgtcca

SEQ ID NO: 1847446 - DNA, 25 bp, Homo sapien
tgagcaaagagatccgtccagtctg

SEQ ID NO: 1847447 - DNA, 25 bp, Homo sapien
tggacggatctctttgctcaaggta

SEQ ID NO: 1847448 - DNA, 25 bp, Homo sapien
gactggacggatctctttgctcaag

SEQ ID NO: 1847449 - DNA, 25 bp, Homo sapien
agactggacggatctctttgctcaa

SEQ ID NO: 1847450 - DNA, 25 bp, Homo sapien
gcagactggacggatctctttgctc

SEQ ID NO: 1847451 - DNA, 25 bp, Homo sapien
cagactggacggatctctttgctca

SEQ ID NO: 1847452 - DNA, 25 bp, Homo sapien
actggacggatctctttgctcaagg

SEQ ID NO: 1847453 - DNA, 25 bp, Homo sapien
aggtagcactgaacatcatgacctg

SEQ ID NO: 1847454 - DNA, 25 bp, Homo sapien
tcatgacctgcttctcgtggggggt

SEQ ID NO: 1847455 - DNA, 25 bp, Homo sapien
cttctcgtggggggtcatgcgaaaa

SEQ ID NO: 1847456 - DNA, 25 bp, Homo sapien
gtagcactgaacatcatgacctgct

SEQ ID NO: 1847457 - DNA, 25 bp, Homo sapien
ggtagcactgaacatcatgacctgc

SEQ ID NO: 1847458 - DNA, 25 bp, Homo sapien
tagcactgaacatcatgacctgctt

SEQ ID NO: 1847459 - DNA, 25 bp, Homo sapien
ttgggagaaggtcccataaagcatg

SEQ ID NO: 1847460 - DNA, 25 bp, Homo sapien
gatctttggcaattctatatggtga

SEQ ID NO: 1847461 - DNA, 25 bp, Homo sapien
gatggactctgatatctggaatata

SEQ ID NO: 1847462 - DNA, 25 bp, Homo sapien
gggatgtcatatttgcctgacttga

SEQ ID NO: 1847463 - DNA, 25 bp, Homo sapien
gaaaagtaatccagagagtcataga

SEQ ID NO: 1847464 - DNA, 25 bp, Homo sapien
tctatatggtgagctgtaaaggtgg

SEQ ID NO: 1847465 - DNA, 25 bp, Homo sapien
atgttttgaaggccttgagagcctc

SEQ ID NO: 1847466 - DNA, 25 bp, Homo sapien
catgttttgaaggccttgagagcct

SEQ ID NO: 1847467 - DNA, 25 bp, Homo sapien
gaggctctcaaggccttcaaaacat

SEQ ID NO: 1847468 - DNA, 25 bp, Homo sapien
aggctctcaaggccttcaaaacatg

SEQ ID NO: 1847469 - DNA, 25 bp, Homo sapien
cacctttacagctcaccatatagaa

SEQ ID NO: 1847470 - DNA, 25 bp, Homo sapien
tatattccagatatcagagtccatc

SEQ ID NO: 1847471 - DNA, 25 bp, Homo sapien
tcaccatatagaattgccaaagatc

SEQ ID NO: 1847472 - DNA, 25 bp, Homo sapien
catgctttatgggaccttctcccaa

SEQ ID NO: 1847473 - DNA, 25 bp, Homo sapien
gactctctggattacttttctatca

SEQ ID NO: 1847474 - DNA, 25 bp, Homo sapien
tcaagtcaggcaaatatgacatccc

SEQ ID NO: 1847475 - DNA, 25 bp, Homo sapien
ggacgactcttatctatcacccatg

SEQ ID NO: 1847476 - DNA, 25 bp, Homo sapien
gactcttatctatcacccatgactg

SEQ ID NO: 1847477 - DNA, 25 bp, Homo sapien
cctcagtgcaaggacgactcttatc

SEQ ID NO: 1847478 - DNA, 25 bp, Homo sapien
gcaaggacgactcttatctatcacc

SEQ ID NO: 1847479 - DNA, 25 bp, Homo sapien
cagtgcaaggacgactcttatctat

SEQ ID NO: 1847480 - DNA, 25 bp, Homo sapien
cacctcagtgcaaggacgactctta

SEQ ID NO: 1847481 - DNA, 25 bp, Homo sapien
gataagagtcgtccttgcactgagg

SEQ ID NO: 1847482 - DNA, 25 bp, Homo sapien
gatagataagagtcgtccttgcact

SEQ ID NO: 1847483 - DNA, 25 bp, Homo sapien
ggtgatagataagagtcgtccttgc

SEQ ID NO: 1847484 - DNA, 25 bp, Homo sapien
cagtcatgggtgatagataagagtc

SEQ ID NO: 1847485 - DNA, 25 bp, Homo sapien
taagagtcgtccttgcactgaggtg

SEQ ID NO: 1847486 - DNA, 25 bp, Homo sapien
catgggtgatagataagagtcgtcc

SEQ ID NO: 1847487 - DNA, 25 bp, Homo sapien
ttggatgaatgtgataagatgcttg

SEQ ID NO: 1847488 - DNA, 25 bp, Homo sapien
ggatgaatgtgataagatgcttgaa

SEQ ID NO: 1847489 - DNA, 25 bp, Homo sapien
tggatgaatgtgataagatgcttga

SEQ ID NO: 1847490 - DNA, 25 bp, Homo sapien
gatgaatgtgataagatgcttgaac

SEQ ID NO: 1847491 - DNA, 25 bp, Homo sapien
ttttggatgaatgtgataagatgct

SEQ ID NO: 1847492 - DNA, 25 bp, Homo sapien
tttggatgaatgtgataagatgctt

SEQ ID NO: 1847493 - DNA, 25 bp, Homo sapien
gcatatcgtcgtggggactccaggc

SEQ ID NO: 1847494 - DNA, 25 bp, Homo sapien
tccaggccgtatcctagccctggct

SEQ ID NO: 1847495 - DNA, 25 bp, Homo sapien
catatcgtcgtggggactccaggcc

SEQ ID NO: 1847496 - DNA, 25 bp, Homo sapien
ggactccaggccgtatcctagccct

SEQ ID NO: 1847497 - DNA, 25 bp, Homo sapien
actccaggccgtatcctagccctgg

SEQ ID NO: 1847498 - DNA, 25 bp, Homo sapien
gactccaggccgtatcctagccctg

SEQ ID NO: 1847499 - DNA, 25 bp, Homo sapien
gcctggagtccccacgacgatatgc

SEQ ID NO: 1847500 - DNA, 25 bp, Homo sapien
agccagggctaggatacggcctgga

SEQ ID NO: 1847501 - DNA, 25 bp, Homo sapien
ggcctggagtccccacgacgatatg

SEQ ID NO: 1847502 - DNA, 25 bp, Homo sapien
ggctaggatacggcctggagtcccc

SEQ ID NO: 1847503 - DNA, 25 bp, Homo sapien
cagggctaggatacggcctggagtc

SEQ ID NO: 1847504 - DNA, 25 bp, Homo sapien
agggctaggatacggcctggagtcc

SEQ ID NO: 1847505 - DNA, 25 bp, Homo sapien
tcaagcatcttatcacattcatcca

SEQ ID NO: 1847506 - DNA, 25 bp, Homo sapien
ttcaagcatcttatcacattcatcc

SEQ ID NO: 1847507 - DNA, 25 bp, Homo sapien
caagcatcttatcacattcatccaa

SEQ ID NO: 1847508 - DNA, 25 bp, Homo sapien
gcatcttatcacattcatccaaaat

SEQ ID NO: 1847509 - DNA, 25 bp, Homo sapien
aagcatcttatcacattcatccaaa

SEQ ID NO: 1847510 - DNA, 25 bp, Homo sapien
gttcaagcatcttatcacattcatc

SEQ ID NO: 1847511 - DNA, 25 bp, Homo sapien
ttggatgaatgtgataagatgcttg

SEQ ID NO: 1847512 - DNA, 25 bp, Homo sapien
tcctagccctggctcgaaataagag

SEQ ID NO: 1847513 - DNA, 25 bp, Homo sapien
aagaggtgctgaagaagaactgccc

SEQ ID NO: 1847514 - DNA, 25 bp, Homo sapien
tgtgataagatgcttgaacagctcg

SEQ ID NO: 1847515 - DNA, 25 bp, Homo sapien
agaactgcccgcatatcgtcgtggg

SEQ ID NO: 1847516 - DNA, 25 bp, Homo sapien
ttggtggtctgtctatcaagaagga

SEQ ID NO: 1847517 - DNA, 25 bp, Homo sapien
caagcatcttatcacattcatccaa

SEQ ID NO: 1847518 - DNA, 25 bp, Homo sapien
tggagtccccacgacgatatgcggg

SEQ ID NO: 1847519 - DNA, 25 bp, Homo sapien
gatatgcgggcagttcttcttcagc

SEQ ID NO: 1847520 - DNA, 25 bp, Homo sapien
cgagctgttcaagcatcttatcaca

SEQ ID NO: 1847521 - DNA, 25 bp, Homo sapien
tcgagccagggctaggatacggcct

SEQ ID NO: 1847522 - DNA, 25 bp, Homo sapien
tccttcttgatagacagaccaccaa

SEQ ID NO: 1847523 - DNA, 25 bp, Homo sapien
cagagtgttgagttcctatgtaaca

SEQ ID NO: 1847524 - DNA, 25 bp, Homo sapien
gtggcagagaaagccggaaacttta

SEQ ID NO: 1847525 - DNA, 25 bp, Homo sapien
taagaaacttgtaggccaatagtct

SEQ ID NO: 1847526 - DNA, 25 bp, Homo sapien
gatgatgcttaacacaagaccaccc

SEQ ID NO: 1847527 - DNA, 25 bp, Homo sapien
aatattgaggattctggccaagtgc

SEQ ID NO: 1847528 - DNA, 25 bp, Homo sapien
aacaggaggattcgtaattgggcta

SEQ ID NO: 1847529 - DNA, 25 bp, Homo sapien
taaagtttccggctttctctgccac

SEQ ID NO: 1847530 - DNA, 25 bp, Homo sapien
gcatcatccatagcccaattacgaa

SEQ ID NO: 1847531 - DNA, 25 bp, Homo sapien
ggtggtcttgtgttaagcatcatcc

SEQ ID NO: 1847532 - DNA, 25 bp, Homo sapien
tgtaagccattgtgcacttggccag

SEQ ID NO: 1847533 - DNA, 25 bp, Homo sapien
tgttacataggaactcaacactctg

SEQ ID NO: 1847534 - DNA, 25 bp, Homo sapien
gagactattggcctacaagtttctt

SEQ ID NO: 1847535 - DNA, 25 bp, Homo sapien
ctctaaatacatgcccaatgtcaag

SEQ ID NO: 1847536 - DNA, 25 bp, Homo sapien
tgatgtgtcacactcgggagttggc

SEQ ID NO: 1847537 - DNA, 25 bp, Homo sapien
tgtgctggtgatgtgtcacactcgg

SEQ ID NO: 1847538 - DNA, 25 bp, Homo sapien
tgagcgcttctctaaatacatgccc

SEQ ID NO: 1847539 - DNA, 25 bp, Homo sapien
tgtcacactcgggagttggcttttc

SEQ ID NO: 1847540 - DNA, 25 bp, Homo sapien
ggaatatgagcgcttctctaaatac

SEQ ID NO: 1847541 - DNA, 25 bp, Homo sapien
gaaaagccaactcccgagtgtgaca

SEQ ID NO: 1847542 - DNA, 25 bp, Homo sapien
cgagtgtgacacatcaccagcacag

SEQ ID NO: 1847543 - DNA, 25 bp, Homo sapien
gggcatgtatttagagaagcgctca

SEQ ID NO: 1847544 - DNA, 25 bp, Homo sapien
gtatttagagaagcgctcatattcc

SEQ ID NO: 1847545 - DNA, 25 bp, Homo sapien
cttgacattgggcatgtatttagag

SEQ ID NO: 1847546 - DNA, 25 bp, Homo sapien
cattgggcatgtatttagagaagcg

SEQ ID NO: 1847547 - DNA, 25 bp, Homo sapien
tatgtctccgtatacttcctgccta

SEQ ID NO: 1847548 - DNA, 25 bp, Homo sapien
tcacttccctagaggggataatgaa

SEQ ID NO: 1847549 - DNA, 25 bp, Homo sapien
tgaagagctacatttaccatatgtc

SEQ ID NO: 1847550 - DNA, 25 bp, Homo sapien
catatgtctccgtatacttcctgcc

SEQ ID NO: 1847551 - DNA, 25 bp, Homo sapien
tgtctccgtatacttcctgcctaag

SEQ ID NO: 1847552 - DNA, 25 bp, Homo sapien
ttaccatatgtctccgtatacttcc

SEQ ID NO: 1847553 - DNA, 25 bp, Homo sapien
gcaggaagtatacggagacatatgg

SEQ ID NO: 1847554 - DNA, 25 bp, Homo sapien
cattatcccctctagggaagtgact

SEQ ID NO: 1847555 - DNA, 25 bp, Homo sapien
gacatatggtaaatgtagctcttca

SEQ ID NO: 1847556 - DNA, 25 bp, Homo sapien
cttaggcaggaagtatacggagaca

SEQ ID NO: 1847557 - DNA, 25 bp, Homo sapien
ttcattatcccctctagggaagtga

SEQ ID NO: 1847558 - DNA, 25 bp, Homo sapien
gaagtatacggagacatatggtaaa

SEQ ID NO: 1847559 - DNA, 25 bp, Homo sapien
ccaggccaagtcgggcatgggaaag

SEQ ID NO: 1847560 - DNA, 25 bp, Homo sapien
tgccaggccaagtcgggcatgggaa

SEQ ID NO: 1847561 - DNA, 25 bp, Homo sapien
ccaagtcgggcatgggaaagacagc

SEQ ID NO: 1847562 - DNA, 25 bp, Homo sapien
gtgccaggccaagtcgggcatggga

SEQ ID NO: 1847563 - DNA, 25 bp, Homo sapien
caggccaagtcgggcatgggaaaga

SEQ ID NO: 1847564 - DNA, 25 bp, Homo sapien
gccaggccaagtcgggcatgggaaa

SEQ ID NO: 1847565 - DNA, 25 bp, Homo sapien
gctgtctttcccatgcccgacttgg

SEQ ID NO: 1847566 - DNA, 25 bp, Homo sapien
tttcccatgcccgacttggcctggc

SEQ ID NO: 1847567 - DNA, 25 bp, Homo sapien
ttcccatgcccgacttggcctggca

SEQ ID NO: 1847568 - DNA, 25 bp, Homo sapien
tcccatgcccgacttggcctggcac

SEQ ID NO: 1847569 - DNA, 25 bp, Homo sapien
ccattctgggaatggatgtcctgtg

SEQ ID NO: 1847570 - DNA, 25 bp, Homo sapien
gtgcatccctcaggccattctggga

SEQ ID NO: 1847571 - DNA, 25 bp, Homo sapien
tgagtgcatccctcaggccattctg

SEQ ID NO: 1847572 - DNA, 25 bp, Homo sapien
ccaagtcgggcatgggaaagacagc

SEQ ID NO: 1847573 - DNA, 25 bp, Homo sapien
tcttggccacactgcaacagctgga

SEQ ID NO: 1847574 - DNA, 25 bp, Homo sapien
ccctcaggccattctgggaatggat

SEQ ID NO: 1847575 - DNA, 25 bp, Homo sapien
tcccagaatggcctgagggatgcac

SEQ ID NO: 1847576 - DNA, 25 bp, Homo sapien
cagaatggcctgagggatgcactca

SEQ ID NO: 1847577 - DNA, 25 bp, Homo sapien
cacaggacatccattcccagaatgg

SEQ ID NO: 1847578 - DNA, 25 bp, Homo sapien
ccattcccagaatggcctgagggat

SEQ ID NO: 1847579 - DNA, 25 bp, Homo sapien
cagctgttgcagtgtggccaagaca

SEQ ID NO: 1847580 - DNA, 25 bp, Homo sapien
gacatccattcccagaatggcctga

SEQ ID NO: 1847581 - DNA, 25 bp, Homo sapien
tgggctctttaagggtacaatacaa

SEQ ID NO: 1847582 - DNA, 25 bp, Homo sapien
atgtgtttgtcgttgctcaggtggt

SEQ ID NO: 1847583 - DNA, 25 bp, Homo sapien
tgctcattgggctctttaagggtac

SEQ ID NO: 1847584 - DNA, 25 bp, Homo sapien
tctcttgggcatgtagtgctcattg

SEQ ID NO: 1847585 - DNA, 25 bp, Homo sapien
aaagatgtgtttgtcgttgctcagg

SEQ ID NO: 1847586 - DNA, 25 bp, Homo sapien
catgtagtgctcattgggctcttta

SEQ ID NO: 1847587 - DNA, 25 bp, Homo sapien
ttgtattgtacccttaaagagccca

SEQ ID NO: 1847588 - DNA, 25 bp, Homo sapien
cctgagcaacgacaaacacatcttt

SEQ ID NO: 1847589 - DNA, 25 bp, Homo sapien
accacctgagcaacgacaaacacat

SEQ ID NO: 1847590 - DNA, 25 bp, Homo sapien
taaagagcccaatgagcactacatg

SEQ ID NO: 1847591 - DNA, 25 bp, Homo sapien
tgtacccttaaagagcccaatgagc

SEQ ID NO: 1847592 - DNA, 25 bp, Homo sapien
caatgagcactacatgcccaagaga

SEQ ID NO: 1847593 - DNA, 25 bp, Homo sapien
gccagagttgctccgggccattgtc

SEQ ID NO: 1847594 - DNA, 25 bp, Homo sapien
caatgagctcttggactatgaagat

SEQ ID NO: 1847595 - DNA, 25 bp, Homo sapien
gctctggctttcgtgacttcctgct

SEQ ID NO: 1847596 - DNA, 25 bp, Homo sapien
tccgggccattgtcgactgtggctt

SEQ ID NO: 1847597 - DNA, 25 bp, Homo sapien
caagccagagttgctccgggccatt

SEQ ID NO: 1847598 - DNA, 25 bp, Homo sapien
ttgctccgggccattgtcgactgtg

SEQ ID NO: 1847599 - DNA, 25 bp, Homo sapien
aagccacagtcgacaatggcccgga

SEQ ID NO: 1847600 - DNA, 25 bp, Homo sapien
agcaggaagtcacgaaagccagagc

SEQ ID NO: 1847601 - DNA, 25 bp, Homo sapien
aatggcccggagcaactctggcttg

SEQ ID NO: 1847602 - DNA, 25 bp, Homo sapien
acaatggcccggagcaactctggct

SEQ ID NO: 1847603 - DNA, 25 bp, Homo sapien
atcttcatagtccaagagctcattg

SEQ ID NO: 1847604 - DNA, 25 bp, Homo sapien
gagcaggaagtcacgaaagccagag

SEQ ID NO: 1847605 - DNA, 25 bp, Homo sapien
ctcttcaccccttgttttcacctat

SEQ ID NO: 1847606 - DNA, 25 bp, Homo sapien
ataggtgaaaacaaggggtgaagag

SEQ ID NO: 1847607 - DNA, 25 bp, Homo sapien
tgttttcacctattttgcgagaacc

SEQ ID NO: 1847608 - DNA, 25 bp, Homo sapien
tcaatcccctactcttcaccccttg

SEQ ID NO: 1847609 - DNA, 25 bp, Homo sapien
acctattttgcgagaacccatccag

SEQ ID NO: 1847610 - DNA, 25 bp, Homo sapien
ttcacctattttgcgagaacccatc

SEQ ID NO: 1847611 - DNA, 25 bp, Homo sapien
cccttgttttcacctattttgcgag

SEQ ID NO: 1847612 - DNA, 25 bp, Homo sapien
ttttcctttgctgttcctcaatccc

SEQ ID NO: 1847613 - DNA, 25 bp, Homo sapien
tctcgcaaaataggtgaaaacaagg

SEQ ID NO: 1847614 - DNA, 25 bp, Homo sapien
ctggatgggttctcgcaaaataggt

SEQ ID NO: 1847615 - DNA, 25 bp, Homo sapien
ctcgcaaaataggtgaaaacaaggg

SEQ ID NO: 1847616 - DNA, 25 bp, Homo sapien
gggattgaggaacagcaaaggaaaa

SEQ ID NO: 1847617 - DNA, 25 bp, Homo sapien
gatgggttctcgcaaaataggtgaa

SEQ ID NO: 1847618 - DNA, 25 bp, Homo sapien
ggttctcgcaaaataggtgaaaaca

SEQ ID NO: 1847619 - DNA, 25 bp, Homo sapien
gctaatcttgttgggaacctctgtc

SEQ ID NO: 1847620 - DNA, 25 bp, Homo sapien
tctggtttccgctactgtgattgct

SEQ ID NO: 1847621 - DNA, 25 bp, Homo sapien
tgaggacttttcaggactctacttg

SEQ ID NO: 1847622 - DNA, 25 bp, Homo sapien
gagttaggcatccataacggtggga

SEQ ID NO: 1847623 - DNA, 25 bp, Homo sapien
aaaagaggtcgtgattaagtcttgc

SEQ ID NO: 1847624 - DNA, 25 bp, Homo sapien
tataatagggaaagcggagtcttcc

SEQ ID NO: 1847625 - DNA, 25 bp, Homo sapien
gacagaggttcccaacaagattagc

SEQ ID NO: 1847626 - DNA, 25 bp, Homo sapien
gaagactccgctttccctattataa

SEQ ID NO: 1847627 - DNA, 25 bp, Homo sapien
tagcaatcacagtagcggaaaccag

SEQ ID NO: 1847628 - DNA, 25 bp, Homo sapien
tataatcccaccgttatggatgcct

SEQ ID NO: 1847629 - DNA, 25 bp, Homo sapien
caagtagagtcctgaaaagtcctca

SEQ ID NO: 1847630 - DNA, 25 bp, Homo sapien
aaagcaagacttaatcacgacctct

SEQ ID NO: 1847631 - DNA, 25 bp, Homo sapien
tgttttcttttcgaaaggtgagcgc

SEQ ID NO: 1847632 - DNA, 25 bp, Homo sapien
gcgcagtgatgaccctcatctatca

SEQ ID NO: 1847633 - DNA, 25 bp, Homo sapien
aaaggtgagcgctttgcgcagtgat

SEQ ID NO: 1847634 - DNA, 25 bp, Homo sapien
agcgctttgcgcagtgatgaccctc

SEQ ID NO: 1847635 - DNA, 25 bp, Homo sapien
gctttgcgcagtgatgaccctcatc

SEQ ID NO: 1847636 - DNA, 25 bp, Homo sapien
gatgttttcttttcgaaaggtgagc

SEQ ID NO: 1847637 - DNA, 25 bp, Homo sapien
atcactgcgcaaagcgctcaccttt

SEQ ID NO: 1847638 - DNA, 25 bp, Homo sapien
agggtcatcactgcgcaaagcgctc

SEQ ID NO: 1847639 - DNA, 25 bp, Homo sapien
gatgagggtcatcactgcgcaaagc

SEQ ID NO: 1847640 - DNA, 25 bp, Homo sapien
tgatagatgagggtcatcactgcgc

SEQ ID NO: 1847641 - DNA, 25 bp, Homo sapien
tagatgagggtcatcactgcgcaaa

SEQ ID NO: 1847642 - DNA, 25 bp, Homo sapien
gcgctcacctttcgaaaagaaaaca

SEQ ID NO: 1847643 - DNA, 25 bp, Homo sapien
cccatgctaattacacaaggcttgc

SEQ ID NO: 1847644 - DNA, 25 bp, Homo sapien
gctttcttattgtagggtggagaca

SEQ ID NO: 1847645 - DNA, 25 bp, Homo sapien
tattagctttcttattgtagggtgg

SEQ ID NO: 1847646 - DNA, 25 bp, Homo sapien
cacaaggcttgcttaaacagcggaa

SEQ ID NO: 1847647 - DNA, 25 bp, Homo sapien
ttttgtggccgagccatttgtcttg

SEQ ID NO: 1847648 - DNA, 25 bp, Homo sapien
cttaaacagcggaagggaggatact

SEQ ID NO: 1847649 - DNA, 25 bp, Homo sapien
tgtctccaccctacaataagaaagc

SEQ ID NO: 1847650 - DNA, 25 bp, Homo sapien
caagacaaatggctcggccacaaaa

SEQ ID NO: 1847651 - DNA, 25 bp, Homo sapien
gcaagccttgtgtaattagcatggg

SEQ ID NO: 1847652 - DNA, 25 bp, Homo sapien
tccgctgtttaagcaagccttgtgt

SEQ ID NO: 1847653 - DNA, 25 bp, Homo sapien
gagaaaggcaatccccgcccaggct

SEQ ID NO: 1847654 - DNA, 25 bp, Homo sapien
agtatcctcccttccgctgtttaag

SEQ ID NO: 1847655 - DNA, 25 bp, Homo sapien
gagtctcaccttcgtagcgtaacag

SEQ ID NO: 1847656 - DNA, 25 bp, Homo sapien
tgagctctttttcggccctcggtgg

SEQ ID NO: 1847657 - DNA, 25 bp, Homo sapien
gccttccaagtgtttacgatacgat

SEQ ID NO: 1847658 - DNA, 25 bp, Homo sapien
ccttcgtagcgtaacagtgatgtga

SEQ ID NO: 1847659 - DNA, 25 bp, Homo sapien
atgtttctccaaaaggagtctcacc

SEQ ID NO: 1847660 - DNA, 25 bp, Homo sapien
caacttaatttggagtgccttccaa

SEQ ID NO: 1847661 - DNA, 25 bp, Homo sapien
cgtatcgtaaacacttggaaggcac

SEQ ID NO: 1847662 - DNA, 25 bp, Homo sapien
caccgagggccgaaaaagagctcaa

SEQ ID NO: 1847663 - DNA, 25 bp, Homo sapien
tacgctacgaaggtgagactccttt

SEQ ID NO: 1847664 - DNA, 25 bp, Homo sapien
taagttgggcaagtcaaggtgagaa

SEQ ID NO: 1847665 - DNA, 25 bp, Homo sapien
caatgacaccaatcgtatcgtaaac

SEQ ID NO: 1847666 - DNA, 25 bp, Homo sapien
tcacatcactgttacgctacgaagg

SEQ ID NO: 1847667 - DNA, 25 bp, Homo sapien
caatgggttcttctcatattggagg

SEQ ID NO: 1847668 - DNA, 25 bp, Homo sapien
ccttagcttgcatccctttcgagag

SEQ ID NO: 1847669 - DNA, 25 bp, Homo sapien
gcgccattgtgttcgttttgctccc

SEQ ID NO: 1847670 - DNA, 25 bp, Homo sapien
agatggtgtcctcggcgccattgtg

SEQ ID NO: 1847671 - DNA, 25 bp, Homo sapien
tcttctcatattggaggcctcagca

SEQ ID NO: 1847672 - DNA, 25 bp, Homo sapien
catccctttcgagagcaaagagctc

SEQ ID NO: 1847673 - DNA, 25 bp, Homo sapien
tctcgaaagggatgcaagctaagga

SEQ ID NO: 1847674 - DNA, 25 bp, Homo sapien
ggacaccatcttggattgggtcccc

SEQ ID NO: 1847675 - DNA, 25 bp, Homo sapien
aaaacgaacacaatggcgccgagga

SEQ ID NO: 1847676 - DNA, 25 bp, Homo sapien
gagctctttgctctcgaaagggatg

SEQ ID NO: 1847677 - DNA, 25 bp, Homo sapien
gaagggagcaaaacgaacacaatgg

SEQ ID NO: 1847678 - DNA, 25 bp, Homo sapien
tgctgaggcctccaatatgagaaga

SEQ ID NO: 1847679 - DNA, 25 bp, Homo sapien
tgatacccttttcacaggcgatggt

SEQ ID NO: 1847680 - DNA, 25 bp, Homo sapien
ttcacaggcgatggtctggtcgctg

SEQ ID NO: 1847681 - DNA, 25 bp, Homo sapien
taagctttggccttcgctacaatcc

SEQ ID NO: 1847682 - DNA, 25 bp, Homo sapien
tacaatccgtttccatctgcgcttc

SEQ ID NO: 1847683 - DNA, 25 bp, Homo sapien
ggccttcgctacaatccgtttccat

SEQ ID NO: 1847684 - DNA, 25 bp, Homo sapien
ccgtcacatgggttcctgataccct

SEQ ID NO: 1847685 - DNA, 25 bp, Homo sapien
gattgtagcgaaggccaaagcttac

SEQ ID NO: 1847686 - DNA, 25 bp, Homo sapien
gaagcgcagatggaaacggattgta

SEQ ID NO: 1847687 - DNA, 25 bp, Homo sapien
agggtatcaggaacccatgtgacgg

SEQ ID NO: 1847688 - DNA, 25 bp, Homo sapien
cagcgaccagaccatcgcctgtgaa

SEQ ID NO: 1847689 - DNA, 25 bp, Homo sapien
ccatcgcctgtgaaaagggtatcag

SEQ ID NO: 1847690 - DNA, 25 bp, Homo sapien
gaaacggattgtagcgaaggccaaa

SEQ ID NO: 1847691 - DNA, 25 bp, Homo sapien
ggatctgtataaccgcggaaggccc

SEQ ID NO: 1847692 - DNA, 25 bp, Homo sapien
agatttccctccttcgtcgctgttg

SEQ ID NO: 1847693 - DNA, 25 bp, Homo sapien
gcctggagcgcacggatctgtataa

SEQ ID NO: 1847694 - DNA, 25 bp, Homo sapien
cgctcttgcagccaagaaggcggga

SEQ ID NO: 1847695 - DNA, 25 bp, Homo sapien
gcctgcaaccggaagtgaaggcaga

SEQ ID NO: 1847696 - DNA, 25 bp, Homo sapien
ccaaaggcaagcctggagcgcacgg

SEQ ID NO: 1847697 - DNA, 25 bp, Homo sapien
gggccttccgcggttatacagatcc

SEQ ID NO: 1847698 - DNA, 25 bp, Homo sapien
tccgtgcgctccaggcttgcctttg

SEQ ID NO: 1847699 - DNA, 25 bp, Homo sapien
tcccgccttcttggctgcaagagcg

SEQ ID NO: 1847700 - DNA, 25 bp, Homo sapien
caacagcgacgaaggagggaaatct

SEQ ID NO: 1847701 - DNA, 25 bp, Homo sapien
ggttatacagatccgtgcgctccag

SEQ ID NO: 1847702 - DNA, 25 bp, Homo sapien
tctgccttcacttccggttgcaggc

SEQ ID NO: 1847703 - DNA, 25 bp, Homo sapien
tggcggtagcagtgaagttagaaac

SEQ ID NO: 1847704 - DNA, 25 bp, Homo sapien
gtcaccttcactaccgggccaagga

SEQ ID NO: 1847705 - DNA, 25 bp, Homo sapien
tagggcctgccggttcctagtgcgt

SEQ ID NO: 1847706 - DNA, 25 bp, Homo sapien
tatatcttttgttactggcggtagc

SEQ ID NO: 1847707 - DNA, 25 bp, Homo sapien
cagagaagacctgcgtggcaaaaac

SEQ ID NO: 1847708 - DNA, 25 bp, Homo sapien
tggcaaaaacctaaacgaagagatg

SEQ ID NO: 1847709 - DNA, 25 bp, Homo sapien
tgctaccgccagtaacaaaagatat

SEQ ID NO: 1847710 - DNA, 25 bp, Homo sapien
cttggcccggtagtgaaggtgacct

SEQ ID NO: 1847711 - DNA, 25 bp, Homo sapien
gatataaaggaaactaacgtctgcc

SEQ ID NO: 1847712 - DNA, 25 bp, Homo sapien
gtttctaacttcactgctaccgcca

SEQ ID NO: 1847713 - DNA, 25 bp, Homo sapien
ttaggtttttgccacgcaggtcttc

SEQ ID NO: 1847714 - DNA, 25 bp, Homo sapien
ccctccgtggatgcgcgaggaacga

SEQ ID NO: 1847715 - DNA, 25 bp, Homo sapien
gaagggcatgcatatgagggaacac

SEQ ID NO: 1847716 - DNA, 25 bp, Homo sapien
gagaggctacaaaatgcagttatct

SEQ ID NO: 1847717 - DNA, 25 bp, Homo sapien
tacaatgggaaagtaaggtgtcaag

SEQ ID NO: 1847718 - DNA, 25 bp, Homo sapien
tagatcttagaaagcaatgagcatc

SEQ ID NO: 1847719 - DNA, 25 bp, Homo sapien
atctcctctttttggagatcagaag

SEQ ID NO: 1847720 - DNA, 25 bp, Homo sapien
catctcctctttttggagatcagaa

SEQ ID NO: 1847721 - DNA, 25 bp, Homo sapien
ctggaattataagagaggggctaaa

SEQ ID NO: 1847722 - DNA, 25 bp, Homo sapien
gagaggggctaaatgtagtcatctc

SEQ ID NO: 1847723 - DNA, 25 bp, Homo sapien
ggaggacatcgaggctaccaagtta

SEQ ID NO: 1847724 - DNA, 25 bp, Homo sapien
gaaaattattggatcctgcctccca

SEQ ID NO: 1847725 - DNA, 25 bp, Homo sapien
catcggccagacactgaagtcagga

SEQ ID NO: 1847726 - DNA, 25 bp, Homo sapien
ccagtgatggacgtgaggaaacagc

SEQ ID NO: 1847727 - DNA, 25 bp, Homo sapien
ctaggcagaaatccggtagttgggg

SEQ ID NO: 1847728 - DNA, 25 bp, Homo sapien
aggcagaaatccggtagttggggtg

SEQ ID NO: 1847729 - DNA, 25 bp, Homo sapien
gcagaaatccggtagttggggtgga

SEQ ID NO: 1847730 - DNA, 25 bp, Homo sapien
ggcctgacgtcgcagaccatgccaa

SEQ ID NO: 1847731 - DNA, 25 bp, Homo sapien
aggacacgctctcggtttctctgct

SEQ ID NO: 1847732 - DNA, 25 bp, Homo sapien
cgtcgcagaccatgccaagaagctg

SEQ ID NO: 1847733 - DNA, 25 bp, Homo sapien
ggccaggacacgctctcggtttctc

SEQ ID NO: 1847734 - DNA, 25 bp, Homo sapien
cacctcagcagacaggttcccctgg

SEQ ID NO: 1847735 - DNA, 25 bp, Homo sapien
tccacctcagcagacaggttcccct

SEQ ID NO: 1847736 - DNA, 25 bp, Homo sapien
cctcagcagacaggttcccctggga

SEQ ID NO: 1847737 - DNA, 25 bp, Homo sapien
gctccacctcagcagacaggttccc

SEQ ID NO: 1847738 - DNA, 25 bp, Homo sapien
tctatgtggccttcaaaactcccag

SEQ ID NO: 1847739 - DNA, 25 bp, Homo sapien
tgcaacttcatcctaaaacagaccg

SEQ ID NO: 1847740 - DNA, 25 bp, Homo sapien
ggcattccgcccacaagctctatgt

SEQ ID NO: 1847741 - DNA, 25 bp, Homo sapien
caccaatgttgtggtccctgccagg

SEQ ID NO: 1847742 - DNA, 25 bp, Homo sapien
gctctcgctctctgcggtattgctc

SEQ ID NO: 1847743 - DNA, 25 bp, Homo sapien
tgctctggaattcgtgctctcgctc

SEQ ID NO: 1847744 - DNA, 25 bp, Homo sapien
aattcgtgctctcgctctctgcggt

SEQ ID NO: 1847745 - DNA, 25 bp, Homo sapien
ctgcttgctctggaattcgtgctct

SEQ ID NO: 1847746 - DNA, 25 bp, Homo sapien
tggataccttgggactgactggcca

SEQ ID NO: 1847747 - DNA, 25 bp, Homo sapien
ggataccttgggactgactggccat

SEQ ID NO: 1847748 - DNA, 25 bp, Homo sapien
tgctggataccttgggactgactgg

SEQ ID NO: 1847749 - DNA, 25 bp, Homo sapien
gctggataccttgggactgactggc

SEQ ID NO: 1847750 - DNA, 25 bp, Homo sapien
ctgttgttatggccgatgctgtttt

SEQ ID NO: 1847751 - DNA, 25 bp, Homo sapien
ttatggccgatgctgttttgaatgc

SEQ ID NO: 1847752 - DNA, 25 bp, Homo sapien
gttgttatggccgatgctgttttga

SEQ ID NO: 1847753 - DNA, 25 bp, Homo sapien
atggccgatgctgttttgaatgctg

SEQ ID NO: 1847754 - DNA, 25 bp, Homo sapien
tcctcctattgatgactggtcctcc

SEQ ID NO: 1847755 - DNA, 25 bp, Homo sapien
caaagctgcgggcttacaacaggtt

SEQ ID NO: 1847756 - DNA, 25 bp, Homo sapien
tcttgctcaggcagtacccaaaggg

SEQ ID NO: 1847757 - DNA, 25 bp, Homo sapien
gcaccgagtgtctctcccaatctca

SEQ ID NO: 1847758 - DNA, 25 bp, Homo sapien
gaatgcgtcacactaggctcctctg

SEQ ID NO: 1847759 - DNA, 25 bp, Homo sapien
agcctggtcagatcgcctggcccgg

SEQ ID NO: 1847760 - DNA, 25 bp, Homo sapien
gctttccatctgcatgaatgcgtca

SEQ ID NO: 1847761 - DNA, 25 bp, Homo sapien
cagcgagaagcagagggatcctgtc

SEQ ID NO: 1847762 - DNA, 25 bp, Homo sapien
tataaagggacctgagcgtccgggc

SEQ ID NO: 1847763 - DNA, 25 bp, Homo sapien
ggctgcccgtgcttcgtgctttgga

SEQ ID NO: 1847764 - DNA, 25 bp, Homo sapien
tatgattgctcttcagggaaccggg

SEQ ID NO: 1847765 - DNA, 25 bp, Homo sapien
cactgccgcttcctctataaaggga

SEQ ID NO: 1847766 - DNA, 25 bp, Homo sapien
taggagctgccttggctcagacatg

SEQ ID NO: 1847767 - DNA, 25 bp, Homo sapien
tgaaaacggagctgaacaataggct

SEQ ID NO: 1847768 - DNA, 25 bp, Homo sapien
aattgacacaagtggaccttaggcc

SEQ ID NO: 1847769 - DNA, 25 bp, Homo sapien
cagacttccttgagacacggagccc

SEQ ID NO: 1847770 - DNA, 25 bp, Homo sapien
ccccaatattcacgcactcgcacca

SEQ ID NO: 1847771 - DNA, 25 bp, Homo sapien
tccgggcccccaatattcacgcact

SEQ ID NO: 1847772 - DNA, 25 bp, Homo sapien
aatattcacgcactcgcaccacgca

SEQ ID NO: 1847773 - DNA, 25 bp, Homo sapien
tgggcgtccgggcccccaatattca

SEQ ID NO: 1847774 - DNA, 25 bp, Homo sapien
gaaccccacgctcgtgtaccagaga

SEQ ID NO: 1847775 - DNA, 25 bp, Homo sapien
tcctggccgggtccagcactggagt

SEQ ID NO: 1847776 - DNA, 25 bp, Homo sapien
aaagaaggtcttccctctcgcgaag

SEQ ID NO: 1847777 - DNA, 25 bp, Homo sapien
tgactgatgttgacgtacaccctct

SEQ ID NO: 1847778 - DNA, 25 bp, Homo sapien
agacagtagaggtaatagaggccgt

SEQ ID NO: 1847779 - DNA, 25 bp, Homo sapien
cgagaactgcgtcccgctcgtcaga

SEQ ID NO: 1847780 - DNA, 25 bp, Homo sapien
gaaacgcctgttccttcgtcgtctc

SEQ ID NO: 1847781 - DNA, 25 bp, Homo sapien
tagaggtaatagaggccgtcctgcg

SEQ ID NO: 1847782 - DNA, 25 bp, Homo sapien
tgctgtttctgggatgagtgcgagt

SEQ ID NO: 1847783 - DNA, 25 bp, Homo sapien
gcgctcttgggaatgcgatcctaaa

SEQ ID NO: 1847784 - DNA, 25 bp, Homo sapien
atcctaaaggcttgggacttctggg

SEQ ID NO: 1847785 - DNA, 25 bp, Homo sapien
gaagtggcggcttttagcccctgcg

SEQ ID NO: 1847786 - DNA, 25 bp, Homo sapien
ctccaggccggcttttgcttgcacc

SEQ ID NO: 1847787 - DNA, 25 bp, Homo sapien
ccgaaggactctgggcgagcagaac

SEQ ID NO: 1847788 - DNA, 25 bp, Homo sapien
cgtaagagtgggcacgagcgacaaa

SEQ ID NO: 1847789 - DNA, 25 bp, Homo sapien
cgagcagaactggaaccttcggatt

SEQ ID NO: 1847790 - DNA, 25 bp, Homo sapien
cactggaatcatggagccgaaggac

SEQ ID NO: 1847791 - DNA, 25 bp, Homo sapien
ttattcaggtcttggaggtccttac

SEQ ID NO: 1847792 - DNA, 25 bp, Homo sapien
ctcttattcaggtcttggaggtcct

SEQ ID NO: 1847793 - DNA, 25 bp, Homo sapien
tcttattcaggtcttggaggtcctt

SEQ ID NO: 1847794 - DNA, 25 bp, Homo sapien
actcttattcaggtcttggaggtcc

SEQ ID NO: 1847795 - DNA, 25 bp, Homo sapien
ctgggagcccggggctgagatctgt

SEQ ID NO: 1847796 - DNA, 25 bp, Homo sapien
gggagcccggggctgagatctgttt

SEQ ID NO: 1847797 - DNA, 25 bp, Homo sapien
gagcccggggctgagatctgtttct

SEQ ID NO: 1847798 - DNA, 25 bp, Homo sapien
agcccggggctgagatctgtttctg

SEQ ID NO: 1847799 - DNA, 25 bp, Homo sapien
gaagaggtatctggggacgcagcag

SEQ ID NO: 1847800 - DNA, 25 bp, Homo sapien
gaaggggcaaagagtccacgattgg

SEQ ID NO: 1847801 - DNA, 25 bp, Homo sapien
acccatgcaggctacccttgagaga

SEQ ID NO: 1847802 - DNA, 25 bp, Homo sapien
ctgagggtctgaagcggggaaggag

SEQ ID NO: 1847803 - DNA, 25 bp, Homo sapien
tgctgggcctgtgccccggggtcgg

SEQ ID NO: 1847804 - DNA, 25 bp, Homo sapien
ccagtccttgctgggcctgtgcccc

SEQ ID NO: 1847805 - DNA, 25 bp, Homo sapien
agtccttgctgggcctgtgccccgg

SEQ ID NO: 1847806 - DNA, 25 bp, Homo sapien
cttgctgggcctgtgccccggggtc

SEQ ID NO: 1847807 - DNA, 25 bp, Homo sapien
gaaacagatgtacctcgggaagagg

SEQ ID NO: 1847808 - DNA, 25 bp, Homo sapien
ttagaagggagaacaagcaaggcat

SEQ ID NO: 1847809 - DNA, 25 bp, Homo sapien
cacagtgcccagagttcagattcag

SEQ ID NO: 1847810 - DNA, 25 bp, Homo sapien
tctgaaagtggacccaagctgcagg

SEQ ID NO: 1847811 - DNA, 25 bp, Homo sapien
taggcaccgccagcaacaaggtcac

SEQ ID NO: 1847812 - DNA, 25 bp, Homo sapien
cagccaggacagtgataggcaccgc

SEQ ID NO: 1847813 - DNA, 25 bp, Homo sapien
acagctagcaggagggaacccctcc

SEQ ID NO: 1847814 - DNA, 25 bp, Homo sapien
cacagctagcaggagggaacccctc

SEQ ID NO: 1847815 - DNA, 25 bp, Homo sapien
tgccctccagccccagtgcccccat

SEQ ID NO: 1847816 - DNA, 25 bp, Homo sapien
ctgccctccagccccagtgccccca

SEQ ID NO: 1847817 - DNA, 25 bp, Homo sapien
cctgccctccagccccagtgccccc

SEQ ID NO: 1847818 - DNA, 25 bp, Homo sapien
cccactctggggtcaaatagtaatt

SEQ ID NO: 1847819 - DNA, 25 bp, Homo sapien
gttgccaaggaggagtcatatctga

SEQ ID NO: 1847820 - DNA, 25 bp, Homo sapien
ttcagggacccaagctcccctaaca

SEQ ID NO: 1847821 - DNA, 25 bp, Homo sapien
cccaagctcccctaacagccagaag

SEQ ID NO: 1847822 - DNA, 25 bp, Homo sapien
ctgggggaagcagatgtgctgagct

SEQ ID NO: 1847823 - DNA, 25 bp, Homo sapien
cagctgccttcttggacctttccag

SEQ ID NO: 1847824 - DNA, 25 bp, Homo sapien
tgtgctgagctcccacatggtggtg

SEQ ID NO: 1847825 - DNA, 25 bp, Homo sapien
tgggaccacagccggcagctgcctt

SEQ ID NO: 1847826 - DNA, 25 bp, Homo sapien
tgggggaatccggagagagtagatt

SEQ ID NO: 1847827 - DNA, 25 bp, Homo sapien
ggaatccggagagagtagatttggc

SEQ ID NO: 1847828 - DNA, 25 bp, Homo sapien
gaatccggagagagtagatttggca

SEQ ID NO: 1847829 - DNA, 25 bp, Homo sapien
ggggaatccggagagagtagatttg

SEQ ID NO: 1847830 - DNA, 25 bp, Homo sapien
cagatttattggggtcttttgaaga

SEQ ID NO: 1847831 - DNA, 25 bp, Homo sapien
agatttattggggtcttttgaagag

SEQ ID NO: 1847832 - DNA, 25 bp, Homo sapien
gggcagatttattggggtcttttga

SEQ ID NO: 1847833 - DNA, 25 bp, Homo sapien
ggcagatttattggggtcttttgaa

SEQ ID NO: 1847834 - DNA, 25 bp, Homo sapien
atctgggctctggaatcactcctcg

SEQ ID NO: 1847835 - DNA, 25 bp, Homo sapien
ccatctgaggagtggcagtgtgttc

SEQ ID NO: 1847836 - DNA, 25 bp, Homo sapien
ggaatcactcctcggggcccatctg

SEQ ID NO: 1847837 - DNA, 25 bp, Homo sapien
tctgaggagtggcagtgtgttccca

SEQ ID NO: 1847838 - DNA, 25 bp, Homo sapien
tggtaatagacggtgctgcccacgg

SEQ ID NO: 1847839 - DNA, 25 bp, Homo sapien
gaaggaggaggactgtaccagcccc

SEQ ID NO: 1847840 - DNA, 25 bp, Homo sapien
ttgccctggtaatagacggtgctgc

SEQ ID NO: 1847841 - DNA, 25 bp, Homo sapien
catagaatccagcccgaaggaggag

SEQ ID NO: 1847842 - DNA, 25 bp, Homo sapien
atggggcaatggagacgggggttgg

SEQ ID NO: 1847843 - DNA, 25 bp, Homo sapien
ctgcatggggcaatggagacggggg

SEQ ID NO: 1847844 - DNA, 25 bp, Homo sapien
catggggcaatggagacgggggttg

SEQ ID NO: 1847845 - DNA, 25 bp, Homo sapien
tgcatggggcaatggagacgggggt

SEQ ID NO: 1847846 - DNA, 25 bp, Homo sapien
caccagccgagtcccattccctgtc

SEQ ID NO: 1847847 - DNA, 25 bp, Homo sapien
cgcacgtcccggatgtgcagctcag

SEQ ID NO: 1847848 - DNA, 25 bp, Homo sapien
agatgctggcgtcatggcctcgcac

SEQ ID NO: 1847849 - DNA, 25 bp, Homo sapien
gcacctccactctgcacacgtagat

SEQ ID NO: 1847850 - DNA, 25 bp, Homo sapien
tggaggaaacgggaagaagcaagtg

SEQ ID NO: 1847851 - DNA, 25 bp, Homo sapien
cttccctggaaccacctcatctcgg

SEQ ID NO: 1847852 - DNA, 25 bp, Homo sapien
ttccctggaaccacctcatctcgga

SEQ ID NO: 1847853 - DNA, 25 bp, Homo sapien
tccctggaaccacctcatctcggaa

SEQ ID NO: 1847854 - DNA, 25 bp, Homo sapien
tccttccagggtacgaatctcaggg

SEQ ID NO: 1847855 - DNA, 25 bp, Homo sapien
acgtgacggagccaatggccagtct

SEQ ID NO: 1847856 - DNA, 25 bp, Homo sapien
tggcattgaaggagcagggcaggaa

SEQ ID NO: 1847857 - DNA, 25 bp, Homo sapien
gaaggcagaggatccttccagggta

SEQ ID NO: 1847858 - DNA, 25 bp, Homo sapien
ctgggacacccagagagcacaggat

SEQ ID NO: 1847859 - DNA, 25 bp, Homo sapien
tgggacacccagagagcacaggatc

SEQ ID NO: 1847860 - DNA, 25 bp, Homo sapien
gatggaccatgatcaagatgagcaa

SEQ ID NO: 1847861 - DNA, 25 bp, Homo sapien
tgatcaagatgagcaacagcatcca

SEQ ID NO: 1847862 - DNA, 25 bp, Homo sapien
ctggatggaccatgatcaagatgag

SEQ ID NO: 1847863 - DNA, 25 bp, Homo sapien
ggaccatgatcaagatgagcaacag

SEQ ID NO: 1847864 - DNA, 25 bp, Homo sapien
gggactcacacatcacttgccaagg

SEQ ID NO: 1847865 - DNA, 25 bp, Homo sapien
gaggaaggactcactacttgtagcc

SEQ ID NO: 1847866 - DNA, 25 bp, Homo sapien
tgccagggacctcgagcatcaaatg

SEQ ID NO: 1847867 - DNA, 25 bp, Homo sapien
tagccaggcctttggtcaccagatg

SEQ ID NO: 1847868 - DNA, 25 bp, Homo sapien
ggttgggcgggtgagaccaggatgt

SEQ ID NO: 1847869 - DNA, 25 bp, Homo sapien
gagaccaggatgtgggttcccccac

SEQ ID NO: 1847870 - DNA, 25 bp, Homo sapien
ttgggcgggtgagaccaggatgtgg

SEQ ID NO: 1847871 - DNA, 25 bp, Homo sapien
gtgagaccaggatgtgggttccccc

SEQ ID NO: 1847872 - DNA, 25 bp, Homo sapien
gatctggaagacacgtgctcatcac

SEQ ID NO: 1847873 - DNA, 25 bp, Homo sapien
tgctccgagactttactcctttctt

SEQ ID NO: 1847874 - DNA, 25 bp, Homo sapien
gatttgtgggccatgcaatggtccc

SEQ ID NO: 1847875 - DNA, 25 bp, Homo sapien
tgcacgcactgctctctcgcttttg

SEQ ID NO: 1847876 - DNA, 25 bp, Homo sapien
ggaactcttaccaggcctgcggaaa

SEQ ID NO: 1847877 - DNA, 25 bp, Homo sapien
caaactcacggcaaagggatgcgag

SEQ ID NO: 1847878 - DNA, 25 bp, Homo sapien
gaactgcccgaagaatgcctacgct

SEQ ID NO: 1847879 - DNA, 25 bp, Homo sapien
ttatgcaaataggtagaactgcccg

SEQ ID NO: 1847880 - DNA, 25 bp, Homo sapien
atgaggaagggccatagagcaaaga

SEQ ID NO: 1847881 - DNA, 25 bp, Homo sapien
tttatttcttaaatactgtgaagga

SEQ ID NO: 1847882 - DNA, 25 bp, Homo sapien
tgaggaagggccatagagcaaagag

SEQ ID NO: 1847883 - DNA, 25 bp, Homo sapien
gatgaggaagggccatagagcaaag

SEQ ID NO: 1847884 - DNA, 25 bp, Homo sapien
tgcagtcgtttttgtatatcagacc

SEQ ID NO: 1847885 - DNA, 25 bp, Homo sapien
tggggaagcgctggggactgtagtt

SEQ ID NO: 1847886 - DNA, 25 bp, Homo sapien
gtcgtttttgtatatcagaccggag

SEQ ID NO: 1847887 - DNA, 25 bp, Homo sapien
cagtcgtttttgtatatcagaccgg

SEQ ID NO: 1847888 - DNA, 25 bp, Homo sapien
caggttggagaaacgctggccaagt

SEQ ID NO: 1847889 - DNA, 25 bp, Homo sapien
catccctattctgcttcaaggtggc

SEQ ID NO: 1847890 - DNA, 25 bp, Homo sapien
gttcatcgctgaagggatccaggga

SEQ ID NO: 1847891 - DNA, 25 bp, Homo sapien
gaaaacaaatggtagcaccaggctg

SEQ ID NO: 1847892 - DNA, 25 bp, Homo sapien
gctgccttagctgcccggctcacag

SEQ ID NO: 1847893 - DNA, 25 bp, Homo sapien
gctctcggggctcgtcaggggccga

SEQ ID NO: 1847894 - DNA, 25 bp, Homo sapien
tagctgcccggctcacagcctctga

SEQ ID NO: 1847895 - DNA, 25 bp, Homo sapien
ctccggctgccttagctgcccggct

SEQ ID NO: 1847896 - DNA, 25 bp, Homo sapien
agatccagtgccaccatccggctca

SEQ ID NO: 1847897 - DNA, 25 bp, Homo sapien
tgagtctccatgctagtggagagag

SEQ ID NO: 1847898 - DNA, 25 bp, Homo sapien
catgagtcaaccactccactgagtc

SEQ ID NO: 1847899 - DNA, 25 bp, Homo sapien
gggaaaagaggatcaacgtcagatc

SEQ ID NO: 1847900 - DNA, 25 bp, Homo sapien
taggcagctgagcaactaatacagg

SEQ ID NO: 1847901 - DNA, 25 bp, Homo sapien
cgtgctcttcaaaacgaaaggcaga

SEQ ID NO: 1847902 - DNA, 25 bp, Homo sapien
gccatccgggattcagagctaggta

SEQ ID NO: 1847903 - DNA, 25 bp, Homo sapien
ggttatgcaacaaccaagagcaagt

SEQ ID NO: 1847904 - DNA, 25 bp, Homo sapien
taccactgaggtaggcatcactcag

SEQ ID NO: 1847905 - DNA, 25 bp, Homo sapien
cgtctcttggcaggcataccactga

SEQ ID NO: 1847906 - DNA, 25 bp, Homo sapien
tccgctggctctgaatgtcctgctg

SEQ ID NO: 1847907 - DNA, 25 bp, Homo sapien
gggctgcggtttcaccttccgctgg

SEQ ID NO: 1847908 - DNA, 25 bp, Homo sapien
gccatgacccactggattacttcct

SEQ ID NO: 1847909 - DNA, 25 bp, Homo sapien
cactggattacttcctgacacttac

SEQ ID NO: 1847910 - DNA, 25 bp, Homo sapien
gctgccatgacccactggattactt

SEQ ID NO: 1847911 - DNA, 25 bp, Homo sapien
tgacccactggattacttcctgaca

SEQ ID NO: 1847912 - DNA, 25 bp, Homo sapien
ctcagctgaagctccatcctgttca

SEQ ID NO: 1847913 - DNA, 25 bp, Homo sapien
tggacctcgggacatggcctcttct

SEQ ID NO: 1847914 - DNA, 25 bp, Homo sapien
caggaggtggacctcgggacatggc

SEQ ID NO: 1847915 - DNA, 25 bp, Homo sapien
agctgaagctccatcctgttcatcc

SEQ ID NO: 1847916 - DNA, 25 bp, Homo sapien
gaggctcaggggaagctctttctgc

SEQ ID NO: 1847917 - DNA, 25 bp, Homo sapien
tttctgctccctgaacttccattgg

SEQ ID NO: 1847918 - DNA, 25 bp, Homo sapien
gggaagctctttctgctccctgaac

SEQ ID NO: 1847919 - DNA, 25 bp, Homo sapien
tgctccctgaacttccattggctcc

SEQ ID NO: 1847920 - DNA, 25 bp, Homo sapien
gtaccctgaccccatcgcccaacag

SEQ ID NO: 1847921 - DNA, 25 bp, Homo sapien
tgaccccatcgcccaacaggtccct

SEQ ID NO: 1847922 - DNA, 25 bp, Homo sapien
caagtaccctgaccccatcgcccaa

SEQ ID NO: 1847923 - DNA, 25 bp, Homo sapien
ccctgaccccatcgcccaacaggtc

SEQ ID NO: 1847924 - DNA, 25 bp, Homo sapien
ggcatgtgctccagtaccacctgaa

SEQ ID NO: 1847925 - DNA, 25 bp, Homo sapien
caaccctgcgaacgtatctgagaat

SEQ ID NO: 1847926 - DNA, 25 bp, Homo sapien
tgaagcctcagtcccatcatagtgg

SEQ ID NO: 1847927 - DNA, 25 bp, Homo sapien
tctgagaatggcatcagggcctaca

SEQ ID NO: 1847928 - DNA, 25 bp, Homo sapien
gatccaggttacagaatgtcagttt

SEQ ID NO: 1847929 - DNA, 25 bp, Homo sapien
caaaaggctaaggatctggggctag

SEQ ID NO: 1847930 - DNA, 25 bp, Homo sapien
acaaaaggctaaggatctggggcta

SEQ ID NO: 1847931 - DNA, 25 bp, Homo sapien
ttagaaatagattagatccaggtta

SEQ ID NO: 1847932 - DNA, 25 bp, Homo sapien
tttagggccaggcattcaaacaggc

SEQ ID NO: 1847933 - DNA, 25 bp, Homo sapien
ccccaagcagtgcaggtttagggcc

SEQ ID NO: 1847934 - DNA, 25 bp, Homo sapien
aggccttggttacacaactccagca

SEQ ID NO: 1847935 - DNA, 25 bp, Homo sapien
cggccattgataacagcagcaagct

SEQ ID NO: 1847936 - DNA, 25 bp, Homo sapien
gcaatgcagcacatgcgcagcaatg

SEQ ID NO: 1847937 - DNA, 25 bp, Homo sapien
aatgctattaaactgctcttggaga

SEQ ID NO: 1847938 - DNA, 25 bp, Homo sapien
gagaaattccaggtttgtccggatg

SEQ ID NO: 1847939 - DNA, 25 bp, Homo sapien
tttgtccggatgatgtccacacctg

SEQ ID NO: 1847940 - DNA, 25 bp, Homo sapien
agataacacaaagatcccaaaatca

SEQ ID NO: 1847941 - DNA, 25 bp, Homo sapien
taacacaaagatcccaaaatcaaga

SEQ ID NO: 1847942 - DNA, 25 bp, Homo sapien
caaagatcccaaaatcaagaatcat

SEQ ID NO: 1847943 - DNA, 25 bp, Homo sapien
gatcccaaaatcaagaatcataaga

SEQ ID NO: 1847944 - DNA, 25 bp, Homo sapien
gcacatactcttctagccccgtgat

SEQ ID NO: 1847945 - DNA, 25 bp, Homo sapien
ccgtgatcaatgtgtgggttgccat

SEQ ID NO: 1847946 - DNA, 25 bp, Homo sapien
aactctcccgcacatactcttctag

SEQ ID NO: 1847947 - DNA, 25 bp, Homo sapien
ttctagccccgtgatcaatgtgtgg

SEQ ID NO: 1847948 - DNA, 25 bp, Homo sapien
gaagcatcactacgtccaccataga

SEQ ID NO: 1847949 - DNA, 25 bp, Homo sapien
atgttactgggtgtgggctcctgac

SEQ ID NO: 1847950 - DNA, 25 bp, Homo sapien
gaccacccaggtagtgctggtggaa

SEQ ID NO: 1847951 - DNA, 25 bp, Homo sapien
tggtggaagaaggatcgcagctggg

SEQ ID NO: 1847952 - DNA, 25 bp, Homo sapien
gaggcgttgtatgaaggcagcaata

SEQ ID NO: 1847953 - DNA, 25 bp, Homo sapien
tggatccactgaggcgttgtatgaa

SEQ ID NO: 1847954 - DNA, 25 bp, Homo sapien
gatgttgctggatccactgaggcgt

SEQ ID NO: 1847955 - DNA, 25 bp, Homo sapien
tcaaagatgttgctggatccactga

SEQ ID NO: 1847956 - DNA, 25 bp, Homo sapien
gctctcaagacccaggcctccagga

SEQ ID NO: 1847957 - DNA, 25 bp, Homo sapien
ctgaggtaaaaaactccggtgacag

SEQ ID NO: 1847958 - DNA, 25 bp, Homo sapien
aactccggtgacaggctctcaagac

SEQ ID NO: 1847959 - DNA, 25 bp, Homo sapien
cctgcgccaccagaaggggagcctg

SEQ ID NO: 1847960 - DNA, 25 bp, Homo sapien
aataatacggcatcaagagggcaca

SEQ ID NO: 1847961 - DNA, 25 bp, Homo sapien
tataatggcaagaaggtaccactgc

SEQ ID NO: 1847962 - DNA, 25 bp, Homo sapien
agagggcacaaaccaacgggtctgg

SEQ ID NO: 1847963 - DNA, 25 bp, Homo sapien
taggtatttaacagagtcaggcagc

SEQ ID NO: 1847964 - DNA, 25 bp, Homo sapien
gacaccaggcatcgccacagtgatg

SEQ ID NO: 1847965 - DNA, 25 bp, Homo sapien
ccagctgtggtagctgtgttggtgg

SEQ ID NO: 1847966 - DNA, 25 bp, Homo sapien
gggacaccaggcatcgccacagtga

SEQ ID NO: 1847967 - DNA, 25 bp, Homo sapien
agcggggccagctgtggtagctgtg

SEQ ID NO: 1847968 - DNA, 25 bp, Homo sapien
tggcggtggagccatacctggggtc

SEQ ID NO: 1847969 - DNA, 25 bp, Homo sapien
ggagccatacctggggtcccctgag

SEQ ID NO: 1847970 - DNA, 25 bp, Homo sapien
gtggagccatacctggggtcccctg

SEQ ID NO: 1847971 - DNA, 25 bp, Homo sapien
gcggtggagccatacctggggtccc

SEQ ID NO: 1847972 - DNA, 25 bp, Homo sapien
gaggcattggtacccagaccggcgc

SEQ ID NO: 1847973 - DNA, 25 bp, Homo sapien
cacaaggactggctgcataagaagc

SEQ ID NO: 1847974 - DNA, 25 bp, Homo sapien
tggctgcataagaagctgccccaca

SEQ ID NO: 1847975 - DNA, 25 bp, Homo sapien
caccatctgggccaacgaggcattg

SEQ ID NO: 1847976 - DNA, 25 bp, Homo sapien
tgtggaggagtgggccgggcaatca

SEQ ID NO: 1847977 - DNA, 25 bp, Homo sapien
tcaccacccgggttggagctgttgg

SEQ ID NO: 1847978 - DNA, 25 bp, Homo sapien
cgggcaatcaccacccgggttggag

SEQ ID NO: 1847979 - DNA, 25 bp, Homo sapien
tccaggatgggaaggccgagcctgt

SEQ ID NO: 1847980 - DNA, 25 bp, Homo sapien
agagacagaccgaagagggctgagg

SEQ ID NO: 1847981 - DNA, 25 bp, Homo sapien
aagagacagaccgaagagggctgag

SEQ ID NO: 1847982 - DNA, 25 bp, Homo sapien
gagacagaccgaagagggctgaggg

SEQ ID NO: 1847983 - DNA, 25 bp, Homo sapien
caagcctccccttccaggtcattac

SEQ ID NO: 1847984 - DNA, 25 bp, Homo sapien
cccaagcctccccttccaggtcatt

SEQ ID NO: 1847985 - DNA, 25 bp, Homo sapien
ccaagcctccccttccaggtcatta

SEQ ID NO: 1847986 - DNA, 25 bp, Homo sapien
ctcccaagcctccccttccaggtca

SEQ ID NO: 1847987 - DNA, 25 bp, Homo sapien
ggcgacggcgtgcatgaactcaggg

SEQ ID NO: 1847988 - DNA, 25 bp, Homo sapien
atgagtgatctggtgggcgacggcg

SEQ ID NO: 1847989 - DNA, 25 bp, Homo sapien
atctggtgggcgacggcgtgcatga

SEQ ID NO: 1847990 - DNA, 25 bp, Homo sapien
gcctgatgagtgatctggtgggcga

SEQ ID NO: 1847991 - DNA, 25 bp, Homo sapien
gggcgggtctgatgtaaccttgaac

SEQ ID NO: 1847992 - DNA, 25 bp, Homo sapien
tccctttctctacccagagctcagc

SEQ ID NO: 1847993 - DNA, 25 bp, Homo sapien
tggaccccttcaacccacccactca

SEQ ID NO: 1847994 - DNA, 25 bp, Homo sapien
tctgatgtaaccttgaacctggacc

SEQ ID NO: 1847995 - DNA, 25 bp, Homo sapien
agtgggagcactcggaacaccacca

SEQ ID NO: 1847996 - DNA, 25 bp, Homo sapien
ccagtgggagcactcggaacaccac

SEQ ID NO: 1847997 - DNA, 25 bp, Homo sapien
tgggagcactcggaacaccaccagg

SEQ ID NO: 1847998 - DNA, 25 bp, Homo sapien
ggccagtgggagcactcggaacacc

SEQ ID NO: 1847999 - DNA, 25 bp, Homo sapien
ctgggcagggagacagagacagtgg

SEQ ID NO: 1848000 - DNA, 25 bp, Homo sapien
tgggcagggagacagagacagtggc

SEQ ID NO: 1848001 - DNA, 25 bp, Homo sapien
gggcagggagacagagacagtggcc

SEQ ID NO: 1848002 - DNA, 25 bp, Homo sapien
aaatccggatgaccctcgggtggct

SEQ ID NO: 1848003 - DNA, 25 bp, Homo sapien
tgaccacgggttccacactctggtg

SEQ ID NO: 1848004 - DNA, 25 bp, Homo sapien
tgttcatgtgcatcatgaccacggg

SEQ ID NO: 1848005 - DNA, 25 bp, Homo sapien
cattggtagaagacggagccacgga

SEQ ID NO: 1848006 - DNA, 25 bp, Homo sapien
aggccggaccacatgcaggtgtcgt

SEQ ID NO: 1848007 - DNA, 25 bp, Homo sapien
tgcaggccagattgcagcgcaggtc

SEQ ID NO: 1848008 - DNA, 25 bp, Homo sapien
gtgttgcccagcagtcgcaggctct

SEQ ID NO: 1848009 - DNA, 25 bp, Homo sapien
caggtcagacagtgcaacaaaggtg

SEQ ID NO: 1848010 - DNA, 25 bp, Homo sapien
agttgatcaaccgctgatcctcctc

SEQ ID NO: 1848011 - DNA, 25 bp, Homo sapien
aagttgatcaaccgctgatcctcct

SEQ ID NO: 1848012 - DNA, 25 bp, Homo sapien
caagttgatcaaccgctgatcctcc

SEQ ID NO: 1848013 - DNA, 25 bp, Homo sapien
ttattgtagtccgtggtggcagcag

SEQ ID NO: 1848014 - DNA, 25 bp, Homo sapien
aagaagggctggaggcgactctcca

SEQ ID NO: 1848015 - DNA, 25 bp, Homo sapien
agcagcacccagaacctcgtagtag

SEQ ID NO: 1848016 - DNA, 25 bp, Homo sapien
tcgtagtagcgctgcaagaagggct

SEQ ID NO: 1848017 - DNA, 25 bp, Homo sapien
tgggctggggcacgctcctccactt

SEQ ID NO: 1848018 - DNA, 25 bp, Homo sapien
ctgatgtttgagagctcaaggctac

SEQ ID NO: 1848019 - DNA, 25 bp, Homo sapien
ggcggctgactgtgctgcggttggg

SEQ ID NO: 1848020 - DNA, 25 bp, Homo sapien
agagctcaaggctactggctccggg

SEQ ID NO: 1848021 - DNA, 25 bp, Homo sapien
gaaggccaaaccctgtgaatgtggc

SEQ ID NO: 1848022 - DNA, 25 bp, Homo sapien
gatgccatgagactaagtctgaaac

SEQ ID NO: 1848023 - DNA, 25 bp, Homo sapien
agaatgaatactgcagagaagacta

SEQ ID NO: 1848024 - DNA, 25 bp, Homo sapien
gagaagactagattatgaaggccaa

SEQ ID NO: 1848025 - DNA, 25 bp, Homo sapien
tatccctgatcatgtgctgagccat

SEQ ID NO: 1848026 - DNA, 25 bp, Homo sapien
ctgatcatgtgctgagccatcacca

SEQ ID NO: 1848027 - DNA, 25 bp, Homo sapien
agtaaggtctgtatatccctgatca

SEQ ID NO: 1848028 - DNA, 25 bp, Homo sapien
ctccatccgggatagtaaggtctgt

SEQ ID NO: 1848029 - DNA, 25 bp, Homo sapien
ctgaatcggggcctgttccatgttg

SEQ ID NO: 1848030 - DNA, 25 bp, Homo sapien
tgaatcggggcctgttccatgttga

SEQ ID NO: 1848031 - DNA, 25 bp, Homo sapien
tagctgttggcattccggtcatgaa

SEQ ID NO: 1848032 - DNA, 25 bp, Homo sapien
gaaggttccaaccatgacatagctg

SEQ ID NO: 1848033 - DNA, 25 bp, Homo sapien
tgagtctgaggaggagcccgttcca

SEQ ID NO: 1848034 - DNA, 25 bp, Homo sapien
gcattccggtcatgaacagaggccc

SEQ ID NO: 1848035 - DNA, 25 bp, Homo sapien
ggtaaatgagccgttgtttttcaga

SEQ ID NO: 1848036 - DNA, 25 bp, Homo sapien
gcagcaatgtgctccttaaactctt

SEQ ID NO: 1848037 - DNA, 25 bp, Homo sapien
gaagcttcttatcatcttgcagaac

SEQ ID NO: 1848038 - DNA, 25 bp, Homo sapien
atcttgcagaactcgtccctggtaa

SEQ ID NO: 1848039 - DNA, 25 bp, Homo sapien
tcctccacagcggtactggtactat

SEQ ID NO: 1848040 - DNA, 25 bp, Homo sapien
cccacaataaaggtacgagtttgag

SEQ ID NO: 1848041 - DNA, 25 bp, Homo sapien
cgagtttgagagtccaaggtcttca

SEQ ID NO: 1848042 - DNA, 25 bp, Homo sapien
ttcaccaacacctccaagctgtcag

SEQ ID NO: 1848043 - DNA, 25 bp, Homo sapien
gtgtacccgaaagactccctagcat

SEQ ID NO: 1848044 - DNA, 25 bp, Homo sapien
cgaaagactccctagcattaatccc

SEQ ID NO: 1848045 - DNA, 25 bp, Homo sapien
gcccagaccagagtgtacccgaaag

SEQ ID NO: 1848046 - DNA, 25 bp, Homo sapien
cagagtgtacccgaaagactcccta

SEQ ID NO: 1848047 - DNA, 25 bp, Homo sapien
ccccttctgattccggggcacaggg

SEQ ID NO: 1848048 - DNA, 25 bp, Homo sapien
cttctgattccggggcacagggaga

SEQ ID NO: 1848049 - DNA, 25 bp, Homo sapien
ctaaaaagtttctcctgcacacaca

SEQ ID NO: 1848050 - DNA, 25 bp, Homo sapien
cacacattcacacctgtccccatcc

SEQ ID NO: 1848051 - DNA, 25 bp, Homo sapien
acaagcgccccagaggtcggaaaat

SEQ ID NO: 1848052 - DNA, 25 bp, Homo sapien
aaaatcctgggacaacgcgaaagcg

SEQ ID NO: 1848053 - DNA, 25 bp, Homo sapien
cggtcacggcaggacaagcgcccca

SEQ ID NO: 1848054 - DNA, 25 bp, Homo sapien
gtcggaaaatcctgggacaacgcga

SEQ ID NO: 1848055 - DNA, 25 bp, Homo sapien
gcgtctactgccttcccacggtgtt

SEQ ID NO: 1848056 - DNA, 25 bp, Homo sapien
ccacggtgttccagcagaacggcac

SEQ ID NO: 1848057 - DNA, 25 bp, Homo sapien
gcagaacggcacaactaacccacag

SEQ ID NO: 1848058 - DNA, 25 bp, Homo sapien
tgctagctgactgcccgcgtctact

SEQ ID NO: 1848059 - DNA, 25 bp, Homo sapien
atctcgaagcgatacttccggctcc

SEQ ID NO: 1848060 - DNA, 25 bp, Homo sapien
ctgccaccgacggccacttccgttt

SEQ ID NO: 1848061 - DNA, 25 bp, Homo sapien
tatttggggatctcgaagcgatact

SEQ ID NO: 1848062 - DNA, 25 bp, Homo sapien
cccgatagtatttggggatctcgaa

SEQ ID NO: 1848063 - DNA, 25 bp, Homo sapien
gtgagtttctgagggcgagtcgggc

SEQ ID NO: 1848064 - DNA, 25 bp, Homo sapien
gggcacgacgagaaagtccgcagcc

SEQ ID NO: 1848065 - DNA, 25 bp, Homo sapien
tacggatgcgtggacacttaagcat

SEQ ID NO: 1848066 - DNA, 25 bp, Homo sapien
gggaccgtactacgcctgcgtgcgt

SEQ ID NO: 1848067 - DNA, 25 bp, Homo sapien
ggcaggagaactcctcactctgggt

SEQ ID NO: 1848068 - DNA, 25 bp, Homo sapien
acatcctcccgaaaagtgtgtggag

SEQ ID NO: 1848069 - DNA, 25 bp, Homo sapien
tggaggaattcaagtccctgacttc

SEQ ID NO: 1848070 - DNA, 25 bp, Homo sapien
gggtcctatgacaccctcccaggaa

SEQ ID NO: 1848071 - DNA, 25 bp, Homo sapien
taaactcccagctggacggtgtcag

SEQ ID NO: 1848072 - DNA, 25 bp, Homo sapien
tagagactcccctttgacacaggga

SEQ ID NO: 1848073 - DNA, 25 bp, Homo sapien
taagtccccagatgggtacaatggg

SEQ ID NO: 1848074 - DNA, 25 bp, Homo sapien
cacagggaatgaaagaacacgttct

SEQ ID NO: 1848075 - DNA, 25 bp, Homo sapien
tcttccctcgatggctcagatcctg

SEQ ID NO: 1848076 - DNA, 25 bp, Homo sapien
ctgagatccaaggaacaccctgggt

SEQ ID NO: 1848077 - DNA, 25 bp, Homo sapien
ttattgctgagtgagcaaaccccta

SEQ ID NO: 1848078 - DNA, 25 bp, Homo sapien
atgatcaccagatccgccctgcagg

SEQ ID NO: 1848079 - DNA, 25 bp, Homo sapien
tgccctcactgtccataaacacaaa

SEQ ID NO: 1848080 - DNA, 25 bp, Homo sapien
cctgaggtccctatgcttacaattt

SEQ ID NO: 1848081 - DNA, 25 bp, Homo sapien
gagaggaccctttggtctttattca

SEQ ID NO: 1848082 - DNA, 25 bp, Homo sapien
tgcaccctcgtactcgggtttcttc

SEQ ID NO: 1848083 - DNA, 25 bp, Homo sapien
tcctaaagcccacactctcttcacc

SEQ ID NO: 1848084 - DNA, 25 bp, Homo sapien
tctcctaaagcccacactctcttca

SEQ ID NO: 1848085 - DNA, 25 bp, Homo sapien
aaagcccacactctcttcacccttt

SEQ ID NO: 1848086 - DNA, 25 bp, Homo sapien
tcacacttttctcctaaagcccaca

SEQ ID NO: 1848087 - DNA, 25 bp, Homo sapien
tcccgggtctcccctctgctcctca

SEQ ID NO: 1848088 - DNA, 25 bp, Homo sapien
ttcccgggtctcccctctgctcctc

SEQ ID NO: 1848089 - DNA, 25 bp, Homo sapien
ctgctcctcaccttccctctccaac

SEQ ID NO: 1848090 - DNA, 25 bp, Homo sapien
cctctgctcctcaccttccctctcc

SEQ ID NO: 1848091 - DNA, 25 bp, Homo sapien
cccaagtaccgggagggagctcctg

SEQ ID NO: 1848092 - DNA, 25 bp, Homo sapien
cacgcctaccaggtttctccaatgg

SEQ ID NO: 1848093 - DNA, 25 bp, Homo sapien
gacagtaggccatgtagccagaggc

SEQ ID NO: 1848094 - DNA, 25 bp, Homo sapien
ctgcccgcagtggtcgtgagcacag

SEQ ID NO: 1848095 - DNA, 25 bp, Homo sapien
atctgagtttgggactggcccctcc

SEQ ID NO: 1848096 - DNA, 25 bp, Homo sapien
ttggttcggaagcagccctagaaac

SEQ ID NO: 1848097 - DNA, 25 bp, Homo sapien
ggctggtcccacttgagggaatcca

SEQ ID NO: 1848098 - DNA, 25 bp, Homo sapien
gagtccttagtcttgggatgcccca

SEQ ID NO: 1848099 - DNA, 25 bp, Homo sapien
tctggggcactatcccagtcacttc

SEQ ID NO: 1848100 - DNA, 25 bp, Homo sapien
cttcctgaattctccgaggagctgt

SEQ ID NO: 1848101 - DNA, 25 bp, Homo sapien
cctgaattctccgaggagctgtcca

SEQ ID NO: 1848102 - DNA, 25 bp, Homo sapien
tttctggggcactatcccagtcact

SEQ ID NO: 1848103 - DNA, 25 bp, Homo sapien
agccaccaagccgtcgcaggaacat

SEQ ID NO: 1848104 - DNA, 25 bp, Homo sapien
gggtcaggcctcattggtttccggc

SEQ ID NO: 1848105 - DNA, 25 bp, Homo sapien
ggcgggtcaggcctcattggtttcc

SEQ ID NO: 1848106 - DNA, 25 bp, Homo sapien
tcaggcctcattggtttccggcggc

SEQ ID NO: 1848107 - DNA, 25 bp, Homo sapien
gcagtgctccatccaataaagcggg

SEQ ID NO: 1848108 - DNA, 25 bp, Homo sapien
tctggctcagaacaggtatttgcct

SEQ ID NO: 1848109 - DNA, 25 bp, Homo sapien
tgaatagtcatgcagcctcaagtgt

SEQ ID NO: 1848110 - DNA, 25 bp, Homo sapien
gagagtcctctctgcgtttccggat

SEQ ID NO: 1848111 - DNA, 25 bp, Homo sapien
tgccccaagggacctcaaggaatag

SEQ ID NO: 1848112 - DNA, 25 bp, Homo sapien
tcagagatccccagttacgaagcaa

SEQ ID NO: 1848113 - DNA, 25 bp, Homo sapien
tcctaggtgctcctggatcgtgtag

SEQ ID NO: 1848114 - DNA, 25 bp, Homo sapien
caaaccgagattagcaaggaccagg

SEQ ID NO: 1848115 - DNA, 25 bp, Homo sapien
caagcttgataatcgtgggccctcc

SEQ ID NO: 1848116 - DNA, 25 bp, Homo sapien
cacgaagctgggcaattcttggtcc

SEQ ID NO: 1848117 - DNA, 25 bp, Homo sapien
tcaggtgggacttgcatgtggctcc

SEQ ID NO: 1848118 - DNA, 25 bp, Homo sapien
gacctgaaagtgaacccagattggc

SEQ ID NO: 1848119 - DNA, 25 bp, Homo sapien
ttatttctgactctcagcccgtctc

SEQ ID NO: 1848120 - DNA, 25 bp, Homo sapien
tttatttctgactctcagcccgtct

SEQ ID NO: 1848121 - DNA, 25 bp, Homo sapien
tatttctgactctcagcccgtctct

SEQ ID NO: 1848122 - DNA, 25 bp, Homo sapien
cagactagggtcagactttaccaaa

SEQ ID NO: 1848123 - DNA, 25 bp, Homo sapien
tattgaccaaaaacttcaggatctg

SEQ ID NO: 1848124 - DNA, 25 bp, Homo sapien
ggtcagaggcccaagttcagacttc

SEQ ID NO: 1848125 - DNA, 25 bp, Homo sapien
gacttcagcagcagactagggtcag

SEQ ID NO: 1848126 - DNA, 25 bp, Homo sapien
taagtccttagatcccgctcccaag

SEQ ID NO: 1848127 - DNA, 25 bp, Homo sapien
cagaactcgaggttcatgtaagtcc

SEQ ID NO: 1848128 - DNA, 25 bp, Homo sapien
cagctcgggtatcccaagctgggaa

SEQ ID NO: 1848129 - DNA, 25 bp, Homo sapien
tgatctgtagcctagtccttcctgg

SEQ ID NO: 1848130 - DNA, 25 bp, Homo sapien
gaggacagtggggatgggattggca

SEQ ID NO: 1848131 - DNA, 25 bp, Homo sapien
aggacagtggggatgggattggcac

SEQ ID NO: 1848132 - DNA, 25 bp, Homo sapien
cttgaggacagtggggatgggattg

SEQ ID NO: 1848133 - DNA, 25 bp, Homo sapien
tgaggacagtggggatgggattggc

SEQ ID NO: 1848134 - DNA, 25 bp, Homo sapien
gaagtgggtgtcacagttctcgcag

SEQ ID NO: 1848135 - DNA, 25 bp, Homo sapien
gaggaccctgcgacagtgacagcag

SEQ ID NO: 1848136 - DNA, 25 bp, Homo sapien
gcagcagtttgaagcccgggctgga

SEQ ID NO: 1848137 - DNA, 25 bp, Homo sapien
ttggaatcttggaagtgggtgtcac

SEQ ID NO: 1848138 - DNA, 25 bp, Homo sapien
gctggcagggtagaataggatcttt

SEQ ID NO: 1848139 - DNA, 25 bp, Homo sapien
tgggcaaaatggcaacgcctgcttt

SEQ ID NO: 1848140 - DNA, 25 bp, Homo sapien
accatgtcccggcaaagcctgcttt

SEQ ID NO: 1848141 - DNA, 25 bp, Homo sapien
ccggcaaagcctgctttctacaaaa

SEQ ID NO: 1848142 - DNA, 25 bp, Homo sapien
tcatgcggttccagcagtctcctaa

SEQ ID NO: 1848143 - DNA, 25 bp, Homo sapien
tgggctgccctcagtatccggtgag

SEQ ID NO: 1848144 - DNA, 25 bp, Homo sapien
gcctcatagaaagctcgggctgcag

SEQ ID NO: 1848145 - DNA, 25 bp, Homo sapien
gagtcatcttatcctcagcctcaag

SEQ ID NO: 1848146 - DNA, 25 bp, Homo sapien
cgtggtgaccctgtagcaaccacag

SEQ ID NO: 1848147 - DNA, 25 bp, Homo sapien
gggaaggatgagacaagtaagccaa

SEQ ID NO: 1848148 - DNA, 25 bp, Homo sapien
taagccaagctcgtggtgaccctgt

SEQ ID NO: 1848149 - DNA, 25 bp, Homo sapien
tgagacaagtaagccaagctcgtgg

SEQ ID NO: 1848150 - DNA, 25 bp, Homo sapien
tgcgtaaaaacatggaaccctacaa

SEQ ID NO: 1848151 - DNA, 25 bp, Homo sapien
gagactttgcgtaaaaacatggaac

SEQ ID NO: 1848152 - DNA, 25 bp, Homo sapien
tggaaccctacaataccgactttgc

SEQ ID NO: 1848153 - DNA, 25 bp, Homo sapien
gggagagagactttgcgtaaaaaca

SEQ ID NO: 1848154 - DNA, 25 bp, Homo sapien
ggagagtctcctatacgtgttgctg

SEQ ID NO: 1848155 - DNA, 25 bp, Homo sapien
tgggtcactccctagaagatctcgg

SEQ ID NO: 1848156 - DNA, 25 bp, Homo sapien
taagtcttccgcgatcccatttcgg

SEQ ID NO: 1848157 - DNA, 25 bp, Homo sapien
gtagcttccgtaccgcaaaatggcg

SEQ ID NO: 1848158 - DNA, 25 bp, Homo sapien
tccactctgtgggttaggaaaggcc

SEQ ID NO: 1848159 - DNA, 25 bp, Homo sapien
taatgaaataacgtcacgcctgccc

SEQ ID NO: 1848160 - DNA, 25 bp, Homo sapien
tagtaaacgagcaaagctccgcgcg

SEQ ID NO: 1848161 - DNA, 25 bp, Homo sapien
cacattacttgagggctcgggcgtg

SEQ ID NO: 1848162 - DNA, 25 bp, Homo sapien
tctgaccagggttcgaaggtcacac

SEQ ID NO: 1848163 - DNA, 25 bp, Homo sapien
gggttcgaaggtcacacttagagcc

SEQ ID NO: 1848164 - DNA, 25 bp, Homo sapien
cattactctgaccagggttcgaagg

SEQ ID NO: 1848165 - DNA, 25 bp, Homo sapien
gaagtgcaaagggacgagcagaatg

SEQ ID NO: 1848166 - DNA, 25 bp, Homo sapien
tctctggcgggactgattcgcacta

SEQ ID NO: 1848167 - DNA, 25 bp, Homo sapien
caataaggacccagcggattggccg

SEQ ID NO: 1848168 - DNA, 25 bp, Homo sapien
aggagcccggaggaaacagtatgcc

SEQ ID NO: 1848169 - DNA, 25 bp, Homo sapien
tatgcccgtcaagggtctctggcgg

SEQ ID NO: 1848170 - DNA, 25 bp, Homo sapien
tcccttgtcgctgggagcggcacat

SEQ ID NO: 1848171 - DNA, 25 bp, Homo sapien
tgacccttggcgcttgcgtgttgcc

SEQ ID NO: 1848172 - DNA, 25 bp, Homo sapien
tcatcctgggattggtagttcgctt

SEQ ID NO: 1848173 - DNA, 25 bp, Homo sapien
tccagccggtgagtctgaagtcgtc

SEQ ID NO: 1848174 - DNA, 25 bp, Homo sapien
gatccacgcccgctacatccttacc

SEQ ID NO: 1848175 - DNA, 25 bp, Homo sapien
gcccgctacatccttaccaaccgtg

SEQ ID NO: 1848176 - DNA, 25 bp, Homo sapien
tacatccttaccaaccgtggcatcg

SEQ ID NO: 1848177 - DNA, 25 bp, Homo sapien
taccaaccgtggcatcgcccagatg

SEQ ID NO: 1848178 - DNA, 25 bp, Homo sapien
gagactttggttactgtcctcgtgt

SEQ ID NO: 1848179 - DNA, 25 bp, Homo sapien
ctttggttactgtcctcgtgtgtac

SEQ ID NO: 1848180 - DNA, 25 bp, Homo sapien
tactgtcctcgtgtgtactgtgaga

SEQ ID NO: 1848181 - DNA, 25 bp, Homo sapien
gcaaggagactttggttactgtcct

SEQ ID NO: 1848182 - DNA, 25 bp, Homo sapien
aagctctactgccccaagtgcatgg

SEQ ID NO: 1848183 - DNA, 25 bp, Homo sapien
atggtgaagctctactgccccaagt

SEQ ID NO: 1848184 - DNA, 25 bp, Homo sapien
gagcccagtcaagacgattcgctga

SEQ ID NO: 1848185 - DNA, 25 bp, Homo sapien
cacctgtcctgcagtctttgacttt

SEQ ID NO: 1848186 - DNA, 25 bp, Homo sapien
ctccaagccgccagcaacttcaaga

SEQ ID NO: 1848187 - DNA, 25 bp, Homo sapien
aattaaaggagtcgttattgtggtg

SEQ ID NO: 1848188 - DNA, 25 bp, Homo sapien
tcccagatgagtatagccaggtgtc

SEQ ID NO: 1848189 - DNA, 25 bp, Homo sapien
catacactggataaacatgctggac

SEQ ID NO: 1848190 - DNA, 25 bp, Homo sapien
tcacctgtcaagtagggatagtgcc

SEQ ID NO: 1848191 - DNA, 25 bp, Homo sapien
tgctggacataacgctgctctgagt

SEQ ID NO: 1848192 - DNA, 25 bp, Homo sapien
gggcagttaggcaggtgcacctccc

SEQ ID NO: 1848193 - DNA, 25 bp, Homo sapien
acaagaggacagctcagcagagctg

SEQ ID NO: 1848194 - DNA, 25 bp, Homo sapien
ttcacctccaccagaagaaagagac

SEQ ID NO: 1848195 - DNA, 25 bp, Homo sapien
ctgggggtcccttacctgacccatg

SEQ ID NO: 1848196 - DNA, 25 bp, Homo sapien
aacatccagggactaggggacaaga

SEQ ID NO: 1848197 - DNA, 25 bp, Homo sapien
aaacatccagggactaggggacaag

SEQ ID NO: 1848198 - DNA, 25 bp, Homo sapien
acatccagggactaggggacaagag

SEQ ID NO: 1848199 - DNA, 25 bp, Homo sapien
catccagggactaggggacaagaga

SEQ ID NO: 1848200 - DNA, 25 bp, Homo sapien
tggccaagcccagatagaagtcagg

SEQ ID NO: 1848201 - DNA, 25 bp, Homo sapien
ggtacagagtagcagtaagtgtgct

SEQ ID NO: 1848202 - DNA, 25 bp, Homo sapien
taagtgtgctgaagggcgtcaacca

SEQ ID NO: 1848203 - DNA, 25 bp, Homo sapien
gaaggtggctggaaactggtggaat

SEQ ID NO: 1848204 - DNA, 25 bp, Homo sapien
gggtcattgcagaaatccaggaagc

SEQ ID NO: 1848205 - DNA, 25 bp, Homo sapien
gttttgagggtcattgcagaaatcc

SEQ ID NO: 1848206 - DNA, 25 bp, Homo sapien
ctaaggagtatagagccctctgttt

SEQ ID NO: 1848207 - DNA, 25 bp, Homo sapien
gccctctgttttgagggtcattgca

SEQ ID NO: 1848208 - DNA, 25 bp, Homo sapien
gaagttcgggtatttgaacaatcac

SEQ ID NO: 1848209 - DNA, 25 bp, Homo sapien
cagaagccagacaccggagaagttc

SEQ ID NO: 1848210 - DNA, 25 bp, Homo sapien
actcaccatgacgtcagaaccgctg

SEQ ID NO: 1848211 - DNA, 25 bp, Homo sapien
tgctccttacttcggcagtcactca

SEQ ID NO: 1848212 - DNA, 25 bp, Homo sapien
gaaaagattcctgtagttaggcatg

SEQ ID NO: 1848213 - DNA, 25 bp, Homo sapien
cagtgatacggaagtccccaggaag

SEQ ID NO: 1848214 - DNA, 25 bp, Homo sapien
gacagtgggcaccagtgatacggaa

SEQ ID NO: 1848215 - DNA, 25 bp, Homo sapien
gacatgcccagtgttcaccagccat

SEQ ID NO: 1848216 - DNA, 25 bp, Homo sapien
aagctgcgcaccttgatagggtaga

SEQ ID NO: 1848217 - DNA, 25 bp, Homo sapien
gggtcagagagaaaacgctccatga

SEQ ID NO: 1848218 - DNA, 25 bp, Homo sapien
cagacagatgcggaagcagacagct

SEQ ID NO: 1848219 - DNA, 25 bp, Homo sapien
gcaacaccagcagtaactgcagaca

SEQ ID NO: 1848220 - DNA, 25 bp, Homo sapien
ccagaaggcaccctaactccttggt

SEQ ID NO: 1848221 - DNA, 25 bp, Homo sapien
gatcccagaaggcaccctaactcct

SEQ ID NO: 1848222 - DNA, 25 bp, Homo sapien
tttgtggagagtgatgcagctgctg

SEQ ID NO: 1848223 - DNA, 25 bp, Homo sapien
tgtggagagtgatgcagctgctgcc

SEQ ID NO: 1848224 - DNA, 25 bp, Homo sapien
ctccaagaggcatcggtagcagcgc

SEQ ID NO: 1848225 - DNA, 25 bp, Homo sapien
gcatcggtagcagcgcaggtatttg

SEQ ID NO: 1848226 - DNA, 25 bp, Homo sapien
aggcatcggtagcagcgcaggtatt

SEQ ID NO: 1848227 - DNA, 25 bp, Homo sapien
tgagggggttcccaattgacaggaa

SEQ ID NO: 1848228 - DNA, 25 bp, Homo sapien
gcacatcagtccatgagcaggcatt

SEQ ID NO: 1848229 - DNA, 25 bp, Homo sapien
ccagcagagcacttggtgttaggca

SEQ ID NO: 1848230 - DNA, 25 bp, Homo sapien
caggctggactcagtcttgttctat

SEQ ID NO: 1848231 - DNA, 25 bp, Homo sapien
gtctcagaaaaccatcaaagcccca

SEQ ID NO: 1848232 - DNA, 25 bp, Homo sapien
gacccttctgaacccttggagccac

SEQ ID NO: 1848233 - DNA, 25 bp, Homo sapien
caggagacccttctgaacccttgga

SEQ ID NO: 1848234 - DNA, 25 bp, Homo sapien
ggagacccttctgaacccttggagc

SEQ ID NO: 1848235 - DNA, 25 bp, Homo sapien
gagacccttctgaacccttggagcc

SEQ ID NO: 1848236 - DNA, 25 bp, Homo sapien
tcatgaccagcactattaagaggac

SEQ ID NO: 1848237 - DNA, 25 bp, Homo sapien
gctcatcatgaccagcactattaag

SEQ ID NO: 1848238 - DNA, 25 bp, Homo sapien
ccagcactattaagaggaccgtgta

SEQ ID NO: 1848239 - DNA, 25 bp, Homo sapien
ctattaagaggaccgtgtagagggc

SEQ ID NO: 1848240 - DNA, 25 bp, Homo sapien
ctgtggaagcacaggggacccagac

SEQ ID NO: 1848241 - DNA, 25 bp, Homo sapien
ggctccctgcagggcctgccataaa

SEQ ID NO: 1848242 - DNA, 25 bp, Homo sapien
cctgcagggcctgccataaaacgca

SEQ ID NO: 1848243 - DNA, 25 bp, Homo sapien
gggacccagactctggctccctgca

SEQ ID NO: 1848244 - DNA, 25 bp, Homo sapien
gacagttaaaccactgaccagaggg

SEQ ID NO: 1848245 - DNA, 25 bp, Homo sapien
ggagacaagtccaccagcaatgatg

SEQ ID NO: 1848246 - DNA, 25 bp, Homo sapien
tgccaggagcacctcgacagttaaa

SEQ ID NO: 1848247 - DNA, 25 bp, Homo sapien
gccgccgggaagtaggacgctattc

SEQ ID NO: 1848248 - DNA, 25 bp, Homo sapien
agtgggcctgaactccggagcccac

SEQ ID NO: 1848249 - DNA, 25 bp, Homo sapien
cacctcagaactccggtaggacggg

SEQ ID NO: 1848250 - DNA, 25 bp, Homo sapien
cccacagaatctggcgctgggcgtc

SEQ ID NO: 1848251 - DNA, 25 bp, Homo sapien
tgaccgcacctcagaactccggtag

SEQ ID NO: 1848252 - DNA, 25 bp, Homo sapien
tcccaggcgaattctggagaccgcg

SEQ ID NO: 1848253 - DNA, 25 bp, Homo sapien
tggaaagtgcgaaccgcgcgtcggg

SEQ ID NO: 1848254 - DNA, 25 bp, Homo sapien
cggacatccggagcccgaagcggct

SEQ ID NO: 1848255 - DNA, 25 bp, Homo sapien
ccagctcagtcttgactcagaaact

SEQ ID NO: 1848256 - DNA, 25 bp, Homo sapien
tattcaagaattatccagtcccagg

SEQ ID NO: 1848257 - DNA, 25 bp, Homo sapien
tttaggatcgttgggctgtgcgtta

SEQ ID NO: 1848258 - DNA, 25 bp, Homo sapien
tgctacctcccagactattcaagaa

SEQ ID NO: 1848259 - DNA, 25 bp, Homo sapien
caatttcccgtctggaggttctggt

SEQ ID NO: 1848260 - DNA, 25 bp, Homo sapien
gcacgccactgagcgcctcccaaaa

SEQ ID NO: 1848261 - DNA, 25 bp, Homo sapien
ctgcgggaagaaagaaattcgagag

SEQ ID NO: 1848262 - DNA, 25 bp, Homo sapien
aaagaaattcgagaggaaactgcac

SEQ ID NO: 1848263 - DNA, 25 bp, Homo sapien
aaactgcacgccactgagcgcctcc

SEQ ID NO: 1848264 - DNA, 25 bp, Homo sapien
ggcgcgctaagagtccagagagttc

SEQ ID NO: 1848265 - DNA, 25 bp, Homo sapien
cagagagttcgtttccatggtgacg

SEQ ID NO: 1848266 - DNA, 25 bp, Homo sapien
cagcagcagatgacggtgtcccttc

SEQ ID NO: 1848267 - DNA, 25 bp, Homo sapien
ggcgcggcctccgagtaattaatcc

SEQ ID NO: 1848268 - DNA, 25 bp, Homo sapien
tccagatttcccgtccagagtctaa

SEQ ID NO: 1848269 - DNA, 25 bp, Homo sapien
ggagccctcactcgcttgtgacagc

SEQ ID NO: 1848270 - DNA, 25 bp, Homo sapien
gaaatctggctatcactgacgcctg

SEQ ID NO: 1848271 - DNA, 25 bp, Homo sapien
gacagctgtacgagaaatacatgcc

SEQ ID NO: 1848272 - DNA, 25 bp, Homo sapien
cagcgccccagcaactgggaaggtc

SEQ ID NO: 1848273 - DNA, 25 bp, Homo sapien
gtgtccagtatagcagggtccagcg

SEQ ID NO: 1848274 - DNA, 25 bp, Homo sapien
tgtccagtatagcagggtccagcgc

SEQ ID NO: 1848275 - DNA, 25 bp, Homo sapien
gtccagtatagcagggtccagcgcc

SEQ ID NO: 1848276 - DNA, 25 bp, Homo sapien
tcccttaaggagttgcagcgctaat

SEQ ID NO: 1848277 - DNA, 25 bp, Homo sapien
gagagggcaccagtatcagctatcc

SEQ ID NO: 1848278 - DNA, 25 bp, Homo sapien
cacagaaatttagccagagactcca

SEQ ID NO: 1848279 - DNA, 25 bp, Homo sapien
cattagaacattgtcgcccacgtta

SEQ ID NO: 1848280 - DNA, 25 bp, Homo sapien
gaataatccattcatgtaatgcagg

SEQ ID NO: 1848281 - DNA, 25 bp, Homo sapien
gaatcacaaataagagggtctttcc

SEQ ID NO: 1848282 - DNA, 25 bp, Homo sapien
ttccataatgagtcccagttggtcc

SEQ ID NO: 1848283 - DNA, 25 bp, Homo sapien
gttaagtacagccacatgaatgagg

SEQ ID NO: 1848284 - DNA, 25 bp, Homo sapien
cagtgagtggcctcaaagttgtgca

SEQ ID NO: 1848285 - DNA, 25 bp, Homo sapien
tccaccacccactctacaaaagctg

SEQ ID NO: 1848286 - DNA, 25 bp, Homo sapien
gctgccacttccaatgcttataggg

SEQ ID NO: 1848287 - DNA, 25 bp, Homo sapien
agccctggccattcaagaacccttc

SEQ ID NO: 1848288 - DNA, 25 bp, Homo sapien
tgcttatagggtatccccagtcccc

SEQ ID NO: 1848289 - DNA, 25 bp, Homo sapien
gctgccgccgtccatctgcactcat

SEQ ID NO: 1848290 - DNA, 25 bp, Homo sapien
cagctgccgccgtccatctgcactc

SEQ ID NO: 1848291 - DNA, 25 bp, Homo sapien
acaaagccagctgccgccgtccatc

SEQ ID NO: 1848292 - DNA, 25 bp, Homo sapien
aagccagctgccgccgtccatctgc

SEQ ID NO: 1848293 - DNA, 25 bp, Homo sapien
agagaggaggcgctcaaaataggcc

SEQ ID NO: 1848294 - DNA, 25 bp, Homo sapien
tgcagagaggaggcgctcaaaatag

SEQ ID NO: 1848295 - DNA, 25 bp, Homo sapien
ggccacacatctgggtattcatccc

SEQ ID NO: 1848296 - DNA, 25 bp, Homo sapien
acacatctgggtattcatccccttc

SEQ ID NO: 1848297 - DNA, 25 bp, Homo sapien
tggtaggagcggaggacagacagac

SEQ ID NO: 1848298 - DNA, 25 bp, Homo sapien
aagtcgggcccgtgttctgcctggt

SEQ ID NO: 1848299 - DNA, 25 bp, Homo sapien
acctcccatcggctataaattgagg

SEQ ID NO: 1848300 - DNA, 25 bp, Homo sapien
tgcctggtaggagcggaggacagac

SEQ ID NO: 1848301 - DNA, 25 bp, Homo sapien
caagcctcactggatcccttctcac

SEQ ID NO: 1848302 - DNA, 25 bp, Homo sapien
ccaagcctcactggatcccttctca

SEQ ID NO: 1848303 - DNA, 25 bp, Homo sapien
ccccaagcctcactggatcccttct

SEQ ID NO: 1848304 - DNA, 25 bp, Homo sapien
ccgccccaagcctcactggatccct

SEQ ID NO: 1848305 - DNA, 25 bp, Homo sapien
tccaaccactgcctcaccactcgaa

SEQ ID NO: 1848306 - DNA, 25 bp, Homo sapien
caaccactgcctcaccactcgaaga

SEQ ID NO: 1848307 - DNA, 25 bp, Homo sapien
ctccaaccactgcctcaccactcga

SEQ ID NO: 1848308 - DNA, 25 bp, Homo sapien
ccaaccactgcctcaccactcgaag

SEQ ID NO: 1848309 - DNA, 25 bp, Homo sapien
ctccttccctgtgctggtatcagta

SEQ ID NO: 1848310 - DNA, 25 bp, Homo sapien
ccttccctgtgctggtatcagtatc

SEQ ID NO: 1848311 - DNA, 25 bp, Homo sapien
ctgtgtgtgtacactgcccccagcg

SEQ ID NO: 1848312 - DNA, 25 bp, Homo sapien
ttccctgtgctggtatcagtatctg

SEQ ID NO: 1848313 - DNA, 25 bp, Homo sapien
caggaggtcattgcctcggttggac

SEQ ID NO: 1848314 - DNA, 25 bp, Homo sapien
ttcagcaggaggtcattgcctcggt

SEQ ID NO: 1848315 - DNA, 25 bp, Homo sapien
attgcctcggttggacatgatgtcc

SEQ ID NO: 1848316 - DNA, 25 bp, Homo sapien
aggtcattgcctcggttggacatga

SEQ ID NO: 1848317 - DNA, 25 bp, Homo sapien
atacccaggtttctggtgggcagag

SEQ ID NO: 1848318 - DNA, 25 bp, Homo sapien
ctgagggccgagattcccacgcact

SEQ ID NO: 1848319 - DNA, 25 bp, Homo sapien
gggttcctgagggccgagattccca

SEQ ID NO: 1848320 - DNA, 25 bp, Homo sapien
taggaggaagggtctagatacccag

SEQ ID NO: 1848321 - DNA, 25 bp, Homo sapien
ttctccggatcagcagtacaggacc

SEQ ID NO: 1848322 - DNA, 25 bp, Homo sapien
tcatccttggttctccggatcagca

SEQ ID NO: 1848323 - DNA, 25 bp, Homo sapien
ggatcagcagtacaggaccctggta

SEQ ID NO: 1848324 - DNA, 25 bp, Homo sapien
cttggttctccggatcagcagtaca

SEQ ID NO: 1848325 - DNA, 25 bp, Homo sapien
gcagggtcactcaggatgtgagcca

SEQ ID NO: 1848326 - DNA, 25 bp, Homo sapien
catggttcagtctggccctgctggg

SEQ ID NO: 1848327 - DNA, 25 bp, Homo sapien
caggtgttcaatgccggacgctggc

SEQ ID NO: 1848328 - DNA, 25 bp, Homo sapien
tagtttcagggtttgagcgcccagc

SEQ ID NO: 1848329 - DNA, 25 bp, Homo sapien
tccgcgttgtttagattgagatgct

SEQ ID NO: 1848330 - DNA, 25 bp, Homo sapien
gctgctccgcgttgtttagattgag

SEQ ID NO: 1848331 - DNA, 25 bp, Homo sapien
ttgtttagattgagatgctgcctca

SEQ ID NO: 1848332 - DNA, 25 bp, Homo sapien
tgcacagctgctccgcgttgtttag

SEQ ID NO: 1848333 - DNA, 25 bp, Homo sapien
taaaggtcctcactattcacggaga

SEQ ID NO: 1848334 - DNA, 25 bp, Homo sapien
gagccatctcagaacagttcccagt

SEQ ID NO: 1848335 - DNA, 25 bp, Homo sapien
cccacccaagaaaagggagccatct

SEQ ID NO: 1848336 - DNA, 25 bp, Homo sapien
agcccttgcccaacataaaggtcct

SEQ ID NO: 1848337 - DNA, 25 bp, Homo sapien
gtcatcaaaggaggcatccaggatc

SEQ ID NO: 1848338 - DNA, 25 bp, Homo sapien
caggatcatggcactaacatctggg

SEQ ID NO: 1848339 - DNA, 25 bp, Homo sapien
cagctgtctggcatgaccttcaagg

SEQ ID NO: 1848340 - DNA, 25 bp, Homo sapien
taacatctgggtaggacatggctgc

SEQ ID NO: 1848341 - DNA, 25 bp, Homo sapien
tagaacactggagatagtgcactga

SEQ ID NO: 1848342 - DNA, 25 bp, Homo sapien
tacttcacttggttagggaactatc

SEQ ID NO: 1848343 - DNA, 25 bp, Homo sapien
aaataggatagcttcttccaggccc

SEQ ID NO: 1848344 - DNA, 25 bp, Homo sapien
gaaaggtgaagtgtatgcaaatagg

SEQ ID NO: 1848345 - DNA, 25 bp, Homo sapien
aagcccaggcggtggatggcaaact

SEQ ID NO: 1848346 - DNA, 25 bp, Homo sapien
gaccaggcgtagatgatgatgtcct

SEQ ID NO: 1848347 - DNA, 25 bp, Homo sapien
gcctcattctgcgggaatggcaccc

SEQ ID NO: 1848348 - DNA, 25 bp, Homo sapien
cacatccatggcattagcctcattc

SEQ ID NO: 1848349 - DNA, 25 bp, Homo sapien
gttctctccagaagacggatgtgta

SEQ ID NO: 1848350 - DNA, 25 bp, Homo sapien
tgagtgggaggccttcaagaaatcc

SEQ ID NO: 1848351 - DNA, 25 bp, Homo sapien
aggagtgtgtcagcaccaaaggcca

SEQ ID NO: 1848352 - DNA, 25 bp, Homo sapien
cctgcagccacctatgacaggcaga

SEQ ID NO: 1848353 - DNA, 25 bp, Homo sapien
agcctggatgattccagcccaggac

SEQ ID NO: 1848354 - DNA, 25 bp, Homo sapien
cgtgcttccagcaaagcctggatga

SEQ ID NO: 1848355 - DNA, 25 bp, Homo sapien
aaagcctggatgattccagcccagg

SEQ ID NO: 1848356 - DNA, 25 bp, Homo sapien
gcaaagcctggatgattccagccca

SEQ ID NO: 1848357 - DNA, 25 bp, Homo sapien
gcataatagctagggacacaggcca

SEQ ID NO: 1848358 - DNA, 25 bp, Homo sapien
gaaggactgagaccttgtggcccac

SEQ ID NO: 1848359 - DNA, 25 bp, Homo sapien
caaatggcgagtggacttttcccta

SEQ ID NO: 1848360 - DNA, 25 bp, Homo sapien
caagccttcccagaaataggagatg

SEQ ID NO: 1848361 - DNA, 25 bp, Homo sapien
tggagacgcagcccacctcataaaa

SEQ ID NO: 1848362 - DNA, 25 bp, Homo sapien
ggagacgcagcccacctcataaaac

SEQ ID NO: 1848363 - DNA, 25 bp, Homo sapien
tcattccacagggtccataagagga

SEQ ID NO: 1848364 - DNA, 25 bp, Homo sapien
cttggaagattaccagctggatctc

SEQ ID NO: 1848365 - DNA, 25 bp, Homo sapien
tctccaaggggaatggaagcttctc

SEQ ID NO: 1848366 - DNA, 25 bp, Homo sapien
gcaaagggattacaaatactcctca

SEQ ID NO: 1848367 - DNA, 25 bp, Homo sapien
cccagacctctactgccttcctcac

SEQ ID NO: 1848368 - DNA, 25 bp, Homo sapien
ccagtagtggttccttcagggaggt

SEQ ID NO: 1848369 - DNA, 25 bp, Homo sapien
ggtgctatagcattggggtccccag

SEQ ID NO: 1848370 - DNA, 25 bp, Homo sapien
tatagcattggggtccccagacctc

SEQ ID NO: 1848371 - DNA, 25 bp, Homo sapien
gccggtccacaaacatggtgtcaat

SEQ ID NO: 1848372 - DNA, 25 bp, Homo sapien
ccgccggtccacaaacatggtgtca

SEQ ID NO: 1848373 - DNA, 25 bp, Homo sapien
ggtccacaaacatggtgtcaatctc

SEQ ID NO: 1848374 - DNA, 25 bp, Homo sapien
atggtgtcaatctcattgccatcac

SEQ ID NO: 1848375 - DNA, 25 bp, Homo sapien
tggatacagcatccggcgccctagg

SEQ ID NO: 1848376 - DNA, 25 bp, Homo sapien
atccggcgccctagggtgtgcgcca

SEQ ID NO: 1848377 - DNA, 25 bp, Homo sapien
tcttccaccagtcgggcctggccct

SEQ ID NO: 1848378 - DNA, 25 bp, Homo sapien
acagagcctggatacagcatccggc

SEQ ID NO: 1848379 - DNA, 25 bp, Homo sapien
tgacaaggcagcttcttaacccggt

SEQ ID NO: 1848380 - DNA, 25 bp, Homo sapien
cggttgaggagggtgtctgctgtcc

SEQ ID NO: 1848381 - DNA, 25 bp, Homo sapien
ctggtgatctgacaaggcagcttct

SEQ ID NO: 1848382 - DNA, 25 bp, Homo sapien
gcagcttcttaacccggttgaggag

SEQ ID NO: 1848383 - DNA, 25 bp, Homo sapien
tcttcccagtggaagtcgactggcc

SEQ ID NO: 1848384 - DNA, 25 bp, Homo sapien
aagtcgactggccagctccggaagt

SEQ ID NO: 1848385 - DNA, 25 bp, Homo sapien
tgggttcttcccagtggaagtcgac

SEQ ID NO: 1848386 - DNA, 25 bp, Homo sapien
gctccggaagtcaaagttgtagttg

SEQ ID NO: 1848387 - DNA, 25 bp, Homo sapien
aagactggttccgatgtgttgcttc

SEQ ID NO: 1848388 - DNA, 25 bp, Homo sapien
tgggggttggtccagcggccaatgc

SEQ ID NO: 1848389 - DNA, 25 bp, Homo sapien
gatgaactgccggtactgggggttg

SEQ ID NO: 1848390 - DNA, 25 bp, Homo sapien
ttttctgaagactggttccgatgtg

SEQ ID NO: 1848391 - DNA, 25 bp, Homo sapien
ggccacacctgccagaagtagcagc

SEQ ID NO: 1848392 - DNA, 25 bp, Homo sapien
aacggcaccactttggacaaactca

SEQ ID NO: 1848393 - DNA, 25 bp, Homo sapien
ccagcatagtgagaaaacggcacca

SEQ ID NO: 1848394 - DNA, 25 bp, Homo sapien
cacacctgccagaagtagcagcaat

SEQ ID NO: 1848395 - DNA, 25 bp, Homo sapien
gagaggagtaataagagatggacca

SEQ ID NO: 1848396 - DNA, 25 bp, Homo sapien
aagagatggaccagaatactgaagc

SEQ ID NO: 1848397 - DNA, 25 bp, Homo sapien
taataagagatggaccagaatactg

SEQ ID NO: 1848398 - DNA, 25 bp, Homo sapien
gagtaataagagatggaccagaata

SEQ ID NO: 1848399 - DNA, 25 bp, Homo sapien
gggcacggggctgatagtacgtatc

SEQ ID NO: 1848400 - DNA, 25 bp, Homo sapien
ccaggatgctgtcagcatgtttctc

SEQ ID NO: 1848401 - DNA, 25 bp, Homo sapien
ggatgctgtcagcatgtttctccag

SEQ ID NO: 1848402 - DNA, 25 bp, Homo sapien
gtgccaggatgctgtcagcatgttt

SEQ ID NO: 1848403 - DNA, 25 bp, Homo sapien
tgaaagcagcattggacgatttttg

SEQ ID NO: 1848404 - DNA, 25 bp, Homo sapien
aagcagcattggacgatttttgctc

SEQ ID NO: 1848405 - DNA, 25 bp, Homo sapien
tcactctgaacctaatttcccaccc

SEQ ID NO: 1848406 - DNA, 25 bp, Homo sapien
cagcattggacgatttttgctcctt

SEQ ID NO: 1848407 - DNA, 25 bp, Homo sapien
ttaactcaggaagcacacagagcgc

SEQ ID NO: 1848408 - DNA, 25 bp, Homo sapien
tccgtaggcgtgactttaactcagg

SEQ ID NO: 1848409 - DNA, 25 bp, Homo sapien
ggactcaagactcaactgggaccgg

SEQ ID NO: 1848410 - DNA, 25 bp, Homo sapien
gaatacaatgactcgggtctccagg

SEQ ID NO: 1848411 - DNA, 25 bp, Homo sapien
tccctctcccggtagattttgtaga

SEQ ID NO: 1848412 - DNA, 25 bp, Homo sapien
ccctctcccggtagattttgtagag

SEQ ID NO: 1848413 - DNA, 25 bp, Homo sapien
ctgccgttggcgtctcagggacgct

SEQ ID NO: 1848414 - DNA, 25 bp, Homo sapien
gcagtgactgccgttggcgtctcag

SEQ ID NO: 1848415 - DNA, 25 bp, Homo sapien
tctgaggtgttgtgtgcccttgacg

SEQ ID NO: 1848416 - DNA, 25 bp, Homo sapien
gtgttgtgtgcccttgacgtcagcc

SEQ ID NO: 1848417 - DNA, 25 bp, Homo sapien
cctgcctctgaggtgttgtgtgccc

SEQ ID NO: 1848418 - DNA, 25 bp, Homo sapien
tgtgtgcccttgacgtcagcccgta

SEQ ID NO: 1848419 - DNA, 25 bp, Homo sapien
tgactcaagaagatagaattacccc

SEQ ID NO: 1848420 - DNA, 25 bp, Homo sapien
cgagggtccaggttatgcagtttcc

SEQ ID NO: 1848421 - DNA, 25 bp, Homo sapien
tagacatgctgctgggctttatcgc

SEQ ID NO: 1848422 - DNA, 25 bp, Homo sapien
ttcctatgtggaactccccaggctg

SEQ ID NO: 1848423 - DNA, 25 bp, Homo sapien
ctgcctcatgactcacaacaaaggg

SEQ ID NO: 1848424 - DNA, 25 bp, Homo sapien
gagacggaaagggatgttctttcac

SEQ ID NO: 1848425 - DNA, 25 bp, Homo sapien
ccaggagccgaagaccaagaatcat

SEQ ID NO: 1848426 - DNA, 25 bp, Homo sapien
caaaggggtcagctttagcctggca

SEQ ID NO: 1848427 - DNA, 25 bp, Homo sapien
tgctcgcagcagtggtgccacagag

SEQ ID NO: 1848428 - DNA, 25 bp, Homo sapien
actgggcccttgagaggcagctttt

SEQ ID NO: 1848429 - DNA, 25 bp, Homo sapien
tgccacagagtgtaggagtgcagcc

SEQ ID NO: 1848430 - DNA, 25 bp, Homo sapien
ggtgtcctctcccagcgaagctggc

SEQ ID NO: 1848431 - DNA, 25 bp, Homo sapien
ccggatggatggaggtagggagcct

SEQ ID NO: 1848432 - DNA, 25 bp, Homo sapien
gggccacaggaaaggccggatggat

SEQ ID NO: 1848433 - DNA, 25 bp, Homo sapien
ggagaagggccattggaccagagtc

SEQ ID NO: 1848434 - DNA, 25 bp, Homo sapien
gaggcatgctgaggcgggggccaca

SEQ ID NO: 1848435 - DNA, 25 bp, Homo sapien
cagggtttggtgaagccacagatgt

SEQ ID NO: 1848436 - DNA, 25 bp, Homo sapien
gatgccacaagcttcatcgtcccga

SEQ ID NO: 1848437 - DNA, 25 bp, Homo sapien
acagatgtagcagcggagccttccc

SEQ ID NO: 1848438 - DNA, 25 bp, Homo sapien
tgaagtgccaatactgatgccacaa

SEQ ID NO: 1848439 - DNA, 25 bp, Homo sapien
agaggaacagcacgcagaggaagat

SEQ ID NO: 1848440 - DNA, 25 bp, Homo sapien
acagaggaacagcacgcagaggaag

SEQ ID NO: 1848441 - DNA, 25 bp, Homo sapien
ccacagaggaacagcacgcagagga

SEQ ID NO: 1848442 - DNA, 25 bp, Homo sapien
ggaacagcacgcagaggaagatgct

SEQ ID NO: 1848443 - DNA, 25 bp, Homo sapien
ttctttatgaggttatatcaatatt

SEQ ID NO: 1848444 - DNA, 25 bp, Homo sapien
tttcaaagttacttaagactctgaa

SEQ ID NO: 1848445 - DNA, 25 bp, Homo sapien
tctttatgaggttatatcaatattt

SEQ ID NO: 1848446 - DNA, 25 bp, Homo sapien
catcaggtccttgtgggagccttca

SEQ ID NO: 1848447 - DNA, 25 bp, Homo sapien
gagagacgattctgtaaagccaggg

SEQ ID NO: 1848448 - DNA, 25 bp, Homo sapien
gatggatgaggagaccactcggaac

SEQ ID NO: 1848449 - DNA, 25 bp, Homo sapien
gggagcccttctaggagccaatgga

SEQ ID NO: 1848450 - DNA, 25 bp, Homo sapien
cagcgcagattggagaaaacccaca

SEQ ID NO: 1848451 - DNA, 25 bp, Homo sapien
tgcagttgtccttgttgcagcaggt

SEQ ID NO: 1848452 - DNA, 25 bp, Homo sapien
tggtttggttgaaggcctcctgaca

SEQ ID NO: 1848453 - DNA, 25 bp, Homo sapien
tatgtcagacccagcttacggttgg

SEQ ID NO: 1848454 - DNA, 25 bp, Homo sapien
gcagggaatcggccaggatgggcac

SEQ ID NO: 1848455 - DNA, 25 bp, Homo sapien
tcttttcttagtctgatcttccttc

SEQ ID NO: 1848456 - DNA, 25 bp, Homo sapien
ccttccttcccaactctgtccctgg

SEQ ID NO: 1848457 - DNA, 25 bp, Homo sapien
ttcccaactctgtccctggccctcc

SEQ ID NO: 1848458 - DNA, 25 bp, Homo sapien
ttccttcccaactctgtccctggcc

SEQ ID NO: 1848459 - DNA, 25 bp, Homo sapien
tttgaggccgttttctcagtataat

SEQ ID NO: 1848460 - DNA, 25 bp, Homo sapien
ggccgttttctcagtataataatag

SEQ ID NO: 1848461 - DNA, 25 bp, Homo sapien
gttttctcagtataataatagcacc

SEQ ID NO: 1848462 - DNA, 25 bp, Homo sapien
ctgtctctttttgaggccgttttct

SEQ ID NO: 1848463 - DNA, 25 bp, Homo sapien
tcagtcctggtcatagaggctccca

SEQ ID NO: 1848464 - DNA, 25 bp, Homo sapien
ttgcctggcacacaaccatctttgg

SEQ ID NO: 1848465 - DNA, 25 bp, Homo sapien
cattgctataatcctctgcttctcc

SEQ ID NO: 1848466 - DNA, 25 bp, Homo sapien
caaagacataggatgttgcctggca

SEQ ID NO: 1848467 - DNA, 25 bp, Homo sapien
accttgtagcaggagtgacagcgaa

SEQ ID NO: 1848468 - DNA, 25 bp, Homo sapien
cttgtagcaggagtgacagcgaatg

SEQ ID NO: 1848469 - DNA, 25 bp, Homo sapien
tagcaggagtgacagcgaatgtcag

SEQ ID NO: 1848470 - DNA, 25 bp, Homo sapien
tgtagcaggagtgacagcgaatgtc

SEQ ID NO: 1848471 - DNA, 25 bp, Homo sapien
tggagggtggagaagagcccatccc

SEQ ID NO: 1848472 - DNA, 25 bp, Homo sapien
gagaagagcccatcccgtaggtgct

SEQ ID NO: 1848473 - DNA, 25 bp, Homo sapien
ccgtaggtgctccaacctgtttggc

SEQ ID NO: 1848474 - DNA, 25 bp, Homo sapien
catcccgtaggtgctccaacctgtt

SEQ ID NO: 1848475 - DNA, 25 bp, Homo sapien
agaaggctcaagaaaacgctctgtt

SEQ ID NO: 1848476 - DNA, 25 bp, Homo sapien
catggaggctcttagatgtcactgc

SEQ ID NO: 1848477 - DNA, 25 bp, Homo sapien
cttcagaaggctcaagaaaacgctc

SEQ ID NO: 1848478 - DNA, 25 bp, Homo sapien
tttccatggaggctcttagatgtca

SEQ ID NO: 1848479 - DNA, 25 bp, Homo sapien
cagggtgagcagcataagggctttc

SEQ ID NO: 1848480 - DNA, 25 bp, Homo sapien
tgagtggcctttttggaatttataa

SEQ ID NO: 1848481 - DNA, 25 bp, Homo sapien
tccagctctaggagttgagtggcct

SEQ ID NO: 1848482 - DNA, 25 bp, Homo sapien
gcagctgatagagtagattttcaag

SEQ ID NO: 1848483 - DNA, 25 bp, Homo sapien
gattttcaaggatccagctctagga

SEQ ID NO: 1848484 - DNA, 25 bp, Homo sapien
tctcccaactactgcctattcagca

SEQ ID NO: 1848485 - DNA, 25 bp, Homo sapien
tggccagcagtaccccaaggccagg

SEQ ID NO: 1848486 - DNA, 25 bp, Homo sapien
tcctatactatcctacccctggcca

SEQ ID NO: 1848487 - DNA, 25 bp, Homo sapien
cagtggatccttttccctacactct

SEQ ID NO: 1848488 - DNA, 25 bp, Homo sapien
tgtgctgagcaccaagcagagggag

SEQ ID NO: 1848489 - DNA, 25 bp, Homo sapien
gtgctgagcaccaagcagagggagc

SEQ ID NO: 1848490 - DNA, 25 bp, Homo sapien
gtgtgctgagcaccaagcagaggga

SEQ ID NO: 1848491 - DNA, 25 bp, Homo sapien
gcacagggaagacatggagtgggga

SEQ ID NO: 1848492 - DNA, 25 bp, Homo sapien
ctgcacagggaagacatggagtggg

SEQ ID NO: 1848493 - DNA, 25 bp, Homo sapien
tgcacagggaagacatggagtgggg

SEQ ID NO: 1848494 - DNA, 25 bp, Homo sapien
ctggctgttgggcagatccccacct

SEQ ID NO: 1848495 - DNA, 25 bp, Homo sapien
ccaggcaacccaggacgaagaaaga

SEQ ID NO: 1848496 - DNA, 25 bp, Homo sapien
tggctgttgggcagatccccacctc

SEQ ID NO: 1848497 - DNA, 25 bp, Homo sapien
aaagggggcacaccaggcaacccag

SEQ ID NO: 1848498 - DNA, 25 bp, Homo sapien
gaggcatatgggtgatctgtcagca

SEQ ID NO: 1848499 - DNA, 25 bp, Homo sapien
ggtgatctgtcagcactgccattgc

SEQ ID NO: 1848500 - DNA, 25 bp, Homo sapien
gggtcagggaggcatatgggtgatc

SEQ ID NO: 1848501 - DNA, 25 bp, Homo sapien
atatgggtgatctgtcagcactgcc

SEQ ID NO: 1848502 - DNA, 25 bp, Homo sapien
tgcctgccacaacagtgcgaggtcc

SEQ ID NO: 1848503 - DNA, 25 bp, Homo sapien
agggacccgagactggcacagtgga

SEQ ID NO: 1848504 - DNA, 25 bp, Homo sapien
agccttttgggcagcgtcgctgctg

SEQ ID NO: 1848505 - DNA, 25 bp, Homo sapien
cagagaccgcgcaggtgggagggac

SEQ ID NO: 1848506 - DNA, 25 bp, Homo sapien
ctctcatttcctcagcgggcgccca

SEQ ID NO: 1848507 - DNA, 25 bp, Homo sapien
ctcatttcctcagcgggcgcccagg

SEQ ID NO: 1848508 - DNA, 25 bp, Homo sapien
catttcctcagcgggcgcccaggcc

SEQ ID NO: 1848509 - DNA, 25 bp, Homo sapien
gcctctcatttcctcagcgggcgcc

SEQ ID NO: 1848510 - DNA, 25 bp, Homo sapien
ctccctaggctggtcccgctccgca

SEQ ID NO: 1848511 - DNA, 25 bp, Homo sapien
cctccctccctaggctggtcccgct

SEQ ID NO: 1848512 - DNA, 25 bp, Homo sapien
ccctccctaggctggtcccgctccg

SEQ ID NO: 1848513 - DNA, 25 bp, Homo sapien
tccctccctaggctggtcccgctcc

SEQ ID NO: 1848514 - DNA, 25 bp, Homo sapien
gaacgtgtccgccacgatctcagct

SEQ ID NO: 1848515 - DNA, 25 bp, Homo sapien
tcagctcctcggtgattggtccatt

SEQ ID NO: 1848516 - DNA, 25 bp, Homo sapien
gattggtccatttggagaggcctac

SEQ ID NO: 1848517 - DNA, 25 bp, Homo sapien
tccatttggagaggcctacgaaaaa

SEQ ID NO: 1848518 - DNA, 25 bp, Homo sapien
tgagttagaaacaaggctccagacg

SEQ ID NO: 1848519 - DNA, 25 bp, Homo sapien
aacaaggctccagacggccgagtct

SEQ ID NO: 1848520 - DNA, 25 bp, Homo sapien
ctacttccctgtgccaagacctatg

SEQ ID NO: 1848521 - DNA, 25 bp, Homo sapien
gcggaggtttgagggcgggagtgag

SEQ ID NO: 1848522 - DNA, 25 bp, Homo sapien
gagaacgtcagtgccatccagcgtc

SEQ ID NO: 1848523 - DNA, 25 bp, Homo sapien
ttgcagggctttgcggactccatcg

SEQ ID NO: 1848524 - DNA, 25 bp, Homo sapien
tatttccacaattcggagccccagg

SEQ ID NO: 1848525 - DNA, 25 bp, Homo sapien
gcgttctcgtctcctatttccacaa

SEQ ID NO: 1848526 - DNA, 25 bp, Homo sapien
agaagagggcacggagctgtgacac

SEQ ID NO: 1848527 - DNA, 25 bp, Homo sapien
cttaggataggagaagagggcacgg

SEQ ID NO: 1848528 - DNA, 25 bp, Homo sapien
gagggcacggagctgtgacaccccc

SEQ ID NO: 1848529 - DNA, 25 bp, Homo sapien
aagagggcacggagctgtgacaccc

SEQ ID NO: 1848530 - DNA, 25 bp, Homo sapien
tgattagggccgtgtccccttggat

SEQ ID NO: 1848531 - DNA, 25 bp, Homo sapien
cagcggcaatgactcctcaggtggc

SEQ ID NO: 1848532 - DNA, 25 bp, Homo sapien
tccctttgagctttggccagatcca

SEQ ID NO: 1848533 - DNA, 25 bp, Homo sapien
tagccccagtcgttgcctcagttta

SEQ ID NO: 1848534 - DNA, 25 bp, Homo sapien
cctccaaccgctcggatttcttagt

SEQ ID NO: 1848535 - DNA, 25 bp, Homo sapien
ctccaaccgctcggatttcttagtt

SEQ ID NO: 1848536 - DNA, 25 bp, Homo sapien
atctctaggcgtccctcccactccg

SEQ ID NO: 1848537 - DNA, 25 bp, Homo sapien
cctcctgccatctctaggcgtccct

SEQ ID NO: 1848538 - DNA, 25 bp, Homo sapien
aaaaagacatgcagacaagggcgtt

SEQ ID NO: 1848539 - DNA, 25 bp, Homo sapien
aaagacatgcagacaagggcgttgg

SEQ ID NO: 1848540 - DNA, 25 bp, Homo sapien
acaaggctagggtctctaatctcca

SEQ ID NO: 1848541 - DNA, 25 bp, Homo sapien
cttgtgaggtccctgtcgggcgccc

SEQ ID NO: 1848542 - DNA, 25 bp, Homo sapien
cgctaccgcagggactggaagtcca

SEQ ID NO: 1848543 - DNA, 25 bp, Homo sapien
taggatgcgctcactccccaaaaat

SEQ ID NO: 1848544 - DNA, 25 bp, Homo sapien
tagtataaaccagaccgagtcccga

SEQ ID NO: 1848545 - DNA, 25 bp, Homo sapien
tctctgtctggtgcaggcatgggcc

SEQ ID NO: 1848546 - DNA, 25 bp, Homo sapien
taaggagttaagcatcctctctccg

SEQ ID NO: 1848547 - DNA, 25 bp, Homo sapien
tgggagaggtctaaaacgaaatgcg

SEQ ID NO: 1848548 - DNA, 25 bp, Homo sapien
cggaccggcacgaaacatagcagcc

SEQ ID NO: 1848549 - DNA, 25 bp, Homo sapien
tcgtagacctcagaacagcgcaacg

SEQ ID NO: 1848550 - DNA, 25 bp, Homo sapien
actcctgtcgcgctgtgatctcggc

SEQ ID NO: 1848551 - DNA, 25 bp, Homo sapien
taggcgagctcatatactacgatgg

SEQ ID NO: 1848552 - DNA, 25 bp, Homo sapien
ttggagtgtgtccattgggtagcaa

SEQ ID NO: 1848553 - DNA, 25 bp, Homo sapien
accatcccggaacaagtgctccagg

SEQ ID NO: 1848554 - DNA, 25 bp, Homo sapien
ggtagcaatgtggaaaccaccaggg

SEQ ID NO: 1848555 - DNA, 25 bp, Homo sapien
ctgaaatatgttgtcctactcatcc

SEQ ID NO: 1848556 - DNA, 25 bp, Homo sapien
aagtaccgatgcactccccggaagg

SEQ ID NO: 1848557 - DNA, 25 bp, Homo sapien
tctggacaggtggaagcgaattctt

SEQ ID NO: 1848558 - DNA, 25 bp, Homo sapien
tggaagcgaattcttcccgggcgta

SEQ ID NO: 1848559 - DNA, 25 bp, Homo sapien
ttcccgggcgtaggcattgctcaag

SEQ ID NO: 1848560 - DNA, 25 bp, Homo sapien
tactatgtgtaactttggcaacagg

SEQ ID NO: 1848561 - DNA, 25 bp, Homo sapien
aaacttcctctgagagacaccttca

SEQ ID NO: 1848562 - DNA, 25 bp, Homo sapien
ccagggtgagctcgttgccatccaa

SEQ ID NO: 1848563 - DNA, 25 bp, Homo sapien
gctcgttgccatccaaaaacttcct

SEQ ID NO: 1848564 - DNA, 25 bp, Homo sapien
ctgtgcaagagagggaactgattag

SEQ ID NO: 1848565 - DNA, 25 bp, Homo sapien
ctgattagaacttcaggaaaagatt

SEQ ID NO: 1848566 - DNA, 25 bp, Homo sapien
tgacatagtccgaaaaggcccgttg

SEQ ID NO: 1848567 - DNA, 25 bp, Homo sapien
ttcaggaaaagattgacatagtccg

SEQ ID NO: 1848568 - DNA, 25 bp, Homo sapien
tgatatctgaacgtccaggtgcccc

SEQ ID NO: 1848569 - DNA, 25 bp, Homo sapien
gggaaatttacgaacatctgcttca

SEQ ID NO: 1848570 - DNA, 25 bp, Homo sapien
gcagccaactaacgtcctcagtggg

SEQ ID NO: 1848571 - DNA, 25 bp, Homo sapien
gactgttcttaagcatgaccctatt

SEQ ID NO: 1848572 - DNA, 25 bp, Homo sapien
ccgctgggtcctctctattcctccc

SEQ ID NO: 1848573 - DNA, 25 bp, Homo sapien
ccaggcctctgacccacaagactca

SEQ ID NO: 1848574 - DNA, 25 bp, Homo sapien
caggacccaggcctctgacccacaa

SEQ ID NO: 1848575 - DNA, 25 bp, Homo sapien
tgggtcctctctattcctcccagga

SEQ ID NO: 1848576 - DNA, 25 bp, Homo sapien
cagcccagctgtgttggactcaggg

SEQ ID NO: 1848577 - DNA, 25 bp, Homo sapien
gtcattgagtgctgggtttgaattc

SEQ ID NO: 1848578 - DNA, 25 bp, Homo sapien
cagctgtgttggactcagggttcag

SEQ ID NO: 1848579 - DNA, 25 bp, Homo sapien
atttggcaaatatgtccagcccagc

SEQ ID NO: 1848580 - DNA, 25 bp, Homo sapien
cagcttctgcactgtctcggtccgc

SEQ ID NO: 1848581 - DNA, 25 bp, Homo sapien
acagcttctgcactgtctcggtccg

SEQ ID NO: 1848582 - DNA, 25 bp, Homo sapien
gggcagttcccaatcttggccccat

SEQ ID NO: 1848583 - DNA, 25 bp, Homo sapien
cttcacgaacaattcgacctgcggt

SEQ ID NO: 1848584 - DNA, 25 bp, Homo sapien
tcgacctgcggttgttcttcagcca

SEQ ID NO: 1848585 - DNA, 25 bp, Homo sapien
acaattcgacctgcggttgttcttc

SEQ ID NO: 1848586 - DNA, 25 bp, Homo sapien
cacgaacaattcgacctgcggttgt

SEQ ID NO: 1848587 - DNA, 25 bp, Homo sapien
tgcgtcggggaccaggaagtggccg

SEQ ID NO: 1848588 - DNA, 25 bp, Homo sapien
gttgcgtcggggaccaggaagtggc

SEQ ID NO: 1848589 - DNA, 25 bp, Homo sapien
ttgcgtcggggaccaggaagtggcc

SEQ ID NO: 1848590 - DNA, 25 bp, Homo sapien
cagacctacttgcacccaaactagg

SEQ ID NO: 1848591 - DNA, 25 bp, Homo sapien
acactcagggactctctcccctaga

SEQ ID NO: 1848592 - DNA, 25 bp, Homo sapien
gaaggcgggtctcacactcagggac

SEQ ID NO: 1848593 - DNA, 25 bp, Homo sapien
ttcagcacaacacaagctcaatcag

SEQ ID NO: 1848594 - DNA, 25 bp, Homo sapien
agctcggtcctctcccgggctggat

SEQ ID NO: 1848595 - DNA, 25 bp, Homo sapien
ctctcccgggctggatcagagagcc

SEQ ID NO: 1848596 - DNA, 25 bp, Homo sapien
gctggatcagagagccgctgactca

SEQ ID NO: 1848597 - DNA, 25 bp, Homo sapien
agagagccgctgactcaccgaccgg

SEQ ID NO: 1848598 - DNA, 25 bp, Homo sapien
aaggtggtcgtttaatcattctgca

SEQ ID NO: 1848599 - DNA, 25 bp, Homo sapien
gactgcagataggaaccgttagcca

SEQ ID NO: 1848600 - DNA, 25 bp, Homo sapien
cctacacttgggattgggcatagga

SEQ ID NO: 1848601 - DNA, 25 bp, Homo sapien
ctgagagaagaactcggaagtggaa

SEQ ID NO: 1848602 - DNA, 25 bp, Homo sapien
accaacctcctccaagtttctatag

SEQ ID NO: 1848603 - DNA, 25 bp, Homo sapien
ccattgctcaacagatttgccaggg

SEQ ID NO: 1848604 - DNA, 25 bp, Homo sapien
tctatagctccattgctcaacagat

SEQ ID NO: 1848605 - DNA, 25 bp, Homo sapien
tcctccaagtttctatagctccatt

SEQ ID NO: 1848606 - DNA, 25 bp, Homo sapien
tgcgaaggggtatgggcatgtccca

SEQ ID NO: 1848607 - DNA, 25 bp, Homo sapien
gggtgtgagtgttctgatcagaact

SEQ ID NO: 1848608 - DNA, 25 bp, Homo sapien
ccagaatttgatgtaattcgaatgc

SEQ ID NO: 1848609 - DNA, 25 bp, Homo sapien
tcttcaggggtgtgtagaagtgcga

SEQ ID NO: 1848610 - DNA, 25 bp, Homo sapien
cgtgctaatccctgtaaccttcgaa

SEQ ID NO: 1848611 - DNA, 25 bp, Homo sapien
cccagtggccgtgctaatccctgta

SEQ ID NO: 1848612 - DNA, 25 bp, Homo sapien
gtaaccttcgaaatttcagtatatg

SEQ ID NO: 1848613 - DNA, 25 bp, Homo sapien
aatttgtgtcatccgtgcccagtgg

SEQ ID NO: 1848614 - DNA, 25 bp, Homo sapien
ctgtgaggatggcaacgatcttgtc

SEQ ID NO: 1848615 - DNA, 25 bp, Homo sapien
gtgatgagatccaaatgtgcaacca

SEQ ID NO: 1848616 - DNA, 25 bp, Homo sapien
tctatcaggtttgcgaaggtgttgc

SEQ ID NO: 1848617 - DNA, 25 bp, Homo sapien
tcttttaagaccatggagacctgtg

SEQ ID NO: 1848618 - DNA, 25 bp, Homo sapien
catgagaacgaaccccttcagagag

SEQ ID NO: 1848619 - DNA, 25 bp, Homo sapien
taccccaggatacttcatgagaacg

SEQ ID NO: 1848620 - DNA, 25 bp, Homo sapien
cctactgtggcgtgagagtcagcct

SEQ ID NO: 1848621 - DNA, 25 bp, Homo sapien
tgttgttgctgtaggaagactcccg

SEQ ID NO: 1848622 - DNA, 25 bp, Homo sapien
gaacaaggctagttcctgcaccacc

SEQ ID NO: 1848623 - DNA, 25 bp, Homo sapien
gtggcagcaacaggtaaacttcaag

SEQ ID NO: 1848624 - DNA, 25 bp, Homo sapien
tcagtgctggcttaacagaaaacac

SEQ ID NO: 1848625 - DNA, 25 bp, Homo sapien
aaaaaatggctccaggtagtgagtc

SEQ ID NO: 1848626 - DNA, 25 bp, Homo sapien
atatgacatgcaaaaacgatctttc

SEQ ID NO: 1848627 - DNA, 25 bp, Homo sapien
tatgacatgcaaaaacgatctttct

SEQ ID NO: 1848628 - DNA, 25 bp, Homo sapien
catgcaaaaacgatctttctttgaa

SEQ ID NO: 1848629 - DNA, 25 bp, Homo sapien
tgacatgcaaaaacgatctttcttt

SEQ ID NO: 1848630 - DNA, 25 bp, Homo sapien
tgtgggaatatccattgccctctat

SEQ ID NO: 1848631 - DNA, 25 bp, Homo sapien
agaagacatgtttattgaaactgtc

SEQ ID NO: 1848632 - DNA, 25 bp, Homo sapien
ggaatatccattgccctctatccca

SEQ ID NO: 1848633 - DNA, 25 bp, Homo sapien
gaagaagacatgtttattgaaactg

SEQ ID NO: 1848634 - DNA, 25 bp, Homo sapien
tggggcaggttgaaaatagtgctgg

SEQ ID NO: 1848635 - DNA, 25 bp, Homo sapien
aatggggcaggttgaaaatagtgct

SEQ ID NO: 1848636 - DNA, 25 bp, Homo sapien
caatggggcaggttgaaaatagtgc

SEQ ID NO: 1848637 - DNA, 25 bp, Homo sapien
gggcaggttgaaaatagtgctggag

SEQ ID NO: 1848638 - DNA, 25 bp, Homo sapien
tgccttgagtcaccaatgtgaaggg

SEQ ID NO: 1848639 - DNA, 25 bp, Homo sapien
agcagaagcagcacccctccaactg

SEQ ID NO: 1848640 - DNA, 25 bp, Homo sapien
gccctgccttgagtcaccaatgtga

SEQ ID NO: 1848641 - DNA, 25 bp, Homo sapien
cagccctgccttgagtcaccaatgt

SEQ ID NO: 1848642 - DNA, 25 bp, Homo sapien
tcagatgagccggtaggggtggtgt

SEQ ID NO: 1848643 - DNA, 25 bp, Homo sapien
cctgtgatggaaagtagtagttcct

SEQ ID NO: 1848644 - DNA, 25 bp, Homo sapien
ctgtgatggaaagtagtagttcctc

SEQ ID NO: 1848645 - DNA, 25 bp, Homo sapien
gtgatggaaagtagtagttcctcac

SEQ ID NO: 1848646 - DNA, 25 bp, Homo sapien
tgtgatggaaagtagtagttcctca

SEQ ID NO: 1848647 - DNA, 25 bp, Homo sapien
taccaggagccggaggaaagcatga

SEQ ID NO: 1848648 - DNA, 25 bp, Homo sapien
gaaagcatgagtcgggggtactggg

SEQ ID NO: 1848649 - DNA, 25 bp, Homo sapien
aatccggggccgctgaatctgggac

SEQ ID NO: 1848650 - DNA, 25 bp, Homo sapien
tcaccacggaatccggggccgctga

SEQ ID NO: 1848651 - DNA, 25 bp, Homo sapien
gaagctggcgatgcggagactgagc

SEQ ID NO: 1848652 - DNA, 25 bp, Homo sapien
gagactgagcgggactttgctgccc

SEQ ID NO: 1848653 - DNA, 25 bp, Homo sapien
gaagctggggttgacgaaagtccta

SEQ ID NO: 1848654 - DNA, 25 bp, Homo sapien
gtcaagatcctgagggcccgagaag

SEQ ID NO: 1848655 - DNA, 25 bp, Homo sapien
ggaaggggccgctctaactctctcc

SEQ ID NO: 1848656 - DNA, 25 bp, Homo sapien
ctgcagagaagggttcttcagggaa

SEQ ID NO: 1848657 - DNA, 25 bp, Homo sapien
cttcagggaaggggccgctctaact

SEQ ID NO: 1848658 - DNA, 25 bp, Homo sapien
tcagggaaggggccgctctaactct

SEQ ID NO: 1848659 - DNA, 25 bp, Homo sapien
cagaaggacagggactacagtgcta

SEQ ID NO: 1848660 - DNA, 25 bp, Homo sapien
tctgggacccctcgaaggatgacgt

SEQ ID NO: 1848661 - DNA, 25 bp, Homo sapien
ggagaaatgcggctgaggatcccca

SEQ ID NO: 1848662 - DNA, 25 bp, Homo sapien
ggcctagttcggcaccctctgggac

SEQ ID NO: 1848663 - DNA, 25 bp, Homo sapien
catcctccatggggatcccaaagtg

SEQ ID NO: 1848664 - DNA, 25 bp, Homo sapien
ccatcctccatggggatcccaaagt

SEQ ID NO: 1848665 - DNA, 25 bp, Homo sapien
tccatcctccatggggatcccaaag

SEQ ID NO: 1848666 - DNA, 25 bp, Homo sapien
cggcgagtgtgacctagaggacccc

SEQ ID NO: 1848667 - DNA, 25 bp, Homo sapien
ccagaactgcccaaagcggcgagtg

SEQ ID NO: 1848668 - DNA, 25 bp, Homo sapien
tgtctgtggagggtcatccatggtc

SEQ ID NO: 1848669 - DNA, 25 bp, Homo sapien
ccaaagcggcgagtgtgacctagag

SEQ ID NO: 1848670 - DNA, 25 bp, Homo sapien
gcccatccacgctgaacacaagtgg

SEQ ID NO: 1848671 - DNA, 25 bp, Homo sapien
gatcttctggagcagcccatccacg

SEQ ID NO: 1848672 - DNA, 25 bp, Homo sapien
ctgctgatgtctccgtggatccgga

SEQ ID NO: 1848673 - DNA, 25 bp, Homo sapien
ggatccggactgtgatcttctggag

SEQ ID NO: 1848674 - DNA, 25 bp, Homo sapien
cacaacaggagggtccaggggaaga

SEQ ID NO: 1848675 - DNA, 25 bp, Homo sapien
caccacaacaggagggtccagggga

SEQ ID NO: 1848676 - DNA, 25 bp, Homo sapien
gcccaggcaccacaacaggagggtc

SEQ ID NO: 1848677 - DNA, 25 bp, Homo sapien
ctgcccaggcaccacaacaggaggg

SEQ ID NO: 1848678 - DNA, 25 bp, Homo sapien
tttgtatggctcaaaacgcagaggg

SEQ ID NO: 1848679 - DNA, 25 bp, Homo sapien
aatggctgccacgtctcgaatgtgc

SEQ ID NO: 1848680 - DNA, 25 bp, Homo sapien
gggacaagatctcacgccgagctcg

SEQ ID NO: 1848681 - DNA, 25 bp, Homo sapien
gagctcgaccctgaacccttgatgt

SEQ ID NO: 1848682 - DNA, 25 bp, Homo sapien
agacaaagatatctgagagtggagg

SEQ ID NO: 1848683 - DNA, 25 bp, Homo sapien
cggcagcgccgctcctgagtcaggg

SEQ ID NO: 1848684 - DNA, 25 bp, Homo sapien
ctgagtcagggattccacctggttg

SEQ ID NO: 1848685 - DNA, 25 bp, Homo sapien
cgtgaagacaaagatatctgagagt

SEQ ID NO: 1848686 - DNA, 25 bp, Homo sapien
gcagggaaggcaacgaccagtgtta

SEQ ID NO: 1848687 - DNA, 25 bp, Homo sapien
gggaatgggtagagccacggaggat

SEQ ID NO: 1848688 - DNA, 25 bp, Homo sapien
ttaacaatggcagtaggaggggaat

SEQ ID NO: 1848689 - DNA, 25 bp, Homo sapien
cctacagtgaagctagtggatctag

SEQ ID NO: 1848690 - DNA, 25 bp, Homo sapien
gggtcactggttgtaaagacagggc

SEQ ID NO: 1848691 - DNA, 25 bp, Homo sapien
aggcatggatctcattaagctgttg

SEQ ID NO: 1848692 - DNA, 25 bp, Homo sapien
tgcagggctgacaggcacatctcag

SEQ ID NO: 1848693 - DNA, 25 bp, Homo sapien
ccccaaggcatggatctcattaagc

SEQ ID NO: 1848694 - DNA, 25 bp, Homo sapien
caaagaaagtttacatgaccagcct

SEQ ID NO: 1848695 - DNA, 25 bp, Homo sapien
caatgtagctagttatctcagatgc

SEQ ID NO: 1848696 - DNA, 25 bp, Homo sapien
gataccaatctctgtctataggaaa

SEQ ID NO: 1848697 - DNA, 25 bp, Homo sapien
agaattgaaaatggcggccgggcac

SEQ ID NO: 1848698 - DNA, 25 bp, Homo sapien
tgggtcatgaaaaggcaccaggaca

SEQ ID NO: 1848699 - DNA, 25 bp, Homo sapien
ccacaaggtggcgagcctggatttt

SEQ ID NO: 1848700 - DNA, 25 bp, Homo sapien
tctccgctgctccacaaggtggcga

SEQ ID NO: 1848701 - DNA, 25 bp, Homo sapien
agcgttgatctcctcacccatgctg

SEQ ID NO: 1848702 - DNA, 25 bp, Homo sapien
ctgtctcccaggcggcttcgcagaa

SEQ ID NO: 1848703 - DNA, 25 bp, Homo sapien
tctcccaggcggcttcgcagaaggc

SEQ ID NO: 1848704 - DNA, 25 bp, Homo sapien
tcccaggcggcttcgcagaaggctg

SEQ ID NO: 1848705 - DNA, 25 bp, Homo sapien
tgtctcccaggcggcttcgcagaag

SEQ ID NO: 1848706 - DNA, 25 bp, Homo sapien
ctgggagctgctccggtcaaaatgg

SEQ ID NO: 1848707 - DNA, 25 bp, Homo sapien
ttgttgatgcctcccctcggtggct

SEQ ID NO: 1848708 - DNA, 25 bp, Homo sapien
agaagcctggggatgtgctgtcctt

SEQ ID NO: 1848709 - DNA, 25 bp, Homo sapien
cctggggatgtgctgtccttgttga

SEQ ID NO: 1848710 - DNA, 25 bp, Homo sapien
caatcggagcaggtaggatcggcca

SEQ ID NO: 1848711 - DNA, 25 bp, Homo sapien
ggatgagttccaaagtagccagagg

SEQ ID NO: 1848712 - DNA, 25 bp, Homo sapien
gcagctcaactcctcgcaatcggag

SEQ ID NO: 1848713 - DNA, 25 bp, Homo sapien
gagtgtgaagcccagccaattcctg

SEQ ID NO: 1848714 - DNA, 25 bp, Homo sapien
acccagttgctatgactgtagaaat

SEQ ID NO: 1848715 - DNA, 25 bp, Homo sapien
cacccagttgctatgactgtagaaa

SEQ ID NO: 1848716 - DNA, 25 bp, Homo sapien
cccagttgctatgactgtagaaatc

SEQ ID NO: 1848717 - DNA, 25 bp, Homo sapien
gcatgaagtgcagccccgaggcgct

SEQ ID NO: 1848718 - DNA, 25 bp, Homo sapien
gggctgcattggcacgagacacctc

SEQ ID NO: 1848719 - DNA, 25 bp, Homo sapien
gctcagcatcaaagtgcaggtcggg

SEQ ID NO: 1848720 - DNA, 25 bp, Homo sapien
cgaggcgctggcgagccagggtgtg

SEQ ID NO: 1848721 - DNA, 25 bp, Homo sapien
ctcggaaccgccgagaagaaccagg

SEQ ID NO: 1848722 - DNA, 25 bp, Homo sapien
aggctgctcggaaccgccgagaaga

SEQ ID NO: 1848723 - DNA, 25 bp, Homo sapien
agaaccaggtccaaagtaggcggca

SEQ ID NO: 1848724 - DNA, 25 bp, Homo sapien
caggtccaaagtaggcggcaaagag

SEQ ID NO: 1848725 - DNA, 25 bp, Homo sapien
tgcagggtgacgttgagcgctgcct

SEQ ID NO: 1848726 - DNA, 25 bp, Homo sapien
cctcagttaggtcttggtgggtgat

SEQ ID NO: 1848727 - DNA, 25 bp, Homo sapien
tcaagacgaagaggggggcggcctg

SEQ ID NO: 1848728 - DNA, 25 bp, Homo sapien
caggaagtcctcaagacgaagaggg

SEQ ID NO: 1848729 - DNA, 25 bp, Homo sapien
tgcagcagaagcaacgctgaggggc

SEQ ID NO: 1848730 - DNA, 25 bp, Homo sapien
agcagaagcaacgctgaggggcccg

SEQ ID NO: 1848731 - DNA, 25 bp, Homo sapien
gcagaagcaacgctgaggggcccgg

SEQ ID NO: 1848732 - DNA, 25 bp, Homo sapien
ggctctgcgggtctccatgggaacc

SEQ ID NO: 1848733 - DNA, 25 bp, Homo sapien
gaggaggaagcagccgcgattccag

SEQ ID NO: 1848734 - DNA, 25 bp, Homo sapien
aagcagccgcgattccagggcaggc

SEQ ID NO: 1848735 - DNA, 25 bp, Homo sapien
agggcaggccggctctgcgggtctc

SEQ ID NO: 1848736 - DNA, 25 bp, Homo sapien
caggcaacccctggccctttcgctc

SEQ ID NO: 1848737 - DNA, 25 bp, Homo sapien
gctggcccgggcttgacgtcacagg

SEQ ID NO: 1848738 - DNA, 25 bp, Homo sapien
ggcttgacgtcacagggcacttagg

SEQ ID NO: 1848739 - DNA, 25 bp, Homo sapien
cagggcacttaggtcagagttataa

SEQ ID NO: 1848740 - DNA, 25 bp, Homo sapien
ctgccatccccatggtgagccgctg

SEQ ID NO: 1848741 - DNA, 25 bp, Homo sapien
gctgccatccccatggtgagccgct

SEQ ID NO: 1848742 - DNA, 25 bp, Homo sapien
tgctgccatccccatggtgagccgc

SEQ ID NO: 1848743 - DNA, 25 bp, Homo sapien
tgccatccccatggtgagccgctgg

SEQ ID NO: 1848744 - DNA, 25 bp, Homo sapien
tggaatagggcgatggcctcatcca

SEQ ID NO: 1848745 - DNA, 25 bp, Homo sapien
tcttctggaatagggcgatggcctc

SEQ ID NO: 1848746 - DNA, 25 bp, Homo sapien
catcttctggaatagggcgatggcc

SEQ ID NO: 1848747 - DNA, 25 bp, Homo sapien
tctggaatagggcgatggcctcatc

SEQ ID NO: 1848748 - DNA, 25 bp, Homo sapien
cagtagctcagaggaggcgtgaacc

SEQ ID NO: 1848749 - DNA, 25 bp, Homo sapien
gtggtgagtccccaagaacaaagga

SEQ ID NO: 1848750 - DNA, 25 bp, Homo sapien
gagcctacgtgttccccattcagtg

SEQ ID NO: 1848751 - DNA, 25 bp, Homo sapien
aaagttgggaagatgagcgaggacc

SEQ ID NO: 1848752 - DNA, 25 bp, Homo sapien
ttctatggtccctgctcaaagcgcc

SEQ ID NO: 1848753 - DNA, 25 bp, Homo sapien
taggatgcctggttctaggtcagcc

SEQ ID NO: 1848754 - DNA, 25 bp, Homo sapien
gacaaacaagactggccttccaggg

SEQ ID NO: 1848755 - DNA, 25 bp, Homo sapien
gagattaaccacgtccactcaaggc

SEQ ID NO: 1848756 - DNA, 25 bp, Homo sapien
gtcaacaccactgcactcggaccag

SEQ ID NO: 1848757 - DNA, 25 bp, Homo sapien
caacaccactgcactcggaccagcc

SEQ ID NO: 1848758 - DNA, 25 bp, Homo sapien
tggttacgatcaattagttgtcaac

SEQ ID NO: 1848759 - DNA, 25 bp, Homo sapien
actggttacgatcaattagttgtca

SEQ ID NO: 1848760 - DNA, 25 bp, Homo sapien
ctcctggacttcgagcggcaccttg

SEQ ID NO: 1848761 - DNA, 25 bp, Homo sapien
tgggcctcaactcgcttggcttgca

SEQ ID NO: 1848762 - DNA, 25 bp, Homo sapien
tgccgctgggcctcaactcgcttgg

SEQ ID NO: 1848763 - DNA, 25 bp, Homo sapien
gatagcccgaggcagcacggcgttc

SEQ ID NO: 1848764 - DNA, 25 bp, Homo sapien
gaaaggtgaggcctagctccatgga

SEQ ID NO: 1848765 - DNA, 25 bp, Homo sapien
caggaaaccaagcagtcactgccgg

SEQ ID NO: 1848766 - DNA, 25 bp, Homo sapien
ggtgaggcctagctccatggagaca

SEQ ID NO: 1848767 - DNA, 25 bp, Homo sapien
ccggacactgggtcccagagtaggc

SEQ ID NO: 1848768 - DNA, 25 bp, Homo sapien
tgaggttgtagtcggcccgcaggga

SEQ ID NO: 1848769 - DNA, 25 bp, Homo sapien
gagcgcacggctcgcgtgatgctta

SEQ ID NO: 1848770 - DNA, 25 bp, Homo sapien
agtcaggccggatccgggtgaggtt

SEQ ID NO: 1848771 - DNA, 25 bp, Homo sapien
tagcgccagctcaagggcggcttct

SEQ ID NO: 1848772 - DNA, 25 bp, Homo sapien
tgtacagggtctggcgggcacactc

SEQ ID NO: 1848773 - DNA, 25 bp, Homo sapien
cattcagtacaggtttcaggcactc

SEQ ID NO: 1848774 - DNA, 25 bp, Homo sapien
gctcctccgtcacgaagggcatgaa

SEQ ID NO: 1848775 - DNA, 25 bp, Homo sapien
caacgtccaggcaagtgtacagggt

SEQ ID NO: 1848776 - DNA, 25 bp, Homo sapien
tacagggctcacggctggaggtcta

SEQ ID NO: 1848777 - DNA, 25 bp, Homo sapien
gggacgagaggtacagggctcacgg

SEQ ID NO: 1848778 - DNA, 25 bp, Homo sapien
gggatgggttggcttaggtctcaag

SEQ ID NO: 1848779 - DNA, 25 bp, Homo sapien
cacggctggaggtctagccttgagc

SEQ ID NO: 1848780 - DNA, 25 bp, Homo sapien
cagagctcatagagccagaagctgt

SEQ ID NO: 1848781 - DNA, 25 bp, Homo sapien
acagcctctgtcaggcggctgcgga

SEQ ID NO: 1848782 - DNA, 25 bp, Homo sapien
tgggcagtggtgacggccgggaagt

SEQ ID NO: 1848783 - DNA, 25 bp, Homo sapien
tctgtcaggcggctgcggatccagc

SEQ ID NO: 1848784 - DNA, 25 bp, Homo sapien
tggcggtaacccagtatccggttca

SEQ ID NO: 1848785 - DNA, 25 bp, Homo sapien
ccacgaagggcaaacttggtggcat

SEQ ID NO: 1848786 - DNA, 25 bp, Homo sapien
tgttgcagaagtggcggtaacccag

SEQ ID NO: 1848787 - DNA, 25 bp, Homo sapien
ggcaaacttggtggcattccagagc

SEQ ID NO: 1848788 - DNA, 25 bp, Homo sapien
ggaatccccgctgggaagtcagctt

SEQ ID NO: 1848789 - DNA, 25 bp, Homo sapien
taatccaaaccggagagcatcggtg

SEQ ID NO: 1848790 - DNA, 25 bp, Homo sapien
gggacatgtaggcacataatccaaa

SEQ ID NO: 1848791 - DNA, 25 bp, Homo sapien
gagagcatcggtgccacattcagga

SEQ ID NO: 1848792 - DNA, 25 bp, Homo sapien
ctccacctcgctgggatccaggttg

SEQ ID NO: 1848793 - DNA, 25 bp, Homo sapien
atcttccggccgtgagcatctcgca

SEQ ID NO: 1848794 - DNA, 25 bp, Homo sapien
ctgcagggagattccatagatgaca

SEQ ID NO: 1848795 - DNA, 25 bp, Homo sapien
ctcgcacgatggcatggaggtagac

SEQ ID NO: 1848796 - DNA, 25 bp, Homo sapien
gggatcgatgacattgcctagagac

SEQ ID NO: 1848797 - DNA, 25 bp, Homo sapien
tgaccggtctccagcagtgtcccgg

SEQ ID NO: 1848798 - DNA, 25 bp, Homo sapien
agaagaggatgtcatgaccggtctc

SEQ ID NO: 1848799 - DNA, 25 bp, Homo sapien
aagggcagcctgcccgtgagcttca

SEQ ID NO: 1848800 - DNA, 25 bp, Homo sapien
tgtcccggggtagaacacactcagg

SEQ ID NO: 1848801 - DNA, 25 bp, Homo sapien
ctccagtcccctgtcccgccaagcc

SEQ ID NO: 1848802 - DNA, 25 bp, Homo sapien
ctgagggcagaccagggtgtgaagg

SEQ ID NO: 1848803 - DNA, 25 bp, Homo sapien
ggagccaacacccaccctccagtcc

SEQ ID NO: 1848804 - DNA, 25 bp, Homo sapien
gtgtgaaggggagccaacacccacc

SEQ ID NO: 1848805 - DNA, 25 bp, Homo sapien
tgggccagcccaaaatggataaggg

SEQ ID NO: 1848806 - DNA, 25 bp, Homo sapien
ggttgggccagcccaaaatggataa

SEQ ID NO: 1848807 - DNA, 25 bp, Homo sapien
ctggttgggccagcccaaaatggat

SEQ ID NO: 1848808 - DNA, 25 bp, Homo sapien
ttgggccagcccaaaatggataagg

SEQ ID NO: 1848809 - DNA, 25 bp, Homo sapien
gagtggagctctgccccccacaact

SEQ ID NO: 1848810 - DNA, 25 bp, Homo sapien
ggagtggagctctgccccccacaac

SEQ ID NO: 1848811 - DNA, 25 bp, Homo sapien
ggagactgatcttgtcaggggacac

SEQ ID NO: 1848812 - DNA, 25 bp, Homo sapien
ctggagactgatcttgtcaggggac

SEQ ID NO: 1848813 - DNA, 25 bp, Homo sapien
gctggagactgatcttgtcagggga

SEQ ID NO: 1848814 - DNA, 25 bp, Homo sapien
tggagactgatcttgtcaggggaca

SEQ ID NO: 1848815 - DNA, 25 bp, Homo sapien
cctccgcctcattgcgtccactcac

SEQ ID NO: 1848816 - DNA, 25 bp, Homo sapien
actccagcagggtgtcccagcagct

SEQ ID NO: 1848817 - DNA, 25 bp, Homo sapien
tccagcagggtgtcccagcagctag

SEQ ID NO: 1848818 - DNA, 25 bp, Homo sapien
gcagggtgtcccagcagctagctct

SEQ ID NO: 1848819 - DNA, 25 bp, Homo sapien
agcagggtgtcccagcagctagctc

SEQ ID NO: 1848820 - DNA, 25 bp, Homo sapien
tgacagtgacaaagtaggctgggat

SEQ ID NO: 1848821 - DNA, 25 bp, Homo sapien
aggctgggatgcgatggccccacca

SEQ ID NO: 1848822 - DNA, 25 bp, Homo sapien
acagctgcctggaaatgcaccactc

SEQ ID NO: 1848823 - DNA, 25 bp, Homo sapien
tgggtcactgacagtgacaaagtag

SEQ ID NO: 1848824 - DNA, 25 bp, Homo sapien
gcagcagaggctctaccacgtcctt

SEQ ID NO: 1848825 - DNA, 25 bp, Homo sapien
agcgaacgtaccactgcggccgcag

SEQ ID NO: 1848826 - DNA, 25 bp, Homo sapien
tgccatgtgcgctgatgggcctcag

SEQ ID NO: 1848827 - DNA, 25 bp, Homo sapien
atgcggaggtcaccccgagtcacag

SEQ ID NO: 1848828 - DNA, 25 bp, Homo sapien
gggtacacgtaggtgagaaggccag

SEQ ID NO: 1848829 - DNA, 25 bp, Homo sapien
ctgggggtacacgtaggtgagaagg

SEQ ID NO: 1848830 - DNA, 25 bp, Homo sapien
gccaggcggtaaaaccctgaggagc

SEQ ID NO: 1848831 - DNA, 25 bp, Homo sapien
ggggtacacgtaggtgagaaggcca

SEQ ID NO: 1848832 - DNA, 25 bp, Homo sapien
caccatggggttgtcctcaatgcca

SEQ ID NO: 1848833 - DNA, 25 bp, Homo sapien
tgtcctcaatgccacggaacagtcc

SEQ ID NO: 1848834 - DNA, 25 bp, Homo sapien
aacagtccccgctccttcagcgcca

SEQ ID NO: 1848835 - DNA, 25 bp, Homo sapien
caccagcaccgctttcctggcctca

SEQ ID NO: 1848836 - DNA, 25 bp, Homo sapien
tgaggcctcatcatggcgatgccca

SEQ ID NO: 1848837 - DNA, 25 bp, Homo sapien
taggaatgaggcctcatcatggcga

SEQ ID NO: 1848838 - DNA, 25 bp, Homo sapien
tggcgatgcccagccatccctccat

SEQ ID NO: 1848839 - DNA, 25 bp, Homo sapien
ccatctccctgacccgggcactctt

SEQ ID NO: 1848840 - DNA, 25 bp, Homo sapien
tgtgcgggggtgatcttcacagcac

SEQ ID NO: 1848841 - DNA, 25 bp, Homo sapien
gtgccgctgcccaacttcatagtca

SEQ ID NO: 1848842 - DNA, 25 bp, Homo sapien
aaggcggaggcacattgatgagggc

SEQ ID NO: 1848843 - DNA, 25 bp, Homo sapien
gggccccccgggagtccatgatgct

SEQ ID NO: 1848844 - DNA, 25 bp, Homo sapien
ctccgagacaggaatgggtggatca

SEQ ID NO: 1848845 - DNA, 25 bp, Homo sapien
cacaaattcatcgaagacaatggga

SEQ ID NO: 1848846 - DNA, 25 bp, Homo sapien
ggtggatcacgttcttccccttcag

SEQ ID NO: 1848847 - DNA, 25 bp, Homo sapien
tccatgtccacaaattcatcgaaga

SEQ ID NO: 1848848 - DNA, 25 bp, Homo sapien
cggaaagataccaaaaacgcatgaa

SEQ ID NO: 1848849 - DNA, 25 bp, Homo sapien
ggcggaaagataccaaaaacgcatg

SEQ ID NO: 1848850 - DNA, 25 bp, Homo sapien
gcggaaagataccaaaaacgcatga

SEQ ID NO: 1848851 - DNA, 25 bp, Homo sapien
ggaaagataccaaaaacgcatgaag

SEQ ID NO: 1848852 - DNA, 25 bp, Homo sapien
tctcgatccgagttgttgccaccac

SEQ ID NO: 1848853 - DNA, 25 bp, Homo sapien
ccagcattgtctcgatccgagttgt

SEQ ID NO: 1848854 - DNA, 25 bp, Homo sapien
cattgtctcgatccgagttgttgcc

SEQ ID NO: 1848855 - DNA, 25 bp, Homo sapien
atctcccagcattgtctcgatccga

SEQ ID NO: 1848856 - DNA, 25 bp, Homo sapien
ttataggcaaaggacacgaggaccc

SEQ ID NO: 1848857 - DNA, 25 bp, Homo sapien
tccttgtagccaggcacggagagca

SEQ ID NO: 1848858 - DNA, 25 bp, Homo sapien
agggtgcgacctgtcagctccttct

SEQ ID NO: 1848859 - DNA, 25 bp, Homo sapien
agagcagggtgcgacctgtcagctc

SEQ ID NO: 1848860 - DNA, 25 bp, Homo sapien
agttgagggtgcaggaccagttaac

SEQ ID NO: 1848861 - DNA, 25 bp, Homo sapien
tgcaggaccagttaacaaggcgggt

SEQ ID NO: 1848862 - DNA, 25 bp, Homo sapien
gggtactgcgatagatgatgccttc

SEQ ID NO: 1848863 - DNA, 25 bp, Homo sapien
tcgtgaagccggacaaaggcctctg

SEQ ID NO: 1848864 - DNA, 25 bp, Homo sapien
ccaaggagctgccaagcttcttcaa

SEQ ID NO: 1848865 - DNA, 25 bp, Homo sapien
gtgaaacaggctcgatcccagtcca

SEQ ID NO: 1848866 - DNA, 25 bp, Homo sapien
ccatggtgaaacaggctcgatccca

SEQ ID NO: 1848867 - DNA, 25 bp, Homo sapien
gcttcttcaactggtggtaaatccg

SEQ ID NO: 1848868 - DNA, 25 bp, Homo sapien
tcagtccctgctcacgccatagctt

SEQ ID NO: 1848869 - DNA, 25 bp, Homo sapien
ttccacttccagacttcctgtagaa

SEQ ID NO: 1848870 - DNA, 25 bp, Homo sapien
tgtagaaaggcctcgcggcccagct

SEQ ID NO: 1848871 - DNA, 25 bp, Homo sapien
ggtggcaatacctgcatggtcacag

SEQ ID NO: 1848872 - DNA, 25 bp, Homo sapien
acacctcggggatttgctgctgaca

SEQ ID NO: 1848873 - DNA, 25 bp, Homo sapien
gggtgggatgcacatcatgaagaca

SEQ ID NO: 1848874 - DNA, 25 bp, Homo sapien
gatggcgttggtgagtgcatggccc

SEQ ID NO: 1848875 - DNA, 25 bp, Homo sapien
agggagcctgtcacattggggggtg

SEQ ID NO: 1848876 - DNA, 25 bp, Homo sapien
tccacataccgagggctgtaggagt

SEQ ID NO: 1848877 - DNA, 25 bp, Homo sapien
cctccacataccgagggctgtagga

SEQ ID NO: 1848878 - DNA, 25 bp, Homo sapien
gcagcctccacataccgagggctgt

SEQ ID NO: 1848879 - DNA, 25 bp, Homo sapien
agcctccacataccgagggctgtag

SEQ ID NO: 1848880 - DNA, 25 bp, Homo sapien
cataggtaatgaccccaggatcccg

SEQ ID NO: 1848881 - DNA, 25 bp, Homo sapien
ggttgggaggtcataggtaatgacc

SEQ ID NO: 1848882 - DNA, 25 bp, Homo sapien
taatgaccccaggatcccgtttctc

SEQ ID NO: 1848883 - DNA, 25 bp, Homo sapien
ggggttgggaggtcataggtaatga

SEQ ID NO: 1848884 - DNA, 25 bp, Homo sapien
ctagcttctcccgtttctttgcctc

SEQ ID NO: 1848885 - DNA, 25 bp, Homo sapien
ctctagcttctcccgtttctttgcc

SEQ ID NO: 1848886 - DNA, 25 bp, Homo sapien
tctctagcttctcccgtttctttgc

SEQ ID NO: 1848887 - DNA, 25 bp, Homo sapien
agagagaggtgcagaaattcagact

SEQ ID NO: 1848888 - DNA, 25 bp, Homo sapien
ctagagagaggtgcagaaattcaga

SEQ ID NO: 1848889 - DNA, 25 bp, Homo sapien
gaggtgcagaaattcagactcagcc

SEQ ID NO: 1848890 - DNA, 25 bp, Homo sapien
gagaggtgcagaaattcagactcag

SEQ ID NO: 1848891 - DNA, 25 bp, Homo sapien
ggaattctggctgccggacacacgt

SEQ ID NO: 1848892 - DNA, 25 bp, Homo sapien
tatagaaccacttctcctagcacgg

SEQ ID NO: 1848893 - DNA, 25 bp, Homo sapien
gacacacgtgacaaaccagcgagtc

SEQ ID NO: 1848894 - DNA, 25 bp, Homo sapien
cacattattccagatccggcgggca

SEQ ID NO: 1848895 - DNA, 25 bp, Homo sapien
tggaacaggaaataaatgactcttc

SEQ ID NO: 1848896 - DNA, 25 bp, Homo sapien
atgactcttctcagtcaccctacag

SEQ ID NO: 1848897 - DNA, 25 bp, Homo sapien
ctcttctcagtcaccctacagtgag

SEQ ID NO: 1848898 - DNA, 25 bp, Homo sapien
ctggaacaggaaataaatgactctt

SEQ ID NO: 1848899 - DNA, 25 bp, Homo sapien
tccccggccaagtaggtgtgcagcc

SEQ ID NO: 1848900 - DNA, 25 bp, Homo sapien
cccggccaagtaggtgtgcagccga

SEQ ID NO: 1848901 - DNA, 25 bp, Homo sapien
ggcctccccggccaagtaggtgtgc

SEQ ID NO: 1848902 - DNA, 25 bp, Homo sapien
agccgccaggtcagccagagtgggg

SEQ ID NO: 1848903 - DNA, 25 bp, Homo sapien
tgtcggcgtaactgacccactgttg

SEQ ID NO: 1848904 - DNA, 25 bp, Homo sapien
gtcctgggccgagcttcggagtccc

SEQ ID NO: 1848905 - DNA, 25 bp, Homo sapien
ccactgttggacaaggacagccgcc

SEQ ID NO: 1848906 - DNA, 25 bp, Homo sapien
agctggtattaactccgtgtcggcg

SEQ ID NO: 1848907 - DNA, 25 bp, Homo sapien
agttatgagaaggtccgaacgaagt

SEQ ID NO: 1848908 - DNA, 25 bp, Homo sapien
tgagaaggtccgaacgaagtggaaa

SEQ ID NO: 1848909 - DNA, 25 bp, Homo sapien
atgagaaggtccgaacgaagtggaa

SEQ ID NO: 1848910 - DNA, 25 bp, Homo sapien
ttatgagaaggtccgaacgaagtgg

SEQ ID NO: 1848911 - DNA, 25 bp, Homo sapien
gactgcgggatcgaggtgggtccta

SEQ ID NO: 1848912 - DNA, 25 bp, Homo sapien
tcccataggactgagggtctgacca

SEQ ID NO: 1848913 - DNA, 25 bp, Homo sapien
tgggtcctatgtttgagtagagagg

SEQ ID NO: 1848914 - DNA, 25 bp, Homo sapien
tctgaccaggcaggctgtcaggagc

SEQ ID NO: 1848915 - DNA, 25 bp, Homo sapien
gatgcgggttcgagccgcgtgtacg

SEQ ID NO: 1848916 - DNA, 25 bp, Homo sapien
tctcaggagcgggtcggcgtctggt

SEQ ID NO: 1848917 - DNA, 25 bp, Homo sapien
gtctggttggatgcgggttcgagcc

SEQ ID NO: 1848918 - DNA, 25 bp, Homo sapien
gagcgggtcggcgtctggttggatg

SEQ ID NO: 1848919 - DNA, 25 bp, Homo sapien
actgggccgggaatccacctcacag

SEQ ID NO: 1848920 - DNA, 25 bp, Homo sapien
agggagatggtcagactgggccggg

SEQ ID NO: 1848921 - DNA, 25 bp, Homo sapien
gtcagactgggccgggaatccacct

SEQ ID NO: 1848922 - DNA, 25 bp, Homo sapien
atggtcagactgggccgggaatcca

SEQ ID NO: 1848923 - DNA, 25 bp, Homo sapien
gcggaggagtcgagcgggcagagac

SEQ ID NO: 1848924 - DNA, 25 bp, Homo sapien
ggtgaccctagttccctaagatcgc

SEQ ID NO: 1848925 - DNA, 25 bp, Homo sapien
cctttgtgacagggagcgtttccgg

SEQ ID NO: 1848926 - DNA, 25 bp, Homo sapien
cgccggtctcacgaggaacagcgcg

SEQ ID NO: 1848927 - DNA, 25 bp, Homo sapien
taaattttattcccgatgcgggaca

SEQ ID NO: 1848928 - DNA, 25 bp, Homo sapien
aaattttattcccgatgcgggacag

SEQ ID NO: 1848929 - DNA, 25 bp, Homo sapien
gctttgaagtttcccagcctactta

SEQ ID NO: 1848930 - DNA, 25 bp, Homo sapien
taccatctccagagaagtagtgaga

SEQ ID NO: 1848931 - DNA, 25 bp, Homo sapien
gaggatagctgttccctattactcc

SEQ ID NO: 1848932 - DNA, 25 bp, Homo sapien
tccccttctcaagagaggatagctg

SEQ ID NO: 1848933 - DNA, 25 bp, Homo sapien
tgccgcatcctgtagcaactgtgtg

SEQ ID NO: 1848934 - DNA, 25 bp, Homo sapien
tgcagggcttccttccttgccgcat

SEQ ID NO: 1848935 - DNA, 25 bp, Homo sapien
ttccttgccgcatcctgtagcaact

SEQ ID NO: 1848936 - DNA, 25 bp, Homo sapien
ggcttccttccttgccgcatcctgt

SEQ ID NO: 1848937 - DNA, 25 bp, Homo sapien
agctgcacgtatcggaccactgagc

SEQ ID NO: 1848938 - DNA, 25 bp, Homo sapien
catctgctggcagctgcacgtatcg

SEQ ID NO: 1848939 - DNA, 25 bp, Homo sapien
actgagccccgaatgaagcagttct

SEQ ID NO: 1848940 - DNA, 25 bp, Homo sapien
ccactgagccccgaatgaagcagtt

SEQ ID NO: 1848941 - DNA, 25 bp, Homo sapien
tgtgacactgatgtcagttagtttg

SEQ ID NO: 1848942 - DNA, 25 bp, Homo sapien
tgtcagttagtttgatgttgagata

SEQ ID NO: 1848943 - DNA, 25 bp, Homo sapien
tgtgagggtatttctcagggtctgt

SEQ ID NO: 1848944 - DNA, 25 bp, Homo sapien
gacactgatgtcagttagtttgatg

SEQ ID NO: 1848945 - DNA, 25 bp, Homo sapien
ccacagaatggagggttccacagat

SEQ ID NO: 1848946 - DNA, 25 bp, Homo sapien
gatccacagaatggagggttccaca

SEQ ID NO: 1848947 - DNA, 25 bp, Homo sapien
tccacagaatggagggttccacaga

SEQ ID NO: 1848948 - DNA, 25 bp, Homo sapien
ctgatccacagaatggagggttcca

SEQ ID NO: 1848949 - DNA, 25 bp, Homo sapien
gagaacatgactgggagaagtcaag

SEQ ID NO: 1848950 - DNA, 25 bp, Homo sapien
gctgggatgagaacatgactgggag

SEQ ID NO: 1848951 - DNA, 25 bp, Homo sapien
gatgagaacatgactgggagaagtc

SEQ ID NO: 1848952 - DNA, 25 bp, Homo sapien
taacaaagtcaacatagaggtgact

SEQ ID NO: 1848953 - DNA, 25 bp, Homo sapien
cctttggctgggaatggttgttcac

SEQ ID NO: 1848954 - DNA, 25 bp, Homo sapien
tttggaaccagagcccatatgtgga

SEQ ID NO: 1848955 - DNA, 25 bp, Homo sapien
tgaagccagctggagaacagcccag

SEQ ID NO: 1848956 - DNA, 25 bp, Homo sapien
gcaggcatgagtgatgtcctctcca

SEQ ID NO: 1848957 - DNA, 25 bp, Homo sapien
aaataatcgtaataaatagcagttt

SEQ ID NO: 1848958 - DNA, 25 bp, Homo sapien
tctttaaaacccagcgtctaggcca

SEQ ID NO: 1848959 - DNA, 25 bp, Homo sapien
acccagcgtctaggccatgtgcggt

SEQ ID NO: 1848960 - DNA, 25 bp, Homo sapien
ccaaaaataaagttggcagttctct

SEQ ID NO: 1848961 - DNA, 25 bp, Homo sapien
gctttgtattgttttccaatacacg

SEQ ID NO: 1848962 - DNA, 25 bp, Homo sapien
gatacaatctctaagcttatctgta

SEQ ID NO: 1848963 - DNA, 25 bp, Homo sapien
ctgtaaatttaaggcacaaggcatt

SEQ ID NO: 1848964 - DNA, 25 bp, Homo sapien
ctgcgcctgacctgtatttactctt

SEQ ID NO: 1848965 - DNA, 25 bp, Homo sapien
tcattctttagttccacgaccacat

SEQ ID NO: 1848966 - DNA, 25 bp, Homo sapien
tcaggtcattctttagttccacgac

SEQ ID NO: 1848967 - DNA, 25 bp, Homo sapien
ggtcattctttagttccacgaccac

SEQ ID NO: 1848968 - DNA, 25 bp, Homo sapien
caggtcattctttagttccacgacc

SEQ ID NO: 1848969 - DNA, 25 bp, Homo sapien
gaaggagcatggtagggaggagtgt

SEQ ID NO: 1848970 - DNA, 25 bp, Homo sapien
aaatactggtattgtgaaccccact

SEQ ID NO: 1848971 - DNA, 25 bp, Homo sapien
cctttgacagtattaccaaatactg

SEQ ID NO: 1848972 - DNA, 25 bp, Homo sapien
aggagcatggtagggaggagtgtcc

SEQ ID NO: 1848973 - DNA, 25 bp, Homo sapien
tgtgctctctcagtcgaccaccttt

SEQ ID NO: 1848974 - DNA, 25 bp, Homo sapien
tcagtcgaccacctttctcgggtac

SEQ ID NO: 1848975 - DNA, 25 bp, Homo sapien
agactctgccctgcatacgtcggcc

SEQ ID NO: 1848976 - DNA, 25 bp, Homo sapien
actctgccctgcatacgtcggcctc

SEQ ID NO: 1848977 - DNA, 25 bp, Homo sapien
gatgaagataaaaactccggaccta

SEQ ID NO: 1848978 - DNA, 25 bp, Homo sapien
tcaatgaacctgagaaacagtacag

SEQ ID NO: 1848979 - DNA, 25 bp, Homo sapien
tcactgaatctctctcagggttggg

SEQ ID NO: 1848980 - DNA, 25 bp, Homo sapien
tgctctgaggtctaacttttccgtc

SEQ ID NO: 1848981 - DNA, 25 bp, Homo sapien
cagcgggaagcgacgcagaaagctc

SEQ ID NO: 1848982 - DNA, 25 bp, Homo sapien
ctgacgggcaaagcgcggccgactt

SEQ ID NO: 1848983 - DNA, 25 bp, Homo sapien
aaaccgaagcgcgagcccgcgcgtg

SEQ ID NO: 1848984 - DNA, 25 bp, Homo sapien
gacgcagaaagctccaagcgctgac

SEQ ID NO: 1848985 - DNA, 25 bp, Homo sapien
gtagagtagaggggaggaggaagcc

SEQ ID NO: 1848986 - DNA, 25 bp, Homo sapien
tgggtagagtagaggggaggaggaa

SEQ ID NO: 1848987 - DNA, 25 bp, Homo sapien
ggtagagtagaggggaggaggaagc

SEQ ID NO: 1848988 - DNA, 25 bp, Homo sapien
ctgggtagagtagaggggaggagga

SEQ ID NO: 1848989 - DNA, 25 bp, Homo sapien
attgacaaataagcatccacacagg

SEQ ID NO: 1848990 - DNA, 25 bp, Homo sapien
tgaaatacatgtagaggcatcctag

SEQ ID NO: 1848991 - DNA, 25 bp, Homo sapien
ggtaacttagattcaggtctggtca

SEQ ID NO: 1848992 - DNA, 25 bp, Homo sapien
tgtgataggtggtgcatgagactcc

SEQ ID NO: 1848993 - DNA, 25 bp, Homo sapien
tctacttcttcaattgtggggcctg

SEQ ID NO: 1848994 - DNA, 25 bp, Homo sapien
ttaatctacttcttcaattgtgggg

SEQ ID NO: 1848995 - DNA, 25 bp, Homo sapien
aatctacttcttcaattgtggggcc

SEQ ID NO: 1848996 - DNA, 25 bp, Homo sapien
acttcttcaattgtggggcctgtgg

SEQ ID NO: 1848997 - DNA, 25 bp, Homo sapien
ctccttggtagagttttgtgatgat

SEQ ID NO: 1848998 - DNA, 25 bp, Homo sapien
caattcctttctcttatgatcaaac

SEQ ID NO: 1848999 - DNA, 25 bp, Homo sapien
cctttctcttatgatcaaactcatc

SEQ ID NO: 1849000 - DNA, 25 bp, Homo sapien
tgacctccagccacgaaaggagctc

SEQ ID NO: 1849001 - DNA, 25 bp, Homo sapien
tttctctgccagttgattgacctcc

SEQ ID NO: 1849002 - DNA, 25 bp, Homo sapien
tttatcagactcactaatcttgccc

SEQ ID NO: 1849003 - DNA, 25 bp, Homo sapien
tttttatcagactcactaatcttgc

SEQ ID NO: 1849004 - DNA, 25 bp, Homo sapien
aatcttgcccttcaaaccttcatca

SEQ ID NO: 1849005 - DNA, 25 bp, Homo sapien
tcagactcactaatcttgcccttca

SEQ ID NO: 1849006 - DNA, 25 bp, Homo sapien
tccattgaagtagtcctgaagcagc

SEQ ID NO: 1849007 - DNA, 25 bp, Homo sapien
gaagcgctttttctacaggctccag

SEQ ID NO: 1849008 - DNA, 25 bp, Homo sapien
tgtcaaacgtcacctcgatctgagg

SEQ ID NO: 1849009 - DNA, 25 bp, Homo sapien
tatggcgattcccttggcagtagcc

SEQ ID NO: 1849010 - DNA, 25 bp, Homo sapien
ctccaagtcaccaagtgttaggatt

SEQ ID NO: 1849011 - DNA, 25 bp, Homo sapien
cctccaagtcaccaagtgttaggat

SEQ ID NO: 1849012 - DNA, 25 bp, Homo sapien
cgacgccttcgcttcagtttggaaa

SEQ ID NO: 1849013 - DNA, 25 bp, Homo sapien
tggaaacgtccagattacgcagccc

SEQ ID NO: 1849014 - DNA, 25 bp, Homo sapien
tgggggctccctcaatatcaaactg

SEQ ID NO: 1849015 - DNA, 25 bp, Homo sapien
tatcaaactgcacaaccggggtccc

SEQ ID NO: 1849016 - DNA, 25 bp, Homo sapien
aggacttcttcaacgggcgcgacct

SEQ ID NO: 1849017 - DNA, 25 bp, Homo sapien
ggacaagtccgagaacgtgcaggac

SEQ ID NO: 1849018 - DNA, 25 bp, Homo sapien
tttgagggcatcgacttctacacgt

SEQ ID NO: 1849019 - DNA, 25 bp, Homo sapien
tggacaaggcccagattcacgacct

SEQ ID NO: 1849020 - DNA, 25 bp, Homo sapien
gcgagagggccatgacgaaagacaa

SEQ ID NO: 1849021 - DNA, 25 bp, Homo sapien
gatgactgccctgatcaagcgcaac

SEQ ID NO: 1849022 - DNA, 25 bp, Homo sapien
aagcagacgcagatcttcaccacct

SEQ ID NO: 1849023 - DNA, 25 bp, Homo sapien
ctggacgtggctcccctgtcgctgg

SEQ ID NO: 1849024 - DNA, 25 bp, Homo sapien
agatcaccatcaccaacgacaaggg

SEQ ID NO: 1849025 - DNA, 25 bp, Homo sapien
ggtgtgtaaccccatcatcagcgga

SEQ ID NO: 1849026 - DNA, 25 bp, Homo sapien
ccgagaaggacgagtttgagcacaa

SEQ ID NO: 1849027 - DNA, 25 bp, Homo sapien
ttcaacatgaagagcgccgtggagg

SEQ ID NO: 1849028 - DNA, 25 bp, Homo sapien
gcgggtggctcactaggtcaggagt

SEQ ID NO: 1849029 - DNA, 25 bp, Homo sapien
aaatacaaaaattagctaggcgtgg

SEQ ID NO: 1849030 - DNA, 25 bp, Homo sapien
tcaagacaagcctggccaagatggt

SEQ ID NO: 1849031 - DNA, 25 bp, Homo sapien
gatggtgaaaccccacctctactaa

SEQ ID NO: 1849032 - DNA, 25 bp, Homo sapien
ggcctttccaggtgatcaacgacgg

SEQ ID NO: 1849033 - DNA, 25 bp, Homo sapien
cattaggtgcctcggagaaaggacc

SEQ ID NO: 1849034 - DNA, 25 bp, Homo sapien
aattacctactgaagggcaggcggc

SEQ ID NO: 1849035 - DNA, 25 bp, Homo sapien
caagcccaaggtgcaggtgagctac

SEQ ID NO: 1849036 - DNA, 25 bp, Homo sapien
caggtgcccgtcttgattagagtgg

SEQ ID NO: 1849037 - DNA, 25 bp, Homo sapien
ttaagagaaattgcaggtgcccgtc

SEQ ID NO: 1849038 - DNA, 25 bp, Homo sapien
ttcagggaaaagtcggatggcagct

SEQ ID NO: 1849039 - DNA, 25 bp, Homo sapien
gagaaattgcaggtgcccgtcttga

SEQ ID NO: 1849040 - DNA, 25 bp, Homo sapien
gtaatggcccgactgttgagtgagg

SEQ ID NO: 1849041 - DNA, 25 bp, Homo sapien
gggctcgtgggttggcagtatgaga

SEQ ID NO: 1849042 - DNA, 25 bp, Homo sapien
ttctttttgcgaagtgggctcgtgg

SEQ ID NO: 1849043 - DNA, 25 bp, Homo sapien
ggatcccaacggcttgcgctgcctt

SEQ ID NO: 1849044 - DNA, 25 bp, Homo sapien
gggaactcggctagcggccccacag

SEQ ID NO: 1849045 - DNA, 25 bp, Homo sapien
tggaactgacctagctcgtggcagg

SEQ ID NO: 1849046 - DNA, 25 bp, Homo sapien
cagttgggtgaactaccgttgcaca

SEQ ID NO: 1849047 - DNA, 25 bp, Homo sapien
ggagagggcggtccccagtgcagtt

SEQ ID NO: 1849048 - DNA, 25 bp, Homo sapien
tgttggtgactttctagagattact

SEQ ID NO: 1849049 - DNA, 25 bp, Homo sapien
aacacaattcagtgcggccttcaac

SEQ ID NO: 1849050 - DNA, 25 bp, Homo sapien
gcccgggctggcaatggtacgatct

SEQ ID NO: 1849051 - DNA, 25 bp, Homo sapien
tgagacagggcgcaatgccaggatc

SEQ ID NO: 1849052 - DNA, 25 bp, Homo sapien
gattctgcactaatctgagtgaagg

SEQ ID NO: 1849053 - DNA, 25 bp, Homo sapien
cagggacaatgcaccttcacagaga

SEQ ID NO: 1849054 - DNA, 25 bp, Homo sapien
gctttgtatggctgtcatgcttaga

SEQ ID NO: 1849055 - DNA, 25 bp, Homo sapien
cccctcatggagagaagctttgtat

SEQ ID NO: 1849056 - DNA, 25 bp, Homo sapien
tcctatatttgtcttatatacaagt

SEQ ID NO: 1849057 - DNA, 25 bp, Homo sapien
tggtgctgggcatatcctaagaact

SEQ ID NO: 1849058 - DNA, 25 bp, Homo sapien
ggcacttcaagtagatagcttctat

SEQ ID NO: 1849059 - DNA, 25 bp, Homo sapien
tcttccgcctggtgctgggcatatc

SEQ ID NO: 1849060 - DNA, 25 bp, Homo sapien
aaaagtctccatcttacaagggcca

SEQ ID NO: 1849061 - DNA, 25 bp, Homo sapien
cagttgcttaggctagacccttgga

SEQ ID NO: 1849062 - DNA, 25 bp, Homo sapien
tcttagaaatgacacgaggatctgt

SEQ ID NO: 1849063 - DNA, 25 bp, Homo sapien
tttactgctgctccatcctggtggg

SEQ ID NO: 1849064 - DNA, 25 bp, Homo sapien
aagccgccattgtcatcctggcccg

SEQ ID NO: 1849065 - DNA, 25 bp, Homo sapien
ttggtgatgactcccaacgagcacc

SEQ ID NO: 1849066 - DNA, 25 bp, Homo sapien
agccgccattgtcatcctggcccgt

SEQ ID NO: 1849067 - DNA, 25 bp, Homo sapien
gtgatgactcccaacgagcaccctg

SEQ ID NO: 1849068 - DNA, 25 bp, Homo sapien
tggctggccgggctgaggggctcct

SEQ ID NO: 1849069 - DNA, 25 bp, Homo sapien
gtggctggccgggctgaggggctcc

SEQ ID NO: 1849070 - DNA, 25 bp, Homo sapien
ggtggctggccgggctgaggggctc

SEQ ID NO: 1849071 - DNA, 25 bp, Homo sapien
gggtggctggccgggctgaggggct

SEQ ID NO: 1849072 - DNA, 25 bp, Homo sapien
agatggggtggctgcggggcggaga

SEQ ID NO: 1849073 - DNA, 25 bp, Homo sapien
ctcagacggggtggttgccaggcag

SEQ ID NO: 1849074 - DNA, 25 bp, Homo sapien
acttctcagacggggtggttgccag

SEQ ID NO: 1849075 - DNA, 25 bp, Homo sapien
cccagatggggtggctgcggggcgg

SEQ ID NO: 1849076 - DNA, 25 bp, Homo sapien
tgcccagccaacttgccccaatttt

SEQ ID NO: 1849077 - DNA, 25 bp, Homo sapien
gtgcccagccaacttgccccaattt

SEQ ID NO: 1849078 - DNA, 25 bp, Homo sapien
gagggagagtctcgctccatagccc

SEQ ID NO: 1849079 - DNA, 25 bp, Homo sapien
tttgagggagagtctcgctccatag

SEQ ID NO: 1849080 - DNA, 25 bp, Homo sapien
tttctgcaactttgacgtacatata

SEQ ID NO: 1849081 - DNA, 25 bp, Homo sapien
tataattcattttagctggacactt

SEQ ID NO: 1849082 - DNA, 25 bp, Homo sapien
gcaactttgacgtacatataattca

SEQ ID NO: 1849083 - DNA, 25 bp, Homo sapien
ttcattttagctggacacttgcact

SEQ ID NO: 1849084 - DNA, 25 bp, Homo sapien
taatttgccataggaagtgctcact

SEQ ID NO: 1849085 - DNA, 25 bp, Homo sapien
acttctctgtcaggctagctgggac

SEQ ID NO: 1849086 - DNA, 25 bp, Homo sapien
cacttgcaccctatttcatggagga

SEQ ID NO: 1849087 - DNA, 25 bp, Homo sapien
gatggtatcctaccccatgttagaa

SEQ ID NO: 1849088 - DNA, 25 bp, Homo sapien
tcggtgataagaaggaatgtaggct

SEQ ID NO: 1849089 - DNA, 25 bp, Homo sapien
caacctgtttctcggtgataagaag

SEQ ID NO: 1849090 - DNA, 25 bp, Homo sapien
tcatactcattacacctgtgaagat

SEQ ID NO: 1849091 - DNA, 25 bp, Homo sapien
aaaatatcttatggcactcccttca

SEQ ID NO: 1849092 - DNA, 25 bp, Homo sapien
ggtgcacctagtccttactctgaaa

SEQ ID NO: 1849093 - DNA, 25 bp, Homo sapien
tttcacaggcagtacgcacatcagg

SEQ ID NO: 1849094 - DNA, 25 bp, Homo sapien
tcttaccgcaacaccaaagaggagg

SEQ ID NO: 1849095 - DNA, 25 bp, Homo sapien
cacccaggctcacaaggatacatga

SEQ ID NO: 1849096 - DNA, 25 bp, Homo sapien
ggtggtggggccacacttagccata

SEQ ID NO: 1849097 - DNA, 25 bp, Homo sapien
gggccacacttagccatatggaaag

SEQ ID NO: 1849098 - DNA, 25 bp, Homo sapien
ccatatggaaagacagtattctcag

SEQ ID NO: 1849099 - DNA, 25 bp, Homo sapien
cacacttagccatatggaaagacag

SEQ ID NO: 1849100 - DNA, 25 bp, Homo sapien
gggagaggacgcctagctttcagtc

SEQ ID NO: 1849101 - DNA, 25 bp, Homo sapien
cagaatacccctgtggcagtggcac

SEQ ID NO: 1849102 - DNA, 25 bp, Homo sapien
gatggaactgtctttcaggcgtctc

SEQ ID NO: 1849103 - DNA, 25 bp, Homo sapien
agcagaccctctacagacccgtgtt

SEQ ID NO: 1849104 - DNA, 25 bp, Homo sapien
tccgccatgaggtaccattgctgaa

SEQ ID NO: 1849105 - DNA, 25 bp, Homo sapien
tttctcatacaggacgtagagctgg

SEQ ID NO: 1849106 - DNA, 25 bp, Homo sapien
cattgctgaagctccatcgcagggt

SEQ ID NO: 1849107 - DNA, 25 bp, Homo sapien
tagacactgattttggccacggaga

SEQ ID NO: 1849108 - DNA, 25 bp, Homo sapien
tgtctagacacagggctctccctgc

SEQ ID NO: 1849109 - DNA, 25 bp, Homo sapien
agtcagggagagagggtctctgccc

SEQ ID NO: 1849110 - DNA, 25 bp, Homo sapien
gccttgtctagacacagggctctcc

SEQ ID NO: 1849111 - DNA, 25 bp, Homo sapien
tctgcccaggccttgtctagacaca

SEQ ID NO: 1849112 - DNA, 25 bp, Homo sapien
ggtgactacagctcctgcagctacc

SEQ ID NO: 1849113 - DNA, 25 bp, Homo sapien
gggccttagtgtatcacaggcatca

SEQ ID NO: 1849114 - DNA, 25 bp, Homo sapien
gacaatgccggagctggtgactaca

SEQ ID NO: 1849115 - DNA, 25 bp, Homo sapien
agctcagggtcgaaggtcacatcac

SEQ ID NO: 1849116 - DNA, 25 bp, Homo sapien
tgcggaggacaattcggcagtggca

SEQ ID NO: 1849117 - DNA, 25 bp, Homo sapien
aggacaattcggcagtggcagtggt

SEQ ID NO: 1849118 - DNA, 25 bp, Homo sapien
ggtttcgggcattgatgacgactga

SEQ ID NO: 1849119 - DNA, 25 bp, Homo sapien
cgggcattgatgacgactgagccat

SEQ ID NO: 1849120 - DNA, 25 bp, Homo sapien
ttcatcaggattgaaatcattttcc

SEQ ID NO: 1849121 - DNA, 25 bp, Homo sapien
ttccgtagcgccaggaggcaccatg

SEQ ID NO: 1849122 - DNA, 25 bp, Homo sapien
catggccacacacgatgaggcggcc

SEQ ID NO: 1849123 - DNA, 25 bp, Homo sapien
catgatcatcgctgaggagacagaa

SEQ ID NO: 1849124 - DNA, 25 bp, Homo sapien
gggaactgggtgtcacagaaggaga

SEQ ID NO: 1849125 - DNA, 25 bp, Homo sapien
ctgtgggaaagggaactgggtgtca

SEQ ID NO: 1849126 - DNA, 25 bp, Homo sapien
gaactgggtgtcacagaaggagact

SEQ ID NO: 1849127 - DNA, 25 bp, Homo sapien
gaaagggaactgggtgtcacagaag

SEQ ID NO: 1849128 - DNA, 25 bp, Homo sapien
ctgaataccagagcccggtccaggg

SEQ ID NO: 1849129 - DNA, 25 bp, Homo sapien
ccaatatccagggagagattccggg

SEQ ID NO: 1849130 - DNA, 25 bp, Homo sapien
gattccggggtgtgctccaggaaac

SEQ ID NO: 1849131 - DNA, 25 bp, Homo sapien
gggcaaacacttcagtgccaatatc

SEQ ID NO: 1849132 - DNA, 25 bp, Homo sapien
atcgctcactactgccccaaggttc

SEQ ID NO: 1849133 - DNA, 25 bp, Homo sapien
gcacaaagggagtagaaaagaaata

SEQ ID NO: 1849134 - DNA, 25 bp, Homo sapien
tccccatcattgacaatgaacgctg

SEQ ID NO: 1849135 - DNA, 25 bp, Homo sapien
gcagccggccttgtgagcacaaagg

SEQ ID NO: 1849136 - DNA, 25 bp, Homo sapien
tccgcagggcgatgaacttggcccc

SEQ ID NO: 1849137 - DNA, 25 bp, Homo sapien
ctcagcaaaggcgagaagagtgccc

SEQ ID NO: 1849138 - DNA, 25 bp, Homo sapien
ggacattttcctcgcctcagcaaag

SEQ ID NO: 1849139 - DNA, 25 bp, Homo sapien
ggtgtccactgagccgatctgtctc

SEQ ID NO: 1849140 - DNA, 25 bp, Homo sapien
ggaagatcgcggcaaacacccaaac

SEQ ID NO: 1849141 - DNA, 25 bp, Homo sapien
cccagaagcccagaatccgcggccc

SEQ ID NO: 1849142 - DNA, 25 bp, Homo sapien
cagaccgaagtcgttctcagccttg

SEQ ID NO: 1849143 - DNA, 25 bp, Homo sapien
aagtcgttctcagccttggaccagg

SEQ ID NO: 1849144 - DNA, 25 bp, Homo sapien
ccgtgctgggtcgctccccagtcat

SEQ ID NO: 1849145 - DNA, 25 bp, Homo sapien
ggcagctagactccacagagtcggg

SEQ ID NO: 1849146 - DNA, 25 bp, Homo sapien
agcgcagatgtcacccttaagcccg

SEQ ID NO: 1849147 - DNA, 25 bp, Homo sapien
tcagctgacccggaccctttaaagc

SEQ ID NO: 1849148 - DNA, 25 bp, Homo sapien
ccacagagtcgggagtcagctgacc

SEQ ID NO: 1849149 - DNA, 25 bp, Homo sapien
caaaatggagacctgtaaggcgaag

SEQ ID NO: 1849150 - DNA, 25 bp, Homo sapien
gtaaggcgaagtgaggttggatggc

SEQ ID NO: 1849151 - DNA, 25 bp, Homo sapien
ggtgcagtcctggatcagggccgga

SEQ ID NO: 1849152 - DNA, 25 bp, Homo sapien
cagtcctggatcagggccggagctg

SEQ ID NO: 1849153 - DNA, 25 bp, Homo sapien
ctcttggacatgtagtagggccggt

SEQ ID NO: 1849154 - DNA, 25 bp, Homo sapien
ttggacatgtagtagggccggtcca

SEQ ID NO: 1849155 - DNA, 25 bp, Homo sapien
agaaggctcttggacatgtagtagg

SEQ ID NO: 1849156 - DNA, 25 bp, Homo sapien
tccagggagccgttgttccgctcca

SEQ ID NO: 1849157 - DNA, 25 bp, Homo sapien
caacagagaccggttagagcggacc

SEQ ID NO: 1849158 - DNA, 25 bp, Homo sapien
ctgagccgcaacagagaccggttag

SEQ ID NO: 1849159 - DNA, 25 bp, Homo sapien
gccgcaacagagaccggttagagcg

SEQ ID NO: 1849160 - DNA, 25 bp, Homo sapien
agagaccggttagagcggaccctgg

SEQ ID NO: 1849161 - DNA, 25 bp, Homo sapien
tgtagagtaagaaaatcccctgccg

SEQ ID NO: 1849162 - DNA, 25 bp, Homo sapien
gaaaaaatgcatgtcagtcgcttag

SEQ ID NO: 1849163 - DNA, 25 bp, Homo sapien
caaaccctgaatggatgcatgctgt

SEQ ID NO: 1849164 - DNA, 25 bp, Homo sapien
gtcgcttaggaggagactggcaaac

SEQ ID NO: 1849165 - DNA, 25 bp, Homo sapien
gagacctctccatcagaatgctcct

SEQ ID NO: 1849166 - DNA, 25 bp, Homo sapien
tacccgagatttcttagggaagata

SEQ ID NO: 1849167 - DNA, 25 bp, Homo sapien
ctaatggctaacttctacccgagat

SEQ ID NO: 1849168 - DNA, 25 bp, Homo sapien
cttagggaagatagcagagacctct

SEQ ID NO: 1849169 - DNA, 25 bp, Homo sapien
gctccctctggttcgtttagctcac

SEQ ID NO: 1849170 - DNA, 25 bp, Homo sapien
aaaaaatgcttgaacggctcagtac

SEQ ID NO: 1849171 - DNA, 25 bp, Homo sapien
gctcacaaaggcattgtttctagaa

SEQ ID NO: 1849172 - DNA, 25 bp, Homo sapien
gtttctagaagcaccaaatctccaa

SEQ ID NO: 1849173 - DNA, 25 bp, Homo sapien
acacacatgccgaaaacgctgaaga

SEQ ID NO: 1849174 - DNA, 25 bp, Homo sapien
tgccgaaaacgctgaagaagccgct

SEQ ID NO: 1849175 - DNA, 25 bp, Homo sapien
tggcgatgacataggcccccaggat

SEQ ID NO: 1849176 - DNA, 25 bp, Homo sapien
gtccacacacatgccgaaaacgctg

SEQ ID NO: 1849177 - DNA, 25 bp, Homo sapien
tggaagacatgacccgttggggtta

SEQ ID NO: 1849178 - DNA, 25 bp, Homo sapien
aagacatgacccgttggggttattg

SEQ ID NO: 1849179 - DNA, 25 bp, Homo sapien
agacatgacccgttggggttattgg

SEQ ID NO: 1849180 - DNA, 25 bp, Homo sapien
ctggaagacatgacccgttggggtt

SEQ ID NO: 1849181 - DNA, 25 bp, Homo sapien
ccagtaatagttgaggtgggggctc

SEQ ID NO: 1849182 - DNA, 25 bp, Homo sapien
tgatgggcagccagtaatagttgag

SEQ ID NO: 1849183 - DNA, 25 bp, Homo sapien
cagccccgggatgcgaccggagaaa

SEQ ID NO: 1849184 - DNA, 25 bp, Homo sapien
agtctttacccagccccgggatgcg

SEQ ID NO: 1849185 - DNA, 25 bp, Homo sapien
gggggttagtgctgcacctctgagg

SEQ ID NO: 1849186 - DNA, 25 bp, Homo sapien
ctgcccagcacccctaccctctgtc

SEQ ID NO: 1849187 - DNA, 25 bp, Homo sapien
ctgtggaataattctgggggttagt

SEQ ID NO: 1849188 - DNA, 25 bp, Homo sapien
tgcccagcacccctaccctctgtcc

SEQ ID NO: 1849189 - DNA, 25 bp, Homo sapien
ctgtgactttgtccaggacgaccac

SEQ ID NO: 1849190 - DNA, 25 bp, Homo sapien
gtctgtgactttgtccaggacgacc

SEQ ID NO: 1849191 - DNA, 25 bp, Homo sapien
gcagcaggtctgtgactttgtccag

SEQ ID NO: 1849192 - DNA, 25 bp, Homo sapien
gcaggtctgtgactttgtccaggac

SEQ ID NO: 1849193 - DNA, 25 bp, Homo sapien
ctgacaatgtttcgcatgagtagca

SEQ ID NO: 1849194 - DNA, 25 bp, Homo sapien
gtagcatgaacgcatttttggctga

SEQ ID NO: 1849195 - DNA, 25 bp, Homo sapien
catgaacgcatttttggctgagaca

SEQ ID NO: 1849196 - DNA, 25 bp, Homo sapien
caatgtttcgcatgagtagcatgaa

SEQ ID NO: 1849197 - DNA, 25 bp, Homo sapien
tatgcattgcggtttaggaacttga

SEQ ID NO: 1849198 - DNA, 25 bp, Homo sapien
cagcacatgatgcagcgggctacag

SEQ ID NO: 1849199 - DNA, 25 bp, Homo sapien
catgatgtatgcattgcggtttagg

SEQ ID NO: 1849200 - DNA, 25 bp, Homo sapien
cagcgggctacagggttctgcactc

SEQ ID NO: 1849201 - DNA, 25 bp, Homo sapien
atactccaagatgacccgggctatc

SEQ ID NO: 1849202 - DNA, 25 bp, Homo sapien
ctgagcttgtggtcaatatactcca

SEQ ID NO: 1849203 - DNA, 25 bp, Homo sapien
acccgggctatctgcacaagggtca

SEQ ID NO: 1849204 - DNA, 25 bp, Homo sapien
ctctgagcttgtggtcaatatactc

SEQ ID NO: 1849205 - DNA, 25 bp, Homo sapien
ctccagcgaggacgcattggcccag

SEQ ID NO: 1849206 - DNA, 25 bp, Homo sapien
gccccaggaccccatagatttgcag

SEQ ID NO: 1849207 - DNA, 25 bp, Homo sapien
gccagtacccagttaagggtccaga

SEQ ID NO: 1849208 - DNA, 25 bp, Homo sapien
ttgcagattgaagacagaacgttgg

SEQ ID NO: 1849209 - DNA, 25 bp, Homo sapien
tgggcacgaggagttcacaaggtgg

SEQ ID NO: 1849210 - DNA, 25 bp, Homo sapien
ggcacgaggagttcacaaggtgggc

SEQ ID NO: 1849211 - DNA, 25 bp, Homo sapien
cctgggcacgaggagttcacaaggt

SEQ ID NO: 1849212 - DNA, 25 bp, Homo sapien
ctgggcacgaggagttcacaaggtg

SEQ ID NO: 1849213 - DNA, 25 bp, Homo sapien
gagctgatgttggatgcccagagca

SEQ ID NO: 1849214 - DNA, 25 bp, Homo sapien
ggagctgatgttggatgcccagagc

SEQ ID NO: 1849215 - DNA, 25 bp, Homo sapien
ggggttgccccgatgtagccaggta

SEQ ID NO: 1849216 - DNA, 25 bp, Homo sapien
tggggttgccccgatgtagccaggt

SEQ ID NO: 1849217 - DNA, 25 bp, Homo sapien
ctggggttgccccgatgtagccagg

SEQ ID NO: 1849218 - DNA, 25 bp, Homo sapien
gggttgccccgatgtagccaggtac

SEQ ID NO: 1849219 - DNA, 25 bp, Homo sapien
ggctggctgcgtgggcagaggatac

SEQ ID NO: 1849220 - DNA, 25 bp, Homo sapien
tccaagagtggctggctgcgtgggc

SEQ ID NO: 1849221 - DNA, 25 bp, Homo sapien
gtggctggctgcgtgggcagaggat

SEQ ID NO: 1849222 - DNA, 25 bp, Homo sapien
gagtggctggctgcgtgggcagagg

SEQ ID NO: 1849223 - DNA, 25 bp, Homo sapien
gcagtcatggcccagtaggcaatgc

SEQ ID NO: 1849224 - DNA, 25 bp, Homo sapien
gaccagtgggtagaacatggtagac

SEQ ID NO: 1849225 - DNA, 25 bp, Homo sapien
agagcagtcatggcccagtaggcaa

SEQ ID NO: 1849226 - DNA, 25 bp, Homo sapien
gggtagaacatggtagacatcatct

SEQ ID NO: 1849227 - DNA, 25 bp, Homo sapien
atacgaatccgctgccgcaggaaga

SEQ ID NO: 1849228 - DNA, 25 bp, Homo sapien
tggcttcaagcaccgccaacacgat

SEQ ID NO: 1849229 - DNA, 25 bp, Homo sapien
ggcaatacgaatccgctgccgcagg

SEQ ID NO: 1849230 - DNA, 25 bp, Homo sapien
gagggcgatggcaatacgaatccgc

SEQ ID NO: 1849231 - DNA, 25 bp, Homo sapien
caggtctcctgcacgctctggtagg

SEQ ID NO: 1849232 - DNA, 25 bp, Homo sapien
agataaacagtaggctcaagaccag

SEQ ID NO: 1849233 - DNA, 25 bp, Homo sapien
tagtagatgccatatgccagcacgc

SEQ ID NO: 1849234 - DNA, 25 bp, Homo sapien
actcggtactcctcccagcagtagt

SEQ ID NO: 1849235 - DNA, 25 bp, Homo sapien
aataccaggactgggcaaaatcttc

SEQ ID NO: 1849236 - DNA, 25 bp, Homo sapien
tcttcaaagatcttaacactgatgt

SEQ ID NO: 1849237 - DNA, 25 bp, Homo sapien
aagaatccaataccaggactgggca

SEQ ID NO: 1849238 - DNA, 25 bp, Homo sapien
ggcattgaggctgtcaataagaccg

SEQ ID NO: 1849239 - DNA, 25 bp, Homo sapien
gatcccctgctgtatggtggtgtca

SEQ ID NO: 1849240 - DNA, 25 bp, Homo sapien
tgatcccctgctgtatggtggtgtc

SEQ ID NO: 1849241 - DNA, 25 bp, Homo sapien
tcccctgctgtatggtggtgtcatt

SEQ ID NO: 1849242 - DNA, 25 bp, Homo sapien
ctgatcccctgctgtatggtggtgt

SEQ ID NO: 1849243 - DNA, 25 bp, Homo sapien
gtccatggaaagcagcgtcccagag

SEQ ID NO: 1849244 - DNA, 25 bp, Homo sapien
tggagtaatgttggtccatggaaag

SEQ ID NO: 1849245 - DNA, 25 bp, Homo sapien
ggtccatggaaagcagcgtcccaga

SEQ ID NO: 1849246 - DNA, 25 bp, Homo sapien
ctgggagcgccggtggagtaatgtt

SEQ ID NO: 1849247 - DNA, 25 bp, Homo sapien
ctcaccgtaaactccgcctctgggc

SEQ ID NO: 1849248 - DNA, 25 bp, Homo sapien
cctgttgcaggcttgtgatcaccgt

SEQ ID NO: 1849249 - DNA, 25 bp, Homo sapien
tggggcagagttcctgttgcaggct

SEQ ID NO: 1849250 - DNA, 25 bp, Homo sapien
cagagttcctgttgcaggcttgtga

SEQ ID NO: 1849251 - DNA, 25 bp, Homo sapien
gttcctgttgcaggcttgtgatcac

SEQ ID NO: 1849252 - DNA, 25 bp, Homo sapien
ccttctgggcgacagtgatgaggtt

SEQ ID NO: 1849253 - DNA, 25 bp, Homo sapien
tggcccttctgggcgacagtgatga

SEQ ID NO: 1849254 - DNA, 25 bp, Homo sapien
agtgatgaggttaggggcaatattc

SEQ ID NO: 1849255 - DNA, 25 bp, Homo sapien
cagtgatgaggttaggggcaatatt

SEQ ID NO: 1849256 - DNA, 25 bp, Homo sapien
tgtatagaagacttccccaacagtc

SEQ ID NO: 1849257 - DNA, 25 bp, Homo sapien
cccaacagtctgtgagaactcgttt

SEQ ID NO: 1849258 - DNA, 25 bp, Homo sapien
aactcgttttttcccacagtccatg

SEQ ID NO: 1849259 - DNA, 25 bp, Homo sapien
cagggtacccctggcagacaaaagt

SEQ ID NO: 1849260 - DNA, 25 bp, Homo sapien
tggggcactgtaggccgttctcagc

SEQ ID NO: 1849261 - DNA, 25 bp, Homo sapien
agatgttgaagtacaggagatacgg

SEQ ID NO: 1849262 - DNA, 25 bp, Homo sapien
gaagtacaggagatacggcttatct

SEQ ID NO: 1849263 - DNA, 25 bp, Homo sapien
tgttgaagtacaggagatacggctt

SEQ ID NO: 1849264 - DNA, 25 bp, Homo sapien
catgccacagtaggccccagtagag

SEQ ID NO: 1849265 - DNA, 25 bp, Homo sapien
acagtaggccccagtagagttcctg

SEQ ID NO: 1849266 - DNA, 25 bp, Homo sapien
ttgccgggggtctccatacaaccag

SEQ ID NO: 1849267 - DNA, 25 bp, Homo sapien
tgccgggggtctccatacaaccagg

SEQ ID NO: 1849268 - DNA, 25 bp, Homo sapien
aggaagaggacgcagcagatgacat

SEQ ID NO: 1849269 - DNA, 25 bp, Homo sapien
aatccccaccacgatgtaacctaga

SEQ ID NO: 1849270 - DNA, 25 bp, Homo sapien
ccaccacgatgtaacctagaatgaa

SEQ ID NO: 1849271 - DNA, 25 bp, Homo sapien
ggaagaggacgcagcagatgacatc

SEQ ID NO: 1849272 - DNA, 25 bp, Homo sapien
aaggaggggtcgtatttgactggct

SEQ ID NO: 1849273 - DNA, 25 bp, Homo sapien
tgatggggcctcgaaaggaggggtc

SEQ ID NO: 1849274 - DNA, 25 bp, Homo sapien
ctgttcttgatggggcctcgaaagg

SEQ ID NO: 1849275 - DNA, 25 bp, Homo sapien
cgaaaggaggggtcgtatttgactg

SEQ ID NO: 1849276 - DNA, 25 bp, Homo sapien
cgtaggcctcgtcatcctcgtcccg

SEQ ID NO: 1849277 - DNA, 25 bp, Homo sapien
cctcgtcccgctgctttccccccat

SEQ ID NO: 1849278 - DNA, 25 bp, Homo sapien
ggcctcgtcatcctcgtcccgctgc

SEQ ID NO: 1849279 - DNA, 25 bp, Homo sapien
cgtcatcctcgtcccgctgctttcc

SEQ ID NO: 1849280 - DNA, 25 bp, Homo sapien
gaggcccgacttcaattcatcaaac

SEQ ID NO: 1849281 - DNA, 25 bp, Homo sapien
cttcaactgaggatggggaacacgg

SEQ ID NO: 1849282 - DNA, 25 bp, Homo sapien
ctgggatctctggtcaggaatgtgt

SEQ ID NO: 1849283 - DNA, 25 bp, Homo sapien
gggtggccagccctgaagttgccct

SEQ ID NO: 1849284 - DNA, 25 bp, Homo sapien
ccacattggcaggtgaaatatttgc

SEQ ID NO: 1849285 - DNA, 25 bp, Homo sapien
gcagctcagggtgtgggtccaggcg

SEQ ID NO: 1849286 - DNA, 25 bp, Homo sapien
aatggcttcggctgagtgcttgcac

SEQ ID NO: 1849287 - DNA, 25 bp, Homo sapien
tccaggcgggccagacggctctgct

SEQ ID NO: 1849288 - DNA, 25 bp, Homo sapien
ggcatctatgcagtacacctctcca

SEQ ID NO: 1849289 - DNA, 25 bp, Homo sapien
tccccagtccggatgtctcgggaac

SEQ ID NO: 1849290 - DNA, 25 bp, Homo sapien
tctcgggaactgaagaaggcgatgc

SEQ ID NO: 1849291 - DNA, 25 bp, Homo sapien
gatgaagcggctgatgttgccatag

SEQ ID NO: 1849292 - DNA, 25 bp, Homo sapien
atcagagatcagctccccgacatac

SEQ ID NO: 1849293 - DNA, 25 bp, Homo sapien
cttgttgtctaagtcgaagaggtaa

SEQ ID NO: 1849294 - DNA, 25 bp, Homo sapien
agcatcagagatcagctccccgaca

SEQ ID NO: 1849295 - DNA, 25 bp, Homo sapien
tctaagtcgaagaggtaagaatcat

SEQ ID NO: 1849296 - DNA, 25 bp, Homo sapien
aggaatccatggttctgaaggtgag

SEQ ID NO: 1849297 - DNA, 25 bp, Homo sapien
tctgaaggtgagtgtgggctattag

SEQ ID NO: 1849298 - DNA, 25 bp, Homo sapien
agtgtgggctattaggaggtggctc

SEQ ID NO: 1849299 - DNA, 25 bp, Homo sapien
gaaggtgagtgtgggctattaggag

SEQ ID NO: 1849300 - DNA, 25 bp, Homo sapien
tgttcggtagagctgtagccgcacc

SEQ ID NO: 1849301 - DNA, 25 bp, Homo sapien
ttggctgttcggtagagctgtagcc

SEQ ID NO: 1849302 - DNA, 25 bp, Homo sapien
atgaaggtcccctgtgggatggtct

SEQ ID NO: 1849303 - DNA, 25 bp, Homo sapien
agcccatcttggctgttcggtagag

SEQ ID NO: 1849304 - DNA, 25 bp, Homo sapien
ttgatgccactctgtacgacccggt

SEQ ID NO: 1849305 - DNA, 25 bp, Homo sapien
tcagcggaggctcaatcttgttaaa

SEQ ID NO: 1849306 - DNA, 25 bp, Homo sapien
taaattcctggagcaatcgcccatc

SEQ ID NO: 1849307 - DNA, 25 bp, Homo sapien
gagcacgcctggttacactcgaaaa

SEQ ID NO: 1849308 - DNA, 25 bp, Homo sapien
cataccagcaccggatgctgagctg

SEQ ID NO: 1849309 - DNA, 25 bp, Homo sapien
agcagtcgtccacacacgtgcagtg

SEQ ID NO: 1849310 - DNA, 25 bp, Homo sapien
gagcagtcgtccacacacgtgcagt

SEQ ID NO: 1849311 - DNA, 25 bp, Homo sapien
tagagcagtcgtccacacacgtgca

SEQ ID NO: 1849312 - DNA, 25 bp, Homo sapien
ctagagcagtcgtccacacacgtgc

SEQ ID NO: 1849313 - DNA, 25 bp, Homo sapien
gatgtacttgtaatcctcagggcag

SEQ ID NO: 1849314 - DNA, 25 bp, Homo sapien
cgttgacacagggaatgggcacgtt

SEQ ID NO: 1849315 - DNA, 25 bp, Homo sapien
tggtggacgtctcgcagttctctga

SEQ ID NO: 1849316 - DNA, 25 bp, Homo sapien
gggtgatgttgcgatcgatgttcat

SEQ ID NO: 1849317 - DNA, 25 bp, Homo sapien
cggcagatgatcttctctgtgcgga

SEQ ID NO: 1849318 - DNA, 25 bp, Homo sapien
gcggatggcccgatttcccacccca

SEQ ID NO: 1849319 - DNA, 25 bp, Homo sapien
ggcagatgatcttctctgtgcggat

SEQ ID NO: 1849320 - DNA, 25 bp, Homo sapien
tctgtgcggatggcccgatttccca

SEQ ID NO: 1849321 - DNA, 25 bp, Homo sapien
tgttccgcagctcagggttggcccc

SEQ ID NO: 1849322 - DNA, 25 bp, Homo sapien
tgagttgaagcgcaaaccacacgtc

SEQ ID NO: 1849323 - DNA, 25 bp, Homo sapien
accacacgtcggagcgctcgggagt

SEQ ID NO: 1849324 - DNA, 25 bp, Homo sapien
gttggccccacgtgacaggaataac

SEQ ID NO: 1849325 - DNA, 25 bp, Homo sapien
tgaggctgcaagaagtgggggcagg

SEQ ID NO: 1849326 - DNA, 25 bp, Homo sapien
ggggcaggggcatcaagggcggggc

SEQ ID NO: 1849327 - DNA, 25 bp, Homo sapien
gggcaggggcatcaagggcggggca

SEQ ID NO: 1849328 - DNA, 25 bp, Homo sapien
atggaggtcacagcgcgcattcaga

SEQ ID NO: 1849329 - DNA, 25 bp, Homo sapien
cattcagaaggacttcggcgatggc

SEQ ID NO: 1849330 - DNA, 25 bp, Homo sapien
gaggcccagtgcaggcagatgttct

SEQ ID NO: 1849331 - DNA, 25 bp, Homo sapien
acgcagtcatggtagctctcccgag

SEQ ID NO: 1849332 - DNA, 25 bp, Homo sapien
tgtcagtgagggtgacgtcggcgcc

SEQ ID NO: 1849333 - DNA, 25 bp, Homo sapien
gcgccccgcgtcagtagcatgcgga

SEQ ID NO: 1849334 - DNA, 25 bp, Homo sapien
tagcatgcggatcacctcgatgtgc

SEQ ID NO: 1849335 - DNA, 25 bp, Homo sapien
ctctgcagcccagatgatgggcgtc

SEQ ID NO: 1849336 - DNA, 25 bp, Homo sapien
aatgggactagtagggtcgggcgcg

SEQ ID NO: 1849337 - DNA, 25 bp, Homo sapien
cttaacgtctctgggtcgcagtttc

SEQ ID NO: 1849338 - DNA, 25 bp, Homo sapien
gcaaatggtcaagattggctgtgtg

SEQ ID NO: 1849339 - DNA, 25 bp, Homo sapien
aacgtctctgggtcgcagtttcttc

SEQ ID NO: 1849340 - DNA, 25 bp, Homo sapien
tatgactgtctgtgaactgctactg

SEQ ID NO: 1849341 - DNA, 25 bp, Homo sapien
gaagcagcgacaacccaataacaat

SEQ ID NO: 1849342 - DNA, 25 bp, Homo sapien
caaaaatgggactagtagcgtctac

SEQ ID NO: 1849343 - DNA, 25 bp, Homo sapien
ttccaaaaaatacagccaggagctg

SEQ ID NO: 1849344 - DNA, 25 bp, Homo sapien
ctgggcattgacgtccacctgtcct

SEQ ID NO: 1849345 - DNA, 25 bp, Homo sapien
caagttcccgattttggctgcgtgg

SEQ ID NO: 1849346 - DNA, 25 bp, Homo sapien
tggaggcaggtggaaccgtcctcct

SEQ ID NO: 1849347 - DNA, 25 bp, Homo sapien
agcaggctgaccatctccaagttcc

SEQ ID NO: 1849348 - DNA, 25 bp, Homo sapien
agtggcgtccgctgctgtttgtcca

SEQ ID NO: 1849349 - DNA, 25 bp, Homo sapien
gctacctccaggtggttgttcacca

SEQ ID NO: 1849350 - DNA, 25 bp, Homo sapien
accacgctgcaccatgtaacgggct

SEQ ID NO: 1849351 - DNA, 25 bp, Homo sapien
atgtaacgggctacctccaggtggt

SEQ ID NO: 1849352 - DNA, 25 bp, Homo sapien
tggtgaatgaggcatggggccgggc

SEQ ID NO: 1849353 - DNA, 25 bp, Homo sapien
ggcctaagggcctggtgaatgaggc

SEQ ID NO: 1849354 - DNA, 25 bp, Homo sapien
cagcacatggcagatctccacggag

SEQ ID NO: 1849355 - DNA, 25 bp, Homo sapien
gcttgctctgctggtcgctctggaa

SEQ ID NO: 1849356 - DNA, 25 bp, Homo sapien
acatggcagatctccacggagccct

SEQ ID NO: 1849357 - DNA, 25 bp, Homo sapien
ctctgctggtcgctctggaagttgg

SEQ ID NO: 1849358 - DNA, 25 bp, Homo sapien
gtgcactgtgcaaggtccctaacct

SEQ ID NO: 1849359 - DNA, 25 bp, Homo sapien
aacaggacccagcacctatgagtca

SEQ ID NO: 1849360 - DNA, 25 bp, Homo sapien
ggctaacaggtataagcactcagaa

SEQ ID NO: 1849361 - DNA, 25 bp, Homo sapien
ccacactaagtccttcagggcaagg

SEQ ID NO: 1849362 - DNA, 25 bp, Homo sapien
tgccgagggtggaaacggagcttct

SEQ ID NO: 1849363 - DNA, 25 bp, Homo sapien
acagcatcaggatcaccttctgcag

SEQ ID NO: 1849364 - DNA, 25 bp, Homo sapien
cttcacggacaggtacaactgccga

SEQ ID NO: 1849365 - DNA, 25 bp, Homo sapien
gctcgccctgcttcacggacaggta

SEQ ID NO: 1849366 - DNA, 25 bp, Homo sapien
agtggcagccccacggctgaaaggc

SEQ ID NO: 1849367 - DNA, 25 bp, Homo sapien
tgagctgtcaatggtgtcagccagg

SEQ ID NO: 1849368 - DNA, 25 bp, Homo sapien
ggccctgagctgtcaatggtgtcag

SEQ ID NO: 1849369 - DNA, 25 bp, Homo sapien
tcagccaggggatcgcagggcgggc

SEQ ID NO: 1849370 - DNA, 25 bp, Homo sapien
cggtgggccacacggaagtcagggt

SEQ ID NO: 1849371 - DNA, 25 bp, Homo sapien
gacagaagaccatcccattcagctg

SEQ ID NO: 1849372 - DNA, 25 bp, Homo sapien
gggctgagaagtgtctgctctcccg

SEQ ID NO: 1849373 - DNA, 25 bp, Homo sapien
ccccgggggatggtcacctcttgag

SEQ ID NO: 1849374 - DNA, 25 bp, Homo sapien
tggtgtttgaccatgcgggcgcggt

SEQ ID NO: 1849375 - DNA, 25 bp, Homo sapien
aggatggcggcattgcagcctgaca

SEQ ID NO: 1849376 - DNA, 25 bp, Homo sapien
gcctcatggtctcccgcttgaggat

SEQ ID NO: 1849377 - DNA, 25 bp, Homo sapien
gccgtgcagaagtagccgcagcccg

SEQ ID NO: 1849378 - DNA, 25 bp, Homo sapien
gatgcggtcaatcttgggtgcctcc

SEQ ID NO: 1849379 - DNA, 25 bp, Homo sapien
ggtgcctccatgcggcagctgcaca

SEQ ID NO: 1849380 - DNA, 25 bp, Homo sapien
gccctctcgctgatgcggtcaatct

SEQ ID NO: 1849381 - DNA, 25 bp, Homo sapien
gctctgtctccagcgaagatgtgtc

SEQ ID NO: 1849382 - DNA, 25 bp, Homo sapien
ccagagggacctccatgtactcact

SEQ ID NO: 1849383 - DNA, 25 bp, Homo sapien
agagggacctccatgtactcactgg

SEQ ID NO: 1849384 - DNA, 25 bp, Homo sapien
cagagggacctccatgtactcactg

SEQ ID NO: 1849385 - DNA, 25 bp, Homo sapien
gcggaggctcccgcttgcgccgttt

SEQ ID NO: 1849386 - DNA, 25 bp, Homo sapien
tgcgccgtttccgagacggcttcac

SEQ ID NO: 1849387 - DNA, 25 bp, Homo sapien
tccgagacggcttcacccatgggct

SEQ ID NO: 1849388 - DNA, 25 bp, Homo sapien
cgcttgcgccgtttccgagacggct

SEQ ID NO: 1849389 - DNA, 25 bp, Homo sapien
tcacttagttgttcagttagagctt

SEQ ID NO: 1849390 - DNA, 25 bp, Homo sapien
cttcacttagttgttcagttagagc

SEQ ID NO: 1849391 - DNA, 25 bp, Homo sapien
ctcttcacttagttgttcagttaga

SEQ ID NO: 1849392 - DNA, 25 bp, Homo sapien
tatctgactgattccctgactcctc

SEQ ID NO: 1849393 - DNA, 25 bp, Homo sapien
ccacagagtaggaatcatagtagag

SEQ ID NO: 1849394 - DNA, 25 bp, Homo sapien
tcatagtagagactgaagtcatcac

SEQ ID NO: 1849395 - DNA, 25 bp, Homo sapien
ttgctgtcggagtccacgcgctcat

SEQ ID NO: 1849396 - DNA, 25 bp, Homo sapien
gtccacgcgctcatccacagagtag

SEQ ID NO: 1849397 - DNA, 25 bp, Homo sapien
tgaacgccgggcagaacctaactcc

SEQ ID NO: 1849398 - DNA, 25 bp, Homo sapien
gccgggcagaacctaactcctccga

SEQ ID NO: 1849399 - DNA, 25 bp, Homo sapien
ctgaacgccgggcagaacctaactc

SEQ ID NO: 1849400 - DNA, 25 bp, Homo sapien
cgccgggcagaacctaactcctccg

SEQ ID NO: 1849401 - DNA, 25 bp, Homo sapien
cctcctgagttcagcttcctccttt

SEQ ID NO: 1849402 - DNA, 25 bp, Homo sapien
gccacctcctgagttcagcttcctc

SEQ ID NO: 1849403 - DNA, 25 bp, Homo sapien
cacctcctgagttcagcttcctcct

SEQ ID NO: 1849404 - DNA, 25 bp, Homo sapien
ctcctgagttcagcttcctcctttt

SEQ ID NO: 1849405 - DNA, 25 bp, Homo sapien
ccagtgagtggacatcatcactcat

SEQ ID NO: 1849406 - DNA, 25 bp, Homo sapien
cacctttcccagtgagtggacatca

SEQ ID NO: 1849407 - DNA, 25 bp, Homo sapien
cccagtgagtggacatcatcactca

SEQ ID NO: 1849408 - DNA, 25 bp, Homo sapien
tgaggtcacctttcccagtgagtgg

SEQ ID NO: 1849409 - DNA, 25 bp, Homo sapien
tgtatttcagggggccgcttctcag

SEQ ID NO: 1849410 - DNA, 25 bp, Homo sapien
ctgtatttcagggggccgcttctca

SEQ ID NO: 1849411 - DNA, 25 bp, Homo sapien
atgctgtatttcagggggccgcttc

SEQ ID NO: 1849412 - DNA, 25 bp, Homo sapien
tgctgtatttcagggggccgcttct

SEQ ID NO: 1849413 - DNA, 25 bp, Homo sapien
tgatcctccccagaaagtacgggat

SEQ ID NO: 1849414 - DNA, 25 bp, Homo sapien
tgacagatgagttccccaagggctt

SEQ ID NO: 1849415 - DNA, 25 bp, Homo sapien
tgttggttcacagatcaagcacagc

SEQ ID NO: 1849416 - DNA, 25 bp, Homo sapien
taactcctacgcagtgtgcccagag

SEQ ID NO: 1849417 - DNA, 25 bp, Homo sapien
taaaggctgtcctcaaaacctgacc

SEQ ID NO: 1849418 - DNA, 25 bp, Homo sapien
tcctggtttggacatggttttgcgg

SEQ ID NO: 1849419 - DNA, 25 bp, Homo sapien
gctcggtggaccttgggctgtccct

SEQ ID NO: 1849420 - DNA, 25 bp, Homo sapien
tagcctcatagccaaactctggaca

SEQ ID NO: 1849421 - DNA, 25 bp, Homo sapien
cattgacatcttggcccggctagga

SEQ ID NO: 1849422 - DNA, 25 bp, Homo sapien
tctcagattcatccccaatgagtgg

SEQ ID NO: 1849423 - DNA, 25 bp, Homo sapien
aagattctcagattcatccccaatg

SEQ ID NO: 1849424 - DNA, 25 bp, Homo sapien
catccccaatgagtggtgtagcccc

SEQ ID NO: 1849425 - DNA, 25 bp, Homo sapien
aatgagtggtgtagcccctacaggg

SEQ ID NO: 1849426 - DNA, 25 bp, Homo sapien
tggtttccttctccagcagcagcgc

SEQ ID NO: 1849427 - DNA, 25 bp, Homo sapien
ctctctcggtggctcctctggtttc

SEQ ID NO: 1849428 - DNA, 25 bp, Homo sapien
tctcggtggctcctctggtttcctt

SEQ ID NO: 1849429 - DNA, 25 bp, Homo sapien
ccttctccagcagcagcgcccccat

SEQ ID NO: 1849430 - DNA, 25 bp, Homo sapien
gctggtcagcccagtagagagttgg

SEQ ID NO: 1849431 - DNA, 25 bp, Homo sapien
tcggctgcccggaggggccgcacga

SEQ ID NO: 1849432 - DNA, 25 bp, Homo sapien
cgcatcaaccccctccctctcggta

SEQ ID NO: 1849433 - DNA, 25 bp, Homo sapien
agagagtaggctccggggcctacct

SEQ ID NO: 1849434 - DNA, 25 bp, Homo sapien
gagcattgcacgggcgcgcgcttcc

SEQ ID NO: 1849435 - DNA, 25 bp, Homo sapien
ccctcatccgcccccggtgctggcc

SEQ ID NO: 1849436 - DNA, 25 bp, Homo sapien
gattgctgcaagtcccgcccgggcc

SEQ ID NO: 1849437 - DNA, 25 bp, Homo sapien
gccccgttgcacccccggagcattg

SEQ ID NO: 1849438 - DNA, 25 bp, Homo sapien
ccgccgctgcagctcccgccgccgc

SEQ ID NO: 1849439 - DNA, 25 bp, Homo sapien
ggccgccgccgctgcagctcccgcc

SEQ ID NO: 1849440 - DNA, 25 bp, Homo sapien
ccgccgccgctgcagctcccgccgc

SEQ ID NO: 1849441 - DNA, 25 bp, Homo sapien
cggccgccgccgctgcagctcccgc

SEQ ID NO: 1849442 - DNA, 25 bp, Homo sapien
tgttacaccttcacacgcactaggg

SEQ ID NO: 1849443 - DNA, 25 bp, Homo sapien
cagcggcccgaacgtcattactgac

SEQ ID NO: 1849444 - DNA, 25 bp, Homo sapien
cgcactagggatccaggtaagccca

SEQ ID NO: 1849445 - DNA, 25 bp, Homo sapien
taagcacagtcaggtactccgtggg

SEQ ID NO: 1849446 - DNA, 25 bp, Homo sapien
ctcccaacagcccttcttgtgttct

SEQ ID NO: 1849447 - DNA, 25 bp, Homo sapien
tctaagagaaggaaatctttctctg

SEQ ID NO: 1849448 - DNA, 25 bp, Homo sapien
ctaagagaaggaaatctttctctgg

SEQ ID NO: 1849449 - DNA, 25 bp, Homo sapien
gagaaggaaatctttctctgggacc

SEQ ID NO: 1849450 - DNA, 25 bp, Homo sapien
cgagtgtgacttgacaccacgatgc

SEQ ID NO: 1849451 - DNA, 25 bp, Homo sapien
cacagcgagggcacatgaagatgaa

SEQ ID NO: 1849452 - DNA, 25 bp, Homo sapien
ctggaacacttccgggcacttggtg

SEQ ID NO: 1849453 - DNA, 25 bp, Homo sapien
acttccgggcacttggtgcacttga

SEQ ID NO: 1849454 - DNA, 25 bp, Homo sapien
tgagaagcccccaggcaggggtccc

SEQ ID NO: 1849455 - DNA, 25 bp, Homo sapien
ccgccccccgggcagccatggccac

SEQ ID NO: 1849456 - DNA, 25 bp, Homo sapien
cggctgccccccgcccccaggctgc

SEQ ID NO: 1849457 - DNA, 25 bp, Homo sapien
ctgagaagcccccaggcaggggtcc

SEQ ID NO: 1849458 - DNA, 25 bp, Homo sapien
gctgcttccaccaggcccgaggtgg

SEQ ID NO: 1849459 - DNA, 25 bp, Homo sapien
tccgacaggctatagcaggccttca

SEQ ID NO: 1849460 - DNA, 25 bp, Homo sapien
caggctatagcaggccttcaccaca

SEQ ID NO: 1849461 - DNA, 25 bp, Homo sapien
tgctgcttccaccaggcccgaggtg

SEQ ID NO: 1849462 - DNA, 25 bp, Homo sapien
ttgcggcctcgtggccgggcagctg

SEQ ID NO: 1849463 - DNA, 25 bp, Homo sapien
tggaagcgcaggacttccaccccag

SEQ ID NO: 1849464 - DNA, 25 bp, Homo sapien
ggagggacttggtggcgctgatgct

SEQ ID NO: 1849465 - DNA, 25 bp, Homo sapien
cagggggtttgagccggtgtgccac

SEQ ID NO: 1849466 - DNA, 25 bp, Homo sapien
aaggtctctggctctccgaagccaa

SEQ ID NO: 1849467 - DNA, 25 bp, Homo sapien
ggtctctggctctccgaagccaagg

SEQ ID NO: 1849468 - DNA, 25 bp, Homo sapien
aggtctctggctctccgaagccaag

SEQ ID NO: 1849469 - DNA, 25 bp, Homo sapien
gcagcgacccccacacacgggcagg

SEQ ID NO: 1849470 - DNA, 25 bp, Homo sapien
gcaggcgcggggatgcacgggacgc

SEQ ID NO: 1849471 - DNA, 25 bp, Homo sapien
ggctcgtgccgtgtgttccaggccc

SEQ ID NO: 1849472 - DNA, 25 bp, Homo sapien
ggcgggggcggctcgtgccgtgtgt

SEQ ID NO: 1849473 - DNA, 25 bp, Homo sapien
ccgcggccagtttgcgcgtgcgtgc

SEQ ID NO: 1849474 - DNA, 25 bp, Homo sapien
gccagtttgcgcgtgcgtgccaagt

SEQ ID NO: 1849475 - DNA, 25 bp, Homo sapien
gaggcccgctcactcgggcccgccc

SEQ ID NO: 1849476 - DNA, 25 bp, Homo sapien
tttgcgcgtgcgtgccaagtgccgc

SEQ ID NO: 1849477 - DNA, 25 bp, Homo sapien
tgagtagctaggattacggacgtct

SEQ ID NO: 1849478 - DNA, 25 bp, Homo sapien
gctaggattacggacgtctgccacc

SEQ ID NO: 1849479 - DNA, 25 bp, Homo sapien
tagctaggattacggacgtctgcca

SEQ ID NO: 1849480 - DNA, 25 bp, Homo sapien
taggattacggacgtctgccaccac

SEQ ID NO: 1849481 - DNA, 25 bp, Homo sapien
ggaatggcattcttttgcaactaaa

SEQ ID NO: 1849482 - DNA, 25 bp, Homo sapien
taaaaaagatccatgtttacaacac

SEQ ID NO: 1849483 - DNA, 25 bp, Homo sapien
aatgaatcatgaagggaatggttaa

SEQ ID NO: 1849484 - DNA, 25 bp, Homo sapien
aagttttagatagcagcataaaaac

SEQ ID NO: 1849485 - DNA, 25 bp, Homo sapien
ctggatgttgaggtctgcacctgtt

SEQ ID NO: 1849486 - DNA, 25 bp, Homo sapien
tgagtagcaagcatccacatattcg

SEQ ID NO: 1849487 - DNA, 25 bp, Homo sapien
tattcgtaagagtggagttgctgga

SEQ ID NO: 1849488 - DNA, 25 bp, Homo sapien
gctgtctgtctgtggaccacagtct

SEQ ID NO: 1849489 - DNA, 25 bp, Homo sapien
cagtggtctccacagaaaggtagtg

SEQ ID NO: 1849490 - DNA, 25 bp, Homo sapien
aaggctgaggtcttactttccagga

SEQ ID NO: 1849491 - DNA, 25 bp, Homo sapien
ttcatcatctagaacagtggtctcc

SEQ ID NO: 1849492 - DNA, 25 bp, Homo sapien
gagataacccacaggagtgaagcag

SEQ ID NO: 1849493 - DNA, 25 bp, Homo sapien
gggtcatcatgcccctcacagggtg

SEQ ID NO: 1849494 - DNA, 25 bp, Homo sapien
tcatcatgcccctcacagggtggag

SEQ ID NO: 1849495 - DNA, 25 bp, Homo sapien
cccctcacagggtggagtgaagaga

SEQ ID NO: 1849496 - DNA, 25 bp, Homo sapien
catgcccctcacagggtggagtgaa

SEQ ID NO: 1849497 - DNA, 25 bp, Homo sapien
tcttcaactcgccttcttttctgtg

SEQ ID NO: 1849498 - DNA, 25 bp, Homo sapien
tcttatatagataggagacccacta

SEQ ID NO: 1849499 - DNA, 25 bp, Homo sapien
tctgtgtcattacatgctgttctct

SEQ ID NO: 1849500 - DNA, 25 bp, Homo sapien
tccaaccttggcttgcggcagcata

SEQ ID NO: 1849501 - DNA, 25 bp, Homo sapien
gggaaatcctcagggctcctaccag

SEQ ID NO: 1849502 - DNA, 25 bp, Homo sapien
tgacttgactcatgcttgtttcact

SEQ ID NO: 1849503 - DNA, 25 bp, Homo sapien
agtaaatccgggtctctaggatgcc

SEQ ID NO: 1849504 - DNA, 25 bp, Homo sapien
tcctctctcctagctgagtaaatcc

SEQ ID NO: 1849505 - DNA, 25 bp, Homo sapien
ccttttcagtccaccatagcagttt

SEQ ID NO: 1849506 - DNA, 25 bp, Homo sapien
tgggcctttgctccccatagactcc

SEQ ID NO: 1849507 - DNA, 25 bp, Homo sapien
tctcctaacacgaggaaacaaatac

SEQ ID NO: 1849508 - DNA, 25 bp, Homo sapien
gcagttttctcctaacacgaggaaa

SEQ ID NO: 1849509 - DNA, 25 bp, Homo sapien
gagtctctgtggcatggtttgggaa

SEQ ID NO: 1849510 - DNA, 25 bp, Homo sapien
gattaccacaagcaaccatggcagg

SEQ ID NO: 1849511 - DNA, 25 bp, Homo sapien
cacaggaagggtaccgattaccaca

SEQ ID NO: 1849512 - DNA, 25 bp, Homo sapien
agcaaccatggcaggccaagatctc

SEQ ID NO: 1849513 - DNA, 25 bp, Homo sapien
agcgcccttcaaagggacacgagag

SEQ ID NO: 1849514 - DNA, 25 bp, Homo sapien
cactcaatcaaggtcagcgtaggta

SEQ ID NO: 1849515 - DNA, 25 bp, Homo sapien
tgtggatgacaaggaacactcaatc

SEQ ID NO: 1849516 - DNA, 25 bp, Homo sapien
tcaaagggacacgagagctgtatgg

SEQ ID NO: 1849517 - DNA, 25 bp, Homo sapien
gcactggccatgtcgttacactgag

SEQ ID NO: 1849518 - DNA, 25 bp, Homo sapien
ggcttaaccccaatcccaagtgctg

SEQ ID NO: 1849519 - DNA, 25 bp, Homo sapien
gatcaaacctgacagccgtttttaa

SEQ ID NO: 1849520 - DNA, 25 bp, Homo sapien
tgttccagatccttttggggcaagg

SEQ ID NO: 1849521 - DNA, 25 bp, Homo sapien
gggcatatgaggcacaaggaatcca

SEQ ID NO: 1849522 - DNA, 25 bp, Homo sapien
ccagcattggggcatatgaggcaca

SEQ ID NO: 1849523 - DNA, 25 bp, Homo sapien
cagtgttttactgagaccagcattg

SEQ ID NO: 1849524 - DNA, 25 bp, Homo sapien
taagcttccacctcagtgttttact

SEQ ID NO: 1849525 - DNA, 25 bp, Homo sapien
gtggcaacccttagggctgttctgg

SEQ ID NO: 1849526 - DNA, 25 bp, Homo sapien
ctcttgtcccggtggcaacccttag

SEQ ID NO: 1849527 - DNA, 25 bp, Homo sapien
cggtggcaacccttagggctgttct

SEQ ID NO: 1849528 - DNA, 25 bp, Homo sapien
gtagacgtcatcactgtagacaatc

SEQ ID NO: 1849529 - DNA, 25 bp, Homo sapien
tagcggcatccagcatgggctgttt

SEQ ID NO: 1849530 - DNA, 25 bp, Homo sapien
ttttcgggctatgttgactttgagc

SEQ ID NO: 1849531 - DNA, 25 bp, Homo sapien
gacagacttgccagtagcggcatcc

SEQ ID NO: 1849532 - DNA, 25 bp, Homo sapien
gactttgagctgtacagactccacc

SEQ ID NO: 1849533 - DNA, 25 bp, Homo sapien
catctagtattttgaggagaacaca

SEQ ID NO: 1849534 - DNA, 25 bp, Homo sapien
cagcagaagcgatgggaagaacaga

SEQ ID NO: 1849535 - DNA, 25 bp, Homo sapien
ccaaagaagttattccaggagttgc

SEQ ID NO: 1849536 - DNA, 25 bp, Homo sapien
caggagttgctatcctaggaggaga

SEQ ID NO: 1849537 - DNA, 25 bp, Homo sapien
ctcagcaacggcctgatctgctgac

SEQ ID NO: 1849538 - DNA, 25 bp, Homo sapien
tgctgactccatcttttcataggtg

SEQ ID NO: 1849539 - DNA, 25 bp, Homo sapien
cagcaacggcctgatctgctgactc

SEQ ID NO: 1849540 - DNA, 25 bp, Homo sapien
tctgctgactccatcttttcatagg

SEQ ID NO: 1849541 - DNA, 25 bp, Homo sapien
tcgccgttcagggaatgaatccgac

SEQ ID NO: 1849542 - DNA, 25 bp, Homo sapien
gaagggtgggtgtcatgtcttctcc

SEQ ID NO: 1849543 - DNA, 25 bp, Homo sapien
gggtgtcatgtcttctccatataca

SEQ ID NO: 1849544 - DNA, 25 bp, Homo sapien
tccatatacatagagagtattccct

SEQ ID NO: 1849545 - DNA, 25 bp, Homo sapien
ctcggtctcggtctcgatcccgctc

SEQ ID NO: 1849546 - DNA, 25 bp, Homo sapien
tcggtctcggtctcgatcccgctcc

SEQ ID NO: 1849547 - DNA, 25 bp, Homo sapien
ctcggtctcgatcccgctcccgatc

SEQ ID NO: 1849548 - DNA, 25 bp, Homo sapien
ggtctcggtctcgatcccgctcccg

SEQ ID NO: 1849549 - DNA, 25 bp, Homo sapien
tctgtctctgtctcgatcccggtct

SEQ ID NO: 1849550 - DNA, 25 bp, Homo sapien
atccctgtcccgctctctgtctctg

SEQ ID NO: 1849551 - DNA, 25 bp, Homo sapien
ctgtcccgttcccggtctcgatctc

SEQ ID NO: 1849552 - DNA, 25 bp, Homo sapien
tctcgatctcgatcccgatcccgat

SEQ ID NO: 1849553 - DNA, 25 bp, Homo sapien
gctgcggcttcggggaggggaggct

SEQ ID NO: 1849554 - DNA, 25 bp, Homo sapien
catagccccagtcaaagcttcgagg

SEQ ID NO: 1849555 - DNA, 25 bp, Homo sapien
tggtcctagttctcgaagtcgatca

SEQ ID NO: 1849556 - DNA, 25 bp, Homo sapien
ctcttctccatctggtcctagttct

SEQ ID NO: 1849557 - DNA, 25 bp, Homo sapien
cttcatagccccagtcaaagcttcg

SEQ ID NO: 1849558 - DNA, 25 bp, Homo sapien
accctgtggagactcaatattccct

SEQ ID NO: 1849559 - DNA, 25 bp, Homo sapien
caaacctcccaaggactcaggcaat

SEQ ID NO: 1849560 - DNA, 25 bp, Homo sapien
aatcaactccaccaaatgggcccag

SEQ ID NO: 1849561 - DNA, 25 bp, Homo sapien
cctctatagcccagctcctacagcc

SEQ ID NO: 1849562 - DNA, 25 bp, Homo sapien
acagagatttcctctggggacgtct

SEQ ID NO: 1849563 - DNA, 25 bp, Homo sapien
ctctcatacagagatttcctctggg

SEQ ID NO: 1849564 - DNA, 25 bp, Homo sapien
gagatttcctctggggacgtctgga

SEQ ID NO: 1849565 - DNA, 25 bp, Homo sapien
atttcctctggggacgtctggatga

SEQ ID NO: 1849566 - DNA, 25 bp, Homo sapien
gcagatatgctcctctggaacggct

SEQ ID NO: 1849567 - DNA, 25 bp, Homo sapien
tgctcctctggaacggctggaaagt

SEQ ID NO: 1849568 - DNA, 25 bp, Homo sapien
tatgctcctctggaacggctggaaa

SEQ ID NO: 1849569 - DNA, 25 bp, Homo sapien
gatatgctcctctggaacggctgga

SEQ ID NO: 1849570 - DNA, 25 bp, Homo sapien
tcaagggttcgagaacgcttgaagc

SEQ ID NO: 1849571 - DNA, 25 bp, Homo sapien
gttcttggtctcagccttgatggca

SEQ ID NO: 1849572 - DNA, 25 bp, Homo sapien
tggtctcagccttgatggcactgat

SEQ ID NO: 1849573 - DNA, 25 bp, Homo sapien
cccctcaagggttcgagaacgcttg

SEQ ID NO: 1849574 - DNA, 25 bp, Homo sapien
gacaccaccttggctggttgtgctg

SEQ ID NO: 1849575 - DNA, 25 bp, Homo sapien
caccaccttggctggttgtgctgct

SEQ ID NO: 1849576 - DNA, 25 bp, Homo sapien
acaccaccttggctggttgtgctgc

SEQ ID NO: 1849577 - DNA, 25 bp, Homo sapien
taatgcattgttcctaccctcaaga

SEQ ID NO: 1849578 - DNA, 25 bp, Homo sapien
ctatttcctgcatattgaatgaggc

SEQ ID NO: 1849579 - DNA, 25 bp, Homo sapien
tcgtaacagggatatccaggaggct

SEQ ID NO: 1849580 - DNA, 25 bp, Homo sapien
gaatgaggcccagccatgacttcgt

SEQ ID NO: 1849581 - DNA, 25 bp, Homo sapien
tcttcctcgctcagtccggggggta

SEQ ID NO: 1849582 - DNA, 25 bp, Homo sapien
tcagtccggggggtatcaccaacat

SEQ ID NO: 1849583 - DNA, 25 bp, Homo sapien
cctcttcctcgctcagtccgggggg

SEQ ID NO: 1849584 - DNA, 25 bp, Homo sapien
ttcctcgctcagtccggggggtatc

SEQ ID NO: 1849585 - DNA, 25 bp, Homo sapien
taccatgtggttcaaggagggacaa

SEQ ID NO: 1849586 - DNA, 25 bp, Homo sapien
cccgcagagcaacgcaaagaggaag

SEQ ID NO: 1849587 - DNA, 25 bp, Homo sapien
tccgtcggaaagacgatggcacccg

SEQ ID NO: 1849588 - DNA, 25 bp, Homo sapien
agggacaaatatccactccgtcgga

SEQ ID NO: 1849589 - DNA, 25 bp, Homo sapien
gatagcgggctcacaacgatgacgt

SEQ ID NO: 1849590 - DNA, 25 bp, Homo sapien
cacaacgatgacgtagcgaggagcg

SEQ ID NO: 1849591 - DNA, 25 bp, Homo sapien
gctggccgctgatagcgggctcaca

SEQ ID NO: 1849592 - DNA, 25 bp, Homo sapien
tagcgaggagcggaaaacgcggtaa

SEQ ID NO: 1849593 - DNA, 25 bp, Homo sapien
tgtggccacaggaacatggacaaat

SEQ ID NO: 1849594 - DNA, 25 bp, Homo sapien
taccagggtgcccttcactgggaga

SEQ ID NO: 1849595 - DNA, 25 bp, Homo sapien
gcacccatagagtgttctgcagcag

SEQ ID NO: 1849596 - DNA, 25 bp, Homo sapien
caccctggtctgtgagagaacatgt

SEQ ID NO: 1849597 - DNA, 25 bp, Homo sapien
gggatgactcagctaagaagacagc

SEQ ID NO: 1849598 - DNA, 25 bp, Homo sapien
cagggatgactcagctaagaagaca

SEQ ID NO: 1849599 - DNA, 25 bp, Homo sapien
gatgactcagctaagaagacagcga

SEQ ID NO: 1849600 - DNA, 25 bp, Homo sapien
gactcagctaagaagacagcgagag

SEQ ID NO: 1849601 - DNA, 25 bp, Homo sapien
atgactgcctccctctaaagcatta

SEQ ID NO: 1849602 - DNA, 25 bp, Homo sapien
ggtcctgagtcatagcttccacata

SEQ ID NO: 1849603 - DNA, 25 bp, Homo sapien
tgatgggaggtcctgagtcatagct

SEQ ID NO: 1849604 - DNA, 25 bp, Homo sapien
tgggaggtcctgagtcatagcttcc

SEQ ID NO: 1849605 - DNA, 25 bp, Homo sapien
gaggtcctgagtcatagcttccaca

SEQ ID NO: 1849606 - DNA, 25 bp, Homo sapien
ttggtgtacagacacggtgactggg

SEQ ID NO: 1849607 - DNA, 25 bp, Homo sapien
caggaaggcgtaaggtgcatcttgg

SEQ ID NO: 1849608 - DNA, 25 bp, Homo sapien
acagacacggtgactgggccgccag

SEQ ID NO: 1849609 - DNA, 25 bp, Homo sapien
gggcaggaaggcgtaaggtgcatct

SEQ ID NO: 1849610 - DNA, 25 bp, Homo sapien
cagatggaggcatcagttgagggcc

SEQ ID NO: 1849611 - DNA, 25 bp, Homo sapien
agatggaggcatcagttgagggcca

SEQ ID NO: 1849612 - DNA, 25 bp, Homo sapien
atggaggcatcagttgagggccaga

SEQ ID NO: 1849613 - DNA, 25 bp, Homo sapien
gatggaggcatcagttgagggccag

SEQ ID NO: 1849614 - DNA, 25 bp, Homo sapien
gggtcatcctggacaaccgtgctct

SEQ ID NO: 1849615 - DNA, 25 bp, Homo sapien
tcctggacaaccgtgctctgggcaa

SEQ ID NO: 1849616 - DNA, 25 bp, Homo sapien
aggcggcacagaagttcatgcacac

SEQ ID NO: 1849617 - DNA, 25 bp, Homo sapien
acagagggattccagccgtcacggt

SEQ ID NO: 1849618 - DNA, 25 bp, Homo sapien
acgggtgggagctgcaacatcgttc

SEQ ID NO: 1849619 - DNA, 25 bp, Homo sapien
ggctgttgccctggatgctagacct

SEQ ID NO: 1849620 - DNA, 25 bp, Homo sapien
atacgggtgggagctgcaacatcgt

SEQ ID NO: 1849621 - DNA, 25 bp, Homo sapien
cctggatgctagacctgtggtcttg

SEQ ID NO: 1849622 - DNA, 25 bp, Homo sapien
caaacatcttcatggtaggaaaggt

SEQ ID NO: 1849623 - DNA, 25 bp, Homo sapien
cttgagggaagagacaaaaccgtct

SEQ ID NO: 1849624 - DNA, 25 bp, Homo sapien
ccgtctgggttacggaagccagcaa

SEQ ID NO: 1849625 - DNA, 25 bp, Homo sapien
agcaacaacattcgggacccctggg

SEQ ID NO: 1849626 - DNA, 25 bp, Homo sapien
aatgactgagcccaccatttcagga

SEQ ID NO: 1849627 - DNA, 25 bp, Homo sapien
acaggaaaagcaagggatcagtggg

SEQ ID NO: 1849628 - DNA, 25 bp, Homo sapien
tttcccagccttcaagcctaagctc

SEQ ID NO: 1849629 - DNA, 25 bp, Homo sapien
ttcaagcctaagctctcgccctgcc

SEQ ID NO: 1849630 - DNA, 25 bp, Homo sapien
ggatcagtgggacccctcgtgcacc

SEQ ID NO: 1849631 - DNA, 25 bp, Homo sapien
ctccacatagcaggttgggggctgt

SEQ ID NO: 1849632 - DNA, 25 bp, Homo sapien
agggctgtgcatctccttggaggtc

SEQ ID NO: 1849633 - DNA, 25 bp, Homo sapien
ctgtagaaactcctccattggccag

SEQ ID NO: 1849634 - DNA, 25 bp, Homo sapien
gaaactcctccattggccagggctg

SEQ ID NO: 1849635 - DNA, 25 bp, Homo sapien
gagcagagggtggcttcccaggcgg

SEQ ID NO: 1849636 - DNA, 25 bp, Homo sapien
tcccctgagaagagcagagggtggc

SEQ ID NO: 1849637 - DNA, 25 bp, Homo sapien
gaagagcagagggtggcttcccagg

SEQ ID NO: 1849638 - DNA, 25 bp, Homo sapien
ctcccctgagaagagcagagggtgg

SEQ ID NO: 1849639 - DNA, 25 bp, Homo sapien
cacgttggtgttaacctccccagag

SEQ ID NO: 1849640 - DNA, 25 bp, Homo sapien
agaagcagcagcaggcgtggcgggc

SEQ ID NO: 1849641 - DNA, 25 bp, Homo sapien
ctgcacaaggagagaagcagcagca

SEQ ID NO: 1849642 - DNA, 25 bp, Homo sapien
aagcagcagcaggcgtggcgggctc

SEQ ID NO: 1849643 - DNA, 25 bp, Homo sapien
agagaagcagcagcaggcgtggcgg

SEQ ID NO: 1849644 - DNA, 25 bp, Homo sapien
gaagggggctatgaagcaggggcaa

SEQ ID NO: 1849645 - DNA, 25 bp, Homo sapien
ggaagggggctatgaagcaggggca

SEQ ID NO: 1849646 - DNA, 25 bp, Homo sapien
ggtgtctccacttcactcaggtata

SEQ ID NO: 1849647 - DNA, 25 bp, Homo sapien
ccatgtacataagctcccggaggag

SEQ ID NO: 1849648 - DNA, 25 bp, Homo sapien
cgtcagcagttttgtcaggtgcccc

SEQ ID NO: 1849649 - DNA, 25 bp, Homo sapien
tcctgccgctcatacggtgtcgtca

SEQ ID NO: 1849650 - DNA, 25 bp, Homo sapien
ggagttacaggctgaaggtctgaca

SEQ ID NO: 1849651 - DNA, 25 bp, Homo sapien
ggtacgggtctccagatatactgcc

SEQ ID NO: 1849652 - DNA, 25 bp, Homo sapien
tagtgagatgctcccctcgaagaat

SEQ ID NO: 1849653 - DNA, 25 bp, Homo sapien
ggactgattctcaccccggctttgg

SEQ ID NO: 1849654 - DNA, 25 bp, Homo sapien
gcagggctcgggcatctccatggta

SEQ ID NO: 1849655 - DNA, 25 bp, Homo sapien
tcgatccgggtatccgtctctgagg

SEQ ID NO: 1849656 - DNA, 25 bp, Homo sapien
tactggcgttgagcatccagggaga

SEQ ID NO: 1849657 - DNA, 25 bp, Homo sapien
gacgaggtagtttgttccgaggctc

SEQ ID NO: 1849658 - DNA, 25 bp, Homo sapien
ctaagacaagcaggggtacagagtt

SEQ ID NO: 1849659 - DNA, 25 bp, Homo sapien
cagagtttccattctacagaggagg

SEQ ID NO: 1849660 - DNA, 25 bp, Homo sapien
gtacagagtttccattctacagagg

SEQ ID NO: 1849661 - DNA, 25 bp, Homo sapien
agagtttccattctacagaggaggc

SEQ ID NO: 1849662 - DNA, 25 bp, Homo sapien
gagaaggatgactggtttaggacta

SEQ ID NO: 1849663 - DNA, 25 bp, Homo sapien
aggacgtctgcgctcagatcaagaa

SEQ ID NO: 1849664 - DNA, 25 bp, Homo sapien
ttaggactaagcgagccacctgatc

SEQ ID NO: 1849665 - DNA, 25 bp, Homo sapien
caaatgcagtgaggttaggaaggac

SEQ ID NO: 1849666 - DNA, 25 bp, Homo sapien
tgatgctggtatgtgcgtcgccacc

SEQ ID NO: 1849667 - DNA, 25 bp, Homo sapien
gccagaggccgaaggatgcaaaagt

SEQ ID NO: 1849668 - DNA, 25 bp, Homo sapien
tgcaatcattcagcgacagtggcgg

SEQ ID NO: 1849669 - DNA, 25 bp, Homo sapien
ttcacgaaggaggttgacaccaacg

SEQ ID NO: 1849670 - DNA, 25 bp, Homo sapien
gggacgacaagttgacgctcctttc

SEQ ID NO: 1849671 - DNA, 25 bp, Homo sapien
ctgagggacgacaagttgacgctcc

SEQ ID NO: 1849672 - DNA, 25 bp, Homo sapien
gagggacgacaagttgacgctcctt

SEQ ID NO: 1849673 - DNA, 25 bp, Homo sapien
tgagggacgacaagttgacgctcct

SEQ ID NO: 1849674 - DNA, 25 bp, Homo sapien
ggcatggttcgaacatacagcgctg

SEQ ID NO: 1849675 - DNA, 25 bp, Homo sapien
cgcaggtagtacagggcatttcaaa

SEQ ID NO: 1849676 - DNA, 25 bp, Homo sapien
cattaggcctttcaggcgagggcac

SEQ ID NO: 1849677 - DNA, 25 bp, Homo sapien
agctgttcccgcgaggcctgtttga

SEQ ID NO: 1849678 - DNA, 25 bp, Homo sapien
ggctgacacatctgggttgaacaca

SEQ ID NO: 1849679 - DNA, 25 bp, Homo sapien
aaagtaccggatttacaggccagag

SEQ ID NO: 1849680 - DNA, 25 bp, Homo sapien
tgtacgactactacaaccccggtga

SEQ ID NO: 1849681 - DNA, 25 bp, Homo sapien
gagccaacaagattcccggataggg

SEQ ID NO: 1849682 - DNA, 25 bp, Homo sapien
tgggaaccatgaagctggaagcact

SEQ ID NO: 1849683 - DNA, 25 bp, Homo sapien
tggaagcactgctgtgtccgctttc

SEQ ID NO: 1849684 - DNA, 25 bp, Homo sapien
tcctccaggagtatggcactcaggg

SEQ ID NO: 1849685 - DNA, 25 bp, Homo sapien
agcctgggaccagggcatattaaag

SEQ ID NO: 1849686 - DNA, 25 bp, Homo sapien
gagttgtgcaatcctcaggtccggc

SEQ ID NO: 1849687 - DNA, 25 bp, Homo sapien
tccagtcattcgacagaaattcggg

SEQ ID NO: 1849688 - DNA, 25 bp, Homo sapien
gatgactccgcgtctgtccaaagaa

SEQ ID NO: 1849689 - DNA, 25 bp, Homo sapien
tcagtttccgtagaggtcatgacag

SEQ ID NO: 1849690 - DNA, 25 bp, Homo sapien
accagtggggtcccctcctctgctt

SEQ ID NO: 1849691 - DNA, 25 bp, Homo sapien
agaccagtggggtcccctcctctgc

SEQ ID NO: 1849692 - DNA, 25 bp, Homo sapien
agtggggtcccctcctctgcttctt

SEQ ID NO: 1849693 - DNA, 25 bp, Homo sapien
cagtggggtcccctcctctgcttct

SEQ ID NO: 1849694 - DNA, 25 bp, Homo sapien
agaaggcttcctccagcggctgggt

SEQ ID NO: 1849695 - DNA, 25 bp, Homo sapien
cacagtgctgcgagatcgctggcag

SEQ ID NO: 1849696 - DNA, 25 bp, Homo sapien
tcctttattgctcctgtacgaaccc

SEQ ID NO: 1849697 - DNA, 25 bp, Homo sapien
ctcagtgctcggcagtcatactggg

SEQ ID NO: 1849698 - DNA, 25 bp, Homo sapien
cgctggggagcgaaagtttcttggt

SEQ ID NO: 1849699 - DNA, 25 bp, Homo sapien
ccgctggggagcgaaagtttcttgg

SEQ ID NO: 1849700 - DNA, 25 bp, Homo sapien
cccgctggggagcgaaagtttcttg

SEQ ID NO: 1849701 - DNA, 25 bp, Homo sapien
ttcatttccgtgaagggcaccgaga

SEQ ID NO: 1849702 - DNA, 25 bp, Homo sapien
gggctgaaacctaggcaggccgagc

SEQ ID NO: 1849703 - DNA, 25 bp, Homo sapien
cactgtggggctgaaacctaggcag

SEQ ID NO: 1849704 - DNA, 25 bp, Homo sapien
tacactgtggggctgaaacctaggc

SEQ ID NO: 1849705 - DNA, 25 bp, Homo sapien
gaaacctaggcaggccgagccccag

SEQ ID NO: 1849706 - DNA, 25 bp, Homo sapien
tagtggcagttcctgtaccaccagg

SEQ ID NO: 1849707 - DNA, 25 bp, Homo sapien
gatggtccactgtgctcccgtagag

SEQ ID NO: 1849708 - DNA, 25 bp, Homo sapien
cccctcggtaggagacagcgcagga

SEQ ID NO: 1849709 - DNA, 25 bp, Homo sapien
tcccgatcacgggcagagaagacac

SEQ ID NO: 1849710 - DNA, 25 bp, Homo sapien
caagtggaggcggtagtactccgca

SEQ ID NO: 1849711 - DNA, 25 bp, Homo sapien
caggtccacgcgcatggagtagtca

SEQ ID NO: 1849712 - DNA, 25 bp, Homo sapien
gaaggagtcgtactgggcgaacaca

SEQ ID NO: 1849713 - DNA, 25 bp, Homo sapien
cagccgagtctacgtggaaggagtc

SEQ ID NO: 1849714 - DNA, 25 bp, Homo sapien
tgtctgtccatccatgcggcgctgg

SEQ ID NO: 1849715 - DNA, 25 bp, Homo sapien
gtccatccatgcggcgctggaacac

SEQ ID NO: 1849716 - DNA, 25 bp, Homo sapien
ctgtccatccatgcggcgctggaac

SEQ ID NO: 1849717 - DNA, 25 bp, Homo sapien
tctgtccatccatgcggcgctggaa

SEQ ID NO: 1849718 - DNA, 25 bp, Homo sapien
ccctgggcttcccaatgccacccac

SEQ ID NO: 1849719 - DNA, 25 bp, Homo sapien
ccatcagtctccatgtcgcaaaaca

SEQ ID NO: 1849720 - DNA, 25 bp, Homo sapien
tggaggcaccggctccgttctgcat

SEQ ID NO: 1849721 - DNA, 25 bp, Homo sapien
cgttctgcatctcctccccgcagtc

SEQ ID NO: 1849722 - DNA, 25 bp, Homo sapien
tccatgtcgcaaaacacgttcaggg

SEQ ID NO: 1849723 - DNA, 25 bp, Homo sapien
aggagctggtgagatgtgatccctc

SEQ ID NO: 1849724 - DNA, 25 bp, Homo sapien
gtgaaagaggtggacacgggcggca

SEQ ID NO: 1849725 - DNA, 25 bp, Homo sapien
ccgtgcattgtaggaggtggaggga

SEQ ID NO: 1849726 - DNA, 25 bp, Homo sapien
ccacatggcctggagccgtgcattg

SEQ ID NO: 1849727 - DNA, 25 bp, Homo sapien
ctcagtccaagtgagcagggcggtg

SEQ ID NO: 1849728 - DNA, 25 bp, Homo sapien
tcagtccaagtgagcagggcggtgc

SEQ ID NO: 1849729 - DNA, 25 bp, Homo sapien
cagtccaagtgagcagggcggtgcg

SEQ ID NO: 1849730 - DNA, 25 bp, Homo sapien
tggcctccaagtcccgaggggcctc

SEQ ID NO: 1849731 - DNA, 25 bp, Homo sapien
cagggggtagtccaccgcgctgcct

SEQ ID NO: 1849732 - DNA, 25 bp, Homo sapien
aaggtcatgcagggggtagtccacc

SEQ ID NO: 1849733 - DNA, 25 bp, Homo sapien
gccacgcactgtggcggtgtagttg

SEQ ID NO: 1849734 - DNA, 25 bp, Homo sapien
gcgctgcctggggtctccgcctgca

SEQ ID NO: 1849735 - DNA, 25 bp, Homo sapien
gacgtcataggtgtccacaggattc

SEQ ID NO: 1849736 - DNA, 25 bp, Homo sapien
cacgcaactgtgtgggaccgtcagg

SEQ ID NO: 1849737 - DNA, 25 bp, Homo sapien
gggcttccagtgcagcacggcgaat

SEQ ID NO: 1849738 - DNA, 25 bp, Homo sapien
cctcggtcaagttcagtgcacgcaa

SEQ ID NO: 1849739 - DNA, 25 bp, Homo sapien
aagcctcggaccgagaccacggtca

SEQ ID NO: 1849740 - DNA, 25 bp, Homo sapien
catccacctgcacactctgaggctc

SEQ ID NO: 1849741 - DNA, 25 bp, Homo sapien
agtttctgggtccgggcctggccat

SEQ ID NO: 1849742 - DNA, 25 bp, Homo sapien
tagcgagcgcctgggatcagcccct

SEQ ID NO: 1849743 - DNA, 25 bp, Homo sapien
agaggaaatgcgaggcgatgagcac

SEQ ID NO: 1849744 - DNA, 25 bp, Homo sapien
cgatgagcacatggcaaaggcacca

SEQ ID NO: 1849745 - DNA, 25 bp, Homo sapien
tgcgaggcgatgagcacatggcaaa

SEQ ID NO: 1849746 - DNA, 25 bp, Homo sapien
acattggggatcgagggttacccag

SEQ ID NO: 1849747 - DNA, 25 bp, Homo sapien
taggagactttgaagctgtccgccc

SEQ ID NO: 1849748 - DNA, 25 bp, Homo sapien
tccgtccgccagctggtaggagact

SEQ ID NO: 1849749 - DNA, 25 bp, Homo sapien
tttcactgaattggaggtcacgggg

SEQ ID NO: 1849750 - DNA, 25 bp, Homo sapien
ctttgaagctgtccgcccgggatgg

SEQ ID NO: 1849751 - DNA, 25 bp, Homo sapien
atggaaccccaaagcggagcaggaa

SEQ ID NO: 1849752 - DNA, 25 bp, Homo sapien
cagtgaactggtggtcacgtcagtc

SEQ ID NO: 1849753 - DNA, 25 bp, Homo sapien
tcctcgcagcccatacagtgtcagg

SEQ ID NO: 1849754 - DNA, 25 bp, Homo sapien
gctgtacagagtcccggaacgcagg

SEQ ID NO: 1849755 - DNA, 25 bp, Homo sapien
ctgaggtctgaccagcaggagccag

SEQ ID NO: 1849756 - DNA, 25 bp, Homo sapien
tgaggtctgaccagcaggagccagc

SEQ ID NO: 1849757 - DNA, 25 bp, Homo sapien
gaggtctgaccagcaggagccagcc

SEQ ID NO: 1849758 - DNA, 25 bp, Homo sapien
ggctgcccgttcgtgtcctcatact

SEQ ID NO: 1849759 - DNA, 25 bp, Homo sapien
tcgccgtccacgagcaaggcctggg

SEQ ID NO: 1849760 - DNA, 25 bp, Homo sapien
aggatcttgctctggtcgccgtcca

SEQ ID NO: 1849761 - DNA, 25 bp, Homo sapien
tactggaccacgaaggaatcaaagg

SEQ ID NO: 1849762 - DNA, 25 bp, Homo sapien
ttgtgtcggtcacggtcagcactcc

SEQ ID NO: 1849763 - DNA, 25 bp, Homo sapien
gtgtcggtcacggtcagcactccta

SEQ ID NO: 1849764 - DNA, 25 bp, Homo sapien
tcagcactcctaggcggggctcttc

SEQ ID NO: 1849765 - DNA, 25 bp, Homo sapien
gggttgtgtcggtcacggtcagcac

SEQ ID NO: 1849766 - DNA, 25 bp, Homo sapien
gcctctggggctaactctggggctg

SEQ ID NO: 1849767 - DNA, 25 bp, Homo sapien
ctggggctggtgtgtcctcttctgg

SEQ ID NO: 1849768 - DNA, 25 bp, Homo sapien
ctcaggggcctctggggctaactct

SEQ ID NO: 1849769 - DNA, 25 bp, Homo sapien
tctggggctggtgtgtcctcttctg

SEQ ID NO: 1849770 - DNA, 25 bp, Homo sapien
gtttgccgctatctggacaaggcca

SEQ ID NO: 1849771 - DNA, 25 bp, Homo sapien
gaagtttataggtccaggcccagtc

SEQ ID NO: 1849772 - DNA, 25 bp, Homo sapien
cagccccagcgagtaatgaggagca

SEQ ID NO: 1849773 - DNA, 25 bp, Homo sapien
gaaaatgctcctgactcatccacgg

SEQ ID NO: 1849774 - DNA, 25 bp, Homo sapien
tagagcagaaacttgtatttcttgc

SEQ ID NO: 1849775 - DNA, 25 bp, Homo sapien
cgtagagcagaaacttgtatttctt

SEQ ID NO: 1849776 - DNA, 25 bp, Homo sapien
cccgtagagcagaaacttgtatttc

SEQ ID NO: 1849777 - DNA, 25 bp, Homo sapien
gcccgtagagcagaaacttgtattt

SEQ ID NO: 1849778 - DNA, 25 bp, Homo sapien
gctggtctgcggccacaggcactgc

SEQ ID NO: 1849779 - DNA, 25 bp, Homo sapien
aggtctcctcagccacggtcagttc

SEQ ID NO: 1849780 - DNA, 25 bp, Homo sapien
tgggctaccgtccaggacaggcgca

SEQ ID NO: 1849781 - DNA, 25 bp, Homo sapien
tgggctgcccgtccgtgtccctgta

SEQ ID NO: 1849782 - DNA, 25 bp, Homo sapien
gcctttgcctaagccctggcagcct

SEQ ID NO: 1849783 - DNA, 25 bp, Homo sapien
ggcagcctcccggaggtgtgaggtt

SEQ ID NO: 1849784 - DNA, 25 bp, Homo sapien
tagtcacatgctgcctttgcctaag

SEQ ID NO: 1849785 - DNA, 25 bp, Homo sapien
ctcttagtcacatgctgcctttgcc

SEQ ID NO: 1849786 - DNA, 25 bp, Homo sapien
aaatggtccctccagtgtagcccca

SEQ ID NO: 1849787 - DNA, 25 bp, Homo sapien
ggaaatggtccctccagtgtagccc

SEQ ID NO: 1849788 - DNA, 25 bp, Homo sapien
gggaaatggtccctccagtgtagcc

SEQ ID NO: 1849789 - DNA, 25 bp, Homo sapien
ctgggaaatggtccctccagtgtag

SEQ ID NO: 1849790 - DNA, 25 bp, Homo sapien
aaggtggaggctggactgggactca

SEQ ID NO: 1849791 - DNA, 25 bp, Homo sapien
tctgagggctcggatgagaggcagc

SEQ ID NO: 1849792 - DNA, 25 bp, Homo sapien
gggccagctctgagggctcggatga

SEQ ID NO: 1849793 - DNA, 25 bp, Homo sapien
ggcagctctggaaaaggtggaggct

SEQ ID NO: 1849794 - DNA, 25 bp, Homo sapien
agagcaggaacctgtatttcctact

SEQ ID NO: 1849795 - DNA, 25 bp, Homo sapien
cctgtatttcctactgggctccagg

SEQ ID NO: 1849796 - DNA, 25 bp, Homo sapien
gggcccagtcgtttcctgcctgaca

SEQ ID NO: 1849797 - DNA, 25 bp, Homo sapien
gagatggggcccagtcgtttcctgc

SEQ ID NO: 1849798 - DNA, 25 bp, Homo sapien
agaggcccacggagtcaggggtcgc

SEQ ID NO: 1849799 - DNA, 25 bp, Homo sapien
gaattcgccctcagggaccgtccac

SEQ ID NO: 1849800 - DNA, 25 bp, Homo sapien
gaccacgaaggagtcgaattcgccc

SEQ ID NO: 1849801 - DNA, 25 bp, Homo sapien
tcgccctcagggaccgtccacgaga

SEQ ID NO: 1849802 - DNA, 25 bp, Homo sapien
gtcagctcccccaggcggggagacg

SEQ ID NO: 1849803 - DNA, 25 bp, Homo sapien
agtcagctcccccaggcggggagac

SEQ ID NO: 1849804 - DNA, 25 bp, Homo sapien
ggcgtttcccattctggagtccaaa

SEQ ID NO: 1849805 - DNA, 25 bp, Homo sapien
tgcgcgtccctgtactgtaccagga

SEQ ID NO: 1849806 - DNA, 25 bp, Homo sapien
ggaggtctccgctcacaggcactgc

SEQ ID NO: 1849807 - DNA, 25 bp, Homo sapien
gagaggcccactgagtccgaggtca

SEQ ID NO: 1849808 - DNA, 25 bp, Homo sapien
agcagagcaggcccatgggtcagga

SEQ ID NO: 1849809 - DNA, 25 bp, Homo sapien
gagcaggcccatgggtcaggaggca

SEQ ID NO: 1849810 - DNA, 25 bp, Homo sapien
cagagcaggcccatgggtcaggagg

SEQ ID NO: 1849811 - DNA, 25 bp, Homo sapien
ctgaaaagagcagagcaggcccatg

SEQ ID NO: 1849812 - DNA, 25 bp, Homo sapien
ccgtgatgcccacggtggacactgg

SEQ ID NO: 1849813 - DNA, 25 bp, Homo sapien
tgtccttgtactgcacggtgaagga

SEQ ID NO: 1849814 - DNA, 25 bp, Homo sapien
tactgcacggtgaaggagtcgaagc

SEQ ID NO: 1849815 - DNA, 25 bp, Homo sapien
tccctgtccttgtactgcacggtga

SEQ ID NO: 1849816 - DNA, 25 bp, Homo sapien
ccttgtactgcacggtgaaggagtc

SEQ ID NO: 1849817 - DNA, 25 bp, Homo sapien
gaagtggtcaaactggccctcggga

SEQ ID NO: 1849818 - DNA, 25 bp, Homo sapien
actggaccaggaagtggtcaaactg

SEQ ID NO: 1849819 - DNA, 25 bp, Homo sapien
atccccattcctgtactggaccagg

SEQ ID NO: 1849820 - DNA, 25 bp, Homo sapien
ctgagatggtgaccccgtcctcgtg

SEQ ID NO: 1849821 - DNA, 25 bp, Homo sapien
gacagacacgtgtggggacagtgag

SEQ ID NO: 1849822 - DNA, 25 bp, Homo sapien
tggacagacacgtgtggggacagtg

SEQ ID NO: 1849823 - DNA, 25 bp, Homo sapien
ggacagacacgtgtggggacagtga

SEQ ID NO: 1849824 - DNA, 25 bp, Homo sapien
tccctgtccttgtactgcacagtga

SEQ ID NO: 1849825 - DNA, 25 bp, Homo sapien
ccctgtccttgtactgcacagtgaa

SEQ ID NO: 1849826 - DNA, 25 bp, Homo sapien
atccccattcctgtactggaccagg

SEQ ID NO: 1849827 - DNA, 25 bp, Homo sapien
tcatcttgtacttgtggtctggctc

SEQ ID NO: 1849828 - DNA, 25 bp, Homo sapien
caggaagtggtcaaactggccctcg

SEQ ID NO: 1849829 - DNA, 25 bp, Homo sapien
ctgagatggtgaccccgtcctcgtg

SEQ ID NO: 1849830 - DNA, 25 bp, Homo sapien
ctgcttgggtggtctctgcttcatc

SEQ ID NO: 1849831 - DNA, 25 bp, Homo sapien
gcttgggtggtctctgcttcatcct

SEQ ID NO: 1849832 - DNA, 25 bp, Homo sapien
tgcttgggtggtctctgcttcatcc

SEQ ID NO: 1849833 - DNA, 25 bp, Homo sapien
tgcatcttgtatttgcgcccgggct

SEQ ID NO: 1849834 - DNA, 25 bp, Homo sapien
cgtggaggccgtacaggtgcatctt

SEQ ID NO: 1849835 - DNA, 25 bp, Homo sapien
tgtactgcacggtgaaggagtcgaa

SEQ ID NO: 1849836 - DNA, 25 bp, Homo sapien
tccctgtccttgtactgcacggtga

SEQ ID NO: 1849837 - DNA, 25 bp, Homo sapien
ctcctcagggggctcccgggcctca

SEQ ID NO: 1849838 - DNA, 25 bp, Homo sapien
cctcagggggctcccgggcctcagt

SEQ ID NO: 1849839 - DNA, 25 bp, Homo sapien
ctcagggggctcccgggcctcagtg

SEQ ID NO: 1849840 - DNA, 25 bp, Homo sapien
tcctcagggggctcccgggcctcag

SEQ ID NO: 1849841 - DNA, 25 bp, Homo sapien
ctgagttccgtggggctgggggtct

SEQ ID NO: 1849842 - DNA, 25 bp, Homo sapien
tgagttccgtggggctgggggtctc

SEQ ID NO: 1849843 - DNA, 25 bp, Homo sapien
cctggggctgccatcatccactcac

SEQ ID NO: 1849844 - DNA, 25 bp, Homo sapien
caggaagtggtcaaactggccctcg

SEQ ID NO: 1849845 - DNA, 25 bp, Homo sapien
ctcgggaaccgtccaggacaggctg

SEQ ID NO: 1849846 - DNA, 25 bp, Homo sapien
ctgagatggtgaccccgtcctcgtg

SEQ ID NO: 1849847 - DNA, 25 bp, Homo sapien
atccccattcctgtactggaccagg

SEQ ID NO: 1849848 - DNA, 25 bp, Homo sapien
cgtggaggccgtacaggtgcatctt

SEQ ID NO: 1849849 - DNA, 25 bp, Homo sapien
gcccctcgtggaggccgtacaggtg

SEQ ID NO: 1849850 - DNA, 25 bp, Homo sapien
ccttgtactgcacggtgaaggagtc

SEQ ID NO: 1849851 - DNA, 25 bp, Homo sapien
tccctgtccttgtactgcacggtga

SEQ ID NO: 1849852 - DNA, 25 bp, Homo sapien
tccctgtccttgtactgcacggtga

SEQ ID NO: 1849853 - DNA, 25 bp, Homo sapien
tactgcacggtgaaggagtcgaagc

SEQ ID NO: 1849854 - DNA, 25 bp, Homo sapien
tgtccttgtactgcacggtgaagga

SEQ ID NO: 1849855 - DNA, 25 bp, Homo sapien
ccttgtactgcacggtgaaggagtc

SEQ ID NO: 1849856 - DNA, 25 bp, Homo sapien
ctgtcactgttagctcccccaggag

SEQ ID NO: 1849857 - DNA, 25 bp, Homo sapien
actgttagctcccccaggagcggct

SEQ ID NO: 1849858 - DNA, 25 bp, Homo sapien
cctggcacccgtgttgccttgggct

SEQ ID NO: 1849859 - DNA, 25 bp, Homo sapien
tgtcctcatgtcctggcacccgtgt

SEQ ID NO: 1849860 - DNA, 25 bp, Homo sapien
ctgtcaccccgatggcagacacggg

SEQ ID NO: 1849861 - DNA, 25 bp, Homo sapien
tcatgtcctggcacccgtgttgcct

SEQ ID NO: 1849862 - DNA, 25 bp, Homo sapien
gttcaggggtgggaggttctgtcga

SEQ ID NO: 1849863 - DNA, 25 bp, Homo sapien
tcagctcctccaggcgaggcttgat

SEQ ID NO: 1849864 - DNA, 25 bp, Homo sapien
ccaggcgaggcttgatggggggttc

SEQ ID NO: 1849865 - DNA, 25 bp, Homo sapien
gctcctccaggcgaggcttgatggg

SEQ ID NO: 1849866 - DNA, 25 bp, Homo sapien
ctggggccatttcttcatcctttcc

SEQ ID NO: 1849867 - DNA, 25 bp, Homo sapien
ggccatttcttcatcctttcctggg

SEQ ID NO: 1849868 - DNA, 25 bp, Homo sapien
ggggccatttcttcatcctttcctg

SEQ ID NO: 1849869 - DNA, 25 bp, Homo sapien
gccatttcttcatcctttcctgggg

SEQ ID NO: 1849870 - DNA, 25 bp, Homo sapien
ttaaactggaccaagaaatggtcaa

SEQ ID NO: 1849871 - DNA, 25 bp, Homo sapien
aactggaccaagaaatggtcaaact

SEQ ID NO: 1849872 - DNA, 25 bp, Homo sapien
taaaccaacagcagacacggggccc

SEQ ID NO: 1849873 - DNA, 25 bp, Homo sapien
cagttaaaccaacagcagacacggg

SEQ ID NO: 1849874 - DNA, 25 bp, Homo sapien
tcactgtcatctgccctaggcgcag

SEQ ID NO: 1849875 - DNA, 25 bp, Homo sapien
tcatctgccctaggcgcagctttgc

SEQ ID NO: 1849876 - DNA, 25 bp, Homo sapien
tgcaagaggagcatcaggggactcc

SEQ ID NO: 1849877 - DNA, 25 bp, Homo sapien
cctaggcgcagctttgcaagaggag

SEQ ID NO: 1849878 - DNA, 25 bp, Homo sapien
atgctggaggctgtactttgctaag

SEQ ID NO: 1849879 - DNA, 25 bp, Homo sapien
tttgctaagacccaacccagagggc

SEQ ID NO: 1849880 - DNA, 25 bp, Homo sapien
tggaggctgtactttgctaagaccc

SEQ ID NO: 1849881 - DNA, 25 bp, Homo sapien
gctgtactttgctaagacccaaccc

SEQ ID NO: 1849882 - DNA, 25 bp, Homo sapien
tactgcacggtgaaggagtcgaagc

SEQ ID NO: 1849883 - DNA, 25 bp, Homo sapien
tccctgtccttgtactgcacggtga

SEQ ID NO: 1849884 - DNA, 25 bp, Homo sapien
ctcgtggaggccgtacaggtgcatc

SEQ ID NO: 1849885 - DNA, 25 bp, Homo sapien
cgtggaggccgtacaggtgcatctt

SEQ ID NO: 1849886 - DNA, 25 bp, Homo sapien
tcctgtcactgttagctcccccagg

SEQ ID NO: 1849887 - DNA, 25 bp, Homo sapien
ctgtcactgttagctcccccaggag

SEQ ID NO: 1849888 - DNA, 25 bp, Homo sapien
gatcctgtcactgttagctccccca

SEQ ID NO: 1849889 - DNA, 25 bp, Homo sapien
actgttagctcccccaggagcggct

SEQ ID NO: 1849890 - DNA, 25 bp, Homo sapien
caagagggtgaccctcccatggctc

SEQ ID NO: 1849891 - DNA, 25 bp, Homo sapien
gcaagagggtgaccctcccatggct

SEQ ID NO: 1849892 - DNA, 25 bp, Homo sapien
ctggctccaggcccgagatggtgac

SEQ ID NO: 1849893 - DNA, 25 bp, Homo sapien
actggaccaggaagtggtcaaactg

SEQ ID NO: 1849894 - DNA, 25 bp, Homo sapien
ggctccaggcccgagatggtgaccc

SEQ ID NO: 1849895 - DNA, 25 bp, Homo sapien
ggaccaggaagtggtcaaactgtcc

SEQ ID NO: 1849896 - DNA, 25 bp, Homo sapien
tgtcagggcctcgacatggacagga

SEQ ID NO: 1849897 - DNA, 25 bp, Homo sapien
tatctgtggtcggattccaggccag

SEQ ID NO: 1849898 - DNA, 25 bp, Homo sapien
ctgaaaccatacagggtcaccaggt

SEQ ID NO: 1849899 - DNA, 25 bp, Homo sapien
tatgcggaccatttggagttgcccg

SEQ ID NO: 1849900 - DNA, 25 bp, Homo sapien
tggaggggtcggggccgtggtctca

SEQ ID NO: 1849901 - DNA, 25 bp, Homo sapien
gagaggcccacggagttctgggtca

SEQ ID NO: 1849902 - DNA, 25 bp, Homo sapien
gcagcccgtagagcagcagcttgta

SEQ ID NO: 1849903 - DNA, 25 bp, Homo sapien
gggcccacacgcttgccgtggtgca

SEQ ID NO: 1849904 - DNA, 25 bp, Homo sapien
gtatcatccatagcactccgggctt

SEQ ID NO: 1849905 - DNA, 25 bp, Homo sapien
gtgacagtgacagagcgctcatggc

SEQ ID NO: 1849906 - DNA, 25 bp, Homo sapien
ggcccgtctttgtccttgaactgga

SEQ ID NO: 1849907 - DNA, 25 bp, Homo sapien
aggaatctgtacttgcggccggcat

SEQ ID NO: 1849908 - DNA, 25 bp, Homo sapien
tgagagggccatggcgcttcttgcc

SEQ ID NO: 1849909 - DNA, 25 bp, Homo sapien
gtgctagccccatgtggcttttcaa

SEQ ID NO: 1849910 - DNA, 25 bp, Homo sapien
ctgtgctagccccatgtggcttttc

SEQ ID NO: 1849911 - DNA, 25 bp, Homo sapien
gctcagctgtgtaggggcccatctc

SEQ ID NO: 1849912 - DNA, 25 bp, Homo sapien
agtcactgtgctagccccatgtggc

SEQ ID NO: 1849913 - DNA, 25 bp, Homo sapien
catcctggatcccaaagagcaggaa

SEQ ID NO: 1849914 - DNA, 25 bp, Homo sapien
gaaccacaaaggagtcgaattcacc

SEQ ID NO: 1849915 - DNA, 25 bp, Homo sapien
cagagactgggctgcgtcgtttccc

SEQ ID NO: 1849916 - DNA, 25 bp, Homo sapien
ggatagtgacctcccgctgatctgc

SEQ ID NO: 1849917 - DNA, 25 bp, Homo sapien
aaacattgccttcaggtggggtagg

SEQ ID NO: 1849918 - DNA, 25 bp, Homo sapien
gtaatcctatacagcttattttaca

SEQ ID NO: 1849919 - DNA, 25 bp, Homo sapien
acattgccttcaggtggggtagggg

SEQ ID NO: 1849920 - DNA, 25 bp, Homo sapien
tttgataactgtctataaatataat

SEQ ID NO: 1849921 - DNA, 25 bp, Homo sapien
cttgtactggactatgaaggagtca

SEQ ID NO: 1849922 - DNA, 25 bp, Homo sapien
tctcaggctccaggttgtagactgt

SEQ ID NO: 1849923 - DNA, 25 bp, Homo sapien
gactgtgacctctcgctggtctgcc

SEQ ID NO: 1849924 - DNA, 25 bp, Homo sapien
tgcgttgcccatcatgtagtccata

SEQ ID NO: 1849925 - DNA, 25 bp, Homo sapien
cttctgagatcagaggagatgatag

SEQ ID NO: 1849926 - DNA, 25 bp, Homo sapien
gaggagatgataggacaccttcagg

SEQ ID NO: 1849927 - DNA, 25 bp, Homo sapien
gatcagaggagatgataggacacct

SEQ ID NO: 1849928 - DNA, 25 bp, Homo sapien
gagatcagaggagatgataggacac

SEQ ID NO: 1849929 - DNA, 25 bp, Homo sapien
tacttgtgcccgggctctaggcctc

SEQ ID NO: 1849930 - DNA, 25 bp, Homo sapien
tgtacttgtgcccgggctctaggcc

SEQ ID NO: 1849931 - DNA, 25 bp, Homo sapien
catcttgtacttgtgcccgggctct

SEQ ID NO: 1849932 - DNA, 25 bp, Homo sapien
tcttgtacttgtgcccgggctctag

SEQ ID NO: 1849933 - DNA, 25 bp, Homo sapien
gggctgggggtctcgtccacatcct

SEQ ID NO: 1849934 - DNA, 25 bp, Homo sapien
tgggggtctcgtccacatcctcctg

SEQ ID NO: 1849935 - DNA, 25 bp, Homo sapien
gggtctcgtccacatcctcctgagg

SEQ ID NO: 1849936 - DNA, 25 bp, Homo sapien
gtctcgtccacatcctcctgaggag

SEQ ID NO: 1849937 - DNA, 25 bp, Homo sapien
ctagagaaacgtggtgctcttgtca

SEQ ID NO: 1849938 - DNA, 25 bp, Homo sapien
tagagaaacgtggtgctcttgtcac

SEQ ID NO: 1849939 - DNA, 25 bp, Homo sapien
tatacttccggtcgggatccaggcc

SEQ ID NO: 1849940 - DNA, 25 bp, Homo sapien
cgaagcccgtagaggttcatcttat

SEQ ID NO: 1849941 - DNA, 25 bp, Homo sapien
cactgtccatgagagacgcaaggag

SEQ ID NO: 1849942 - DNA, 25 bp, Homo sapien
tactggaccatgaatgagtcgaagg

SEQ ID NO: 1849943 - DNA, 25 bp, Homo sapien
gcttggggtttcgacgggatgtcac

SEQ ID NO: 1849944 - DNA, 25 bp, Homo sapien
ggcttggggtttcgacgggatgtca

SEQ ID NO: 1849945 - DNA, 25 bp, Homo sapien
cttggggtttcgacgggatgtcaca

SEQ ID NO: 1849946 - DNA, 25 bp, Homo sapien
ttggggtttcgacgggatgtcacac

SEQ ID NO: 1849947 - DNA, 25 bp, Homo sapien
gggccataccgcttcttgttcgcaa

SEQ ID NO: 1849948 - DNA, 25 bp, Homo sapien
tgtcacccacaggtttcccaggtgg

SEQ ID NO: 1849949 - DNA, 25 bp, Homo sapien
tgttcgcaattccaaacagagtgaa

SEQ ID NO: 1849950 - DNA, 25 bp, Homo sapien
agacaacaaatgaacgctcgggccc

SEQ ID NO: 1849951 - DNA, 25 bp, Homo sapien
tggatcacgaaggagtcaaactcgc

SEQ ID NO: 1849952 - DNA, 25 bp, Homo sapien
caaggagtcggaggtcctgtctgtc

SEQ ID NO: 1849953 - DNA, 25 bp, Homo sapien
gacaaatttgtacttgcggccagga

SEQ ID NO: 1849954 - DNA, 25 bp, Homo sapien
tcttgccaacaaacccatacaggac

SEQ ID NO: 1849955 - DNA, 25 bp, Homo sapien
ccgcatgcgcagttggaagtaggca

SEQ ID NO: 1849956 - DNA, 25 bp, Homo sapien
ccataatgccttggtagatgatggg

SEQ ID NO: 1849957 - DNA, 25 bp, Homo sapien
cctgggccccttgcgtcgtcgaggg

SEQ ID NO: 1849958 - DNA, 25 bp, Homo sapien
cccatgaagtgacagctcatacggg

SEQ ID NO: 1849959 - DNA, 25 bp, Homo sapien
ggctcatcggtagtccccaagaggc

SEQ ID NO: 1849960 - DNA, 25 bp, Homo sapien
gaggaggctcatcggtagtccccaa

SEQ ID NO: 1849961 - DNA, 25 bp, Homo sapien
gagggaggaggctcatcggtagtcc

SEQ ID NO: 1849962 - DNA, 25 bp, Homo sapien
atcggtagtccccaagaggcccaag

SEQ ID NO: 1849963 - DNA, 25 bp, Homo sapien
tgtggtggtgatgaaggcgtaggac

SEQ ID NO: 1849964 - DNA, 25 bp, Homo sapien
ctgtggtggtgatgaaggcgtagga

SEQ ID NO: 1849965 - DNA, 25 bp, Homo sapien
cccgtggacctccacgtggtaggtg

SEQ ID NO: 1849966 - DNA, 25 bp, Homo sapien
cctgaggtcgggcaggctgacggtg

SEQ ID NO: 1849967 - DNA, 25 bp, Homo sapien
tgacggtgcgcgtggtgcccggcac

SEQ ID NO: 1849968 - DNA, 25 bp, Homo sapien
cggagcccgtcgagagacacgagaa

SEQ ID NO: 1849969 - DNA, 25 bp, Homo sapien
cccggtcgacgccttcaggcgagag

SEQ ID NO: 1849970 - DNA, 25 bp, Homo sapien
tcgacgccttcaggcgagaggccgt

SEQ ID NO: 1849971 - DNA, 25 bp, Homo sapien
cttcaggcgagaggccgtagattcc

SEQ ID NO: 1849972 - DNA, 25 bp, Homo sapien
ggtggcgggacgcagccacccggtc

SEQ ID NO: 1849973 - DNA, 25 bp, Homo sapien
ggtgccgggatcagggctggcggtg

SEQ ID NO: 1849974 - DNA, 25 bp, Homo sapien
ctggtgccgggatcagggctggcgg

SEQ ID NO: 1849975 - DNA, 25 bp, Homo sapien
tgcgggggagccggctggggcggcg

SEQ ID NO: 1849976 - DNA, 25 bp, Homo sapien
ccggctggggcggcggccaacagac

SEQ ID NO: 1849977 - DNA, 25 bp, Homo sapien
agtattcatggatgtggcgcgccac

SEQ ID NO: 1849978 - DNA, 25 bp, Homo sapien
tgcaagtattcatggatgtggcgcg

SEQ ID NO: 1849979 - DNA, 25 bp, Homo sapien
cgctgcaagtattcatggatgtggc

SEQ ID NO: 1849980 - DNA, 25 bp, Homo sapien
caagtattcatggatgtggcgcgcc

SEQ ID NO: 1849981 - DNA, 25 bp, Homo sapien
aggtcctgcaccgtgccgcggaaac

SEQ ID NO: 1849982 - DNA, 25 bp, Homo sapien
tgggtagccgtgagcccgcaggtgg

SEQ ID NO: 1849983 - DNA, 25 bp, Homo sapien
tggttggcccgcagtgggtagccgt

SEQ ID NO: 1849984 - DNA, 25 bp, Homo sapien
ggaaacggctcagctcggccgtcag

SEQ ID NO: 1849985 - DNA, 25 bp, Homo sapien
ggcttggcctgggcggggactcctc

SEQ ID NO: 1849986 - DNA, 25 bp, Homo sapien
ctgggacaggcttggcctgggcggg

SEQ ID NO: 1849987 - DNA, 25 bp, Homo sapien
ggacaggcttggcctgggcggggac

SEQ ID NO: 1849988 - DNA, 25 bp, Homo sapien
acaggcttggcctgggcggggactc

SEQ ID NO: 1849989 - DNA, 25 bp, Homo sapien
tccgggtaactgtagtggcctggtg

SEQ ID NO: 1849990 - DNA, 25 bp, Homo sapien
ctccgggtaactgtagtggcctggt

SEQ ID NO: 1849991 - DNA, 25 bp, Homo sapien
tccagtcccacaagatctatcagca

SEQ ID NO: 1849992 - DNA, 25 bp, Homo sapien
gatctctaatctgcctaattccagt

SEQ ID NO: 1849993 - DNA, 25 bp, Homo sapien
agtcaacaggactgatgatctctaa

SEQ ID NO: 1849994 - DNA, 25 bp, Homo sapien
agcaatcccaatccaaaagtcaaca

SEQ ID NO: 1849995 - DNA, 25 bp, Homo sapien
ggtgtcacagccaccactcggaggt

SEQ ID NO: 1849996 - DNA, 25 bp, Homo sapien
tggttgccggcactgacgtaggaca

SEQ ID NO: 1849997 - DNA, 25 bp, Homo sapien
tattctacgcctggcatcaggtcag

SEQ ID NO: 1849998 - DNA, 25 bp, Homo sapien
ccaagctccagtgttgtcggtgtca

SEQ ID NO: 1849999 - DNA, 25 bp, Homo sapien
tctggtcataggctgaggcagagct

SEQ ID NO: 1850000 - DNA, 25 bp, Homo sapien
gtcctctctggtcataggctgaggc

SEQ ID NO: 1850001 - DNA, 25 bp, Homo sapien
ccagctggtccctcgaagggctcgg

SEQ ID NO: 1850002 - DNA, 25 bp, Homo sapien
agtgacctggtactcctgtccaggg

SEQ ID NO: 1850003 - DNA, 25 bp, Homo sapien
tgtgaatggggggctcgccccctct

SEQ ID NO: 1850004 - DNA, 25 bp, Homo sapien
tgaatggggggctcgccccctctgt

SEQ ID NO: 1850005 - DNA, 25 bp, Homo sapien
ctgtgaatggggggctcgccccctc

SEQ ID NO: 1850006 - DNA, 25 bp, Homo sapien
gtgaatggggggctcgccccctctg

SEQ ID NO: 1850007 - DNA, 25 bp, Homo sapien
tgtccagctaggacagccgctaagg

SEQ ID NO: 1850008 - DNA, 25 bp, Homo sapien
tccaaagggaatctactggaccctg

SEQ ID NO: 1850009 - DNA, 25 bp, Homo sapien
tccattcagccaagtaggattggaa

SEQ ID NO: 1850010 - DNA, 25 bp, Homo sapien
gattatgtgtggtgcctccaaaggg

SEQ ID NO: 1850011 - DNA, 25 bp, Homo sapien
cctccaagattcaagggattcttcc

SEQ ID NO: 1850012 - DNA, 25 bp, Homo sapien
aagattcaagggattcttccttagc

SEQ ID NO: 1850013 - DNA, 25 bp, Homo sapien
caagattcaagggattcttccttag

SEQ ID NO: 1850014 - DNA, 25 bp, Homo sapien
tccaagattcaagggattcttcctt

SEQ ID NO: 1850015 - DNA, 25 bp, Homo sapien
tggggatgaactgaatttcataggc

SEQ ID NO: 1850016 - DNA, 25 bp, Homo sapien
aggagccggggtccactctgtccga

SEQ ID NO: 1850017 - DNA, 25 bp, Homo sapien
catcctcatgccctcaatggttggc

SEQ ID NO: 1850018 - DNA, 25 bp, Homo sapien
tctgtccgaactgttgtctcctcca

SEQ ID NO: 1850019 - DNA, 25 bp, Homo sapien
cgcaatcggttccagtgtaccccgg

SEQ ID NO: 1850020 - DNA, 25 bp, Homo sapien
gcgtgctgcagtcttcccctgagta

SEQ ID NO: 1850021 - DNA, 25 bp, Homo sapien
tttggttgcagtcgccagggcagct

SEQ ID NO: 1850022 - DNA, 25 bp, Homo sapien
tgtagcccgtgtcgcaaatgcattc

SEQ ID NO: 1850023 - DNA, 25 bp, Homo sapien
gtccttgcagcgtccccgctggctg

SEQ ID NO: 1850024 - DNA, 25 bp, Homo sapien
gggcagctccgcgtaccacagtcct

SEQ ID NO: 1850025 - DNA, 25 bp, Homo sapien
cctcgccagtgtagccggggtcaca

SEQ ID NO: 1850026 - DNA, 25 bp, Homo sapien
tcctcgcctgtgtacccgggccagc

SEQ ID NO: 1850027 - DNA, 25 bp, Homo sapien
cctcgccagtgtagccggggttaca

SEQ ID NO: 1850028 - DNA, 25 bp, Homo sapien
ctctgactgcaaccgcgagggcagc

SEQ ID NO: 1850029 - DNA, 25 bp, Homo sapien
gggttacacacgcagcgcccattct

SEQ ID NO: 1850030 - DNA, 25 bp, Homo sapien
cgcccattctcacagcgccccctct

SEQ ID NO: 1850031 - DNA, 25 bp, Homo sapien
tgatcattgcagtcatctgggcagg

SEQ ID NO: 1850032 - DNA, 25 bp, Homo sapien
agtgtagccgggaaagcacacgcaa

SEQ ID NO: 1850033 - DNA, 25 bp, Homo sapien
tcccctctggctgcaacctcgaggg

SEQ ID NO: 1850034 - DNA, 25 bp, Homo sapien
cacggacacagcgaccctgatcatt

SEQ ID NO: 1850035 - DNA, 25 bp, Homo sapien
gaagagggagggatctcagcatctg

SEQ ID NO: 1850036 - DNA, 25 bp, Homo sapien
aagagggagggatctcagcatctgt

SEQ ID NO: 1850037 - DNA, 25 bp, Homo sapien
cagagggtccgcacatctgtctgac

SEQ ID NO: 1850038 - DNA, 25 bp, Homo sapien
tgcagagggtccgcacatctgtctg

SEQ ID NO: 1850039 - DNA, 25 bp, Homo sapien
gcagagggtccgcacatctgtctga

SEQ ID NO: 1850040 - DNA, 25 bp, Homo sapien
ggtgcagcggctcagatcaaacaca

SEQ ID NO: 1850041 - DNA, 25 bp, Homo sapien
tgtagtgctcctatgtgcaggcccc

SEQ ID NO: 1850042 - DNA, 25 bp, Homo sapien
tctcagggccctcgcatatgctttg

SEQ ID NO: 1850043 - DNA, 25 bp, Homo sapien
taaggccatgtctgctcccagttgc

SEQ ID NO: 1850044 - DNA, 25 bp, Homo sapien
tgtgtaatgtatgcagcctctcagg

SEQ ID NO: 1850045 - DNA, 25 bp, Homo sapien
agacggaccctcagggcctgtacct

SEQ ID NO: 1850046 - DNA, 25 bp, Homo sapien
atcccccagtgcactgttccttgag

SEQ ID NO: 1850047 - DNA, 25 bp, Homo sapien
caggttaatgcggtgggtgaatacc

SEQ ID NO: 1850048 - DNA, 25 bp, Homo sapien
tccaggatctctagacggaccctca

SEQ ID NO: 1850049 - DNA, 25 bp, Homo sapien
ttggaccgtgaagagaaggggcctg

SEQ ID NO: 1850050 - DNA, 25 bp, Homo sapien
tcacattggaccgtgaagagaaggg

SEQ ID NO: 1850051 - DNA, 25 bp, Homo sapien
gtgtcacattggaccgtgaagagaa

SEQ ID NO: 1850052 - DNA, 25 bp, Homo sapien
tggaccgtgaagagaaggggcctgc

SEQ ID NO: 1850053 - DNA, 25 bp, Homo sapien
aggttagagcatactgggctggcat

SEQ ID NO: 1850054 - DNA, 25 bp, Homo sapien
ctggaggttagagcatactgggctg

SEQ ID NO: 1850055 - DNA, 25 bp, Homo sapien
ggaggttagagcatactgggctggc

SEQ ID NO: 1850056 - DNA, 25 bp, Homo sapien
gaggttagagcatactgggctggca

SEQ ID NO: 1850057 - DNA, 25 bp, Homo sapien
ggctgagccacaaccgactgtggat

SEQ ID NO: 1850058 - DNA, 25 bp, Homo sapien
cacaaccgactgtggatctcggcag

SEQ ID NO: 1850059 - DNA, 25 bp, Homo sapien
gatctcggcagcgacagtgaggagg

SEQ ID NO: 1850060 - DNA, 25 bp, Homo sapien
cgactgtggatctcggcagcgacag

SEQ ID NO: 1850061 - DNA, 25 bp, Homo sapien
tggtttccaggctcatggagaagct

SEQ ID NO: 1850062 - DNA, 25 bp, Homo sapien
ttgtaagaaaagcaccaagccttgc

SEQ ID NO: 1850063 - DNA, 25 bp, Homo sapien
gctcatgtcttgtatgttcacatct

SEQ ID NO: 1850064 - DNA, 25 bp, Homo sapien
caagccttgcacagtgtaggtgacc

SEQ ID NO: 1850065 - DNA, 25 bp, Homo sapien
tagcagaacgatgaggcaaacatca

SEQ ID NO: 1850066 - DNA, 25 bp, Homo sapien
aggtcgctgtggcaaccacacatct

SEQ ID NO: 1850067 - DNA, 25 bp, Homo sapien
agggacccaggtcgctgtggcaacc

SEQ ID NO: 1850068 - DNA, 25 bp, Homo sapien
tccagaagccatagcagaacgatga

SEQ ID NO: 1850069 - DNA, 25 bp, Homo sapien
tgttgactcacattccagggatgcg

SEQ ID NO: 1850070 - DNA, 25 bp, Homo sapien
gatgacatgcggtctgtgatcccgc

SEQ ID NO: 1850071 - DNA, 25 bp, Homo sapien
catgagacatcgttgctagacacag

SEQ ID NO: 1850072 - DNA, 25 bp, Homo sapien
gacacagatataccccagagttgca

SEQ ID NO: 1850073 - DNA, 25 bp, Homo sapien
aactgaacctcacacaatcccctca

SEQ ID NO: 1850074 - DNA, 25 bp, Homo sapien
aataagtgcttaacccccacacctg

SEQ ID NO: 1850075 - DNA, 25 bp, Homo sapien
cctccactgccataacactagagaa

SEQ ID NO: 1850076 - DNA, 25 bp, Homo sapien
agaggagccctatattctgaaaagg

SEQ ID NO: 1850077 - DNA, 25 bp, Homo sapien
tcagggatgattgaggtagaggggc

SEQ ID NO: 1850078 - DNA, 25 bp, Homo sapien
tgaatcaccctggtgtccatgacct

SEQ ID NO: 1850079 - DNA, 25 bp, Homo sapien
gggatggctgttttcggagcgaggg

SEQ ID NO: 1850080 - DNA, 25 bp, Homo sapien
tgtggaggtcttgatgtgaatcacc

SEQ ID NO: 1850081 - DNA, 25 bp, Homo sapien
tgacctcacactcgatctgcatcat

SEQ ID NO: 1850082 - DNA, 25 bp, Homo sapien
agatggggaggcaaacagggattgc

SEQ ID NO: 1850083 - DNA, 25 bp, Homo sapien
agaggagatggggaggcaaacaggg

SEQ ID NO: 1850084 - DNA, 25 bp, Homo sapien
tgagaaggggagagttaaggaagag

SEQ ID NO: 1850085 - DNA, 25 bp, Homo sapien
ctgtgagaaggggagagttaaggaa

SEQ ID NO: 1850086 - DNA, 25 bp, Homo sapien
accagggacatcttgggccgggagg

SEQ ID NO: 1850087 - DNA, 25 bp, Homo sapien
gaggtcttgttgtggctgatggctg

SEQ ID NO: 1850088 - DNA, 25 bp, Homo sapien
caccagggacatcttgggccgggag

SEQ ID NO: 1850089 - DNA, 25 bp, Homo sapien
caagaatgctggctgcgaacggtct

SEQ ID NO: 1850090 - DNA, 25 bp, Homo sapien
tctgggtggcgatatagttgcagct

SEQ ID NO: 1850091 - DNA, 25 bp, Homo sapien
ttcccgtcggtcaattgcatccaag

SEQ ID NO: 1850092 - DNA, 25 bp, Homo sapien
taaaatgtgtcttcccgtcggtcaa

SEQ ID NO: 1850093 - DNA, 25 bp, Homo sapien
tggggactgccttaactggaggtga

SEQ ID NO: 1850094 - DNA, 25 bp, Homo sapien
gatggggactgccttaactggaggt

SEQ ID NO: 1850095 - DNA, 25 bp, Homo sapien
gggactgccttaactggaggtgact

SEQ ID NO: 1850096 - DNA, 25 bp, Homo sapien
gactgccttaactggaggtgacttc

SEQ ID NO: 1850097 - DNA, 25 bp, Homo sapien
ccagccactcaactcgtcagcaagc

SEQ ID NO: 1850098 - DNA, 25 bp, Homo sapien
tctgagggatcttcctccggcctct

SEQ ID NO: 1850099 - DNA, 25 bp, Homo sapien
ccggcctctctggtggcgctggacc

SEQ ID NO: 1850100 - DNA, 25 bp, Homo sapien
ctcctgggccctctgagggatcttc

SEQ ID NO: 1850101 - DNA, 25 bp, Homo sapien
tcttagtagtagctccttggcgccc

SEQ ID NO: 1850102 - DNA, 25 bp, Homo sapien
ttgaagtgccggcaatcagaggaga

SEQ ID NO: 1850103 - DNA, 25 bp, Homo sapien
agagctggtctaggtctcttagtag

SEQ ID NO: 1850104 - DNA, 25 bp, Homo sapien
actcagtgcggttgaagtgccggca

SEQ ID NO: 1850105 - DNA, 25 bp, Homo sapien
ccctggagaggttcaactccctgaa

SEQ ID NO: 1850106 - DNA, 25 bp, Homo sapien
ctctgagaaccccagcaagtgtctc

SEQ ID NO: 1850107 - DNA, 25 bp, Homo sapien
gaggacccctggagaggttcaactc

SEQ ID NO: 1850108 - DNA, 25 bp, Homo sapien
cttgttcatccgaggagagatggga

SEQ ID NO: 1850109 - DNA, 25 bp, Homo sapien
gagcctagaactcagtaagcactta

SEQ ID NO: 1850110 - DNA, 25 bp, Homo sapien
gacagtgcatcacctagagcctaga

SEQ ID NO: 1850111 - DNA, 25 bp, Homo sapien
gaataaagactctgcagatggactg

SEQ ID NO: 1850112 - DNA, 25 bp, Homo sapien
tctgttatacaagcctgagtctgcc

SEQ ID NO: 1850113 - DNA, 25 bp, Homo sapien
agaccatgatgcagaccaccttcct

SEQ ID NO: 1850114 - DNA, 25 bp, Homo sapien
gagaaggaagaccatgatgcagacc

SEQ ID NO: 1850115 - DNA, 25 bp, Homo sapien
tcctgtttccagaccctaacttgag

SEQ ID NO: 1850116 - DNA, 25 bp, Homo sapien
ctgacaggtccaaagttgaaggcaa

SEQ ID NO: 1850117 - DNA, 25 bp, Homo sapien
tcattccaaggaggctgtattcctg

SEQ ID NO: 1850118 - DNA, 25 bp, Homo sapien
ctgttggtctcccagggacagactg

SEQ ID NO: 1850119 - DNA, 25 bp, Homo sapien
tattcctgttggtctcccagggaca

SEQ ID NO: 1850120 - DNA, 25 bp, Homo sapien
gaggctgtattcctgttggtctccc

SEQ ID NO: 1850121 - DNA, 25 bp, Homo sapien
ggcaggctgactcccggttcttgat

SEQ ID NO: 1850122 - DNA, 25 bp, Homo sapien
ttctttctccgggactggcaggctg

SEQ ID NO: 1850123 - DNA, 25 bp, Homo sapien
ggttcttgatcattcgctgctgccg

SEQ ID NO: 1850124 - DNA, 25 bp, Homo sapien
agggcagcattctctcggcggagct

SEQ ID NO: 1850125 - DNA, 25 bp, Homo sapien
atccacttcaggcgggcaggagttt

SEQ ID NO: 1850126 - DNA, 25 bp, Homo sapien
cacttcaggcgggcaggagtttcca

SEQ ID NO: 1850127 - DNA, 25 bp, Homo sapien
ttcaggcgggcaggagtttccaggc

SEQ ID NO: 1850128 - DNA, 25 bp, Homo sapien
caggcgggcaggagtttccaggcat

SEQ ID NO: 1850129 - DNA, 25 bp, Homo sapien
actcgaatagcaccctggatgagga

SEQ ID NO: 1850130 - DNA, 25 bp, Homo sapien
tcttcctctcaggccgtggtagaga

SEQ ID NO: 1850131 - DNA, 25 bp, Homo sapien
tggactcgaatagcaccctggatga

SEQ ID NO: 1850132 - DNA, 25 bp, Homo sapien
ggagcgggaacgatgctcttcctct

SEQ ID NO: 1850133 - DNA, 25 bp, Homo sapien
agcctcaatggctgcaagctctctg

SEQ ID NO: 1850134 - DNA, 25 bp, Homo sapien
gagcacccaaggattgggcagcctc

SEQ ID NO: 1850135 - DNA, 25 bp, Homo sapien
agctctctgacagggtcaatgcagc

SEQ ID NO: 1850136 - DNA, 25 bp, Homo sapien
cacaagagcacccaaggattgggca

SEQ ID NO: 1850137 - DNA, 25 bp, Homo sapien
gcgcctgccaccactccacgctaat

SEQ ID NO: 1850138 - DNA, 25 bp, Homo sapien
caggcgcctgccaccactccacgct

SEQ ID NO: 1850139 - DNA, 25 bp, Homo sapien
aggcgcctgccaccactccacgcta

SEQ ID NO: 1850140 - DNA, 25 bp, Homo sapien
ggcgcctgccaccactccacgctaa

SEQ ID NO: 1850141 - DNA, 25 bp, Homo sapien
catgcccggcccttttctccttctt

SEQ ID NO: 1850142 - DNA, 25 bp, Homo sapien
ccatgcccggcccttttctccttct

SEQ ID NO: 1850143 - DNA, 25 bp, Homo sapien
gttagcactacaggtttgggctgca

SEQ ID NO: 1850144 - DNA, 25 bp, Homo sapien
ggaggcacagctctggatggcattg

SEQ ID NO: 1850145 - DNA, 25 bp, Homo sapien
ggacagtggttagcactacaggttt

SEQ ID NO: 1850146 - DNA, 25 bp, Homo sapien
ggtgctgggaggcacagctctggat

SEQ ID NO: 1850147 - DNA, 25 bp, Homo sapien
ctgggacatcccacaggaggcatcc

SEQ ID NO: 1850148 - DNA, 25 bp, Homo sapien
ggaactcactggaaaacctggagga

SEQ ID NO: 1850149 - DNA, 25 bp, Homo sapien
cctctaggtcaggaggaactcactg

SEQ ID NO: 1850150 - DNA, 25 bp, Homo sapien
actcactggaaaacctggaggaagg

SEQ ID NO: 1850151 - DNA, 25 bp, Homo sapien
acctctaggtcaggaggaactcact

SEQ ID NO: 1850152 - DNA, 25 bp, Homo sapien
gggaggcctcagagttgacggaaga

SEQ ID NO: 1850153 - DNA, 25 bp, Homo sapien
gagagacaggttctatcttggtctg

SEQ ID NO: 1850154 - DNA, 25 bp, Homo sapien
ggaggcctcagagttgacggaagaa

SEQ ID NO: 1850155 - DNA, 25 bp, Homo sapien
catggagagacaggttctatcttgg

SEQ ID NO: 1850156 - DNA, 25 bp, Homo sapien
gttgaatggcatgacagaatactag

SEQ ID NO: 1850157 - DNA, 25 bp, Homo sapien
tcccgtagtagagccaaggattggg

SEQ ID NO: 1850158 - DNA, 25 bp, Homo sapien
gatacatatgccctaaactgctcac

SEQ ID NO: 1850159 - DNA, 25 bp, Homo sapien
aaataatatccatctcctcagcact

SEQ ID NO: 1850160 - DNA, 25 bp, Homo sapien
tgatctggacggtttcaaatgagga

SEQ ID NO: 1850161 - DNA, 25 bp, Homo sapien
cggtttcaaatgaggatgttgggtc

SEQ ID NO: 1850162 - DNA, 25 bp, Homo sapien
gggataacattgatctggacggttt

SEQ ID NO: 1850163 - DNA, 25 bp, Homo sapien
ggatgttgggtcatctcccaggaga

SEQ ID NO: 1850164 - DNA, 25 bp, Homo sapien
gcagggggaagatggctcagacttc

SEQ ID NO: 1850165 - DNA, 25 bp, Homo sapien
tggagagacgcgatgactcggagct

SEQ ID NO: 1850166 - DNA, 25 bp, Homo sapien
ctgtggagagacgcgatgactcgga

SEQ ID NO: 1850167 - DNA, 25 bp, Homo sapien
cagggggaagatggctcagacttca

SEQ ID NO: 1850168 - DNA, 25 bp, Homo sapien
agatcggcaggagttcccatggggg

SEQ ID NO: 1850169 - DNA, 25 bp, Homo sapien
gatcggcaggagttcccatgggggc

SEQ ID NO: 1850170 - DNA, 25 bp, Homo sapien
aagatcggcaggagttcccatgggg

SEQ ID NO: 1850171 - DNA, 25 bp, Homo sapien
gaagatcggcaggagttcccatggg

SEQ ID NO: 1850172 - DNA, 25 bp, Homo sapien
catccatccccacgtccagggagct

SEQ ID NO: 1850173 - DNA, 25 bp, Homo sapien
gacatccatccccacgtccagggag

SEQ ID NO: 1850174 - DNA, 25 bp, Homo sapien
acatccatccccacgtccagggagc

SEQ ID NO: 1850175 - DNA, 25 bp, Homo sapien
ctgacatccatccccacgtccaggg

SEQ ID NO: 1850176 - DNA, 25 bp, Homo sapien
caacggaagagctgcgtctgctcct

SEQ ID NO: 1850177 - DNA, 25 bp, Homo sapien
ctccgggcaacggaagagctgcgtc

SEQ ID NO: 1850178 - DNA, 25 bp, Homo sapien
cgggacatcctgctccgggcaacgg

SEQ ID NO: 1850179 - DNA, 25 bp, Homo sapien
tcctgctccgggcaacggaagagct

SEQ ID NO: 1850180 - DNA, 25 bp, Homo sapien
gaaatgctgagcgtcggggggtcgt

SEQ ID NO: 1850181 - DNA, 25 bp, Homo sapien
tgcaagaaatgctgagcgtcggggg

SEQ ID NO: 1850182 - DNA, 25 bp, Homo sapien
ctgcaagaaatgctgagcgtcgggg

SEQ ID NO: 1850183 - DNA, 25 bp, Homo sapien
caagaaatgctgagcgtcggggggt

SEQ ID NO: 1850184 - DNA, 25 bp, Homo sapien
tgaagaaacgcgtcgggtcagcaat

SEQ ID NO: 1850185 - DNA, 25 bp, Homo sapien
caggttgtcggtgaagaaacgcgtc

SEQ ID NO: 1850186 - DNA, 25 bp, Homo sapien
cagcaatctcgctgagcagcatcag

SEQ ID NO: 1850187 - DNA, 25 bp, Homo sapien
ctccgggctaagcaggttgtcggtg

SEQ ID NO: 1850188 - DNA, 25 bp, Homo sapien
tccccatcaccaactaatcagttga

SEQ ID NO: 1850189 - DNA, 25 bp, Homo sapien
ctctccccatcaccaactaatcagt

SEQ ID NO: 1850190 - DNA, 25 bp, Homo sapien
ccccatcaccaactaatcagttgac

SEQ ID NO: 1850191 - DNA, 25 bp, Homo sapien
tctccccatcaccaactaatcagtt

SEQ ID NO: 1850192 - DNA, 25 bp, Homo sapien
actgaggctgccctagcaacaactg

SEQ ID NO: 1850193 - DNA, 25 bp, Homo sapien
gatctatcgccagcaccttcttgag

SEQ ID NO: 1850194 - DNA, 25 bp, Homo sapien
agccaaacatcttgcgcagaccctg

SEQ ID NO: 1850195 - DNA, 25 bp, Homo sapien
tggttcttcccctgaatgaccacct

SEQ ID NO: 1850196 - DNA, 25 bp, Homo sapien
agctccttcagggttcccagctcga

SEQ ID NO: 1850197 - DNA, 25 bp, Homo sapien
cgtccatagcatcgggcagctcctt

SEQ ID NO: 1850198 - DNA, 25 bp, Homo sapien
ggagcagccgaagagcccgtccata

SEQ ID NO: 1850199 - DNA, 25 bp, Homo sapien
agctcgaaatagttctgtgcccctt

SEQ ID NO: 1850200 - DNA, 25 bp, Homo sapien
ggaggtccagagtgcccaggcagct

SEQ ID NO: 1850201 - DNA, 25 bp, Homo sapien
aggaggtccagagtgcccaggcagc

SEQ ID NO: 1850202 - DNA, 25 bp, Homo sapien
tggcggccctgatccgaaaggaaac

SEQ ID NO: 1850203 - DNA, 25 bp, Homo sapien
tacgcccatagttagctctgtccag

SEQ ID NO: 1850204 - DNA, 25 bp, Homo sapien
caagccatggccacggattacgatc

SEQ ID NO: 1850205 - DNA, 25 bp, Homo sapien
tacgatcttcttgacaaagctccca

SEQ ID NO: 1850206 - DNA, 25 bp, Homo sapien
taactgaatcaaggttctcccgaag

SEQ ID NO: 1850207 - DNA, 25 bp, Homo sapien
tcaagcgtttcggtaggagggtctc

SEQ ID NO: 1850208 - DNA, 25 bp, Homo sapien
tcttgttgcggctgagaggtgtcct

SEQ ID NO: 1850209 - DNA, 25 bp, Homo sapien
caattgtattgactggtggcgtctc

SEQ ID NO: 1850210 - DNA, 25 bp, Homo sapien
aaagggatgaaccaggttcaggtca

SEQ ID NO: 1850211 - DNA, 25 bp, Homo sapien
tggatgcttagtcccttccacggtg

SEQ ID NO: 1850212 - DNA, 25 bp, Homo sapien
ttccacggtgagtgaacagttttgg

SEQ ID NO: 1850213 - DNA, 25 bp, Homo sapien
tcagaaagggatgaaccaggttcag

SEQ ID NO: 1850214 - DNA, 25 bp, Homo sapien
tagcagggttcttatttagactcct

SEQ ID NO: 1850215 - DNA, 25 bp, Homo sapien
gctaatagcagggttcttatttaga

SEQ ID NO: 1850216 - DNA, 25 bp, Homo sapien
tcttatttagactcctttctcgtcc

SEQ ID NO: 1850217 - DNA, 25 bp, Homo sapien
acaatgctaatagcagggttcttat

SEQ ID NO: 1850218 - DNA, 25 bp, Homo sapien
gagccgggccattcgaatcacctct

SEQ ID NO: 1850219 - DNA, 25 bp, Homo sapien
tcggagccttgccccacgcggagag

SEQ ID NO: 1850220 - DNA, 25 bp, Homo sapien
ctgcgcggccaaagtgcctggcatg

SEQ ID NO: 1850221 - DNA, 25 bp, Homo sapien
aagctaaatggctactgaatgctgc

SEQ ID NO: 1850222 - DNA, 25 bp, Homo sapien
cacatccatcattgcctttcaagtc

SEQ ID NO: 1850223 - DNA, 25 bp, Homo sapien
atccatcattgcctttcaagtcctc

SEQ ID NO: 1850224 - DNA, 25 bp, Homo sapien
atcattgcctttcaagtcctccttc

SEQ ID NO: 1850225 - DNA, 25 bp, Homo sapien
ttcacatccatcattgcctttcaag

SEQ ID NO: 1850226 - DNA, 25 bp, Homo sapien
taacagcatgcctggccgctgctca

SEQ ID NO: 1850227 - DNA, 25 bp, Homo sapien
ctccagttgcaaggagtttaacagc

SEQ ID NO: 1850228 - DNA, 25 bp, Homo sapien
ttgcaaggagtttaacagcatgcct

SEQ ID NO: 1850229 - DNA, 25 bp, Homo sapien
ttaacagcatgcctggccgctgctc

SEQ ID NO: 1850230 - DNA, 25 bp, Homo sapien
tctttcagaagttcacacacactca

SEQ ID NO: 1850231 - DNA, 25 bp, Homo sapien
gacttgggaggtccatagcctggat

SEQ ID NO: 1850232 - DNA, 25 bp, Homo sapien
tatttacagagcgtttacaggcagg

SEQ ID NO: 1850233 - DNA, 25 bp, Homo sapien
tacaccaggaacttcccaaatgtcc

SEQ ID NO: 1850234 - DNA, 25 bp, Homo sapien
cgcggtatgactgcagaaagagcct

SEQ ID NO: 1850235 - DNA, 25 bp, Homo sapien
cagggctcggtccttttgccggaag

SEQ ID NO: 1850236 - DNA, 25 bp, Homo sapien
gaactggattccgagcttgctcgca

SEQ ID NO: 1850237 - DNA, 25 bp, Homo sapien
tgacggccccagaaacgggtgtgca

SEQ ID NO: 1850238 - DNA, 25 bp, Homo sapien
agttccgggcctcgcgtgaagcgat

SEQ ID NO: 1850239 - DNA, 25 bp, Homo sapien
ttagggatcccagtagttctcgtgg

SEQ ID NO: 1850240 - DNA, 25 bp, Homo sapien
gctgcgcggcgatgatgatgactac

SEQ ID NO: 1850241 - DNA, 25 bp, Homo sapien
tacggtgaggatggtacagagcacc

SEQ ID NO: 1850242 - DNA, 25 bp, Homo sapien
tgggcatgtagtcgtgtggcgggcg

SEQ ID NO: 1850243 - DNA, 25 bp, Homo sapien
tggcaatgatgccagtaggccagaa

SEQ ID NO: 1850244 - DNA, 25 bp, Homo sapien
gcatgtagtcgtgtggcgggcgcct

SEQ ID NO: 1850245 - DNA, 25 bp, Homo sapien
atgtagtcgtgtggcgggcgcctcg

SEQ ID NO: 1850246 - DNA, 25 bp, Homo sapien
gggagagtggaggtcactcctgttc

SEQ ID NO: 1850247 - DNA, 25 bp, Homo sapien
gcggcggggggagagtggaggtcac

SEQ ID NO: 1850248 - DNA, 25 bp, Homo sapien
cccccggggtcccgcctgcatatgg

SEQ ID NO: 1850249 - DNA, 25 bp, Homo sapien
gagtggaggtcactcctgttccccc

SEQ ID NO: 1850250 - DNA, 25 bp, Homo sapien
agcgttgggcggctggcagagtggc

SEQ ID NO: 1850251 - DNA, 25 bp, Homo sapien
cagcctaccagcgttgggcggctgg

SEQ ID NO: 1850252 - DNA, 25 bp, Homo sapien
ggcaggggcatcactctgaccctct

SEQ ID NO: 1850253 - DNA, 25 bp, Homo sapien
cctctcccagcctaccagcgttggg

SEQ ID NO: 1850254 - DNA, 25 bp, Homo sapien
tgcccaccgggtagaccggcacgta

SEQ ID NO: 1850255 - DNA, 25 bp, Homo sapien
ggtagaccggcacgtaagcagtgca

SEQ ID NO: 1850256 - DNA, 25 bp, Homo sapien
cacgtaagcagtgcaaggctgcagc

SEQ ID NO: 1850257 - DNA, 25 bp, Homo sapien
ccggcacgtaagcagtgcaaggctg

SEQ ID NO: 1850258 - DNA, 25 bp, Homo sapien
gcccacagtccccgcgtgcgtgggc

SEQ ID NO: 1850259 - DNA, 25 bp, Homo sapien
cagcggcagcgtgcccacagtcccc

SEQ ID NO: 1850260 - DNA, 25 bp, Homo sapien
cccacagtccccgcgtgcgtgggca

SEQ ID NO: 1850261 - DNA, 25 bp, Homo sapien
ccccccagcggcagcgtgcccacag

SEQ ID NO: 1850262 - DNA, 25 bp, Homo sapien
gaagtgggccctcgaagcgagtctc

SEQ ID NO: 1850263 - DNA, 25 bp, Homo sapien
ggaagtgggccctcgaagcgagtct

SEQ ID NO: 1850264 - DNA, 25 bp, Homo sapien
agggcggcggagaagtgtgagggac

SEQ ID NO: 1850265 - DNA, 25 bp, Homo sapien
gcggtgccagactgatggtagtggt

SEQ ID NO: 1850266 - DNA, 25 bp, Homo sapien
ggagggaccgcgctgagcggtggcc

SEQ ID NO: 1850267 - DNA, 25 bp, Homo sapien
tgcaggtaagggtcgggtggcatgc

SEQ ID NO: 1850268 - DNA, 25 bp, Homo sapien
tatccgagctagtcctgtgtgtgcg

SEQ ID NO: 1850269 - DNA, 25 bp, Homo sapien
catagagagagacgggtgagaaacc

SEQ ID NO: 1850270 - DNA, 25 bp, Homo sapien
gaatctcgggacctcttttagggca

SEQ ID NO: 1850271 - DNA, 25 bp, Homo sapien
tatgcgtagacatgcaaccctgtgt

SEQ ID NO: 1850272 - DNA, 25 bp, Homo sapien
caagggggacggagagtctggagac

SEQ ID NO: 1850273 - DNA, 25 bp, Homo sapien
gaaggggaatgaaatagaaccacag

SEQ ID NO: 1850274 - DNA, 25 bp, Homo sapien
aacctggctgtacctccttcaccct

SEQ ID NO: 1850275 - DNA, 25 bp, Homo sapien
cccctgaccatgttgttggcaaggg

SEQ ID NO: 1850276 - DNA, 25 bp, Homo sapien
tgcggtctcgctgggacagggtccc

SEQ ID NO: 1850277 - DNA, 25 bp, Homo sapien
gcctgcggtctcgctgggacagggt

SEQ ID NO: 1850278 - DNA, 25 bp, Homo sapien
ctgcagccggagtgggggtcctcgg

SEQ ID NO: 1850279 - DNA, 25 bp, Homo sapien
tgcagccggagtgggggtcctcggc

SEQ ID NO: 1850280 - DNA, 25 bp, Homo sapien
gcggcagcagcgcagagatggagag

SEQ ID NO: 1850281 - DNA, 25 bp, Homo sapien
cggcagcagcgcagagatggagaga

SEQ ID NO: 1850282 - DNA, 25 bp, Homo sapien
gtttgggctcctttggagttgtcat

SEQ ID NO: 1850283 - DNA, 25 bp, Homo sapien
caacctagcagtaaagagggaggcc

SEQ ID NO: 1850284 - DNA, 25 bp, Homo sapien
acctagcagtaaagagggaggccca

SEQ ID NO: 1850285 - DNA, 25 bp, Homo sapien
tctatggagatttacaccagttttt

SEQ ID NO: 1850286 - DNA, 25 bp, Homo sapien
cgaggataggaagtctatggagatt

SEQ ID NO: 1850287 - DNA, 25 bp, Homo sapien
cttattgcatcttgggagcgcgtgg

SEQ ID NO: 1850288 - DNA, 25 bp, Homo sapien
cagataatcattattcttcccttac

SEQ ID NO: 1850289 - DNA, 25 bp, Homo sapien
ttaggcgttcgcgtgagcgctcaac

SEQ ID NO: 1850290 - DNA, 25 bp, Homo sapien
cagtcgttctggtcacttaggcgtt

SEQ ID NO: 1850291 - DNA, 25 bp, Homo sapien
agagtcagatcacggcttcacacca

SEQ ID NO: 1850292 - DNA, 25 bp, Homo sapien
tagcagagactacagagcagtacag

SEQ ID NO: 1850293 - DNA, 25 bp, Homo sapien
tgaagagttgtaagtcgctgacctg

SEQ ID NO: 1850294 - DNA, 25 bp, Homo sapien
ggactctctgcgtctctggagacaa

SEQ ID NO: 1850295 - DNA, 25 bp, Homo sapien
aagccctagcaagtaaaagccctga

SEQ ID NO: 1850296 - DNA, 25 bp, Homo sapien
aaattacgcgggcatgagtcagcgc

SEQ ID NO: 1850297 - DNA, 25 bp, Homo sapien
tgttgaggggcacgcccgggctggc

SEQ ID NO: 1850298 - DNA, 25 bp, Homo sapien
gaggggcacgcccgggctggcatca

SEQ ID NO: 1850299 - DNA, 25 bp, Homo sapien
gggcacgcccgggctggcatcagcc

SEQ ID NO: 1850300 - DNA, 25 bp, Homo sapien
gtgttgaggggcacgcccgggctgg

SEQ ID NO: 1850301 - DNA, 25 bp, Homo sapien
cagcacacggcaaaatgcagaggac

SEQ ID NO: 1850302 - DNA, 25 bp, Homo sapien
cacacggcaaaatgcagaggactac

SEQ ID NO: 1850303 - DNA, 25 bp, Homo sapien
gcacacggcaaaatgcagaggacta

SEQ ID NO: 1850304 - DNA, 25 bp, Homo sapien
ccagcacacggcaaaatgcagagga

SEQ ID NO: 1850305 - DNA, 25 bp, Homo sapien
tcgtgttctgctgcggagccagacg

SEQ ID NO: 1850306 - DNA, 25 bp, Homo sapien
ccccttggggaatgcaaacttcgtg

SEQ ID NO: 1850307 - DNA, 25 bp, Homo sapien
caaacttcgtgttctgctgcggagc

SEQ ID NO: 1850308 - DNA, 25 bp, Homo sapien
gggaatgcaaacttcgtgttctgct

SEQ ID NO: 1850309 - DNA, 25 bp, Homo sapien
agaatcaaggcggggaaatcggact

SEQ ID NO: 1850310 - DNA, 25 bp, Homo sapien
gagaatcaaggcggggaaatcggac

SEQ ID NO: 1850311 - DNA, 25 bp, Homo sapien
ggagaatcaaggcggggaaatcgga

SEQ ID NO: 1850312 - DNA, 25 bp, Homo sapien
taaacagcgggtggagcgaggccta

SEQ ID NO: 1850313 - DNA, 25 bp, Homo sapien
ccgtgggttccagacttgggataag

SEQ ID NO: 1850314 - DNA, 25 bp, Homo sapien
acttgggataagtaaacagcgggtg

SEQ ID NO: 1850315 - DNA, 25 bp, Homo sapien
agcgggtggagcgaggcctacggac

SEQ ID NO: 1850316 - DNA, 25 bp, Homo sapien
ccaggccaggtgggagtctgcactc

SEQ ID NO: 1850317 - DNA, 25 bp, Homo sapien
gagtctgcactcttcaaggggcctg

SEQ ID NO: 1850318 - DNA, 25 bp, Homo sapien
gggagtctgcactcttcaaggggcc

SEQ ID NO: 1850319 - DNA, 25 bp, Homo sapien
tctgcactcttcaaggggcctgggc

SEQ ID NO: 1850320 - DNA, 25 bp, Homo sapien
gtattaaagaactccgcgttgttca

SEQ ID NO: 1850321 - DNA, 25 bp, Homo sapien
ccgcgttgttcatggctgaggcgat

SEQ ID NO: 1850322 - DNA, 25 bp, Homo sapien
cattaggaagatcctggacctagag

SEQ ID NO: 1850323 - DNA, 25 bp, Homo sapien
gaggcgatgcattaggaagatcctg

SEQ ID NO: 1850324 - DNA, 25 bp, Homo sapien
taagagggactacccatgagagtgg

SEQ ID NO: 1850325 - DNA, 25 bp, Homo sapien
ccctgggagagcctagtttctttga

SEQ ID NO: 1850326 - DNA, 25 bp, Homo sapien
atctggctgtatgggtggagaaccc

SEQ ID NO: 1850327 - DNA, 25 bp, Homo sapien
gggaatatctgtggcctatgaggcc

SEQ ID NO: 1850328 - DNA, 25 bp, Homo sapien
tcagagagggggaagcctcaacaga

SEQ ID NO: 1850329 - DNA, 25 bp, Homo sapien
cagggagtggctaatgccaccagga

SEQ ID NO: 1850330 - DNA, 25 bp, Homo sapien
ccccagttgtgggaacaggtctgga

SEQ ID NO: 1850331 - DNA, 25 bp, Homo sapien
cacgcaaaactgggtcccaccctct

SEQ ID NO: 1850332 - DNA, 25 bp, Homo sapien
gaagtgagtgcagcacctgatgtct

SEQ ID NO: 1850333 - DNA, 25 bp, Homo sapien
gggcagaagtgagtgcagcacctga

SEQ ID NO: 1850334 - DNA, 25 bp, Homo sapien
cagaagtgagtgcagcacctgatgt

SEQ ID NO: 1850335 - DNA, 25 bp, Homo sapien
tcttccccttgtgtctggtgagatg

SEQ ID NO: 1850336 - DNA, 25 bp, Homo sapien
gtctggtgagatggtgcagcagggc

SEQ ID NO: 1850337 - DNA, 25 bp, Homo sapien
tgtgtctggtgagatggtgcagcag

SEQ ID NO: 1850338 - DNA, 25 bp, Homo sapien
gcttcttccccttgtgtctggtgag

SEQ ID NO: 1850339 - DNA, 25 bp, Homo sapien
aatgtggagactgaactggtatccc

SEQ ID NO: 1850340 - DNA, 25 bp, Homo sapien
gagagtgcacgaccctgggcatctg

SEQ ID NO: 1850341 - DNA, 25 bp, Homo sapien
gcaagggcaggcatgagacctctga

SEQ ID NO: 1850342 - DNA, 25 bp, Homo sapien
ctctgaattagaagggtccagcccc

SEQ ID NO: 1850343 - DNA, 25 bp, Homo sapien
ggagtgcttcaggtatcagcttcca

SEQ ID NO: 1850344 - DNA, 25 bp, Homo sapien
ccagagggcgagaagtcctcctcac

SEQ ID NO: 1850345 - DNA, 25 bp, Homo sapien
tgggagtgcttcaggtatcagcttc

SEQ ID NO: 1850346 - DNA, 25 bp, Homo sapien
cctcctcacaaatggatgagtccat

SEQ ID NO: 1850347 - DNA, 25 bp, Homo sapien
tccactggggatggaatgttcccct

SEQ ID NO: 1850348 - DNA, 25 bp, Homo sapien
ggggatttgttccaaagaatggatg

SEQ ID NO: 1850349 - DNA, 25 bp, Homo sapien
tggatgagtccactggccaatgtgg

SEQ ID NO: 1850350 - DNA, 25 bp, Homo sapien
gaatgttcccctcccttgtgtaggc

SEQ ID NO: 1850351 - DNA, 25 bp, Homo sapien
caaggaagagggtttggccctgctt

SEQ ID NO: 1850352 - DNA, 25 bp, Homo sapien
actgtcccacagacaagacagtagg

SEQ ID NO: 1850353 - DNA, 25 bp, Homo sapien
ggcgctgtatccacattcacttcag

SEQ ID NO: 1850354 - DNA, 25 bp, Homo sapien
tgcaccgaggcaagagtccatggat

SEQ ID NO: 1850355 - DNA, 25 bp, Homo sapien
ggagatttcccggaaaacagtgagc

SEQ ID NO: 1850356 - DNA, 25 bp, Homo sapien
tcagccagagctgggacgtcatctg

SEQ ID NO: 1850357 - DNA, 25 bp, Homo sapien
tgtcagcccttccgtgggcactggg

SEQ ID NO: 1850358 - DNA, 25 bp, Homo sapien
catggagtgccggactctgtcagcc

SEQ ID NO: 1850359 - DNA, 25 bp, Homo sapien
ggtttggcatttactgctgaatgag

SEQ ID NO: 1850360 - DNA, 25 bp, Homo sapien
cacccaggtctttgcccacaggtgg

SEQ ID NO: 1850361 - DNA, 25 bp, Homo sapien
ggcccagcttccgagtgatactctt

SEQ ID NO: 1850362 - DNA, 25 bp, Homo sapien
tctgaggcccttctcctatacaaag

SEQ ID NO: 1850363 - DNA, 25 bp, Homo sapien
tcttggtaggaggacatgactatgg

SEQ ID NO: 1850364 - DNA, 25 bp, Homo sapien
ccgaggtgaagcgacgctccttctt

SEQ ID NO: 1850365 - DNA, 25 bp, Homo sapien
ctccttcttgcagtagaagtcttgg

SEQ ID NO: 1850366 - DNA, 25 bp, Homo sapien
tagaagtcttggtaggaggacatga

SEQ ID NO: 1850367 - DNA, 25 bp, Homo sapien
ctgggcctgcactgcaagatggaag

SEQ ID NO: 1850368 - DNA, 25 bp, Homo sapien
gagccattgtggtttctcgttccct

SEQ ID NO: 1850369 - DNA, 25 bp, Homo sapien
tgtggtttctcgttccctcaggaaa

SEQ ID NO: 1850370 - DNA, 25 bp, Homo sapien
agcatggagccattgtggtttctcg

SEQ ID NO: 1850371 - DNA, 25 bp, Homo sapien
cattgtggtttctcgttccctcagg

SEQ ID NO: 1850372 - DNA, 25 bp, Homo sapien
ccccgtgcgcttccggtcgatgaag

SEQ ID NO: 1850373 - DNA, 25 bp, Homo sapien
cagtagctcgcgcttggcaatgggc

SEQ ID NO: 1850374 - DNA, 25 bp, Homo sapien
agcggcctggcagtacctccatcat

SEQ ID NO: 1850375 - DNA, 25 bp, Homo sapien
tccggtcgatgaagatgactcctgc

SEQ ID NO: 1850376 - DNA, 25 bp, Homo sapien
actcggatcccgtacaggtatttga

SEQ ID NO: 1850377 - DNA, 25 bp, Homo sapien
gtggagcagcattagacgcaagatc

SEQ ID NO: 1850378 - DNA, 25 bp, Homo sapien
ctggtggttggagacaacaacatag

SEQ ID NO: 1850379 - DNA, 25 bp, Homo sapien
caagcagatcgagagagctctggtg

SEQ ID NO: 1850380 - DNA, 25 bp, Homo sapien
tcatgttctcgacgttgcgtcctcg

SEQ ID NO: 1850381 - DNA, 25 bp, Homo sapien
ccattgtagaaggccatcttgaaga

SEQ ID NO: 1850382 - DNA, 25 bp, Homo sapien
acacacagggatggcgagcacagcc

SEQ ID NO: 1850383 - DNA, 25 bp, Homo sapien
tcctcgcacggcacacacagggatg

SEQ ID NO: 1850384 - DNA, 25 bp, Homo sapien
ggttaaatctaagccgcctgtgttc

SEQ ID NO: 1850385 - DNA, 25 bp, Homo sapien
ttctaggttaaatctaagccgcctg

SEQ ID NO: 1850386 - DNA, 25 bp, Homo sapien
aacagcagtttctaggttaaatcta

SEQ ID NO: 1850387 - DNA, 25 bp, Homo sapien
aatctaagccgcctgtgttcctaac

SEQ ID NO: 1850388 - DNA, 25 bp, Homo sapien
tccagacaggcaaacgaatcctact

SEQ ID NO: 1850389 - DNA, 25 bp, Homo sapien
ttcccttccttctagtgacactttg

SEQ ID NO: 1850390 - DNA, 25 bp, Homo sapien
gacactttgcgtgggcaggtacagt

SEQ ID NO: 1850391 - DNA, 25 bp, Homo sapien
tggaatagctacaaagaccaatcct

SEQ ID NO: 1850392 - DNA, 25 bp, Homo sapien
tatatgaaaactcacacacatgcgg

SEQ ID NO: 1850393 - DNA, 25 bp, Homo sapien
gcctatggatagcattgggacaacc

SEQ ID NO: 1850394 - DNA, 25 bp, Homo sapien
gacaacctagttgcacacaagccat

SEQ ID NO: 1850395 - DNA, 25 bp, Homo sapien
gaggtcctgtgcctagatggaaaca

SEQ ID NO: 1850396 - DNA, 25 bp, Homo sapien
tctcaggtcccctctcctatcccca

SEQ ID NO: 1850397 - DNA, 25 bp, Homo sapien
tcaggtcccctctcctatccccagc

SEQ ID NO: 1850398 - DNA, 25 bp, Homo sapien
ccctctcaggtcccctctcctatcc

SEQ ID NO: 1850399 - DNA, 25 bp, Homo sapien
caggtcccctctcctatccccagca

SEQ ID NO: 1850400 - DNA, 25 bp, Homo sapien
gccaggctgcggcagcggtggtggc

SEQ ID NO: 1850401 - DNA, 25 bp, Homo sapien
tccccagccaggctgcggcagcggt

SEQ ID NO: 1850402 - DNA, 25 bp, Homo sapien
cagccaggctgcggcagcggtggtg

SEQ ID NO: 1850403 - DNA, 25 bp, Homo sapien
ccagccaggctgcggcagcggtggt

SEQ ID NO: 1850404 - DNA, 25 bp, Homo sapien
ggaggttgggcccatagcggtagga

SEQ ID NO: 1850405 - DNA, 25 bp, Homo sapien
gtctctgtcggggtgtcggtgccaa

SEQ ID NO: 1850406 - DNA, 25 bp, Homo sapien
tgtcggtgccaagggggcgacggga

SEQ ID NO: 1850407 - DNA, 25 bp, Homo sapien
ctagccccggccgatggaggggagg

SEQ ID NO: 1850408 - DNA, 25 bp, Homo sapien
cttactcttgagtcacatgggatct

SEQ ID NO: 1850409 - DNA, 25 bp, Homo sapien
catgccctcgggaagaggattggta

SEQ ID NO: 1850410 - DNA, 25 bp, Homo sapien
tctggaatgcgcgtgcctccttaat

SEQ ID NO: 1850411 - DNA, 25 bp, Homo sapien
gaagaatgccgattcctctggaatg

SEQ ID NO: 1850412 - DNA, 25 bp, Homo sapien
cagtgattgtaggaaaagcccaaac

SEQ ID NO: 1850413 - DNA, 25 bp, Homo sapien
tcagtgattgtaggaaaagcccaaa

SEQ ID NO: 1850414 - DNA, 25 bp, Homo sapien
aatgagttgggttaacaccagcgcc

SEQ ID NO: 1850415 - DNA, 25 bp, Homo sapien
tgctctctacgtcaccaaaggaggt

SEQ ID NO: 1850416 - DNA, 25 bp, Homo sapien
gatgttcccactatccaaacgtcgg

SEQ ID NO: 1850417 - DNA, 25 bp, Homo sapien
ttggagccattttgaaccctgcgac

SEQ ID NO: 1850418 - DNA, 25 bp, Homo sapien
gagttgatttggagccatacgctcc

SEQ ID NO: 1850419 - DNA, 25 bp, Homo sapien
attttccgtcaagttttagccaatg

SEQ ID NO: 1850420 - DNA, 25 bp, Homo sapien
tacgctccaaagtccaatagcaatc

SEQ ID NO: 1850421 - DNA, 25 bp, Homo sapien
ttccgtcaagttttagccaatgagt

SEQ ID NO: 1850422 - DNA, 25 bp, Homo sapien
tccccagagtctaatatggattctg

SEQ ID NO: 1850423 - DNA, 25 bp, Homo sapien
agaatcagtattgagggtccctgct

SEQ ID NO: 1850424 - DNA, 25 bp, Homo sapien
ccttctgctcagaggctcactcagt

SEQ ID NO: 1850425 - DNA, 25 bp, Homo sapien
aacgttgtttaattctctgccctgg

SEQ ID NO: 1850426 - DNA, 25 bp, Homo sapien
tcaggtgtttaatcatcattgtggg

SEQ ID NO: 1850427 - DNA, 25 bp, Homo sapien
gattatacaggagagagttggtctg

SEQ ID NO: 1850428 - DNA, 25 bp, Homo sapien
gaggccagaacagttcaagggaaaa

SEQ ID NO: 1850429 - DNA, 25 bp, Homo sapien
ctggttgtagaagaaagcttggcaa

SEQ ID NO: 1850430 - DNA, 25 bp, Homo sapien
aaggccctccagtactactctcgcc

SEQ ID NO: 1850431 - DNA, 25 bp, Homo sapien
ggccctccagtactactctcgcctg

SEQ ID NO: 1850432 - DNA, 25 bp, Homo sapien
tcaaggccctccagtactactctcg

SEQ ID NO: 1850433 - DNA, 25 bp, Homo sapien
gccctccagtactactctcgcctgc

SEQ ID NO: 1850434 - DNA, 25 bp, Homo sapien
caggttcctccgactgattcagttc

SEQ ID NO: 1850435 - DNA, 25 bp, Homo sapien
tcaggttcctccgactgattcagtt

SEQ ID NO: 1850436 - DNA, 25 bp, Homo sapien
aggttcctccgactgattcagttct

SEQ ID NO: 1850437 - DNA, 25 bp, Homo sapien
tctcctcggcgttgccgcctttgcc

SEQ ID NO: 1850438 - DNA, 25 bp, Homo sapien
accccaatgagcagggcggctgtcc

SEQ ID NO: 1850439 - DNA, 25 bp, Homo sapien
tgaccccaatgagcagggcggctgt

SEQ ID NO: 1850440 - DNA, 25 bp, Homo sapien
agatgaccccaatgagcagggcggc

SEQ ID NO: 1850441 - DNA, 25 bp, Homo sapien
gacagggaaaattgagagcacagcc

SEQ ID NO: 1850442 - DNA, 25 bp, Homo sapien
tcctttcttgttgaccatcccccca

SEQ ID NO: 1850443 - DNA, 25 bp, Homo sapien
cctttcttgttgaccatccccccag

SEQ ID NO: 1850444 - DNA, 25 bp, Homo sapien
ttccctgactttatcaaacccctca

SEQ ID NO: 1850445 - DNA, 25 bp, Homo sapien
tccctgactttatcaaacccctcac

SEQ ID NO: 1850446 - DNA, 25 bp, Homo sapien
gcagttggcccctcctcgcctggtt

SEQ ID NO: 1850447 - DNA, 25 bp, Homo sapien
tgcagttggcccctcctcgcctggt

SEQ ID NO: 1850448 - DNA, 25 bp, Homo sapien
ctgcagttggcccctcctcgcctgg

SEQ ID NO: 1850449 - DNA, 25 bp, Homo sapien
gatgctgacagcacggctttcctgg

SEQ ID NO: 1850450 - DNA, 25 bp, Homo sapien
tgctgatgctgacagcacggctttc

SEQ ID NO: 1850451 - DNA, 25 bp, Homo sapien
tatctcagggaggatcagcacaggg

SEQ ID NO: 1850452 - DNA, 25 bp, Homo sapien
tcctgaggccctatctcagggagga

SEQ ID NO: 1850453 - DNA, 25 bp, Homo sapien
ctcccagcccctctctccaggtcac

SEQ ID NO: 1850454 - DNA, 25 bp, Homo sapien
ccagcccctctctccaggtcactca

SEQ ID NO: 1850455 - DNA, 25 bp, Homo sapien
tcccagcccctctctccaggtcact

SEQ ID NO: 1850456 - DNA, 25 bp, Homo sapien
cagcccctctctccaggtcactcac

SEQ ID NO: 1850457 - DNA, 25 bp, Homo sapien
cagggacttcacaggtcagggttac

SEQ ID NO: 1850458 - DNA, 25 bp, Homo sapien
cagggttacggttccaccaggagct

SEQ ID NO: 1850459 - DNA, 25 bp, Homo sapien
accaccaattggacctcctccagag

SEQ ID NO: 1850460 - DNA, 25 bp, Homo sapien
tcacaggtcagggttacggttccac

SEQ ID NO: 1850461 - DNA, 25 bp, Homo sapien
ttccctaagggtcagacttccagaa

SEQ ID NO: 1850462 - DNA, 25 bp, Homo sapien
cttgtgagtgatcccagtggccatg

SEQ ID NO: 1850463 - DNA, 25 bp, Homo sapien
gggtcagacttccagaacgtgctca

SEQ ID NO: 1850464 - DNA, 25 bp, Homo sapien
ttgaggtggagagttacacttgtga

SEQ ID NO: 1850465 - DNA, 25 bp, Homo sapien
tggatgggggctgtgcgcaaggccc

SEQ ID NO: 1850466 - DNA, 25 bp, Homo sapien
ggatgggggctgtgcgcaaggcccg

SEQ ID NO: 1850467 - DNA, 25 bp, Homo sapien
gatgggggctgtgcgcaaggcccgg

SEQ ID NO: 1850468 - DNA, 25 bp, Homo sapien
gggtcaccattagctccgactgcag

SEQ ID NO: 1850469 - DNA, 25 bp, Homo sapien
tacaggagaaggtgggacggggatc

SEQ ID NO: 1850470 - DNA, 25 bp, Homo sapien
tcaccattagctccgactgcagtgt

SEQ ID NO: 1850471 - DNA, 25 bp, Homo sapien
cattagctccgactgcagtgtgaag

SEQ ID NO: 1850472 - DNA, 25 bp, Homo sapien
gccagctaagagtccctgcagggta

SEQ ID NO: 1850473 - DNA, 25 bp, Homo sapien
taagagtccctgcagggtagcttcc

SEQ ID NO: 1850474 - DNA, 25 bp, Homo sapien
tctcattaggcaccaggggcttccc

SEQ ID NO: 1850475 - DNA, 25 bp, Homo sapien
agggtagcttccctctgacacacat

SEQ ID NO: 1850476 - DNA, 25 bp, Homo sapien
tcacagggccgttttctacttctcc

SEQ ID NO: 1850477 - DNA, 25 bp, Homo sapien
ctcctgttcacagggccgttttcta

SEQ ID NO: 1850478 - DNA, 25 bp, Homo sapien
cctgttcacagggccgttttctact

SEQ ID NO: 1850479 - DNA, 25 bp, Homo sapien
tgttcacagggccgttttctacttc

SEQ ID NO: 1850480 - DNA, 25 bp, Homo sapien
ttgggaacaccagccgtgagttcag

SEQ ID NO: 1850481 - DNA, 25 bp, Homo sapien
aacaccagccgtgagttcagaggca

SEQ ID NO: 1850482 - DNA, 25 bp, Homo sapien
ggaacaccagccgtgagttcagagg

SEQ ID NO: 1850483 - DNA, 25 bp, Homo sapien
cttattgggaacaccagccgtgagt

SEQ ID NO: 1850484 - DNA, 25 bp, Homo sapien
cagtcagaggctgtaattgtgaagg

SEQ ID NO: 1850485 - DNA, 25 bp, Homo sapien
tccagtcagaggctgtaattgtgaa

SEQ ID NO: 1850486 - DNA, 25 bp, Homo sapien
tcagaggctgtaattgtgaaggttc

SEQ ID NO: 1850487 - DNA, 25 bp, Homo sapien
aaatccagtcagaggctgtaattgt

SEQ ID NO: 1850488 - DNA, 25 bp, Homo sapien
tcagaggccctcatgggccaaggct

SEQ ID NO: 1850489 - DNA, 25 bp, Homo sapien
aggccagtggaagtcagaggccctc

SEQ ID NO: 1850490 - DNA, 25 bp, Homo sapien
gtcagaggccctcatgggccaaggc

SEQ ID NO: 1850491 - DNA, 25 bp, Homo sapien
gaggccagtggaagtcagaggccct

SEQ ID NO: 1850492 - DNA, 25 bp, Homo sapien
gtagttggacttggtctcctttcca

SEQ ID NO: 1850493 - DNA, 25 bp, Homo sapien
gaagagggagccgttgggaaggaca

SEQ ID NO: 1850494 - DNA, 25 bp, Homo sapien
ggaaggacacgagccacactgtccc

SEQ ID NO: 1850495 - DNA, 25 bp, Homo sapien
aatcccctcatcctggatcccgaca

SEQ ID NO: 1850496 - DNA, 25 bp, Homo sapien
tgcctggcaccggaaaatcccctca

SEQ ID NO: 1850497 - DNA, 25 bp, Homo sapien
aggaccttccaagcttctgtccggc

SEQ ID NO: 1850498 - DNA, 25 bp, Homo sapien
ttccaagcttctgtccggcctgtgt

SEQ ID NO: 1850499 - DNA, 25 bp, Homo sapien
ggagacaggaccttccaagcttctg

SEQ ID NO: 1850500 - DNA, 25 bp, Homo sapien
ggggagacaggaccttccaagcttc

SEQ ID NO: 1850501 - DNA, 25 bp, Homo sapien
tgacggggatccaaatcattgctgg

SEQ ID NO: 1850502 - DNA, 25 bp, Homo sapien
gagaagcagggcctaaacagtgcaa

SEQ ID NO: 1850503 - DNA, 25 bp, Homo sapien
caaatcattgctggtctccctggaa

SEQ ID NO: 1850504 - DNA, 25 bp, Homo sapien
gaagcagggcctaaacagtgcaagg

SEQ ID NO: 1850505 - DNA, 25 bp, Homo sapien
tggctcgccaatccgggctgtgatg

SEQ ID NO: 1850506 - DNA, 25 bp, Homo sapien
cagtggctcgccaatccgggctgtg

SEQ ID NO: 1850507 - DNA, 25 bp, Homo sapien
ttgggggcccccttacacttcagca

SEQ ID NO: 1850508 - DNA, 25 bp, Homo sapien
ccagccgctggggtggtttcttggg

SEQ ID NO: 1850509 - DNA, 25 bp, Homo sapien
gaatgagggctaacaaaatttggac

SEQ ID NO: 1850510 - DNA, 25 bp, Homo sapien
tctgggaaaagttctaggacgactg

SEQ ID NO: 1850511 - DNA, 25 bp, Homo sapien
tgagggaccttgaaaggcacttcct

SEQ ID NO: 1850512 - DNA, 25 bp, Homo sapien
ggtaggaagggaatgagggctaaca

SEQ ID NO: 1850513 - DNA, 25 bp, Homo sapien
caggctccaactgctgttccggctg

SEQ ID NO: 1850514 - DNA, 25 bp, Homo sapien
ccaggctccaactgctgttccggct

SEQ ID NO: 1850515 - DNA, 25 bp, Homo sapien
aagttgcatcaatagggttcaggcc

SEQ ID NO: 1850516 - DNA, 25 bp, Homo sapien
gagccccatcttgattgcgcaaagt

SEQ ID NO: 1850517 - DNA, 25 bp, Homo sapien
atctttcagtcgtcttgtcacaggg

SEQ ID NO: 1850518 - DNA, 25 bp, Homo sapien
caattgggcctgcatcatgaaggca

SEQ ID NO: 1850519 - DNA, 25 bp, Homo sapien
agtgaggagagaactgcccccggcc

SEQ ID NO: 1850520 - DNA, 25 bp, Homo sapien
gtgaggagagaactgcccccggccc

SEQ ID NO: 1850521 - DNA, 25 bp, Homo sapien
ttttctgtgaaactacacaagttta

SEQ ID NO: 1850522 - DNA, 25 bp, Homo sapien
tctgtgaaactacacaagtttacaa

SEQ ID NO: 1850523 - DNA, 25 bp, Homo sapien
gcaccccaacccatatttaacatat

SEQ ID NO: 1850524 - DNA, 25 bp, Homo sapien
ttttggtgtgacaaaaagatacctc

SEQ ID NO: 1850525 - DNA, 25 bp, Homo sapien
gatcagatggtagctagttcagggc

SEQ ID NO: 1850526 - DNA, 25 bp, Homo sapien
aaattaaagacatgtcactcacagg

SEQ ID NO: 1850527 - DNA, 25 bp, Homo sapien
ctttggctatcacccctaatatggg

SEQ ID NO: 1850528 - DNA, 25 bp, Homo sapien
taaaatttacttcctgatggacagg

SEQ ID NO: 1850529 - DNA, 25 bp, Homo sapien
tcaaatgcggcagaaacctgcctgc

SEQ ID NO: 1850530 - DNA, 25 bp, Homo sapien
ccctccgaggtagatatctgagtca

SEQ ID NO: 1850531 - DNA, 25 bp, Homo sapien
ctccctggtccctccgttggggatg

SEQ ID NO: 1850532 - DNA, 25 bp, Homo sapien
ggtccctccgttggggatgtcactg

SEQ ID NO: 1850533 - DNA, 25 bp, Homo sapien
atcagagtgaacactccctggtccc

SEQ ID NO: 1850534 - DNA, 25 bp, Homo sapien
ggaaccctgtgtgggcacaacatta

SEQ ID NO: 1850535 - DNA, 25 bp, Homo sapien
tgggcacaacattactagggaaaat

SEQ ID NO: 1850536 - DNA, 25 bp, Homo sapien
ccctgtgtgggcacaacattactag

SEQ ID NO: 1850537 - DNA, 25 bp, Homo sapien
tgtgtgggcacaacattactaggga

SEQ ID NO: 1850538 - DNA, 25 bp, Homo sapien
ctcatttcccgtgggctgtacatct

SEQ ID NO: 1850539 - DNA, 25 bp, Homo sapien
cctcatttcccgtgggctgtacatc

SEQ ID NO: 1850540 - DNA, 25 bp, Homo sapien
gggaaagccctattcgagaggagat

SEQ ID NO: 1850541 - DNA, 25 bp, Homo sapien
cttgtatcctaaagtagaggaaatg

SEQ ID NO: 1850542 - DNA, 25 bp, Homo sapien
aagaggtcttgtatcctaaagtaga

SEQ ID NO: 1850543 - DNA, 25 bp, Homo sapien
ggaaagccctattcgagaggagatg

SEQ ID NO: 1850544 - DNA, 25 bp, Homo sapien
tgggaagcagaataggaatctccgt

SEQ ID NO: 1850545 - DNA, 25 bp, Homo sapien
ggcatccccagaaacatgtctccag

SEQ ID NO: 1850546 - DNA, 25 bp, Homo sapien
cagaaacatgtctccagatcctgag

SEQ ID NO: 1850547 - DNA, 25 bp, Homo sapien
ggaatctccgttgagcccaggcatc

SEQ ID NO: 1850548 - DNA, 25 bp, Homo sapien
tgttccttggccacccgtgggaaga

SEQ ID NO: 1850549 - DNA, 25 bp, Homo sapien
taacattccaacacacagaaagagc

SEQ ID NO: 1850550 - DNA, 25 bp, Homo sapien
cctgcctagataggaagtgggaaca

SEQ ID NO: 1850551 - DNA, 25 bp, Homo sapien
gctactatactccaattatccacaa

SEQ ID NO: 1850552 - DNA, 25 bp, Homo sapien
tcagctggggtgacagtgggatcca

SEQ ID NO: 1850553 - DNA, 25 bp, Homo sapien
cagctggggtgacagtgggatccac

SEQ ID NO: 1850554 - DNA, 25 bp, Homo sapien
tgtggcccccctgggtgactgacac

SEQ ID NO: 1850555 - DNA, 25 bp, Homo sapien
gaagggggtgtcggggagctggtgc

SEQ ID NO: 1850556 - DNA, 25 bp, Homo sapien
cagaggaagggggtgtcggggagct

SEQ ID NO: 1850557 - DNA, 25 bp, Homo sapien
gagctggtgcggctgtggcccccct

SEQ ID NO: 1850558 - DNA, 25 bp, Homo sapien
ctcctcttggaactttccgatgttt

SEQ ID NO: 1850559 - DNA, 25 bp, Homo sapien
gacagcatagatgtttgcctcctct

SEQ ID NO: 1850560 - DNA, 25 bp, Homo sapien
cagcatagatgtttgcctcctcttg

SEQ ID NO: 1850561 - DNA, 25 bp, Homo sapien
ttgacagcatagatgtttgcctcct

SEQ ID NO: 1850562 - DNA, 25 bp, Homo sapien
gaagtccttcactgaataagatgtg

SEQ ID NO: 1850563 - DNA, 25 bp, Homo sapien
ctctgaagtccttcactgaataaga

SEQ ID NO: 1850564 - DNA, 25 bp, Homo sapien
agtccttcactgaataagatgtgag

SEQ ID NO: 1850565 - DNA, 25 bp, Homo sapien
cttcactgaataagatgtgagtgac

SEQ ID NO: 1850566 - DNA, 25 bp, Homo sapien
actaggatatgggttactcaggtgg

SEQ ID NO: 1850567 - DNA, 25 bp, Homo sapien
caggtgggagtagaaatactcattt

SEQ ID NO: 1850568 - DNA, 25 bp, Homo sapien
ctgagacacggtgatgccacacttc

SEQ ID NO: 1850569 - DNA, 25 bp, Homo sapien
ggcctcctcactaggatatgggtta

SEQ ID NO: 1850570 - DNA, 25 bp, Homo sapien
tcgatggatgatgctcaccatgcgt

SEQ ID NO: 1850571 - DNA, 25 bp, Homo sapien
catgggtcgtgaactcattacatgc

SEQ ID NO: 1850572 - DNA, 25 bp, Homo sapien
tccctcagcaggttcatgacatggg

SEQ ID NO: 1850573 - DNA, 25 bp, Homo sapien
gatggcgctgaactttcgatggatg

SEQ ID NO: 1850574 - DNA, 25 bp, Homo sapien
ggccagtgggctggtgaggaggagc

SEQ ID NO: 1850575 - DNA, 25 bp, Homo sapien
tagtgggggccagtgggctggtgag

SEQ ID NO: 1850576 - DNA, 25 bp, Homo sapien
ctgtagtgggggccagtgggctggt

SEQ ID NO: 1850577 - DNA, 25 bp, Homo sapien
gtgggggccagtgggctggtgagga

SEQ ID NO: 1850578 - DNA, 25 bp, Homo sapien
tccgagtgttcgatggagttgtcag

SEQ ID NO: 1850579 - DNA, 25 bp, Homo sapien
caagtttgctgcgatagtccgagtg

SEQ ID NO: 1850580 - DNA, 25 bp, Homo sapien
tgtgacggatctgggcaagtttgct

SEQ ID NO: 1850581 - DNA, 25 bp, Homo sapien
catgttgtccaagcgcatcagctgt

SEQ ID NO: 1850582 - DNA, 25 bp, Homo sapien
cactctagccctataatgaacaggg

SEQ ID NO: 1850583 - DNA, 25 bp, Homo sapien
tttcctcagggccccaagttgtcac

SEQ ID NO: 1850584 - DNA, 25 bp, Homo sapien
tgttcccagagttgagcaatccggg

SEQ ID NO: 1850585 - DNA, 25 bp, Homo sapien
tagcatgcaggcgagtggacttagg

SEQ ID NO: 1850586 - DNA, 25 bp, Homo sapien
tttcacacaggacgctaaagagagc

SEQ ID NO: 1850587 - DNA, 25 bp, Homo sapien
aaagagagcaggcttcattcggtgg

SEQ ID NO: 1850588 - DNA, 25 bp, Homo sapien
ttcattcggtggcagtttagggcgt

SEQ ID NO: 1850589 - DNA, 25 bp, Homo sapien
cacacaggacgctaaagagagcagg

SEQ ID NO: 1850590 - DNA, 25 bp, Homo sapien
gtctgcggagggaggaagcggattg

SEQ ID NO: 1850591 - DNA, 25 bp, Homo sapien
tgcggagggaggaagcggattgggg

SEQ ID NO: 1850592 - DNA, 25 bp, Homo sapien
agtctgcggagggaggaagcggatt

SEQ ID NO: 1850593 - DNA, 25 bp, Homo sapien
gaggaagcggattgggggtggaatg

SEQ ID NO: 1850594 - DNA, 25 bp, Homo sapien
gagagggatcacttttctatgggct

SEQ ID NO: 1850595 - DNA, 25 bp, Homo sapien
ggaggtttgagagggatcacttttc

SEQ ID NO: 1850596 - DNA, 25 bp, Homo sapien
tgaagggaggtttgagagggatcac

SEQ ID NO: 1850597 - DNA, 25 bp, Homo sapien
acagtttcttagtctgggagccaga

SEQ ID NO: 1850598 - DNA, 25 bp, Homo sapien
tccaggctctggtcggtgatggtca

SEQ ID NO: 1850599 - DNA, 25 bp, Homo sapien
ctcgtccaggctctggtcggtgatg

SEQ ID NO: 1850600 - DNA, 25 bp, Homo sapien
gcctgggcctcgtccaggctctggt

SEQ ID NO: 1850601 - DNA, 25 bp, Homo sapien
tctggtcggtgatggtcattatctg

SEQ ID NO: 1850602 - DNA, 25 bp, Homo sapien
aatgtccccgatgtcttgcttccct

SEQ ID NO: 1850603 - DNA, 25 bp, Homo sapien
ctgcagaatgtccccgatgtcttgc

SEQ ID NO: 1850604 - DNA, 25 bp, Homo sapien
cgatgtcttgcttccctcggcctcc

SEQ ID NO: 1850605 - DNA, 25 bp, Homo sapien
cagaatgtccccgatgtcttgcttc

SEQ ID NO: 1850606 - DNA, 25 bp, Homo sapien
ctccgccaccgggaggctcgccagg

SEQ ID NO: 1850607 - DNA, 25 bp, Homo sapien
gggtctccgccaccgggaggctcgc

SEQ ID NO: 1850608 - DNA, 25 bp, Homo sapien
gcggccccagtagccgttcgtccat

SEQ ID NO: 1850609 - DNA, 25 bp, Homo sapien
ggcggccccagtagccgttcgtcca

SEQ ID NO: 1850610 - DNA, 25 bp, Homo sapien
accccggcactgaagggagacctgg

SEQ ID NO: 1850611 - DNA, 25 bp, Homo sapien
agggagacctgggataccggctggg

SEQ ID NO: 1850612 - DNA, 25 bp, Homo sapien
ggttcaccccggcactgaagggaga

SEQ ID NO: 1850613 - DNA, 25 bp, Homo sapien
cccggcggcggagaaaatggagccg

SEQ ID NO: 1850614 - DNA, 25 bp, Homo sapien
tggtacccctgccaagcaagagttg

SEQ ID NO: 1850615 - DNA, 25 bp, Homo sapien
caggttataacctctcaggtggagg

SEQ ID NO: 1850616 - DNA, 25 bp, Homo sapien
tactgcctagtagcttgacaactgg

SEQ ID NO: 1850617 - DNA, 25 bp, Homo sapien
gaaggtccattcacagcccgtaaac

SEQ ID NO: 1850618 - DNA, 25 bp, Homo sapien
tcagcaggtgtgtgtggggggccgg

SEQ ID NO: 1850619 - DNA, 25 bp, Homo sapien
cagcaggtgtgtgtggggggccggg

SEQ ID NO: 1850620 - DNA, 25 bp, Homo sapien
gcaggtgtgtgtggggggccgggac

SEQ ID NO: 1850621 - DNA, 25 bp, Homo sapien
agcaggtgtgtgtggggggccggga

SEQ ID NO: 1850622 - DNA, 25 bp, Homo sapien
tgaccgctgggcttccatccgctgg

SEQ ID NO: 1850623 - DNA, 25 bp, Homo sapien
ggctctgaccgctgggcttccatcc

SEQ ID NO: 1850624 - DNA, 25 bp, Homo sapien
gctcctccattcgacccccaccctg

SEQ ID NO: 1850625 - DNA, 25 bp, Homo sapien
gacccccaccctgaactctcagcag

SEQ ID NO: 1850626 - DNA, 25 bp, Homo sapien
aagagaccaggaggcctgggtttgc

SEQ ID NO: 1850627 - DNA, 25 bp, Homo sapien
ccaggaggcctgggtttgcctcctg

SEQ ID NO: 1850628 - DNA, 25 bp, Homo sapien
agaccaggaggcctgggtttgcctc

SEQ ID NO: 1850629 - DNA, 25 bp, Homo sapien
caagagaccaggaggcctgggtttg

SEQ ID NO: 1850630 - DNA, 25 bp, Homo sapien
gactgaggatagtgctgtaaagctg

SEQ ID NO: 1850631 - DNA, 25 bp, Homo sapien
tctgtcctcgagaggacggagtggg

SEQ ID NO: 1850632 - DNA, 25 bp, Homo sapien
gtgactgaggatagtgctgtaaagc

SEQ ID NO: 1850633 - DNA, 25 bp, Homo sapien
tctctgtcctcgagaggacggagtg

SEQ ID NO: 1850634 - DNA, 25 bp, Homo sapien
gactgggcttcagccaccaggtcca

SEQ ID NO: 1850635 - DNA, 25 bp, Homo sapien
actgggcttcagccaccaggtccag

SEQ ID NO: 1850636 - DNA, 25 bp, Homo sapien
agggagagcagggaggccgagcggg

SEQ ID NO: 1850637 - DNA, 25 bp, Homo sapien
cagggaggccgagcggggtcccagg

SEQ ID NO: 1850638 - DNA, 25 bp, Homo sapien
gcagggagagcagggaggccgagcg

SEQ ID NO: 1850639 - DNA, 25 bp, Homo sapien
ctgcagggagagcagggaggccgag

SEQ ID NO: 1850640 - DNA, 25 bp, Homo sapien
attagggactttggatcagaggaga

SEQ ID NO: 1850641 - DNA, 25 bp, Homo sapien
gtgacgtgattagggactttggatc

SEQ ID NO: 1850642 - DNA, 25 bp, Homo sapien
gacgtgattagggactttggatcag

SEQ ID NO: 1850643 - DNA, 25 bp, Homo sapien
tgtggacagggtgacgtgattaggg

SEQ ID NO: 1850644 - DNA, 25 bp, Homo sapien
gaggagcagatcgccaaggccgagt

SEQ ID NO: 1850645 - DNA, 25 bp, Homo sapien
ggggatggaggagcagatcgccaag

SEQ ID NO: 1850646 - DNA, 25 bp, Homo sapien
ggatggaggagcagatcgccaaggc

SEQ ID NO: 1850647 - DNA, 25 bp, Homo sapien
aggagcagatcgccaaggccgagtg

SEQ ID NO: 1850648 - DNA, 25 bp, Homo sapien
caagcagtggtggttgaagcgggag

SEQ ID NO: 1850649 - DNA, 25 bp, Homo sapien
tagtcaagcagtggtggttgaagcg

SEQ ID NO: 1850650 - DNA, 25 bp, Homo sapien
gctaggccagtggcccgtttcctct

SEQ ID NO: 1850651 - DNA, 25 bp, Homo sapien
cagtttgcccaagcctttcaaggcc

SEQ ID NO: 1850652 - DNA, 25 bp, Homo sapien
cttcctggggtctctcagcctccat

SEQ ID NO: 1850653 - DNA, 25 bp, Homo sapien
atcctcttcttcctggggtctctca

SEQ ID NO: 1850654 - DNA, 25 bp, Homo sapien
tcttcttcctggggtctctcagcct

SEQ ID NO: 1850655 - DNA, 25 bp, Homo sapien
catcctcttcttcctggggtctctc

SEQ ID NO: 1850656 - DNA, 25 bp, Homo sapien
gagactgggaaaaactcctccagct

SEQ ID NO: 1850657 - DNA, 25 bp, Homo sapien
gactcctggcggtctcatctccaga

SEQ ID NO: 1850658 - DNA, 25 bp, Homo sapien
gagcctcagtagtcccctaatccct

SEQ ID NO: 1850659 - DNA, 25 bp, Homo sapien
gatgcctgggtactgagcaggaagc

SEQ ID NO: 1850660 - DNA, 25 bp, Homo sapien
gaagtggaggattcagatccaggga

SEQ ID NO: 1850661 - DNA, 25 bp, Homo sapien
tgggaggggcatggttccagtggga

SEQ ID NO: 1850662 - DNA, 25 bp, Homo sapien
gcatggttccagtgggaagtggagg

SEQ ID NO: 1850663 - DNA, 25 bp, Homo sapien
gtgggaagtggaggattcagatcca

SEQ ID NO: 1850664 - DNA, 25 bp, Homo sapien
ttattccatggtcggtggcgacgga

SEQ ID NO: 1850665 - DNA, 25 bp, Homo sapien
agacaattattccatggtcggtggc

SEQ ID NO: 1850666 - DNA, 25 bp, Homo sapien
aattattccatggtcggtggcgacg

SEQ ID NO: 1850667 - DNA, 25 bp, Homo sapien
acaattattccatggtcggtggcga

SEQ ID NO: 1850668 - DNA, 25 bp, Homo sapien
aaaatgctgacattatgcagtcact

SEQ ID NO: 1850669 - DNA, 25 bp, Homo sapien
aatgctgacattatgcagtcactcc

SEQ ID NO: 1850670 - DNA, 25 bp, Homo sapien
tgacattatgcagtcactcccatct

SEQ ID NO: 1850671 - DNA, 25 bp, Homo sapien
gctgacattatgcagtcactcccat

SEQ ID NO: 1850672 - DNA, 25 bp, Homo sapien
ttcttaaatagcgatagcagtggct

SEQ ID NO: 1850673 - DNA, 25 bp, Homo sapien
cagtggctagaagaagcgcttcatc

SEQ ID NO: 1850674 - DNA, 25 bp, Homo sapien
gggcctgcctcatcctagcatctta

SEQ ID NO: 1850675 - DNA, 25 bp, Homo sapien
ggatccatcttaaaaccaggaaggc

SEQ ID NO: 1850676 - DNA, 25 bp, Homo sapien
ttggtttatgggcatttcttggagg

SEQ ID NO: 1850677 - DNA, 25 bp, Homo sapien
cctccttggtttatgggcatttctt

SEQ ID NO: 1850678 - DNA, 25 bp, Homo sapien
ccttggtttatgggcatttcttgga

SEQ ID NO: 1850679 - DNA, 25 bp, Homo sapien
tccttggtttatgggcatttcttgg

SEQ ID NO: 1850680 - DNA, 25 bp, Homo sapien
gaggcccgcgcatgcctgcagaaaa

SEQ ID NO: 1850681 - DNA, 25 bp, Homo sapien
cggagtaaggcaaggaggcgggatc

SEQ ID NO: 1850682 - DNA, 25 bp, Homo sapien
tcgcattatcgcagggttgggccga

SEQ ID NO: 1850683 - DNA, 25 bp, Homo sapien
gtcaagttgaggtgatccccgctcc

SEQ ID NO: 1850684 - DNA, 25 bp, Homo sapien
agaggctccggcaatgagaataggc

SEQ ID NO: 1850685 - DNA, 25 bp, Homo sapien
gcgcagccaagtctacggaccaagt

SEQ ID NO: 1850686 - DNA, 25 bp, Homo sapien
caagtccgagcctgcagacaagctc

SEQ ID NO: 1850687 - DNA, 25 bp, Homo sapien
ggctccggcaatgagaataggcccc

SEQ ID NO: 1850688 - DNA, 25 bp, Homo sapien
ggctgacagcgtccggcagcgcggc

SEQ ID NO: 1850689 - DNA, 25 bp, Homo sapien
ccccgcccccatgcgggggcacgct

SEQ ID NO: 1850690 - DNA, 25 bp, Homo sapien
cggctgacagcgtccggcagcgcgg

SEQ ID NO: 1850691 - DNA, 25 bp, Homo sapien
ctccggctgacagcgtccggcagcg

SEQ ID NO: 1850692 - DNA, 25 bp, Homo sapien
gtggctttgtgacgggcctctggtg

SEQ ID NO: 1850693 - DNA, 25 bp, Homo sapien
gcccggcgtggctttgtgacgggcc

SEQ ID NO: 1850694 - DNA, 25 bp, Homo sapien
ccggcgtggctttgtgacgggcctc

SEQ ID NO: 1850695 - DNA, 25 bp, Homo sapien
tgacaccgtccgtgcgcgcgggaag

SEQ ID NO: 1850696 - DNA, 25 bp, Homo sapien
ctgggctacttccaccgctccttcc

SEQ ID NO: 1850697 - DNA, 25 bp, Homo sapien
gttacgttggtgagcgacgtccgcc

SEQ ID NO: 1850698 - DNA, 25 bp, Homo sapien
ccgccaggaatagcggcgtctgctc

SEQ ID NO: 1850699 - DNA, 25 bp, Homo sapien
gtccgccggcgctagcccagcctgg

SEQ ID NO: 1850700 - DNA, 25 bp, Homo sapien
gggttaccgcactttccatctctcg

SEQ ID NO: 1850701 - DNA, 25 bp, Homo sapien
ttctgccttcacttgcgcgaccact

SEQ ID NO: 1850702 - DNA, 25 bp, Homo sapien
cagggccgatatcagggaaggccac

SEQ ID NO: 1850703 - DNA, 25 bp, Homo sapien
ccctatcccttcaggctttgcgggt

SEQ ID NO: 1850704 - DNA, 25 bp, Homo sapien
gggcgttgttcacggcagcagccca

SEQ ID NO: 1850705 - DNA, 25 bp, Homo sapien
tctttatcggctccggcctggagaa

SEQ ID NO: 1850706 - DNA, 25 bp, Homo sapien
gtcctgggcatctttatcggctccg

SEQ ID NO: 1850707 - DNA, 25 bp, Homo sapien
cctggagaagcgagcgggcggctcg

SEQ ID NO: 1850708 - DNA, 25 bp, Homo sapien
gaagggctattcgggccggctggtc

SEQ ID NO: 1850709 - DNA, 25 bp, Homo sapien
cagttgggggccagacgcctgggtt

SEQ ID NO: 1850710 - DNA, 25 bp, Homo sapien
ggctattcgggccggctggtccctc

SEQ ID NO: 1850711 - DNA, 25 bp, Homo sapien
attcgggccggctggtccctcaaag

SEQ ID NO: 1850712 - DNA, 25 bp, Homo sapien
tgcagtttgtctgctacggagcaga

SEQ ID NO: 1850713 - DNA, 25 bp, Homo sapien
gcagccagcatcaagggtgtggtcc

SEQ ID NO: 1850714 - DNA, 25 bp, Homo sapien
tgtgcgagcgtccactgcagtttgt

SEQ ID NO: 1850715 - DNA, 25 bp, Homo sapien
gtggtcccgtcctctgtgcgagcgt

SEQ ID NO: 1850716 - DNA, 25 bp, Homo sapien
ccgggagaatcgggcagccaggtgc

SEQ ID NO: 1850717 - DNA, 25 bp, Homo sapien
ctcccgagcatcagcagccacagca

SEQ ID NO: 1850718 - DNA, 25 bp, Homo sapien
agggctcaggacatcccaaccatgc

SEQ ID NO: 1850719 - DNA, 25 bp, Homo sapien
ttggggttggctccagcctcaagga

SEQ ID NO: 1850720 - DNA, 25 bp, Homo sapien
agagaccagagctggcacgtggagg

SEQ ID NO: 1850721 - DNA, 25 bp, Homo sapien
gggaggagttagcatggctgcctga

SEQ ID NO: 1850722 - DNA, 25 bp, Homo sapien
agctggcacgtggagggtgggcctg

SEQ ID NO: 1850723 - DNA, 25 bp, Homo sapien
ggctgcctgagggagcgccccacag

SEQ ID NO: 1850724 - DNA, 25 bp, Homo sapien
ggcctgagcacatcacaactccatc

SEQ ID NO: 1850725 - DNA, 25 bp, Homo sapien
gcctgagcacatcacaactccatcc

SEQ ID NO: 1850726 - DNA, 25 bp, Homo sapien
ccggatgagctggaggacgagaaga

SEQ ID NO: 1850727 - DNA, 25 bp, Homo sapien
gtccgaggccgtcgagtgaaaccag

SEQ ID NO: 1850728 - DNA, 25 bp, Homo sapien
gagctccatgctctcggcgtcgacg

SEQ ID NO: 1850729 - DNA, 25 bp, Homo sapien
accaatgctgtcctcgcctagtggg

SEQ ID NO: 1850730 - DNA, 25 bp, Homo sapien
agggccaggagaatcaccccggcca

SEQ ID NO: 1850731 - DNA, 25 bp, Homo sapien
ctagggccaggagaatcaccccggc

SEQ ID NO: 1850732 - DNA, 25 bp, Homo sapien
tagggccaggagaatcaccccggcc

SEQ ID NO: 1850733 - DNA, 25 bp, Homo sapien
cacagcacaggccagggaagctggt

SEQ ID NO: 1850734 - DNA, 25 bp, Homo sapien
cagggaagctggttggcagggggtg

SEQ ID NO: 1850735 - DNA, 25 bp, Homo sapien
ctggggagcacagcacaggccaggg

SEQ ID NO: 1850736 - DNA, 25 bp, Homo sapien
acaggccagggaagctggttggcag

SEQ ID NO: 1850737 - DNA, 25 bp, Homo sapien
ggtcagggccacagcgggacaaatc

SEQ ID NO: 1850738 - DNA, 25 bp, Homo sapien
cggtccctgcatgagggtggacagc

SEQ ID NO: 1850739 - DNA, 25 bp, Homo sapien
agcaaggaagcggagtagaagccca

SEQ ID NO: 1850740 - DNA, 25 bp, Homo sapien
cagccatcgcagcaaggaagcggag

SEQ ID NO: 1850741 - DNA, 25 bp, Homo sapien
ccagcactgagggagtcggtctcct

SEQ ID NO: 1850742 - DNA, 25 bp, Homo sapien
tgatcatggcagtactggtcatagg

SEQ ID NO: 1850743 - DNA, 25 bp, Homo sapien
tgcagtgttgcagcctttctcacag

SEQ ID NO: 1850744 - DNA, 25 bp, Homo sapien
cagtgcccgttgtggaagtgatcat

SEQ ID NO: 1850745 - DNA, 25 bp, Homo sapien
ggatggtagtccagacaccccaatg

SEQ ID NO: 1850746 - DNA, 25 bp, Homo sapien
gcaatgagcttagtcaagtcctgga

SEQ ID NO: 1850747 - DNA, 25 bp, Homo sapien
gaaggaggcttgagacctgagttcc

SEQ ID NO: 1850748 - DNA, 25 bp, Homo sapien
ccttcaactcttagagaggagccca

SEQ ID NO: 1850749 - DNA, 25 bp, Homo sapien
tggcactgcccgtcccggaagagaa

SEQ ID NO: 1850750 - DNA, 25 bp, Homo sapien
catcaaacagacactcttcagagtc

SEQ ID NO: 1850751 - DNA, 25 bp, Homo sapien
gaagagaagccagcaccgagagtgg

SEQ ID NO: 1850752 - DNA, 25 bp, Homo sapien
gggtctcacagtcgtagccatcaaa

SEQ ID NO: 1850753 - DNA, 25 bp, Homo sapien
gcagtgatggaagccgcaggaaggg

SEQ ID NO: 1850754 - DNA, 25 bp, Homo sapien
gggccacagcctttaggagctggtg

SEQ ID NO: 1850755 - DNA, 25 bp, Homo sapien
ctgagcagctgccattgtataggca

SEQ ID NO: 1850756 - DNA, 25 bp, Homo sapien
gcaggagcatcgaaagcctgggccc

SEQ ID NO: 1850757 - DNA, 25 bp, Homo sapien
aaataggatcatatgtcttcctctt

SEQ ID NO: 1850758 - DNA, 25 bp, Homo sapien
gaaataggatcatatgtcttcctct

SEQ ID NO: 1850759 - DNA, 25 bp, Homo sapien
agaaataggatcatatgtcttcctc

SEQ ID NO: 1850760 - DNA, 25 bp, Homo sapien
taaaataacctatctgaggccaccc

SEQ ID NO: 1850761 - DNA, 25 bp, Homo sapien
catgctatcaactgatcctgccttg

SEQ ID NO: 1850762 - DNA, 25 bp, Homo sapien
gactgcttctgagagacacttccca

SEQ ID NO: 1850763 - DNA, 25 bp, Homo sapien
tgaccttcccttaggcaacgcctgt

SEQ ID NO: 1850764 - DNA, 25 bp, Homo sapien
gtgagcttggcatggctttttccaa

SEQ ID NO: 1850765 - DNA, 25 bp, Homo sapien
tgtgagcttggcatggctttttcca

SEQ ID NO: 1850766 - DNA, 25 bp, Homo sapien
caataatttccacatcagtgctcac

SEQ ID NO: 1850767 - DNA, 25 bp, Homo sapien
tttttccaataatttccacatcagt

SEQ ID NO: 1850768 - DNA, 25 bp, Homo sapien
caactgaggtattcttgccttgtca

SEQ ID NO: 1850769 - DNA, 25 bp, Homo sapien
ccttgtcagcatagggggcaacaga

SEQ ID NO: 1850770 - DNA, 25 bp, Homo sapien
gattccaactgaggtattcttgcct

SEQ ID NO: 1850771 - DNA, 25 bp, Homo sapien
tgccttgtcagcatagggggcaaca

SEQ ID NO: 1850772 - DNA, 25 bp, Homo sapien
cccaggggtgatcctgctgtggcct

SEQ ID NO: 1850773 - DNA, 25 bp, Homo sapien
acccaggggtgatcctgctgtggcc

SEQ ID NO: 1850774 - DNA, 25 bp, Homo sapien
ctgtggcaggggtctatctccacct

SEQ ID NO: 1850775 - DNA, 25 bp, Homo sapien
ggcaggggtctatctccacctcaca

SEQ ID NO: 1850776 - DNA, 25 bp, Homo sapien
caggggtctatctccacctcacacc

SEQ ID NO: 1850777 - DNA, 25 bp, Homo sapien
gtggcaggggtctatctccacctca

SEQ ID NO: 1850778 - DNA, 25 bp, Homo sapien
tccaggtttgggagtacaggttcca

SEQ ID NO: 1850779 - DNA, 25 bp, Homo sapien
tctgtccatcgtagcctggggcaca

SEQ ID NO: 1850780 - DNA, 25 bp, Homo sapien
caggttccatggttgtgacagggtt

SEQ ID NO: 1850781 - DNA, 25 bp, Homo sapien
ggctggtccagacactcgtccacgt

SEQ ID NO: 1850782 - DNA, 25 bp, Homo sapien
agagtacagtaccaggaaggcaggc

SEQ ID NO: 1850783 - DNA, 25 bp, Homo sapien
gagacacaattgttggcgacacaca

SEQ ID NO: 1850784 - DNA, 25 bp, Homo sapien
caggcaccgttttaggcactaggaa

SEQ ID NO: 1850785 - DNA, 25 bp, Homo sapien
tacaagggacccagctcaagatagt

SEQ ID NO: 1850786 - DNA, 25 bp, Homo sapien
cttgtctttcctcccccttctcctg

SEQ ID NO: 1850787 - DNA, 25 bp, Homo sapien
tcccccttctcctgcagaccctctc

SEQ ID NO: 1850788 - DNA, 25 bp, Homo sapien
cctcccccttctcctgcagaccctc

SEQ ID NO: 1850789 - DNA, 25 bp, Homo sapien
ccccttctcctgcagaccctctcac

SEQ ID NO: 1850790 - DNA, 25 bp, Homo sapien
ggaggggccgctgtcgacacagagg

SEQ ID NO: 1850791 - DNA, 25 bp, Homo sapien
aggcctggactcacatgggttcacg

SEQ ID NO: 1850792 - DNA, 25 bp, Homo sapien
ctggactcacatgggttcacgtgat

SEQ ID NO: 1850793 - DNA, 25 bp, Homo sapien
gcctggactcacatgggttcacgtg

SEQ ID NO: 1850794 - DNA, 25 bp, Homo sapien
tggaaggttgcagagaggcccggtc

SEQ ID NO: 1850795 - DNA, 25 bp, Homo sapien
aggttgcagagaggcccggtccatc

SEQ ID NO: 1850796 - DNA, 25 bp, Homo sapien
gaggacagtggaaggttgcagagag

SEQ ID NO: 1850797 - DNA, 25 bp, Homo sapien
acagtggaaggttgcagagaggccc

SEQ ID NO: 1850798 - DNA, 25 bp, Homo sapien
ggaggcagtgggaattgcgtgggca

SEQ ID NO: 1850799 - DNA, 25 bp, Homo sapien
tctgggcacataagtccatcagagt

SEQ ID NO: 1850800 - DNA, 25 bp, Homo sapien
tgggaattgcgtgggcagggcttct

SEQ ID NO: 1850801 - DNA, 25 bp, Homo sapien
gcttctgggcacataagtccatcag

SEQ ID NO: 1850802 - DNA, 25 bp, Homo sapien
tggcagctgcctccggtgtagccag

SEQ ID NO: 1850803 - DNA, 25 bp, Homo sapien
gcagctgcctccggtgtagccagtg

SEQ ID NO: 1850804 - DNA, 25 bp, Homo sapien
agctgcctccggtgtagccagtggg

SEQ ID NO: 1850805 - DNA, 25 bp, Homo sapien
ctggcagctgcctccggtgtagcca

SEQ ID NO: 1850806 - DNA, 25 bp, Homo sapien
acaggtacccccattgaagcacggg

SEQ ID NO: 1850807 - DNA, 25 bp, Homo sapien
agctttccctcacagcgcgggccct

SEQ ID NO: 1850808 - DNA, 25 bp, Homo sapien
gttcacacaggtacccccattgaag

SEQ ID NO: 1850809 - DNA, 25 bp, Homo sapien
agaaggtgccaggcctgttcacaca

SEQ ID NO: 1850810 - DNA, 25 bp, Homo sapien
cacacagtagtcagtgctggtttgg

SEQ ID NO: 1850811 - DNA, 25 bp, Homo sapien
tgcaggagccgccattgagacatgg

SEQ ID NO: 1850812 - DNA, 25 bp, Homo sapien
gacacacagtagtcagtgctggttt

SEQ ID NO: 1850813 - DNA, 25 bp, Homo sapien
ccattgagacatggccctgagtgac

SEQ ID NO: 1850814 - DNA, 25 bp, Homo sapien
cttgacatagggggtgaccagcaca

SEQ ID NO: 1850815 - DNA, 25 bp, Homo sapien
acagggtgtatatggtttagggagg

SEQ ID NO: 1850816 - DNA, 25 bp, Homo sapien
ccttgacatagggggtgaccagcac

SEQ ID NO: 1850817 - DNA, 25 bp, Homo sapien
cctgtagggcaggtgcagttgtagc

SEQ ID NO: 1850818 - DNA, 25 bp, Homo sapien
tagcctgtagggcaggtgcagttgt

SEQ ID NO: 1850819 - DNA, 25 bp, Homo sapien
aggtgcagttgtagccagagggctg

SEQ ID NO: 1850820 - DNA, 25 bp, Homo sapien
ggtgcagttgtagccagagggctgg

SEQ ID NO: 1850821 - DNA, 25 bp, Homo sapien
cccgtccaacccacgtcacacacac

SEQ ID NO: 1850822 - DNA, 25 bp, Homo sapien
tggccccgtccaacccacgtcacac

SEQ ID NO: 1850823 - DNA, 25 bp, Homo sapien
ctggccccgtccaacccacgtcaca

SEQ ID NO: 1850824 - DNA, 25 bp, Homo sapien
gccccgtccaacccacgtcacacac

SEQ ID NO: 1850825 - DNA, 25 bp, Homo sapien
tggcaggtgcagttgtcctcaggtg

SEQ ID NO: 1850826 - DNA, 25 bp, Homo sapien
ctctggcagtgcccgtggtggcagg

SEQ ID NO: 1850827 - DNA, 25 bp, Homo sapien
gccagggcttccatcaggacagagg

SEQ ID NO: 1850828 - DNA, 25 bp, Homo sapien
gacagaggcagttggccttgtcttt

SEQ ID NO: 1850829 - DNA, 25 bp, Homo sapien
gagcacacaggggaacctcacagag

SEQ ID NO: 1850830 - DNA, 25 bp, Homo sapien
agcacacaggggaacctcacagagc

SEQ ID NO: 1850831 - DNA, 25 bp, Homo sapien
atctgcttgggctggcacaggttgg

SEQ ID NO: 1850832 - DNA, 25 bp, Homo sapien
catatctgcttgggctggcacaggt

SEQ ID NO: 1850833 - DNA, 25 bp, Homo sapien
agtcacatgaagatggcaactgtct

SEQ ID NO: 1850834 - DNA, 25 bp, Homo sapien
tagtaggcgttggtaagtgcttgct

SEQ ID NO: 1850835 - DNA, 25 bp, Homo sapien
tgtcttactcagatttgcctccgta

SEQ ID NO: 1850836 - DNA, 25 bp, Homo sapien
tccccatggttgtacaattatgcag

SEQ ID NO: 1850837 - DNA, 25 bp, Homo sapien
actctgccccaacccaaatggaata

SEQ ID NO: 1850838 - DNA, 25 bp, Homo sapien
tctgccccaacccaaatggaataaa

SEQ ID NO: 1850839 - DNA, 25 bp, Homo sapien
tcaaacacccaccaatgaactctgc

SEQ ID NO: 1850840 - DNA, 25 bp, Homo sapien
acccaccaatgaactctgccccaac

SEQ ID NO: 1850841 - DNA, 25 bp, Homo sapien
aggcagctggctccaacgggacatg

SEQ ID NO: 1850842 - DNA, 25 bp, Homo sapien
aaaagaaggctcctggaagatcaag

SEQ ID NO: 1850843 - DNA, 25 bp, Homo sapien
cgggacatgggtcactcaggcactc

SEQ ID NO: 1850844 - DNA, 25 bp, Homo sapien
cacctctgtttgacagcgtggccct

SEQ ID NO: 1850845 - DNA, 25 bp, Homo sapien
tcgatatcctcctcacatcgggtgc

SEQ ID NO: 1850846 - DNA, 25 bp, Homo sapien
tcctcacatcgggtgccggagaatc

SEQ ID NO: 1850847 - DNA, 25 bp, Homo sapien
gagcttctgcactcatcgatatcct

SEQ ID NO: 1850848 - DNA, 25 bp, Homo sapien
cactgcccaccattggcacagggag

SEQ ID NO: 1850849 - DNA, 25 bp, Homo sapien
gcaatccgcgtggttcaggcaggga

SEQ ID NO: 1850850 - DNA, 25 bp, Homo sapien
gaggcacactcgttggtctccacct

SEQ ID NO: 1850851 - DNA, 25 bp, Homo sapien
ggagctgaggcacactcgttggtct

SEQ ID NO: 1850852 - DNA, 25 bp, Homo sapien
cagatgcactggaagccgttgagca

SEQ ID NO: 1850853 - DNA, 25 bp, Homo sapien
ccacccaaggccccatccagctgat

SEQ ID NO: 1850854 - DNA, 25 bp, Homo sapien
ttccccacccaaggccccatccagc

SEQ ID NO: 1850855 - DNA, 25 bp, Homo sapien
acccaaggccccatccagctgatac

SEQ ID NO: 1850856 - DNA, 25 bp, Homo sapien
ccccacccaaggccccatccagctg

SEQ ID NO: 1850857 - DNA, 25 bp, Homo sapien
cgccatgttcacagggacttgggcc

SEQ ID NO: 1850858 - DNA, 25 bp, Homo sapien
gggagaggcactcattgtgatcagc

SEQ ID NO: 1850859 - DNA, 25 bp, Homo sapien
caagtaggtccagacaggtgcttcc

SEQ ID NO: 1850860 - DNA, 25 bp, Homo sapien
tgtgatcagcctcacaacgggagcc

SEQ ID NO: 1850861 - DNA, 25 bp, Homo sapien
caggtgggccccgaatagccaggct

SEQ ID NO: 1850862 - DNA, 25 bp, Homo sapien
gttggtgctgcattgggcatcccca

SEQ ID NO: 1850863 - DNA, 25 bp, Homo sapien
aggcagagtgtggagcctgtgaggg

SEQ ID NO: 1850864 - DNA, 25 bp, Homo sapien
gcatccccatggcacggctggctca

SEQ ID NO: 1850865 - DNA, 25 bp, Homo sapien
aagctcctagcagtcctcctggtgc

SEQ ID NO: 1850866 - DNA, 25 bp, Homo sapien
gaagctcctagcagtcctcctggtg

SEQ ID NO: 1850867 - DNA, 25 bp, Homo sapien
ctcctgataccctctacccccatac

SEQ ID NO: 1850868 - DNA, 25 bp, Homo sapien
caggttctcctcacagcttgtgccc

SEQ ID NO: 1850869 - DNA, 25 bp, Homo sapien
cacacacacgcagtgaaagctacca

SEQ ID NO: 1850870 - DNA, 25 bp, Homo sapien
gcagcaatacagtcatccaggttct

SEQ ID NO: 1850871 - DNA, 25 bp, Homo sapien
agagcccacccggtcaatgcaggtg

SEQ ID NO: 1850872 - DNA, 25 bp, Homo sapien
acattggtggctgacacagttgtct

SEQ ID NO: 1850873 - DNA, 25 bp, Homo sapien
gtctggattcacctcacagcccggg

SEQ ID NO: 1850874 - DNA, 25 bp, Homo sapien
ccccattctgacattggtggctgac

SEQ ID NO: 1850875 - DNA, 25 bp, Homo sapien
caggtgtaggtgtccagcccatcct

SEQ ID NO: 1850876 - DNA, 25 bp, Homo sapien
ttcgaacagcccctaggagggcagg

SEQ ID NO: 1850877 - DNA, 25 bp, Homo sapien
tggctgaacagaagtcccgaagctg

SEQ ID NO: 1850878 - DNA, 25 bp, Homo sapien
tgacatcacgttcacaggcatggcc

SEQ ID NO: 1850879 - DNA, 25 bp, Homo sapien
ccattaacacatgggttggctgaac

SEQ ID NO: 1850880 - DNA, 25 bp, Homo sapien
cgaggcctggatgtggcagcggccc

SEQ ID NO: 1850881 - DNA, 25 bp, Homo sapien
ggaggacaagggtcttcaagcttgg

SEQ ID NO: 1850882 - DNA, 25 bp, Homo sapien
acaagaagctgggtgtcaatggaga

SEQ ID NO: 1850883 - DNA, 25 bp, Homo sapien
cagggaggcaagtgcacaagaagct

SEQ ID NO: 1850884 - DNA, 25 bp, Homo sapien
tcaagcttggcctggcatctctcgc

SEQ ID NO: 1850885 - DNA, 25 bp, Homo sapien
gggtcaggaaactggcacgtctcac

SEQ ID NO: 1850886 - DNA, 25 bp, Homo sapien
tgggcgttctggcaggggtcaggaa

SEQ ID NO: 1850887 - DNA, 25 bp, Homo sapien
aaactggcacgtctcacccaggaag

SEQ ID NO: 1850888 - DNA, 25 bp, Homo sapien
aggaaactggcacgtctcacccagg

SEQ ID NO: 1850889 - DNA, 25 bp, Homo sapien
ggtcccttgtcccagagacaggctc

SEQ ID NO: 1850890 - DNA, 25 bp, Homo sapien
gcctccattggcacagggttctggg

SEQ ID NO: 1850891 - DNA, 25 bp, Homo sapien
tctgggaaactcccacacagcagcc

SEQ ID NO: 1850892 - DNA, 25 bp, Homo sapien
tctgaccactgagacacatagcagc

SEQ ID NO: 1850893 - DNA, 25 bp, Homo sapien
ctctgggtctgaccactgagacaca

SEQ ID NO: 1850894 - DNA, 25 bp, Homo sapien
tctgggtctgaccactgagacacat

SEQ ID NO: 1850895 - DNA, 25 bp, Homo sapien
gaccactgagacacatagcagcagc

SEQ ID NO: 1850896 - DNA, 25 bp, Homo sapien
tcctcggcctgctgcaagcctcacg

SEQ ID NO: 1850897 - DNA, 25 bp, Homo sapien
ggcagggaccctcagagctctcact

SEQ ID NO: 1850898 - DNA, 25 bp, Homo sapien
cttcaggcagggaccctcagagctc

SEQ ID NO: 1850899 - DNA, 25 bp, Homo sapien
tcggcctgctgcaagcctcacgtct

SEQ ID NO: 1850900 - DNA, 25 bp, Homo sapien
gggcttctgggccttatcttggctc

SEQ ID NO: 1850901 - DNA, 25 bp, Homo sapien
ttttctccttctggcgaatgggcaa

SEQ ID NO: 1850902 - DNA, 25 bp, Homo sapien
aatgggcaagatgctggccggtttt

SEQ ID NO: 1850903 - DNA, 25 bp, Homo sapien
cttggctcttgccaggacttatttt

SEQ ID NO: 1850904 - DNA, 25 bp, Homo sapien
gttcctttagtagcacagggaactg

SEQ ID NO: 1850905 - DNA, 25 bp, Homo sapien
ctgagttcctttagtagcacaggga

SEQ ID NO: 1850906 - DNA, 25 bp, Homo sapien
cttgagtcaacccaggacaactttg

SEQ ID NO: 1850907 - DNA, 25 bp, Homo sapien
cagaaggtgtcagtggcagctgtgc

SEQ ID NO: 1850908 - DNA, 25 bp, Homo sapien
ctgtagaggagaaggattgagacat

SEQ ID NO: 1850909 - DNA, 25 bp, Homo sapien
gagacatgacctttggtgaaactga

SEQ ID NO: 1850910 - DNA, 25 bp, Homo sapien
ttcacttatagtccagcaaggcctg

SEQ ID NO: 1850911 - DNA, 25 bp, Homo sapien
gacttctcaattgggccccaatcta

SEQ ID NO: 1850912 - DNA, 25 bp, Homo sapien
gcttccttggaagacatctagttag

SEQ ID NO: 1850913 - DNA, 25 bp, Homo sapien
gagaacacagtagacagccatacag

SEQ ID NO: 1850914 - DNA, 25 bp, Homo sapien
tcatcaaacgcctccaaagaatagc

SEQ ID NO: 1850915 - DNA, 25 bp, Homo sapien
gctcatcaaagacctgaggattctg

SEQ ID NO: 1850916 - DNA, 25 bp, Homo sapien
aagtatccagtctttcttgacggaa

SEQ ID NO: 1850917 - DNA, 25 bp, Homo sapien
catatacgtcttaacttatgaaaca

SEQ ID NO: 1850918 - DNA, 25 bp, Homo sapien
aattgtaatctgtttaggcaatggc

SEQ ID NO: 1850919 - DNA, 25 bp, Homo sapien
tatggtttgtatctggagtatggga

SEQ ID NO: 1850920 - DNA, 25 bp, Homo sapien
cttcgcccttttcgagccttttgat

SEQ ID NO: 1850921 - DNA, 25 bp, Homo sapien
tatttgccttcgcccttttcgagcc

SEQ ID NO: 1850922 - DNA, 25 bp, Homo sapien
tcctgtatttgccttcgcccttttc

SEQ ID NO: 1850923 - DNA, 25 bp, Homo sapien
tgtatttgccttcgcccttttcgag

SEQ ID NO: 1850924 - DNA, 25 bp, Homo sapien
ctttacttgggattccagtgtttct

SEQ ID NO: 1850925 - DNA, 25 bp, Homo sapien
tgggattccagtgtttctggtacac

SEQ ID NO: 1850926 - DNA, 25 bp, Homo sapien
tcttctttacttgggattccagtgt

SEQ ID NO: 1850927 - DNA, 25 bp, Homo sapien
gattccagtgtttctggtacactca

SEQ ID NO: 1850928 - DNA, 25 bp, Homo sapien
gctccctgtccttgtggtatactca

SEQ ID NO: 1850929 - DNA, 25 bp, Homo sapien
ccttgcagtgcctccacattttaga

SEQ ID NO: 1850930 - DNA, 25 bp, Homo sapien
cctttgagacaccagactgactctt

SEQ ID NO: 1850931 - DNA, 25 bp, Homo sapien
gattctggtcctttcagtacacctg

SEQ ID NO: 1850932 - DNA, 25 bp, Homo sapien
caaaagggcgtgatttagatatcaa

SEQ ID NO: 1850933 - DNA, 25 bp, Homo sapien
gggcgtgatttagatatcaagtatt

SEQ ID NO: 1850934 - DNA, 25 bp, Homo sapien
ctgagcatacaacaaaagggcgtga

SEQ ID NO: 1850935 - DNA, 25 bp, Homo sapien
catacaacaaaagggcgtgatttag

SEQ ID NO: 1850936 - DNA, 25 bp, Homo sapien
cacttcagtaggtactgggcattcc

SEQ ID NO: 1850937 - DNA, 25 bp, Homo sapien
gtaggtactgggcattcccttcttc

SEQ ID NO: 1850938 - DNA, 25 bp, Homo sapien
tcagtaggtactgggcattcccttc

SEQ ID NO: 1850939 - DNA, 25 bp, Homo sapien
acttcagtaggtactgggcattccc

SEQ ID NO: 1850940 - DNA, 25 bp, Homo sapien
gaagaactggctcacttaataagag

SEQ ID NO: 1850941 - DNA, 25 bp, Homo sapien
tatatattggcaagggtcataacac

SEQ ID NO: 1850942 - DNA, 25 bp, Homo sapien
tgccaattattctcattggtggaaa

SEQ ID NO: 1850943 - DNA, 25 bp, Homo sapien
aatctataaagttggtcagtttgcc

SEQ ID NO: 1850944 - DNA, 25 bp, Homo sapien
aaacagagaggtatcttagcaactg

SEQ ID NO: 1850945 - DNA, 25 bp, Homo sapien
gagaggtatcttagcaactgttttt

SEQ ID NO: 1850946 - DNA, 25 bp, Homo sapien
gaggtatcttagcaactgttttttc

SEQ ID NO: 1850947 - DNA, 25 bp, Homo sapien
cagagaggtatcttagcaactgttt

SEQ ID NO: 1850948 - DNA, 25 bp, Homo sapien
tgattgtgtgaggatgcgatctgac

SEQ ID NO: 1850949 - DNA, 25 bp, Homo sapien
caactcaagttccaatagacatcag

SEQ ID NO: 1850950 - DNA, 25 bp, Homo sapien
gactttgataaatgcaccacagaga

SEQ ID NO: 1850951 - DNA, 25 bp, Homo sapien
cctggccgtcttatctaagtcagag

SEQ ID NO: 1850952 - DNA, 25 bp, Homo sapien
cccatggatgccacggaagaagcat

SEQ ID NO: 1850953 - DNA, 25 bp, Homo sapien
aataccacagtgtgaatggccacaa

SEQ ID NO: 1850954 - DNA, 25 bp, Homo sapien
cagaaataccacagtgtgaatggcc

SEQ ID NO: 1850955 - DNA, 25 bp, Homo sapien
cattcagaaataccacagtgtgaat

SEQ ID NO: 1850956 - DNA, 25 bp, Homo sapien
gtcattcagaaataccacagtgtga

SEQ ID NO: 1850957 - DNA, 25 bp, Homo sapien
tgagttgtatatatgggaaacttac

SEQ ID NO: 1850958 - DNA, 25 bp, Homo sapien
cagttgtttgtaaacattttatact

SEQ ID NO: 1850959 - DNA, 25 bp, Homo sapien
tcttcagttgtttgtaaacatttta

SEQ ID NO: 1850960 - DNA, 25 bp, Homo sapien
cttcagttgtttgtaaacattttat

SEQ ID NO: 1850961 - DNA, 25 bp, Homo sapien
tcagttgtttgtaaacattttatac

SEQ ID NO: 1850962 - DNA, 25 bp, Homo sapien
agggagaacttagatgccatagaca

SEQ ID NO: 1850963 - DNA, 25 bp, Homo sapien
tcaaaagaagaatgagttctgtttg

SEQ ID NO: 1850964 - DNA, 25 bp, Homo sapien
ttgtcccagggagaacttagatgcc

SEQ ID NO: 1850965 - DNA, 25 bp, Homo sapien
ctgtttgtcccagggagaacttaga

SEQ ID NO: 1850966 - DNA, 25 bp, Homo sapien
gtggaaaagaagatagaaatgagtc

SEQ ID NO: 1850967 - DNA, 25 bp, Homo sapien
tggaaaagaagatagaaatgagtca

SEQ ID NO: 1850968 - DNA, 25 bp, Homo sapien
ctatattgcagaaaggttgtggaaa

SEQ ID NO: 1850969 - DNA, 25 bp, Homo sapien
tattgcagaaaggttgtggaaaaga

SEQ ID NO: 1850970 - DNA, 25 bp, Homo sapien
agctggagtgtgtctgctacaggca

SEQ ID NO: 1850971 - DNA, 25 bp, Homo sapien
tatatgtatccttagagctggagtg

SEQ ID NO: 1850972 - DNA, 25 bp, Homo sapien
tacaggcagcatagatagttgcaac

SEQ ID NO: 1850973 - DNA, 25 bp, Homo sapien
tactgaagtccgctacgattattat

SEQ ID NO: 1850974 - DNA, 25 bp, Homo sapien
ctttgtgttgaatatgcatgtcggg

SEQ ID NO: 1850975 - DNA, 25 bp, Homo sapien
tttgtgttgaatatgcatgtcggga

SEQ ID NO: 1850976 - DNA, 25 bp, Homo sapien
cactttgtgttgaatatgcatgtcg

SEQ ID NO: 1850977 - DNA, 25 bp, Homo sapien
tgtgttgaatatgcatgtcgggatc

SEQ ID NO: 1850978 - DNA, 25 bp, Homo sapien
tcctcatagtccagaagtctagcac

SEQ ID NO: 1850979 - DNA, 25 bp, Homo sapien
atcctcatagtccagaagtctagca

SEQ ID NO: 1850980 - DNA, 25 bp, Homo sapien
catcctcatagtccagaagtctagc

SEQ ID NO: 1850981 - DNA, 25 bp, Homo sapien
ctgaactgtatctggagatatacat

SEQ ID NO: 1850982 - DNA, 25 bp, Homo sapien
gaactgtatctggagatatacattt

SEQ ID NO: 1850983 - DNA, 25 bp, Homo sapien
ttctgaactgtatctggagatatac

SEQ ID NO: 1850984 - DNA, 25 bp, Homo sapien
tttgttctgaactgtatctggagat

SEQ ID NO: 1850985 - DNA, 25 bp, Homo sapien
cccagtagagtcaggatgacagcca

SEQ ID NO: 1850986 - DNA, 25 bp, Homo sapien
cactttgcttacgtcgtgcccatct

SEQ ID NO: 1850987 - DNA, 25 bp, Homo sapien
aatagccaggatggcaagtcccagt

SEQ ID NO: 1850988 - DNA, 25 bp, Homo sapien
gcccatcttgttaacaaaatagcca

SEQ ID NO: 1850989 - DNA, 25 bp, Homo sapien
gatttctttgtcagagagagatcaa

SEQ ID NO: 1850990 - DNA, 25 bp, Homo sapien
ttgcgtggagcagattgatcagacc

SEQ ID NO: 1850991 - DNA, 25 bp, Homo sapien
cagagatgcagaggatcactgagaa

SEQ ID NO: 1850992 - DNA, 25 bp, Homo sapien
ttcatcaggtctcgcatcatctgga

SEQ ID NO: 1850993 - DNA, 25 bp, Homo sapien
ggagttccctctggcccatagagca

SEQ ID NO: 1850994 - DNA, 25 bp, Homo sapien
ccatagagcagatagtcagatctct

SEQ ID NO: 1850995 - DNA, 25 bp, Homo sapien
agatctctgtgggatatctggctgc

SEQ ID NO: 1850996 - DNA, 25 bp, Homo sapien
tgaatgtccatggatcacacgcttg

SEQ ID NO: 1850997 - DNA, 25 bp, Homo sapien
tggaacaagtgacgtccacagcgga

SEQ ID NO: 1850998 - DNA, 25 bp, Homo sapien
tgtctgcacgtggaacagcccgtgg

SEQ ID NO: 1850999 - DNA, 25 bp, Homo sapien
catctgaagagcacatcggctgcat

SEQ ID NO: 1851000 - DNA, 25 bp, Homo sapien
ccacagcggagatgtttgtgaccct

SEQ ID NO: 1851001 - DNA, 25 bp, Homo sapien
agagaaagcaaccaaagcctggggt

SEQ ID NO: 1851002 - DNA, 25 bp, Homo sapien
gagaaagcaaccaaagcctggggtc

SEQ ID NO: 1851003 - DNA, 25 bp, Homo sapien
gggcagagaaagcaaccaaagcctg

SEQ ID NO: 1851004 - DNA, 25 bp, Homo sapien
ctggggcagagaaagcaaccaaagc

SEQ ID NO: 1851005 - DNA, 25 bp, Homo sapien
ctttttcaaaaaggcagcggtactg

SEQ ID NO: 1851006 - DNA, 25 bp, Homo sapien
tcaatggcgtcactcaccagtacag

SEQ ID NO: 1851007 - DNA, 25 bp, Homo sapien
ggtcagtctgccctcgtcaatggcg

SEQ ID NO: 1851008 - DNA, 25 bp, Homo sapien
gtactgcccgtcgtccgaaggtctg

SEQ ID NO: 1851009 - DNA, 25 bp, Homo sapien
cggatgtcttcccaatacacctggg

SEQ ID NO: 1851010 - DNA, 25 bp, Homo sapien
accagggtggcttccgcatagaaca

SEQ ID NO: 1851011 - DNA, 25 bp, Homo sapien
ttggatgcgatgctcagacacggcc

SEQ ID NO: 1851012 - DNA, 25 bp, Homo sapien
agaggcgttcctgaccaccagggtg

SEQ ID NO: 1851013 - DNA, 25 bp, Homo sapien
tccctccatgtggatgctaggggca

SEQ ID NO: 1851014 - DNA, 25 bp, Homo sapien
ctccatgtggatgctaggggcagac

SEQ ID NO: 1851015 - DNA, 25 bp, Homo sapien
catgtggatgctaggggcagacccc

SEQ ID NO: 1851016 - DNA, 25 bp, Homo sapien
gtccctccatgtggatgctaggggc

SEQ ID NO: 1851017 - DNA, 25 bp, Homo sapien
cagaggctgagatcccagtgacgtt

SEQ ID NO: 1851018 - DNA, 25 bp, Homo sapien
ccagtgacgttgctcacagggaggt

SEQ ID NO: 1851019 - DNA, 25 bp, Homo sapien
aggctgagatcccagtgacgttgct

SEQ ID NO: 1851020 - DNA, 25 bp, Homo sapien
agaggctgagatcccagtgacgttg

SEQ ID NO: 1851021 - DNA, 25 bp, Homo sapien
tcatgacattttgcaacgcctctag

SEQ ID NO: 1851022 - DNA, 25 bp, Homo sapien
atgacattttgcaacgcctctagca

SEQ ID NO: 1851023 - DNA, 25 bp, Homo sapien
acatcatgacattttgcaacgcctc

SEQ ID NO: 1851024 - DNA, 25 bp, Homo sapien
catcatgacattttgcaacgcctct

SEQ ID NO: 1851025 - DNA, 25 bp, Homo sapien
tagctggcaggttaacagggcatct

SEQ ID NO: 1851026 - DNA, 25 bp, Homo sapien
tgagcagggccaatgactctaaagt

SEQ ID NO: 1851027 - DNA, 25 bp, Homo sapien
tcacctccacgtgcattgtggtcct

SEQ ID NO: 1851028 - DNA, 25 bp, Homo sapien
ccagtattgtccattgtcggagggc

SEQ ID NO: 1851029 - DNA, 25 bp, Homo sapien
caggatgaataggaaggaggcgact

SEQ ID NO: 1851030 - DNA, 25 bp, Homo sapien
gaaggaggcgactgcaccagacaga

SEQ ID NO: 1851031 - DNA, 25 bp, Homo sapien
gaggcgactgcaccagacagattgt

SEQ ID NO: 1851032 - DNA, 25 bp, Homo sapien
gcgactgcaccagacagattgtagc

SEQ ID NO: 1851033 - DNA, 25 bp, Homo sapien
cacttcagaggcttgcgttcctgta

SEQ ID NO: 1851034 - DNA, 25 bp, Homo sapien
agaccacttcagaggcttgcgttcc

SEQ ID NO: 1851035 - DNA, 25 bp, Homo sapien
aggcttgcgttcctgtaggtctttc

SEQ ID NO: 1851036 - DNA, 25 bp, Homo sapien
cagaggcttgcgttcctgtaggtct

SEQ ID NO: 1851037 - DNA, 25 bp, Homo sapien
tctggcggcttgaagaatttggacg

SEQ ID NO: 1851038 - DNA, 25 bp, Homo sapien
gccaacatagctgtggacaaagcca

SEQ ID NO: 1851039 - DNA, 25 bp, Homo sapien
tgaggctcaaggtgcattggccaac

SEQ ID NO: 1851040 - DNA, 25 bp, Homo sapien
gacaaagcgctccaactatactccg

SEQ ID NO: 1851041 - DNA, 25 bp, Homo sapien
tcacgtggcttcgaaatggaaaacc

SEQ ID NO: 1851042 - DNA, 25 bp, Homo sapien
tgtggaactgagagagcccaacgtc

SEQ ID NO: 1851043 - DNA, 25 bp, Homo sapien
tcaccacaggagtgtcagagacagt

SEQ ID NO: 1851044 - DNA, 25 bp, Homo sapien
ccagaggtaactgtgctcacgaaca

SEQ ID NO: 1851045 - DNA, 25 bp, Homo sapien
tcaactgaggacgtttacgactgca

SEQ ID NO: 1851046 - DNA, 25 bp, Homo sapien
gggcttggatgagcctcttctcaag

SEQ ID NO: 1851047 - DNA, 25 bp, Homo sapien
aacttggtgttctaactgtttcata

SEQ ID NO: 1851048 - DNA, 25 bp, Homo sapien
cctcctatgatgcttgtgtgaaact

SEQ ID NO: 1851049 - DNA, 25 bp, Homo sapien
gattgctccatactctaacatctag

SEQ ID NO: 1851050 - DNA, 25 bp, Homo sapien
caatccttgacctcagtgaaagcag

SEQ ID NO: 1851051 - DNA, 25 bp, Homo sapien
taacatctagctggcttccctgtct

SEQ ID NO: 1851052 - DNA, 25 bp, Homo sapien
ccaagagtggttatgcctcctcgat

SEQ ID NO: 1851053 - DNA, 25 bp, Homo sapien
gcatctcttgtgtacttattgttta

SEQ ID NO: 1851054 - DNA, 25 bp, Homo sapien
tgtttaaggtttcctcaaactgtga

SEQ ID NO: 1851055 - DNA, 25 bp, Homo sapien
aacatacaggagtctgtctctgcta

SEQ ID NO: 1851056 - DNA, 25 bp, Homo sapien
tctctgctatggaatgccccatggg

SEQ ID NO: 1851057 - DNA, 25 bp, Homo sapien
tccaagaaatgtgccgcagggacat

SEQ ID NO: 1851058 - DNA, 25 bp, Homo sapien
tcgcctgtgcatggagaagctctca

SEQ ID NO: 1851059 - DNA, 25 bp, Homo sapien
cgacgtccctatggaagcgcgcata

SEQ ID NO: 1851060 - DNA, 25 bp, Homo sapien
cttccggtgtggatgagtctctgca

SEQ ID NO: 1851061 - DNA, 25 bp, Homo sapien
cactgtcagcgctgccatgcaggag

SEQ ID NO: 1851062 - DNA, 25 bp, Homo sapien
tcagtgtcactgtcagcgctgccat

SEQ ID NO: 1851063 - DNA, 25 bp, Homo sapien
cagccaaagccagtgggaagctcag

SEQ ID NO: 1851064 - DNA, 25 bp, Homo sapien
aatgtgcgcttatgtcgggtgtccc

SEQ ID NO: 1851065 - DNA, 25 bp, Homo sapien
cagagaacctacataagctacaggg

SEQ ID NO: 1851066 - DNA, 25 bp, Homo sapien
gaggccactgggtacatcttcactt

SEQ ID NO: 1851067 - DNA, 25 bp, Homo sapien
ttaggcaccaaagaacaccccatag

SEQ ID NO: 1851068 - DNA, 25 bp, Homo sapien
caggctttataaagactggacttca

SEQ ID NO: 1851069 - DNA, 25 bp, Homo sapien
ggtcaactgggcaatcgaagtattc

SEQ ID NO: 1851070 - DNA, 25 bp, Homo sapien
tgtgataaggtcaactgggcaatcg

SEQ ID NO: 1851071 - DNA, 25 bp, Homo sapien
aactgggcaatcgaagtattcaggg

SEQ ID NO: 1851072 - DNA, 25 bp, Homo sapien
aacaatgtgataaggtcaactgggc

SEQ ID NO: 1851073 - DNA, 25 bp, Homo sapien
cgctgtcccgccctgccaagggcgc

SEQ ID NO: 1851074 - DNA, 25 bp, Homo sapien
ccggccagcggcaaggccgctgtcc

SEQ ID NO: 1851075 - DNA, 25 bp, Homo sapien
gccaggcccgggctgtgatctgttc

SEQ ID NO: 1851076 - DNA, 25 bp, Homo sapien
cagttcctgcgcctcaggaagaggc

SEQ ID NO: 1851077 - DNA, 25 bp, Homo sapien
ggcgctgccatcaatgctgggactt

SEQ ID NO: 1851078 - DNA, 25 bp, Homo sapien
tgaggcgctgccatcaatgctggga

SEQ ID NO: 1851079 - DNA, 25 bp, Homo sapien
gaggcgctgccatcaatgctgggac

SEQ ID NO: 1851080 - DNA, 25 bp, Homo sapien
cgctgccatcaatgctgggacttca

SEQ ID NO: 1851081 - DNA, 25 bp, Homo sapien
cccctctttgaaggactcagatgag

SEQ ID NO: 1851082 - DNA, 25 bp, Homo sapien
tctttccccctctttgaaggactca

SEQ ID NO: 1851083 - DNA, 25 bp, Homo sapien
tttccccctctttgaaggactcaga

SEQ ID NO: 1851084 - DNA, 25 bp, Homo sapien
tccccctctttgaaggactcagatg

SEQ ID NO: 1851085 - DNA, 25 bp, Homo sapien
aagcccccgactccactcagcatct

SEQ ID NO: 1851086 - DNA, 25 bp, Homo sapien
ctgattcctgaagtagatgaacagc

SEQ ID NO: 1851087 - DNA, 25 bp, Homo sapien
aaagcccccgactccactcagcatc

SEQ ID NO: 1851088 - DNA, 25 bp, Homo sapien
gattagcacagtccccttcttggtg

SEQ ID NO: 1851089 - DNA, 25 bp, Homo sapien
tccccttcttggtgggtgagaaatg

SEQ ID NO: 1851090 - DNA, 25 bp, Homo sapien
aggagaaacctgacactcagggatt

SEQ ID NO: 1851091 - DNA, 25 bp, Homo sapien
gcaaatgaaaataggacgtgggaga

SEQ ID NO: 1851092 - DNA, 25 bp, Homo sapien
gtgtaaacctctccactccgaggaa

SEQ ID NO: 1851093 - DNA, 25 bp, Homo sapien
ttccggaaccacctgacttcaatgc

SEQ ID NO: 1851094 - DNA, 25 bp, Homo sapien
cggaaccacctgacttcaatgctgc

SEQ ID NO: 1851095 - DNA, 25 bp, Homo sapien
tgctgcctggatagaaaccactcac

SEQ ID NO: 1851096 - DNA, 25 bp, Homo sapien
tccattccaccgtaagggggctcat

SEQ ID NO: 1851097 - DNA, 25 bp, Homo sapien
aatgacactcagacttacgcagctc

SEQ ID NO: 1851098 - DNA, 25 bp, Homo sapien
ctcagacttacgcagctccaagaaa

SEQ ID NO: 1851099 - DNA, 25 bp, Homo sapien
agaaatgacactcagacttacgcag

SEQ ID NO: 1851100 - DNA, 25 bp, Homo sapien
tgacactcagacttacgcagctcca

SEQ ID NO: 1851101 - DNA, 25 bp, Homo sapien
gggtacacgaaggatccggtcacac

SEQ ID NO: 1851102 - DNA, 25 bp, Homo sapien
ctgcgggtacacgaaggatccggtc

SEQ ID NO: 1851103 - DNA, 25 bp, Homo sapien
aaggatccggtcacacgggcggcct

SEQ ID NO: 1851104 - DNA, 25 bp, Homo sapien
tacacgaaggatccggtcacacggg

SEQ ID NO: 1851105 - DNA, 25 bp, Homo sapien
tctcaattacattagggtgccagag

SEQ ID NO: 1851106 - DNA, 25 bp, Homo sapien
gttagacaggaatgagaaatcccgg

SEQ ID NO: 1851107 - DNA, 25 bp, Homo sapien
caaaacgggaggcacatttcaggtt

SEQ ID NO: 1851108 - DNA, 25 bp, Homo sapien
cagagctcttattggcgacatgtgc

SEQ ID NO: 1851109 - DNA, 25 bp, Homo sapien
tcggtaaccccacacagtatatagt

SEQ ID NO: 1851110 - DNA, 25 bp, Homo sapien
gacaagaccgcagtaagacaatgag

SEQ ID NO: 1851111 - DNA, 25 bp, Homo sapien
tgggtgaacctatgaaactgaggac

SEQ ID NO: 1851112 - DNA, 25 bp, Homo sapien
cctatgagatgtgaacaatgtccac

SEQ ID NO: 1851113 - DNA, 25 bp, Homo sapien
gacataacccaggatcgtctaggag

SEQ ID NO: 1851114 - DNA, 25 bp, Homo sapien
tgcgatcccttgataaagatgagca

SEQ ID NO: 1851115 - DNA, 25 bp, Homo sapien
agaaatggcctgtacaaaggcccct

SEQ ID NO: 1851116 - DNA, 25 bp, Homo sapien
gacaacctacatacactacagggat

SEQ ID NO: 1851117 - DNA, 25 bp, Homo sapien
tcactgtcaacgctgccaagctgga

SEQ ID NO: 1851118 - DNA, 25 bp, Homo sapien
tgtcactgtcaacgctgccaagctg

SEQ ID NO: 1851119 - DNA, 25 bp, Homo sapien
ctgtcaacgctgccaagctggagcc

SEQ ID NO: 1851120 - DNA, 25 bp, Homo sapien
cactgtcaacgctgccaagctggag

SEQ ID NO: 1851121 - DNA, 25 bp, Homo sapien
caggcaagtctcactcagggagaac

SEQ ID NO: 1851122 - DNA, 25 bp, Homo sapien
aagtctcactcagggagaactatga

SEQ ID NO: 1851123 - DNA, 25 bp, Homo sapien
agcaggcaagtctcactcagggaga

SEQ ID NO: 1851124 - DNA, 25 bp, Homo sapien
ggcaagtctcactcagggagaacta

SEQ ID NO: 1851125 - DNA, 25 bp, Homo sapien
ttgccttgggaaaactaccctcatg

SEQ ID NO: 1851126 - DNA, 25 bp, Homo sapien
caaaagttgaagatgaggcgctgcc

SEQ ID NO: 1851127 - DNA, 25 bp, Homo sapien
agttgaagatgaggcgctgccatca

SEQ ID NO: 1851128 - DNA, 25 bp, Homo sapien
aaagttgaagatgaggcgctgccat

SEQ ID NO: 1851129 - DNA, 25 bp, Homo sapien
aaaagttgaagatgaggcgctgcca

SEQ ID NO: 1851130 - DNA, 25 bp, Homo sapien
aagtgggaaagcttttcatcctgca

SEQ ID NO: 1851131 - DNA, 25 bp, Homo sapien
aagctcttgtggaagaataacagcc

SEQ ID NO: 1851132 - DNA, 25 bp, Homo sapien
gaataacagccaagtgggaaagctt

SEQ ID NO: 1851133 - DNA, 25 bp, Homo sapien
gcagaaggttcttccttgaatgtgg

SEQ ID NO: 1851134 - DNA, 25 bp, Homo sapien
cccgctttcaacgactcagatgaga

SEQ ID NO: 1851135 - DNA, 25 bp, Homo sapien
tcttttccccgctttcaacgactca

SEQ ID NO: 1851136 - DNA, 25 bp, Homo sapien
ttccccgctttcaacgactcagatg

SEQ ID NO: 1851137 - DNA, 25 bp, Homo sapien
ttttccccgctttcaacgactcaga

SEQ ID NO: 1851138 - DNA, 25 bp, Homo sapien
aaacaagttcctaagtctccctgag

SEQ ID NO: 1851139 - DNA, 25 bp, Homo sapien
ctccctgagccaatgatcctgcaaa

SEQ ID NO: 1851140 - DNA, 25 bp, Homo sapien
gtctccctgagccaatgatcctgca

SEQ ID NO: 1851141 - DNA, 25 bp, Homo sapien
acaagttcctaagtctccctgagcc

SEQ ID NO: 1851142 - DNA, 25 bp, Homo sapien
cttttgggtgaagtccagagtgtcc

SEQ ID NO: 1851143 - DNA, 25 bp, Homo sapien
tttgggtgaagtccagagtgtcctg

SEQ ID NO: 1851144 - DNA, 25 bp, Homo sapien
ttttgggtgaagtccagagtgtcct

SEQ ID NO: 1851145 - DNA, 25 bp, Homo sapien
ccttttgggtgaagtccagagtgtc

SEQ ID NO: 1851146 - DNA, 25 bp, Homo sapien
agccccgtcccaaggaagagcaggc

SEQ ID NO: 1851147 - DNA, 25 bp, Homo sapien
tgctctgtgcagattcagaccgtgc

SEQ ID NO: 1851148 - DNA, 25 bp, Homo sapien
tctgattcttgaagtagatgaacag

SEQ ID NO: 1851149 - DNA, 25 bp, Homo sapien
ttgaagtagatgaacagccccgtcc

SEQ ID NO: 1851150 - DNA, 25 bp, Homo sapien
agagggctcgtcatgcttggatgct

SEQ ID NO: 1851151 - DNA, 25 bp, Homo sapien
gtgagagggctcgtcatgcttggat

SEQ ID NO: 1851152 - DNA, 25 bp, Homo sapien
attgcactgtgagagggctcgtcat

SEQ ID NO: 1851153 - DNA, 25 bp, Homo sapien
tcgtcatgcttggatgctcctccac

SEQ ID NO: 1851154 - DNA, 25 bp, Homo sapien
tccattctggatcaggcctatggag

SEQ ID NO: 1851155 - DNA, 25 bp, Homo sapien
tctggatcaggcctatggagaccac

SEQ ID NO: 1851156 - DNA, 25 bp, Homo sapien
tggatcaggcctatggagaccaccg

SEQ ID NO: 1851157 - DNA, 25 bp, Homo sapien
atcaggcctatggagaccaccgcag

SEQ ID NO: 1851158 - DNA, 25 bp, Homo sapien
acacagcagaccaggaggttgctgt

SEQ ID NO: 1851159 - DNA, 25 bp, Homo sapien
accactcacacagcagaccaggagg

SEQ ID NO: 1851160 - DNA, 25 bp, Homo sapien
gaaaccactcacacagcagaccagg

SEQ ID NO: 1851161 - DNA, 25 bp, Homo sapien
actcacacagcagaccaggaggttg

SEQ ID NO: 1851162 - DNA, 25 bp, Homo sapien
tgcaggatacatagtccccttaggt

SEQ ID NO: 1851163 - DNA, 25 bp, Homo sapien
ggatacatagtccccttaggttgga

SEQ ID NO: 1851164 - DNA, 25 bp, Homo sapien
caggatacatagtccccttaggttg

SEQ ID NO: 1851165 - DNA, 25 bp, Homo sapien
ctttgcaggatacatagtcccctta

SEQ ID NO: 1851166 - DNA, 25 bp, Homo sapien
attgtgagagggctcatcacacttg

SEQ ID NO: 1851167 - DNA, 25 bp, Homo sapien
ttgtgagagggctcatcacacttgg

SEQ ID NO: 1851168 - DNA, 25 bp, Homo sapien
tccattgtgagagggctcatcacac

SEQ ID NO: 1851169 - DNA, 25 bp, Homo sapien
cattccattgtgagagggctcatca

SEQ ID NO: 1851170 - DNA, 25 bp, Homo sapien
agtggggagctcagcaccatcagtg

SEQ ID NO: 1851171 - DNA, 25 bp, Homo sapien
gtcgggtgcccacagccaaagccag

SEQ ID NO: 1851172 - DNA, 25 bp, Homo sapien
aagccagtggggagctcagcaccat

SEQ ID NO: 1851173 - DNA, 25 bp, Homo sapien
tggggagctcagcaccatcagtgtc

SEQ ID NO: 1851174 - DNA, 25 bp, Homo sapien
taatgttatcgatttcctcacccct

SEQ ID NO: 1851175 - DNA, 25 bp, Homo sapien
gactgccttggttgcatctcgaaaa

SEQ ID NO: 1851176 - DNA, 25 bp, Homo sapien
taaagaagtgcgactcttccccact

SEQ ID NO: 1851177 - DNA, 25 bp, Homo sapien
caagatggttgaaagcattgttcct

SEQ ID NO: 1851178 - DNA, 25 bp, Homo sapien
tgagagagtctattcccttagaatc

SEQ ID NO: 1851179 - DNA, 25 bp, Homo sapien
tgttgctttcatcaagcgtgtgaca

SEQ ID NO: 1851180 - DNA, 25 bp, Homo sapien
tccttgggctcatgtacgattgttc

SEQ ID NO: 1851181 - DNA, 25 bp, Homo sapien
tccaaactgtggctcaacaaacgac

SEQ ID NO: 1851182 - DNA, 25 bp, Homo sapien
tcagtttgggcctactacggctaag

SEQ ID NO: 1851183 - DNA, 25 bp, Homo sapien
catcatctagagtgcaagggttgaa

SEQ ID NO: 1851184 - DNA, 25 bp, Homo sapien
gaacacatatcttcgtgaggacata

SEQ ID NO: 1851185 - DNA, 25 bp, Homo sapien
tacggctaaggctgttctgaacact

SEQ ID NO: 1851186 - DNA, 25 bp, Homo sapien
ccaaagccctgaattgagggtgcct

SEQ ID NO: 1851187 - DNA, 25 bp, Homo sapien
gagggtgcctatcaggaatctatag

SEQ ID NO: 1851188 - DNA, 25 bp, Homo sapien
gatgagctacgaagttccaggatca

SEQ ID NO: 1851189 - DNA, 25 bp, Homo sapien
gaatctataggccttcgtgtggaag

SEQ ID NO: 1851190 - DNA, 25 bp, Homo sapien
tatgcctatagtgtggaatgtctaa

SEQ ID NO: 1851191 - DNA, 25 bp, Homo sapien
gagaatcctccgtcttctaaatttg

SEQ ID NO: 1851192 - DNA, 25 bp, Homo sapien
tcagatagcacataatagagaatcc

SEQ ID NO: 1851193 - DNA, 25 bp, Homo sapien
tctttggagccaaatggaccagatg

SEQ ID NO: 1851194 - DNA, 25 bp, Homo sapien
ctgaggaagccacaagggaggacat

SEQ ID NO: 1851195 - DNA, 25 bp, Homo sapien
tgaggaagccacaagggaggacatt

SEQ ID NO: 1851196 - DNA, 25 bp, Homo sapien
ggtcctgagaaagccctctcttgtg

SEQ ID NO: 1851197 - DNA, 25 bp, Homo sapien
tcttctttgaatgtgtcatctgcac

SEQ ID NO: 1851198 - DNA, 25 bp, Homo sapien
ttgtggaagaataacagccaggagg

SEQ ID NO: 1851199 - DNA, 25 bp, Homo sapien
aggagggaaagcttttcatcctgca

SEQ ID NO: 1851200 - DNA, 25 bp, Homo sapien
tgactctactaacagtttcttttcc

SEQ ID NO: 1851201 - DNA, 25 bp, Homo sapien
cctgactctactaacagtttctttt

SEQ ID NO: 1851202 - DNA, 25 bp, Homo sapien
ctgactctactaacagtttcttttc

SEQ ID NO: 1851203 - DNA, 25 bp, Homo sapien
aacatctatctagccacagagtgcc

SEQ ID NO: 1851204 - DNA, 25 bp, Homo sapien
gaaagttctgcaagtccctacccga

SEQ ID NO: 1851205 - DNA, 25 bp, Homo sapien
atttagaaacctctcctaagacagg

SEQ ID NO: 1851206 - DNA, 25 bp, Homo sapien
tctcactagggaaaccgtatctgtt

SEQ ID NO: 1851207 - DNA, 25 bp, Homo sapien
tagcaggacattagagccgtttggg

SEQ ID NO: 1851208 - DNA, 25 bp, Homo sapien
tatgctttcacatagtaaccatgca

SEQ ID NO: 1851209 - DNA, 25 bp, Homo sapien
ggagagttctctgtcactacaaccc

SEQ ID NO: 1851210 - DNA, 25 bp, Homo sapien
caagatctcaaaccaaaggacccct

SEQ ID NO: 1851211 - DNA, 25 bp, Homo sapien
aagcccccgactccactcagcatct

SEQ ID NO: 1851212 - DNA, 25 bp, Homo sapien
ctgattcctgaagtagatgaacagc

SEQ ID NO: 1851213 - DNA, 25 bp, Homo sapien
aaagcccccgactccactcagcatc

SEQ ID NO: 1851214 - DNA, 25 bp, Homo sapien
tcctgcctggcaggcgagactgctt

SEQ ID NO: 1851215 - DNA, 25 bp, Homo sapien
acaaataactcagatcaacagcacc

SEQ ID NO: 1851216 - DNA, 25 bp, Homo sapien
ggaggtacaggtgtttctagaaaca

SEQ ID NO: 1851217 - DNA, 25 bp, Homo sapien
tctagaaacacctacagggctaccc

SEQ ID NO: 1851218 - DNA, 25 bp, Homo sapien
gatgagcacagtccccttcttggtg

SEQ ID NO: 1851219 - DNA, 25 bp, Homo sapien
tcttggtgggtgagaaatttatgaa

SEQ ID NO: 1851220 - DNA, 25 bp, Homo sapien
aataggatgtcggagaggagaaacc

SEQ ID NO: 1851221 - DNA, 25 bp, Homo sapien
ggagaaacctgacactcagggatga

SEQ ID NO: 1851222 - DNA, 25 bp, Homo sapien
gtgtaaacctctccactccgaggaa

SEQ ID NO: 1851223 - DNA, 25 bp, Homo sapien
tgctgcctggatagaaaccactcac

SEQ ID NO: 1851224 - DNA, 25 bp, Homo sapien
cggaaccacctgacttcaatgctgc

SEQ ID NO: 1851225 - DNA, 25 bp, Homo sapien
ttccggaaccacctgacttcaatgc

SEQ ID NO: 1851226 - DNA, 25 bp, Homo sapien
ccattccactgtgagggggctcatc

SEQ ID NO: 1851227 - DNA, 25 bp, Homo sapien
cattccactgtgagggggctcatca

SEQ ID NO: 1851228 - DNA, 25 bp, Homo sapien
tccattccactgtgagggggctcat

SEQ ID NO: 1851229 - DNA, 25 bp, Homo sapien
taggcagtagatcattgtccattcc

SEQ ID NO: 1851230 - DNA, 25 bp, Homo sapien
gaggtctcctcaattcccctagaaa

SEQ ID NO: 1851231 - DNA, 25 bp, Homo sapien
tactaagccctcgagatattaggca

SEQ ID NO: 1851232 - DNA, 25 bp, Homo sapien
aaccacaaactggagcaaatgctga

SEQ ID NO: 1851233 - DNA, 25 bp, Homo sapien
agaaatgacactcagacgtagagta

SEQ ID NO: 1851234 - DNA, 25 bp, Homo sapien
cactcagacgtagagtactccaaga

SEQ ID NO: 1851235 - DNA, 25 bp, Homo sapien
aatgacactcagacgtagagtactc

SEQ ID NO: 1851236 - DNA, 25 bp, Homo sapien
gacgtagagtactccaagaaacgtg

SEQ ID NO: 1851237 - DNA, 25 bp, Homo sapien
aacgatccagtcacacaggcggcct

SEQ ID NO: 1851238 - DNA, 25 bp, Homo sapien
tcatcccacatgtttaccggttcct

SEQ ID NO: 1851239 - DNA, 25 bp, Homo sapien
agagcagtgaaagtgatggcccaac

SEQ ID NO: 1851240 - DNA, 25 bp, Homo sapien
gcttagacaggaatgagaaatgtcg

SEQ ID NO: 1851241 - DNA, 25 bp, Homo sapien
tctgaacccttccttagtgctgacc

SEQ ID NO: 1851242 - DNA, 25 bp, Homo sapien
gtgactccaagtactaaagatctca

SEQ ID NO: 1851243 - DNA, 25 bp, Homo sapien
ttattggtggagatttgagtagaaa

SEQ ID NO: 1851244 - DNA, 25 bp, Homo sapien
gacataacccaggatcgtttaggag

SEQ ID NO: 1851245 - DNA, 25 bp, Homo sapien
aaatcctctaaagaccctgaggaca

SEQ ID NO: 1851246 - DNA, 25 bp, Homo sapien
gggagctcagcaccatcagtgtcac

SEQ ID NO: 1851247 - DNA, 25 bp, Homo sapien
tcagtgtcactgtcagaactgccat

SEQ ID NO: 1851248 - DNA, 25 bp, Homo sapien
ggtgtccccagccaaagccagtggg

SEQ ID NO: 1851249 - DNA, 25 bp, Homo sapien
gtcactgtcagaactgccatgcagg

SEQ ID NO: 1851250 - DNA, 25 bp, Homo sapien
gtctcactcagggagaactatgaac

SEQ ID NO: 1851251 - DNA, 25 bp, Homo sapien
ctcactcagggagaactatgaaccc

SEQ ID NO: 1851252 - DNA, 25 bp, Homo sapien
ctcagggagaactatgaacccctcc

SEQ ID NO: 1851253 - DNA, 25 bp, Homo sapien
tcactcagggagaactatgaacccc

SEQ ID NO: 1851254 - DNA, 25 bp, Homo sapien
gatcttgtctaactgcaacctctgt

SEQ ID NO: 1851255 - DNA, 25 bp, Homo sapien
tctcctgggttcaagctattctcct

SEQ ID NO: 1851256 - DNA, 25 bp, Homo sapien
gaatgtagagcgtgaatcaggatac

SEQ ID NO: 1851257 - DNA, 25 bp, Homo sapien
tgtggattgccaagaactctcccct

SEQ ID NO: 1851258 - DNA, 25 bp, Homo sapien
cagacataggtggaaagtccctgcc

SEQ ID NO: 1851259 - DNA, 25 bp, Homo sapien
cttttcaagtaagatccagcatgct

SEQ ID NO: 1851260 - DNA, 25 bp, Homo sapien
ctgatatttttcatgcctctgtggg

SEQ ID NO: 1851261 - DNA, 25 bp, Homo sapien
tatttttcatgcctctgtgggaagt

SEQ ID NO: 1851262 - DNA, 25 bp, Homo sapien
gatatttttcatgcctctgtgggaa

SEQ ID NO: 1851263 - DNA, 25 bp, Homo sapien
atttttcatgcctctgtgggaagtc

SEQ ID NO: 1851264 - DNA, 25 bp, Homo sapien
tcataagtccgtgatgtgccaggca

SEQ ID NO: 1851265 - DNA, 25 bp, Homo sapien
cattatagtgggaaagaaagcgcaa

SEQ ID NO: 1851266 - DNA, 25 bp, Homo sapien
caatgtgtcgttgctcccaagcaga

SEQ ID NO: 1851267 - DNA, 25 bp, Homo sapien
gaaatgctggtaggagggctcttcc

SEQ ID NO: 1851268 - DNA, 25 bp, Homo sapien
ggctgactgaaaccgtggctaagaa

SEQ ID NO: 1851269 - DNA, 25 bp, Homo sapien
gatcatttgtcatgtccagtaacac

SEQ ID NO: 1851270 - DNA, 25 bp, Homo sapien
tggagtaagccacccagctacctaa

SEQ ID NO: 1851271 - DNA, 25 bp, Homo sapien
gcaaccaactacagtatagcctgat

SEQ ID NO: 1851272 - DNA, 25 bp, Homo sapien
aatcccatagcggatgacaccacag

SEQ ID NO: 1851273 - DNA, 25 bp, Homo sapien
gatccagaatatgggaacttccact

SEQ ID NO: 1851274 - DNA, 25 bp, Homo sapien
ggctgttaaaacatggcactcttct

SEQ ID NO: 1851275 - DNA, 25 bp, Homo sapien
cagggatgaaaccaacaagatccag

SEQ ID NO: 1851276 - DNA, 25 bp, Homo sapien
taacaacttaagtctcaatcagcag

SEQ ID NO: 1851277 - DNA, 25 bp, Homo sapien
agcactactcacaatggccaggaga

SEQ ID NO: 1851278 - DNA, 25 bp, Homo sapien
atcagcagatgagtgtataaggaaa

SEQ ID NO: 1851279 - DNA, 25 bp, Homo sapien
ggccaggagatgttaacaacttaag

SEQ ID NO: 1851280 - DNA, 25 bp, Homo sapien
gaatactggtaagcatcactgtctc

SEQ ID NO: 1851281 - DNA, 25 bp, Homo sapien
taggttgtcctctagaacacccaca

SEQ ID NO: 1851282 - DNA, 25 bp, Homo sapien
tctaaggtaaggacaaatgctcaag

SEQ ID NO: 1851283 - DNA, 25 bp, Homo sapien
aatgctcaagaccagtaggttgtcc

SEQ ID NO: 1851284 - DNA, 25 bp, Homo sapien
taaccgggaaaagagtgtcatcagg

SEQ ID NO: 1851285 - DNA, 25 bp, Homo sapien
tccataagaaggaagagcctgccaa

SEQ ID NO: 1851286 - DNA, 25 bp, Homo sapien
tagtgacctccctcataaccgggaa

SEQ ID NO: 1851287 - DNA, 25 bp, Homo sapien
gactctggcttcatgacgaaactca

SEQ ID NO: 1851288 - DNA, 25 bp, Homo sapien
tatgaacaggcacccccaatgaggg

SEQ ID NO: 1851289 - DNA, 25 bp, Homo sapien
gacaaggagtggaatgactatgaac

SEQ ID NO: 1851290 - DNA, 25 bp, Homo sapien
gacaaagggagctcagacaaggagt

SEQ ID NO: 1851291 - DNA, 25 bp, Homo sapien
caatgagggaccctagaaccagagg

SEQ ID NO: 1851292 - DNA, 25 bp, Homo sapien
ccaggaccacaaggatctggaaaat

SEQ ID NO: 1851293 - DNA, 25 bp, Homo sapien
catggctggtgtagacatctgcaca

SEQ ID NO: 1851294 - DNA, 25 bp, Homo sapien
tttccaggaccacaaggatctggaa

SEQ ID NO: 1851295 - DNA, 25 bp, Homo sapien
ctgaggtgctccacatggctggtgt

SEQ ID NO: 1851296 - DNA, 25 bp, Homo sapien
ctaataagagcgatggacacaatgc

SEQ ID NO: 1851297 - DNA, 25 bp, Homo sapien
aatgctggctgtcagcatcccgtgc

SEQ ID NO: 1851298 - DNA, 25 bp, Homo sapien
cgatggacacaatgctggctgtcag

SEQ ID NO: 1851299 - DNA, 25 bp, Homo sapien
ataagagcgatggacacaatgctgg

SEQ ID NO: 1851300 - DNA, 25 bp, Homo sapien
gataaacagtgaccatggattagaa

SEQ ID NO: 1851301 - DNA, 25 bp, Homo sapien
gcaacaatgtagtgaaagacacaac

SEQ ID NO: 1851302 - DNA, 25 bp, Homo sapien
ctcattgtgtatctggaactagtca

SEQ ID NO: 1851303 - DNA, 25 bp, Homo sapien
gaaagagaggcagattcacagatag

SEQ ID NO: 1851304 - DNA, 25 bp, Homo sapien
tgattgatgtgacttgccagaatgt

SEQ ID NO: 1851305 - DNA, 25 bp, Homo sapien
gattgatgtgacttgccagaatgtt

SEQ ID NO: 1851306 - DNA, 25 bp, Homo sapien
tcttgattgatgtgacttgccagaa

SEQ ID NO: 1851307 - DNA, 25 bp, Homo sapien
cttgattgatgtgacttgccagaat

SEQ ID NO: 1851308 - DNA, 25 bp, Homo sapien
caggttggctgggtcacctcaaggt

SEQ ID NO: 1851309 - DNA, 25 bp, Homo sapien
tcagtgtcttttcaaggtacaaccc

SEQ ID NO: 1851310 - DNA, 25 bp, Homo sapien
agaggctgggatattctcaggccac

SEQ ID NO: 1851311 - DNA, 25 bp, Homo sapien
ggtacaaccctccttctgggcacag

SEQ ID NO: 1851312 - DNA, 25 bp, Homo sapien
gagcagtctgaggagagaatagaaa

SEQ ID NO: 1851313 - DNA, 25 bp, Homo sapien
gcagtctgaggagagaatagaaaca

SEQ ID NO: 1851314 - DNA, 25 bp, Homo sapien
gctctaaagtcaggtaatggttttc

SEQ ID NO: 1851315 - DNA, 25 bp, Homo sapien
ttcatgtgcttctcttgagcagtct

SEQ ID NO: 1851316 - DNA, 25 bp, Homo sapien
atgcagctggccgtgcacaggcaga

SEQ ID NO: 1851317 - DNA, 25 bp, Homo sapien
agtagatgcagctggccgtgcacag

SEQ ID NO: 1851318 - DNA, 25 bp, Homo sapien
cctgagtagatgcagctggccgtgc

SEQ ID NO: 1851319 - DNA, 25 bp, Homo sapien
tgagtagatgcagctggccgtgcac

SEQ ID NO: 1851320 - DNA, 25 bp, Homo sapien
gcagggacaagcaggcgttacagaa

SEQ ID NO: 1851321 - DNA, 25 bp, Homo sapien
gtgggtcagtgcaggaagtagggtc

SEQ ID NO: 1851322 - DNA, 25 bp, Homo sapien
tgacctggtggctgcgtgacagcca

SEQ ID NO: 1851323 - DNA, 25 bp, Homo sapien
ggtcacagccatccgcctcaaggtg

SEQ ID NO: 1851324 - DNA, 25 bp, Homo sapien
cagcacagggtacgctggtgggcct

SEQ ID NO: 1851325 - DNA, 25 bp, Homo sapien
tacgctggtgggcctgccatcttcc

SEQ ID NO: 1851326 - DNA, 25 bp, Homo sapien
tgcagcttcagacagacaaagctga

SEQ ID NO: 1851327 - DNA, 25 bp, Homo sapien
cagcttcagacagacaaagctgagg

SEQ ID NO: 1851328 - DNA, 25 bp, Homo sapien
tataccatgaacagagaccactact

SEQ ID NO: 1851329 - DNA, 25 bp, Homo sapien
ggaacaacctctggagattcctaga

SEQ ID NO: 1851330 - DNA, 25 bp, Homo sapien
aagtgggcatcatcctagtgtctaa

SEQ ID NO: 1851331 - DNA, 25 bp, Homo sapien
cccacactggatcacggctgaaata

SEQ ID NO: 1851332 - DNA, 25 bp, Homo sapien
acaatgatgaatggtaaggatgccc

SEQ ID NO: 1851333 - DNA, 25 bp, Homo sapien
ggctctgaccctcttaatggaggaa

SEQ ID NO: 1851334 - DNA, 25 bp, Homo sapien
tttttggaaaggagccagtgagaca

SEQ ID NO: 1851335 - DNA, 25 bp, Homo sapien
ttgtcactagaaggcaaggaggccg

SEQ ID NO: 1851336 - DNA, 25 bp, Homo sapien
agagacaggacctctctgaacagag

SEQ ID NO: 1851337 - DNA, 25 bp, Homo sapien
caggaggaaagagctacatctagag

SEQ ID NO: 1851338 - DNA, 25 bp, Homo sapien
gctacatctagagacaggacctctc

SEQ ID NO: 1851339 - DNA, 25 bp, Homo sapien
tcaggaggaaagagctacatctaga

SEQ ID NO: 1851340 - DNA, 25 bp, Homo sapien
ccgaggaagatcagccccagcacga

SEQ ID NO: 1851341 - DNA, 25 bp, Homo sapien
cgaggaagatcagccccagcacgaa

SEQ ID NO: 1851342 - DNA, 25 bp, Homo sapien
ccatagtttccctgatgaggagctg

SEQ ID NO: 1851343 - DNA, 25 bp, Homo sapien
cataccccatagtttccctgatgag

SEQ ID NO: 1851344 - DNA, 25 bp, Homo sapien
agcctgagtgtcagtgtttgtcccc

SEQ ID NO: 1851345 - DNA, 25 bp, Homo sapien
gcagagcctgagtgtcagtgtttgt

SEQ ID NO: 1851346 - DNA, 25 bp, Homo sapien
ctggtcattccgaaaccaccggact

SEQ ID NO: 1851347 - DNA, 25 bp, Homo sapien
cattccgaaaccaccggactttgat

SEQ ID NO: 1851348 - DNA, 25 bp, Homo sapien
gggcctctgtcctggatggggagat

SEQ ID NO: 1851349 - DNA, 25 bp, Homo sapien
ggggagatggtcactgtgggctcca

SEQ ID NO: 1851350 - DNA, 25 bp, Homo sapien
ggaaagatataggagtgagatgtga

SEQ ID NO: 1851351 - DNA, 25 bp, Homo sapien
gagtgagatgtgagaccacacagca

SEQ ID NO: 1851352 - DNA, 25 bp, Homo sapien
gaaataacagtcagctatgtggcct

SEQ ID NO: 1851353 - DNA, 25 bp, Homo sapien
cagagtggaaagatacttggagtcc

SEQ ID NO: 1851354 - DNA, 25 bp, Homo sapien
aatgtgcaacctagtaacagacagc

SEQ ID NO: 1851355 - DNA, 25 bp, Homo sapien
tattctgagatctgtgcagtggtcg

SEQ ID NO: 1851356 - DNA, 25 bp, Homo sapien
aaggtcttggtgagcaattatgggc

SEQ ID NO: 1851357 - DNA, 25 bp, Homo sapien
tgctgcttctggtcaaaactggctt

SEQ ID NO: 1851358 - DNA, 25 bp, Homo sapien
cccttagactctatggatgtgtagt

SEQ ID NO: 1851359 - DNA, 25 bp, Homo sapien
cacacaggaatagactcattgctgc

SEQ ID NO: 1851360 - DNA, 25 bp, Homo sapien
catagatggtatttgataaggcaac

SEQ ID NO: 1851361 - DNA, 25 bp, Homo sapien
tatataaagtggtgatgctaatctc

SEQ ID NO: 1851362 - DNA, 25 bp, Homo sapien
caagtaactgtgagattaaatgacg

SEQ ID NO: 1851363 - DNA, 25 bp, Homo sapien
tattcctgaagtggatagtcatggg

SEQ ID NO: 1851364 - DNA, 25 bp, Homo sapien
taacagaagatcattgagctcacac

SEQ ID NO: 1851365 - DNA, 25 bp, Homo sapien
gatgggcagctgagtacatttattc

SEQ ID NO: 1851366 - DNA, 25 bp, Homo sapien
gagctcacaccacataccagtcaat

SEQ ID NO: 1851367 - DNA, 25 bp, Homo sapien
cagtcaatgtgtcaggtactaggca

SEQ ID NO: 1851368 - DNA, 25 bp, Homo sapien
aagagctgtgcacgtgggccttgct

SEQ ID NO: 1851369 - DNA, 25 bp, Homo sapien
taattgctgaatgtcctgcgcgcag

SEQ ID NO: 1851370 - DNA, 25 bp, Homo sapien
cataaggcacgaggcaagaacatgc

SEQ ID NO: 1851371 - DNA, 25 bp, Homo sapien
taagcctgaagcttcctgctgcaag

SEQ ID NO: 1851372 - DNA, 25 bp, Homo sapien
gaagcgcacgatctcttctcggtta

SEQ ID NO: 1851373 - DNA, 25 bp, Homo sapien
ctgttccagtactcggcggcaggca

SEQ ID NO: 1851374 - DNA, 25 bp, Homo sapien
tctcggttatagatgcttctgctca

SEQ ID NO: 1851375 - DNA, 25 bp, Homo sapien
cgtgcggagctccaactggtagttg

SEQ ID NO: 1851376 - DNA, 25 bp, Homo sapien
gggtgctcagcatcgacagcatcaa

SEQ ID NO: 1851377 - DNA, 25 bp, Homo sapien
ctcagcatcgacagcatcaaggtca

SEQ ID NO: 1851378 - DNA, 25 bp, Homo sapien
gtcacagttgctgcccgaaggcctc

SEQ ID NO: 1851379 - DNA, 25 bp, Homo sapien
aggcctccggggatccgcaaagcct

SEQ ID NO: 1851380 - DNA, 25 bp, Homo sapien
tggtagtcaacacagctcggacctg

SEQ ID NO: 1851381 - DNA, 25 bp, Homo sapien
gaaaagtggtagtcaacacagctcg

SEQ ID NO: 1851382 - DNA, 25 bp, Homo sapien
ctcggacctgatggatctgatgtac

SEQ ID NO: 1851383 - DNA, 25 bp, Homo sapien
tgagacgaagggaaaagtggtagtc

SEQ ID NO: 1851384 - DNA, 25 bp, Homo sapien
atgtttccatgcgtggtaggattgg

SEQ ID NO: 1851385 - DNA, 25 bp, Homo sapien
ggatgtttccatgcgtggtaggatt

SEQ ID NO: 1851386 - DNA, 25 bp, Homo sapien
gatgtttccatgcgtggtaggattg

SEQ ID NO: 1851387 - DNA, 25 bp, Homo sapien
tggatgtttccatgcgtggtaggat

SEQ ID NO: 1851388 - DNA, 25 bp, Homo sapien
aaaagcagactttaactcctgctcc

SEQ ID NO: 1851389 - DNA, 25 bp, Homo sapien
ctgtgagagcatgtaaaagactgag

SEQ ID NO: 1851390 - DNA, 25 bp, Homo sapien
gagcatgtaaaagactgagctcctc

SEQ ID NO: 1851391 - DNA, 25 bp, Homo sapien
gagagcatgtaaaagactgagctcc

SEQ ID NO: 1851392 - DNA, 25 bp, Homo sapien
taggagcatcccgtattggaggtct

SEQ ID NO: 1851393 - DNA, 25 bp, Homo sapien
gctaaactggagtgatagaatgccc

SEQ ID NO: 1851394 - DNA, 25 bp, Homo sapien
ctaagaggatcgtggtaagtactgc

SEQ ID NO: 1851395 - DNA, 25 bp, Homo sapien
gggtcaatgtcctcctaattctggg

SEQ ID NO: 1851396 - DNA, 25 bp, Homo sapien
gaatgctgaagtccaagagtcaact

SEQ ID NO: 1851397 - DNA, 25 bp, Homo sapien
acaattcagtagattggtacctggg

SEQ ID NO: 1851398 - DNA, 25 bp, Homo sapien
acatacatattccagagtttggaca

SEQ ID NO: 1851399 - DNA, 25 bp, Homo sapien
cagggagtgcgatgtggctctcttc

SEQ ID NO: 1851400 - DNA, 25 bp, Homo sapien
agaaatttgtcaccaaacagaccag

SEQ ID NO: 1851401 - DNA, 25 bp, Homo sapien
tgctccagatggtaggtgtagacat

SEQ ID NO: 1851402 - DNA, 25 bp, Homo sapien
tctgaataggtgtggatacaactcc

SEQ ID NO: 1851403 - DNA, 25 bp, Homo sapien
gtgtagacatctccatgctcgggta

SEQ ID NO: 1851404 - DNA, 25 bp, Homo sapien
tattaaagaaccatgaatgatgtga

SEQ ID NO: 1851405 - DNA, 25 bp, Homo sapien
attaaagaaccatgaatgatgtgat

SEQ ID NO: 1851406 - DNA, 25 bp, Homo sapien
tcagaatcaggtttaattatgggaa

SEQ ID NO: 1851407 - DNA, 25 bp, Homo sapien
tgtttgtcatgcttctcttgacagg

SEQ ID NO: 1851408 - DNA, 25 bp, Homo sapien
gattttgtttgtcatgcttctcttg

SEQ ID NO: 1851409 - DNA, 25 bp, Homo sapien
aaagcactaaagttaggtaaatgat

SEQ ID NO: 1851410 - DNA, 25 bp, Homo sapien
ctgagtagacacagcttgcagtgca

SEQ ID NO: 1851411 - DNA, 25 bp, Homo sapien
gagtagacacagcttgcagtgcaca

SEQ ID NO: 1851412 - DNA, 25 bp, Homo sapien
acacagcttgcagtgcacaggcaga

SEQ ID NO: 1851413 - DNA, 25 bp, Homo sapien
tagacacagcttgcagtgcacaggc

SEQ ID NO: 1851414 - DNA, 25 bp, Homo sapien
agagtgatgaccaatcccagacaaa

SEQ ID NO: 1851415 - DNA, 25 bp, Homo sapien
gatcacagaaggtgacctgtggctg

SEQ ID NO: 1851416 - DNA, 25 bp, Homo sapien
atgacacaggcagctaggaattctg

SEQ ID NO: 1851417 - DNA, 25 bp, Homo sapien
gaagcagagtcaccgccagtgcctt

SEQ ID NO: 1851418 - DNA, 25 bp, Homo sapien
taaggcctggttctaggaaacaatc

SEQ ID NO: 1851419 - DNA, 25 bp, Homo sapien
gaggtccagggcatatcatcatcac

SEQ ID NO: 1851420 - DNA, 25 bp, Homo sapien
caggccatgaacagagaccactgtg

SEQ ID NO: 1851421 - DNA, 25 bp, Homo sapien
ggaacagcagttacccttctgggta

SEQ ID NO: 1851422 - DNA, 25 bp, Homo sapien
cgaggaagatcagccccagcacgaa

SEQ ID NO: 1851423 - DNA, 25 bp, Homo sapien
ccgaggaagatcagccccagcacga

SEQ ID NO: 1851424 - DNA, 25 bp, Homo sapien
gtccagtcaccattcctaatgaggg

SEQ ID NO: 1851425 - DNA, 25 bp, Homo sapien
tgagatgtgagaccacacagcacgc

SEQ ID NO: 1851426 - DNA, 25 bp, Homo sapien
agtgagatgtgagaccacacagcac

SEQ ID NO: 1851427 - DNA, 25 bp, Homo sapien
gagatgtgagaccacacagcacgcc

SEQ ID NO: 1851428 - DNA, 25 bp, Homo sapien
gtgagatgtgagaccacacagcacg

SEQ ID NO: 1851429 - DNA, 25 bp, Homo sapien
cagaatagaaagatacctggagtcc

SEQ ID NO: 1851430 - DNA, 25 bp, Homo sapien
aacttgcaatctagtaacagagacc

SEQ ID NO: 1851431 - DNA, 25 bp, Homo sapien
actgatcaaacatcatgtttgccca

SEQ ID NO: 1851432 - DNA, 25 bp, Homo sapien
ttgacaatcactgagaatccaaaaa

SEQ ID NO: 1851433 - DNA, 25 bp, Homo sapien
tctcacctcaaagagctccgccatg

SEQ ID NO: 1851434 - DNA, 25 bp, Homo sapien
gaattacgatgaataataatttgaa

SEQ ID NO: 1851435 - DNA, 25 bp, Homo sapien
ctctcacctcaaagagctccgccat

SEQ ID NO: 1851436 - DNA, 25 bp, Homo sapien
gcagctccgcctcgtagttgtgtct

SEQ ID NO: 1851437 - DNA, 25 bp, Homo sapien
gccgctgcaaggtcgtgcgcagctc

SEQ ID NO: 1851438 - DNA, 25 bp, Homo sapien
tgctccaagaagtccttatagttgt

SEQ ID NO: 1851439 - DNA, 25 bp, Homo sapien
aagcgcccgtactcctcgcggttat

SEQ ID NO: 1851440 - DNA, 25 bp, Homo sapien
tcagccactggggtgctcagcatca

SEQ ID NO: 1851441 - DNA, 25 bp, Homo sapien
agcatcaccagcatcacggtcacag

SEQ ID NO: 1851442 - DNA, 25 bp, Homo sapien
agctgctgcccaaaagcctccaggg

SEQ ID NO: 1851443 - DNA, 25 bp, Homo sapien
aagcctccagggatctgcagagcca

SEQ ID NO: 1851444 - DNA, 25 bp, Homo sapien
tggtagtcaacacagctcaaaccta

SEQ ID NO: 1851445 - DNA, 25 bp, Homo sapien
gctcaaacctaatggatcttatgta

SEQ ID NO: 1851446 - DNA, 25 bp, Homo sapien
taatggatcttatgtacctgccgga

SEQ ID NO: 1851447 - DNA, 25 bp, Homo sapien
tcttatgtacctgccggaaagaata

SEQ ID NO: 1851448 - DNA, 25 bp, Homo sapien
ggaaccaagtgtataaatgtcattg

SEQ ID NO: 1851449 - DNA, 25 bp, Homo sapien
gggaaccaagtgtataaatgtcatt

SEQ ID NO: 1851450 - DNA, 25 bp, Homo sapien
tgggaaccaagtgtataaatgtcat

SEQ ID NO: 1851451 - DNA, 25 bp, Homo sapien
ctgggaaccaagtgtataaatgtca

SEQ ID NO: 1851452 - DNA, 25 bp, Homo sapien
cgttaggtggaacgagagacttgga

SEQ ID NO: 1851453 - DNA, 25 bp, Homo sapien
tgtttctcgttaggtggaacgagag

SEQ ID NO: 1851454 - DNA, 25 bp, Homo sapien
ctcgttaggtggaacgagagacttg

SEQ ID NO: 1851455 - DNA, 25 bp, Homo sapien
taggtggaacgagagacttggaaaa

SEQ ID NO: 1851456 - DNA, 25 bp, Homo sapien
cattacaaggaaccagtctaaggac

SEQ ID NO: 1851457 - DNA, 25 bp, Homo sapien
acacctctcccaatgtattactgag

SEQ ID NO: 1851458 - DNA, 25 bp, Homo sapien
gacacacattcgtattttaatgccc

SEQ ID NO: 1851459 - DNA, 25 bp, Homo sapien
gtctaaggactgttgattgaatcaa

SEQ ID NO: 1851460 - DNA, 25 bp, Homo sapien
tgagcactgttgtttgatgaattcc

SEQ ID NO: 1851461 - DNA, 25 bp, Homo sapien
tatgaatgagcactgttgtttgatg

SEQ ID NO: 1851462 - DNA, 25 bp, Homo sapien
gaatgagcactgttgtttgatgaat

SEQ ID NO: 1851463 - DNA, 25 bp, Homo sapien
tgaatgagcactgttgtttgatgaa

SEQ ID NO: 1851464 - DNA, 25 bp, Homo sapien
tctgtgaccattttgatgagatctc

SEQ ID NO: 1851465 - DNA, 25 bp, Homo sapien
tcatagcccagagtaagaggattac

SEQ ID NO: 1851466 - DNA, 25 bp, Homo sapien
gcagtagcaagttcatagcccagag

SEQ ID NO: 1851467 - DNA, 25 bp, Homo sapien
ccatcttggcagtagcaagttcata

SEQ ID NO: 1851468 - DNA, 25 bp, Homo sapien
tatcacagtctggatattgacattg

SEQ ID NO: 1851469 - DNA, 25 bp, Homo sapien
ccaaggataacatcttgtaaactac

SEQ ID NO: 1851470 - DNA, 25 bp, Homo sapien
ctatagttttggcattccaggagtg

SEQ ID NO: 1851471 - DNA, 25 bp, Homo sapien
cattttgcccttttgtagccacagc

SEQ ID NO: 1851472 - DNA, 25 bp, Homo sapien
aatggatctttatgcatgactttgc

SEQ ID NO: 1851473 - DNA, 25 bp, Homo sapien
gtttccataaccatttcagctatcg

SEQ ID NO: 1851474 - DNA, 25 bp, Homo sapien
tctggcttaataaagctagcttggt

SEQ ID NO: 1851475 - DNA, 25 bp, Homo sapien
tgttgagaacaccaagaagctttag

SEQ ID NO: 1851476 - DNA, 25 bp, Homo sapien
gcctttccatcagtatgcaccagaa

SEQ ID NO: 1851477 - DNA, 25 bp, Homo sapien
ctgactattaaacagatgtgtgctt

SEQ ID NO: 1851478 - DNA, 25 bp, Homo sapien
tgatgggataggctcattttgttta

SEQ ID NO: 1851479 - DNA, 25 bp, Homo sapien
actcatgcaattacataatggcttt

SEQ ID NO: 1851480 - DNA, 25 bp, Homo sapien
tcagttcgggctcctccaaggatca

SEQ ID NO: 1851481 - DNA, 25 bp, Homo sapien
tgaatgtcctttacctcacccaggg

SEQ ID NO: 1851482 - DNA, 25 bp, Homo sapien
acttataggagtagggctggaccac

SEQ ID NO: 1851483 - DNA, 25 bp, Homo sapien
tcagaacacagagctccagaatcag

SEQ ID NO: 1851484 - DNA, 25 bp, Homo sapien
ttagcatgactgagggagcagaaca

SEQ ID NO: 1851485 - DNA, 25 bp, Homo sapien
gactgagggagcagaacagctcttg

SEQ ID NO: 1851486 - DNA, 25 bp, Homo sapien
actgagggagcagaacagctcttga

SEQ ID NO: 1851487 - DNA, 25 bp, Homo sapien
gagggagcagaacagctcttgagac

SEQ ID NO: 1851488 - DNA, 25 bp, Homo sapien
cccacagccgttccagagactcagg

SEQ ID NO: 1851489 - DNA, 25 bp, Homo sapien
ccccacagccgttccagagactcag

SEQ ID NO: 1851490 - DNA, 25 bp, Homo sapien
ccacagccgttccagagactcaggg

SEQ ID NO: 1851491 - DNA, 25 bp, Homo sapien
tcattaccagacatctgcgtcctca

SEQ ID NO: 1851492 - DNA, 25 bp, Homo sapien
attaccagacatctgcgtcctcaca

SEQ ID NO: 1851493 - DNA, 25 bp, Homo sapien
ctcattaccagacatctgcgtcctc

SEQ ID NO: 1851494 - DNA, 25 bp, Homo sapien
taccagacatctgcgtcctcacata

SEQ ID NO: 1851495 - DNA, 25 bp, Homo sapien
ggattgccccaattaggacccaata

SEQ ID NO: 1851496 - DNA, 25 bp, Homo sapien
ccaattaggacccaatatgattatc

SEQ ID NO: 1851497 - DNA, 25 bp, Homo sapien
aatggattgccccaattaggaccca

SEQ ID NO: 1851498 - DNA, 25 bp, Homo sapien
agaaaagaatggattgccccaatta

SEQ ID NO: 1851499 - DNA, 25 bp, Homo sapien
taggaaggctgcaatgccactcagc

SEQ ID NO: 1851500 - DNA, 25 bp, Homo sapien
gagcccttagctggatgatgattcc

SEQ ID NO: 1851501 - DNA, 25 bp, Homo sapien
ctttctgagcccttagctggatgat

SEQ ID NO: 1851502 - DNA, 25 bp, Homo sapien
ggaagattagcccaagtaggaaggc

SEQ ID NO: 1851503 - DNA, 25 bp, Homo sapien
gcactttcttggaatcccagaatct

SEQ ID NO: 1851504 - DNA, 25 bp, Homo sapien
tagacaccaaatccaatgctagcta

SEQ ID NO: 1851505 - DNA, 25 bp, Homo sapien
tggaatcccagaatctgtactagac

SEQ ID NO: 1851506 - DNA, 25 bp, Homo sapien
caaatccaatgctagctagagaaaa

SEQ ID NO: 1851507 - DNA, 25 bp, Homo sapien
tcaggcccagagagtactagaaact

SEQ ID NO: 1851508 - DNA, 25 bp, Homo sapien
tgtattgagtcagtatagtcctgag

SEQ ID NO: 1851509 - DNA, 25 bp, Homo sapien
taaacgcagaagtgacacaggctct

SEQ ID NO: 1851510 - DNA, 25 bp, Homo sapien
catgttgtgaccaagataaacgcag

SEQ ID NO: 1851511 - DNA, 25 bp, Homo sapien
ggtcctctctgggtacactgtcacc

SEQ ID NO: 1851512 - DNA, 25 bp, Homo sapien
tctccattcctgatagggccagtgg

SEQ ID NO: 1851513 - DNA, 25 bp, Homo sapien
gagtcatttctagcatcaccacagt

SEQ ID NO: 1851514 - DNA, 25 bp, Homo sapien
ctggatagaagcctgtcacagagca

SEQ ID NO: 1851515 - DNA, 25 bp, Homo sapien
cagcctgtagttgtgtctacagacc

SEQ ID NO: 1851516 - DNA, 25 bp, Homo sapien
ccaagagatccagccggctgttcca

SEQ ID NO: 1851517 - DNA, 25 bp, Homo sapien
tccccacagtgaagggtgcgcccag

SEQ ID NO: 1851518 - DNA, 25 bp, Homo sapien
ggctgccccagcttggtcaatgcca

SEQ ID NO: 1851519 - DNA, 25 bp, Homo sapien
cagtcagcctttgcctgaatcacaa

SEQ ID NO: 1851520 - DNA, 25 bp, Homo sapien
gtcgaaacgtacatactcctccaag

SEQ ID NO: 1851521 - DNA, 25 bp, Homo sapien
taaagatgaatctgaccacaaactg

SEQ ID NO: 1851522 - DNA, 25 bp, Homo sapien
tctgtcccgttggtgaagtaacagt

SEQ ID NO: 1851523 - DNA, 25 bp, Homo sapien
ctgtgacccagcctactgcaggttg

SEQ ID NO: 1851524 - DNA, 25 bp, Homo sapien
tgagatttgtttccgtgtcctgacc

SEQ ID NO: 1851525 - DNA, 25 bp, Homo sapien
gttgtttctcccagcaggctcgaac

SEQ ID NO: 1851526 - DNA, 25 bp, Homo sapien
ggcactgactgaggttgatacacac

SEQ ID NO: 1851527 - DNA, 25 bp, Homo sapien
caaggcgtacctttctgccaaaggg

SEQ ID NO: 1851528 - DNA, 25 bp, Homo sapien
tcccatgtaaagaggcaaggcgtac

SEQ ID NO: 1851529 - DNA, 25 bp, Homo sapien
taccccttgaataggtggctctggt

SEQ ID NO: 1851530 - DNA, 25 bp, Homo sapien
caaaagccacttccagtctggtctg

SEQ ID NO: 1851531 - DNA, 25 bp, Homo sapien
ggaggaatccagtcgggtcagattc

SEQ ID NO: 1851532 - DNA, 25 bp, Homo sapien
atgagctcataaaattcagtcagaa

SEQ ID NO: 1851533 - DNA, 25 bp, Homo sapien
cagaatgagctcataaaattcagtc

SEQ ID NO: 1851534 - DNA, 25 bp, Homo sapien
atgagatagtaaaatcgtcagcctc

SEQ ID NO: 1851535 - DNA, 25 bp, Homo sapien
tagtaaaatcgtcagcctcttcaga

SEQ ID NO: 1851536 - DNA, 25 bp, Homo sapien
cacttctttgatacgactttgggat

SEQ ID NO: 1851537 - DNA, 25 bp, Homo sapien
agcaaactcatgatcccacctagtg

SEQ ID NO: 1851538 - DNA, 25 bp, Homo sapien
taggctaagaattttgccagctcaa

SEQ ID NO: 1851539 - DNA, 25 bp, Homo sapien
gacgtctcaaaccagcaagaggtgt

SEQ ID NO: 1851540 - DNA, 25 bp, Homo sapien
ctcaatttccctgtgatggttttgt

SEQ ID NO: 1851541 - DNA, 25 bp, Homo sapien
tattcccaggaaatatccactgaaa

SEQ ID NO: 1851542 - DNA, 25 bp, Homo sapien
tcatttgaactcattattcccagga

SEQ ID NO: 1851543 - DNA, 25 bp, Homo sapien
aatttccctgtgatggttttgtcca

SEQ ID NO: 1851544 - DNA, 25 bp, Homo sapien
aatatcatgaacttccaaagggttt

SEQ ID NO: 1851545 - DNA, 25 bp, Homo sapien
taagacgaatgtgacctctgcttcc

SEQ ID NO: 1851546 - DNA, 25 bp, Homo sapien
ctgagtggctttatgttaggtgtct

SEQ ID NO: 1851547 - DNA, 25 bp, Homo sapien
tataagtgcctctgtcacactcaat

SEQ ID NO: 1851548 - DNA, 25 bp, Homo sapien
tttggtgaggagtgtctgaatttca

SEQ ID NO: 1851549 - DNA, 25 bp, Homo sapien
tagttcagttaagaagcccatttat

SEQ ID NO: 1851550 - DNA, 25 bp, Homo sapien
ttcagagatattaacttctgttaag

SEQ ID NO: 1851551 - DNA, 25 bp, Homo sapien
ggaaggtgtatatttcaaggttgct

SEQ ID NO: 1851552 - DNA, 25 bp, Homo sapien
ttcatacagcaaatagattcagtct

SEQ ID NO: 1851553 - DNA, 25 bp, Homo sapien
ctagcaacagcaaaagacttccaat

SEQ ID NO: 1851554 - DNA, 25 bp, Homo sapien
tctatacaagactaactagcaacag

SEQ ID NO: 1851555 - DNA, 25 bp, Homo sapien
gacttccaataacctaactagccat

SEQ ID NO: 1851556 - DNA, 25 bp, Homo sapien
gccatcagtagaaggaaacaggata

SEQ ID NO: 1851557 - DNA, 25 bp, Homo sapien
gatatatggctttccgcccaggtgc

SEQ ID NO: 1851558 - DNA, 25 bp, Homo sapien
tatgaattagccctcggccaggtag

SEQ ID NO: 1851559 - DNA, 25 bp, Homo sapien
tagaagcacatggagagttccccag

SEQ ID NO: 1851560 - DNA, 25 bp, Homo sapien
ttagatggcatcagactcaagcagg

SEQ ID NO: 1851561 - DNA, 25 bp, Homo sapien
attaatactgttaatcagggaactg

SEQ ID NO: 1851562 - DNA, 25 bp, Homo sapien
cctagcttcttcaaaatagcagaca

SEQ ID NO: 1851563 - DNA, 25 bp, Homo sapien
ccagaccctagcttcttcaaaatag

SEQ ID NO: 1851564 - DNA, 25 bp, Homo sapien
tactgttaatcagggaactgttctc

SEQ ID NO: 1851565 - DNA, 25 bp, Homo sapien
caccaggcaaagctctagtcaccag

SEQ ID NO: 1851566 - DNA, 25 bp, Homo sapien
aggatataggaaggcaatctcatga

SEQ ID NO: 1851567 - DNA, 25 bp, Homo sapien
gataaacgactgatgggacaggcag

SEQ ID NO: 1851568 - DNA, 25 bp, Homo sapien
caacagataaacgactgatgggaca

SEQ ID NO: 1851569 - DNA, 25 bp, Homo sapien
tcaggaacagctatctggccgcaca

SEQ ID NO: 1851570 - DNA, 25 bp, Homo sapien
aggaacagctatctggccgcacagc

SEQ ID NO: 1851571 - DNA, 25 bp, Homo sapien
actcaggaacagctatctggccgca

SEQ ID NO: 1851572 - DNA, 25 bp, Homo sapien
agctatctggccgcacagctctagg

SEQ ID NO: 1851573 - DNA, 25 bp, Homo sapien
caggcgggaatagaggtcctgtccc

SEQ ID NO: 1851574 - DNA, 25 bp, Homo sapien
ctgcaccaggcgggaatagaggtcc

SEQ ID NO: 1851575 - DNA, 25 bp, Homo sapien
tgcaccaggcgggaatagaggtcct

SEQ ID NO: 1851576 - DNA, 25 bp, Homo sapien
caccaggcgggaatagaggtcctgt

SEQ ID NO: 1851577 - DNA, 25 bp, Homo sapien
gagctgggcaagcttctgcagcttg

SEQ ID NO: 1851578 - DNA, 25 bp, Homo sapien
tagagctgggcaagcttctgcagct

SEQ ID NO: 1851579 - DNA, 25 bp, Homo sapien
ctagagctgggcaagcttctgcagc

SEQ ID NO: 1851580 - DNA, 25 bp, Homo sapien
gctgggcaagcttctgcagcttgcc

SEQ ID NO: 1851581 - DNA, 25 bp, Homo sapien
agcctgtgagcaatcaccagcactg

SEQ ID NO: 1851582 - DNA, 25 bp, Homo sapien
tgtgcgatccccacgggaattccag

SEQ ID NO: 1851583 - DNA, 25 bp, Homo sapien
gatccccacgggaattccagtcctg

SEQ ID NO: 1851584 - DNA, 25 bp, Homo sapien
tgggcgcgctgaactgtctgcagcc

SEQ ID NO: 1851585 - DNA, 25 bp, Homo sapien
tgctcgcactgcacatctagggcac

SEQ ID NO: 1851586 - DNA, 25 bp, Homo sapien
gttgtttctgtcccgcagccagctg

SEQ ID NO: 1851587 - DNA, 25 bp, Homo sapien
cgggcaatggccagacgttgtttct

SEQ ID NO: 1851588 - DNA, 25 bp, Homo sapien
tctagggcactagtagcctcatcca

SEQ ID NO: 1851589 - DNA, 25 bp, Homo sapien
tgaggaaatcagagaaattcccttc

SEQ ID NO: 1851590 - DNA, 25 bp, Homo sapien
ctgaggaaatcagagaaattccctt

SEQ ID NO: 1851591 - DNA, 25 bp, Homo sapien
tcaccttatcatcttcgcagctctg

SEQ ID NO: 1851592 - DNA, 25 bp, Homo sapien
ccataagcaatgttgttcctcacag

SEQ ID NO: 1851593 - DNA, 25 bp, Homo sapien
ttcctcacagaaccggagaacagca

SEQ ID NO: 1851594 - DNA, 25 bp, Homo sapien
ttatcatcttcgcagctctgcagcc

SEQ ID NO: 1851595 - DNA, 25 bp, Homo sapien
tgtgcaggtagcagtgttcatactg

SEQ ID NO: 1851596 - DNA, 25 bp, Homo sapien
tgcaggtagcagtgttcatactgtg

SEQ ID NO: 1851597 - DNA, 25 bp, Homo sapien
gctgtgcaggtagcagtgttcatac

SEQ ID NO: 1851598 - DNA, 25 bp, Homo sapien
ggctgtgcaggtagcagtgttcata

SEQ ID NO: 1851599 - DNA, 25 bp, Homo sapien
tcacctcaccaggacgtagggtaaa

SEQ ID NO: 1851600 - DNA, 25 bp, Homo sapien
tcaccaggacgtagggtaaacgtca

SEQ ID NO: 1851601 - DNA, 25 bp, Homo sapien
cgtcacctcaccaggacgtagggta

SEQ ID NO: 1851602 - DNA, 25 bp, Homo sapien
caccaggacgtagggtaaacgtcag

SEQ ID NO: 1851603 - DNA, 25 bp, Homo sapien
cctgtcagggcgattgggatatgca

SEQ ID NO: 1851604 - DNA, 25 bp, Homo sapien
tgcagctcccacgttgctgagcata

SEQ ID NO: 1851605 - DNA, 25 bp, Homo sapien
aggagacgtcttggaatttcacaac

SEQ ID NO: 1851606 - DNA, 25 bp, Homo sapien
gaaggcagatttggctgtcggtcca

SEQ ID NO: 1851607 - DNA, 25 bp, Homo sapien
tcctggtagatcataaaggaaagca

SEQ ID NO: 1851608 - DNA, 25 bp, Homo sapien
atcagcatctgcacccccaagtgca

SEQ ID NO: 1851609 - DNA, 25 bp, Homo sapien
cgctctcctggtagatcataaagga

SEQ ID NO: 1851610 - DNA, 25 bp, Homo sapien
tcagcatctgcacccccaagtgcag

SEQ ID NO: 1851611 - DNA, 25 bp, Homo sapien
agctgcaaaggcctctagaaccagc

SEQ ID NO: 1851612 - DNA, 25 bp, Homo sapien
tctagaaccagctgtagtttcctct

SEQ ID NO: 1851613 - DNA, 25 bp, Homo sapien
agatgaggctgggaatcttcccatt

SEQ ID NO: 1851614 - DNA, 25 bp, Homo sapien
tttcacaaccactctggtatcttac

SEQ ID NO: 1851615 - DNA, 25 bp, Homo sapien
tccgccaatacagctgccgacattg

SEQ ID NO: 1851616 - DNA, 25 bp, Homo sapien
gttccaggtctctccgccaatacag

SEQ ID NO: 1851617 - DNA, 25 bp, Homo sapien
aaactgcgaacggtctgcagccctc

SEQ ID NO: 1851618 - DNA, 25 bp, Homo sapien
gttcaagggcctctttatagcgaca

SEQ ID NO: 1851619 - DNA, 25 bp, Homo sapien
gcatcaaagaactctagcaacagag

SEQ ID NO: 1851620 - DNA, 25 bp, Homo sapien
gaaaagcctcatgccactagatttg

SEQ ID NO: 1851621 - DNA, 25 bp, Homo sapien
cacagatagttaagaaaggtggaga

SEQ ID NO: 1851622 - DNA, 25 bp, Homo sapien
agagtgaaggagcaagggaacaaaa

SEQ ID NO: 1851623 - DNA, 25 bp, Homo sapien
tgagtcgaggcgatatgctgagcat

SEQ ID NO: 1851624 - DNA, 25 bp, Homo sapien
caggcttcgcaagagcacattggca

SEQ ID NO: 1851625 - DNA, 25 bp, Homo sapien
acaccttctccgctgctattgtgaa

SEQ ID NO: 1851626 - DNA, 25 bp, Homo sapien
ttaaaggaagccagttactcatcag

SEQ ID NO: 1851627 - DNA, 25 bp, Homo sapien
agaaaccgaggtcctggcgcagcag

SEQ ID NO: 1851628 - DNA, 25 bp, Homo sapien
tgattcgagacatggtgtaggtgaa

SEQ ID NO: 1851629 - DNA, 25 bp, Homo sapien
ctcccggatccgcaagttgattcga

SEQ ID NO: 1851630 - DNA, 25 bp, Homo sapien
tggaagaaaccgaggtcctggcgca

SEQ ID NO: 1851631 - DNA, 25 bp, Homo sapien
caggatgtcaatcacacgaccagaa

SEQ ID NO: 1851632 - DNA, 25 bp, Homo sapien
gaatagtgagggattaatgtctcac

SEQ ID NO: 1851633 - DNA, 25 bp, Homo sapien
tgtcaatcacacgaccagaatagtg

SEQ ID NO: 1851634 - DNA, 25 bp, Homo sapien
cacgaccagaatagtgagggattaa

SEQ ID NO: 1851635 - DNA, 25 bp, Homo sapien
caggtccggcctggagagcttcagc

SEQ ID NO: 1851636 - DNA, 25 bp, Homo sapien
aggcggcaacgaggagaggcaggtc

SEQ ID NO: 1851637 - DNA, 25 bp, Homo sapien
ggaagaagaaggcggcaacgaggag

SEQ ID NO: 1851638 - DNA, 25 bp, Homo sapien
tcagcagcctccacatcaagacttt

SEQ ID NO: 1851639 - DNA, 25 bp, Homo sapien
agcagccctcttagctttagcagcc

SEQ ID NO: 1851640 - DNA, 25 bp, Homo sapien
cagggtctcaggtcagggagccgca

SEQ ID NO: 1851641 - DNA, 25 bp, Homo sapien
tccaaggggctgaagcgactctggc

SEQ ID NO: 1851642 - DNA, 25 bp, Homo sapien
gcccttgaggaagcaaagtccccag

SEQ ID NO: 1851643 - DNA, 25 bp, Homo sapien
tctgcttcagcgctgaggtccgctc

SEQ ID NO: 1851644 - DNA, 25 bp, Homo sapien
tcccaacctcgctaccggctctggt

SEQ ID NO: 1851645 - DNA, 25 bp, Homo sapien
ttcagcgctgaggtccgctccgtct

SEQ ID NO: 1851646 - DNA, 25 bp, Homo sapien
gctctggtccgccagctacgctcgg

SEQ ID NO: 1851647 - DNA, 25 bp, Homo sapien
gacttaacgtggcttaggtccctga

SEQ ID NO: 1851648 - DNA, 25 bp, Homo sapien
ctttggctcaggctaggcctcttct

SEQ ID NO: 1851649 - DNA, 25 bp, Homo sapien
tgctgagcccgtactctctctttgg

SEQ ID NO: 1851650 - DNA, 25 bp, Homo sapien
caaatagagaacacgcagaagatgc

SEQ ID NO: 1851651 - DNA, 25 bp, Homo sapien
ttctactttcacccaaccatcttcc

SEQ ID NO: 1851652 - DNA, 25 bp, Homo sapien
ctactttcacccaaccatcttcctt

SEQ ID NO: 1851653 - DNA, 25 bp, Homo sapien
tctactttcacccaaccatcttcct

SEQ ID NO: 1851654 - DNA, 25 bp, Homo sapien
tgtcactgatgttatgttgaaggca

SEQ ID NO: 1851655 - DNA, 25 bp, Homo sapien
gaacatggagtcacctttcacctca

SEQ ID NO: 1851656 - DNA, 25 bp, Homo sapien
gcttaaaaccatatgactgggcctt

SEQ ID NO: 1851657 - DNA, 25 bp, Homo sapien
gcagcaacaagacacatgcgcaagc

SEQ ID NO: 1851658 - DNA, 25 bp, Homo sapien
taagattaggccgatagccactgtc

SEQ ID NO: 1851659 - DNA, 25 bp, Homo sapien
taagtgttcccactacccgtggaga

SEQ ID NO: 1851660 - DNA, 25 bp, Homo sapien
gttcatccacgtagtagagtccagg

SEQ ID NO: 1851661 - DNA, 25 bp, Homo sapien
acatatttcctgagagccgagtccc

SEQ ID NO: 1851662 - DNA, 25 bp, Homo sapien
acagatcatactgcccatagagagg

SEQ ID NO: 1851663 - DNA, 25 bp, Homo sapien
gaggctgccgacactgaaatacgtt

SEQ ID NO: 1851664 - DNA, 25 bp, Homo sapien
gaaatacgttctccatttcgcagat

SEQ ID NO: 1851665 - DNA, 25 bp, Homo sapien
ttctccatttcgcagatagtacagc

SEQ ID NO: 1851666 - DNA, 25 bp, Homo sapien
tgcattccttggccagcaggcgctc

SEQ ID NO: 1851667 - DNA, 25 bp, Homo sapien
ttggccagcaggcgctcccagtact

SEQ ID NO: 1851668 - DNA, 25 bp, Homo sapien
ggccagcaggcgctcccagtactga

SEQ ID NO: 1851669 - DNA, 25 bp, Homo sapien
agcaggcgctcccagtactgacagt

SEQ ID NO: 1851670 - DNA, 25 bp, Homo sapien
ccaagcaggtaagggttaatctcaa

SEQ ID NO: 1851671 - DNA, 25 bp, Homo sapien
acatggtgccaagcaggtaagggtt

SEQ ID NO: 1851672 - DNA, 25 bp, Homo sapien
ggtgccaagcaggtaagggttaatc

SEQ ID NO: 1851673 - DNA, 25 bp, Homo sapien
gcaggtaagggttaatctcaatcac

SEQ ID NO: 1851674 - DNA, 25 bp, Homo sapien
gagaagggatgaccccatagatccc

SEQ ID NO: 1851675 - DNA, 25 bp, Homo sapien
gatcccccagtgtgtcctaaatcaa

SEQ ID NO: 1851676 - DNA, 25 bp, Homo sapien
ccagtgtgtcctaaatcaatatcca

SEQ ID NO: 1851677 - DNA, 25 bp, Homo sapien
tgcctgctggagcgtatacactcac

SEQ ID NO: 1851678 - DNA, 25 bp, Homo sapien
caatctgaacgttcctttctccgtc

SEQ ID NO: 1851679 - DNA, 25 bp, Homo sapien
ctggaacttgaaggcgagcgtggtg

SEQ ID NO: 1851680 - DNA, 25 bp, Homo sapien
gaaggcgagcgtggtggtgccatgg

SEQ ID NO: 1851681 - DNA, 25 bp, Homo sapien
ccatctcaatctgaacgttcctttc

SEQ ID NO: 1851682 - DNA, 25 bp, Homo sapien
tctcaggcgaccctccactcctcag

SEQ ID NO: 1851683 - DNA, 25 bp, Homo sapien
taacttgcacttcctcctctcaggc

SEQ ID NO: 1851684 - DNA, 25 bp, Homo sapien
cgcccgcctccctgcatccctaggg

SEQ ID NO: 1851685 - DNA, 25 bp, Homo sapien
tctttgtcctaacttgcacttcctc

SEQ ID NO: 1851686 - DNA, 25 bp, Homo sapien
ggtaaagcgagctctggagatcgca

SEQ ID NO: 1851687 - DNA, 25 bp, Homo sapien
ccgcaaccgggagagccgattccgg

SEQ ID NO: 1851688 - DNA, 25 bp, Homo sapien
gaaactgtagtgtcctgggtccgag

SEQ ID NO: 1851689 - DNA, 25 bp, Homo sapien
tctggagatcgcatagagaaactgt

SEQ ID NO: 1851690 - DNA, 25 bp, Homo sapien
gatgggtcaagggtcttccgaagaa

SEQ ID NO: 1851691 - DNA, 25 bp, Homo sapien
aaaggacagttagtgcctggaccag

SEQ ID NO: 1851692 - DNA, 25 bp, Homo sapien
cccacttggcgatgggttacagtaa

SEQ ID NO: 1851693 - DNA, 25 bp, Homo sapien
gaaagcgagaaaggaacaggcgcct

SEQ ID NO: 1851694 - DNA, 25 bp, Homo sapien
gtagggtcgtgtcatctaaaggcgc

SEQ ID NO: 1851695 - DNA, 25 bp, Homo sapien
taaaggcgcagcttcaaccagaaga

SEQ ID NO: 1851696 - DNA, 25 bp, Homo sapien
ccaggagctgggagtagtgtcacgc

SEQ ID NO: 1851697 - DNA, 25 bp, Homo sapien
cgtgtcatctaaaggcgcagcttca

SEQ ID NO: 1851698 - DNA, 25 bp, Homo sapien
taacctgtagtcacccacaagagcg

SEQ ID NO: 1851699 - DNA, 25 bp, Homo sapien
caacagaatatacccgccgcgtgta

SEQ ID NO: 1851700 - DNA, 25 bp, Homo sapien
gggcagagtcttggaaacaggtcct

SEQ ID NO: 1851701 - DNA, 25 bp, Homo sapien
tgagcactgcggagtttcacgcctc

SEQ ID NO: 1851702 - DNA, 25 bp, Homo sapien
cagtttcagagtgctggccacacca

SEQ ID NO: 1851703 - DNA, 25 bp, Homo sapien
tttatgggccagcatatgccttcag

SEQ ID NO: 1851704 - DNA, 25 bp, Homo sapien
gaagtctgcattatcacgaggagct

SEQ ID NO: 1851705 - DNA, 25 bp, Homo sapien
tcagccctggctctaaactccgtta

SEQ ID NO: 1851706 - DNA, 25 bp, Homo sapien
ttctggagcatctgcaggagcctgc

SEQ ID NO: 1851707 - DNA, 25 bp, Homo sapien
cattctggagcatctgcaggagcct

SEQ ID NO: 1851708 - DNA, 25 bp, Homo sapien
ctggagcatctgcaggagcctgcac

SEQ ID NO: 1851709 - DNA, 25 bp, Homo sapien
tcattctggagcatctgcaggagcc

SEQ ID NO: 1851710 - DNA, 25 bp, Homo sapien
tcagggctttcgtacaggagctgct

SEQ ID NO: 1851711 - DNA, 25 bp, Homo sapien
atgagaagcactgagcgggagtacc

SEQ ID NO: 1851712 - DNA, 25 bp, Homo sapien
ggatagcgcctccttccagaaagag

SEQ ID NO: 1851713 - DNA, 25 bp, Homo sapien
agaaagaggatgtggtcagcctgct

SEQ ID NO: 1851714 - DNA, 25 bp, Homo sapien
cgatattatgaggatggtcttttcc

SEQ ID NO: 1851715 - DNA, 25 bp, Homo sapien
tatgtttcgctttagaaattcagtc

SEQ ID NO: 1851716 - DNA, 25 bp, Homo sapien
catagcgggacgctgtctgtacaaa

SEQ ID NO: 1851717 - DNA, 25 bp, Homo sapien
taaataaacgatattatgaggatgg

SEQ ID NO: 1851718 - DNA, 25 bp, Homo sapien
taactgattctaggtgtctttgcct

SEQ ID NO: 1851719 - DNA, 25 bp, Homo sapien
gggtgggatatagccattaagaaga

SEQ ID NO: 1851720 - DNA, 25 bp, Homo sapien
gaggcatccaatggaactggatttg

SEQ ID NO: 1851721 - DNA, 25 bp, Homo sapien
tgggaactgagaactgcaaggactg

SEQ ID NO: 1851722 - DNA, 25 bp, Homo sapien
ttccggatcaatgctcgggccaacg

SEQ ID NO: 1851723 - DNA, 25 bp, Homo sapien
aactggctgtttgcatccagggcac

SEQ ID NO: 1851724 - DNA, 25 bp, Homo sapien
gcatcatccaggataagtacacacg

SEQ ID NO: 1851725 - DNA, 25 bp, Homo sapien
tgtaactggctgtttgcatccaggg

SEQ ID NO: 1851726 - DNA, 25 bp, Homo sapien
tgagaacggtatagccacatgtgtg

SEQ ID NO: 1851727 - DNA, 25 bp, Homo sapien
tcaggatgaagaagccataggagca

SEQ ID NO: 1851728 - DNA, 25 bp, Homo sapien
tctgggaagatgaacagaatcctga

SEQ ID NO: 1851729 - DNA, 25 bp, Homo sapien
caagatctgacggttgtagctggat

SEQ ID NO: 1851730 - DNA, 25 bp, Homo sapien
tatgggccccagactttactgcagc

SEQ ID NO: 1851731 - DNA, 25 bp, Homo sapien
ccaaatacctgtggctcttgtccca

SEQ ID NO: 1851732 - DNA, 25 bp, Homo sapien
tcctccatagttggcttctgggtca

SEQ ID NO: 1851733 - DNA, 25 bp, Homo sapien
caggccataggcaatattttcttga

SEQ ID NO: 1851734 - DNA, 25 bp, Homo sapien
gtgctcttcccagacccattgggtc

SEQ ID NO: 1851735 - DNA, 25 bp, Homo sapien
cagacccattgggtcccaccagcgc

SEQ ID NO: 1851736 - DNA, 25 bp, Homo sapien
tgtgctcttcccagacccattgggt

SEQ ID NO: 1851737 - DNA, 25 bp, Homo sapien
gacatcttggaactggacaaggccc

SEQ ID NO: 1851738 - DNA, 25 bp, Homo sapien
gacaaggccctccaagtgtaaggga

SEQ ID NO: 1851739 - DNA, 25 bp, Homo sapien
ctgtagcactaagacatctgggcgg

SEQ ID NO: 1851740 - DNA, 25 bp, Homo sapien
tgtaagggagtcaacagaccactgg

SEQ ID NO: 1851741 - DNA, 25 bp, Homo sapien
ctctggggtagatggagagcagtac

SEQ ID NO: 1851742 - DNA, 25 bp, Homo sapien
ctgtactctggggtagatggagagc

SEQ ID NO: 1851743 - DNA, 25 bp, Homo sapien
tgtactctggggtagatggagagca

SEQ ID NO: 1851744 - DNA, 25 bp, Homo sapien
tactctggggtagatggagagcagt

SEQ ID NO: 1851745 - DNA, 25 bp, Homo sapien
ctagagggaggtaagaatagtgaaa

SEQ ID NO: 1851746 - DNA, 25 bp, Homo sapien
cagcattatgtgaagcaagaagggt

SEQ ID NO: 1851747 - DNA, 25 bp, Homo sapien
gaatagtgaaagtgaggtagtctgc

SEQ ID NO: 1851748 - DNA, 25 bp, Homo sapien
aagtgaggtagtctgcttgccagca

SEQ ID NO: 1851749 - DNA, 25 bp, Homo sapien
aatgtagaggattcccactttcagc

SEQ ID NO: 1851750 - DNA, 25 bp, Homo sapien
accagctgcccaccaatgtagagga

SEQ ID NO: 1851751 - DNA, 25 bp, Homo sapien
gacaaggttcccactgcttacagcc

SEQ ID NO: 1851752 - DNA, 25 bp, Homo sapien
catctggtagagaacaaatgtgaca

SEQ ID NO: 1851753 - DNA, 25 bp, Homo sapien
gacatcggcaggctcaataggcaga

SEQ ID NO: 1851754 - DNA, 25 bp, Homo sapien
tctacaaggtaccagcatgaagcag

SEQ ID NO: 1851755 - DNA, 25 bp, Homo sapien
ccctgagaggcaaaggaaggcccta

SEQ ID NO: 1851756 - DNA, 25 bp, Homo sapien
aatgaggaaacaaccagtcgggcgc

SEQ ID NO: 1851757 - DNA, 25 bp, Homo sapien
gactttgccagagattcccgcacct

SEQ ID NO: 1851758 - DNA, 25 bp, Homo sapien
aagcttcgaactgtaggcatggccg

SEQ ID NO: 1851759 - DNA, 25 bp, Homo sapien
ggcatggccgacagagcctcaatgg

SEQ ID NO: 1851760 - DNA, 25 bp, Homo sapien
tatttcttgcagcttttccctaaac

SEQ ID NO: 1851761 - DNA, 25 bp, Homo sapien
caatgtgagaggaactgagtctgcc

SEQ ID NO: 1851762 - DNA, 25 bp, Homo sapien
ggtctgtgtagagcgggccaactcc

SEQ ID NO: 1851763 - DNA, 25 bp, Homo sapien
gagaatcagtaagggtgccaggaaa

SEQ ID NO: 1851764 - DNA, 25 bp, Homo sapien
agacacagctatgccccttggatgc

SEQ ID NO: 1851765 - DNA, 25 bp, Homo sapien
gaatcactcagggtggacgtgtcct

SEQ ID NO: 1851766 - DNA, 25 bp, Homo sapien
tgagggacactgatccccagagcat

SEQ ID NO: 1851767 - DNA, 25 bp, Homo sapien
tgatccccaagagacataggcctcg

SEQ ID NO: 1851768 - DNA, 25 bp, Homo sapien
aggtaccacagaaataagctcagat

SEQ ID NO: 1851769 - DNA, 25 bp, Homo sapien
tcagcatttagggtcttggcctcag

SEQ ID NO: 1851770 - DNA, 25 bp, Homo sapien
tgccgaagtctgtggagcactcaag

SEQ ID NO: 1851771 - DNA, 25 bp, Homo sapien
cctagagaacctgtatgtcccatgc

SEQ ID NO: 1851772 - DNA, 25 bp, Homo sapien
cactcactgggactagggttctaac

SEQ ID NO: 1851773 - DNA, 25 bp, Homo sapien
ggtgttgttatagatcccgtcaccc

SEQ ID NO: 1851774 - DNA, 25 bp, Homo sapien
tgttgttatagatcccgtcacccac

SEQ ID NO: 1851775 - DNA, 25 bp, Homo sapien
acgtggcccatggtgttgttataga

SEQ ID NO: 1851776 - DNA, 25 bp, Homo sapien
ctgtgcacgtggcccatggtgttgt

SEQ ID NO: 1851777 - DNA, 25 bp, Homo sapien
ctggctatggtgagaatggacatga

SEQ ID NO: 1851778 - DNA, 25 bp, Homo sapien
tgtagaatccagtcagtgaggcggc

SEQ ID NO: 1851779 - DNA, 25 bp, Homo sapien
ttaagtttcgagtgaaggtatcggc

SEQ ID NO: 1851780 - DNA, 25 bp, Homo sapien
gctgagccatcttgtagaatccagt

SEQ ID NO: 1851781 - DNA, 25 bp, Homo sapien
tgaggcggcccgtaaagaatggaat

SEQ ID NO: 1851782 - DNA, 25 bp, Homo sapien
aggaccaggaacagcgagaggcggc

SEQ ID NO: 1851783 - DNA, 25 bp, Homo sapien
gaggctcccgagtttgtgccacagg

SEQ ID NO: 1851784 - DNA, 25 bp, Homo sapien
cctagaagccgacgcacagggtttc

SEQ ID NO: 1851785 - DNA, 25 bp, Homo sapien
agggtttccagagccgccctgaccg

SEQ ID NO: 1851786 - DNA, 25 bp, Homo sapien
gtgacttccccagtgcagtagcctg

SEQ ID NO: 1851787 - DNA, 25 bp, Homo sapien
cagtagcctggtgctatccgcggac

SEQ ID NO: 1851788 - DNA, 25 bp, Homo sapien
cccagtcggcgagaagtagcagtac

SEQ ID NO: 1851789 - DNA, 25 bp, Homo sapien
tcagctctcggaacaaggcaagtcc

SEQ ID NO: 1851790 - DNA, 25 bp, Homo sapien
caggctgatcctgcgctggcgagaa

SEQ ID NO: 1851791 - DNA, 25 bp, Homo sapien
gcctgggactctccgcgccccggtg

SEQ ID NO: 1851792 - DNA, 25 bp, Homo sapien
gagtcctcccctactggcggctggg

SEQ ID NO: 1851793 - DNA, 25 bp, Homo sapien
ctgaagctccgggtaccgccgagtc

SEQ ID NO: 1851794 - DNA, 25 bp, Homo sapien
tacttccaaaagtggcctgcccaga

SEQ ID NO: 1851795 - DNA, 25 bp, Homo sapien
tggtagcaagcgtggaaatcagatc

SEQ ID NO: 1851796 - DNA, 25 bp, Homo sapien
gaaagcgaaatcgaaagcggccgcc

SEQ ID NO: 1851797 - DNA, 25 bp, Homo sapien
ggcagatctgccctacacacgttag

SEQ ID NO: 1851798 - DNA, 25 bp, Homo sapien
tacatagagtgcaagctaagtagct

SEQ ID NO: 1851799 - DNA, 25 bp, Homo sapien
tatatagaaagccacttagtgaccc

SEQ ID NO: 1851800 - DNA, 25 bp, Homo sapien
taactagctcagtgaaaattagtcc

SEQ ID NO: 1851801 - DNA, 25 bp, Homo sapien
tcatttgaggctgcaaaacaacaat

SEQ ID NO: 1851802 - DNA, 25 bp, Homo sapien
catacagagatgagggaaaactaac

SEQ ID NO: 1851803 - DNA, 25 bp, Homo sapien
taacagaatttgtcactaacaggtc

SEQ ID NO: 1851804 - DNA, 25 bp, Homo sapien
cagaaactgtgtaagcccgaaggag

SEQ ID NO: 1851805 - DNA, 25 bp, Homo sapien
ggaaagaattagctaccttgaagac

SEQ ID NO: 1851806 - DNA, 25 bp, Homo sapien
aataagagtgttgaacaaatccctt

SEQ ID NO: 1851807 - DNA, 25 bp, Homo sapien
aaacaataagagtgttgaacaaatc

SEQ ID NO: 1851808 - DNA, 25 bp, Homo sapien
acaataagagtgttgaacaaatccc

SEQ ID NO: 1851809 - DNA, 25 bp, Homo sapien
caataagagtgttgaacaaatccct

SEQ ID NO: 1851810 - DNA, 25 bp, Homo sapien
tggtcacttgcagtagatccttgat

SEQ ID NO: 1851811 - DNA, 25 bp, Homo sapien
cttcaactttgtcatcatcgtgtag

SEQ ID NO: 1851812 - DNA, 25 bp, Homo sapien
caactttgtcatcatcgtgtaggtc

SEQ ID NO: 1851813 - DNA, 25 bp, Homo sapien
ttcttcaactttgtcatcatcgtgt

SEQ ID NO: 1851814 - DNA, 25 bp, Homo sapien
gcaagctatctgttgccatagcttc

SEQ ID NO: 1851815 - DNA, 25 bp, Homo sapien
tcttagcaagctatctgttgccata

SEQ ID NO: 1851816 - DNA, 25 bp, Homo sapien
caagctatctgttgccatagcttca

SEQ ID NO: 1851817 - DNA, 25 bp, Homo sapien
agctatctgttgccatagcttcagt

SEQ ID NO: 1851818 - DNA, 25 bp, Homo sapien
tgtctgctggacgatatgtcgccag

SEQ ID NO: 1851819 - DNA, 25 bp, Homo sapien
tcgtactatggtaaggagtgcttgg

SEQ ID NO: 1851820 - DNA, 25 bp, Homo sapien
ccatcgtactatggtaaggagtgct

SEQ ID NO: 1851821 - DNA, 25 bp, Homo sapien
tggacgatatgtcgccaggatgttc

SEQ ID NO: 1851822 - DNA, 25 bp, Homo sapien
tgaggggccgttgcgaggccgtgga

SEQ ID NO: 1851823 - DNA, 25 bp, Homo sapien
aagtcgtagaggtgttgtccttcag

SEQ ID NO: 1851824 - DNA, 25 bp, Homo sapien
ctcccacggggatgttcggccgacg

SEQ ID NO: 1851825 - DNA, 25 bp, Homo sapien
agctgctcgtggacactcccacggg

SEQ ID NO: 1851826 - DNA, 25 bp, Homo sapien
cattctattctattggcccagttgt

SEQ ID NO: 1851827 - DNA, 25 bp, Homo sapien
cagttttgccttcaatacgtcggta

SEQ ID NO: 1851828 - DNA, 25 bp, Homo sapien
tctcatgtagtcaggaaattcccca

SEQ ID NO: 1851829 - DNA, 25 bp, Homo sapien
tacgtcggtacttagttcatctgga

SEQ ID NO: 1851830 - DNA, 25 bp, Homo sapien
tattcaggccccaatgagaggctgc

SEQ ID NO: 1851831 - DNA, 25 bp, Homo sapien
gttactctcattacctgtgatgcag

SEQ ID NO: 1851832 - DNA, 25 bp, Homo sapien
tatgaaatacatatctcctcccgat

SEQ ID NO: 1851833 - DNA, 25 bp, Homo sapien
ttgactctgatctttcgttagctgg

SEQ ID NO: 1851834 - DNA, 25 bp, Homo sapien
tttattgagccacctattctgcttc

SEQ ID NO: 1851835 - DNA, 25 bp, Homo sapien
gagccacctattctgcttctttgca

SEQ ID NO: 1851836 - DNA, 25 bp, Homo sapien
cctattctgcttctttgcaacaaaa

SEQ ID NO: 1851837 - DNA, 25 bp, Homo sapien
tattgagccacctattctgcttctt

SEQ ID NO: 1851838 - DNA, 25 bp, Homo sapien
atagcccaggctcaaatttttctcg

SEQ ID NO: 1851839 - DNA, 25 bp, Homo sapien
caggtgacagtggaaccctgttagg

SEQ ID NO: 1851840 - DNA, 25 bp, Homo sapien
tgaggagcccatccctaatttagat

SEQ ID NO: 1851841 - DNA, 25 bp, Homo sapien
tgaaaccgataaaaatgggagctcc

SEQ ID NO: 1851842 - DNA, 25 bp, Homo sapien
agtggaaactgtatagctggtcatc

SEQ ID NO: 1851843 - DNA, 25 bp, Homo sapien
gctgcttctacaccaaaacagctgg

SEQ ID NO: 1851844 - DNA, 25 bp, Homo sapien
cctaacccatgtgctatgatttgaa

SEQ ID NO: 1851845 - DNA, 25 bp, Homo sapien
tctaaagtcgtacaagccaatctgc

SEQ ID NO: 1851846 - DNA, 25 bp, Homo sapien
ttattccaggaaacagaatgaagaa

SEQ ID NO: 1851847 - DNA, 25 bp, Homo sapien
gaatgaagaacaaaatctgcctagg

SEQ ID NO: 1851848 - DNA, 25 bp, Homo sapien
tttctatttattattccaggaaaca

SEQ ID NO: 1851849 - DNA, 25 bp, Homo sapien
tgccctttgaaaagacatttctatt

SEQ ID NO: 1851850 - DNA, 25 bp, Homo sapien
ctaatttagtaaaggttgacagcaa

SEQ ID NO: 1851851 - DNA, 25 bp, Homo sapien
gaacaaatagcgtttatcccaggaa

SEQ ID NO: 1851852 - DNA, 25 bp, Homo sapien
tctggaaaaattgagtagacatact

SEQ ID NO: 1851853 - DNA, 25 bp, Homo sapien
gaaaggcaagttttacgtccatgct

SEQ ID NO: 1851854 - DNA, 25 bp, Homo sapien
gaagatcctagtcaagcaacatgaa

SEQ ID NO: 1851855 - DNA, 25 bp, Homo sapien
ccctactgtttgacacagcattgaa

SEQ ID NO: 1851856 - DNA, 25 bp, Homo sapien
taatgctcattatcaccctactgtt

SEQ ID NO: 1851857 - DNA, 25 bp, Homo sapien
caaaacaatgctcgcagatgatact

SEQ ID NO: 1851858 - DNA, 25 bp, Homo sapien
taagaggatcgagcaaggttgtccc

SEQ ID NO: 1851859 - DNA, 25 bp, Homo sapien
acagacaatttttcctcgagaatga

SEQ ID NO: 1851860 - DNA, 25 bp, Homo sapien
ggttgtcccatataagatcaactta

SEQ ID NO: 1851861 - DNA, 25 bp, Homo sapien
tgatatacaagtggcaaacacacat

SEQ ID NO: 1851862 - DNA, 25 bp, Homo sapien
tctctgaaacaatcaccagttgctg

SEQ ID NO: 1851863 - DNA, 25 bp, Homo sapien
gcatagtcccaggaatgaggtcccc

SEQ ID NO: 1851864 - DNA, 25 bp, Homo sapien
tcatcccagaaatatagccttggac

SEQ ID NO: 1851865 - DNA, 25 bp, Homo sapien
tgtcctctatggcacactgagagcc

SEQ ID NO: 1851866 - DNA, 25 bp, Homo sapien
taaataaaagggagataatgaggct

SEQ ID NO: 1851867 - DNA, 25 bp, Homo sapien
gataatgaggcttcaacccaacttg

SEQ ID NO: 1851868 - DNA, 25 bp, Homo sapien
agggagataatgaggcttcaaccca

SEQ ID NO: 1851869 - DNA, 25 bp, Homo sapien
atgaggcttcaacccaacttgcccc

SEQ ID NO: 1851870 - DNA, 25 bp, Homo sapien
aattggacccaggaagaggagtgta

SEQ ID NO: 1851871 - DNA, 25 bp, Homo sapien
ttggacccaggaagaggagtgtaac

SEQ ID NO: 1851872 - DNA, 25 bp, Homo sapien
cttctgaataattggacccaggaag

SEQ ID NO: 1851873 - DNA, 25 bp, Homo sapien
aataattggacccaggaagaggagt

SEQ ID NO: 1851874 - DNA, 25 bp, Homo sapien
cagtaggaaggagagagttaatcac

SEQ ID NO: 1851875 - DNA, 25 bp, Homo sapien
gcagtattcatagcaaatgcagtag

SEQ ID NO: 1851876 - DNA, 25 bp, Homo sapien
tacttgattataccagtctttgtgg

SEQ ID NO: 1851877 - DNA, 25 bp, Homo sapien
gatgggagttcagcgagtcactcac

SEQ ID NO: 1851878 - DNA, 25 bp, Homo sapien
cacagaaaccttcagggtctgcatg

SEQ ID NO: 1851879 - DNA, 25 bp, Homo sapien
caccaagagagaagatgatgaggcc

SEQ ID NO: 1851880 - DNA, 25 bp, Homo sapien
tagagtggccagctctccgccagct

SEQ ID NO: 1851881 - DNA, 25 bp, Homo sapien
ccagctgatcacaccaagagagaag

SEQ ID NO: 1851882 - DNA, 25 bp, Homo sapien
gcatgccaaatggtctgccagccgt

SEQ ID NO: 1851883 - DNA, 25 bp, Homo sapien
tccaggtcctctctaatacagtggg

SEQ ID NO: 1851884 - DNA, 25 bp, Homo sapien
tcccgtatgcttggtagagcaggcc

SEQ ID NO: 1851885 - DNA, 25 bp, Homo sapien
tgtgaggagacgttccccaggaaag

SEQ ID NO: 1851886 - DNA, 25 bp, Homo sapien
gctgtctaccatgtaccatgtatcg

SEQ ID NO: 1851887 - DNA, 25 bp, Homo sapien
tgtatcgatccacatctcattttct

SEQ ID NO: 1851888 - DNA, 25 bp, Homo sapien
tctctgctttgaccctaattccatc

SEQ ID NO: 1851889 - DNA, 25 bp, Homo sapien
cattttcagcacttcgctgtctacc

SEQ ID NO: 1851890 - DNA, 25 bp, Homo sapien
tcaggagccccaatgtgctctacca

SEQ ID NO: 1851891 - DNA, 25 bp, Homo sapien
tctgctggatagaagccccacacat

SEQ ID NO: 1851892 - DNA, 25 bp, Homo sapien
acatagcaggccagcatcacaggct

SEQ ID NO: 1851893 - DNA, 25 bp, Homo sapien
caggtgtaagtgtccccgtaagagg

SEQ ID NO: 1851894 - DNA, 25 bp, Homo sapien
aactcttcgtagattttgcaaccca

SEQ ID NO: 1851895 - DNA, 25 bp, Homo sapien
taaggaagctaagagtaatccagag

SEQ ID NO: 1851896 - DNA, 25 bp, Homo sapien
gcctaacttaggactcactcttaaa

SEQ ID NO: 1851897 - DNA, 25 bp, Homo sapien
tcacatagttcaaggaaacaagcct

SEQ ID NO: 1851898 - DNA, 25 bp, Homo sapien
tgccctcctaactgcacttcctggt

SEQ ID NO: 1851899 - DNA, 25 bp, Homo sapien
tgcacttcctggtagcccctctgca

SEQ ID NO: 1851900 - DNA, 25 bp, Homo sapien
gcccctctgcacccctctctcctca

SEQ ID NO: 1851901 - DNA, 25 bp, Homo sapien
cccctctgcacccctctctcctcac

SEQ ID NO: 1851902 - DNA, 25 bp, Homo sapien
cgcaagcgctgcatcagggtgtctt

SEQ ID NO: 1851903 - DNA, 25 bp, Homo sapien
ttctgaagcccattgcgcaagcgct

SEQ ID NO: 1851904 - DNA, 25 bp, Homo sapien
attcagcaccccaaattcgcaaggg

SEQ ID NO: 1851905 - DNA, 25 bp, Homo sapien
gaggacattcgccaagctattcagc

SEQ ID NO: 1851906 - DNA, 25 bp, Homo sapien
ccagcagcagcggcaggaatgtgat

SEQ ID NO: 1851907 - DNA, 25 bp, Homo sapien
gcagcagcggcaggaatgtgatcat

SEQ ID NO: 1851908 - DNA, 25 bp, Homo sapien
ccaggctgagccccagcagcagcgg

SEQ ID NO: 1851909 - DNA, 25 bp, Homo sapien
ctgctcctgtgcagcccaggctgag

SEQ ID NO: 1851910 - DNA, 25 bp, Homo sapien
tgctctcccaaaagaccaggaccag

SEQ ID NO: 1851911 - DNA, 25 bp, Homo sapien
caaacagggacagattggctaggta

SEQ ID NO: 1851912 - DNA, 25 bp, Homo sapien
gggagtccagtgtcccaaacaggga

SEQ ID NO: 1851913 - DNA, 25 bp, Homo sapien
tgcagaataagggaagcagcgccac

SEQ ID NO: 1851914 - DNA, 25 bp, Homo sapien
agatttattgccttgtggggggaag

SEQ ID NO: 1851915 - DNA, 25 bp, Homo sapien
gagatttattgccttgtggggggaa

SEQ ID NO: 1851916 - DNA, 25 bp, Homo sapien
tggttgtgataggcaggccactctg

SEQ ID NO: 1851917 - DNA, 25 bp, Homo sapien
gagacttcttctaccctaagaggag

SEQ ID NO: 1851918 - DNA, 25 bp, Homo sapien
tccccaggtgggaaatctacacaca

SEQ ID NO: 1851919 - DNA, 25 bp, Homo sapien
catcctctgtttggatggccgaagc

SEQ ID NO: 1851920 - DNA, 25 bp, Homo sapien
aaggcatcaggggatccatcctcct

SEQ ID NO: 1851921 - DNA, 25 bp, Homo sapien
atggtgctggatacaggcccccaca

SEQ ID NO: 1851922 - DNA, 25 bp, Homo sapien
accacaccctgcagaagttgatctc

SEQ ID NO: 1851923 - DNA, 25 bp, Homo sapien
ttttcactcaaagcaattcttgtga

SEQ ID NO: 1851924 - DNA, 25 bp, Homo sapien
tccagcagatctgagggcagtgcgt

SEQ ID NO: 1851925 - DNA, 25 bp, Homo sapien
cagcagatctgagggcagtgcgttc

SEQ ID NO: 1851926 - DNA, 25 bp, Homo sapien
acaatgcccacgatgatgcccagca

SEQ ID NO: 1851927 - DNA, 25 bp, Homo sapien
agatctgagggcagtgcgttccggg

SEQ ID NO: 1851928 - DNA, 25 bp, Homo sapien
ctgggatgacatgggagactgggat

SEQ ID NO: 1851929 - DNA, 25 bp, Homo sapien
taggaatggactaaacaaggtacca

SEQ ID NO: 1851930 - DNA, 25 bp, Homo sapien
aagaagcctcctcccatggatctat

SEQ ID NO: 1851931 - DNA, 25 bp, Homo sapien
tgcccccaaaaggaccagaattcca

SEQ ID NO: 1851932 - DNA, 25 bp, Homo sapien
tagcggtcaatttcgtgagtcacaa

SEQ ID NO: 1851933 - DNA, 25 bp, Homo sapien
taggcaattgctgtgtagcggtcaa

SEQ ID NO: 1851934 - DNA, 25 bp, Homo sapien
tgagacaaaagtaggcccaaatcct

SEQ ID NO: 1851935 - DNA, 25 bp, Homo sapien
tgagtccatcgacagctgagacaaa

SEQ ID NO: 1851936 - DNA, 25 bp, Homo sapien
tcagcgtgaacacttcagcgatagg

SEQ ID NO: 1851937 - DNA, 25 bp, Homo sapien
gcgtgaacacttcagcgataggaaa

SEQ ID NO: 1851938 - DNA, 25 bp, Homo sapien
gtgaacacttcagcgataggaaacc

SEQ ID NO: 1851939 - DNA, 25 bp, Homo sapien
gggcttcagcgtgaacacttcagcg

SEQ ID NO: 1851940 - DNA, 25 bp, Homo sapien
ggtcttcttccaggcaaggactgca

SEQ ID NO: 1851941 - DNA, 25 bp, Homo sapien
actacatgctaggtacttcggccca

SEQ ID NO: 1851942 - DNA, 25 bp, Homo sapien
tgcagctagacgtagaagcagagcc

SEQ ID NO: 1851943 - DNA, 25 bp, Homo sapien
cctgtctagagctcacattgatgtc

SEQ ID NO: 1851944 - DNA, 25 bp, Homo sapien
tatttgctggatcatccactcgcag

SEQ ID NO: 1851945 - DNA, 25 bp, Homo sapien
tccactcgcagaactctttgtcaaa

SEQ ID NO: 1851946 - DNA, 25 bp, Homo sapien
tcccatcaagttttggccctatttg

SEQ ID NO: 1851947 - DNA, 25 bp, Homo sapien
ccagtcagcaaattcgggcaggcga

SEQ ID NO: 1851948 - DNA, 25 bp, Homo sapien
gaaaagctggtcctcgtcgtaggcc

SEQ ID NO: 1851949 - DNA, 25 bp, Homo sapien
tggtcctcgtcgtaggcctcagaga

SEQ ID NO: 1851950 - DNA, 25 bp, Homo sapien
ggcctcagagagtcccacactggga

SEQ ID NO: 1851951 - DNA, 25 bp, Homo sapien
tcgtcgtaggcctcagagagtccca

SEQ ID NO: 1851952 - DNA, 25 bp, Homo sapien
gtcatctggccacattggagtagga

SEQ ID NO: 1851953 - DNA, 25 bp, Homo sapien
ctggcagtacactgtgtgcaggaat

SEQ ID NO: 1851954 - DNA, 25 bp, Homo sapien
ggcagtacactgtgtgcaggaatgt

SEQ ID NO: 1851955 - DNA, 25 bp, Homo sapien
gaatgtgtggttttgcaggtcatct

SEQ ID NO: 1851956 - DNA, 25 bp, Homo sapien
caaaaacaagcaaggcctgcttaag

SEQ ID NO: 1851957 - DNA, 25 bp, Homo sapien
gaagaacaaattatggcatctctcc

SEQ ID NO: 1851958 - DNA, 25 bp, Homo sapien
ctataaaaaggccagttggcaaaag

SEQ ID NO: 1851959 - DNA, 25 bp, Homo sapien
tgccgggagctaagattaagccact

SEQ ID NO: 1851960 - DNA, 25 bp, Homo sapien
catggatgggtttctcactcttaga

SEQ ID NO: 1851961 - DNA, 25 bp, Homo sapien
caagccatagatgggactgcctccc

SEQ ID NO: 1851962 - DNA, 25 bp, Homo sapien
gaaagcctgcattctgctcaccatg

SEQ ID NO: 1851963 - DNA, 25 bp, Homo sapien
tattgactagagaaggccatggatg

SEQ ID NO: 1851964 - DNA, 25 bp, Homo sapien
tgtcttctgttccttaacctaccag

SEQ ID NO: 1851965 - DNA, 25 bp, Homo sapien
gagaagtgaccccataactgcataa

SEQ ID NO: 1851966 - DNA, 25 bp, Homo sapien
aggaatcgctcagccagcaggaaac

SEQ ID NO: 1851967 - DNA, 25 bp, Homo sapien
tggcaccaagcgtctctcaaaatgt

SEQ ID NO: 1851968 - DNA, 25 bp, Homo sapien
ggaagagggatcttccagattattc

SEQ ID NO: 1851969 - DNA, 25 bp, Homo sapien
aggagtggggtagcagccacagaag

SEQ ID NO: 1851970 - DNA, 25 bp, Homo sapien
tgtagcagcgcagctccttggttct

SEQ ID NO: 1851971 - DNA, 25 bp, Homo sapien
ggagtggggtagcagccacagaagt

SEQ ID NO: 1851972 - DNA, 25 bp, Homo sapien
agtaggtaggagctaccaacccagc

SEQ ID NO: 1851973 - DNA, 25 bp, Homo sapien
gaacatttcccagtatcccaacatt

SEQ ID NO: 1851974 - DNA, 25 bp, Homo sapien
ggaaatcatggtaaccctccagaaa

SEQ ID NO: 1851975 - DNA, 25 bp, Homo sapien
catttatgcactaacccatcagcgg

SEQ ID NO: 1851976 - DNA, 25 bp, Homo sapien
ctatgacctcctagatattctggaa

SEQ ID NO: 1851977 - DNA, 25 bp, Homo sapien
tctcaagattacaagagtacactca

SEQ ID NO: 1851978 - DNA, 25 bp, Homo sapien
ccaatgtactctcatgaatgtcaac

SEQ ID NO: 1851979 - DNA, 25 bp, Homo sapien
tataattttcaaaccgtgccattag

SEQ ID NO: 1851980 - DNA, 25 bp, Homo sapien
gatgtccacccgagctacaaatgtg

SEQ ID NO: 1851981 - DNA, 25 bp, Homo sapien
ggaccactgtattttgataactata

SEQ ID NO: 1851982 - DNA, 25 bp, Homo sapien
tcctatccatagatatacctatgat

SEQ ID NO: 1851983 - DNA, 25 bp, Homo sapien
gattatacagtttattcctatccat

SEQ ID NO: 1851984 - DNA, 25 bp, Homo sapien
ggtccttctgtctcatacacaaagt

SEQ ID NO: 1851985 - DNA, 25 bp, Homo sapien
tacagactttgtggttaaacagcca

SEQ ID NO: 1851986 - DNA, 25 bp, Homo sapien
tccgggtaacagagaaggttgacca

SEQ ID NO: 1851987 - DNA, 25 bp, Homo sapien
gaacaggctcccagattacagactt

SEQ ID NO: 1851988 - DNA, 25 bp, Homo sapien
tcaaatgtcgaatgcctcagaggtc

SEQ ID NO: 1851989 - DNA, 25 bp, Homo sapien
gtgcgcttccgctggattcaggcca

SEQ ID NO: 1851990 - DNA, 25 bp, Homo sapien
ctgacagctcagcagcgtgcgcttc

SEQ ID NO: 1851991 - DNA, 25 bp, Homo sapien
gcgacgagggcgagaaactccctct

SEQ ID NO: 1851992 - DNA, 25 bp, Homo sapien
agaccctcatatctccaggtccagg

SEQ ID NO: 1851993 - DNA, 25 bp, Homo sapien
caagccgagggcaactttggaggcc

SEQ ID NO: 1851994 - DNA, 25 bp, Homo sapien
gtaccaagccgagggcaactttgga

SEQ ID NO: 1851995 - DNA, 25 bp, Homo sapien
ccgtaccaagccgagggcaactttg

SEQ ID NO: 1851996 - DNA, 25 bp, Homo sapien
gaaggctttaggatccaggtgagaa

SEQ ID NO: 1851997 - DNA, 25 bp, Homo sapien
cgtggagggggggcgagcgggagag

SEQ ID NO: 1851998 - DNA, 25 bp, Homo sapien
caatgggagcgtggagggggggcga

SEQ ID NO: 1851999 - DNA, 25 bp, Homo sapien
agccaatgggagcgtggaggggggg

SEQ ID NO: 1852000 - DNA, 25 bp, Homo sapien
ccaatgggagcgtggagggggggcg

SEQ ID NO: 1852001 - DNA, 25 bp, Homo sapien
tctggcaacactgttttagactgtg

SEQ ID NO: 1852002 - DNA, 25 bp, Homo sapien
gaagcccgtagctgttcgccataga

SEQ ID NO: 1852003 - DNA, 25 bp, Homo sapien
ggcatgggaacgttagatcccctca

SEQ ID NO: 1852004 - DNA, 25 bp, Homo sapien
caggccgcggcttctaagatggcgt

SEQ ID NO: 1852005 - DNA, 25 bp, Homo sapien
gagtcagtccctccttagttgcccg

SEQ ID NO: 1852006 - DNA, 25 bp, Homo sapien
catccgcttggaaatggccttcgtc

SEQ ID NO: 1852007 - DNA, 25 bp, Homo sapien
caacagcgggctatattgacgacgg

SEQ ID NO: 1852008 - DNA, 25 bp, Homo sapien
catccgagatcgaaacgggacctcg

SEQ ID NO: 1852009 - DNA, 25 bp, Homo sapien
gccaagatgccagatgaaccactag

SEQ ID NO: 1852010 - DNA, 25 bp, Homo sapien
gatgtatttgagttccgttatgcca

SEQ ID NO: 1852011 - DNA, 25 bp, Homo sapien
gggcctttaccagtctctactgcca

SEQ ID NO: 1852012 - DNA, 25 bp, Homo sapien
gatgaaccactagaaccagggcctt

SEQ ID NO: 1852013 - DNA, 25 bp, Homo sapien
cctggacatcaacaaattacctggg

SEQ ID NO: 1852014 - DNA, 25 bp, Homo sapien
cagggagccctctttacgtgattca

SEQ ID NO: 1852015 - DNA, 25 bp, Homo sapien
tccacacttagagagcttgagcgct

SEQ ID NO: 1852016 - DNA, 25 bp, Homo sapien
ccatgagttacgatgagaagcggca

SEQ ID NO: 1852017 - DNA, 25 bp, Homo sapien
ggccctgttttgagattgtttgttc

SEQ ID NO: 1852018 - DNA, 25 bp, Homo sapien
atagctgccctattcacttctaagg

SEQ ID NO: 1852019 - DNA, 25 bp, Homo sapien
tttcagtcatctccccatttggtcc

SEQ ID NO: 1852020 - DNA, 25 bp, Homo sapien
gggtttcagtcatctccccatttgg

SEQ ID NO: 1852021 - DNA, 25 bp, Homo sapien
ttggaactggcttctctatgaaggc

SEQ ID NO: 1852022 - DNA, 25 bp, Homo sapien
gaaagacagttattaccttgtcttc

SEQ ID NO: 1852023 - DNA, 25 bp, Homo sapien
cttctctatgaaggcaggttgtaga

SEQ ID NO: 1852024 - DNA, 25 bp, Homo sapien
ctggcttctctatgaaggcaggttg

SEQ ID NO: 1852025 - DNA, 25 bp, Homo sapien
taatgactttatcaagccttaggac

SEQ ID NO: 1852026 - DNA, 25 bp, Homo sapien
tttatcaagccttaggacagagatg

SEQ ID NO: 1852027 - DNA, 25 bp, Homo sapien
tatcaagccttaggacagagatgag

SEQ ID NO: 1852028 - DNA, 25 bp, Homo sapien
tgactttatcaagccttaggacaga

SEQ ID NO: 1852029 - DNA, 25 bp, Homo sapien
gatcagagattgttgggtacacacg

SEQ ID NO: 1852030 - DNA, 25 bp, Homo sapien
tcaagttaacgtctaagcaaaagat

SEQ ID NO: 1852031 - DNA, 25 bp, Homo sapien
gggctgagtgcttggcagccacatt

SEQ ID NO: 1852032 - DNA, 25 bp, Homo sapien
tgattcctgctctaactacacaggg

SEQ ID NO: 1852033 - DNA, 25 bp, Homo sapien
taaactcaggagctgtcgggtggac

SEQ ID NO: 1852034 - DNA, 25 bp, Homo sapien
gatggcacctgattacgtcactggg

SEQ ID NO: 1852035 - DNA, 25 bp, Homo sapien
gagagaacaccgctaacatgcaggg

SEQ ID NO: 1852036 - DNA, 25 bp, Homo sapien
tagagtgtgtctaggtggacctccc

SEQ ID NO: 1852037 - DNA, 25 bp, Homo sapien
tcaaagtcagcacagcgggatgcac

SEQ ID NO: 1852038 - DNA, 25 bp, Homo sapien
catcatggcaggataccagtggcct

SEQ ID NO: 1852039 - DNA, 25 bp, Homo sapien
tagtaggtgtccaacaaaccctgcc

SEQ ID NO: 1852040 - DNA, 25 bp, Homo sapien
catacagagtaaacccaggcaggag

SEQ ID NO: 1852041 - DNA, 25 bp, Homo sapien
cactggacacatatgtgcccatgat

SEQ ID NO: 1852042 - DNA, 25 bp, Homo sapien
gggacactggacacatatgtgccca

SEQ ID NO: 1852043 - DNA, 25 bp, Homo sapien
ggacacatatgtgcccatgatgatg

SEQ ID NO: 1852044 - DNA, 25 bp, Homo sapien
gacactggacacatatgtgcccatg

SEQ ID NO: 1852045 - DNA, 25 bp, Homo sapien
ggtggtggaataggcacctggagct

SEQ ID NO: 1852046 - DNA, 25 bp, Homo sapien
ctggtggtggaataggcacctggag

SEQ ID NO: 1852047 - DNA, 25 bp, Homo sapien
ggcatctggtggtggaataggcacc

SEQ ID NO: 1852048 - DNA, 25 bp, Homo sapien
catctggtggtggaataggcacctg

SEQ ID NO: 1852049 - DNA, 25 bp, Homo sapien
ggagttggtggtatatgaaaggatt

SEQ ID NO: 1852050 - DNA, 25 bp, Homo sapien
aggattctagagtaaaggaaacctg

SEQ ID NO: 1852051 - DNA, 25 bp, Homo sapien
aaaggaaggagttggtggtatatga

SEQ ID NO: 1852052 - DNA, 25 bp, Homo sapien
ggaaggagttggtggtatatgaaag

SEQ ID NO: 1852053 - DNA, 25 bp, Homo sapien
caatgcctgaggagtggcgcatcca

SEQ ID NO: 1852054 - DNA, 25 bp, Homo sapien
aatgcctgaggagtggcgcatccag

SEQ ID NO: 1852055 - DNA, 25 bp, Homo sapien
cccaatgcctgaggagtggcgcatc

SEQ ID NO: 1852056 - DNA, 25 bp, Homo sapien
tgcctgaggagtggcgcatccaggc

SEQ ID NO: 1852057 - DNA, 25 bp, Homo sapien
acttgcggaacaaatggtcaggctg

SEQ ID NO: 1852058 - DNA, 25 bp, Homo sapien
gacagtttggccgttgcgcagccag

SEQ ID NO: 1852059 - DNA, 25 bp, Homo sapien
tgttgtccacgatgcagatgaggat

SEQ ID NO: 1852060 - DNA, 25 bp, Homo sapien
ggcagtcatagacgtcctcggctga

SEQ ID NO: 1852061 - DNA, 25 bp, Homo sapien
aggctcatccctcaccccagggcct

SEQ ID NO: 1852062 - DNA, 25 bp, Homo sapien
ccacaggctcatccctcaccccagg

SEQ ID NO: 1852063 - DNA, 25 bp, Homo sapien
gagtccacaggctcatccctcaccc

SEQ ID NO: 1852064 - DNA, 25 bp, Homo sapien
gtccacaggctcatccctcacccca

SEQ ID NO: 1852065 - DNA, 25 bp, Homo sapien
atctgtgggcaggggatgctctggg

SEQ ID NO: 1852066 - DNA, 25 bp, Homo sapien
gacgttccccctttgtagccatctg

SEQ ID NO: 1852067 - DNA, 25 bp, Homo sapien
ggcaggggatgctctggggtatcca

SEQ ID NO: 1852068 - DNA, 25 bp, Homo sapien
tgtgggcaggggatgctctggggta

SEQ ID NO: 1852069 - DNA, 25 bp, Homo sapien
tatatttgactggtccctgggcggg

SEQ ID NO: 1852070 - DNA, 25 bp, Homo sapien
cctgggcgggagtccgggtgagagg

SEQ ID NO: 1852071 - DNA, 25 bp, Homo sapien
gacgccaggagctcctatatttgac

SEQ ID NO: 1852072 - DNA, 25 bp, Homo sapien
ccgggtgagaggtgtcattcctcaa

SEQ ID NO: 1852073 - DNA, 25 bp, Homo sapien
tgggtgggcagagggagggccggta

SEQ ID NO: 1852074 - DNA, 25 bp, Homo sapien
tctgctgcggttggagcgctccacc

SEQ ID NO: 1852075 - DNA, 25 bp, Homo sapien
ctctgctgcggttggagcgctccac

SEQ ID NO: 1852076 - DNA, 25 bp, Homo sapien
tttgattgcggcgatgccggccagc

SEQ ID NO: 1852077 - DNA, 25 bp, Homo sapien
gattgcggcgatgccggccagcccg

SEQ ID NO: 1852078 - DNA, 25 bp, Homo sapien
ttgattgcggcgatgccggccagcc

SEQ ID NO: 1852079 - DNA, 25 bp, Homo sapien
gctttgattgcggcgatgccggcca

SEQ ID NO: 1852080 - DNA, 25 bp, Homo sapien
tcaaagcgggcaaagtcaccaaact

SEQ ID NO: 1852081 - DNA, 25 bp, Homo sapien
cacacggcctcgcttttcttcaggt

SEQ ID NO: 1852082 - DNA, 25 bp, Homo sapien
ccgaggcgccgtaagactggtagaa

SEQ ID NO: 1852083 - DNA, 25 bp, Homo sapien
attcatgggtgaactggcccgaggc

SEQ ID NO: 1852084 - DNA, 25 bp, Homo sapien
cacaatatgtgattgttgagtccct

SEQ ID NO: 1852085 - DNA, 25 bp, Homo sapien
tccacaatatgtgattgttgagtcc

SEQ ID NO: 1852086 - DNA, 25 bp, Homo sapien
aatatgtgattgttgagtccctgag

SEQ ID NO: 1852087 - DNA, 25 bp, Homo sapien
catccacaatatgtgattgttgagt

SEQ ID NO: 1852088 - DNA, 25 bp, Homo sapien
ctgcctcctgcgggctcaggagggt

SEQ ID NO: 1852089 - DNA, 25 bp, Homo sapien
tcctgcgggctcaggagggtcatca

SEQ ID NO: 1852090 - DNA, 25 bp, Homo sapien
gggctcaggagggtcatcagggtgt

SEQ ID NO: 1852091 - DNA, 25 bp, Homo sapien
ctcaggagggtcatcagggtgtgga

SEQ ID NO: 1852092 - DNA, 25 bp, Homo sapien
gacaggaacaaggcggaggtaaaga

SEQ ID NO: 1852093 - DNA, 25 bp, Homo sapien
tttaatcaaatcagtctcagtccgt

SEQ ID NO: 1852094 - DNA, 25 bp, Homo sapien
tcaaatcagtctcagtccgtgtggt

SEQ ID NO: 1852095 - DNA, 25 bp, Homo sapien
cagtctcagtccgtgtggtgaggac

SEQ ID NO: 1852096 - DNA, 25 bp, Homo sapien
tagatctgactgtttgctggtgcat

SEQ ID NO: 1852097 - DNA, 25 bp, Homo sapien
tttccattctggaccttagatctga

SEQ ID NO: 1852098 - DNA, 25 bp, Homo sapien
attctggaccttagatctgactgtt

SEQ ID NO: 1852099 - DNA, 25 bp, Homo sapien
gaccttagatctgactgtttgctgg

SEQ ID NO: 1852100 - DNA, 25 bp, Homo sapien
tatcagttctaagagtgttctggtg

SEQ ID NO: 1852101 - DNA, 25 bp, Homo sapien
ttgagatagtcatatggattttggc

SEQ ID NO: 1852102 - DNA, 25 bp, Homo sapien
tatcctgccaagtctactgaattgg

SEQ ID NO: 1852103 - DNA, 25 bp, Homo sapien
tgtgtatacttgtcttttcccagtt

SEQ ID NO: 1852104 - DNA, 25 bp, Homo sapien
gacctggtcctagacttccagtaag

SEQ ID NO: 1852105 - DNA, 25 bp, Homo sapien
tagtaaccacatcggcaacagaggt

SEQ ID NO: 1852106 - DNA, 25 bp, Homo sapien
ttccagtaagaatgactcagagtct

SEQ ID NO: 1852107 - DNA, 25 bp, Homo sapien
tgaatggaatcctaatctgcctgaa

SEQ ID NO: 1852108 - DNA, 25 bp, Homo sapien
tattggtcttagggtattctcggga

SEQ ID NO: 1852109 - DNA, 25 bp, Homo sapien
tcttagggtattctcgggaaggtga

SEQ ID NO: 1852110 - DNA, 25 bp, Homo sapien
aaggagaacagaggataaaaggctc

SEQ ID NO: 1852111 - DNA, 25 bp, Homo sapien
aggagaacagaggataaaaggctca

SEQ ID NO: 1852112 - DNA, 25 bp, Homo sapien
cagccactggagtagttttcacatg

SEQ ID NO: 1852113 - DNA, 25 bp, Homo sapien
ttactaaggaatgactgctttgagg

SEQ ID NO: 1852114 - DNA, 25 bp, Homo sapien
gaagggtcagcaattcagtcagcca

SEQ ID NO: 1852115 - DNA, 25 bp, Homo sapien
ttgaggtaatggataaggacagagc

SEQ ID NO: 1852116 - DNA, 25 bp, Homo sapien
gagaaggtggtcatccctgcacatg

SEQ ID NO: 1852117 - DNA, 25 bp, Homo sapien
gagaagaagcttaaccctggaatga

SEQ ID NO: 1852118 - DNA, 25 bp, Homo sapien
gagcacataggagccaaggagttca

SEQ ID NO: 1852119 - DNA, 25 bp, Homo sapien
gttcagtactgtaagcccggaccca

SEQ ID NO: 1852120 - DNA, 25 bp, Homo sapien
tccaggtatcccaggagcaatgtag

SEQ ID NO: 1852121 - DNA, 25 bp, Homo sapien
tgcttgcaatagtagagaaccagga

SEQ ID NO: 1852122 - DNA, 25 bp, Homo sapien
tgacaagggactactagcaggacta

SEQ ID NO: 1852123 - DNA, 25 bp, Homo sapien
ggtcaggcccacatgtatatgcagt

SEQ ID NO: 1852124 - DNA, 25 bp, Homo sapien
tgtttcgcgtacagcctgcagatct

SEQ ID NO: 1852125 - DNA, 25 bp, Homo sapien
tcttcgtaaattaggtaacttcaga

SEQ ID NO: 1852126 - DNA, 25 bp, Homo sapien
aagtaaaatactatggaagatttgg

SEQ ID NO: 1852127 - DNA, 25 bp, Homo sapien
tggactaatgcatggacatataaag

SEQ ID NO: 1852128 - DNA, 25 bp, Homo sapien
ggtcatctgcatggaagttcactgt

SEQ ID NO: 1852129 - DNA, 25 bp, Homo sapien
aaatgtaaatcctcagaatagcgcc

SEQ ID NO: 1852130 - DNA, 25 bp, Homo sapien
gacagtaagtagttacaggcaccca

SEQ ID NO: 1852131 - DNA, 25 bp, Homo sapien
tctggattggaagctagccctacta

SEQ ID NO: 1852132 - DNA, 25 bp, Homo sapien
aaatcctagggcctcctctttacat

SEQ ID NO: 1852133 - DNA, 25 bp, Homo sapien
tctacaaatcctagggcctcctctt

SEQ ID NO: 1852134 - DNA, 25 bp, Homo sapien
attctacaaatcctagggcctcctc

SEQ ID NO: 1852135 - DNA, 25 bp, Homo sapien
atcctagggcctcctctttacattc

SEQ ID NO: 1852136 - DNA, 25 bp, Homo sapien
cacagtctccgttgtctcaggcatc

SEQ ID NO: 1852137 - DNA, 25 bp, Homo sapien
cagagactttatgatgaggacggtg

SEQ ID NO: 1852138 - DNA, 25 bp, Homo sapien
cagaacgcagagactttatgatgag

SEQ ID NO: 1852139 - DNA, 25 bp, Homo sapien
gtctccgttgtctcaggcatctgga

SEQ ID NO: 1852140 - DNA, 25 bp, Homo sapien
tatggagagaaaagcagttgcatac

SEQ ID NO: 1852141 - DNA, 25 bp, Homo sapien
ttatggagagaaaagcagttgcata

SEQ ID NO: 1852142 - DNA, 25 bp, Homo sapien
agtgcttgaggagcggctggtccaa

SEQ ID NO: 1852143 - DNA, 25 bp, Homo sapien
cccagtgcttgaggagcggctggtc

SEQ ID NO: 1852144 - DNA, 25 bp, Homo sapien
cagtgcttgaggagcggctggtcca

SEQ ID NO: 1852145 - DNA, 25 bp, Homo sapien
gcttgaggagcggctggtccaagcc

SEQ ID NO: 1852146 - DNA, 25 bp, Homo sapien
gggcacaaaggtcaggtaatggaac

SEQ ID NO: 1852147 - DNA, 25 bp, Homo sapien
aggtcaggtaatggaacttgtggaa

SEQ ID NO: 1852148 - DNA, 25 bp, Homo sapien
cacaaaggtcaggtaatggaacttg

SEQ ID NO: 1852149 - DNA, 25 bp, Homo sapien
caaaggtcaggtaatggaacttgtg

SEQ ID NO: 1852150 - DNA, 25 bp, Homo sapien
gttgcacagccacgtgacgttgagc

SEQ ID NO: 1852151 - DNA, 25 bp, Homo sapien
agctccccgttgcacagccacgtga

SEQ ID NO: 1852152 - DNA, 25 bp, Homo sapien
ccgttgcacagccacgtgacgttga

SEQ ID NO: 1852153 - DNA, 25 bp, Homo sapien
tgcacagccacgtgacgttgagcac

SEQ ID NO: 1852154 - DNA, 25 bp, Homo sapien
ggaagaacttgtcaatgtggcagat

SEQ ID NO: 1852155 - DNA, 25 bp, Homo sapien
gaagaacttgtcaatgtggcagatg

SEQ ID NO: 1852156 - DNA, 25 bp, Homo sapien
acttgtcaatgtggcagatgagggt

SEQ ID NO: 1852157 - DNA, 25 bp, Homo sapien
gaacttgtcaatgtggcagatgagg

SEQ ID NO: 1852158 - DNA, 25 bp, Homo sapien
gacagcaccaggttaggcccctctt

SEQ ID NO: 1852159 - DNA, 25 bp, Homo sapien
aaggagacagcaccaggttaggccc

SEQ ID NO: 1852160 - DNA, 25 bp, Homo sapien
ctggaaggagacagcaccaggttag

SEQ ID NO: 1852161 - DNA, 25 bp, Homo sapien
ggaaggagacagcaccaggttaggc

SEQ ID NO: 1852162 - DNA, 25 bp, Homo sapien
tggttggaacgctggatcaaggtat

SEQ ID NO: 1852163 - DNA, 25 bp, Homo sapien
attcaagttgttgttcaatatagca

SEQ ID NO: 1852164 - DNA, 25 bp, Homo sapien
atatagcaatgttagccagcccgcc

SEQ ID NO: 1852165 - DNA, 25 bp, Homo sapien
gaacgctggatcaaggtattcaagt

SEQ ID NO: 1852166 - DNA, 25 bp, Homo sapien
cccctgttggtctatgcgtctgtac

SEQ ID NO: 1852167 - DNA, 25 bp, Homo sapien
gcggcataagttgacacatggtccg

SEQ ID NO: 1852168 - DNA, 25 bp, Homo sapien
attcaaacataaactcccctgttgg

SEQ ID NO: 1852169 - DNA, 25 bp, Homo sapien
tctatgcgtctgtacaaacgcggca

SEQ ID NO: 1852170 - DNA, 25 bp, Homo sapien
ccatcactagattttggaatgacag

SEQ ID NO: 1852171 - DNA, 25 bp, Homo sapien
catcactagattttggaatgacagc

SEQ ID NO: 1852172 - DNA, 25 bp, Homo sapien
ccccatcactagattttggaatgac

SEQ ID NO: 1852173 - DNA, 25 bp, Homo sapien
cccatcactagattttggaatgaca

SEQ ID NO: 1852174 - DNA, 25 bp, Homo sapien
cagctcctcggagactcagcaggaa

SEQ ID NO: 1852175 - DNA, 25 bp, Homo sapien
gccgagtggaggcagatgagactga

SEQ ID NO: 1852176 - DNA, 25 bp, Homo sapien
actgaggccgagtggaggcagatga

SEQ ID NO: 1852177 - DNA, 25 bp, Homo sapien
cgagtggaggcagatgagactgaaa

SEQ ID NO: 1852178 - DNA, 25 bp, Homo sapien
tgaggccgagtggaggcagatgaga

SEQ ID NO: 1852179 - DNA, 25 bp, Homo sapien
tggagaggaatcagcatggctggga

SEQ ID NO: 1852180 - DNA, 25 bp, Homo sapien
tgggtggagaggaatcagcatggct

SEQ ID NO: 1852181 - DNA, 25 bp, Homo sapien
aggaatcagcatggctgggattcac

SEQ ID NO: 1852182 - DNA, 25 bp, Homo sapien
ggaaatgggtggagaggaatcagca

SEQ ID NO: 1852183 - DNA, 25 bp, Homo sapien
tgctgggtaaagaggacgctggaag

SEQ ID NO: 1852184 - DNA, 25 bp, Homo sapien
ttctctgttgctgggtaaagaggac

SEQ ID NO: 1852185 - DNA, 25 bp, Homo sapien
tctgttgctgggtaaagaggacgct

SEQ ID NO: 1852186 - DNA, 25 bp, Homo sapien
tgggtaaagaggacgctggaaggtg

SEQ ID NO: 1852187 - DNA, 25 bp, Homo sapien
ttccagggacggcaggaatgctacg

SEQ ID NO: 1852188 - DNA, 25 bp, Homo sapien
cttcctggagagatacatctacaac

SEQ ID NO: 1852189 - DNA, 25 bp, Homo sapien
gtttaatgggacacagcgcttcctg

SEQ ID NO: 1852190 - DNA, 25 bp, Homo sapien
acaaccgggaggagttcgcgcgctt

SEQ ID NO: 1852191 - DNA, 25 bp, Homo sapien
tgaagtagtgagacacaggtgcccc

SEQ ID NO: 1852192 - DNA, 25 bp, Homo sapien
gactgtacttttacctggcccagcg

SEQ ID NO: 1852193 - DNA, 25 bp, Homo sapien
taaactcacattgagggaagaggct

SEQ ID NO: 1852194 - DNA, 25 bp, Homo sapien
tgagctgttctctagggtagtcctc

SEQ ID NO: 1852195 - DNA, 25 bp, Homo sapien
gtttcgttagcatctggctccagga

SEQ ID NO: 1852196 - DNA, 25 bp, Homo sapien
gccaagaagttgctctgaagtcagt

SEQ ID NO: 1852197 - DNA, 25 bp, Homo sapien
gacagaccttcaacttccaaattgg

SEQ ID NO: 1852198 - DNA, 25 bp, Homo sapien
gaaaagactattgtgccttaggaaa

SEQ ID NO: 1852199 - DNA, 25 bp, Homo sapien
tataggatgactcataggagcccct

SEQ ID NO: 1852200 - DNA, 25 bp, Homo sapien
tcagatcgcttggtctttgagacaa

SEQ ID NO: 1852201 - DNA, 25 bp, Homo sapien
caggcacctggattagttcatggac

SEQ ID NO: 1852202 - DNA, 25 bp, Homo sapien
agacaatggtgccattaaggacccc

SEQ ID NO: 1852203 - DNA, 25 bp, Homo sapien
cattgcgcagccacgtgatgttcag

SEQ ID NO: 1852204 - DNA, 25 bp, Homo sapien
aacttgtcaacatggcagacgaggg

SEQ ID NO: 1852205 - DNA, 25 bp, Homo sapien
gaacgagggtcagatagtggaacct

SEQ ID NO: 1852206 - DNA, 25 bp, Homo sapien
ctccttgggaaagacgcttacctcg

SEQ ID NO: 1852207 - DNA, 25 bp, Homo sapien
ccttgccatgacgatgccagcaata

SEQ ID NO: 1852208 - DNA, 25 bp, Homo sapien
cattgatccgggtgttcaagtgctt

SEQ ID NO: 1852209 - DNA, 25 bp, Homo sapien
cttgccatgacgatgccagcaatac

SEQ ID NO: 1852210 - DNA, 25 bp, Homo sapien
ccgggtgttcaagtgcttccttgcc

SEQ ID NO: 1852211 - DNA, 25 bp, Homo sapien
aggaacaggcagctataggcagtgc

SEQ ID NO: 1852212 - DNA, 25 bp, Homo sapien
ccctctgagaggaacaggcagctat

SEQ ID NO: 1852213 - DNA, 25 bp, Homo sapien
ctgagaggaacaggcagctataggc

SEQ ID NO: 1852214 - DNA, 25 bp, Homo sapien
agaggaacaggcagctataggcagt

SEQ ID NO: 1852215 - DNA, 25 bp, Homo sapien
gcaatacccctctgagcaccaaagt

SEQ ID NO: 1852216 - DNA, 25 bp, Homo sapien
gcgtctgcacaaactccgcatatgt

SEQ ID NO: 1852217 - DNA, 25 bp, Homo sapien
tctgtttggaccattgatccgggtg

SEQ ID NO: 1852218 - DNA, 25 bp, Homo sapien
taaactctggtagaggccagaccat

SEQ ID NO: 1852219 - DNA, 25 bp, Homo sapien
cactctgtggggcatacagtgccca

SEQ ID NO: 1852220 - DNA, 25 bp, Homo sapien
tctgtggggcatacagtgcccaggg

SEQ ID NO: 1852221 - DNA, 25 bp, Homo sapien
ctctgtggggcatacagtgcccagg

SEQ ID NO: 1852222 - DNA, 25 bp, Homo sapien
cccactctgtggggcatacagtgcc

SEQ ID NO: 1852223 - DNA, 25 bp, Homo sapien
ttgggagctttatgacaccactcat

SEQ ID NO: 1852224 - DNA, 25 bp, Homo sapien
aactcttgggagctttatgacacca

SEQ ID NO: 1852225 - DNA, 25 bp, Homo sapien
ctggtagccaatcacaaaagacgta

SEQ ID NO: 1852226 - DNA, 25 bp, Homo sapien
cacaaaagacgtaaactcttgggag

SEQ ID NO: 1852227 - DNA, 25 bp, Homo sapien
ccagggggcccctccacgagcatac

SEQ ID NO: 1852228 - DNA, 25 bp, Homo sapien
cagggggcccctccacgagcatacc

SEQ ID NO: 1852229 - DNA, 25 bp, Homo sapien
accagggggcccctccacgagcata

SEQ ID NO: 1852230 - DNA, 25 bp, Homo sapien
aaccagggggcccctccacgagcat

SEQ ID NO: 1852231 - DNA, 25 bp, Homo sapien
aggttccagcactgcaggctctctc

SEQ ID NO: 1852232 - DNA, 25 bp, Homo sapien
ctcttctctcccttcagcccccggg

SEQ ID NO: 1852233 - DNA, 25 bp, Homo sapien
gttccagcactgcaggctctctctt

SEQ ID NO: 1852234 - DNA, 25 bp, Homo sapien
cttcagcccccggggcccatgggca

SEQ ID NO: 1852235 - DNA, 25 bp, Homo sapien
ctaagggagacacacatgtaacccc

SEQ ID NO: 1852236 - DNA, 25 bp, Homo sapien
gccaggacaccaggcctgcccccat

SEQ ID NO: 1852237 - DNA, 25 bp, Homo sapien
atgtaaccccagtggggcccatgag

SEQ ID NO: 1852238 - DNA, 25 bp, Homo sapien
cccagtggggcccatgagcagccag

SEQ ID NO: 1852239 - DNA, 25 bp, Homo sapien
aaatccaggccatagccaagataag

SEQ ID NO: 1852240 - DNA, 25 bp, Homo sapien
caggccatagccaagataagggtgg

SEQ ID NO: 1852241 - DNA, 25 bp, Homo sapien
aaacaaagatcttcagaatgcccct

SEQ ID NO: 1852242 - DNA, 25 bp, Homo sapien
acaaagatcttcagaatgcccctct

SEQ ID NO: 1852243 - DNA, 25 bp, Homo sapien
ccagacagcagcataaaggaaaggc

SEQ ID NO: 1852244 - DNA, 25 bp, Homo sapien
agcagaagctcacgggtgccaagag

SEQ ID NO: 1852245 - DNA, 25 bp, Homo sapien
acaggaagcagtccaactgacagag

SEQ ID NO: 1852246 - DNA, 25 bp, Homo sapien
gatgtagcagagtagacaggaagca

SEQ ID NO: 1852247 - DNA, 25 bp, Homo sapien
ggtgtccaacactggactagttctt

SEQ ID NO: 1852248 - DNA, 25 bp, Homo sapien
gggatacaggcaccaacaattatca

SEQ ID NO: 1852249 - DNA, 25 bp, Homo sapien
caattatcaccccacaggtgtccaa

SEQ ID NO: 1852250 - DNA, 25 bp, Homo sapien
cttcatctgggatacaggcaccaac

SEQ ID NO: 1852251 - DNA, 25 bp, Homo sapien
cagactggcccttcatggccatagc

SEQ ID NO: 1852252 - DNA, 25 bp, Homo sapien
cagtcaacaatgagggtgacagact

SEQ ID NO: 1852253 - DNA, 25 bp, Homo sapien
atcttgcagtcaacaatgagggtga

SEQ ID NO: 1852254 - DNA, 25 bp, Homo sapien
catggccatagccacaaggtgccac

SEQ ID NO: 1852255 - DNA, 25 bp, Homo sapien
ggctcaactgttggacacctgggca

SEQ ID NO: 1852256 - DNA, 25 bp, Homo sapien
caactactagggtgaggcctcagaa

SEQ ID NO: 1852257 - DNA, 25 bp, Homo sapien
cttggagaccaggacgggtccagaa

SEQ ID NO: 1852258 - DNA, 25 bp, Homo sapien
taagcaggttgaagtcgtccagtct

SEQ ID NO: 1852259 - DNA, 25 bp, Homo sapien
gtagatagacagataccccttgccc

SEQ ID NO: 1852260 - DNA, 25 bp, Homo sapien
gtgctgagttgggcagtttatgaca

SEQ ID NO: 1852261 - DNA, 25 bp, Homo sapien
agatagacagataccccttgccctc

SEQ ID NO: 1852262 - DNA, 25 bp, Homo sapien
gggtgggtgtgctgagttgggcagt

SEQ ID NO: 1852263 - DNA, 25 bp, Homo sapien
ggaaactcaggcccaggagcaaatc

SEQ ID NO: 1852264 - DNA, 25 bp, Homo sapien
cccaggagcaaatccacagggggtg

SEQ ID NO: 1852265 - DNA, 25 bp, Homo sapien
caggagcaaatccacagggggtgca

SEQ ID NO: 1852266 - DNA, 25 bp, Homo sapien
catcagggaagtaggggaaactcag

SEQ ID NO: 1852267 - DNA, 25 bp, Homo sapien
ccaactggtggtggacaggatacct

SEQ ID NO: 1852268 - DNA, 25 bp, Homo sapien
gaaccgccatattggatgtacctga

SEQ ID NO: 1852269 - DNA, 25 bp, Homo sapien
gaatgcagtcggttttgtacagagg

SEQ ID NO: 1852270 - DNA, 25 bp, Homo sapien
tacatagcccacgaaaagactgact

SEQ ID NO: 1852271 - DNA, 25 bp, Homo sapien
gtgtgggcaccaccttgtcactaca

SEQ ID NO: 1852272 - DNA, 25 bp, Homo sapien
ttaaaggagaccgaagctggtgact

SEQ ID NO: 1852273 - DNA, 25 bp, Homo sapien
gtctagctctgacatacacaggtat

SEQ ID NO: 1852274 - DNA, 25 bp, Homo sapien
caaaagaaagttaggcctggagatt

SEQ ID NO: 1852275 - DNA, 25 bp, Homo sapien
agtgtgaataaactctcacagatgc

SEQ ID NO: 1852276 - DNA, 25 bp, Homo sapien
cttgtccaggtgcacaaataactgc

SEQ ID NO: 1852277 - DNA, 25 bp, Homo sapien
aataaactctcacagatgccagacc

SEQ ID NO: 1852278 - DNA, 25 bp, Homo sapien
tcttgtccaggtgcacaaataactg

SEQ ID NO: 1852279 - DNA, 25 bp, Homo sapien
atccaatcttcaggttctagattgt

SEQ ID NO: 1852280 - DNA, 25 bp, Homo sapien
catgaagccaaagttcacggttctg

SEQ ID NO: 1852281 - DNA, 25 bp, Homo sapien
caaagttcacggttctgatgtttac

SEQ ID NO: 1852282 - DNA, 25 bp, Homo sapien
ttcacggttctgatgtttactgcag

SEQ ID NO: 1852283 - DNA, 25 bp, Homo sapien
gcctggagggtacctcgctaggtca

SEQ ID NO: 1852284 - DNA, 25 bp, Homo sapien
tggagggtacctcgctaggtcactc

SEQ ID NO: 1852285 - DNA, 25 bp, Homo sapien
tacctcgctaggtcactcagcactt

SEQ ID NO: 1852286 - DNA, 25 bp, Homo sapien
agggtacctcgctaggtcactcagc

SEQ ID NO: 1852287 - DNA, 25 bp, Homo sapien
ggatgttgagggtcctccactgagt

SEQ ID NO: 1852288 - DNA, 25 bp, Homo sapien
tcaagtgacggcaagttcagtgtca

SEQ ID NO: 1852289 - DNA, 25 bp, Homo sapien
tcagtgtcacacacggatgttgagg

SEQ ID NO: 1852290 - DNA, 25 bp, Homo sapien
gtttatgggctagagaattactcac

SEQ ID NO: 1852291 - DNA, 25 bp, Homo sapien
tgcgcactcacccctgatggcccag

SEQ ID NO: 1852292 - DNA, 25 bp, Homo sapien
gatggcccaggttccgagaggctaa

SEQ ID NO: 1852293 - DNA, 25 bp, Homo sapien
cccaggttccgagaggctaagcagg

SEQ ID NO: 1852294 - DNA, 25 bp, Homo sapien
ggcccaggttccgagaggctaagca

SEQ ID NO: 1852295 - DNA, 25 bp, Homo sapien
catgtgcctgcatgttaattcatgt

SEQ ID NO: 1852296 - DNA, 25 bp, Homo sapien
gaggaacataaatcacatgttattg

SEQ ID NO: 1852297 - DNA, 25 bp, Homo sapien
gagaggaaggagataatcacatggc

SEQ ID NO: 1852298 - DNA, 25 bp, Homo sapien
tcccaagttctctagtttatagcat

SEQ ID NO: 1852299 - DNA, 25 bp, Homo sapien
gggattcactccctcaactatggag

SEQ ID NO: 1852300 - DNA, 25 bp, Homo sapien
tagccaggccttcggccgactgaat

SEQ ID NO: 1852301 - DNA, 25 bp, Homo sapien
ggactccctactccaaaacagagag

SEQ ID NO: 1852302 - DNA, 25 bp, Homo sapien
gagttccacgttaggccttctgcaa

SEQ ID NO: 1852303 - DNA, 25 bp, Homo sapien
caccctcgagaagtttttccgcgca

SEQ ID NO: 1852304 - DNA, 25 bp, Homo sapien
ggcttcctgcgatcgagaatgggtt

SEQ ID NO: 1852305 - DNA, 25 bp, Homo sapien
gccgcgttctcagcgcgggcactag

SEQ ID NO: 1852306 - DNA, 25 bp, Homo sapien
agagtggccgtctagacgcccacgt

SEQ ID NO: 1852307 - DNA, 25 bp, Homo sapien
tatttaaccatcagtcagcatggaa

SEQ ID NO: 1852308 - DNA, 25 bp, Homo sapien
gacacctgggaggagacaatcacat

SEQ ID NO: 1852309 - DNA, 25 bp, Homo sapien
taaccctttaattgcaggatcaggg

SEQ ID NO: 1852310 - DNA, 25 bp, Homo sapien
acagacacctgggaggagacaatca

SEQ ID NO: 1852311 - DNA, 25 bp, Homo sapien
cacaccccacactattccgtttctt

SEQ ID NO: 1852312 - DNA, 25 bp, Homo sapien
tttaatattccagccatctgcggga

SEQ ID NO: 1852313 - DNA, 25 bp, Homo sapien
atctgcgggatgcagccctgcacac

SEQ ID NO: 1852314 - DNA, 25 bp, Homo sapien
gtgcctgccaaacccagaccaagtg

SEQ ID NO: 1852315 - DNA, 25 bp, Homo sapien
aatggacaggatcagacagagacgg

SEQ ID NO: 1852316 - DNA, 25 bp, Homo sapien
taagggtctcagctctctaacgggt

SEQ ID NO: 1852317 - DNA, 25 bp, Homo sapien
tctaacgggtaacaggctccaggtg

SEQ ID NO: 1852318 - DNA, 25 bp, Homo sapien
cacagtcactgaggaaagtcctgac

SEQ ID NO: 1852319 - DNA, 25 bp, Homo sapien
ctatcccatgaagcagacaggcccc

SEQ ID NO: 1852320 - DNA, 25 bp, Homo sapien
ccgcctcggtggggctcccaggtct

SEQ ID NO: 1852321 - DNA, 25 bp, Homo sapien
ccatgaagcagacaggccccagcag

SEQ ID NO: 1852322 - DNA, 25 bp, Homo sapien
gcctcggtggggctcccaggtctga

SEQ ID NO: 1852323 - DNA, 25 bp, Homo sapien
acctccagcaccgtccggccttgct

SEQ ID NO: 1852324 - DNA, 25 bp, Homo sapien
gctccagcacaggcgttcgcacctc

SEQ ID NO: 1852325 - DNA, 25 bp, Homo sapien
acaggcgttcgcacctccagcaccg

SEQ ID NO: 1852326 - DNA, 25 bp, Homo sapien
ctccagcaccgtccggccttgctgt

SEQ ID NO: 1852327 - DNA, 25 bp, Homo sapien
tacagactggcagtgtctatgtgcc

SEQ ID NO: 1852328 - DNA, 25 bp, Homo sapien
gatgtacagactggcagtgtctatg

SEQ ID NO: 1852329 - DNA, 25 bp, Homo sapien
tgtgccagtctgtgtacacgtctgc

SEQ ID NO: 1852330 - DNA, 25 bp, Homo sapien
cagtctgtgtacacgtctgcattaa

SEQ ID NO: 1852331 - DNA, 25 bp, Homo sapien
ggtaggagacgtcctggtgggctga

SEQ ID NO: 1852332 - DNA, 25 bp, Homo sapien
gacataggggctagtctccgggctc

SEQ ID NO: 1852333 - DNA, 25 bp, Homo sapien
gggagccctctgagtccacgtaaga

SEQ ID NO: 1852334 - DNA, 25 bp, Homo sapien
ctcattggccccacggagtctcagg

SEQ ID NO: 1852335 - DNA, 25 bp, Homo sapien
ggaaggcatcccgagcacagccctg

SEQ ID NO: 1852336 - DNA, 25 bp, Homo sapien
tgaagttgcagaaaactcggaaggc

SEQ ID NO: 1852337 - DNA, 25 bp, Homo sapien
ctggttggggtcgacccagtactct

SEQ ID NO: 1852338 - DNA, 25 bp, Homo sapien
gacgtcatccctaggcgtcacacag

SEQ ID NO: 1852339 - DNA, 25 bp, Homo sapien
tcttcttgggcatctgaatgggcag

SEQ ID NO: 1852340 - DNA, 25 bp, Homo sapien
tctcctcccgcagggagtcgagtga

SEQ ID NO: 1852341 - DNA, 25 bp, Homo sapien
tcatcttcctgcatcagacggcttc

SEQ ID NO: 1852342 - DNA, 25 bp, Homo sapien
gggagtcgagtgagccaaagatctc

SEQ ID NO: 1852343 - DNA, 25 bp, Homo sapien
tctctcccttgggtccgcctgggcc

SEQ ID NO: 1852344 - DNA, 25 bp, Homo sapien
ccttctctcccttgggtccgcctgg

SEQ ID NO: 1852345 - DNA, 25 bp, Homo sapien
gagggccctgcacacccttctctcc

SEQ ID NO: 1852346 - DNA, 25 bp, Homo sapien
cgggtgtcctggagggccctgcaca

SEQ ID NO: 1852347 - DNA, 25 bp, Homo sapien
gtggctcctttggctcctttggggc

SEQ ID NO: 1852348 - DNA, 25 bp, Homo sapien
gctcctttggctcctttggggccag

SEQ ID NO: 1852349 - DNA, 25 bp, Homo sapien
ggctcctttggctcctttggggcca

SEQ ID NO: 1852350 - DNA, 25 bp, Homo sapien
tcctttggctcctttggggccagca

SEQ ID NO: 1852351 - DNA, 25 bp, Homo sapien
aatggggccggatgctcctgggata

SEQ ID NO: 1852352 - DNA, 25 bp, Homo sapien
ccaatggggccggatgctcctggga

SEQ ID NO: 1852353 - DNA, 25 bp, Homo sapien
aggaccaatggggccggatgctcct

SEQ ID NO: 1852354 - DNA, 25 bp, Homo sapien
ccaggaccaatggggccggatgctc

SEQ ID NO: 1852355 - DNA, 25 bp, Homo sapien
gaggcccaggaagtccccgatctcc

SEQ ID NO: 1852356 - DNA, 25 bp, Homo sapien
catctcacccttctgcccaggggag

SEQ ID NO: 1852357 - DNA, 25 bp, Homo sapien
tctcacccttctgcccaggggagcc

SEQ ID NO: 1852358 - DNA, 25 bp, Homo sapien
ctgaggcccaggaagtccccgatct

SEQ ID NO: 1852359 - DNA, 25 bp, Homo sapien
caatcagtccaatgagacctgggtg

SEQ ID NO: 1852360 - DNA, 25 bp, Homo sapien
cacccgggggcccaatcagtccaat

SEQ ID NO: 1852361 - DNA, 25 bp, Homo sapien
gggcccaatcagtccaatgagacct

SEQ ID NO: 1852362 - DNA, 25 bp, Homo sapien
ctgctcacccgggggcccaatcagt

SEQ ID NO: 1852363 - DNA, 25 bp, Homo sapien
ccagcatcgccccggagaccaggca

SEQ ID NO: 1852364 - DNA, 25 bp, Homo sapien
ttggctccagcatcgccccggagac

SEQ ID NO: 1852365 - DNA, 25 bp, Homo sapien
cttggctccagcatcgccccggaga

SEQ ID NO: 1852366 - DNA, 25 bp, Homo sapien
tcgccccggagaccaggcagccctg

SEQ ID NO: 1852367 - DNA, 25 bp, Homo sapien
cctggcctgtagctccaggtcggcc

SEQ ID NO: 1852368 - DNA, 25 bp, Homo sapien
cagcctggcctgtagctccaggtcg

SEQ ID NO: 1852369 - DNA, 25 bp, Homo sapien
ctgtagctccaggtcggccttgctg

SEQ ID NO: 1852370 - DNA, 25 bp, Homo sapien
gcctgtagctccaggtcggccttgc

SEQ ID NO: 1852371 - DNA, 25 bp, Homo sapien
tgtcttccccggggcacctatagcg

SEQ ID NO: 1852372 - DNA, 25 bp, Homo sapien
cggggcacctatagcgccaggatct

SEQ ID NO: 1852373 - DNA, 25 bp, Homo sapien
cccggggcacctatagcgccaggat

SEQ ID NO: 1852374 - DNA, 25 bp, Homo sapien
gggcacctatagcgccaggatctcc

SEQ ID NO: 1852375 - DNA, 25 bp, Homo sapien
ttgtcgcccctcggaaccaggcgag

SEQ ID NO: 1852376 - DNA, 25 bp, Homo sapien
tcgcccctcggaaccaggcgagcca

SEQ ID NO: 1852377 - DNA, 25 bp, Homo sapien
cccctcggaaccaggcgagccagca

SEQ ID NO: 1852378 - DNA, 25 bp, Homo sapien
tccttgtcgcccctcggaaccaggc

SEQ ID NO: 1852379 - DNA, 25 bp, Homo sapien
tccaagtggccctgggggtccattc

SEQ ID NO: 1852380 - DNA, 25 bp, Homo sapien
caagtggccctgggggtccattctc

SEQ ID NO: 1852381 - DNA, 25 bp, Homo sapien
ccaagtggccctgggggtccattct

SEQ ID NO: 1852382 - DNA, 25 bp, Homo sapien
aggctgtcctggctcaccatcctcg

SEQ ID NO: 1852383 - DNA, 25 bp, Homo sapien
tggctcaccatcctcgcctcggtca

SEQ ID NO: 1852384 - DNA, 25 bp, Homo sapien
gtcctggctcaccatcctcgcctcg

SEQ ID NO: 1852385 - DNA, 25 bp, Homo sapien
ctgtcctggctcaccatcctcgcct

SEQ ID NO: 1852386 - DNA, 25 bp, Homo sapien
cagggtcaccaggaaaaccaacagg

SEQ ID NO: 1852387 - DNA, 25 bp, Homo sapien
tccaggggggccagggtcaccagga

SEQ ID NO: 1852388 - DNA, 25 bp, Homo sapien
gccagggtcaccaggaaaaccaaca

SEQ ID NO: 1852389 - DNA, 25 bp, Homo sapien
ttctccaggggggccagggtcacca

SEQ ID NO: 1852390 - DNA, 25 bp, Homo sapien
ctgatccagatggagaataagagtc

SEQ ID NO: 1852391 - DNA, 25 bp, Homo sapien
tgatccagatggagaataagagtca

SEQ ID NO: 1852392 - DNA, 25 bp, Homo sapien
ctgtggggcctttaggccctggtgg

SEQ ID NO: 1852393 - DNA, 25 bp, Homo sapien
cctttctctccacgttccccgcgtg

SEQ ID NO: 1852394 - DNA, 25 bp, Homo sapien
tctctccacgttccccgcgtggacc

SEQ ID NO: 1852395 - DNA, 25 bp, Homo sapien
tttggggccatcatcgcctgtgggg

SEQ ID NO: 1852396 - DNA, 25 bp, Homo sapien
cttgacacctggctcgccctggatc

SEQ ID NO: 1852397 - DNA, 25 bp, Homo sapien
tggatccctggagatcctgactctc

SEQ ID NO: 1852398 - DNA, 25 bp, Homo sapien
gatccctggagatcctgactctcct

SEQ ID NO: 1852399 - DNA, 25 bp, Homo sapien
tggctcgccctggatccctggagat

SEQ ID NO: 1852400 - DNA, 25 bp, Homo sapien
caacacctcctgggggaccttgtgg

SEQ ID NO: 1852401 - DNA, 25 bp, Homo sapien
ccaacacctcctgggggaccttgtg

SEQ ID NO: 1852402 - DNA, 25 bp, Homo sapien
atcagcgccattgggtccagctgga

SEQ ID NO: 1852403 - DNA, 25 bp, Homo sapien
tcagcgccattgggtccagctggac

SEQ ID NO: 1852404 - DNA, 25 bp, Homo sapien
cttctccccagaggggcctggcaaa

SEQ ID NO: 1852405 - DNA, 25 bp, Homo sapien
cataggacccacatctcctgtttct

SEQ ID NO: 1852406 - DNA, 25 bp, Homo sapien
tctcccttctccccagaggggcctg

SEQ ID NO: 1852407 - DNA, 25 bp, Homo sapien
ataggacccacatctcctgtttctc

SEQ ID NO: 1852408 - DNA, 25 bp, Homo sapien
gaatcctcttgttccttcatcacct

SEQ ID NO: 1852409 - DNA, 25 bp, Homo sapien
gggcccattgaatcctcttgttcct

SEQ ID NO: 1852410 - DNA, 25 bp, Homo sapien
attgaatcctcttgttccttcatca

SEQ ID NO: 1852411 - DNA, 25 bp, Homo sapien
gtcctgggggcccattgaatcctct

SEQ ID NO: 1852412 - DNA, 25 bp, Homo sapien
gccccacaggaccaatgggtccagg

SEQ ID NO: 1852413 - DNA, 25 bp, Homo sapien
ggctgccccacaggaccaatgggtc

SEQ ID NO: 1852414 - DNA, 25 bp, Homo sapien
tgccccacaggaccaatgggtccag

SEQ ID NO: 1852415 - DNA, 25 bp, Homo sapien
caggctgccccacaggaccaatggg

SEQ ID NO: 1852416 - DNA, 25 bp, Homo sapien
tgttccctttggtgcccttctgtcc

SEQ ID NO: 1852417 - DNA, 25 bp, Homo sapien
ccttgttccctttggtgcccttctg

SEQ ID NO: 1852418 - DNA, 25 bp, Homo sapien
atgttcacccttgttccctttggtg

SEQ ID NO: 1852419 - DNA, 25 bp, Homo sapien
tgttcacccttgttccctttggtgc

SEQ ID NO: 1852420 - DNA, 25 bp, Homo sapien
catctcggccagtcgggccaatggg

SEQ ID NO: 1852421 - DNA, 25 bp, Homo sapien
gccagtcgggccaatggggcccttc

SEQ ID NO: 1852422 - DNA, 25 bp, Homo sapien
ccagtcgggccaatggggcccttct

SEQ ID NO: 1852423 - DNA, 25 bp, Homo sapien
ctccatctcggccagtcgggccaat

SEQ ID NO: 1852424 - DNA, 25 bp, Homo sapien
gcctgggcgccctggcggaccaatg

SEQ ID NO: 1852425 - DNA, 25 bp, Homo sapien
cctgggcgccctggcggaccaatgg

SEQ ID NO: 1852426 - DNA, 25 bp, Homo sapien
ctgggcgccctggcggaccaatggg

SEQ ID NO: 1852427 - DNA, 25 bp, Homo sapien
caggggggccagacggaccttcatt

SEQ ID NO: 1852428 - DNA, 25 bp, Homo sapien
cagacggaccttcattccccttcaa

SEQ ID NO: 1852429 - DNA, 25 bp, Homo sapien
gccagacggaccttcattccccttc

SEQ ID NO: 1852430 - DNA, 25 bp, Homo sapien
tcattccccttcaaaccaggtccac

SEQ ID NO: 1852431 - DNA, 25 bp, Homo sapien
ctgggaatcccctcagaccagcagg

SEQ ID NO: 1852432 - DNA, 25 bp, Homo sapien
tgcctgggaggcctctctctcctgg

SEQ ID NO: 1852433 - DNA, 25 bp, Homo sapien
ctcagaccagcaggaccatccttcc

SEQ ID NO: 1852434 - DNA, 25 bp, Homo sapien
gaccagcaggaccatccttccctgg

SEQ ID NO: 1852435 - DNA, 25 bp, Homo sapien
ggcctgggtgacctctctcccccat

SEQ ID NO: 1852436 - DNA, 25 bp, Homo sapien
ccccatagggccggtttctcctgct

SEQ ID NO: 1852437 - DNA, 25 bp, Homo sapien
ccatagggccggtttctcctgctgc

SEQ ID NO: 1852438 - DNA, 25 bp, Homo sapien
tgggtgacctctctcccccataggg

SEQ ID NO: 1852439 - DNA, 25 bp, Homo sapien
gtcccaccactcctggaggaccagg

SEQ ID NO: 1852440 - DNA, 25 bp, Homo sapien
tcccaccactcctggaggaccaggg

SEQ ID NO: 1852441 - DNA, 25 bp, Homo sapien
ctttggcctgggtgtcccggcagcc

SEQ ID NO: 1852442 - DNA, 25 bp, Homo sapien
tttggcctgggtgtcccggcagccc

SEQ ID NO: 1852443 - DNA, 25 bp, Homo sapien
ttgggaccctgaggtccagggaggc

SEQ ID NO: 1852444 - DNA, 25 bp, Homo sapien
cgttgggaccctgaggtccagggag

SEQ ID NO: 1852445 - DNA, 25 bp, Homo sapien
tgggaccctgaggtccagggaggcc

SEQ ID NO: 1852446 - DNA, 25 bp, Homo sapien
ggaaggggactttcgatccacactc

SEQ ID NO: 1852447 - DNA, 25 bp, Homo sapien
gaaggggactttcgatccacactca

SEQ ID NO: 1852448 - DNA, 25 bp, Homo sapien
aaggggactttcgatccacactcac

SEQ ID NO: 1852449 - DNA, 25 bp, Homo sapien
cagggggcccatgggggccatcacc

SEQ ID NO: 1852450 - DNA, 25 bp, Homo sapien
ggcccatgggggccatcaccaccag

SEQ ID NO: 1852451 - DNA, 25 bp, Homo sapien
cctctctccagggggcccatggggg

SEQ ID NO: 1852452 - DNA, 25 bp, Homo sapien
gggggcccatgggggccatcaccac

SEQ ID NO: 1852453 - DNA, 25 bp, Homo sapien
ccagtggcacctcggggtccccgct

SEQ ID NO: 1852454 - DNA, 25 bp, Homo sapien
ctccagacttcccagtggcacctcg

SEQ ID NO: 1852455 - DNA, 25 bp, Homo sapien
cagacttcccagtggcacctcgggg

SEQ ID NO: 1852456 - DNA, 25 bp, Homo sapien
agacttcccagtggcacctcggggt

SEQ ID NO: 1852457 - DNA, 25 bp, Homo sapien
cccgaggccctgacttccccgacag

SEQ ID NO: 1852458 - DNA, 25 bp, Homo sapien
gaggccctgacttccccgacaggcc

SEQ ID NO: 1852459 - DNA, 25 bp, Homo sapien
ccgaggccctgacttccccgacagg

SEQ ID NO: 1852460 - DNA, 25 bp, Homo sapien
cgaggccctgacttccccgacaggc

SEQ ID NO: 1852461 - DNA, 25 bp, Homo sapien
tctccactggcaccaggaaagccag

SEQ ID NO: 1852462 - DNA, 25 bp, Homo sapien
tcccttctctccactggcaccagga

SEQ ID NO: 1852463 - DNA, 25 bp, Homo sapien
tggcaccaggaaagccaggaaatcc

SEQ ID NO: 1852464 - DNA, 25 bp, Homo sapien
caggaaagccaggaaatcctaggga

SEQ ID NO: 1852465 - DNA, 25 bp, Homo sapien
gtccctgacgtccaggatagccagg

SEQ ID NO: 1852466 - DNA, 25 bp, Homo sapien
tcggtccagtgcgtccctttggccc

SEQ ID NO: 1852467 - DNA, 25 bp, Homo sapien
agtgcgtccctttggcccctcagga

SEQ ID NO: 1852468 - DNA, 25 bp, Homo sapien
gtcggtccagtgcgtccctttggcc

SEQ ID NO: 1852469 - DNA, 25 bp, Homo sapien
tccagtgcgtccctttggcccctca

SEQ ID NO: 1852470 - DNA, 25 bp, Homo sapien
ctttcacgcctatgtcacctttgaa

SEQ ID NO: 1852471 - DNA, 25 bp, Homo sapien
ttcacgcctatgtcacctttgaacc

SEQ ID NO: 1852472 - DNA, 25 bp, Homo sapien
acctttcacgcctatgtcacctttg

SEQ ID NO: 1852473 - DNA, 25 bp, Homo sapien
cctgtcacctttcacgcctatgtca

SEQ ID NO: 1852474 - DNA, 25 bp, Homo sapien
aaagatagaggtgagagggcaccac

SEQ ID NO: 1852475 - DNA, 25 bp, Homo sapien
gtgagagggcaccacagatgacaga

SEQ ID NO: 1852476 - DNA, 25 bp, Homo sapien
aagatagaggtgagagggcaccaca

SEQ ID NO: 1852477 - DNA, 25 bp, Homo sapien
gaggtgagagggcaccacagatgac

SEQ ID NO: 1852478 - DNA, 25 bp, Homo sapien
ttctcacccttatgacccttcagac

SEQ ID NO: 1852479 - DNA, 25 bp, Homo sapien
cttctcacccttatgacccttcaga

SEQ ID NO: 1852480 - DNA, 25 bp, Homo sapien
cttgacccctcgaggtcctgggtat

SEQ ID NO: 1852481 - DNA, 25 bp, Homo sapien
tcctgggtatcctagaggtccctga

SEQ ID NO: 1852482 - DNA, 25 bp, Homo sapien
gtatcctagaggtccctgaggtcca

SEQ ID NO: 1852483 - DNA, 25 bp, Homo sapien
tgacccctcgaggtcctgggtatcc

SEQ ID NO: 1852484 - DNA, 25 bp, Homo sapien
agagaggcatttataaaggggcctc

SEQ ID NO: 1852485 - DNA, 25 bp, Homo sapien
aagagaggcatttataaaggggcct

SEQ ID NO: 1852486 - DNA, 25 bp, Homo sapien
cgggggtccgtctgagccaggcatg

SEQ ID NO: 1852487 - DNA, 25 bp, Homo sapien
tgccggggagccctggcttcccttg

SEQ ID NO: 1852488 - DNA, 25 bp, Homo sapien
tgagccaggcatgccggggagccct

SEQ ID NO: 1852489 - DNA, 25 bp, Homo sapien
ggagccctggcttcccttgaggacc

SEQ ID NO: 1852490 - DNA, 25 bp, Homo sapien
tctccatgagggccgatggcaccct

SEQ ID NO: 1852491 - DNA, 25 bp, Homo sapien
gccgatggcaccctggggcccggga

SEQ ID NO: 1852492 - DNA, 25 bp, Homo sapien
tctctccatgagggccgatggcacc

SEQ ID NO: 1852493 - DNA, 25 bp, Homo sapien
tccatgagggccgatggcaccctgg

SEQ ID NO: 1852494 - DNA, 25 bp, Homo sapien
ctgggtcccaggggtgccctgttgt

SEQ ID NO: 1852495 - DNA, 25 bp, Homo sapien
ccaggaggtcctggctctccctggg

SEQ ID NO: 1852496 - DNA, 25 bp, Homo sapien
ggtgccctgttgtccaggaggtcct

SEQ ID NO: 1852497 - DNA, 25 bp, Homo sapien
tccaggaggtcctggctctccctgg

SEQ ID NO: 1852498 - DNA, 25 bp, Homo sapien
ggggccctggggaccatccatgcct

SEQ ID NO: 1852499 - DNA, 25 bp, Homo sapien
tggggaccatccatgcctcggacgc

SEQ ID NO: 1852500 - DNA, 25 bp, Homo sapien
cctggggaccatccatgcctcggac

SEQ ID NO: 1852501 - DNA, 25 bp, Homo sapien
tttggggccctggggaccatccatg

SEQ ID NO: 1852502 - DNA, 25 bp, Homo sapien
gtgtgggactgtggatctgtgggct

SEQ ID NO: 1852503 - DNA, 25 bp, Homo sapien
tgtgtgggactgtggatctgtgggc

SEQ ID NO: 1852504 - DNA, 25 bp, Homo sapien
tgtgggactgtggatctgtgggctt

SEQ ID NO: 1852505 - DNA, 25 bp, Homo sapien
ggtcagaagtcagggagtcacttac

SEQ ID NO: 1852506 - DNA, 25 bp, Homo sapien
gaaggcagctagaaaggtggagagt

SEQ ID NO: 1852507 - DNA, 25 bp, Homo sapien
tgggaagcatgccgagagaggagag

SEQ ID NO: 1852508 - DNA, 25 bp, Homo sapien
gtcaaggggtcacctcagggtcaga

SEQ ID NO: 1852509 - DNA, 25 bp, Homo sapien
gcctttggggccaaggagacctcga

SEQ ID NO: 1852510 - DNA, 25 bp, Homo sapien
tggggccaaggagacctcgaggtcc

SEQ ID NO: 1852511 - DNA, 25 bp, Homo sapien
tccaggaataccaggtgggcctttg

SEQ ID NO: 1852512 - DNA, 25 bp, Homo sapien
ccaggaataccaggtgggcctttgg

SEQ ID NO: 1852513 - DNA, 25 bp, Homo sapien
cctcgaggcccaatctccccgtcat

SEQ ID NO: 1852514 - DNA, 25 bp, Homo sapien
tcgaggcccaatctccccgtcatct

SEQ ID NO: 1852515 - DNA, 25 bp, Homo sapien
gaggcccaatctccccgtcatctcc

SEQ ID NO: 1852516 - DNA, 25 bp, Homo sapien
gccctcgaggcccaatctccccgtc

SEQ ID NO: 1852517 - DNA, 25 bp, Homo sapien
gaaggccctgggcaccagtatcacc

SEQ ID NO: 1852518 - DNA, 25 bp, Homo sapien
ggagtccatcaaaacctcggtcacc

SEQ ID NO: 1852519 - DNA, 25 bp, Homo sapien
gggagtccatcaaaacctcggtcac

SEQ ID NO: 1852520 - DNA, 25 bp, Homo sapien
ccaggcatccctcgggctccatcag

SEQ ID NO: 1852521 - DNA, 25 bp, Homo sapien
ccaggatctccaggcatccctcggg

SEQ ID NO: 1852522 - DNA, 25 bp, Homo sapien
aggatctccaggcatccctcgggct

SEQ ID NO: 1852523 - DNA, 25 bp, Homo sapien
atctccaggcatccctcgggctcca

SEQ ID NO: 1852524 - DNA, 25 bp, Homo sapien
ctgtgaggccctgaggtcctctggg

SEQ ID NO: 1852525 - DNA, 25 bp, Homo sapien
ccttcgcccagccttgccaggaggg

SEQ ID NO: 1852526 - DNA, 25 bp, Homo sapien
gccttgccaggagggcctgtgaggc

SEQ ID NO: 1852527 - DNA, 25 bp, Homo sapien
tgaggccctgaggtcctctggggcc

SEQ ID NO: 1852528 - DNA, 25 bp, Homo sapien
tctccagactctcctttcaggccag

SEQ ID NO: 1852529 - DNA, 25 bp, Homo sapien
tccagactctcctttcaggccaggg

SEQ ID NO: 1852530 - DNA, 25 bp, Homo sapien
gaggtcctaagtctccagactctcc

SEQ ID NO: 1852531 - DNA, 25 bp, Homo sapien
ctgaggtcctaagtctccagactct

SEQ ID NO: 1852532 - DNA, 25 bp, Homo sapien
ggccagggggtccacggagcgccag

SEQ ID NO: 1852533 - DNA, 25 bp, Homo sapien
caagggtccagggcgccctgtgtat

SEQ ID NO: 1852534 - DNA, 25 bp, Homo sapien
ggtccagggcgccctgtgtatccca

SEQ ID NO: 1852535 - DNA, 25 bp, Homo sapien
ccagggcgccctgtgtatcccatgg

SEQ ID NO: 1852536 - DNA, 25 bp, Homo sapien
ctgctgcaggatcgcctgggcctga

SEQ ID NO: 1852537 - DNA, 25 bp, Homo sapien
gcctgctgcaggatcgcctgggcct

SEQ ID NO: 1852538 - DNA, 25 bp, Homo sapien
cctcgcctgctgcaggatcgcctgg

SEQ ID NO: 1852539 - DNA, 25 bp, Homo sapien
ctgcaggatcgcctgggcctgagcc

SEQ ID NO: 1852540 - DNA, 25 bp, Homo sapien
aggagccccatctgatccagggagc

SEQ ID NO: 1852541 - DNA, 25 bp, Homo sapien
atctgatccagggagccctgctcgg

SEQ ID NO: 1852542 - DNA, 25 bp, Homo sapien
aggaccaggagccccatctgatcca

SEQ ID NO: 1852543 - DNA, 25 bp, Homo sapien
tgggagcatgagagatgtgccagga

SEQ ID NO: 1852544 - DNA, 25 bp, Homo sapien
cctggatgccagggggaccaatcaa

SEQ ID NO: 1852545 - DNA, 25 bp, Homo sapien
cagggtctccaactgggcctgggtt

SEQ ID NO: 1852546 - DNA, 25 bp, Homo sapien
cccctggatgccagggggaccaatc

SEQ ID NO: 1852547 - DNA, 25 bp, Homo sapien
ttcccctggatgccagggggaccaa

SEQ ID NO: 1852548 - DNA, 25 bp, Homo sapien
tgggcattcagacaggtgtggacac

SEQ ID NO: 1852549 - DNA, 25 bp, Homo sapien
cattcagacaggtgtggacactcag

SEQ ID NO: 1852550 - DNA, 25 bp, Homo sapien
gcattcagacaggtgtggacactca

SEQ ID NO: 1852551 - DNA, 25 bp, Homo sapien
ggcattcagacaggtgtggacactc

SEQ ID NO: 1852552 - DNA, 25 bp, Homo sapien
cagggggcccctccacgagcatacc

SEQ ID NO: 1852553 - DNA, 25 bp, Homo sapien
gggccagggggcccctccacgagca

SEQ ID NO: 1852554 - DNA, 25 bp, Homo sapien
cgcagggccttctgggccagggggc

SEQ ID NO: 1852555 - DNA, 25 bp, Homo sapien
gccagggggcccctccacgagcata

SEQ ID NO: 1852556 - DNA, 25 bp, Homo sapien
aggttccaacactgcaggctctcct

SEQ ID NO: 1852557 - DNA, 25 bp, Homo sapien
tcagccctcggggtccatgggcagc

SEQ ID NO: 1852558 - DNA, 25 bp, Homo sapien
cccttcagccctcggggtccatggg

SEQ ID NO: 1852559 - DNA, 25 bp, Homo sapien
ggttccaacactgcaggctctcctt

SEQ ID NO: 1852560 - DNA, 25 bp, Homo sapien
caattcttgtagctcccactggtag

SEQ ID NO: 1852561 - DNA, 25 bp, Homo sapien
caaggatcgaaaccaacaagaagca

SEQ ID NO: 1852562 - DNA, 25 bp, Homo sapien
caaggtaagacatttggcaaaggaa

SEQ ID NO: 1852563 - DNA, 25 bp, Homo sapien
gtcacagatgggaaatagctcacag

SEQ ID NO: 1852564 - DNA, 25 bp, Homo sapien
caagctctgtctcctcacgataatc

SEQ ID NO: 1852565 - DNA, 25 bp, Homo sapien
gataatcatccccatagccataggt

SEQ ID NO: 1852566 - DNA, 25 bp, Homo sapien
taggtgtaatcgtagggcccttcag

SEQ ID NO: 1852567 - DNA, 25 bp, Homo sapien
ttcaggggggtctgtgccaccctcc

SEQ ID NO: 1852568 - DNA, 25 bp, Homo sapien
gggtgagggtggggcatagagttac

SEQ ID NO: 1852569 - DNA, 25 bp, Homo sapien
gcccactgcccccagatggggtgag

SEQ ID NO: 1852570 - DNA, 25 bp, Homo sapien
gtgcccactgcccccagatggggtg

SEQ ID NO: 1852571 - DNA, 25 bp, Homo sapien
cactgcccccagatggggtgagggt

SEQ ID NO: 1852572 - DNA, 25 bp, Homo sapien
aagaggctcgactccaggatttctt

SEQ ID NO: 1852573 - DNA, 25 bp, Homo sapien
gcctctccccacggcatgggggagg

SEQ ID NO: 1852574 - DNA, 25 bp, Homo sapien
ggggaggaaggtgtcctaggagatg

SEQ ID NO: 1852575 - DNA, 25 bp, Homo sapien
cctaggagatgattgctgggggtgc

SEQ ID NO: 1852576 - DNA, 25 bp, Homo sapien
tgtgcctctccccacggcatggggg

SEQ ID NO: 1852577 - DNA, 25 bp, Homo sapien
cacatcataataggggggctcgtag

SEQ ID NO: 1852578 - DNA, 25 bp, Homo sapien
taatcaggggttgtccccgtagtca

SEQ ID NO: 1852579 - DNA, 25 bp, Homo sapien
gctcgtagtcatagtagagagactc

SEQ ID NO: 1852580 - DNA, 25 bp, Homo sapien
tgtccccgtagtcatcacatcataa

SEQ ID NO: 1852581 - DNA, 25 bp, Homo sapien
gctgatgaatgaggactaggaggag

SEQ ID NO: 1852582 - DNA, 25 bp, Homo sapien
gtgatgggaatagggagatgagggt

SEQ ID NO: 1852583 - DNA, 25 bp, Homo sapien
gggtgatgggaatagggagatgagg

SEQ ID NO: 1852584 - DNA, 25 bp, Homo sapien
tgatgaatgaggactaggaggaggg

SEQ ID NO: 1852585 - DNA, 25 bp, Homo sapien
ccctctctggggtgtgctgcacttg

SEQ ID NO: 1852586 - DNA, 25 bp, Homo sapien
gagatgcctgggtgtcttccctctc

SEQ ID NO: 1852587 - DNA, 25 bp, Homo sapien
ggagagatgcctgggtgtcttccct

SEQ ID NO: 1852588 - DNA, 25 bp, Homo sapien
gtgtgctgcacttgggggttctccc

SEQ ID NO: 1852589 - DNA, 25 bp, Homo sapien
tgttcacatgattcataggctgcct

SEQ ID NO: 1852590 - DNA, 25 bp, Homo sapien
tctgttcacatgattcataggctgc

SEQ ID NO: 1852591 - DNA, 25 bp, Homo sapien
cagctccttctgttcacatgattca

SEQ ID NO: 1852592 - DNA, 25 bp, Homo sapien
tccttctgttcacatgattcatagg

SEQ ID NO: 1852593 - DNA, 25 bp, Homo sapien
tccaatactggacgagcacttcggg

SEQ ID NO: 1852594 - DNA, 25 bp, Homo sapien
tcttcatccagaatacgggcaccaa

SEQ ID NO: 1852595 - DNA, 25 bp, Homo sapien
tcactccatgggtgtccaatactgg

SEQ ID NO: 1852596 - DNA, 25 bp, Homo sapien
atacgggcaccaaagatgatcactc

SEQ ID NO: 1852597 - DNA, 25 bp, Homo sapien
gggcgggtccggacaacagtcagca

SEQ ID NO: 1852598 - DNA, 25 bp, Homo sapien
aggcccagctgtcggacaccctggg

SEQ ID NO: 1852599 - DNA, 25 bp, Homo sapien
taggctgaggcctcggaagactggc

SEQ ID NO: 1852600 - DNA, 25 bp, Homo sapien
gaagcggacaggtcggcccagctcc

SEQ ID NO: 1852601 - DNA, 25 bp, Homo sapien
tgccactcggtaggccacatcagct

SEQ ID NO: 1852602 - DNA, 25 bp, Homo sapien
tctccggacaccatcagggagggag

SEQ ID NO: 1852603 - DNA, 25 bp, Homo sapien
caggtcgtgccactcggtaggccac

SEQ ID NO: 1852604 - DNA, 25 bp, Homo sapien
gacagatgcctttcgctctccggac

SEQ ID NO: 1852605 - DNA, 25 bp, Homo sapien
gatggcagcggctgcaccgctccat

SEQ ID NO: 1852606 - DNA, 25 bp, Homo sapien
agccccagcaccagaggtaggagga

SEQ ID NO: 1852607 - DNA, 25 bp, Homo sapien
aggaggcgatggcagcggctgcacc

SEQ ID NO: 1852608 - DNA, 25 bp, Homo sapien
cccagcctggggccgcgctcagccc

SEQ ID NO: 1852609 - DNA, 25 bp, Homo sapien
gctgagaagccgaaacgccgggtcc

SEQ ID NO: 1852610 - DNA, 25 bp, Homo sapien
gacagggagcagactatgagcctca

SEQ ID NO: 1852611 - DNA, 25 bp, Homo sapien
ccctgaggctgacagaagacaggga

SEQ ID NO: 1852612 - DNA, 25 bp, Homo sapien
agcgacagctgtcagcggcccagct

SEQ ID NO: 1852613 - DNA, 25 bp, Homo sapien
tgggagaacccgacaaattcagaga

SEQ ID NO: 1852614 - DNA, 25 bp, Homo sapien
tggagagccctagggacaggccatt

SEQ ID NO: 1852615 - DNA, 25 bp, Homo sapien
cactcgtgaaaccatcccctgtggg

SEQ ID NO: 1852616 - DNA, 25 bp, Homo sapien
gactcaaggccaccgaagagagaca

SEQ ID NO: 1852617 - DNA, 25 bp, Homo sapien
cttaaggccaatggaccggagggca

SEQ ID NO: 1852618 - DNA, 25 bp, Homo sapien
ccaatgagcttgaagaaaaacagat

SEQ ID NO: 1852619 - DNA, 25 bp, Homo sapien
aacagatgctctagacacttaaggc

SEQ ID NO: 1852620 - DNA, 25 bp, Homo sapien
ggagcctcaagcatctccatgagga

SEQ ID NO: 1852621 - DNA, 25 bp, Homo sapien
tgcatacactttctcccgcaggacc

SEQ ID NO: 1852622 - DNA, 25 bp, Homo sapien
aggacctccacctcactagggttgg

SEQ ID NO: 1852623 - DNA, 25 bp, Homo sapien
gtacttctgtttgcagtaggtctcc

SEQ ID NO: 1852624 - DNA, 25 bp, Homo sapien
gtctccagtgatgcatacactttct

SEQ ID NO: 1852625 - DNA, 25 bp, Homo sapien
gagccacaggatgccccttttgggc

SEQ ID NO: 1852626 - DNA, 25 bp, Homo sapien
tggatgtgggtttttcctcggccag

SEQ ID NO: 1852627 - DNA, 25 bp, Homo sapien
cctcggccagttgggagatttccag

SEQ ID NO: 1852628 - DNA, 25 bp, Homo sapien
tagctgggtaacttaggagtctcgg

SEQ ID NO: 1852629 - DNA, 25 bp, Homo sapien
gaatgattgccctcaggcagccaag

SEQ ID NO: 1852630 - DNA, 25 bp, Homo sapien
tgtcttgtccatcctcatgtcacgc

SEQ ID NO: 1852631 - DNA, 25 bp, Homo sapien
tcacgcattttggacactagctctg

SEQ ID NO: 1852632 - DNA, 25 bp, Homo sapien
taaacagaatgattgccctcaggca

SEQ ID NO: 1852633 - DNA, 25 bp, Homo sapien
cgatcaaagatggctcctactcctg

SEQ ID NO: 1852634 - DNA, 25 bp, Homo sapien
tgctgaatgggctgagttgcggtgc

SEQ ID NO: 1852635 - DNA, 25 bp, Homo sapien
gatcaaagatggctcctactcctgc

SEQ ID NO: 1852636 - DNA, 25 bp, Homo sapien
gctgagttgcggtgcacgtgaagac

SEQ ID NO: 1852637 - DNA, 25 bp, Homo sapien
gaaggaggcaatgaggagttcattc

SEQ ID NO: 1852638 - DNA, 25 bp, Homo sapien
cggtgtgagaaggaggcaatgagga

SEQ ID NO: 1852639 - DNA, 25 bp, Homo sapien
cgaacatcaatggatcggtgtgaga

SEQ ID NO: 1852640 - DNA, 25 bp, Homo sapien
aaggaggatgccatctcgaacatca

SEQ ID NO: 1852641 - DNA, 25 bp, Homo sapien
cagcaagggtcaggagccagaaatc

SEQ ID NO: 1852642 - DNA, 25 bp, Homo sapien
tcaggccaagggattcaaagcacat

SEQ ID NO: 1852643 - DNA, 25 bp, Homo sapien
cctgggtacgcaaggtaaggccact

SEQ ID NO: 1852644 - DNA, 25 bp, Homo sapien
tcaagaagtcaaagggatccaaggt

SEQ ID NO: 1852645 - DNA, 25 bp, Homo sapien
tgcccgcagcaatatgacctgatca

SEQ ID NO: 1852646 - DNA, 25 bp, Homo sapien
cgtgaatagctgtttgtcagctgcc

SEQ ID NO: 1852647 - DNA, 25 bp, Homo sapien
gaaaagtgtgggatcctcttcgccc

SEQ ID NO: 1852648 - DNA, 25 bp, Homo sapien
tcttcgcccactcaacaagcgtgaa

SEQ ID NO: 1852649 - DNA, 25 bp, Homo sapien
gatgtagaacagacctagactgcct

SEQ ID NO: 1852650 - DNA, 25 bp, Homo sapien
gaaggagagtggattgaccccaaca

SEQ ID NO: 1852651 - DNA, 25 bp, Homo sapien
cctccagtcccaagtagtgttagga

SEQ ID NO: 1852652 - DNA, 25 bp, Homo sapien
gaaggagctatcacatccacctcag

SEQ ID NO: 1852653 - DNA, 25 bp, Homo sapien
caggaccctcaacgccctggtcact

SEQ ID NO: 1852654 - DNA, 25 bp, Homo sapien
ctcttctgttccacagcaagctctg

SEQ ID NO: 1852655 - DNA, 25 bp, Homo sapien
ttgtcctttccccgctgacgctcct

SEQ ID NO: 1852656 - DNA, 25 bp, Homo sapien
gctgctgccgctacccccggttccc

SEQ ID NO: 1852657 - DNA, 25 bp, Homo sapien
ccctcttcatgccagtggccaggca

SEQ ID NO: 1852658 - DNA, 25 bp, Homo sapien
gttccgctggcgcttgtccactgtg

SEQ ID NO: 1852659 - DNA, 25 bp, Homo sapien
tccgctggcgcttgtccactgtgca

SEQ ID NO: 1852660 - DNA, 25 bp, Homo sapien
acagcggttccgctggcgcttgtcc

SEQ ID NO: 1852661 - DNA, 25 bp, Homo sapien
cacagctgtaaaccccgtagtgttt

SEQ ID NO: 1852662 - DNA, 25 bp, Homo sapien
aagagtatgtaaggtctttgcggat

SEQ ID NO: 1852663 - DNA, 25 bp, Homo sapien
gatggtgcgtttgaagaagcccttg

SEQ ID NO: 1852664 - DNA, 25 bp, Homo sapien
ctcacagctgtaaaccccgtagtgt

SEQ ID NO: 1852665 - DNA, 25 bp, Homo sapien
cccgcagattgcacatagccgtttg

SEQ ID NO: 1852666 - DNA, 25 bp, Homo sapien
agattgcacatagccgtttgccagc

SEQ ID NO: 1852667 - DNA, 25 bp, Homo sapien
tgtccccgcagattgcacatagccg

SEQ ID NO: 1852668 - DNA, 25 bp, Homo sapien
ttctgtccccgcagattgcacatag

SEQ ID NO: 1852669 - DNA, 25 bp, Homo sapien
tggacagtgcaggccccggacccct

SEQ ID NO: 1852670 - DNA, 25 bp, Homo sapien
cacccccagggagtgacactgttga

SEQ ID NO: 1852671 - DNA, 25 bp, Homo sapien
ccccagggagtgacactgttgagtt

SEQ ID NO: 1852672 - DNA, 25 bp, Homo sapien
ccacccccagggagtgacactgttg

SEQ ID NO: 1852673 - DNA, 25 bp, Homo sapien
gcaaggccctgcaatgcacattcca

SEQ ID NO: 1852674 - DNA, 25 bp, Homo sapien
cacaggaagacttattgggaagcag

SEQ ID NO: 1852675 - DNA, 25 bp, Homo sapien
aatcattccctaccactaagcaagg

SEQ ID NO: 1852676 - DNA, 25 bp, Homo sapien
gcagtctatgtgaaaggccatccct

SEQ ID NO: 1852677 - DNA, 25 bp, Homo sapien
gccaggcagtaagttggtcacaacc

SEQ ID NO: 1852678 - DNA, 25 bp, Homo sapien
agaaaatgaaagtggccaggcagta

SEQ ID NO: 1852679 - DNA, 25 bp, Homo sapien
ggcagtaagttggtcacaacctctc

SEQ ID NO: 1852680 - DNA, 25 bp, Homo sapien
aaagtggccaggcagtaagttggtc

SEQ ID NO: 1852681 - DNA, 25 bp, Homo sapien
gggctgctgacaggcccggagaatc

SEQ ID NO: 1852682 - DNA, 25 bp, Homo sapien
gctgctgacaggcccggagaatcct

SEQ ID NO: 1852683 - DNA, 25 bp, Homo sapien
tgctgacaggcccggagaatcctgg

SEQ ID NO: 1852684 - DNA, 25 bp, Homo sapien
tgggggctgctgacaggcccggaga

SEQ ID NO: 1852685 - DNA, 25 bp, Homo sapien
ggggaccccatggaagaactgatga

SEQ ID NO: 1852686 - DNA, 25 bp, Homo sapien
gggagagcccagtgggggtggtggc

SEQ ID NO: 1852687 - DNA, 25 bp, Homo sapien
ctggaaagggagagcccagtggggg

SEQ ID NO: 1852688 - DNA, 25 bp, Homo sapien
gagagcccagtgggggtggtggcat

SEQ ID NO: 1852689 - DNA, 25 bp, Homo sapien
aagggagagcccagtgggggtggtg

SEQ ID NO: 1852690 - DNA, 25 bp, Homo sapien
ggaggagctgtctgggcttcgggag

SEQ ID NO: 1852691 - DNA, 25 bp, Homo sapien
ttggggaggagctgtctgggcttcg

SEQ ID NO: 1852692 - DNA, 25 bp, Homo sapien
aaggggatttggggaggagctgtct

SEQ ID NO: 1852693 - DNA, 25 bp, Homo sapien
gggaggagctgtctgggcttcggga

SEQ ID NO: 1852694 - DNA, 25 bp, Homo sapien
ccccaagttcagagacaccctgctg

SEQ ID NO: 1852695 - DNA, 25 bp, Homo sapien
ccacccatccccaagttcagagaca

SEQ ID NO: 1852696 - DNA, 25 bp, Homo sapien
cccatccccaagttcagagacaccc

SEQ ID NO: 1852697 - DNA, 25 bp, Homo sapien
ttaattctctaataccccaccgtgc

SEQ ID NO: 1852698 - DNA, 25 bp, Homo sapien
gagaggaggatagttcaggtgagga

SEQ ID NO: 1852699 - DNA, 25 bp, Homo sapien
tcattgtggtgagaggagggagttg

SEQ ID NO: 1852700 - DNA, 25 bp, Homo sapien
aggagggagttgacaaggagaggag

SEQ ID NO: 1852701 - DNA, 25 bp, Homo sapien
aaggagaggaggatagttcaggtga

SEQ ID NO: 1852702 - DNA, 25 bp, Homo sapien
cctctattcccagcgtaaagccagg

SEQ ID NO: 1852703 - DNA, 25 bp, Homo sapien
ccagagcgtgcaagggaaagagaca

SEQ ID NO: 1852704 - DNA, 25 bp, Homo sapien
aaagccacacctgtctcgtgggtgg

SEQ ID NO: 1852705 - DNA, 25 bp, Homo sapien
gggtagaccatcgagcccctctatt

SEQ ID NO: 1852706 - DNA, 25 bp, Homo sapien
cgcccaaagtcctgaggtttaagag

SEQ ID NO: 1852707 - DNA, 25 bp, Homo sapien
cctcctaagacgcaggatctgcctg

SEQ ID NO: 1852708 - DNA, 25 bp, Homo sapien
gaggaatcgtgcccttcccaggccc

SEQ ID NO: 1852709 - DNA, 25 bp, Homo sapien
tgcctgtaaacgcccaaagtcctga

SEQ ID NO: 1852710 - DNA, 25 bp, Homo sapien
gctaggagggcggaagctccccttc

SEQ ID NO: 1852711 - DNA, 25 bp, Homo sapien
ccaaggcctcaagcggtcacagcta

SEQ ID NO: 1852712 - DNA, 25 bp, Homo sapien
tcacagctaggagggcggaagctcc

SEQ ID NO: 1852713 - DNA, 25 bp, Homo sapien
tccggtgcccaaggcctcaagcggt

SEQ ID NO: 1852714 - DNA, 25 bp, Homo sapien
ggtcgcagataaagcggtcactggc

SEQ ID NO: 1852715 - DNA, 25 bp, Homo sapien
gcagataaagcggtcactggctcgc

SEQ ID NO: 1852716 - DNA, 25 bp, Homo sapien
aggggtcgcagataaagcggtcact

SEQ ID NO: 1852717 - DNA, 25 bp, Homo sapien
ataaagcggtcactggctcgcctgc

SEQ ID NO: 1852718 - DNA, 25 bp, Homo sapien
actgccctgcggcatgccgctgagg

SEQ ID NO: 1852719 - DNA, 25 bp, Homo sapien
aagggcgggcgagcggcccaagaca

SEQ ID NO: 1852720 - DNA, 25 bp, Homo sapien
accgggacgcgaccccacaatgcat

SEQ ID NO: 1852721 - DNA, 25 bp, Homo sapien
gttgttctccgcctgccaccgccgc

SEQ ID NO: 1852722 - DNA, 25 bp, Homo sapien
tctgctcagtaccaaaatgacagcg

SEQ ID NO: 1852723 - DNA, 25 bp, Homo sapien
gattgggtcgaattaagcccgtcgc

SEQ ID NO: 1852724 - DNA, 25 bp, Homo sapien
ggattagctgagcacgaggaagccc

SEQ ID NO: 1852725 - DNA, 25 bp, Homo sapien
cccaaggattgatcggaggattagc

SEQ ID NO: 1852726 - DNA, 25 bp, Homo sapien
gaacttcctgttctcgcgggatcta

SEQ ID NO: 1852727 - DNA, 25 bp, Homo sapien
atctaaaggcgggactgccacgtcc

SEQ ID NO: 1852728 - DNA, 25 bp, Homo sapien
cggagtgccgccatattggtaaagg

SEQ ID NO: 1852729 - DNA, 25 bp, Homo sapien
tcccggagccggtgagaattctctg

SEQ ID NO: 1852730 - DNA, 25 bp, Homo sapien
gcccggtccggcgtgttctgtccta

SEQ ID NO: 1852731 - DNA, 25 bp, Homo sapien
cggcatcggccgagcggtcagtgta

SEQ ID NO: 1852732 - DNA, 25 bp, Homo sapien
tccggcgtgttctgtcctacctcag

SEQ ID NO: 1852733 - DNA, 25 bp, Homo sapien
gtcagtgtacgcctggccggagagg

SEQ ID NO: 1852734 - DNA, 25 bp, Homo sapien
gcatgtaccacagtagcgagagaaa

SEQ ID NO: 1852735 - DNA, 25 bp, Homo sapien
tatggtactattcctcaagggaccc

SEQ ID NO: 1852736 - DNA, 25 bp, Homo sapien
gggccattatcctccaacattgggt

SEQ ID NO: 1852737 - DNA, 25 bp, Homo sapien
ccatttgtctggtggcaagatccca

SEQ ID NO: 1852738 - DNA, 25 bp, Homo sapien
tgctctccgagatcaaggactttga

SEQ ID NO: 1852739 - DNA, 25 bp, Homo sapien
gaaatatgtgctctccgagatcaag

SEQ ID NO: 1852740 - DNA, 25 bp, Homo sapien
ctcataaggctggtatgtgaattca

SEQ ID NO: 1852741 - DNA, 25 bp, Homo sapien
aacaggaagaacacctcctcataag

SEQ ID NO: 1852742 - DNA, 25 bp, Homo sapien
taagcctgggaatcttaagccacag

SEQ ID NO: 1852743 - DNA, 25 bp, Homo sapien
ggagtgatgaccctagcagttatgg

SEQ ID NO: 1852744 - DNA, 25 bp, Homo sapien
cgagtccttctatatgacactaggg

SEQ ID NO: 1852745 - DNA, 25 bp, Homo sapien
tgtccttcgaaatgactccagatgc

SEQ ID NO: 1852746 - DNA, 25 bp, Homo sapien
cagccacaaccagaggagctatgga

SEQ ID NO: 1852747 - DNA, 25 bp, Homo sapien
gaggttacacccaccagaagggatg

SEQ ID NO: 1852748 - DNA, 25 bp, Homo sapien
caaacggatggtacgaatttcgcct

SEQ ID NO: 1852749 - DNA, 25 bp, Homo sapien
gaaggctccaagtcaaacaaacgga

SEQ ID NO: 1852750 - DNA, 25 bp, Homo sapien
gccacctgaaaaaccttcaggagga

SEQ ID NO: 1852751 - DNA, 25 bp, Homo sapien
cattctagagatggggccacctgaa

SEQ ID NO: 1852752 - DNA, 25 bp, Homo sapien
ctgaaaaaccttcaggaggaaggag

SEQ ID NO: 1852753 - DNA, 25 bp, Homo sapien
agagatggggccacctgaaaaacct

SEQ ID NO: 1852754 - DNA, 25 bp, Homo sapien
catactaaatatttattttctgcag

SEQ ID NO: 1852755 - DNA, 25 bp, Homo sapien
atactaaatatttattttctgcaga

SEQ ID NO: 1852756 - DNA, 25 bp, Homo sapien
tgcctcaggacatggtgactagttg

SEQ ID NO: 1852757 - DNA, 25 bp, Homo sapien
gacttcggagtaattcttgagccag

SEQ ID NO: 1852758 - DNA, 25 bp, Homo sapien
gagatcttaggtcaaaaagctacag

SEQ ID NO: 1852759 - DNA, 25 bp, Homo sapien
agttgagtgaaccagagattgaggc

SEQ ID NO: 1852760 - DNA, 25 bp, Homo sapien
ccagcttatcctgttgggcaaggtg

SEQ ID NO: 1852761 - DNA, 25 bp, Homo sapien
tccatggagatgaccggcagatctc

SEQ ID NO: 1852762 - DNA, 25 bp, Homo sapien
caggtaagccatgtcaagggcctgg

SEQ ID NO: 1852763 - DNA, 25 bp, Homo sapien
gagaaatgataaaggccattttgga

SEQ ID NO: 1852764 - DNA, 25 bp, Homo sapien
gaagcgatgatagagctggatcagc

SEQ ID NO: 1852765 - DNA, 25 bp, Homo sapien
gcttcttgagctccaccataaggtg

SEQ ID NO: 1852766 - DNA, 25 bp, Homo sapien
taaggtggtgaatgttgatgagctc

SEQ ID NO: 1852767 - DNA, 25 bp, Homo sapien
gacagcacccggtggaagcgatgat

SEQ ID NO: 1852768 - DNA, 25 bp, Homo sapien
aagaatcaggttagggctcatacag

SEQ ID NO: 1852769 - DNA, 25 bp, Homo sapien
gctagtaactgaagaccaagggtca

SEQ ID NO: 1852770 - DNA, 25 bp, Homo sapien
ccaagggtcacttagatgatgctga

SEQ ID NO: 1852771 - DNA, 25 bp, Homo sapien
gggatcaaaccgtaaaatggtgcta

SEQ ID NO: 1852772 - DNA, 25 bp, Homo sapien
tcctgactcagagattccactgatg

SEQ ID NO: 1852773 - DNA, 25 bp, Homo sapien
tgaaactccgcattacatcctgact

SEQ ID NO: 1852774 - DNA, 25 bp, Homo sapien
tccaggaactaccaaagccacggat

SEQ ID NO: 1852775 - DNA, 25 bp, Homo sapien
ccacggatcagctgagttacccggg

SEQ ID NO: 1852776 - DNA, 25 bp, Homo sapien
gtcgctcagcctgtccacgctcaat

SEQ ID NO: 1852777 - DNA, 25 bp, Homo sapien
tcacaaatgccactaaacccccaaa

SEQ ID NO: 1852778 - DNA, 25 bp, Homo sapien
ttcccctcgaagtcgctcagcctgt

SEQ ID NO: 1852779 - DNA, 25 bp, Homo sapien
tgtccacgctcaatcaaagcctcag

SEQ ID NO: 1852780 - DNA, 25 bp, Homo sapien
tgccaacatgtcccactcatttttt

SEQ ID NO: 1852781 - DNA, 25 bp, Homo sapien
tacaacctcaactttcctggctcag

SEQ ID NO: 1852782 - DNA, 25 bp, Homo sapien
gcttctcgtgcacaggtactcgttg

SEQ ID NO: 1852783 - DNA, 25 bp, Homo sapien
gatagtctcttggtcaggcacggta

SEQ ID NO: 1852784 - DNA, 25 bp, Homo sapien
taatcacacaagtcatatatggcag

SEQ ID NO: 1852785 - DNA, 25 bp, Homo sapien
ctgtgttgccaagggtagactacaa

SEQ ID NO: 1852786 - DNA, 25 bp, Homo sapien
ctgtgtccgagcattgagcagctgc

SEQ ID NO: 1852787 - DNA, 25 bp, Homo sapien
cgaattttctgggtaggaaggcaag

SEQ ID NO: 1852788 - DNA, 25 bp, Homo sapien
aagcagtccttcacttcaggatgtc

SEQ ID NO: 1852789 - DNA, 25 bp, Homo sapien
ttgtactaagctggacactgtgcca

SEQ ID NO: 1852790 - DNA, 25 bp, Homo sapien
tgccctcacagagctaacagcagtg

SEQ ID NO: 1852791 - DNA, 25 bp, Homo sapien
actcggaggacaaaattctccacct

SEQ ID NO: 1852792 - DNA, 25 bp, Homo sapien
ccagcatcatgtcatagttgttgat

SEQ ID NO: 1852793 - DNA, 25 bp, Homo sapien
tgaggagaactcagctgccactcgg

SEQ ID NO: 1852794 - DNA, 25 bp, Homo sapien
tgttgatcagaaacacaagctgctc

SEQ ID NO: 1852795 - DNA, 25 bp, Homo sapien
cagctgtcccagcaattgcatggtc

SEQ ID NO: 1852796 - DNA, 25 bp, Homo sapien
gagaactctgcatagcggcgtgtga

SEQ ID NO: 1852797 - DNA, 25 bp, Homo sapien
taggaattgtctggttgatactgac

SEQ ID NO: 1852798 - DNA, 25 bp, Homo sapien
tgatactgacaagagcggaggagaa

SEQ ID NO: 1852799 - DNA, 25 bp, Homo sapien
tggcccaaccaacacaacctcccaa

SEQ ID NO: 1852800 - DNA, 25 bp, Homo sapien
ctcctacccacagtgcaccactcac

SEQ ID NO: 1852801 - DNA, 25 bp, Homo sapien
gtgatgtgactctaccttcagtccc

SEQ ID NO: 1852802 - DNA, 25 bp, Homo sapien
cttccttagccaacccacctccatg

SEQ ID NO: 1852803 - DNA, 25 bp, Homo sapien
ccagaacacctgctcatagcgtggc

SEQ ID NO: 1852804 - DNA, 25 bp, Homo sapien
aatgatgcttagagccctgcctttc

SEQ ID NO: 1852805 - DNA, 25 bp, Homo sapien
ttggccaacccccacaatgatgctt

SEQ ID NO: 1852806 - DNA, 25 bp, Homo sapien
tgctcatagcgtggcccatgacaca

SEQ ID NO: 1852807 - DNA, 25 bp, Homo sapien
tcagttcaaaccgtggccatagcaa

SEQ ID NO: 1852808 - DNA, 25 bp, Homo sapien
tgcttcggacgctctgaacattcat

SEQ ID NO: 1852809 - DNA, 25 bp, Homo sapien
catagcaaggcaagcacctgttccc

SEQ ID NO: 1852810 - DNA, 25 bp, Homo sapien
tctccaggatcagttcaaaccgtgg

SEQ ID NO: 1852811 - DNA, 25 bp, Homo sapien
tactgcctccggagcaaatgaatgg

SEQ ID NO: 1852812 - DNA, 25 bp, Homo sapien
tcagtaggagtctaaggtcagggca

SEQ ID NO: 1852813 - DNA, 25 bp, Homo sapien
gaccaagagagttcgtggcctgttg

SEQ ID NO: 1852814 - DNA, 25 bp, Homo sapien
gcctgttgggcatcaaggaccagaa

SEQ ID NO: 1852815 - DNA, 25 bp, Homo sapien
gagaacaatgtggatacagagaaaa

SEQ ID NO: 1852816 - DNA, 25 bp, Homo sapien
tctttgctgcaatgttacggaaccg

SEQ ID NO: 1852817 - DNA, 25 bp, Homo sapien
gaaaaacagcaatggcatcgtagca

SEQ ID NO: 1852818 - DNA, 25 bp, Homo sapien
gcagtcagctagataagaatccagg

SEQ ID NO: 1852819 - DNA, 25 bp, Homo sapien
tctaggagggcgtagtgctggctgc

SEQ ID NO: 1852820 - DNA, 25 bp, Homo sapien
tcacagatgaaaaggtattcgcggc

SEQ ID NO: 1852821 - DNA, 25 bp, Homo sapien
cagcatggaacaggtcgtgtgcagc

SEQ ID NO: 1852822 - DNA, 25 bp, Homo sapien
cagggtcatgctgagtgtacggccc

SEQ ID NO: 1852823 - DNA, 25 bp, Homo sapien
gggatggaccccaacactgacttcc

SEQ ID NO: 1852824 - DNA, 25 bp, Homo sapien
ggatggaccccaacactgacttccc

SEQ ID NO: 1852825 - DNA, 25 bp, Homo sapien
gcccttaagtcaatggttcccagct

SEQ ID NO: 1852826 - DNA, 25 bp, Homo sapien
gagaaggccactcccaagtctaagg

SEQ ID NO: 1852827 - DNA, 25 bp, Homo sapien
tgctgttgctactcctgcatccacc

SEQ ID NO: 1852828 - DNA, 25 bp, Homo sapien
taaggggattaagacagggcctgca

SEQ ID NO: 1852829 - DNA, 25 bp, Homo sapien
aaaatggtgttcctgctgcggagcg

SEQ ID NO: 1852830 - DNA, 25 bp, Homo sapien
tccgcgctgcgctgtgtgaggcacc

SEQ ID NO: 1852831 - DNA, 25 bp, Homo sapien
aatggtgttcctgctgcggagcgat

SEQ ID NO: 1852832 - DNA, 25 bp, Homo sapien
aggatgggggcctcaagttcagtgg

SEQ ID NO: 1852833 - DNA, 25 bp, Homo sapien
gagggaggctatagctttcatcaca

SEQ ID NO: 1852834 - DNA, 25 bp, Homo sapien
cattggtggctggagtcgaaagtcc

SEQ ID NO: 1852835 - DNA, 25 bp, Homo sapien
gcctggcatgagggttccccagtac

SEQ ID NO: 1852836 - DNA, 25 bp, Homo sapien
caatcatatgcaaaactatgtgtca

SEQ ID NO: 1852837 - DNA, 25 bp, Homo sapien
ttccacacccattagatcatctttc

SEQ ID NO: 1852838 - DNA, 25 bp, Homo sapien
ttgctgtatcttccacacccattag

SEQ ID NO: 1852839 - DNA, 25 bp, Homo sapien
gatcatctttctcagcgacttcctc

SEQ ID NO: 1852840 - DNA, 25 bp, Homo sapien
tcatctttctcagcgacttcctcat

SEQ ID NO: 1852841 - DNA, 25 bp, Homo sapien
gcaccttcatgagccgccccaggta

SEQ ID NO: 1852842 - DNA, 25 bp, Homo sapien
gctgttgctcgttcattgcccagca

SEQ ID NO: 1852843 - DNA, 25 bp, Homo sapien
gatctcctttgctgttgctcgttca

SEQ ID NO: 1852844 - DNA, 25 bp, Homo sapien
agcgtctccacatattcatccctga

SEQ ID NO: 1852845 - DNA, 25 bp, Homo sapien
catattcatccctgatctcctttgc

SEQ ID NO: 1852846 - DNA, 25 bp, Homo sapien
taaactctcggatcttcgtcactgc

SEQ ID NO: 1852847 - DNA, 25 bp, Homo sapien
tggtcatgggtttcctgaaggaata

SEQ ID NO: 1852848 - DNA, 25 bp, Homo sapien
ggaggataaactctcggatcttcgt

SEQ ID NO: 1852849 - DNA, 25 bp, Homo sapien
ggatctgatagttggtcatgggttt

SEQ ID NO: 1852850 - DNA, 25 bp, Homo sapien
cggagccgatcgagcacgcctctga

SEQ ID NO: 1852851 - DNA, 25 bp, Homo sapien
gatcgagcacgcctctgacatctgc

SEQ ID NO: 1852852 - DNA, 25 bp, Homo sapien
cttgacccggagccgatcgagcacg

SEQ ID NO: 1852853 - DNA, 25 bp, Homo sapien
cctctgacatctgcgcaggctgctg

SEQ ID NO: 1852854 - DNA, 25 bp, Homo sapien
agtttcccccgaactgcctggcgat

SEQ ID NO: 1852855 - DNA, 25 bp, Homo sapien
ttcatggctcctgactgttcctgca

SEQ ID NO: 1852856 - DNA, 25 bp, Homo sapien
ctctgaaaagctcccaacatctgct

SEQ ID NO: 1852857 - DNA, 25 bp, Homo sapien
ttcgaagtcgaatgttcatggctcc

SEQ ID NO: 1852858 - DNA, 25 bp, Homo sapien
ctgtagggagggtagatgttgccgg

SEQ ID NO: 1852859 - DNA, 25 bp, Homo sapien
tagggagggtagatgttgccggagt

SEQ ID NO: 1852860 - DNA, 25 bp, Homo sapien
agggagggtagatgttgccggagtg

SEQ ID NO: 1852861 - DNA, 25 bp, Homo sapien
tgtagggagggtagatgttgccgga

SEQ ID NO: 1852862 - DNA, 25 bp, Homo sapien
tgtgatctggttgtgtagagatgct

SEQ ID NO: 1852863 - DNA, 25 bp, Homo sapien
gtgatctggttgtgtagagatgcta

SEQ ID NO: 1852864 - DNA, 25 bp, Homo sapien
gcatcacaggctgtgatctggttgt

SEQ ID NO: 1852865 - DNA, 25 bp, Homo sapien
cagcatcacaggctgtgatctggtt

SEQ ID NO: 1852866 - DNA, 25 bp, Homo sapien
ttgaatagtgacggagatctacacc

SEQ ID NO: 1852867 - DNA, 25 bp, Homo sapien
ctttgaatagtgacggagatctaca

SEQ ID NO: 1852868 - DNA, 25 bp, Homo sapien
gctttgaatagtgacggagatctac

SEQ ID NO: 1852869 - DNA, 25 bp, Homo sapien
tttgaatagtgacggagatctacac

SEQ ID NO: 1852870 - DNA, 25 bp, Homo sapien
aagagcttcctttactaactcatcc

SEQ ID NO: 1852871 - DNA, 25 bp, Homo sapien
taagagcttcctttactaactcatc

SEQ ID NO: 1852872 - DNA, 25 bp, Homo sapien
agagcttcctttactaactcatcct

SEQ ID NO: 1852873 - DNA, 25 bp, Homo sapien
ttaagagcttcctttactaactcat

SEQ ID NO: 1852874 - DNA, 25 bp, Homo sapien
tatccaactccccaagttgcagtgg

SEQ ID NO: 1852875 - DNA, 25 bp, Homo sapien
actccccaagttgcagtggttcctg

SEQ ID NO: 1852876 - DNA, 25 bp, Homo sapien
cttcatccaggatgaattcatcaga

SEQ ID NO: 1852877 - DNA, 25 bp, Homo sapien
cagaagtgatatccaactccccaag

SEQ ID NO: 1852878 - DNA, 25 bp, Homo sapien
gggagccaaacaggtaatatcacgg

SEQ ID NO: 1852879 - DNA, 25 bp, Homo sapien
tatcacgggtagcagccaagttccc

SEQ ID NO: 1852880 - DNA, 25 bp, Homo sapien
cttcgtgactctaccccaaaatgtg

SEQ ID NO: 1852881 - DNA, 25 bp, Homo sapien
acagagaagctggttaacttgccca

SEQ ID NO: 1852882 - DNA, 25 bp, Homo sapien
cttgtgcctaaacccagctcaggtc

SEQ ID NO: 1852883 - DNA, 25 bp, Homo sapien
ttgtgcctaaacccagctcaggtct

SEQ ID NO: 1852884 - DNA, 25 bp, Homo sapien
ccttgtgcctaaacccagctcaggt

SEQ ID NO: 1852885 - DNA, 25 bp, Homo sapien
tgtgcctaaacccagctcaggtctt

SEQ ID NO: 1852886 - DNA, 25 bp, Homo sapien
ggaggagaaacagctccgcgctctc

SEQ ID NO: 1852887 - DNA, 25 bp, Homo sapien
acggaggagaaacagctccgcgctc

SEQ ID NO: 1852888 - DNA, 25 bp, Homo sapien
tacggaggagaaacagctccgcgct

SEQ ID NO: 1852889 - DNA, 25 bp, Homo sapien
cggaggagaaacagctccgcgctct

SEQ ID NO: 1852890 - DNA, 25 bp, Homo sapien
gcagccgccatggtcgcagcggcgg

SEQ ID NO: 1852891 - DNA, 25 bp, Homo sapien
gcaacaccagttcccgggccgcagc

SEQ ID NO: 1852892 - DNA, 25 bp, Homo sapien
ccagcccgcaacaccagttcccggg

SEQ ID NO: 1852893 - DNA, 25 bp, Homo sapien
ccgcaacaccagttcccgggccgca

SEQ ID NO: 1852894 - DNA, 25 bp, Homo sapien
cgttccccggagtggagctacaagt

SEQ ID NO: 1852895 - DNA, 25 bp, Homo sapien
gtctgaaacacaaactagccccgga

SEQ ID NO: 1852896 - DNA, 25 bp, Homo sapien
aagggtcttcctcagcgcgaaatcg

SEQ ID NO: 1852897 - DNA, 25 bp, Homo sapien
ttccggcaactgtcagtcccggcga

SEQ ID NO: 1852898 - DNA, 25 bp, Homo sapien
gccatactctcataaatccagccag

SEQ ID NO: 1852899 - DNA, 25 bp, Homo sapien
ctatgaaccttacgaactgtaaaga

SEQ ID NO: 1852900 - DNA, 25 bp, Homo sapien
gcaccggaagttgtggtacccaagc

SEQ ID NO: 1852901 - DNA, 25 bp, Homo sapien
actgtaaagaaaggcgcaccggaag

SEQ ID NO: 1852902 - DNA, 25 bp, Homo sapien
atcgcagctcgggcaaggaaagccg

SEQ ID NO: 1852903 - DNA, 25 bp, Homo sapien
tgccgtgatccagcggcatcgcagc

SEQ ID NO: 1852904 - DNA, 25 bp, Homo sapien
agccatggtaagactggaatccgtg

SEQ ID NO: 1852905 - DNA, 25 bp, Homo sapien
tacacgccgccgcttgtgctgcagc

SEQ ID NO: 1852906 - DNA, 25 bp, Homo sapien
tgaggaactgacagcccaatacctt

SEQ ID NO: 1852907 - DNA, 25 bp, Homo sapien
tttacctgcagccttcgtgtccgag

SEQ ID NO: 1852908 - DNA, 25 bp, Homo sapien
gcgctggaggcacttaagaatccta

SEQ ID NO: 1852909 - DNA, 25 bp, Homo sapien
tggagggtcctaacagaattgggca

SEQ ID NO: 1852910 - DNA, 25 bp, Homo sapien
ctcatttccctacaggtgatcttgg

SEQ ID NO: 1852911 - DNA, 25 bp, Homo sapien
agacagctgtccacccccagttggg

SEQ ID NO: 1852912 - DNA, 25 bp, Homo sapien
gggagagactgttcccaggcaaccc

SEQ ID NO: 1852913 - DNA, 25 bp, Homo sapien
cctacaggtgatcttggggagagac

SEQ ID NO: 1852914 - DNA, 25 bp, Homo sapien
gccttcgcctccttatgatgctgct

SEQ ID NO: 1852915 - DNA, 25 bp, Homo sapien
ggccttcgcctccttatgatgctgc

SEQ ID NO: 1852916 - DNA, 25 bp, Homo sapien
tggccttcgcctccttatgatgctg

SEQ ID NO: 1852917 - DNA, 25 bp, Homo sapien
tgagaagtggcaggctgacaagggc

SEQ ID NO: 1852918 - DNA, 25 bp, Homo sapien
gagaagtggcaggctgacaagggca

SEQ ID NO: 1852919 - DNA, 25 bp, Homo sapien
ggaagggagccttagcctgcgggtc

SEQ ID NO: 1852920 - DNA, 25 bp, Homo sapien
ttcaccaggcttgccgtggagctgc

SEQ ID NO: 1852921 - DNA, 25 bp, Homo sapien
aagggagccttagcctgcgggtcat

SEQ ID NO: 1852922 - DNA, 25 bp, Homo sapien
gagccttagcctgcgggtcatagcc

SEQ ID NO: 1852923 - DNA, 25 bp, Homo sapien
cagggctcgtgggtccagacaaata

SEQ ID NO: 1852924 - DNA, 25 bp, Homo sapien
gggctcgtgggtccagacaaataag

SEQ ID NO: 1852925 - DNA, 25 bp, Homo sapien
ggctcgtgggtccagacaaataagc

SEQ ID NO: 1852926 - DNA, 25 bp, Homo sapien
cagcctctctatctgctccttcttt

SEQ ID NO: 1852927 - DNA, 25 bp, Homo sapien
ccggcttctgtatggattactctcc

SEQ ID NO: 1852928 - DNA, 25 bp, Homo sapien
ctgcttccggcttctgtatggatta

SEQ ID NO: 1852929 - DNA, 25 bp, Homo sapien
caggccatcgaagttgggctcaccg

SEQ ID NO: 1852930 - DNA, 25 bp, Homo sapien
actctccaggccatcgaagttgggc

SEQ ID NO: 1852931 - DNA, 25 bp, Homo sapien
gggagaagcatggagccataaggaa

SEQ ID NO: 1852932 - DNA, 25 bp, Homo sapien
ctccagcccaactaagcccccagtt

SEQ ID NO: 1852933 - DNA, 25 bp, Homo sapien
gagggagaagcatggagccataagg

SEQ ID NO: 1852934 - DNA, 25 bp, Homo sapien
ccataaggaagaacctcagtccaac

SEQ ID NO: 1852935 - DNA, 25 bp, Homo sapien
gagccggtgggtgaggtagggctgt

SEQ ID NO: 1852936 - DNA, 25 bp, Homo sapien
gggaccagcatgctggtgatgcccc

SEQ ID NO: 1852937 - DNA, 25 bp, Homo sapien
gtgatgcccccagtgtgccccaccc

SEQ ID NO: 1852938 - DNA, 25 bp, Homo sapien
ggaccagcatgctggtgatgccccc

SEQ ID NO: 1852939 - DNA, 25 bp, Homo sapien
ggtccgagtgctcagaggctggtac

SEQ ID NO: 1852940 - DNA, 25 bp, Homo sapien
ctcgcaagtcaaagatcttcagctg

SEQ ID NO: 1852941 - DNA, 25 bp, Homo sapien
gctggtacgtccctcgcaagtcaaa

SEQ ID NO: 1852942 - DNA, 25 bp, Homo sapien
tgccctgcccagatgttgacaacgt

SEQ ID NO: 1852943 - DNA, 25 bp, Homo sapien
gactacagcatcctgatttgcactg

SEQ ID NO: 1852944 - DNA, 25 bp, Homo sapien
tctacaacacacagccgagtggtca

SEQ ID NO: 1852945 - DNA, 25 bp, Homo sapien
agtggtcacgacagcgactacagca

SEQ ID NO: 1852946 - DNA, 25 bp, Homo sapien
gacacagtcgtaagtgcttcacagc

SEQ ID NO: 1852947 - DNA, 25 bp, Homo sapien
ttgaccatctggaacactaactttg

SEQ ID NO: 1852948 - DNA, 25 bp, Homo sapien
gaacatgaatatctacagtcaaatt

SEQ ID NO: 1852949 - DNA, 25 bp, Homo sapien
gatgaaatacttgcaatctctacag

SEQ ID NO: 1852950 - DNA, 25 bp, Homo sapien
tcagttcttcccattagtagatctg

SEQ ID NO: 1852951 - DNA, 25 bp, Homo sapien
caccacgatgacagagaatctttgc

SEQ ID NO: 1852952 - DNA, 25 bp, Homo sapien
gccagtggctccttcatagctggac

SEQ ID NO: 1852953 - DNA, 25 bp, Homo sapien
gtagaatctactgccacagcccgga

SEQ ID NO: 1852954 - DNA, 25 bp, Homo sapien
catagctggactccataaagacaca

SEQ ID NO: 1852955 - DNA, 25 bp, Homo sapien
tgtccgagatggatgacggcattgt

SEQ ID NO: 1852956 - DNA, 25 bp, Homo sapien
ggttctgactcataacatcgagccg

SEQ ID NO: 1852957 - DNA, 25 bp, Homo sapien
cgcccagctcgagcattcagagctg

SEQ ID NO: 1852958 - DNA, 25 bp, Homo sapien
cactgacacatccaggtaggttaga

SEQ ID NO: 1852959 - DNA, 25 bp, Homo sapien
ggtcctaaaggagaggtggtcatcc

SEQ ID NO: 1852960 - DNA, 25 bp, Homo sapien
ggtggtcatcccaagggcttccaac

SEQ ID NO: 1852961 - DNA, 25 bp, Homo sapien
taaaggagaggtggtcatcccaagg

SEQ ID NO: 1852962 - DNA, 25 bp, Homo sapien
cctctgtattccctctgctggggtc

SEQ ID NO: 1852963 - DNA, 25 bp, Homo sapien
agttcctgagctccatggccactca

SEQ ID NO: 1852964 - DNA, 25 bp, Homo sapien
cagttcctgagctccatggccactc

SEQ ID NO: 1852965 - DNA, 25 bp, Homo sapien
gttcctgagctccatggccactcac

SEQ ID NO: 1852966 - DNA, 25 bp, Homo sapien
cctgattgtcatagatgtggagcca

SEQ ID NO: 1852967 - DNA, 25 bp, Homo sapien
gcaagcagtgcctcagaatggagaa

SEQ ID NO: 1852968 - DNA, 25 bp, Homo sapien
cggatacagtggagctcaatgccct

SEQ ID NO: 1852969 - DNA, 25 bp, Homo sapien
gttactcggtcacagcggcggatac

SEQ ID NO: 1852970 - DNA, 25 bp, Homo sapien
ggtcacaggctatcattcaatcagg

SEQ ID NO: 1852971 - DNA, 25 bp, Homo sapien
gaagagtggttcaattgggaaatga

SEQ ID NO: 1852972 - DNA, 25 bp, Homo sapien
ttcaatcaggaatggactatctcac

SEQ ID NO: 1852973 - DNA, 25 bp, Homo sapien
ccaactgaccgctgacagtgaggcc

SEQ ID NO: 1852974 - DNA, 25 bp, Homo sapien
cgttgatctcgcacataagcttctt

SEQ ID NO: 1852975 - DNA, 25 bp, Homo sapien
ttacccaatcaagggcagccacatg

SEQ ID NO: 1852976 - DNA, 25 bp, Homo sapien
gcctccatgacgttgatctcgcaca

SEQ ID NO: 1852977 - DNA, 25 bp, Homo sapien
taagcttctttgttacccaatcaag

SEQ ID NO: 1852978 - DNA, 25 bp, Homo sapien
cttccagttcgagagtagtttagtc

SEQ ID NO: 1852979 - DNA, 25 bp, Homo sapien
cgagagtagtttagtctgtagggtc

SEQ ID NO: 1852980 - DNA, 25 bp, Homo sapien
aaactgccgcagattcaagtcaaag

SEQ ID NO: 1852981 - DNA, 25 bp, Homo sapien
gtctgtagggtccaaactgccgcag

SEQ ID NO: 1852982 - DNA, 25 bp, Homo sapien
caatgtcagcctggcatatctttgc

SEQ ID NO: 1852983 - DNA, 25 bp, Homo sapien
cacaatgtcagcctggcatatcttt

SEQ ID NO: 1852984 - DNA, 25 bp, Homo sapien
cagcctggcatatctttgctgtgtc

SEQ ID NO: 1852985 - DNA, 25 bp, Homo sapien
atgtcagcctggcatatctttgctg

SEQ ID NO: 1852986 - DNA, 25 bp, Homo sapien
ggcagtaaagcttcccaatatgaag

SEQ ID NO: 1852987 - DNA, 25 bp, Homo sapien
aaagcaagggttaggatggcagtaa

SEQ ID NO: 1852988 - DNA, 25 bp, Homo sapien
aatgggggtccagattagggctcac

SEQ ID NO: 1852989 - DNA, 25 bp, Homo sapien
tatgaagcaagtataccaacataaa

SEQ ID NO: 1852990 - DNA, 25 bp, Homo sapien
acctcaagtcggcttcgagttttgg

SEQ ID NO: 1852991 - DNA, 25 bp, Homo sapien
gctcagaacgagcagctttgatact

SEQ ID NO: 1852992 - DNA, 25 bp, Homo sapien
gcagcagctcagaacgagcagcttt

SEQ ID NO: 1852993 - DNA, 25 bp, Homo sapien
agcttcagccacctcaagtcggctt

SEQ ID NO: 1852994 - DNA, 25 bp, Homo sapien
cttcccaactctccggctggacctc

SEQ ID NO: 1852995 - DNA, 25 bp, Homo sapien
tcccaactctccggctggacctcac

SEQ ID NO: 1852996 - DNA, 25 bp, Homo sapien
acttcccaactctccggctggacct

SEQ ID NO: 1852997 - DNA, 25 bp, Homo sapien
gcacttcccaactctccggctggac

SEQ ID NO: 1852998 - DNA, 25 bp, Homo sapien
gggatttgtcaatgcgacagaactt

SEQ ID NO: 1852999 - DNA, 25 bp, Homo sapien
ggatttgtcaatgcgacagaacttc

SEQ ID NO: 1853000 - DNA, 25 bp, Homo sapien
atttgtcaatgcgacagaacttctg

SEQ ID NO: 1853001 - DNA, 25 bp, Homo sapien
tttgtcaatgcgacagaacttctgg

SEQ ID NO: 1853002 - DNA, 25 bp, Homo sapien
tgggactccgggttcttccattctc

SEQ ID NO: 1853003 - DNA, 25 bp, Homo sapien
ctgggactccgggttcttccattct

SEQ ID NO: 1853004 - DNA, 25 bp, Homo sapien
tttcttcgggacctgaggcttctta

SEQ ID NO: 1853005 - DNA, 25 bp, Homo sapien
cgggacctgaggcttcttagagatc

SEQ ID NO: 1853006 - DNA, 25 bp, Homo sapien
ttttggtctctgaggacggagctcc

SEQ ID NO: 1853007 - DNA, 25 bp, Homo sapien
ggagctcccgattcttcttgttacg

SEQ ID NO: 1853008 - DNA, 25 bp, Homo sapien
tcttcttgttacgaggaggccctgg

SEQ ID NO: 1853009 - DNA, 25 bp, Homo sapien
gctgtggtcggaacggtctcttcct

SEQ ID NO: 1853010 - DNA, 25 bp, Homo sapien
tttctcttggtctgaagtttgtctt

SEQ ID NO: 1853011 - DNA, 25 bp, Homo sapien
ctttctcttggtctgaagtttgtct

SEQ ID NO: 1853012 - DNA, 25 bp, Homo sapien
tgggcgggacatccttgcccggctt

SEQ ID NO: 1853013 - DNA, 25 bp, Homo sapien
tttgtctttcttgggcgggacatcc

SEQ ID NO: 1853014 - DNA, 25 bp, Homo sapien
tttttggcaccttatcgcgagcggc

SEQ ID NO: 1853015 - DNA, 25 bp, Homo sapien
tgagtgagggcacgctctccttaga

SEQ ID NO: 1853016 - DNA, 25 bp, Homo sapien
tcatccaatcagcagcgtaccaggt

SEQ ID NO: 1853017 - DNA, 25 bp, Homo sapien
cacagtcggcttgaaaactcccgga

SEQ ID NO: 1853018 - DNA, 25 bp, Homo sapien
gaaatgtggttaccctccttgccaa

SEQ ID NO: 1853019 - DNA, 25 bp, Homo sapien
tgttgtccataaagttgttctgcca

SEQ ID NO: 1853020 - DNA, 25 bp, Homo sapien
cagttcatatgtactgcaaggacag

SEQ ID NO: 1853021 - DNA, 25 bp, Homo sapien
gacagaaaacattgtgccccttcct

SEQ ID NO: 1853022 - DNA, 25 bp, Homo sapien
ggatggctacccacatctggtatga

SEQ ID NO: 1853023 - DNA, 25 bp, Homo sapien
gaagaagagctcctgcgaggaccta

SEQ ID NO: 1853024 - DNA, 25 bp, Homo sapien
gcccttgcatgttaggatatggcca

SEQ ID NO: 1853025 - DNA, 25 bp, Homo sapien
gttataagacaccagttcccacagg

SEQ ID NO: 1853026 - DNA, 25 bp, Homo sapien
gtgtagcagtagaggaccttcgccg

SEQ ID NO: 1853027 - DNA, 25 bp, Homo sapien
cactggtgacgccaggtgtagcagt

SEQ ID NO: 1853028 - DNA, 25 bp, Homo sapien
gaacagtgcccgtgcaatcttcctc

SEQ ID NO: 1853029 - DNA, 25 bp, Homo sapien
agacgggccactggtgacgccaggt

SEQ ID NO: 1853030 - DNA, 25 bp, Homo sapien
tgaagctccatccatggcgtagaat

SEQ ID NO: 1853031 - DNA, 25 bp, Homo sapien
gaaatcgtgtgaagctccatccatg

SEQ ID NO: 1853032 - DNA, 25 bp, Homo sapien
ctgccgcaggaggaaatcgtgtgaa

SEQ ID NO: 1853033 - DNA, 25 bp, Homo sapien
ccatggcgtagaatacattagccga

SEQ ID NO: 1853034 - DNA, 25 bp, Homo sapien
cttggagccttgtcctggcttgtca

SEQ ID NO: 1853035 - DNA, 25 bp, Homo sapien
gacacgactgatgacacttggagcc

SEQ ID NO: 1853036 - DNA, 25 bp, Homo sapien
gccactgcagagtcacgattgtttt

SEQ ID NO: 1853037 - DNA, 25 bp, Homo sapien
gctgtaccagctcatactctgaagc

SEQ ID NO: 1853038 - DNA, 25 bp, Homo sapien
catttatagtccaacaagacaccat

SEQ ID NO: 1853039 - DNA, 25 bp, Homo sapien
ttatagtccaacaagacaccatcct

SEQ ID NO: 1853040 - DNA, 25 bp, Homo sapien
gacaacatttatagtccaacaagac

SEQ ID NO: 1853041 - DNA, 25 bp, Homo sapien
caacatttatagtccaacaagacac

SEQ ID NO: 1853042 - DNA, 25 bp, Homo sapien
caaaatgctcttatagacactgcca

SEQ ID NO: 1853043 - DNA, 25 bp, Homo sapien
tagacactgccatcttcccccaact

SEQ ID NO: 1853044 - DNA, 25 bp, Homo sapien
gacactgccatcttcccccaactcc

SEQ ID NO: 1853045 - DNA, 25 bp, Homo sapien
cactgccatcttcccccaactccat

SEQ ID NO: 1853046 - DNA, 25 bp, Homo sapien
tgagcggcggtgacctcgagaaggc

SEQ ID NO: 1853047 - DNA, 25 bp, Homo sapien
ctggactcggatgatacggcaatca

SEQ ID NO: 1853048 - DNA, 25 bp, Homo sapien
tgatacggcaatcagaggcccctgg

SEQ ID NO: 1853049 - DNA, 25 bp, Homo sapien
cggatgatacggcaatcagaggccc

SEQ ID NO: 1853050 - DNA, 25 bp, Homo sapien
gctggactgtgcagggatggactgc

SEQ ID NO: 1853051 - DNA, 25 bp, Homo sapien
tgacgagacagatggccacttcatg

SEQ ID NO: 1853052 - DNA, 25 bp, Homo sapien
tttccaaggcagagtctagtgacga

SEQ ID NO: 1853053 - DNA, 25 bp, Homo sapien
ggcagagtctagtgacgagacagat

SEQ ID NO: 1853054 - DNA, 25 bp, Homo sapien
cacaggacacaagcggggtagggac

SEQ ID NO: 1853055 - DNA, 25 bp, Homo sapien
gagcaggagttgtaggcgcctcatc

SEQ ID NO: 1853056 - DNA, 25 bp, Homo sapien
atctcccccagtactgggccggtca

SEQ ID NO: 1853057 - DNA, 25 bp, Homo sapien
tcccccagtactgggccggtcacag

SEQ ID NO: 1853058 - DNA, 25 bp, Homo sapien
ctgcagtggcaggagattgggagga

SEQ ID NO: 1853059 - DNA, 25 bp, Homo sapien
gattgggaggatcagagaaaagtgg

SEQ ID NO: 1853060 - DNA, 25 bp, Homo sapien
cagagaaaagtggaagtcccaagaa

SEQ ID NO: 1853061 - DNA, 25 bp, Homo sapien
gcagtggcaggagattgggaggatc

SEQ ID NO: 1853062 - DNA, 25 bp, Homo sapien
cactgcgagatgaccaatgttggcc

SEQ ID NO: 1853063 - DNA, 25 bp, Homo sapien
tgtccactgcgagatgaccaatgtt

SEQ ID NO: 1853064 - DNA, 25 bp, Homo sapien
gatgaccaatgttggccgaagcacc

SEQ ID NO: 1853065 - DNA, 25 bp, Homo sapien
ctccacctcacaggatacacgatgg

SEQ ID NO: 1853066 - DNA, 25 bp, Homo sapien
tgtagccacctctggatatcatggt

SEQ ID NO: 1853067 - DNA, 25 bp, Homo sapien
catggtcaggttggaggttatagcc

SEQ ID NO: 1853068 - DNA, 25 bp, Homo sapien
ccgtcgcaactcagaaaggactgca

SEQ ID NO: 1853069 - DNA, 25 bp, Homo sapien
gacattcattctggagccgtcgcaa

SEQ ID NO: 1853070 - DNA, 25 bp, Homo sapien
atggatagggaagtccagcatccag

SEQ ID NO: 1853071 - DNA, 25 bp, Homo sapien
tggatagggaagtccagcatccagc

SEQ ID NO: 1853072 - DNA, 25 bp, Homo sapien
tcctccgcttgtcaaaattgatgta

SEQ ID NO: 1853073 - DNA, 25 bp, Homo sapien
ttcctccgcttgtcaaaattgatgt

SEQ ID NO: 1853074 - DNA, 25 bp, Homo sapien
cttcctccgcttgtcaaaattgatg

SEQ ID NO: 1853075 - DNA, 25 bp, Homo sapien
actcatccttggaggctgcatccag

SEQ ID NO: 1853076 - DNA, 25 bp, Homo sapien
caactcatccttggaggctgcatcc

SEQ ID NO: 1853077 - DNA, 25 bp, Homo sapien
ccaactcatccttggaggctgcatc

SEQ ID NO: 1853078 - DNA, 25 bp, Homo sapien
ctccaactcatccttggaggctgca

SEQ ID NO: 1853079 - DNA, 25 bp, Homo sapien
aaggtgccaaggtatgggaccacac

SEQ ID NO: 1853080 - DNA, 25 bp, Homo sapien
gaaggtgccaaggtatgggaccaca

SEQ ID NO: 1853081 - DNA, 25 bp, Homo sapien
aggtgccaaggtatgggaccacacc

SEQ ID NO: 1853082 - DNA, 25 bp, Homo sapien
tcggggccttcttggagtgtggctc

SEQ ID NO: 1853083 - DNA, 25 bp, Homo sapien
ggccttcttggagtgtggctccaga

SEQ ID NO: 1853084 - DNA, 25 bp, Homo sapien
gggccttcttggagtgtggctccag

SEQ ID NO: 1853085 - DNA, 25 bp, Homo sapien
cggggccttcttggagtgtggctcc

SEQ ID NO: 1853086 - DNA, 25 bp, Homo sapien
cagctcccgactctgggaataatta

SEQ ID NO: 1853087 - DNA, 25 bp, Homo sapien
cctcctcggagaaaatctggcagag

SEQ ID NO: 1853088 - DNA, 25 bp, Homo sapien
ctcggagaaaatctggcagaggctg

SEQ ID NO: 1853089 - DNA, 25 bp, Homo sapien
gggaataattatcctcctcggagaa

SEQ ID NO: 1853090 - DNA, 25 bp, Homo sapien
agagaagtttcggagcagccggcac

SEQ ID NO: 1853091 - DNA, 25 bp, Homo sapien
tgacaccacggcataaactgaagag

SEQ ID NO: 1853092 - DNA, 25 bp, Homo sapien
aactgaagagaagtttcggagcagc

SEQ ID NO: 1853093 - DNA, 25 bp, Homo sapien
tgcagggctgacaccacggcataaa

SEQ ID NO: 1853094 - DNA, 25 bp, Homo sapien
ctctgccacgcggatccacttctcc

SEQ ID NO: 1853095 - DNA, 25 bp, Homo sapien
cacgcggatccacttctccaggagc

SEQ ID NO: 1853096 - DNA, 25 bp, Homo sapien
tgccacgcggatccacttctccagg

SEQ ID NO: 1853097 - DNA, 25 bp, Homo sapien
ggatccacttctccaggagccgggc

SEQ ID NO: 1853098 - DNA, 25 bp, Homo sapien
aggacagaactaaccactgcccctg

SEQ ID NO: 1853099 - DNA, 25 bp, Homo sapien
tgtgtgacagtagctcggacagatg

SEQ ID NO: 1853100 - DNA, 25 bp, Homo sapien
gacggagtggccgtatggtcacctc

SEQ ID NO: 1853101 - DNA, 25 bp, Homo sapien
gcccctgccaccttgttaaactgtg

SEQ ID NO: 1853102 - DNA, 25 bp, Homo sapien
tgaggtcagccttccaatatcaggg

SEQ ID NO: 1853103 - DNA, 25 bp, Homo sapien
aatcaaaatggtaggtggaggaggc

SEQ ID NO: 1853104 - DNA, 25 bp, Homo sapien
caaggaaaggatctggagtcaagga

SEQ ID NO: 1853105 - DNA, 25 bp, Homo sapien
cttccaatatcagggatctgaggat

SEQ ID NO: 1853106 - DNA, 25 bp, Homo sapien
taagaagctctcaagccggtcaagc

SEQ ID NO: 1853107 - DNA, 25 bp, Homo sapien
tagcagggtcagctgttcggccaag

SEQ ID NO: 1853108 - DNA, 25 bp, Homo sapien
tcggccaagtggtcagcgaggaaca

SEQ ID NO: 1853109 - DNA, 25 bp, Homo sapien
ttccctgctgcataccctgtctgaa

SEQ ID NO: 1853110 - DNA, 25 bp, Homo sapien
tgttgtcctctctagttcgtcggta

SEQ ID NO: 1853111 - DNA, 25 bp, Homo sapien
tagttcgtcggtaggatgagattca

SEQ ID NO: 1853112 - DNA, 25 bp, Homo sapien
cggtaggatgagattcaagggcttc

SEQ ID NO: 1853113 - DNA, 25 bp, Homo sapien
cctctctagttcgtcggtaggatga

SEQ ID NO: 1853114 - DNA, 25 bp, Homo sapien
tcacatcagtccctgatgtccgggt

SEQ ID NO: 1853115 - DNA, 25 bp, Homo sapien
tgtccgggtatccagtaggtgtctg

SEQ ID NO: 1853116 - DNA, 25 bp, Homo sapien
taagccctagcaaggcaggcgtgga

SEQ ID NO: 1853117 - DNA, 25 bp, Homo sapien
tgaaggcccggtgggtagccaggaa

SEQ ID NO: 1853118 - DNA, 25 bp, Homo sapien
gtgacggtaaacacggcaccatcct

SEQ ID NO: 1853119 - DNA, 25 bp, Homo sapien
caagggatcaagaggtcgatattgg

SEQ ID NO: 1853120 - DNA, 25 bp, Homo sapien
gatcaagaggtcgatattggcggct

SEQ ID NO: 1853121 - DNA, 25 bp, Homo sapien
cgatattggcggcttgtgacggtaa

SEQ ID NO: 1853122 - DNA, 25 bp, Homo sapien
accaccccccattgccctcagcctt

SEQ ID NO: 1853123 - DNA, 25 bp, Homo sapien
gggaagtcagacagttccacaccac

SEQ ID NO: 1853124 - DNA, 25 bp, Homo sapien
aggggaagtcagacagttccacacc

SEQ ID NO: 1853125 - DNA, 25 bp, Homo sapien
ggaaggggaagtcagacagttccac

SEQ ID NO: 1853126 - DNA, 25 bp, Homo sapien
agggcatagtaccagcgagtgcgag

SEQ ID NO: 1853127 - DNA, 25 bp, Homo sapien
catagtaccagcgagtgcgaggaag

SEQ ID NO: 1853128 - DNA, 25 bp, Homo sapien
ccagcgagtgcgaggaagggttggg

SEQ ID NO: 1853129 - DNA, 25 bp, Homo sapien
ggcatagtaccagcgagtgcgagga

SEQ ID NO: 1853130 - DNA, 25 bp, Homo sapien
ccgaaggtagcagctccaatcccag

SEQ ID NO: 1853131 - DNA, 25 bp, Homo sapien
caaggactataccagcccagagaat

SEQ ID NO: 1853132 - DNA, 25 bp, Homo sapien
cgtggatggagtacaggaattctga

SEQ ID NO: 1853133 - DNA, 25 bp, Homo sapien
cacacgacagagaagcagggtacaa

SEQ ID NO: 1853134 - DNA, 25 bp, Homo sapien
cagaaccgtggcttcccggcctcta

SEQ ID NO: 1853135 - DNA, 25 bp, Homo sapien
tccaggtcccagaaccgtggcttcc

SEQ ID NO: 1853136 - DNA, 25 bp, Homo sapien
ctaggatctttcctccaggtcccag

SEQ ID NO: 1853137 - DNA, 25 bp, Homo sapien
cctccaggtcccagaaccgtggctt

SEQ ID NO: 1853138 - DNA, 25 bp, Homo sapien
cccccgcccacgaccaggccacctg

SEQ ID NO: 1853139 - DNA, 25 bp, Homo sapien
tgccccccgcccacgaccaggccac

SEQ ID NO: 1853140 - DNA, 25 bp, Homo sapien
ccccgcccacgaccaggccacctgg

SEQ ID NO: 1853141 - DNA, 25 bp, Homo sapien
ctgccccccgcccacgaccaggcca

SEQ ID NO: 1853142 - DNA, 25 bp, Homo sapien
ctcgtgtccaaaagcagccgcaggg

SEQ ID NO: 1853143 - DNA, 25 bp, Homo sapien
tcggaagctgctcagtacgactccc

SEQ ID NO: 1853144 - DNA, 25 bp, Homo sapien
gggctcgtgtccaaaagcagccgca

SEQ ID NO: 1853145 - DNA, 25 bp, Homo sapien
tcccggcttcggaagctgctcagta

SEQ ID NO: 1853146 - DNA, 25 bp, Homo sapien
ggaatcagcggggtcgggccatggg

SEQ ID NO: 1853147 - DNA, 25 bp, Homo sapien
ggccgagtgaaggaatcagcggggt

SEQ ID NO: 1853148 - DNA, 25 bp, Homo sapien
gtgaaggaatcagcggggtcgggcc

SEQ ID NO: 1853149 - DNA, 25 bp, Homo sapien
aatcagcggggtcgggccatggggg

SEQ ID NO: 1853150 - DNA, 25 bp, Homo sapien
aggcaggcgcgggggaaccgggcag

SEQ ID NO: 1853151 - DNA, 25 bp, Homo sapien
tcaggcaggcgcgggggaaccgggc

SEQ ID NO: 1853152 - DNA, 25 bp, Homo sapien
gagagtcaggcaggcgcgggggaac

SEQ ID NO: 1853153 - DNA, 25 bp, Homo sapien
tggagagtcaggcaggcgcggggga

SEQ ID NO: 1853154 - DNA, 25 bp, Homo sapien
cacgtcgacccgcaatgaactggaa

SEQ ID NO: 1853155 - DNA, 25 bp, Homo sapien
caataacacggctaaaactcccgcg

SEQ ID NO: 1853156 - DNA, 25 bp, Homo sapien
gtcctgagccgctgttgccgtcggt

SEQ ID NO: 1853157 - DNA, 25 bp, Homo sapien
gcccgctccgagagcaggagccaaa

SEQ ID NO: 1853158 - DNA, 25 bp, Homo sapien
gaatgtagctgaccgaaatcccggc

SEQ ID NO: 1853159 - DNA, 25 bp, Homo sapien
tgtatcctcgctggtggagtaccct

SEQ ID NO: 1853160 - DNA, 25 bp, Homo sapien
ttccagattcggctctcagaggctt

SEQ ID NO: 1853161 - DNA, 25 bp, Homo sapien
cgagatccccgtcggctcggtgtat

SEQ ID NO: 1853162 - DNA, 25 bp, Homo sapien
tacaatatcgtgtttcgccgccggg

SEQ ID NO: 1853163 - DNA, 25 bp, Homo sapien
ggtctggcgagcaccatctagggct

SEQ ID NO: 1853164 - DNA, 25 bp, Homo sapien
aaaaaagcatttctcgggcctggtg

SEQ ID NO: 1853165 - DNA, 25 bp, Homo sapien
taaatacaactgtggtgaaccgcac

SEQ ID NO: 1853166 - DNA, 25 bp, Homo sapien
aggcagttgaggtgtacatggtcag

SEQ ID NO: 1853167 - DNA, 25 bp, Homo sapien
gacatataaactatcatgggcacag

SEQ ID NO: 1853168 - DNA, 25 bp, Homo sapien
tacatggtcagtttagagacatata

SEQ ID NO: 1853169 - DNA, 25 bp, Homo sapien
gaattcaggatattaaaaggcagtt

SEQ ID NO: 1853170 - DNA, 25 bp, Homo sapien
acagtgggacaaccttagctcattg

SEQ ID NO: 1853171 - DNA, 25 bp, Homo sapien
cagcctcaccctcccagattcaagc

SEQ ID NO: 1853172 - DNA, 25 bp, Homo sapien
aagtagctgggactatagctgtgtg

SEQ ID NO: 1853173 - DNA, 25 bp, Homo sapien
agcgatccttctgccacagctcccc

SEQ ID NO: 1853174 - DNA, 25 bp, Homo sapien
catcgcacccggcctgtaatttctt

SEQ ID NO: 1853175 - DNA, 25 bp, Homo sapien
tgagacgaagttttccttttgtcac

SEQ ID NO: 1853176 - DNA, 25 bp, Homo sapien
gcctgtaatttcttatattgtttac

SEQ ID NO: 1853177 - DNA, 25 bp, Homo sapien
ccggcctgtaatttcttatattgtt

SEQ ID NO: 1853178 - DNA, 25 bp, Homo sapien
taagtagcatgctcaaagagtccta

SEQ ID NO: 1853179 - DNA, 25 bp, Homo sapien
caggttttaacccagatcagtgtga

SEQ ID NO: 1853180 - DNA, 25 bp, Homo sapien
gaattccaagcctaggttctgccta

SEQ ID NO: 1853181 - DNA, 25 bp, Homo sapien
cctacagttaggatatagtgccagg

SEQ ID NO: 1853182 - DNA, 25 bp, Homo sapien
tttgaatccttgcaggtggacaggt

SEQ ID NO: 1853183 - DNA, 25 bp, Homo sapien
tctttgaatccttgcaggtggacag

SEQ ID NO: 1853184 - DNA, 25 bp, Homo sapien
ttctttgaatccttgcaggtggaca

SEQ ID NO: 1853185 - DNA, 25 bp, Homo sapien
ctttgaatccttgcaggtggacagg

SEQ ID NO: 1853186 - DNA, 25 bp, Homo sapien
atgctggagtggtagaggtggaggg

SEQ ID NO: 1853187 - DNA, 25 bp, Homo sapien
tgtcaggctcttgggagtaggtggg

SEQ ID NO: 1853188 - DNA, 25 bp, Homo sapien
aaagattgagaagggatgggatgct

SEQ ID NO: 1853189 - DNA, 25 bp, Homo sapien
agggcagagggatgggtgtcaggct

SEQ ID NO: 1853190 - DNA, 25 bp, Homo sapien
aggtcatggtcagggtagggctgac

SEQ ID NO: 1853191 - DNA, 25 bp, Homo sapien
tcaggtcatggtcagggtagggctg

SEQ ID NO: 1853192 - DNA, 25 bp, Homo sapien
caggtcatggtcagggtagggctga

SEQ ID NO: 1853193 - DNA, 25 bp, Homo sapien
ctcaggtcatggtcagggtagggct

SEQ ID NO: 1853194 - DNA, 25 bp, Homo sapien
cagacaggaaaaggcctacgctgtc

SEQ ID NO: 1853195 - DNA, 25 bp, Homo sapien
acaggaaaaggcctacgctgtcctc

SEQ ID NO: 1853196 - DNA, 25 bp, Homo sapien
cctacgctgtcctcaagggagggcc

SEQ ID NO: 1853197 - DNA, 25 bp, Homo sapien
ggcagacaggaaaaggcctacgctg

SEQ ID NO: 1853198 - DNA, 25 bp, Homo sapien
gtgagagtgagctcctgtcttcctg

SEQ ID NO: 1853199 - DNA, 25 bp, Homo sapien
gggtgagagtgagctcctgtcttcc

SEQ ID NO: 1853200 - DNA, 25 bp, Homo sapien
gaaggggtgagagtgagctcctgtc

SEQ ID NO: 1853201 - DNA, 25 bp, Homo sapien
agtgagctcctgtcttcctgggtgc

SEQ ID NO: 1853202 - DNA, 25 bp, Homo sapien
attccgcagagctcccagctcttac

SEQ ID NO: 1853203 - DNA, 25 bp, Homo sapien
tcagattccgcagagctcccagctc

SEQ ID NO: 1853204 - DNA, 25 bp, Homo sapien
agattccgcagagctcccagctctt

SEQ ID NO: 1853205 - DNA, 25 bp, Homo sapien
gattccgcagagctcccagctctta

SEQ ID NO: 1853206 - DNA, 25 bp, Homo sapien
caggctgggatggtgaattcgacag

SEQ ID NO: 1853207 - DNA, 25 bp, Homo sapien
ctgggatggtgaattcgacaggcat

SEQ ID NO: 1853208 - DNA, 25 bp, Homo sapien
ttcgacaggcatagcgtgccccatg

SEQ ID NO: 1853209 - DNA, 25 bp, Homo sapien
ggtgaattcgacaggcatagcgtgc

SEQ ID NO: 1853210 - DNA, 25 bp, Homo sapien
ggctgacagagccatcggaatggtg

SEQ ID NO: 1853211 - DNA, 25 bp, Homo sapien
gggcggcccgtgcaagggttgctgg

SEQ ID NO: 1853212 - DNA, 25 bp, Homo sapien
tagaagtgggacacaaggcagagca

SEQ ID NO: 1853213 - DNA, 25 bp, Homo sapien
ctccaggcccccagaagggtagaag

SEQ ID NO: 1853214 - DNA, 25 bp, Homo sapien
cattggtgcgtcacagaaataccca

SEQ ID NO: 1853215 - DNA, 25 bp, Homo sapien
cagtccatactgtcctccctaagag

SEQ ID NO: 1853216 - DNA, 25 bp, Homo sapien
tgagcatagggaaatcagtccatac

SEQ ID NO: 1853217 - DNA, 25 bp, Homo sapien
tattacggtccccacaatccagtgc

SEQ ID NO: 1853218 - DNA, 25 bp, Homo sapien
ccctggagacctctgtcccccaact

SEQ ID NO: 1853219 - DNA, 25 bp, Homo sapien
tacccctggagacctctgtccccca

SEQ ID NO: 1853220 - DNA, 25 bp, Homo sapien
tggagacctctgtcccccaactcac

SEQ ID NO: 1853221 - DNA, 25 bp, Homo sapien
ctggagacctctgtcccccaactca

SEQ ID NO: 1853222 - DNA, 25 bp, Homo sapien
cagatgtcccttacccaggtgctgg

SEQ ID NO: 1853223 - DNA, 25 bp, Homo sapien
taggcaaagctcaagtccagcagag

SEQ ID NO: 1853224 - DNA, 25 bp, Homo sapien
cagaaggtcccatttccggtccatg

SEQ ID NO: 1853225 - DNA, 25 bp, Homo sapien
tatggtggccagataggtgccctcc

SEQ ID NO: 1853226 - DNA, 25 bp, Homo sapien
caggcatgcaccaccatgcctggct

SEQ ID NO: 1853227 - DNA, 25 bp, Homo sapien
ttgagacagtttcacgcttgttgcc

SEQ ID NO: 1853228 - DNA, 25 bp, Homo sapien
gagacagtttcacgcttgttgccca

SEQ ID NO: 1853229 - DNA, 25 bp, Homo sapien
gcatgcaccaccatgcctggctaat

SEQ ID NO: 1853230 - DNA, 25 bp, Homo sapien
gattatccgtggcaaatacgcccag

SEQ ID NO: 1853231 - DNA, 25 bp, Homo sapien
aatacagacaatcttaccacccggg

SEQ ID NO: 1853232 - DNA, 25 bp, Homo sapien
tttaatcggccaagctaagcatggg

SEQ ID NO: 1853233 - DNA, 25 bp, Homo sapien
tccatcgggctgtgtcgctgacata

SEQ ID NO: 1853234 - DNA, 25 bp, Homo sapien
gtcttgctcaagtccataaagcgag

SEQ ID NO: 1853235 - DNA, 25 bp, Homo sapien
gatctggacccttagaatctaccca

SEQ ID NO: 1853236 - DNA, 25 bp, Homo sapien
taaagcgagaccaccggctgatctg

SEQ ID NO: 1853237 - DNA, 25 bp, Homo sapien
aaactgaaccccgattggcgaaatg

SEQ ID NO: 1853238 - DNA, 25 bp, Homo sapien
tctggctgtggtcgcaagaggctgg

SEQ ID NO: 1853239 - DNA, 25 bp, Homo sapien
atccagggcccgcgggcagttctgc

SEQ ID NO: 1853240 - DNA, 25 bp, Homo sapien
agcggctcatctcgcagtgtggtgc

SEQ ID NO: 1853241 - DNA, 25 bp, Homo sapien
cggggataccgcctgaaggcagcct

SEQ ID NO: 1853242 - DNA, 25 bp, Homo sapien
ggagaggcacgaagcggctcatctc

SEQ ID NO: 1853243 - DNA, 25 bp, Homo sapien
cggtccctggcgcaacagcagtgca

SEQ ID NO: 1853244 - DNA, 25 bp, Homo sapien
aacagcagtgcaccgggtctcttgg

SEQ ID NO: 1853245 - DNA, 25 bp, Homo sapien
cactgagatagagctcagggtcgag

SEQ ID NO: 1853246 - DNA, 25 bp, Homo sapien
ctttccgctcgcatcctccacgaac

SEQ ID NO: 1853247 - DNA, 25 bp, Homo sapien
ctcgatcaccgcgggtcctgctgag

SEQ ID NO: 1853248 - DNA, 25 bp, Homo sapien
cgatcaccgcgggtcctgctgagac

SEQ ID NO: 1853249 - DNA, 25 bp, Homo sapien
gtcctgctgagacggcggtcgccag

SEQ ID NO: 1853250 - DNA, 25 bp, Homo sapien
tcaccgcgggtcctgctgagacggc

SEQ ID NO: 1853251 - DNA, 25 bp, Homo sapien
ctggcgtatagggacgcgagtgagg

SEQ ID NO: 1853252 - DNA, 25 bp, Homo sapien
cggtttgtatgtctggtgacctgcc

SEQ ID NO: 1853253 - DNA, 25 bp, Homo sapien
gagcggtttgtatgtctggtgacct

SEQ ID NO: 1853254 - DNA, 25 bp, Homo sapien
gacgcgagtgaggagcggtttgtat

SEQ ID NO: 1853255 - DNA, 25 bp, Homo sapien
caaagccacagcgaggagcagagac

SEQ ID NO: 1853256 - DNA, 25 bp, Homo sapien
cagcgaggagcagagacagggactt

SEQ ID NO: 1853257 - DNA, 25 bp, Homo sapien
ccaaagccacagcgaggagcagaga

SEQ ID NO: 1853258 - DNA, 25 bp, Homo sapien
cgaggagcagagacagggacttcat

SEQ ID NO: 1853259 - DNA, 25 bp, Homo sapien
atccacttgcccgaaaaccattact

SEQ ID NO: 1853260 - DNA, 25 bp, Homo sapien
gctgcgacctcctcagccatgaagc

SEQ ID NO: 1853261 - DNA, 25 bp, Homo sapien
tggaaatccccgctctggttaggtg

SEQ ID NO: 1853262 - DNA, 25 bp, Homo sapien
cagggacccgggtagatcctctcca

SEQ ID NO: 1853263 - DNA, 25 bp, Homo sapien
catgtgcaatctactctgtggagca

SEQ ID NO: 1853264 - DNA, 25 bp, Homo sapien
tcctccatgagaaccgagttgggaa

SEQ ID NO: 1853265 - DNA, 25 bp, Homo sapien
tgaaactgtggttccccttccagaa

SEQ ID NO: 1853266 - DNA, 25 bp, Homo sapien
gtgactgcaggatgttcaacacgcc

SEQ ID NO: 1853267 - DNA, 25 bp, Homo sapien
gcccatctccaccttgtggactctg

SEQ ID NO: 1853268 - DNA, 25 bp, Homo sapien
ccactccgggagactctctcttgga

SEQ ID NO: 1853269 - DNA, 25 bp, Homo sapien
gggcgtggccgcactcgcttcgtcg

SEQ ID NO: 1853270 - DNA, 25 bp, Homo sapien
tcttggacggcaaggatggccccgt

SEQ ID NO: 1853271 - DNA, 25 bp, Homo sapien
caaacggccgcagattgaggtgcat

SEQ ID NO: 1853272 - DNA, 25 bp, Homo sapien
gaggtgcatgttcacgtgccggtcc

SEQ ID NO: 1853273 - DNA, 25 bp, Homo sapien
tcctcggtggcgcatgaagctgtct

SEQ ID NO: 1853274 - DNA, 25 bp, Homo sapien
cccgcatgctcttgtgggagaaggc

SEQ ID NO: 1853275 - DNA, 25 bp, Homo sapien
ccaccaacgctacccggcacaccca

SEQ ID NO: 1853276 - DNA, 25 bp, Homo sapien
aacgctacccggcacacccaggctc

SEQ ID NO: 1853277 - DNA, 25 bp, Homo sapien
ttcccacaatggcacagaaagatct

SEQ ID NO: 1853278 - DNA, 25 bp, Homo sapien
aaagatcttattcccgtccccactg

SEQ ID NO: 1853279 - DNA, 25 bp, Homo sapien
acgacgacgggaagaccaggatctg

SEQ ID NO: 1853280 - DNA, 25 bp, Homo sapien
tgagtcatcaagacctgccacagga

SEQ ID NO: 1853281 - DNA, 25 bp, Homo sapien
gctcactcagggtacggacatcact

SEQ ID NO: 1853282 - DNA, 25 bp, Homo sapien
tggttgccctgcatgtccaagggaa

SEQ ID NO: 1853283 - DNA, 25 bp, Homo sapien
aggggtgttggcgctgggcaattac

SEQ ID NO: 1853284 - DNA, 25 bp, Homo sapien
accaggggtgttggcgctgggcaat

SEQ ID NO: 1853285 - DNA, 25 bp, Homo sapien
aaccaggggtgttggcgctgggcaa

SEQ ID NO: 1853286 - DNA, 25 bp, Homo sapien
ggaaccaggggtgttggcgctgggc

SEQ ID NO: 1853287 - DNA, 25 bp, Homo sapien
gaaggacacatgtaccactgcagct

SEQ ID NO: 1853288 - DNA, 25 bp, Homo sapien
tgatagatacatcgcagagctggcc

SEQ ID NO: 1853289 - DNA, 25 bp, Homo sapien
gagattgattctcactggcccggct

SEQ ID NO: 1853290 - DNA, 25 bp, Homo sapien
ccttctcggagtagttcagtgcact

SEQ ID NO: 1853291 - DNA, 25 bp, Homo sapien
ctgggagacagaggagatggctcca

SEQ ID NO: 1853292 - DNA, 25 bp, Homo sapien
tgggagacagaggagatggctccat

SEQ ID NO: 1853293 - DNA, 25 bp, Homo sapien
agccacaggaacaaagaaaggagga

SEQ ID NO: 1853294 - DNA, 25 bp, Homo sapien
cccccagccacaggaacaaagaaag

SEQ ID NO: 1853295 - DNA, 25 bp, Homo sapien
gatacccccccagccacaggaacaa

SEQ ID NO: 1853296 - DNA, 25 bp, Homo sapien
ggatacccccccagccacaggaaca

SEQ ID NO: 1853297 - DNA, 25 bp, Homo sapien
gacaaatcttgtgccctttccttgg

SEQ ID NO: 1853298 - DNA, 25 bp, Homo sapien
gggcagctctgctactgaaaaccaa

SEQ ID NO: 1853299 - DNA, 25 bp, Homo sapien
tatttccgacttacctgagagcctg

SEQ ID NO: 1853300 - DNA, 25 bp, Homo sapien
taacatctcataacgacacagcccg

SEQ ID NO: 1853301 - DNA, 25 bp, Homo sapien
agagcagcaacctgggcccctcccg

SEQ ID NO: 1853302 - DNA, 25 bp, Homo sapien
ccagagcagcaacctgggcccctcc

SEQ ID NO: 1853303 - DNA, 25 bp, Homo sapien
cagagcagcaacctgggcccctccc

SEQ ID NO: 1853304 - DNA, 25 bp, Homo sapien
tcctccaaatgttatcccagaacat

SEQ ID NO: 1853305 - DNA, 25 bp, Homo sapien
ccaaaaggggattagcttagtccat

SEQ ID NO: 1853306 - DNA, 25 bp, Homo sapien
aaggggattagcttagtccatccct

SEQ ID NO: 1853307 - DNA, 25 bp, Homo sapien
ggattagcttagtccatcccttcct

SEQ ID NO: 1853308 - DNA, 25 bp, Homo sapien
cagagtctgagagcacgatgatctc

SEQ ID NO: 1853309 - DNA, 25 bp, Homo sapien
tgatctcttctggatcgcattgtgt

SEQ ID NO: 1853310 - DNA, 25 bp, Homo sapien
ttctggatcgcattgtgtggccaca

SEQ ID NO: 1853311 - DNA, 25 bp, Homo sapien
tctgagagcacgatgatctcttctg

SEQ ID NO: 1853312 - DNA, 25 bp, Homo sapien
ctgcagggaagtgagagacaaagag

SEQ ID NO: 1853313 - DNA, 25 bp, Homo sapien
cagggaagtgagagacaaagagtca

SEQ ID NO: 1853314 - DNA, 25 bp, Homo sapien
gggaagtgagagacaaagagtcaaa

SEQ ID NO: 1853315 - DNA, 25 bp, Homo sapien
gtgagagacaaagagtcaaagagat

SEQ ID NO: 1853316 - DNA, 25 bp, Homo sapien
gagcagctgaaacagccaatgaaag

SEQ ID NO: 1853317 - DNA, 25 bp, Homo sapien
caaattgtcagaggaaacacgccct

SEQ ID NO: 1853318 - DNA, 25 bp, Homo sapien
gcacgtggaatattcagacagagca

SEQ ID NO: 1853319 - DNA, 25 bp, Homo sapien
aggaagagacaggatgtggcacgtg

SEQ ID NO: 1853320 - DNA, 25 bp, Homo sapien
gagctggtcaccaggccatggctgg

SEQ ID NO: 1853321 - DNA, 25 bp, Homo sapien
gggtttgggacagccgggctggaga

SEQ ID NO: 1853322 - DNA, 25 bp, Homo sapien
ttgcaagtaccaggccgaggaggct

SEQ ID NO: 1853323 - DNA, 25 bp, Homo sapien
gaggctgtgaatggggggtttggga

SEQ ID NO: 1853324 - DNA, 25 bp, Homo sapien
cgtggaggaatcagcaactggggcc

SEQ ID NO: 1853325 - DNA, 25 bp, Homo sapien
gggctgggcagggtacatatctttt

SEQ ID NO: 1853326 - DNA, 25 bp, Homo sapien
tctcatgcactgacctttgcctttc

SEQ ID NO: 1853327 - DNA, 25 bp, Homo sapien
gggcagggtacatatctttttccca

SEQ ID NO: 1853328 - DNA, 25 bp, Homo sapien
aaagtcccctgcaatccctccttgg

SEQ ID NO: 1853329 - DNA, 25 bp, Homo sapien
tcagttccccagtattgctctccga

SEQ ID NO: 1853330 - DNA, 25 bp, Homo sapien
agcagactcagttccccagtattgc

SEQ ID NO: 1853331 - DNA, 25 bp, Homo sapien
tccccagtattgctctccgaaagtc

SEQ ID NO: 1853332 - DNA, 25 bp, Homo sapien
taacgatggtgacactatgcgtcct

SEQ ID NO: 1853333 - DNA, 25 bp, Homo sapien
tcattggagatctgtagtgaggaca

SEQ ID NO: 1853334 - DNA, 25 bp, Homo sapien
gagagacgcctccattgaaggaagt

SEQ ID NO: 1853335 - DNA, 25 bp, Homo sapien
cagaatctccccagttgtgaggaga

SEQ ID NO: 1853336 - DNA, 25 bp, Homo sapien
cgtcttcgtcatctgtctcagctct

SEQ ID NO: 1853337 - DNA, 25 bp, Homo sapien
gcacccctgggatgccattccacta

SEQ ID NO: 1853338 - DNA, 25 bp, Homo sapien
agggcacccctgggatgccattcca

SEQ ID NO: 1853339 - DNA, 25 bp, Homo sapien
atcactctcctcatcgtcttcgtca

SEQ ID NO: 1853340 - DNA, 25 bp, Homo sapien
cttgccccagagggtttggttcttg

SEQ ID NO: 1853341 - DNA, 25 bp, Homo sapien
agtcaacctggactccctggtggcc

SEQ ID NO: 1853342 - DNA, 25 bp, Homo sapien
caacattgcatatttggagatgacc

SEQ ID NO: 1853343 - DNA, 25 bp, Homo sapien
gccgggccaacacaggatctgatag

SEQ ID NO: 1853344 - DNA, 25 bp, Homo sapien
ggagatgacctcatccagccgactc

SEQ ID NO: 1853345 - DNA, 25 bp, Homo sapien
cgactcatggccaaactccggtttt

SEQ ID NO: 1853346 - DNA, 25 bp, Homo sapien
ccaaagaggcggatcagcttacgct

SEQ ID NO: 1853347 - DNA, 25 bp, Homo sapien
tagacatagagcttggctggccggc

SEQ ID NO: 1853348 - DNA, 25 bp, Homo sapien
gtgacgtcgctcctgtaacctgatg

SEQ ID NO: 1853349 - DNA, 25 bp, Homo sapien
catagtcagggaaggtatcaggccc

SEQ ID NO: 1853350 - DNA, 25 bp, Homo sapien
aaggacaggagaaccagtcagccat

SEQ ID NO: 1853351 - DNA, 25 bp, Homo sapien
tggggtacaacaatcttccccgcta

SEQ ID NO: 1853352 - DNA, 25 bp, Homo sapien
tacaacaatcttccccgctaaagct

SEQ ID NO: 1853353 - DNA, 25 bp, Homo sapien
gaaaggacaggagaaccagtcagcc

SEQ ID NO: 1853354 - DNA, 25 bp, Homo sapien
cacgatgatgctgttagcggtggcc

SEQ ID NO: 1853355 - DNA, 25 bp, Homo sapien
cgatgatgctgttagcggtggccat

SEQ ID NO: 1853356 - DNA, 25 bp, Homo sapien
ttgtagcatttcttgccgcccgaac

SEQ ID NO: 1853357 - DNA, 25 bp, Homo sapien
tgccgcccgaactactgcttcctct

SEQ ID NO: 1853358 - DNA, 25 bp, Homo sapien
gaggaagtggtggggatttcagaat

SEQ ID NO: 1853359 - DNA, 25 bp, Homo sapien
ctcagaaaccgtctctcgaggcgac

SEQ ID NO: 1853360 - DNA, 25 bp, Homo sapien
gtcacagagtttccgccttcatgca

SEQ ID NO: 1853361 - DNA, 25 bp, Homo sapien
tcgaggcgaccctcgccgcaattct

SEQ ID NO: 1853362 - DNA, 25 bp, Homo sapien
aattctcagaacctcgcatggttcc

SEQ ID NO: 1853363 - DNA, 25 bp, Homo sapien
tttgtgcaaattgccgctgcgaggg

SEQ ID NO: 1853364 - DNA, 25 bp, Homo sapien
taatgaccagccagaccgttgggac

SEQ ID NO: 1853365 - DNA, 25 bp, Homo sapien
gggacctgaatggttcttctccaga

SEQ ID NO: 1853366 - DNA, 25 bp, Homo sapien
tgcttttcaagcttcaccacagaac

SEQ ID NO: 1853367 - DNA, 25 bp, Homo sapien
ctcgttgtgtttagggaggctggag

SEQ ID NO: 1853368 - DNA, 25 bp, Homo sapien
tggagggactcgtggaggcaaggct

SEQ ID NO: 1853369 - DNA, 25 bp, Homo sapien
gggactcgtggaggcaaggctgggt

SEQ ID NO: 1853370 - DNA, 25 bp, Homo sapien
gctggagggactcgtggaggcaagg

SEQ ID NO: 1853371 - DNA, 25 bp, Homo sapien
tggggaaagaagatgtttataggaa

SEQ ID NO: 1853372 - DNA, 25 bp, Homo sapien
acagcagcttataagcagcctccag

SEQ ID NO: 1853373 - DNA, 25 bp, Homo sapien
tcccctaactttgcccatagtagta

SEQ ID NO: 1853374 - DNA, 25 bp, Homo sapien
aaatgccaggaacacatccgcctcg

SEQ ID NO: 1853375 - DNA, 25 bp, Homo sapien
ttgtccaaggcacgtcgcacgggac

SEQ ID NO: 1853376 - DNA, 25 bp, Homo sapien
accaccaaaaagctccctcagcgca

SEQ ID NO: 1853377 - DNA, 25 bp, Homo sapien
tttggcgctggaattaaacaaccac

SEQ ID NO: 1853378 - DNA, 25 bp, Homo sapien
gcaccagggcccatcgatttcacca

SEQ ID NO: 1853379 - DNA, 25 bp, Homo sapien
cagcgcacaacatccaacgtgtttg

SEQ ID NO: 1853380 - DNA, 25 bp, Homo sapien
gggagacctgaacctcagtccagcc

SEQ ID NO: 1853381 - DNA, 25 bp, Homo sapien
gattatctgggcagaatcagttggg

SEQ ID NO: 1853382 - DNA, 25 bp, Homo sapien
ctccctgctctagagtggggacaaa

SEQ ID NO: 1853383 - DNA, 25 bp, Homo sapien
ggggctagtgagtgaggtcctgagt

SEQ ID NO: 1853384 - DNA, 25 bp, Homo sapien
agcagcttctcaagaaattccttca

SEQ ID NO: 1853385 - DNA, 25 bp, Homo sapien
cagcagcttctcaagaaattccttc

SEQ ID NO: 1853386 - DNA, 25 bp, Homo sapien
gcagcagcttctcaagaaattcctt

SEQ ID NO: 1853387 - DNA, 25 bp, Homo sapien
caggtgtgacaacagaccggagctt

SEQ ID NO: 1853388 - DNA, 25 bp, Homo sapien
tgtgacaacagaccggagcttctca

SEQ ID NO: 1853389 - DNA, 25 bp, Homo sapien
gacaacagaccggagcttctcagcc

SEQ ID NO: 1853390 - DNA, 25 bp, Homo sapien
ggtgtgacaacagaccggagcttct

SEQ ID NO: 1853391 - DNA, 25 bp, Homo sapien
atcctaggctcatgggaacagatgt

SEQ ID NO: 1853392 - DNA, 25 bp, Homo sapien
catcaggtcaaaccaggagggcatc

SEQ ID NO: 1853393 - DNA, 25 bp, Homo sapien
cggccagcagctcaaagccaggatg

SEQ ID NO: 1853394 - DNA, 25 bp, Homo sapien
gaacagatgtacttgacgtgaggga

SEQ ID NO: 1853395 - DNA, 25 bp, Homo sapien
gacacggtggcagcatcgttgagca

SEQ ID NO: 1853396 - DNA, 25 bp, Homo sapien
tcagctccagacacggtggcagcat

SEQ ID NO: 1853397 - DNA, 25 bp, Homo sapien
catcgttgagcaggggcacagacat

SEQ ID NO: 1853398 - DNA, 25 bp, Homo sapien
tccagacacggtggcagcatcgttg

SEQ ID NO: 1853399 - DNA, 25 bp, Homo sapien
atggcaggggcctccactccctggg

SEQ ID NO: 1853400 - DNA, 25 bp, Homo sapien
ccctgggacttctgaggccgcttgg

SEQ ID NO: 1853401 - DNA, 25 bp, Homo sapien
tgggacttctgaggccgcttgggtg

SEQ ID NO: 1853402 - DNA, 25 bp, Homo sapien
cttctgaggccgcttgggtgattct

SEQ ID NO: 1853403 - DNA, 25 bp, Homo sapien
tgtccaatagccttagtgggaagat

SEQ ID NO: 1853404 - DNA, 25 bp, Homo sapien
tctgtgtccaatagccttagtggga

SEQ ID NO: 1853405 - DNA, 25 bp, Homo sapien
ctgtgtccaatagccttagtgggaa

SEQ ID NO: 1853406 - DNA, 25 bp, Homo sapien
tccaatagccttagtgggaagattg

SEQ ID NO: 1853407 - DNA, 25 bp, Homo sapien
gggtcctcgtttgcgcacgcgtcat

SEQ ID NO: 1853408 - DNA, 25 bp, Homo sapien
gcggcgacgtccacgcattttctga

SEQ ID NO: 1853409 - DNA, 25 bp, Homo sapien
cattttctgacgtagcgagcgacgg

SEQ ID NO: 1853410 - DNA, 25 bp, Homo sapien
caccagtttcgcttggccagttgcg

SEQ ID NO: 1853411 - DNA, 25 bp, Homo sapien
gacagcgacgattggtccctgcgtg

SEQ ID NO: 1853412 - DNA, 25 bp, Homo sapien
cagaaaagacaaggcgcctgtcggg

SEQ ID NO: 1853413 - DNA, 25 bp, Homo sapien
gagttctctaccctgcttcgcgagc

SEQ ID NO: 1853414 - DNA, 25 bp, Homo sapien
tctcctgcgcctgcgaaacagaaaa

SEQ ID NO: 1853415 - DNA, 25 bp, Homo sapien
tgatcctttattgaaatattttcct

SEQ ID NO: 1853416 - DNA, 25 bp, Homo sapien
tttattgaaatattttcctttgtgc

SEQ ID NO: 1853417 - DNA, 25 bp, Homo sapien
ctttattgaaatattttcctttgtg

SEQ ID NO: 1853418 - DNA, 25 bp, Homo sapien
caaatgatcctttattgaaatattt

SEQ ID NO: 1853419 - DNA, 25 bp, Homo sapien
atctcgttggggtcgaacttcggtg

SEQ ID NO: 1853420 - DNA, 25 bp, Homo sapien
ggatcggtgccgcatctgtcgagca

SEQ ID NO: 1853421 - DNA, 25 bp, Homo sapien
ggcaccgacttcacctctggtgcac

SEQ ID NO: 1853422 - DNA, 25 bp, Homo sapien
gaagtggcaccgacttcacctctgg

SEQ ID NO: 1853423 - DNA, 25 bp, Homo sapien
gactgagcgggaagaacgtcttcat

SEQ ID NO: 1853424 - DNA, 25 bp, Homo sapien
tcttggttgcatcttaccctctgtg

SEQ ID NO: 1853425 - DNA, 25 bp, Homo sapien
cttcatgggctagaaatggagcgcc

SEQ ID NO: 1853426 - DNA, 25 bp, Homo sapien
gcaacatccgtgtattctgccgggt

SEQ ID NO: 1853427 - DNA, 25 bp, Homo sapien
tatttcggtatttctgagggcagcc

SEQ ID NO: 1853428 - DNA, 25 bp, Homo sapien
accagcctgaaccagcctttggagg

SEQ ID NO: 1853429 - DNA, 25 bp, Homo sapien
gaggagaacaaaccataactggcac

SEQ ID NO: 1853430 - DNA, 25 bp, Homo sapien
tccttcagattggtgccagtgtcct

SEQ ID NO: 1853431 - DNA, 25 bp, Homo sapien
tggaccttggcctggatcatcttcc

SEQ ID NO: 1853432 - DNA, 25 bp, Homo sapien
catatctgtaaaagtgggagctgtg

SEQ ID NO: 1853433 - DNA, 25 bp, Homo sapien
tccgtcacatcagggaggtgtgccc

SEQ ID NO: 1853434 - DNA, 25 bp, Homo sapien
tctgccaaacgtttacgtgggaggc

SEQ ID NO: 1853435 - DNA, 25 bp, Homo sapien
gagaattgggacagtttgctcctgg

SEQ ID NO: 1853436 - DNA, 25 bp, Homo sapien
gaaatactttgattttgatcgtgag

SEQ ID NO: 1853437 - DNA, 25 bp, Homo sapien
ttttgatcgtgagatcctccccttc

SEQ ID NO: 1853438 - DNA, 25 bp, Homo sapien
ctgagaattgggacagtttgctcct

SEQ ID NO: 1853439 - DNA, 25 bp, Homo sapien
aggtcttcctagacgctcagcaccc

SEQ ID NO: 1853440 - DNA, 25 bp, Homo sapien
tccccaggtcttcctagacgctcag

SEQ ID NO: 1853441 - DNA, 25 bp, Homo sapien
ccatccccaggtcttcctagacgct

SEQ ID NO: 1853442 - DNA, 25 bp, Homo sapien
caggtcttcctagacgctcagcacc

SEQ ID NO: 1853443 - DNA, 25 bp, Homo sapien
tctgtgcagtacctggttgagtggg

SEQ ID NO: 1853444 - DNA, 25 bp, Homo sapien
ggaggatgataagggatcccggact

SEQ ID NO: 1853445 - DNA, 25 bp, Homo sapien
gggatcccggactctgtatgattga

SEQ ID NO: 1853446 - DNA, 25 bp, Homo sapien
tctgacctcacctacagctgggatg

SEQ ID NO: 1853447 - DNA, 25 bp, Homo sapien
gaaagatgtagagaatacagggact

SEQ ID NO: 1853448 - DNA, 25 bp, Homo sapien
cccaacaaatttgcatacatgacaa

SEQ ID NO: 1853449 - DNA, 25 bp, Homo sapien
tagaagcacttatattctcccaaca

SEQ ID NO: 1853450 - DNA, 25 bp, Homo sapien
gagaatacagggactagaagcactt

SEQ ID NO: 1853451 - DNA, 25 bp, Homo sapien
atttattgggggcccagtcatcacc

SEQ ID NO: 1853452 - DNA, 25 bp, Homo sapien
gatttattgggggcccagtcatcac

SEQ ID NO: 1853453 - DNA, 25 bp, Homo sapien
tatcgcggggatcttcatgatgagc

SEQ ID NO: 1853454 - DNA, 25 bp, Homo sapien
gcgttgaagtatcgcggggatcttc

SEQ ID NO: 1853455 - DNA, 25 bp, Homo sapien
aagtatcgcggggatcttcatgatg

SEQ ID NO: 1853456 - DNA, 25 bp, Homo sapien
tcgcggggatcttcatgatgagcag

SEQ ID NO: 1853457 - DNA, 25 bp, Homo sapien
ctgtgatagagtcagaaactgactc

SEQ ID NO: 1853458 - DNA, 25 bp, Homo sapien
actgtgatagagtcagaaactgact

SEQ ID NO: 1853459 - DNA, 25 bp, Homo sapien
gtgatagagtcagaaactgactctg

SEQ ID NO: 1853460 - DNA, 25 bp, Homo sapien
tgtgatagagtcagaaactgactct

SEQ ID NO: 1853461 - DNA, 25 bp, Homo sapien
actgcaggtacggaaagttcccctg

SEQ ID NO: 1853462 - DNA, 25 bp, Homo sapien
tcccctgttccacaggcaatgcaat

SEQ ID NO: 1853463 - DNA, 25 bp, Homo sapien
ggccacttcgtaagggtgcacagaa

SEQ ID NO: 1853464 - DNA, 25 bp, Homo sapien
aatgcaattacctcggccacttcgt

SEQ ID NO: 1853465 - DNA, 25 bp, Homo sapien
agaacccactcccttacacgcaagc

SEQ ID NO: 1853466 - DNA, 25 bp, Homo sapien
ggggatcactcaaagatttacccaa

SEQ ID NO: 1853467 - DNA, 25 bp, Homo sapien
gggaaggggatcactcaaagattta

SEQ ID NO: 1853468 - DNA, 25 bp, Homo sapien
aagccctagactgcccagcaagtca

SEQ ID NO: 1853469 - DNA, 25 bp, Homo sapien
ctgtcaaagctgggaccaaggaact

SEQ ID NO: 1853470 - DNA, 25 bp, Homo sapien
atctgtcaaagctgggaccaaggaa

SEQ ID NO: 1853471 - DNA, 25 bp, Homo sapien
tctgtcaaagctgggaccaaggaac

SEQ ID NO: 1853472 - DNA, 25 bp, Homo sapien
aaaatctgtcaaagctgggaccaag

SEQ ID NO: 1853473 - DNA, 25 bp, Homo sapien
aaagataaacatggttgaatcaagg

SEQ ID NO: 1853474 - DNA, 25 bp, Homo sapien
catggttgaatcaaggagtgggatt

SEQ ID NO: 1853475 - DNA, 25 bp, Homo sapien
taaacatggttgaatcaaggagtgg

SEQ ID NO: 1853476 - DNA, 25 bp, Homo sapien
ttgaatcaaggagtgggattgagtt

SEQ ID NO: 1853477 - DNA, 25 bp, Homo sapien
ctcactgtcttcctcgatcttccct

SEQ ID NO: 1853478 - DNA, 25 bp, Homo sapien
tgtcttcctcgatcttccctttcca

SEQ ID NO: 1853479 - DNA, 25 bp, Homo sapien
actgtcttcctcgatcttccctttc

SEQ ID NO: 1853480 - DNA, 25 bp, Homo sapien
tcactgtcttcctcgatcttccctt

SEQ ID NO: 1853481 - DNA, 25 bp, Homo sapien
ttaaccccccaactcctatgactca

SEQ ID NO: 1853482 - DNA, 25 bp, Homo sapien
tgtggggagcaaagaatttccccca

SEQ ID NO: 1853483 - DNA, 25 bp, Homo sapien
ccagtcagctcctacagttaggtta

SEQ ID NO: 1853484 - DNA, 25 bp, Homo sapien
cccaggaaagaggttcccagtcagc

SEQ ID NO: 1853485 - DNA, 25 bp, Homo sapien
acgcaggctgctaggcgcttctcca

SEQ ID NO: 1853486 - DNA, 25 bp, Homo sapien
tggatgtaatctgagggatgaggtt

SEQ ID NO: 1853487 - DNA, 25 bp, Homo sapien
taatctgagggatgaggttgacgca

SEQ ID NO: 1853488 - DNA, 25 bp, Homo sapien
gttgacgcaggctgctaggcgcttc

SEQ ID NO: 1853489 - DNA, 25 bp, Homo sapien
tcctttctcgctgcacatcgaggtc

SEQ ID NO: 1853490 - DNA, 25 bp, Homo sapien
gatcatcctttctcgctgcacatcg

SEQ ID NO: 1853491 - DNA, 25 bp, Homo sapien
agtcccattcagagtaccccataac

SEQ ID NO: 1853492 - DNA, 25 bp, Homo sapien
ttctcgctgcacatcgaggtcccta

SEQ ID NO: 1853493 - DNA, 25 bp, Homo sapien
tagccagagccggaatccgaggccg

SEQ ID NO: 1853494 - DNA, 25 bp, Homo sapien
tgcagagaccgagcccggaacgtag

SEQ ID NO: 1853495 - DNA, 25 bp, Homo sapien
tctccttggcgaccttctcgttggg

SEQ ID NO: 1853496 - DNA, 25 bp, Homo sapien
ctcgttggggcaagtaacaaaggct

SEQ ID NO: 1853497 - DNA, 25 bp, Homo sapien
gtcagcaagactcggggtagcaaca

SEQ ID NO: 1853498 - DNA, 25 bp, Homo sapien
ggtcagcaagactcggggtagcaac

SEQ ID NO: 1853499 - DNA, 25 bp, Homo sapien
tcagcaagactcggggtagcaacaa

SEQ ID NO: 1853500 - DNA, 25 bp, Homo sapien
agcaagactcggggtagcaacaaaa

SEQ ID NO: 1853501 - DNA, 25 bp, Homo sapien
ccaaacaaaagacaggagcagagag

SEQ ID NO: 1853502 - DNA, 25 bp, Homo sapien
aaacaaaagacaggagcagagaggc

SEQ ID NO: 1853503 - DNA, 25 bp, Homo sapien
caaacaaaagacaggagcagagagg

SEQ ID NO: 1853504 - DNA, 25 bp, Homo sapien
gccttcgcttagatcctcaggctct

SEQ ID NO: 1853505 - DNA, 25 bp, Homo sapien
agcaggaggcgaattcgatctctcc

SEQ ID NO: 1853506 - DNA, 25 bp, Homo sapien
gggaagccttcgcttagatcctcag

SEQ ID NO: 1853507 - DNA, 25 bp, Homo sapien
ctgagagcaggaggcgaattcgatc

SEQ ID NO: 1853508 - DNA, 25 bp, Homo sapien
taaagcaaaagctcatttcactcac

SEQ ID NO: 1853509 - DNA, 25 bp, Homo sapien
aaataaagcaaaagctcatttcact

SEQ ID NO: 1853510 - DNA, 25 bp, Homo sapien
ctgaaggtgagagagaaacttggaa

SEQ ID NO: 1853511 - DNA, 25 bp, Homo sapien
acttggaaaataaagcaaaagctca

SEQ ID NO: 1853512 - DNA, 25 bp, Homo sapien
ctctgggatttagggtgcgggtagc

SEQ ID NO: 1853513 - DNA, 25 bp, Homo sapien
ctcagggggccaacctctgggattt

SEQ ID NO: 1853514 - DNA, 25 bp, Homo sapien
ttagggtgcgggtagcggtcgaggc

SEQ ID NO: 1853515 - DNA, 25 bp, Homo sapien
cggtcgaggcttcgaggaccggaag

SEQ ID NO: 1853516 - DNA, 25 bp, Homo sapien
ccgagcaggaccgcgggagcccgcc

SEQ ID NO: 1853517 - DNA, 25 bp, Homo sapien
cactccgccgagcaggaccgcggga

SEQ ID NO: 1853518 - DNA, 25 bp, Homo sapien
tccgccgagcaggaccgcgggagcc

SEQ ID NO: 1853519 - DNA, 25 bp, Homo sapien
cgccgagcaggaccgcgggagcccg

SEQ ID NO: 1853520 - DNA, 25 bp, Homo sapien
ctggtacaggagagttgatctcaaa

SEQ ID NO: 1853521 - DNA, 25 bp, Homo sapien
tctcaaaggccacacgtcacacgga

SEQ ID NO: 1853522 - DNA, 25 bp, Homo sapien
tgatctcaaaggccacacgtcacac

SEQ ID NO: 1853523 - DNA, 25 bp, Homo sapien
acgtcacacggagaaacaaccccag

SEQ ID NO: 1853524 - DNA, 25 bp, Homo sapien
gcgcaccatgtgacagtagaagaag

SEQ ID NO: 1853525 - DNA, 25 bp, Homo sapien
tgattagaaaacagcgcgcaccatg

SEQ ID NO: 1853526 - DNA, 25 bp, Homo sapien
catctgcagacgtgcgcggaaatgg

SEQ ID NO: 1853527 - DNA, 25 bp, Homo sapien
gagacttgaccaatcgactaccgca

SEQ ID NO: 1853528 - DNA, 25 bp, Homo sapien
tgctcaggttccttgccccctcctt

SEQ ID NO: 1853529 - DNA, 25 bp, Homo sapien
tgggcctaaggcctcccaccccatc

SEQ ID NO: 1853530 - DNA, 25 bp, Homo sapien
gctgccagcctctccgccgtcgctg

SEQ ID NO: 1853531 - DNA, 25 bp, Homo sapien
tgccagccccagtcatgggcctaag

SEQ ID NO: 1853532 - DNA, 25 bp, Homo sapien
tgggcttataactgcatccgtctaa

SEQ ID NO: 1853533 - DNA, 25 bp, Homo sapien
tagcttccggaggttgccagcagtc

SEQ ID NO: 1853534 - DNA, 25 bp, Homo sapien
cagggccacgctctctttgatgctg

SEQ ID NO: 1853535 - DNA, 25 bp, Homo sapien
tgatgctgtagcagggaatccttcc

SEQ ID NO: 1853536 - DNA, 25 bp, Homo sapien
gctgctcgacgctcaggtggaaatt

SEQ ID NO: 1853537 - DNA, 25 bp, Homo sapien
catcacggcaatggagggactctga

SEQ ID NO: 1853538 - DNA, 25 bp, Homo sapien
tgaagcccgtcccttcaggctgatg

SEQ ID NO: 1853539 - DNA, 25 bp, Homo sapien
ggaacagggagtcttgcatcacggc

SEQ ID NO: 1853540 - DNA, 25 bp, Homo sapien
gcttcctctgcgctcttgggccaga

SEQ ID NO: 1853541 - DNA, 25 bp, Homo sapien
tattcaagccacgttgttcagcttc

SEQ ID NO: 1853542 - DNA, 25 bp, Homo sapien
cgttttctggaatagagcacagggc

SEQ ID NO: 1853543 - DNA, 25 bp, Homo sapien
gcctttgtcactcctggcagcgtca

SEQ ID NO: 1853544 - DNA, 25 bp, Homo sapien
tcaacatgaagttcccacctcggat

SEQ ID NO: 1853545 - DNA, 25 bp, Homo sapien
caccactaatttgcttagtacacct

SEQ ID NO: 1853546 - DNA, 25 bp, Homo sapien
tatacagaactcgatgaacaaggct

SEQ ID NO: 1853547 - DNA, 25 bp, Homo sapien
tctggtatgggttaaatatcccctc

SEQ ID NO: 1853548 - DNA, 25 bp, Homo sapien
tctgcagtagccaatcaacacgagg

SEQ ID NO: 1853549 - DNA, 25 bp, Homo sapien
caacacgaggcttgtaggctgccgt

SEQ ID NO: 1853550 - DNA, 25 bp, Homo sapien
tgctacacttaatcaccgggaaacg

SEQ ID NO: 1853551 - DNA, 25 bp, Homo sapien
tagcggcactgtaactgcgagggca

SEQ ID NO: 1853552 - DNA, 25 bp, Homo sapien
acagtgatgttcctgcgctcactgc

SEQ ID NO: 1853553 - DNA, 25 bp, Homo sapien
gccacgtcgtcacacagtgatgttc

SEQ ID NO: 1853554 - DNA, 25 bp, Homo sapien
gggccttctctgcagcggacggcca

SEQ ID NO: 1853555 - DNA, 25 bp, Homo sapien
ctgggccttctctgcagcggacggc

SEQ ID NO: 1853556 - DNA, 25 bp, Homo sapien
tcaatactccgtgtccttggaaatg

SEQ ID NO: 1853557 - DNA, 25 bp, Homo sapien
aatactccgtgtccttggaaatgcc

SEQ ID NO: 1853558 - DNA, 25 bp, Homo sapien
tccgtgtccttggaaatgcccatct

SEQ ID NO: 1853559 - DNA, 25 bp, Homo sapien
tactccgtgtccttggaaatgccca

SEQ ID NO: 1853560 - DNA, 25 bp, Homo sapien
gtaccatgatctttccctcaatcca

SEQ ID NO: 1853561 - DNA, 25 bp, Homo sapien
atccatcccaatgcaggatgattgg

SEQ ID NO: 1853562 - DNA, 25 bp, Homo sapien
tctggtaccatgatctttccctcaa

SEQ ID NO: 1853563 - DNA, 25 bp, Homo sapien
catcccaatgcaggatgattggttt

SEQ ID NO: 1853564 - DNA, 25 bp, Homo sapien
ctgcagtttcttaccagctgtgggc

SEQ ID NO: 1853565 - DNA, 25 bp, Homo sapien
tcttaccagctgtgggctcttcccc

SEQ ID NO: 1853566 - DNA, 25 bp, Homo sapien
ttaccagctgtgggctcttccccat

SEQ ID NO: 1853567 - DNA, 25 bp, Homo sapien
gcagtttcttaccagctgtgggctc

SEQ ID NO: 1853568 - DNA, 25 bp, Homo sapien
ctgggacacatgcttagggacggcc

SEQ ID NO: 1853569 - DNA, 25 bp, Homo sapien
tagcagacagggctaaggaggtccc

SEQ ID NO: 1853570 - DNA, 25 bp, Homo sapien
tgggaatgggctctcacaagggtat

SEQ ID NO: 1853571 - DNA, 25 bp, Homo sapien
gcttggaggcttctgacacgtgagt

SEQ ID NO: 1853572 - DNA, 25 bp, Homo sapien
gtgcacacttgctaaagcttctgta

SEQ ID NO: 1853573 - DNA, 25 bp, Homo sapien
agacttcgcttaagtccaggcaggg

SEQ ID NO: 1853574 - DNA, 25 bp, Homo sapien
cacgcaggggccctccgaagctgga

SEQ ID NO: 1853575 - DNA, 25 bp, Homo sapien
gaaggcaaagacttcgcttaagtcc

SEQ ID NO: 1853576 - DNA, 25 bp, Homo sapien
ccagcacgttcaggatgggaccatt

SEQ ID NO: 1853577 - DNA, 25 bp, Homo sapien
cacaaactggcccaacagaaccaca

SEQ ID NO: 1853578 - DNA, 25 bp, Homo sapien
cacgttcaggatgggaccattgccc

SEQ ID NO: 1853579 - DNA, 25 bp, Homo sapien
ggaccattgcccaagttcagggctg

SEQ ID NO: 1853580 - DNA, 25 bp, Homo sapien
gccacccctctgtgcaatccaccgg

SEQ ID NO: 1853581 - DNA, 25 bp, Homo sapien
tgatgcagcatgaagtcgaccacga

SEQ ID NO: 1853582 - DNA, 25 bp, Homo sapien
ctgtgcaatccaccgggcaatgcag

SEQ ID NO: 1853583 - DNA, 25 bp, Homo sapien
cctctgtgcaatccaccgggcaatg

SEQ ID NO: 1853584 - DNA, 25 bp, Homo sapien
gccagtcaggccatgctggtagacg

SEQ ID NO: 1853585 - DNA, 25 bp, Homo sapien
cagtcaggccatgctggtagacgtg

SEQ ID NO: 1853586 - DNA, 25 bp, Homo sapien
gtcaggccatgctggtagacgtgta

SEQ ID NO: 1853587 - DNA, 25 bp, Homo sapien
tcaggccatgctggtagacgtgtag

SEQ ID NO: 1853588 - DNA, 25 bp, Homo sapien
tagagtcctgatctaaccagtcaag

SEQ ID NO: 1853589 - DNA, 25 bp, Homo sapien
ggccgagaccacatgtgagttcaca

SEQ ID NO: 1853590 - DNA, 25 bp, Homo sapien
catcatgcaggcagggtatggtatg

SEQ ID NO: 1853591 - DNA, 25 bp, Homo sapien
tacaagtctgggaccccgaaagaga

SEQ ID NO: 1853592 - DNA, 25 bp, Homo sapien
actctgagtcatagcgtcggttgat

SEQ ID NO: 1853593 - DNA, 25 bp, Homo sapien
gtctggaactctgagtcatagcgtc

SEQ ID NO: 1853594 - DNA, 25 bp, Homo sapien
ggttgatgtcgtccccgatgatggc

SEQ ID NO: 1853595 - DNA, 25 bp, Homo sapien
tcatagcgtcggttgatgtcgtccc

SEQ ID NO: 1853596 - DNA, 25 bp, Homo sapien
taggttgcagaggtaaggtgaccat

SEQ ID NO: 1853597 - DNA, 25 bp, Homo sapien
ctgatggcggtaaaaaacgtagctg

SEQ ID NO: 1853598 - DNA, 25 bp, Homo sapien
gctgcggaaaacctcctctgtgtcc

SEQ ID NO: 1853599 - DNA, 25 bp, Homo sapien
aacgtagctgcggaaaacctcctct

SEQ ID NO: 1853600 - DNA, 25 bp, Homo sapien
tggcggtaaaaaacgtagctgcgga

SEQ ID NO: 1853601 - DNA, 25 bp, Homo sapien
gacctgggccttgccccgaagccat

SEQ ID NO: 1853602 - DNA, 25 bp, Homo sapien
ggcagggcaggctctccgcactcct

SEQ ID NO: 1853603 - DNA, 25 bp, Homo sapien
gaggacctgggccttgccccgaagc

SEQ ID NO: 1853604 - DNA, 25 bp, Homo sapien
agggcaggctctccgcactcctgcc

SEQ ID NO: 1853605 - DNA, 25 bp, Homo sapien
tcaggtctcagtggaggacgggatc

SEQ ID NO: 1853606 - DNA, 25 bp, Homo sapien
tttcaggtctcagtggaggacggga

SEQ ID NO: 1853607 - DNA, 25 bp, Homo sapien
caggtctcagtggaggacgggatca

SEQ ID NO: 1853608 - DNA, 25 bp, Homo sapien
ggtctcagtggaggacgggatcagc

SEQ ID NO: 1853609 - DNA, 25 bp, Homo sapien
atcaggtccccagccggggcggcag

SEQ ID NO: 1853610 - DNA, 25 bp, Homo sapien
ctccggcatccagggctgggccaag

SEQ ID NO: 1853611 - DNA, 25 bp, Homo sapien
agaggcaggcatggcaggatcaggt

SEQ ID NO: 1853612 - DNA, 25 bp, Homo sapien
agttctccggcatccagggctgggc

SEQ ID NO: 1853613 - DNA, 25 bp, Homo sapien
gatgtagcctttacttgtccctgtg

SEQ ID NO: 1853614 - DNA, 25 bp, Homo sapien
cattcccggcatctggatgtagcct

SEQ ID NO: 1853615 - DNA, 25 bp, Homo sapien
ggacccgcgagactccagtgatcat

SEQ ID NO: 1853616 - DNA, 25 bp, Homo sapien
ccagtttccaggaatgggcgtcagt

SEQ ID NO: 1853617 - DNA, 25 bp, Homo sapien
gactgtgctttgggattagcagcca

SEQ ID NO: 1853618 - DNA, 25 bp, Homo sapien
ctttgggattagcagccactttatc

SEQ ID NO: 1853619 - DNA, 25 bp, Homo sapien
ctgactgtgctttgggattagcagc

SEQ ID NO: 1853620 - DNA, 25 bp, Homo sapien
gctttgggattagcagccactttat

SEQ ID NO: 1853621 - DNA, 25 bp, Homo sapien
cattttacgactctgaggtaggtcc

SEQ ID NO: 1853622 - DNA, 25 bp, Homo sapien
gatccaggctcttgagttggttggt

SEQ ID NO: 1853623 - DNA, 25 bp, Homo sapien
ggtaggtcctattgccatctccagt

SEQ ID NO: 1853624 - DNA, 25 bp, Homo sapien
cagtgagaacttgcccgatgtcaca

SEQ ID NO: 1853625 - DNA, 25 bp, Homo sapien
agtgggtgaagacgcaggctctcat

SEQ ID NO: 1853626 - DNA, 25 bp, Homo sapien
ggtggtacctggctggctctacgtc

SEQ ID NO: 1853627 - DNA, 25 bp, Homo sapien
ccccagtgggtgaagacgcaggctc

SEQ ID NO: 1853628 - DNA, 25 bp, Homo sapien
gggtgaagacgcaggctctcatgct

SEQ ID NO: 1853629 - DNA, 25 bp, Homo sapien
agcggttgcacctccgggtccttgg

SEQ ID NO: 1853630 - DNA, 25 bp, Homo sapien
cctggagtcggagttgaagaagctt

SEQ ID NO: 1853631 - DNA, 25 bp, Homo sapien
caagagtcccgcctctggaagctag

SEQ ID NO: 1853632 - DNA, 25 bp, Homo sapien
ggctctcaggtttcctggagtcgga

SEQ ID NO: 1853633 - DNA, 25 bp, Homo sapien
atggccaggtacgcttggcccgtgc

SEQ ID NO: 1853634 - DNA, 25 bp, Homo sapien
ggccaggtacgcttggcccgtgcca

SEQ ID NO: 1853635 - DNA, 25 bp, Homo sapien
gccagagatcaccgtggtggaggtg

SEQ ID NO: 1853636 - DNA, 25 bp, Homo sapien
ccaggtacgcttggcccgtgccaga

SEQ ID NO: 1853637 - DNA, 25 bp, Homo sapien
tgggtcagaccgagtaccatcctgc

SEQ ID NO: 1853638 - DNA, 25 bp, Homo sapien
cataagtgaatttgtctagacaggc

SEQ ID NO: 1853639 - DNA, 25 bp, Homo sapien
cagtggacatttgccctgacagtct

SEQ ID NO: 1853640 - DNA, 25 bp, Homo sapien
cctgggtagggtaggcataatgcct

SEQ ID NO: 1853641 - DNA, 25 bp, Homo sapien
ttacccgtgaaaggggactgttgca

SEQ ID NO: 1853642 - DNA, 25 bp, Homo sapien
tcctgagatgacgagtgtgcagctg

SEQ ID NO: 1853643 - DNA, 25 bp, Homo sapien
cactttggagcagtgcctatcagaa

SEQ ID NO: 1853644 - DNA, 25 bp, Homo sapien
agctgtaagctgcaaaggcactccc

SEQ ID NO: 1853645 - DNA, 25 bp, Homo sapien
tcacatcgaagggtttgaatcttgg

SEQ ID NO: 1853646 - DNA, 25 bp, Homo sapien
tggggttgcctgagtagcgctgaga

SEQ ID NO: 1853647 - DNA, 25 bp, Homo sapien
tgtcttttcacatcgaagggtttga

SEQ ID NO: 1853648 - DNA, 25 bp, Homo sapien
cttttcacatcgaagggtttgaatc

SEQ ID NO: 1853649 - DNA, 25 bp, Homo sapien
tgcccccgagcctttggagaatgct

SEQ ID NO: 1853650 - DNA, 25 bp, Homo sapien
ccccttggggtcgtgtccagaagtg

SEQ ID NO: 1853651 - DNA, 25 bp, Homo sapien
tctccattttgtggcagggaggtgg

SEQ ID NO: 1853652 - DNA, 25 bp, Homo sapien
gagggactggctgcggtgctgactc

SEQ ID NO: 1853653 - DNA, 25 bp, Homo sapien
cactaaggggagcgccttggccagc

SEQ ID NO: 1853654 - DNA, 25 bp, Homo sapien
ggcttgtgggggactttgtctccat

SEQ ID NO: 1853655 - DNA, 25 bp, Homo sapien
cttgccccatatgaggggcttgtgg

SEQ ID NO: 1853656 - DNA, 25 bp, Homo sapien
gggactttgtctccatcatccgcag

SEQ ID NO: 1853657 - DNA, 25 bp, Homo sapien
ctccatcatccgcagggtggagcgg

SEQ ID NO: 1853658 - DNA, 25 bp, Homo sapien
ttggcaccgcagtgcctgtgcgcac

SEQ ID NO: 1853659 - DNA, 25 bp, Homo sapien
gagggcggaaccaagaggttggcac

SEQ ID NO: 1853660 - DNA, 25 bp, Homo sapien
aggttggcaccgcagtgcctgtgcg

SEQ ID NO: 1853661 - DNA, 25 bp, Homo sapien
cggccgaggtcacgcgtgggcgcct

SEQ ID NO: 1853662 - DNA, 25 bp, Homo sapien
agcaaacacgtctcggccacgactg

SEQ ID NO: 1853663 - DNA, 25 bp, Homo sapien
tgcgtacctgcgcaggcgctcgcat

SEQ ID NO: 1853664 - DNA, 25 bp, Homo sapien
caggctccagcggagcgtgcgtacc

SEQ ID NO: 1853665 - DNA, 25 bp, Homo sapien
cgaagtgcagcaaacacgtctcggc

SEQ ID NO: 1853666 - DNA, 25 bp, Homo sapien
ctgagaactgccgaaccgtgccaca

SEQ ID NO: 1853667 - DNA, 25 bp, Homo sapien
tgagaactgccgaaccgtgccacat

SEQ ID NO: 1853668 - DNA, 25 bp, Homo sapien
cctgggccggggtgaccactaccat

SEQ ID NO: 1853669 - DNA, 25 bp, Homo sapien
cgcggtctgctaattaacgggtgca

SEQ ID NO: 1853670 - DNA, 25 bp, Homo sapien
cacatagtaggctcgtggtgaggtc

SEQ ID NO: 1853671 - DNA, 25 bp, Homo sapien
catgtgattacaggataggcggccc

SEQ ID NO: 1853672 - DNA, 25 bp, Homo sapien
tcctgcaaccctagaacaagctgtc

SEQ ID NO: 1853673 - DNA, 25 bp, Homo sapien
gtttgataaacacaggtgcccgcca

SEQ ID NO: 1853674 - DNA, 25 bp, Homo sapien
ggtgcgcactcagcagggcacctgt

SEQ ID NO: 1853675 - DNA, 25 bp, Homo sapien
ggcacctgtggtccggctagtttga

SEQ ID NO: 1853676 - DNA, 25 bp, Homo sapien
gctctggtttcagcgcccggtgcgc

SEQ ID NO: 1853677 - DNA, 25 bp, Homo sapien
tgtacaatcagggactcacacagct

SEQ ID NO: 1853678 - DNA, 25 bp, Homo sapien
cagcccaggctattgtcacacaggc

SEQ ID NO: 1853679 - DNA, 25 bp, Homo sapien
gcatgagagggatctcagggccact

SEQ ID NO: 1853680 - DNA, 25 bp, Homo sapien
gaaaaattggacacccttcctgcag

SEQ ID NO: 1853681 - DNA, 25 bp, Homo sapien
tactggaaggccaagcagactaagc

SEQ ID NO: 1853682 - DNA, 25 bp, Homo sapien
tactcggcccagaagcagtactgga

SEQ ID NO: 1853683 - DNA, 25 bp, Homo sapien
tctaaaactcgtatgggcgtgacag

SEQ ID NO: 1853684 - DNA, 25 bp, Homo sapien
gaacctgggtacacaagcagcggtg

SEQ ID NO: 1853685 - DNA, 25 bp, Homo sapien
tgccgagggcaaaaacgtctacact

SEQ ID NO: 1853686 - DNA, 25 bp, Homo sapien
tttgagaacttcaccctggacatgg

SEQ ID NO: 1853687 - DNA, 25 bp, Homo sapien
gacacctgttgagtgaaggcacgaa

SEQ ID NO: 1853688 - DNA, 25 bp, Homo sapien
cttgctggaccgagagagtgtgaca

SEQ ID NO: 1853689 - DNA, 25 bp, Homo sapien
cgcccagcctcaaagtgttatcttt

SEQ ID NO: 1853690 - DNA, 25 bp, Homo sapien
ggtttttcaaccatgtaaatccatc

SEQ ID NO: 1853691 - DNA, 25 bp, Homo sapien
ttttaaaagggtcagcaacatggct

SEQ ID NO: 1853692 - DNA, 25 bp, Homo sapien
tggctatgagcccacggccttggtg

SEQ ID NO: 1853693 - DNA, 25 bp, Homo sapien
catggtggctagtgaaggctccgtc

SEQ ID NO: 1853694 - DNA, 25 bp, Homo sapien
tacaacttggtatgcgagacgctgc

SEQ ID NO: 1853695 - DNA, 25 bp, Homo sapien
tacatcaatgaggacaacgtgggcc

SEQ ID NO: 1853696 - DNA, 25 bp, Homo sapien
gctgctcaagaagaccaagtacggg

SEQ ID NO: 1853697 - DNA, 25 bp, Homo sapien
gacacatccctgacgagtagttttg

SEQ ID NO: 1853698 - DNA, 25 bp, Homo sapien
ttttcagaacaagaacctggactgg

SEQ ID NO: 1853699 - DNA, 25 bp, Homo sapien
gaagtcagcctgtctcggtggcaga

SEQ ID NO: 1853700 - DNA, 25 bp, Homo sapien
gacaagagggttgactgccagctca

SEQ ID NO: 1853701 - DNA, 25 bp, Homo sapien
ttaaccctagatgacggagcagcgg

SEQ ID NO: 1853702 - DNA, 25 bp, Homo sapien
tttctttagagcagcaagggcttcc

SEQ ID NO: 1853703 - DNA, 25 bp, Homo sapien
tcatcactggagactgcgactggga

SEQ ID NO: 1853704 - DNA, 25 bp, Homo sapien
tagacacagacgaggttaagaaccc

SEQ ID NO: 1853705 - DNA, 25 bp, Homo sapien
gatggcaatgtacaagactccacac

SEQ ID NO: 1853706 - DNA, 25 bp, Homo sapien
tgacgatggcaatgtacaagactcc

SEQ ID NO: 1853707 - DNA, 25 bp, Homo sapien
gttttattgacgatggcaatgtaca

SEQ ID NO: 1853708 - DNA, 25 bp, Homo sapien
gggcagttttattgacgatggcaat

SEQ ID NO: 1853709 - DNA, 25 bp, Homo sapien
aggtatgtgcacgaggtaaggcctg

SEQ ID NO: 1853710 - DNA, 25 bp, Homo sapien
gtatgtgcacgaggtaaggcctgag

SEQ ID NO: 1853711 - DNA, 25 bp, Homo sapien
tatgtgcacgaggtaaggcctgagc

SEQ ID NO: 1853712 - DNA, 25 bp, Homo sapien
ggtatgtgcacgaggtaaggcctga

SEQ ID NO: 1853713 - DNA, 25 bp, Homo sapien
cccttgggggcaaacttctcctgca

SEQ ID NO: 1853714 - DNA, 25 bp, Homo sapien
ccacatgcctttatctatttcctta

SEQ ID NO: 1853715 - DNA, 25 bp, Homo sapien
gcctttatctatttccttaagctct

SEQ ID NO: 1853716 - DNA, 25 bp, Homo sapien
tcaggccttatgatcctcctcagga

SEQ ID NO: 1853717 - DNA, 25 bp, Homo sapien
tgggctttcccgacacaagcatggc

SEQ ID NO: 1853718 - DNA, 25 bp, Homo sapien
tcaaacaggtaacagaagtgaccgc

SEQ ID NO: 1853719 - DNA, 25 bp, Homo sapien
cctgctccgtatgagggcaaagaaa

SEQ ID NO: 1853720 - DNA, 25 bp, Homo sapien
catggaggtaactcgcttggcacac

SEQ ID NO: 1853721 - DNA, 25 bp, Homo sapien
taagcttacgccacacaatttgcaa

SEQ ID NO: 1853722 - DNA, 25 bp, Homo sapien
cagcgcggaccaatggcgggactat

SEQ ID NO: 1853723 - DNA, 25 bp, Homo sapien
tttcctgaactaaactcgctgccag

SEQ ID NO: 1853724 - DNA, 25 bp, Homo sapien
catgtttccagtgtccaggtggaca

SEQ ID NO: 1853725 - DNA, 25 bp, Homo sapien
ctgggtcacataactcttaggcgga

SEQ ID NO: 1853726 - DNA, 25 bp, Homo sapien
tcttaggcggatatccccaaacacg

SEQ ID NO: 1853727 - DNA, 25 bp, Homo sapien
agaccacgtcccctgggtcacataa

SEQ ID NO: 1853728 - DNA, 25 bp, Homo sapien
atccccaaacacgtttattgaatgg

SEQ ID NO: 1853729 - DNA, 25 bp, Homo sapien
actcttccaacgacaggccactgaa

SEQ ID NO: 1853730 - DNA, 25 bp, Homo sapien
tcttccaacgacaggccactgaagc

SEQ ID NO: 1853731 - DNA, 25 bp, Homo sapien
aagctggtgtctctggggcgagggt

SEQ ID NO: 1853732 - DNA, 25 bp, Homo sapien
aggccactgaagctggtgtctctgg

SEQ ID NO: 1853733 - DNA, 25 bp, Homo sapien
cagcacacaagccctgctctctaac

SEQ ID NO: 1853734 - DNA, 25 bp, Homo sapien
agcacacaagccctgctctctaact

SEQ ID NO: 1853735 - DNA, 25 bp, Homo sapien
gaggggagagatcagcacacaagcc

SEQ ID NO: 1853736 - DNA, 25 bp, Homo sapien
gcacacaagccctgctctctaactg

SEQ ID NO: 1853737 - DNA, 25 bp, Homo sapien
gaaccagtacagtctccaggaggca

SEQ ID NO: 1853738 - DNA, 25 bp, Homo sapien
tataatgtacccgtgagtcctccct

SEQ ID NO: 1853739 - DNA, 25 bp, Homo sapien
ggaggcagctccaactataatgtac

SEQ ID NO: 1853740 - DNA, 25 bp, Homo sapien
caagacttggcctcgcaagaaccag

SEQ ID NO: 1853741 - DNA, 25 bp, Homo sapien
aatggagtcgcgctaagctctcgta

SEQ ID NO: 1853742 - DNA, 25 bp, Homo sapien
tgtagtagtttgaatggagtcgcgc

SEQ ID NO: 1853743 - DNA, 25 bp, Homo sapien
taagctctcgtacatctgatcacag

SEQ ID NO: 1853744 - DNA, 25 bp, Homo sapien
catctgatcacaggcctcaggctct

SEQ ID NO: 1853745 - DNA, 25 bp, Homo sapien
cctgatggccgcttatctggacctt

SEQ ID NO: 1853746 - DNA, 25 bp, Homo sapien
ttatctggaccttcccgtcctgcca

SEQ ID NO: 1853747 - DNA, 25 bp, Homo sapien
tcacctgatggccgcttatctggac

SEQ ID NO: 1853748 - DNA, 25 bp, Homo sapien
gatggccgcttatctggaccttccc

SEQ ID NO: 1853749 - DNA, 25 bp, Homo sapien
ttcctgctccaacttctctagcagt

SEQ ID NO: 1853750 - DNA, 25 bp, Homo sapien
ccttcctgctccaacttctctagca

SEQ ID NO: 1853751 - DNA, 25 bp, Homo sapien
ctgctccaacttctctagcagtgag

SEQ ID NO: 1853752 - DNA, 25 bp, Homo sapien
tcaactcaagttcccttcctgctcc

SEQ ID NO: 1853753 - DNA, 25 bp, Homo sapien
caggtgtggtataaggtgctgtcct

SEQ ID NO: 1853754 - DNA, 25 bp, Homo sapien
tcaagcaggtgtggtataaggtgct

SEQ ID NO: 1853755 - DNA, 25 bp, Homo sapien
agcaggtgtggtataaggtgctgtc

SEQ ID NO: 1853756 - DNA, 25 bp, Homo sapien
cctcaagcaggtgtggtataaggtg

SEQ ID NO: 1853757 - DNA, 25 bp, Homo sapien
gcgggtcacccttgcagagtgctgc

SEQ ID NO: 1853758 - DNA, 25 bp, Homo sapien
gggtcacccttgcagagtgctgctc

SEQ ID NO: 1853759 - DNA, 25 bp, Homo sapien
gggcgggtcacccttgcagagtgct

SEQ ID NO: 1853760 - DNA, 25 bp, Homo sapien
catggggggcgggtcacccttgcag

SEQ ID NO: 1853761 - DNA, 25 bp, Homo sapien
tcctgtgtgaaagagacagtctcct

SEQ ID NO: 1853762 - DNA, 25 bp, Homo sapien
cagaaggtgtctaactgaggctgta

SEQ ID NO: 1853763 - DNA, 25 bp, Homo sapien
gagacatgcccatttctagccaagt

SEQ ID NO: 1853764 - DNA, 25 bp, Homo sapien
ggtcaatgctgggttcctagccaca

SEQ ID NO: 1853765 - DNA, 25 bp, Homo sapien
ccccagagggcaatttgaggtggaa

SEQ ID NO: 1853766 - DNA, 25 bp, Homo sapien
taagaggagttacatgtgttcccgc

SEQ ID NO: 1853767 - DNA, 25 bp, Homo sapien
tgatttgccctttagttaacccagc

SEQ ID NO: 1853768 - DNA, 25 bp, Homo sapien
tctcagcgctgtaggaaacacgtgt

SEQ ID NO: 1853769 - DNA, 25 bp, Homo sapien
gcttgtctcttatggctacggaacc

SEQ ID NO: 1853770 - DNA, 25 bp, Homo sapien
taaatgagatcacgccggcaaaggt

SEQ ID NO: 1853771 - DNA, 25 bp, Homo sapien
gaacagtaatggctaccactcagct

SEQ ID NO: 1853772 - DNA, 25 bp, Homo sapien
acacagggagttccatttgctgccc

SEQ ID NO: 1853773 - DNA, 25 bp, Homo sapien
gctgtttccctagcaccgttccagg

SEQ ID NO: 1853774 - DNA, 25 bp, Homo sapien
atgtaaaacttcatgcgggcaggac

SEQ ID NO: 1853775 - DNA, 25 bp, Homo sapien
ggacttcacctgtttaacactgctg

SEQ ID NO: 1853776 - DNA, 25 bp, Homo sapien
gcttattgtgtcctgaactacaatg

SEQ ID NO: 1853777 - DNA, 25 bp, Homo sapien
tcacagagcttaagaaaacgccggt

SEQ ID NO: 1853778 - DNA, 25 bp, Homo sapien
ctgggtattctctccctcccgaaag

SEQ ID NO: 1853779 - DNA, 25 bp, Homo sapien
tgtgctacccgctgtcgcaggtaag

SEQ ID NO: 1853780 - DNA, 25 bp, Homo sapien
cggccccgtttggtctcgtccactg

SEQ ID NO: 1853781 - DNA, 25 bp, Homo sapien
ccgcgtgttcccgccttagcgggag

SEQ ID NO: 1853782 - DNA, 25 bp, Homo sapien
gcgtgttcccgccttagcgggagga

SEQ ID NO: 1853783 - DNA, 25 bp, Homo sapien
cgtgttcccgccttagcgggaggag

SEQ ID NO: 1853784 - DNA, 25 bp, Homo sapien
tgttcccgccttagcgggaggagtc

SEQ ID NO: 1853785 - DNA, 25 bp, Homo sapien
tctctgggtagcactgcacagctga

SEQ ID NO: 1853786 - DNA, 25 bp, Homo sapien
caatcaccccatgaggcggtgagcc

SEQ ID NO: 1853787 - DNA, 25 bp, Homo sapien
tgtggccactccaaaccgttacttg

SEQ ID NO: 1853788 - DNA, 25 bp, Homo sapien
caagtatatcaaccccttgtggcca

SEQ ID NO: 1853789 - DNA, 25 bp, Homo sapien
ctcaagggcatcgtaataggtttcc

SEQ ID NO: 1853790 - DNA, 25 bp, Homo sapien
ctccagtgtactccagaaggtgcca

SEQ ID NO: 1853791 - DNA, 25 bp, Homo sapien
ctcacagcttgtgcggactgcagca

SEQ ID NO: 1853792 - DNA, 25 bp, Homo sapien
tgcaagccgcgtctcatggtcagaa

SEQ ID NO: 1853793 - DNA, 25 bp, Homo sapien
gggtctggtccatcgtaggtggtgt

SEQ ID NO: 1853794 - DNA, 25 bp, Homo sapien
attccagtagcccttgtatgtggta

SEQ ID NO: 1853795 - DNA, 25 bp, Homo sapien
ggatatcctgcaggatcctgatgag

SEQ ID NO: 1853796 - DNA, 25 bp, Homo sapien
ggtccatcgtaggtggtgtgctcat

SEQ ID NO: 1853797 - DNA, 25 bp, Homo sapien
gggagagctaccgtgggctgcctgg

SEQ ID NO: 1853798 - DNA, 25 bp, Homo sapien
gaatagaagcggtatgaactctggc

SEQ ID NO: 1853799 - DNA, 25 bp, Homo sapien
caaccttggtgagaccaccgggaga

SEQ ID NO: 1853800 - DNA, 25 bp, Homo sapien
gcctcgtgaggatgcgggctgcctg

SEQ ID NO: 1853801 - DNA, 25 bp, Homo sapien
gaaagtacttcttatctgtttgata

SEQ ID NO: 1853802 - DNA, 25 bp, Homo sapien
ctgagagttttcttccatagtactt

SEQ ID NO: 1853803 - DNA, 25 bp, Homo sapien
catagtacttgtctttgcagagaaa

SEQ ID NO: 1853804 - DNA, 25 bp, Homo sapien
tggcttccattatgtaggaactgat

SEQ ID NO: 1853805 - DNA, 25 bp, Homo sapien
tccgatgcatcatcgccgtgctgcc

SEQ ID NO: 1853806 - DNA, 25 bp, Homo sapien
tgcatgccgcagatgcgcacaccca

SEQ ID NO: 1853807 - DNA, 25 bp, Homo sapien
tgctctgcgcacacttcctcatgtg

SEQ ID NO: 1853808 - DNA, 25 bp, Homo sapien
acttcctcatgtggcgggccttctt

SEQ ID NO: 1853809 - DNA, 25 bp, Homo sapien
cttcagatccaggacacagggatgc

SEQ ID NO: 1853810 - DNA, 25 bp, Homo sapien
gatccaggacacagggatgcgtgta

SEQ ID NO: 1853811 - DNA, 25 bp, Homo sapien
cagatccaggacacagggatgcgtg

SEQ ID NO: 1853812 - DNA, 25 bp, Homo sapien
tcagatccaggacacagggatgcgt

SEQ ID NO: 1853813 - DNA, 25 bp, Homo sapien
actacattttccagcaacaagaacc

SEQ ID NO: 1853814 - DNA, 25 bp, Homo sapien
gtgacactacattttccagcaacaa

SEQ ID NO: 1853815 - DNA, 25 bp, Homo sapien
ctgtgacactacattttccagcaac

SEQ ID NO: 1853816 - DNA, 25 bp, Homo sapien
gacactacattttccagcaacaaga

SEQ ID NO: 1853817 - DNA, 25 bp, Homo sapien
tccctctcactgtgtgggccccatg

SEQ ID NO: 1853818 - DNA, 25 bp, Homo sapien
tccactaagggaggagccacacttc

SEQ ID NO: 1853819 - DNA, 25 bp, Homo sapien
agggaggagccacacttccctctca

SEQ ID NO: 1853820 - DNA, 25 bp, Homo sapien
ggtgctccactaagggaggagccac

SEQ ID NO: 1853821 - DNA, 25 bp, Homo sapien
tcgccccgcccttgggaccacatgt

SEQ ID NO: 1853822 - DNA, 25 bp, Homo sapien
ttgggaccacatgtgagggggatgg

SEQ ID NO: 1853823 - DNA, 25 bp, Homo sapien
catgtgagggggatggcaaggatac

SEQ ID NO: 1853824 - DNA, 25 bp, Homo sapien
ctgtgtctctctgtcgccccgccct

SEQ ID NO: 1853825 - DNA, 25 bp, Homo sapien
attgcaggccccacgggttgaagct

SEQ ID NO: 1853826 - DNA, 25 bp, Homo sapien
ccgcttgttctctgggtactcggag

SEQ ID NO: 1853827 - DNA, 25 bp, Homo sapien
gcctggtggcattgcaggccccacg

SEQ ID NO: 1853828 - DNA, 25 bp, Homo sapien
tctctgggtactcggagcacaggcg

SEQ ID NO: 1853829 - DNA, 25 bp, Homo sapien
tcagcaccagccttaatagggagtg

SEQ ID NO: 1853830 - DNA, 25 bp, Homo sapien
agtagacaactctgcctgtgcatca

SEQ ID NO: 1853831 - DNA, 25 bp, Homo sapien
ggttattctagacagagcattcatc

SEQ ID NO: 1853832 - DNA, 25 bp, Homo sapien
gataaaatgcatcgtaatcctccct

SEQ ID NO: 1853833 - DNA, 25 bp, Homo sapien
cttgggtgagcgtgccagctgggca

SEQ ID NO: 1853834 - DNA, 25 bp, Homo sapien
ccttgggtgagcgtgccagctgggc

SEQ ID NO: 1853835 - DNA, 25 bp, Homo sapien
ttgggtgagcgtgccagctgggcat

SEQ ID NO: 1853836 - DNA, 25 bp, Homo sapien
caagggtgcagtcgctgccattgct

SEQ ID NO: 1853837 - DNA, 25 bp, Homo sapien
ggctctccttcactgggttggcaac

SEQ ID NO: 1853838 - DNA, 25 bp, Homo sapien
tgctggagcgtctgccatatggcca

SEQ ID NO: 1853839 - DNA, 25 bp, Homo sapien
tctttccagaggtgcactgtgacgg

SEQ ID NO: 1853840 - DNA, 25 bp, Homo sapien
tcatacttcatcacgctcatgtgcc

SEQ ID NO: 1853841 - DNA, 25 bp, Homo sapien
ggcttgcacaccgtatgctcgtcat

SEQ ID NO: 1853842 - DNA, 25 bp, Homo sapien
ggattcatagaacctctgctcccgg

SEQ ID NO: 1853843 - DNA, 25 bp, Homo sapien
gaaccgcttcatggccagcggcagg

SEQ ID NO: 1853844 - DNA, 25 bp, Homo sapien
tggtggtggggggtccctgcacagt

SEQ ID NO: 1853845 - DNA, 25 bp, Homo sapien
tggtggggggtccctgcacagtctg

SEQ ID NO: 1853846 - DNA, 25 bp, Homo sapien
gtggtggggggtccctgcacagtct

SEQ ID NO: 1853847 - DNA, 25 bp, Homo sapien
ggtggtggtggggggtccctgcaca

SEQ ID NO: 1853848 - DNA, 25 bp, Homo sapien
cctcctgtctgtgggttctcagcgg

SEQ ID NO: 1853849 - DNA, 25 bp, Homo sapien
cttggcctttattgctgtcatagcg

SEQ ID NO: 1853850 - DNA, 25 bp, Homo sapien
tattgctgtcatagcgcagttgtcc

SEQ ID NO: 1853851 - DNA, 25 bp, Homo sapien
acacggggctgtcagcggtcctcaa

SEQ ID NO: 1853852 - DNA, 25 bp, Homo sapien
ctgctccagtgtggcacagaggtga

SEQ ID NO: 1853853 - DNA, 25 bp, Homo sapien
agaggtgagccccatctggaagctg

SEQ ID NO: 1853854 - DNA, 25 bp, Homo sapien
ctaggcattgatccagctctgctcc

SEQ ID NO: 1853855 - DNA, 25 bp, Homo sapien
taggcattgatccagctctgctcca

SEQ ID NO: 1853856 - DNA, 25 bp, Homo sapien
agcgcagtgtgagcagggaagaccc

SEQ ID NO: 1853857 - DNA, 25 bp, Homo sapien
ctcctcagagagcgcagtgtgagca

SEQ ID NO: 1853858 - DNA, 25 bp, Homo sapien
gattggcagcgattgtctaccaggt

SEQ ID NO: 1853859 - DNA, 25 bp, Homo sapien
cctggacttggacggattggcagcg

SEQ ID NO: 1853860 - DNA, 25 bp, Homo sapien
gagccagaggtttggtacaagtacc

SEQ ID NO: 1853861 - DNA, 25 bp, Homo sapien
gatgcccgagggagcattttttaat

SEQ ID NO: 1853862 - DNA, 25 bp, Homo sapien
ccattcaatgtctttgtgatgcccg

SEQ ID NO: 1853863 - DNA, 25 bp, Homo sapien
tcacaggtctctcggagccagaggt

SEQ ID NO: 1853864 - DNA, 25 bp, Homo sapien
tggcacctccgtggggcagactcct

SEQ ID NO: 1853865 - DNA, 25 bp, Homo sapien
ggcacctccgtggggcagactcctg

SEQ ID NO: 1853866 - DNA, 25 bp, Homo sapien
gcacctccgtggggcagactcctgg

SEQ ID NO: 1853867 - DNA, 25 bp, Homo sapien
aggcatcaggcaatggcccgtccca

SEQ ID NO: 1853868 - DNA, 25 bp, Homo sapien
gagtgtatggaaggcagggcccagg

SEQ ID NO: 1853869 - DNA, 25 bp, Homo sapien
cccgtcccagcgtggagcatttgct

SEQ ID NO: 1853870 - DNA, 25 bp, Homo sapien
tcagtgcccaccatgtacaggcatc

SEQ ID NO: 1853871 - DNA, 25 bp, Homo sapien
agtgggggacagtttcatactctgc

SEQ ID NO: 1853872 - DNA, 25 bp, Homo sapien
caggctgcagggatgtatcaggctc

SEQ ID NO: 1853873 - DNA, 25 bp, Homo sapien
ccaagagtcagatgcagcaataagc

SEQ ID NO: 1853874 - DNA, 25 bp, Homo sapien
gcaataagcccctcatcttctgctg

SEQ ID NO: 1853875 - DNA, 25 bp, Homo sapien
actgacctggttgggccctgctggc

SEQ ID NO: 1853876 - DNA, 25 bp, Homo sapien
ggcatgggccccggctctcctggga

SEQ ID NO: 1853877 - DNA, 25 bp, Homo sapien
gcagcacccaaacgtgcagcctcat

SEQ ID NO: 1853878 - DNA, 25 bp, Homo sapien
actgactgacctggttgggccctgc

SEQ ID NO: 1853879 - DNA, 25 bp, Homo sapien
ctgtgtgactctagtgacgaggata

SEQ ID NO: 1853880 - DNA, 25 bp, Homo sapien
gactctagtgacgaggataacaggc

SEQ ID NO: 1853881 - DNA, 25 bp, Homo sapien
caactgtgtgactctagtgacgagg

SEQ ID NO: 1853882 - DNA, 25 bp, Homo sapien
tgacgaggataacaggctggtgctc

SEQ ID NO: 1853883 - DNA, 25 bp, Homo sapien
aaaggtgaccacaacagcccacaag

SEQ ID NO: 1853884 - DNA, 25 bp, Homo sapien
ggctgccttcttggggtgactgacc

SEQ ID NO: 1853885 - DNA, 25 bp, Homo sapien
gaacgggaaaggtgaccacaacagc

SEQ ID NO: 1853886 - DNA, 25 bp, Homo sapien
tgtgaacgggaaaggtgaccacaac

SEQ ID NO: 1853887 - DNA, 25 bp, Homo sapien
attatgagaacatggcctcaccacg

SEQ ID NO: 1853888 - DNA, 25 bp, Homo sapien
acggggccagcgctcagattcctgc

SEQ ID NO: 1853889 - DNA, 25 bp, Homo sapien
cagtttcagccctgatactgaagcc

SEQ ID NO: 1853890 - DNA, 25 bp, Homo sapien
catccagacatcagaggaaatgaga

SEQ ID NO: 1853891 - DNA, 25 bp, Homo sapien
ctgtggaatttcctgtttgctcccc

SEQ ID NO: 1853892 - DNA, 25 bp, Homo sapien
aaaataccagtaagactagagaggg

SEQ ID NO: 1853893 - DNA, 25 bp, Homo sapien
cctgcctgccgcagatgaggacaca

SEQ ID NO: 1853894 - DNA, 25 bp, Homo sapien
tggttaatgtttctggaggcagctg

SEQ ID NO: 1853895 - DNA, 25 bp, Homo sapien
gaatcggcgttctggctgcaggcct

SEQ ID NO: 1853896 - DNA, 25 bp, Homo sapien
gaaacgccggctgcgctgaagttct

SEQ ID NO: 1853897 - DNA, 25 bp, Homo sapien
gaggcttctcgcacttaataaggcc

SEQ ID NO: 1853898 - DNA, 25 bp, Homo sapien
tggtcacagtaaagcaaggcgatct

SEQ ID NO: 1853899 - DNA, 25 bp, Homo sapien
agaagcaacactgaggcgggcccgc

SEQ ID NO: 1853900 - DNA, 25 bp, Homo sapien
cagacctttggaatcgtgtcaggac

SEQ ID NO: 1853901 - DNA, 25 bp, Homo sapien
aagtgtgaattcagcaccgcaggcc

SEQ ID NO: 1853902 - DNA, 25 bp, Homo sapien
gaagcccacattttcctgcgagccg

SEQ ID NO: 1853903 - DNA, 25 bp, Homo sapien
cagagtctgggctatcaccctggct

SEQ ID NO: 1853904 - DNA, 25 bp, Homo sapien
gaagagggcttagtccatctccaca

SEQ ID NO: 1853905 - DNA, 25 bp, Homo sapien
gatccgggattcgttggaggccagg

SEQ ID NO: 1853906 - DNA, 25 bp, Homo sapien
agctcggtcccagacacgcttcatg

SEQ ID NO: 1853907 - DNA, 25 bp, Homo sapien
gaggccaggaactccacagctcggt

SEQ ID NO: 1853908 - DNA, 25 bp, Homo sapien
aacgcggtgggactccgtctggatc

SEQ ID NO: 1853909 - DNA, 25 bp, Homo sapien
ccgaggtgagccagcctgtggatgc

SEQ ID NO: 1853910 - DNA, 25 bp, Homo sapien
ctgtggatgcccctcctacaaaggg

SEQ ID NO: 1853911 - DNA, 25 bp, Homo sapien
aggctctggcatggaatttatgtaa

SEQ ID NO: 1853912 - DNA, 25 bp, Homo sapien
ggatgcccctcctacaaagggcaca

SEQ ID NO: 1853913 - DNA, 25 bp, Homo sapien
tcattgtcacgatactcctgccagg

SEQ ID NO: 1853914 - DNA, 25 bp, Homo sapien
tgggagtttgagtaccccaagtcac

SEQ ID NO: 1853915 - DNA, 25 bp, Homo sapien
gaatgatagtctcttcgtcacagcc

SEQ ID NO: 1853916 - DNA, 25 bp, Homo sapien
gcacaggttgactgagatgctcatt

SEQ ID NO: 1853917 - DNA, 25 bp, Homo sapien
taaagtggactgctaacggctctat

SEQ ID NO: 1853918 - DNA, 25 bp, Homo sapien
gattctggtcaataaagcctcaagg

SEQ ID NO: 1853919 - DNA, 25 bp, Homo sapien
caagtgtctgctagggagggaccac

SEQ ID NO: 1853920 - DNA, 25 bp, Homo sapien
cacggaaatgccactagccatggga

SEQ ID NO: 1853921 - DNA, 25 bp, Homo sapien
gcgcacgtgcaggatgcctacatat

SEQ ID NO: 1853922 - DNA, 25 bp, Homo sapien
agggatcaagctgtcgcgcacgtgc

SEQ ID NO: 1853923 - DNA, 25 bp, Homo sapien
ggatgcctacatatggatagcgctc

SEQ ID NO: 1853924 - DNA, 25 bp, Homo sapien
tgctcccagtccacgtaatggtcct

SEQ ID NO: 1853925 - DNA, 25 bp, Homo sapien
taggagaattaggagcccccacaaa

SEQ ID NO: 1853926 - DNA, 25 bp, Homo sapien
tcttctaactttcgccaccgatatt

SEQ ID NO: 1853927 - DNA, 25 bp, Homo sapien
catctcatacatggcttgttcctcc

SEQ ID NO: 1853928 - DNA, 25 bp, Homo sapien
ttcaccatctcatacatggcttgtt

SEQ ID NO: 1853929 - DNA, 25 bp, Homo sapien
aacactgttaatccctcacacttca

SEQ ID NO: 1853930 - DNA, 25 bp, Homo sapien
aacaaaacactgttaatccctcaca

SEQ ID NO: 1853931 - DNA, 25 bp, Homo sapien
ctgtgagggaacaaaacactgttaa

SEQ ID NO: 1853932 - DNA, 25 bp, Homo sapien
caaaacactgttaatccctcacact

SEQ ID NO: 1853933 - DNA, 25 bp, Homo sapien
tctgctcaaaggcggcccccgatgt

SEQ ID NO: 1853934 - DNA, 25 bp, Homo sapien
caggggataagactggtgccctcct

SEQ ID NO: 1853935 - DNA, 25 bp, Homo sapien
cccgatgtcaggggataagactggt

SEQ ID NO: 1853936 - DNA, 25 bp, Homo sapien
tcaaaggcggcccccgatgtcaggg

SEQ ID NO: 1853937 - DNA, 25 bp, Homo sapien
agtaaaagtaggccaagcccctgct

SEQ ID NO: 1853938 - DNA, 25 bp, Homo sapien
gtagctctccaggagatgtttatat

SEQ ID NO: 1853939 - DNA, 25 bp, Homo sapien
gtaaaagtaggccaagcccctgctg

SEQ ID NO: 1853940 - DNA, 25 bp, Homo sapien
taaaagtaggccaagcccctgctgt

SEQ ID NO: 1853941 - DNA, 25 bp, Homo sapien
tgtccacagtcgtcaccaattcaga

SEQ ID NO: 1853942 - DNA, 25 bp, Homo sapien
aggcggcagccaacacccatgcggg

SEQ ID NO: 1853943 - DNA, 25 bp, Homo sapien
aagatgagcacgttggtgacagcag

SEQ ID NO: 1853944 - DNA, 25 bp, Homo sapien
aggcagaccaccttgtccacagtcg

SEQ ID NO: 1853945 - DNA, 25 bp, Homo sapien
taaagctttaaagacggcagcaggc

SEQ ID NO: 1853946 - DNA, 25 bp, Homo sapien
gaataggcttggtatcctggctgca

SEQ ID NO: 1853947 - DNA, 25 bp, Homo sapien
tgacccagggcgagaatatcatgct

SEQ ID NO: 1853948 - DNA, 25 bp, Homo sapien
gaaaattgctcagctactcagggca

SEQ ID NO: 1853949 - DNA, 25 bp, Homo sapien
cggcttcaaacttggcggaggagct

SEQ ID NO: 1853950 - DNA, 25 bp, Homo sapien
tactgctcagtatccaggtcagtgc

SEQ ID NO: 1853951 - DNA, 25 bp, Homo sapien
tatccaggtcagtgcggcttcaaac

SEQ ID NO: 1853952 - DNA, 25 bp, Homo sapien
cagatgcccacgtccttgttactgc

SEQ ID NO: 1853953 - DNA, 25 bp, Homo sapien
gattctctggatttccacactcaaa

SEQ ID NO: 1853954 - DNA, 25 bp, Homo sapien
agattctctggatttccacactcaa

SEQ ID NO: 1853955 - DNA, 25 bp, Homo sapien
tatatattcttgggcttccataaca

SEQ ID NO: 1853956 - DNA, 25 bp, Homo sapien
ttccataacaggaatgcatttgctt

SEQ ID NO: 1853957 - DNA, 25 bp, Homo sapien
tcagacagatagcttcggaaggtac

SEQ ID NO: 1853958 - DNA, 25 bp, Homo sapien
tggaggcctgctcccataggatgga

SEQ ID NO: 1853959 - DNA, 25 bp, Homo sapien
ttctgactcatgacacaggcaggcg

SEQ ID NO: 1853960 - DNA, 25 bp, Homo sapien
tatttaacacgtgtgcgtggcctga

SEQ ID NO: 1853961 - DNA, 25 bp, Homo sapien
ttggatggccaggaaattgtagagt

SEQ ID NO: 1853962 - DNA, 25 bp, Homo sapien
gctgccttctgcttggcctgacaga

SEQ ID NO: 1853963 - DNA, 25 bp, Homo sapien
gtagagttcatgcagcagctccagc

SEQ ID NO: 1853964 - DNA, 25 bp, Homo sapien
aaattgtagagttcatgcagcagct

SEQ ID NO: 1853965 - DNA, 25 bp, Homo sapien
taagacagtcaatgcagggctggcc

SEQ ID NO: 1853966 - DNA, 25 bp, Homo sapien
gcccctgggctactagagatgttaa

SEQ ID NO: 1853967 - DNA, 25 bp, Homo sapien
gactactaagtcatgccctctggca

SEQ ID NO: 1853968 - DNA, 25 bp, Homo sapien
taaaagccgttatctgcaccaggat

SEQ ID NO: 1853969 - DNA, 25 bp, Homo sapien
tcacagtccactggcaataacttca

SEQ ID NO: 1853970 - DNA, 25 bp, Homo sapien
tctcacagtccactggcaataactt

SEQ ID NO: 1853971 - DNA, 25 bp, Homo sapien
tctctcacagtccactggcaataac

SEQ ID NO: 1853972 - DNA, 25 bp, Homo sapien
ttctctcacagtccactggcaataa

SEQ ID NO: 1853973 - DNA, 25 bp, Homo sapien
taatttctctagcaggtcgacaaac

SEQ ID NO: 1853974 - DNA, 25 bp, Homo sapien
gttatagtaccatgacactcccagg

SEQ ID NO: 1853975 - DNA, 25 bp, Homo sapien
gagtctgttaatacccttgcccaca

SEQ ID NO: 1853976 - DNA, 25 bp, Homo sapien
taaaagttggtgaactacagtggcc

SEQ ID NO: 1853977 - DNA, 25 bp, Homo sapien
atgcccaggaagacgagcagtagcc

SEQ ID NO: 1853978 - DNA, 25 bp, Homo sapien
caggaagacgagcagtagccctagg

SEQ ID NO: 1853979 - DNA, 25 bp, Homo sapien
gatgcccaggaagacgagcagtagc

SEQ ID NO: 1853980 - DNA, 25 bp, Homo sapien
gcccaggaagacgagcagtagccct

SEQ ID NO: 1853981 - DNA, 25 bp, Homo sapien
cagcagggcccgctcgagtcgcccg

SEQ ID NO: 1853982 - DNA, 25 bp, Homo sapien
agccggcgccccacctcaggccggg

SEQ ID NO: 1853983 - DNA, 25 bp, Homo sapien
cagccggcgccccacctcaggccgg

SEQ ID NO: 1853984 - DNA, 25 bp, Homo sapien
ggcccgctcgagtcgcccgcaggcc

SEQ ID NO: 1853985 - DNA, 25 bp, Homo sapien
ggagctgccccggaccgaggcgcgg

SEQ ID NO: 1853986 - DNA, 25 bp, Homo sapien
ccgggccctgcgtggccctgtcggg

SEQ ID NO: 1853987 - DNA, 25 bp, Homo sapien
tgcgtggccctgtcgggcgtccggg

SEQ ID NO: 1853988 - DNA, 25 bp, Homo sapien
tgtcgggcgtccgggcgtcctcgtc

SEQ ID NO: 1853989 - DNA, 25 bp, Homo sapien
ggcgggcaggataggcgaggccgcg

SEQ ID NO: 1853990 - DNA, 25 bp, Homo sapien
gccgggcgggcaggataggcgaggc

SEQ ID NO: 1853991 - DNA, 25 bp, Homo sapien
cgccgggcgggcaggataggcgagg

SEQ ID NO: 1853992 - DNA, 25 bp, Homo sapien
ccggatatcaccgtaggccccaggg

SEQ ID NO: 1853993 - DNA, 25 bp, Homo sapien
gagggccggatatcaccgtaggccc

SEQ ID NO: 1853994 - DNA, 25 bp, Homo sapien
caggaagccgcggagggccggatat

SEQ ID NO: 1853995 - DNA, 25 bp, Homo sapien
cgcggagggccggatatcaccgtag

SEQ ID NO: 1853996 - DNA, 25 bp, Homo sapien
cgcgcagcggcgcatcctcgcgtaa

SEQ ID NO: 1853997 - DNA, 25 bp, Homo sapien
gcgcagcggcgcatcctcgcgtaac

SEQ ID NO: 1853998 - DNA, 25 bp, Homo sapien
tagacatcccgggtggtgtcggtga

SEQ ID NO: 1853999 - DNA, 25 bp, Homo sapien
tggtgtcggtgatgggtcctggctg

SEQ ID NO: 1854000 - DNA, 25 bp, Homo sapien
cagcttgttgcggtagacatcccgg

SEQ ID NO: 1854001 - DNA, 25 bp, Homo sapien
gcctcttcccgtaaccgctcctcgc

SEQ ID NO: 1854002 - DNA, 25 bp, Homo sapien
ggggccacgcgccatgatgggaagg

SEQ ID NO: 1854003 - DNA, 25 bp, Homo sapien
aagaattatttgagccaattgtgag

SEQ ID NO: 1854004 - DNA, 25 bp, Homo sapien
caattgtgagaaatcgaacagtggc

SEQ ID NO: 1854005 - DNA, 25 bp, Homo sapien
gctgggtccctgttgcggctcatta

SEQ ID NO: 1854006 - DNA, 25 bp, Homo sapien
aaacgagagaagaaaggagccgaca

SEQ ID NO: 1854007 - DNA, 25 bp, Homo sapien
gagggtgccttgttcagcagtggag

SEQ ID NO: 1854008 - DNA, 25 bp, Homo sapien
ggtgccttgttcagcagtggagttc

SEQ ID NO: 1854009 - DNA, 25 bp, Homo sapien
tgagggtgccttgttcagcagtgga

SEQ ID NO: 1854010 - DNA, 25 bp, Homo sapien
aatgagggtgccttgttcagcagtg

SEQ ID NO: 1854011 - DNA, 25 bp, Homo sapien
ggaaatgcagaatggacactgtatc

SEQ ID NO: 1854012 - DNA, 25 bp, Homo sapien
ctgggtggaaatgcagaatggacac

SEQ ID NO: 1854013 - DNA, 25 bp, Homo sapien
aatggacactgtatctaattgctgg

SEQ ID NO: 1854014 - DNA, 25 bp, Homo sapien
cagaatggacactgtatctaattgc

SEQ ID NO: 1854015 - DNA, 25 bp, Homo sapien
agctggcaggctctgtaaattccca

SEQ ID NO: 1854016 - DNA, 25 bp, Homo sapien
ttatttgctggaggggaatttgctt

SEQ ID NO: 1854017 - DNA, 25 bp, Homo sapien
tatttgctggaggggaatttgcttt

SEQ ID NO: 1854018 - DNA, 25 bp, Homo sapien
gctctgtaaattcccagggcctcac

SEQ ID NO: 1854019 - DNA, 25 bp, Homo sapien
ggcaggaggggcctcccaaatctgt

SEQ ID NO: 1854020 - DNA, 25 bp, Homo sapien
ttgggcaggaggggcctcccaaatc

SEQ ID NO: 1854021 - DNA, 25 bp, Homo sapien
aggaggggcctcccaaatctgtcca

SEQ ID NO: 1854022 - DNA, 25 bp, Homo sapien
atctgtccaccttctccccagcgtg

SEQ ID NO: 1854023 - DNA, 25 bp, Homo sapien
gagaaaagcagaggtttgcgctcag

SEQ ID NO: 1854024 - DNA, 25 bp, Homo sapien
catcaggtctgcttatgaaactgcc

SEQ ID NO: 1854025 - DNA, 25 bp, Homo sapien
gaggtttgcgctcagtaccatcatc

SEQ ID NO: 1854026 - DNA, 25 bp, Homo sapien
tatgaaactgccctctaaaacttgc

SEQ ID NO: 1854027 - DNA, 25 bp, Homo sapien
ccaccctgtggtgatgttgtggaag

SEQ ID NO: 1854028 - DNA, 25 bp, Homo sapien
cagccaccctgtggtgatgttgtgg

SEQ ID NO: 1854029 - DNA, 25 bp, Homo sapien
gcagccaccctgtggtgatgttgtg

SEQ ID NO: 1854030 - DNA, 25 bp, Homo sapien
gccaccctgtggtgatgttgtggaa

SEQ ID NO: 1854031 - DNA, 25 bp, Homo sapien
gctggggaagcatctcactcagcag

SEQ ID NO: 1854032 - DNA, 25 bp, Homo sapien
tgagtcctgctgaggggatcaatac

SEQ ID NO: 1854033 - DNA, 25 bp, Homo sapien
ggatcaatacaccttccataacggg

SEQ ID NO: 1854034 - DNA, 25 bp, Homo sapien
tgctgaggggatcaatacaccttcc

SEQ ID NO: 1854035 - DNA, 25 bp, Homo sapien
gaggggatcaatacaccttccataa

SEQ ID NO: 1854036 - DNA, 25 bp, Homo sapien
atgggctccgcagggtctacaggac

SEQ ID NO: 1854037 - DNA, 25 bp, Homo sapien
ccccagacctctgccatacactcag

SEQ ID NO: 1854038 - DNA, 25 bp, Homo sapien
tccgcagggtctacaggaccttcct

SEQ ID NO: 1854039 - DNA, 25 bp, Homo sapien
cttcttccctgatgggctccgcagg

SEQ ID NO: 1854040 - DNA, 25 bp, Homo sapien
tctggagttcgccataggtgaagat

SEQ ID NO: 1854041 - DNA, 25 bp, Homo sapien
cagccacagccttacgggataccat

SEQ ID NO: 1854042 - DNA, 25 bp, Homo sapien
tcctctggagttcgccataggtgaa

SEQ ID NO: 1854043 - DNA, 25 bp, Homo sapien
tgcatcctctggagttcgccatagg

SEQ ID NO: 1854044 - DNA, 25 bp, Homo sapien
gtctggaggagtctctctgcttgtc

SEQ ID NO: 1854045 - DNA, 25 bp, Homo sapien
tgggtctggaggagtctctctgctt

SEQ ID NO: 1854046 - DNA, 25 bp, Homo sapien
ggcgtgcacgtggtctgagtgggtc

SEQ ID NO: 1854047 - DNA, 25 bp, Homo sapien
tctgcttgtcttctggtgtccggct

SEQ ID NO: 1854048 - DNA, 25 bp, Homo sapien
ttgtgccttggtcctcgttgggcat

SEQ ID NO: 1854049 - DNA, 25 bp, Homo sapien
tgctgggctgatgacttttggattt

SEQ ID NO: 1854050 - DNA, 25 bp, Homo sapien
caaatggaaacagcgggccacatgc

SEQ ID NO: 1854051 - DNA, 25 bp, Homo sapien
gcaaatggaaacagcgggccacatg

SEQ ID NO: 1854052 - DNA, 25 bp, Homo sapien
aatggaaacagcgggccacatgcag

SEQ ID NO: 1854053 - DNA, 25 bp, Homo sapien
cattccttatccgatgtcccttcaa

SEQ ID NO: 1854054 - DNA, 25 bp, Homo sapien
tgggcccgccggtgacattccttat

SEQ ID NO: 1854055 - DNA, 25 bp, Homo sapien
tcttgcctaaattgcctttccatgc

SEQ ID NO: 1854056 - DNA, 25 bp, Homo sapien
tgaggatggttgattaccaggcaac

SEQ ID NO: 1854057 - DNA, 25 bp, Homo sapien
tgtgtgcttcactcggatccctcct

SEQ ID NO: 1854058 - DNA, 25 bp, Homo sapien
cctgtgtgcttcactcggatccctc

SEQ ID NO: 1854059 - DNA, 25 bp, Homo sapien
ctgtgtgcttcactcggatccctcc

SEQ ID NO: 1854060 - DNA, 25 bp, Homo sapien
tccaaatctagagcctcctgtcatc

SEQ ID NO: 1854061 - DNA, 25 bp, Homo sapien
ggggtgttccacagggggcacacat

SEQ ID NO: 1854062 - DNA, 25 bp, Homo sapien
catcacttctgagccccccatttct

SEQ ID NO: 1854063 - DNA, 25 bp, Homo sapien
atctagagcctcctgtcatcacttc

SEQ ID NO: 1854064 - DNA, 25 bp, Homo sapien
ggaccagaccaagcactgtgcacgt

SEQ ID NO: 1854065 - DNA, 25 bp, Homo sapien
actttcatctactgatgactgggca

SEQ ID NO: 1854066 - DNA, 25 bp, Homo sapien
gaccctgaaatgtgttgaagctgga

SEQ ID NO: 1854067 - DNA, 25 bp, Homo sapien
gaggctggcttcgtggaccctgaaa

SEQ ID NO: 1854068 - DNA, 25 bp, Homo sapien
tttgacagttctcgagccagatggg

SEQ ID NO: 1854069 - DNA, 25 bp, Homo sapien
tctgcaggccgtgttcagctggcgt

SEQ ID NO: 1854070 - DNA, 25 bp, Homo sapien
tctttgacagttctcgagccagatg

SEQ ID NO: 1854071 - DNA, 25 bp, Homo sapien
tgggcgtgccggctgacagcagcca

SEQ ID NO: 1854072 - DNA, 25 bp, Homo sapien
ctggggaatgaacagcagtggcctc

SEQ ID NO: 1854073 - DNA, 25 bp, Homo sapien
atgaacagcagtggcctcaggctcc

SEQ ID NO: 1854074 - DNA, 25 bp, Homo sapien
ggaatgaacagcagtggcctcaggc

SEQ ID NO: 1854075 - DNA, 25 bp, Homo sapien
tggggaatgaacagcagtggcctca

SEQ ID NO: 1854076 - DNA, 25 bp, Homo sapien
taggtgcttggcgtgccacagctgc

SEQ ID NO: 1854077 - DNA, 25 bp, Homo sapien
ttctcgctccagaacccagctggtg

SEQ ID NO: 1854078 - DNA, 25 bp, Homo sapien
tgtgtgttctcgctccagaacccag

SEQ ID NO: 1854079 - DNA, 25 bp, Homo sapien
ctggtgatggtagcattgtaggtgc

SEQ ID NO: 1854080 - DNA, 25 bp, Homo sapien
tgactgcgccaagctgagctcctct

SEQ ID NO: 1854081 - DNA, 25 bp, Homo sapien
tcctcgtggttatccttggtctctt

SEQ ID NO: 1854082 - DNA, 25 bp, Homo sapien
tgaatggctgactgcgccaagctga

SEQ ID NO: 1854083 - DNA, 25 bp, Homo sapien
gagctcctcttcctcgtggttatcc

SEQ ID NO: 1854084 - DNA, 25 bp, Homo sapien
cagggatgccgatagagcccaggca

SEQ ID NO: 1854085 - DNA, 25 bp, Homo sapien
caggggcagggatgccgatagagcc

SEQ ID NO: 1854086 - DNA, 25 bp, Homo sapien
gatgccgatagagcccaggcaggtg

SEQ ID NO: 1854087 - DNA, 25 bp, Homo sapien
ggcagggatgccgatagagcccagg

SEQ ID NO: 1854088 - DNA, 25 bp, Homo sapien
ggccccaagcatggcggggggcagt

SEQ ID NO: 1854089 - DNA, 25 bp, Homo sapien
ctgggggccccaagcatggcggggg

SEQ ID NO: 1854090 - DNA, 25 bp, Homo sapien
ggggccccaagcatggcggggggca

SEQ ID NO: 1854091 - DNA, 25 bp, Homo sapien
ccccaagcatggcggggggcagtgc

SEQ ID NO: 1854092 - DNA, 25 bp, Homo sapien
ggaaggttggagcttgaccattctt

SEQ ID NO: 1854093 - DNA, 25 bp, Homo sapien
cggttctgggaaggttggagcttga

SEQ ID NO: 1854094 - DNA, 25 bp, Homo sapien
tgggaaggttggagcttgaccattc

SEQ ID NO: 1854095 - DNA, 25 bp, Homo sapien
ttctgggaaggttggagcttgacca

SEQ ID NO: 1854096 - DNA, 25 bp, Homo sapien
ccagttggccttggcctgaggtgct

SEQ ID NO: 1854097 - DNA, 25 bp, Homo sapien
gaggtgctgggggaatggttgaggg

SEQ ID NO: 1854098 - DNA, 25 bp, Homo sapien
ggtgctgggggaatggttgagggtc

SEQ ID NO: 1854099 - DNA, 25 bp, Homo sapien
ctgaggtgctgggggaatggttgag

SEQ ID NO: 1854100 - DNA, 25 bp, Homo sapien
tacttggggcccactacgtctgctg

SEQ ID NO: 1854101 - DNA, 25 bp, Homo sapien
cctcagggtgctcccgaatggagat

SEQ ID NO: 1854102 - DNA, 25 bp, Homo sapien
tgctggccctgacattctcctcagg

SEQ ID NO: 1854103 - DNA, 25 bp, Homo sapien
agccagtcatggctgggtacttggg

SEQ ID NO: 1854104 - DNA, 25 bp, Homo sapien
ggttctatgggcaccatccctgtct

SEQ ID NO: 1854105 - DNA, 25 bp, Homo sapien
gggttctatgggcaccatccctgtc

SEQ ID NO: 1854106 - DNA, 25 bp, Homo sapien
cgggttctatgggcaccatccctgt

SEQ ID NO: 1854107 - DNA, 25 bp, Homo sapien
gttctatgggcaccatccctgtctt

SEQ ID NO: 1854108 - DNA, 25 bp, Homo sapien
cacagcgtttctgagtggaaaacag

SEQ ID NO: 1854109 - DNA, 25 bp, Homo sapien
cagcgtttctgagtggaaaacaggc

SEQ ID NO: 1854110 - DNA, 25 bp, Homo sapien
ggaaaacaggctgggccccactgca

SEQ ID NO: 1854111 - DNA, 25 bp, Homo sapien
ccccactgcaggcaaacgccctcat

SEQ ID NO: 1854112 - DNA, 25 bp, Homo sapien
atagcacatagcaaaggcaattgac

SEQ ID NO: 1854113 - DNA, 25 bp, Homo sapien
taaaggatagcacatagcaaaggca

SEQ ID NO: 1854114 - DNA, 25 bp, Homo sapien
ggatagcacatagcaaaggcaattg

SEQ ID NO: 1854115 - DNA, 25 bp, Homo sapien
tttattaaaggatagcacatagcaa

SEQ ID NO: 1854116 - DNA, 25 bp, Homo sapien
cctgggtgctccactgacgtggcca

SEQ ID NO: 1854117 - DNA, 25 bp, Homo sapien
ttgaaaaccagacatggtcatggcc

SEQ ID NO: 1854118 - DNA, 25 bp, Homo sapien
tgcacagcagatagggccagatgtt

SEQ ID NO: 1854119 - DNA, 25 bp, Homo sapien
tggccacctccatcaccagaatggg

SEQ ID NO: 1854120 - DNA, 25 bp, Homo sapien
tgcaaaggagtatgaaaaagtgagt

SEQ ID NO: 1854121 - DNA, 25 bp, Homo sapien
agcagctcttggacgtggccctcgg

SEQ ID NO: 1854122 - DNA, 25 bp, Homo sapien
agctcttggacgtggccctcggctc

SEQ ID NO: 1854123 - DNA, 25 bp, Homo sapien
ctgagcagctcttggacgtggccct

SEQ ID NO: 1854124 - DNA, 25 bp, Homo sapien
tcggctcctacctgtgcttccctgt

SEQ ID NO: 1854125 - DNA, 25 bp, Homo sapien
ccactcatcaaggcctgggttggag

SEQ ID NO: 1854126 - DNA, 25 bp, Homo sapien
cactcatcaaggcctgggttggagg

SEQ ID NO: 1854127 - DNA, 25 bp, Homo sapien
gagctccccactcatcaaggcctgg

SEQ ID NO: 1854128 - DNA, 25 bp, Homo sapien
ggcagcggctgggtgaggtcatcca

SEQ ID NO: 1854129 - DNA, 25 bp, Homo sapien
cgagctctgtcacacctcctctctg

SEQ ID NO: 1854130 - DNA, 25 bp, Homo sapien
agctctgtcacacctcctctctgtg

SEQ ID NO: 1854131 - DNA, 25 bp, Homo sapien
cagcggctgggtgaggtcatccagc

SEQ ID NO: 1854132 - DNA, 25 bp, Homo sapien
tctgggatgaagaaacgacacaggg

SEQ ID NO: 1854133 - DNA, 25 bp, Homo sapien
gagcatgagtgattagcattgggca

SEQ ID NO: 1854134 - DNA, 25 bp, Homo sapien
gcattgggcattgaagctaaaaaga

SEQ ID NO: 1854135 - DNA, 25 bp, Homo sapien
aagaaacgacacagggcaaatgggt

SEQ ID NO: 1854136 - DNA, 25 bp, Homo sapien
ctttcagctgcagacacggcttcca

SEQ ID NO: 1854137 - DNA, 25 bp, Homo sapien
cagctgcagacacggcttccatcat

SEQ ID NO: 1854138 - DNA, 25 bp, Homo sapien
ccctctcctaagtgactttcagctg

SEQ ID NO: 1854139 - DNA, 25 bp, Homo sapien
agcagggccctctcctaagtgactt

SEQ ID NO: 1854140 - DNA, 25 bp, Homo sapien
tccttcgttcggtgtactcgtggca

SEQ ID NO: 1854141 - DNA, 25 bp, Homo sapien
tgtcctgggttgcttatactggtcc

SEQ ID NO: 1854142 - DNA, 25 bp, Homo sapien
ctccttcgttcggtgtactcgtggc

SEQ ID NO: 1854143 - DNA, 25 bp, Homo sapien
aatatttgtcctgggttgcttatac

SEQ ID NO: 1854144 - DNA, 25 bp, Homo sapien
tggagggccatcagcctggcgccca

SEQ ID NO: 1854145 - DNA, 25 bp, Homo sapien
aaggcaccgttctggagggccatca

SEQ ID NO: 1854146 - DNA, 25 bp, Homo sapien
caccgttctggagggccatcagcct

SEQ ID NO: 1854147 - DNA, 25 bp, Homo sapien
tccaaaggcaccgttctggagggcc

SEQ ID NO: 1854148 - DNA, 25 bp, Homo sapien
acaccccggaaaatgtccttcatat

SEQ ID NO: 1854149 - DNA, 25 bp, Homo sapien
tggccatggacaccccggaaaatgt

SEQ ID NO: 1854150 - DNA, 25 bp, Homo sapien
ctggccatggacaccccggaaaatg

SEQ ID NO: 1854151 - DNA, 25 bp, Homo sapien
catggacaccccggaaaatgtcctt

SEQ ID NO: 1854152 - DNA, 25 bp, Homo sapien
tggtaacctccttgctcagctaatg

SEQ ID NO: 1854153 - DNA, 25 bp, Homo sapien
gacaagtagaggtgactgggtctca

SEQ ID NO: 1854154 - DNA, 25 bp, Homo sapien
ggtctcaagagaggtgactcacatg

SEQ ID NO: 1854155 - DNA, 25 bp, Homo sapien
ggactcgccataaatagccccaaga

SEQ ID NO: 1854156 - DNA, 25 bp, Homo sapien
gcccatgggctccataaacttcagt

SEQ ID NO: 1854157 - DNA, 25 bp, Homo sapien
gccaggccttgtggagacccagctg

SEQ ID NO: 1854158 - DNA, 25 bp, Homo sapien
cccatgggctccataaacttcagtg

SEQ ID NO: 1854159 - DNA, 25 bp, Homo sapien
cagcccatgggctccataaacttca

SEQ ID NO: 1854160 - DNA, 25 bp, Homo sapien
catttgcacaggcttgcagacccag

SEQ ID NO: 1854161 - DNA, 25 bp, Homo sapien
gaatcgagatacgtagtgtctgccc

SEQ ID NO: 1854162 - DNA, 25 bp, Homo sapien
tcagcacccgttggatgaagaaaca

SEQ ID NO: 1854163 - DNA, 25 bp, Homo sapien
ggtgatgacacgttcttcagcgtag

SEQ ID NO: 1854164 - DNA, 25 bp, Homo sapien
tttcatatgaagaggatggctggcc

SEQ ID NO: 1854165 - DNA, 25 bp, Homo sapien
taaaattcaacgtagtgtgtcaggc

SEQ ID NO: 1854166 - DNA, 25 bp, Homo sapien
tgtcttctgcggtgagcaaccctca

SEQ ID NO: 1854167 - DNA, 25 bp, Homo sapien
tgacagcggcgctcaaagcttctgg

SEQ ID NO: 1854168 - DNA, 25 bp, Homo sapien
gaaaccctctaaggtgatcctcgcc

SEQ ID NO: 1854169 - DNA, 25 bp, Homo sapien
caggacatgtgaaatcagggacgtc

SEQ ID NO: 1854170 - DNA, 25 bp, Homo sapien
cctttacaaagtgcgtgaaggcacc

SEQ ID NO: 1854171 - DNA, 25 bp, Homo sapien
tgaagaaacctgaattagcggagac

SEQ ID NO: 1854172 - DNA, 25 bp, Homo sapien
tcaggaacagagtaaccgtcccgcg

SEQ ID NO: 1854173 - DNA, 25 bp, Homo sapien
ctcaggaacagagtaaccgtcccgc

SEQ ID NO: 1854174 - DNA, 25 bp, Homo sapien
caggaacagagtaaccgtcccgcgg

SEQ ID NO: 1854175 - DNA, 25 bp, Homo sapien
gagttgtcttttcaagtctgtagga

SEQ ID NO: 1854176 - DNA, 25 bp, Homo sapien
acagcttggttcctgtgaagtgagc

SEQ ID NO: 1854177 - DNA, 25 bp, Homo sapien
tcctgtgaagtgagcttgctgtgac

SEQ ID NO: 1854178 - DNA, 25 bp, Homo sapien
tgcttcttcagggacaactgtggtc

SEQ ID NO: 1854179 - DNA, 25 bp, Homo sapien
gttcttccctgatcagtcctcccag

SEQ ID NO: 1854180 - DNA, 25 bp, Homo sapien
actggagagtgaggcctttgcctgt

SEQ ID NO: 1854181 - DNA, 25 bp, Homo sapien
ttctgttcttcaccctgatctgttc

SEQ ID NO: 1854182 - DNA, 25 bp, Homo sapien
ctgttcttcaccctgatctgttctt

SEQ ID NO: 1854183 - DNA, 25 bp, Homo sapien
gccctcgttcattgggcagttggtt

SEQ ID NO: 1854184 - DNA, 25 bp, Homo sapien
tagccctcgttcattgggcagttgg

SEQ ID NO: 1854185 - DNA, 25 bp, Homo sapien
ctgtgtagccctcgttcattgggca

SEQ ID NO: 1854186 - DNA, 25 bp, Homo sapien
tgtagccctcgttcattgggcagtt

SEQ ID NO: 1854187 - DNA, 25 bp, Homo sapien
accacatttcatcatcattcctctt

SEQ ID NO: 1854188 - DNA, 25 bp, Homo sapien
tgaccacatttcatcatcattcctc

SEQ ID NO: 1854189 - DNA, 25 bp, Homo sapien
aatgaccacatttcatcatcattcc

SEQ ID NO: 1854190 - DNA, 25 bp, Homo sapien
caatgaccacatttcatcatcattc

SEQ ID NO: 1854191 - DNA, 25 bp, Homo sapien
cctgggcacagcatcctgaccatgt

SEQ ID NO: 1854192 - DNA, 25 bp, Homo sapien
cgcagtcactactgatggccaggga

SEQ ID NO: 1854193 - DNA, 25 bp, Homo sapien
cttggacattccctgagcgcagtca

SEQ ID NO: 1854194 - DNA, 25 bp, Homo sapien
catgtcttgacgtagctgcctctgc

SEQ ID NO: 1854195 - DNA, 25 bp, Homo sapien
gacggcagcaggtccacaaggaggc

SEQ ID NO: 1854196 - DNA, 25 bp, Homo sapien
tgacggcagcaggtccacaaggagg

SEQ ID NO: 1854197 - DNA, 25 bp, Homo sapien
cactcctgcgatgtgacagtaggta

SEQ ID NO: 1854198 - DNA, 25 bp, Homo sapien
cttggatctgagtggacctgggttc

SEQ ID NO: 1854199 - DNA, 25 bp, Homo sapien
caccatggcctccatagaaggtgtg

SEQ ID NO: 1854200 - DNA, 25 bp, Homo sapien
acagtaggtaggtcactcgcattct

SEQ ID NO: 1854201 - DNA, 25 bp, Homo sapien
tgtgaaaatagtggtcatggccatc

SEQ ID NO: 1854202 - DNA, 25 bp, Homo sapien
tgaaaatagtggtcatggccatccc

SEQ ID NO: 1854203 - DNA, 25 bp, Homo sapien
tatgtgaaaatagtggtcatggcca

SEQ ID NO: 1854204 - DNA, 25 bp, Homo sapien
ctatgtgaaaatagtggtcatggcc

SEQ ID NO: 1854205 - DNA, 25 bp, Homo sapien
taatagtcccatatctcagcttgaa

SEQ ID NO: 1854206 - DNA, 25 bp, Homo sapien
tgaatcttataaacgctcagagtcc

SEQ ID NO: 1854207 - DNA, 25 bp, Homo sapien
ctcagagtccaaccacattcacggg

SEQ ID NO: 1854208 - DNA, 25 bp, Homo sapien
cattcacgggattgttccctcttta

SEQ ID NO: 1854209 - DNA, 25 bp, Homo sapien
ccctgcctgttgcaagctctcctgg

SEQ ID NO: 1854210 - DNA, 25 bp, Homo sapien
tcctccagtaactgccagagtgtgg

SEQ ID NO: 1854211 - DNA, 25 bp, Homo sapien
acagctcctccagtaactgccagag

SEQ ID NO: 1854212 - DNA, 25 bp, Homo sapien
gagtgtgggtgtgtcagagccttct

SEQ ID NO: 1854213 - DNA, 25 bp, Homo sapien
aacttgacttctcatgcaggagagg

SEQ ID NO: 1854214 - DNA, 25 bp, Homo sapien
taacttgacttctcatgcaggagag

SEQ ID NO: 1854215 - DNA, 25 bp, Homo sapien
gcaaaaattggatgcagtgggtcca

SEQ ID NO: 1854216 - DNA, 25 bp, Homo sapien
ggcccccactggagtccagagaaag

SEQ ID NO: 1854217 - DNA, 25 bp, Homo sapien
tgagcctcttcaggctgtttaccag

SEQ ID NO: 1854218 - DNA, 25 bp, Homo sapien
ccaggggtgtcaccgcccaggcctg

SEQ ID NO: 1854219 - DNA, 25 bp, Homo sapien
ggctgagctgccgtaccaggcccat

SEQ ID NO: 1854220 - DNA, 25 bp, Homo sapien
gtgggctgagctgccgtaccaggcc

SEQ ID NO: 1854221 - DNA, 25 bp, Homo sapien
ggtgggctgagctgccgtaccaggc

SEQ ID NO: 1854222 - DNA, 25 bp, Homo sapien
gagcacaccaggcaatttgctgaat

SEQ ID NO: 1854223 - DNA, 25 bp, Homo sapien
gaaatggcaggcttgagcacaccag

SEQ ID NO: 1854224 - DNA, 25 bp, Homo sapien
gctcaggagcgcacaggaaatggca

SEQ ID NO: 1854225 - DNA, 25 bp, Homo sapien
cggcgcgattgtttgcggagctcaa

SEQ ID NO: 1854226 - DNA, 25 bp, Homo sapien
catcttcatcctcaagcccccacca

SEQ ID NO: 1854227 - DNA, 25 bp, Homo sapien
ccccaccaacgagcaggagttggat

SEQ ID NO: 1854228 - DNA, 25 bp, Homo sapien
agcccccaccaacgagcaggagttg

SEQ ID NO: 1854229 - DNA, 25 bp, Homo sapien
aagcccccaccaacgagcaggagtt

SEQ ID NO: 1854230 - DNA, 25 bp, Homo sapien
gacaggcgtccaccatgggtgctgt

SEQ ID NO: 1854231 - DNA, 25 bp, Homo sapien
ccagggacaggcgtccaccatgggt

SEQ ID NO: 1854232 - DNA, 25 bp, Homo sapien
cctgcacccacagcagtggggtcag

SEQ ID NO: 1854233 - DNA, 25 bp, Homo sapien
ccaccatgggtgctgtcatgaggtg

SEQ ID NO: 1854234 - DNA, 25 bp, Homo sapien
ggcctgagtgacctcgatcgatgag

SEQ ID NO: 1854235 - DNA, 25 bp, Homo sapien
gagcagcatgttatttactggctcc

SEQ ID NO: 1854236 - DNA, 25 bp, Homo sapien
catcgatcggccctggcctgagtga

SEQ ID NO: 1854237 - DNA, 25 bp, Homo sapien
gtctgcggccatcgatcggccctgg

SEQ ID NO: 1854238 - DNA, 25 bp, Homo sapien
cccctggagacagccagcagctgtc

SEQ ID NO: 1854239 - DNA, 25 bp, Homo sapien
gccagcagctgtcctcatccctagg

SEQ ID NO: 1854240 - DNA, 25 bp, Homo sapien
cctggagacagccagcagctgtcct

SEQ ID NO: 1854241 - DNA, 25 bp, Homo sapien
gagacagccagcagctgtcctcatc

SEQ ID NO: 1854242 - DNA, 25 bp, Homo sapien
cttctcgcgtgtcccgttggcaata

SEQ ID NO: 1854243 - DNA, 25 bp, Homo sapien
cagcttctcgcgtgtcccgttggca

SEQ ID NO: 1854244 - DNA, 25 bp, Homo sapien
agcttctcgcgtgtcccgttggcaa

SEQ ID NO: 1854245 - DNA, 25 bp, Homo sapien
tctcgcgtgtcccgttggcaatagt

SEQ ID NO: 1854246 - DNA, 25 bp, Homo sapien
gcgggctggcttccgcggtctccat

SEQ ID NO: 1854247 - DNA, 25 bp, Homo sapien
cgggtgtggacgagggccacgacca

SEQ ID NO: 1854248 - DNA, 25 bp, Homo sapien
tgcagggtctgggagcgggcttcca

SEQ ID NO: 1854249 - DNA, 25 bp, Homo sapien
ccacgaccacgggatgaagagagct

SEQ ID NO: 1854250 - DNA, 25 bp, Homo sapien
gaagcctgaggctttaactgcagaa

SEQ ID NO: 1854251 - DNA, 25 bp, Homo sapien
tttgggagaacatgccttggctcag

SEQ ID NO: 1854252 - DNA, 25 bp, Homo sapien
ggtgtcttgatgctgaattccagta

SEQ ID NO: 1854253 - DNA, 25 bp, Homo sapien
gctggctggttgatgtgttttggga

SEQ ID NO: 1854254 - DNA, 25 bp, Homo sapien
caatggcgggctgaattacacaggc

SEQ ID NO: 1854255 - DNA, 25 bp, Homo sapien
tcctaggagttccacaaaggtgccc

SEQ ID NO: 1854256 - DNA, 25 bp, Homo sapien
taattatccaccgagcaatggcggg

SEQ ID NO: 1854257 - DNA, 25 bp, Homo sapien
aagtgagattctggtgccgagtgcc

SEQ ID NO: 1854258 - DNA, 25 bp, Homo sapien
aggacgcagcacttggcaacacact

SEQ ID NO: 1854259 - DNA, 25 bp, Homo sapien
caggcactgaactccgtgtggtcgg

SEQ ID NO: 1854260 - DNA, 25 bp, Homo sapien
ggttcttgtggtagcctggcaccgc

SEQ ID NO: 1854261 - DNA, 25 bp, Homo sapien
gaaaagtgacactggtgggacccaa

SEQ ID NO: 1854262 - DNA, 25 bp, Homo sapien
cacgtccgtgggtgcccacgggcag

SEQ ID NO: 1854263 - DNA, 25 bp, Homo sapien
cctcagcaccaagccacgtccgtgg

SEQ ID NO: 1854264 - DNA, 25 bp, Homo sapien
atcctcagcaccaagccacgtccgt

SEQ ID NO: 1854265 - DNA, 25 bp, Homo sapien
cagcaccaagccacgtccgtgggtg

SEQ ID NO: 1854266 - DNA, 25 bp, Homo sapien
ttccacagggtcacggctcctcctc

SEQ ID NO: 1854267 - DNA, 25 bp, Homo sapien
cttccacagggtcacggctcctcct

SEQ ID NO: 1854268 - DNA, 25 bp, Homo sapien
cctgctgctcagctccatggactcg

SEQ ID NO: 1854269 - DNA, 25 bp, Homo sapien
cctcctgctgctcagctccatggac

SEQ ID NO: 1854270 - DNA, 25 bp, Homo sapien
tgtaagtgacgtaagtctgtttggt

SEQ ID NO: 1854271 - DNA, 25 bp, Homo sapien
aagtgacgtaagtctgtttggtggc

SEQ ID NO: 1854272 - DNA, 25 bp, Homo sapien
gtgacgtaagtctgtttggtggcca

SEQ ID NO: 1854273 - DNA, 25 bp, Homo sapien
gttggtgtaagtgacgtaagtctgt

SEQ ID NO: 1854274 - DNA, 25 bp, Homo sapien
tctcctgctgttcctagctccccat

SEQ ID NO: 1854275 - DNA, 25 bp, Homo sapien
cgcctctcatggcatccagtcctga

SEQ ID NO: 1854276 - DNA, 25 bp, Homo sapien
ccagtcctgagctgagcaatcgaca

SEQ ID NO: 1854277 - DNA, 25 bp, Homo sapien
gctgagcaatcgacactgccccaaa

SEQ ID NO: 1854278 - DNA, 25 bp, Homo sapien
tgtccacagctgagtgacgccagca

SEQ ID NO: 1854279 - DNA, 25 bp, Homo sapien
gaagcattgcccaacttgacagatg

SEQ ID NO: 1854280 - DNA, 25 bp, Homo sapien
tgaccctcggtcaggatctgttggc

SEQ ID NO: 1854281 - DNA, 25 bp, Homo sapien
tgtctagccagggtttagggcctcc

SEQ ID NO: 1854282 - DNA, 25 bp, Homo sapien
tggaagcccactaacacaggcagaa

SEQ ID NO: 1854283 - DNA, 25 bp, Homo sapien
tatcacatgtggacgaagcaaactg

SEQ ID NO: 1854284 - DNA, 25 bp, Homo sapien
catgagcagaacaaccattgaggtc

SEQ ID NO: 1854285 - DNA, 25 bp, Homo sapien
catgtcctattacggcagagagcaa

SEQ ID NO: 1854286 - DNA, 25 bp, Homo sapien
tgtccccagaattaatcacctggct

SEQ ID NO: 1854287 - DNA, 25 bp, Homo sapien
tccatccggctgtccccagaattaa

SEQ ID NO: 1854288 - DNA, 25 bp, Homo sapien
ggctgtccccagaattaatcacctg

SEQ ID NO: 1854289 - DNA, 25 bp, Homo sapien
tccggctgtccccagaattaatcac

SEQ ID NO: 1854290 - DNA, 25 bp, Homo sapien
ccagggtcgtaggttgagggaagct

SEQ ID NO: 1854291 - DNA, 25 bp, Homo sapien
tcatctggggtttccgaacatccag

SEQ ID NO: 1854292 - DNA, 25 bp, Homo sapien
gggtttccgaacatccaggtagaca

SEQ ID NO: 1854293 - DNA, 25 bp, Homo sapien
gccagcatggcacccgaagggaacc

SEQ ID NO: 1854294 - DNA, 25 bp, Homo sapien
ccggggacgattccttctcccagag

SEQ ID NO: 1854295 - DNA, 25 bp, Homo sapien
tcaaggttctcgcagagctcagact

SEQ ID NO: 1854296 - DNA, 25 bp, Homo sapien
gacttggcctctccgttgggccgga

SEQ ID NO: 1854297 - DNA, 25 bp, Homo sapien
gcctcaaggttctcgcagagctcag

SEQ ID NO: 1854298 - DNA, 25 bp, Homo sapien
ctggggcctcaaggttctcgcagag

SEQ ID NO: 1854299 - DNA, 25 bp, Homo sapien
tcagcgtcgtcgtctggatgtacag

SEQ ID NO: 1854300 - DNA, 25 bp, Homo sapien
gactttgggcatgtagagcattccc

SEQ ID NO: 1854301 - DNA, 25 bp, Homo sapien
cgtaacgacggctttgaggctgcgc

SEQ ID NO: 1854302 - DNA, 25 bp, Homo sapien
ttgttggacatggtggccgccgtaa

SEQ ID NO: 1854303 - DNA, 25 bp, Homo sapien
acttcagaacacatgtcctccaccg

SEQ ID NO: 1854304 - DNA, 25 bp, Homo sapien
tgagtctctaagaagcctggtagtc

SEQ ID NO: 1854305 - DNA, 25 bp, Homo sapien
gggcatcttgcagctcggcatgaca

SEQ ID NO: 1854306 - DNA, 25 bp, Homo sapien
ctggtagtctgaaccgcaggaactt

SEQ ID NO: 1854307 - DNA, 25 bp, Homo sapien
ctctgtgggccgcatgtcataggga

SEQ ID NO: 1854308 - DNA, 25 bp, Homo sapien
gatgctcatccctagtcccaggaag

SEQ ID NO: 1854309 - DNA, 25 bp, Homo sapien
tggtaccctgtgcaaggctcgcagt

SEQ ID NO: 1854310 - DNA, 25 bp, Homo sapien
cagcagcacgtagctcagttcacgg

SEQ ID NO: 1854311 - DNA, 25 bp, Homo sapien
tccccggccagtgcatccgctctat

SEQ ID NO: 1854312 - DNA, 25 bp, Homo sapien
cccgctccccggccagtgcatccgc

SEQ ID NO: 1854313 - DNA, 25 bp, Homo sapien
gctccccggccagtgcatccgctct

SEQ ID NO: 1854314 - DNA, 25 bp, Homo sapien
ccgctccccggccagtgcatccgct

SEQ ID NO: 1854315 - DNA, 25 bp, Homo sapien
aatcgttgcgcagctggtattggta

SEQ ID NO: 1854316 - DNA, 25 bp, Homo sapien
ggagccaatgaccttgtactcggca

SEQ ID NO: 1854317 - DNA, 25 bp, Homo sapien
gtagatgtcatagcgcccaggcgca

SEQ ID NO: 1854318 - DNA, 25 bp, Homo sapien
ggtattggtagatgtcatagcgccc

SEQ ID NO: 1854319 - DNA, 25 bp, Homo sapien
tgaatcctgcccaattcgctcacgg

SEQ ID NO: 1854320 - DNA, 25 bp, Homo sapien
ttgacgtttcggatgtacttaagca

SEQ ID NO: 1854321 - DNA, 25 bp, Homo sapien
cacaggtcacggtgcatggcgtgca

SEQ ID NO: 1854322 - DNA, 25 bp, Homo sapien
ccatggcgtacacggcatcgatcac

SEQ ID NO: 1854323 - DNA, 25 bp, Homo sapien
ggtgtaatcacctccattgtagaga

SEQ ID NO: 1854324 - DNA, 25 bp, Homo sapien
ggccctgggtaatcatgatattaga

SEQ ID NO: 1854325 - DNA, 25 bp, Homo sapien
accagtacttgctatgtgtcaggca

SEQ ID NO: 1854326 - DNA, 25 bp, Homo sapien
ggcattgtacggaactcttgatgta

SEQ ID NO: 1854327 - DNA, 25 bp, Homo sapien
agctaagactccatgcagcgcgtcc

SEQ ID NO: 1854328 - DNA, 25 bp, Homo sapien
gaggagctaagactccatgcagcgc

SEQ ID NO: 1854329 - DNA, 25 bp, Homo sapien
ggaggagctaagactccatgcagcg

SEQ ID NO: 1854330 - DNA, 25 bp, Homo sapien
ggagctaagactccatgcagcgcgt

SEQ ID NO: 1854331 - DNA, 25 bp, Homo sapien
ccggccctgcccggcccgcgtgctc

SEQ ID NO: 1854332 - DNA, 25 bp, Homo sapien
ctagagcccgcccggccctgcccgg

SEQ ID NO: 1854333 - DNA, 25 bp, Homo sapien
ggccctgcccggcccgcgtgctcac

SEQ ID NO: 1854334 - DNA, 25 bp, Homo sapien
gcccggccctgcccggcccgcgtgc

SEQ ID NO: 1854335 - DNA, 25 bp, Homo sapien
ggtgcacttcttgacgtggctgccc

SEQ ID NO: 1854336 - DNA, 25 bp, Homo sapien
tcttgagggcgtggcggctcagctt

SEQ ID NO: 1854337 - DNA, 25 bp, Homo sapien
caaaccagatgttgcgccggttgtt

SEQ ID NO: 1854338 - DNA, 25 bp, Homo sapien
tggaagttgtcctcccagaactcgg

SEQ ID NO: 1854339 - DNA, 25 bp, Homo sapien
gcaatgctaacagcgggctttgaga

SEQ ID NO: 1854340 - DNA, 25 bp, Homo sapien
tgaggatgtttccacggcctttaac

SEQ ID NO: 1854341 - DNA, 25 bp, Homo sapien
ggcctttaaccgctgcaatgctaac

SEQ ID NO: 1854342 - DNA, 25 bp, Homo sapien
ctttgagaaggagccgcctgggagt

SEQ ID NO: 1854343 - DNA, 25 bp, Homo sapien
gtggggctgcccaacccggggagca

SEQ ID NO: 1854344 - DNA, 25 bp, Homo sapien
tggggctgcccaacccggggagcac

SEQ ID NO: 1854345 - DNA, 25 bp, Homo sapien
ggttggcccttcgtgctgcctccag

SEQ ID NO: 1854346 - DNA, 25 bp, Homo sapien
aagaaatggcctgtctggttggccc

SEQ ID NO: 1854347 - DNA, 25 bp, Homo sapien
caggtgcaatcttggagccccagct

SEQ ID NO: 1854348 - DNA, 25 bp, Homo sapien
tcttggggaggatcgtgacagcacc

SEQ ID NO: 1854349 - DNA, 25 bp, Homo sapien
agcccagccgcgtctgtccacgaaa

SEQ ID NO: 1854350 - DNA, 25 bp, Homo sapien
cccagccgcgtctgtccacgaaact

SEQ ID NO: 1854351 - DNA, 25 bp, Homo sapien
gccgcgtctgtccacgaaactgccc

SEQ ID NO: 1854352 - DNA, 25 bp, Homo sapien
cagccgcgtctgtccacgaaactgc

SEQ ID NO: 1854353 - DNA, 25 bp, Homo sapien
cgccctctgtgccaaaattccaggt

SEQ ID NO: 1854354 - DNA, 25 bp, Homo sapien
atggctaccgcctcatccaacctgc

SEQ ID NO: 1854355 - DNA, 25 bp, Homo sapien
gagacgcatgccttcctggctcatc

SEQ ID NO: 1854356 - DNA, 25 bp, Homo sapien
acgtctgactcaggccccacaacca

SEQ ID NO: 1854357 - DNA, 25 bp, Homo sapien
gcattagaacctaagtggtccggcc

SEQ ID NO: 1854358 - DNA, 25 bp, Homo sapien
ggtagccatccctagcaggtggaat

SEQ ID NO: 1854359 - DNA, 25 bp, Homo sapien
cacagctagtaggtgggagaacagc

SEQ ID NO: 1854360 - DNA, 25 bp, Homo sapien
tctgttaaagcacccaggtagccat

SEQ ID NO: 1854361 - DNA, 25 bp, Homo sapien
tatcttcaccgactgggcgatgcac

SEQ ID NO: 1854362 - DNA, 25 bp, Homo sapien
tgatgactgccctggcgttcgaagt

SEQ ID NO: 1854363 - DNA, 25 bp, Homo sapien
tgggctcccgtggtatcttcaccga

SEQ ID NO: 1854364 - DNA, 25 bp, Homo sapien
tcttgtcgaactcgcctgccttggg

SEQ ID NO: 1854365 - DNA, 25 bp, Homo sapien
taaagacaacatccggtacctagtg

SEQ ID NO: 1854366 - DNA, 25 bp, Homo sapien
cagtcaggacagcttcagtgccagt

SEQ ID NO: 1854367 - DNA, 25 bp, Homo sapien
tcatgcttaggagctagactgcctg

SEQ ID NO: 1854368 - DNA, 25 bp, Homo sapien
tatagcagctagaagcagcacggca

SEQ ID NO: 1854369 - DNA, 25 bp, Homo sapien
tcagccactgcctttgacggatgag

SEQ ID NO: 1854370 - DNA, 25 bp, Homo sapien
ccctggtggcagtcgatggaaaagc

SEQ ID NO: 1854371 - DNA, 25 bp, Homo sapien
tcaggattcacgaccaggctgggtg

SEQ ID NO: 1854372 - DNA, 25 bp, Homo sapien
cggtcttggtatctaagggctgccc

SEQ ID NO: 1854373 - DNA, 25 bp, Homo sapien
agaggatgcaagtggccaggcggca

SEQ ID NO: 1854374 - DNA, 25 bp, Homo sapien
tctcctaagacaccaagaagtccca

SEQ ID NO: 1854375 - DNA, 25 bp, Homo sapien
gcattctggagagaacagggtacgc

SEQ ID NO: 1854376 - DNA, 25 bp, Homo sapien
gacaccaagaagtcccaagtgctag

SEQ ID NO: 1854377 - DNA, 25 bp, Homo sapien
ctggacgaatggagaactgagttcc

SEQ ID NO: 1854378 - DNA, 25 bp, Homo sapien
taatccacacttgctggacgaatgg

SEQ ID NO: 1854379 - DNA, 25 bp, Homo sapien
ccaggacggcggtaatccacacttg

SEQ ID NO: 1854380 - DNA, 25 bp, Homo sapien
ttttgaagggacagctcggcaggag

SEQ ID NO: 1854381 - DNA, 25 bp, Homo sapien
aagtttcacggtcacacacgctcac

SEQ ID NO: 1854382 - DNA, 25 bp, Homo sapien
aaagtttcacggtcacacacgctca

SEQ ID NO: 1854383 - DNA, 25 bp, Homo sapien
ggcacagggccatacgcacacactg

SEQ ID NO: 1854384 - DNA, 25 bp, Homo sapien
tacgcacacactgacagagtcacag

SEQ ID NO: 1854385 - DNA, 25 bp, Homo sapien
taagaacctcgtacagcctcatagc

SEQ ID NO: 1854386 - DNA, 25 bp, Homo sapien
ccatcacacttatggacccactaag

SEQ ID NO: 1854387 - DNA, 25 bp, Homo sapien
cgggcactggtgagctgtgtagagg

SEQ ID NO: 1854388 - DNA, 25 bp, Homo sapien
ggtctcgggcactggtgagctgtgt

SEQ ID NO: 1854389 - DNA, 25 bp, Homo sapien
tcacccaaggtctcgggcactggtg

SEQ ID NO: 1854390 - DNA, 25 bp, Homo sapien
cacccaaggtctcgggcactggtga

SEQ ID NO: 1854391 - DNA, 25 bp, Homo sapien
ccgggccctgctaggtgggagtcac

SEQ ID NO: 1854392 - DNA, 25 bp, Homo sapien
ctcccgggccctgctaggtgggagt

SEQ ID NO: 1854393 - DNA, 25 bp, Homo sapien
tcccgggccctgctaggtgggagtc

SEQ ID NO: 1854394 - DNA, 25 bp, Homo sapien
cttgagggcacggacgatgtccacc

SEQ ID NO: 1854395 - DNA, 25 bp, Homo sapien
ctctcaccatagctgccctccgagg

SEQ ID NO: 1854396 - DNA, 25 bp, Homo sapien
tccacttgagggcacggacgatgtc

SEQ ID NO: 1854397 - DNA, 25 bp, Homo sapien
gagggcacggacgatgtccaccatg

SEQ ID NO: 1854398 - DNA, 25 bp, Homo sapien
gaagaagtcgtagcggctgttgtca

SEQ ID NO: 1854399 - DNA, 25 bp, Homo sapien
ccgagggcaccacgcgggagaagaa

SEQ ID NO: 1854400 - DNA, 25 bp, Homo sapien
cgggagaagaagtcgtagcggctgt

SEQ ID NO: 1854401 - DNA, 25 bp, Homo sapien
cacgcgggagaagaagtcgtagcgg

SEQ ID NO: 1854402 - DNA, 25 bp, Homo sapien
ggtctggcgctgtggaggcgtagct

SEQ ID NO: 1854403 - DNA, 25 bp, Homo sapien
tctggcgctgtggaggcgtagctga

SEQ ID NO: 1854404 - DNA, 25 bp, Homo sapien
ctggcgctgtggaggcgtagctgat

SEQ ID NO: 1854405 - DNA, 25 bp, Homo sapien
tcaggtctggcgctgtggaggcgta

SEQ ID NO: 1854406 - DNA, 25 bp, Homo sapien
gagaacgtccattgccaaaagcatg

SEQ ID NO: 1854407 - DNA, 25 bp, Homo sapien
gtccattgccaaaagcatggcccag

SEQ ID NO: 1854408 - DNA, 25 bp, Homo sapien
tcccctgagaacgtccattgccaaa

SEQ ID NO: 1854409 - DNA, 25 bp, Homo sapien
ttgccaaaagcatggcccagctcgg

SEQ ID NO: 1854410 - DNA, 25 bp, Homo sapien
ctgccggccccctcccatcacacac

SEQ ID NO: 1854411 - DNA, 25 bp, Homo sapien
tcctaggactctccctctctgccgg

SEQ ID NO: 1854412 - DNA, 25 bp, Homo sapien
ctcctaggactctccctctctgccg

SEQ ID NO: 1854413 - DNA, 25 bp, Homo sapien
taggactctccctctctgccggccc

SEQ ID NO: 1854414 - DNA, 25 bp, Homo sapien
cagggacatcctgggaatgctattg

SEQ ID NO: 1854415 - DNA, 25 bp, Homo sapien
tgtcacagggacatcctgggaatgc

SEQ ID NO: 1854416 - DNA, 25 bp, Homo sapien
cattgtcacagggacatcctgggaa

SEQ ID NO: 1854417 - DNA, 25 bp, Homo sapien
ggacatcctgggaatgctattgggc

SEQ ID NO: 1854418 - DNA, 25 bp, Homo sapien
cagctctgggtaactggttcccaga

SEQ ID NO: 1854419 - DNA, 25 bp, Homo sapien
ccagctctgggtaactggttcccag

SEQ ID NO: 1854420 - DNA, 25 bp, Homo sapien
cggctagcacacgggtggtgaccca

SEQ ID NO: 1854421 - DNA, 25 bp, Homo sapien
gggtggtgacccagaacgcccacag

SEQ ID NO: 1854422 - DNA, 25 bp, Homo sapien
ctcacagagcacctgagcacccctc

SEQ ID NO: 1854423 - DNA, 25 bp, Homo sapien
acctgagcacccctctggccaggtg

SEQ ID NO: 1854424 - DNA, 25 bp, Homo sapien
acagagcacctgagcacccctctgg

SEQ ID NO: 1854425 - DNA, 25 bp, Homo sapien
ccagggctccccctcacagagcacc

SEQ ID NO: 1854426 - DNA, 25 bp, Homo sapien
gggaggagcaggataggccccagat

SEQ ID NO: 1854427 - DNA, 25 bp, Homo sapien
agatcgggagactgtctgtccttgc

SEQ ID NO: 1854428 - DNA, 25 bp, Homo sapien
taggccccagatcgggagactgtct

SEQ ID NO: 1854429 - DNA, 25 bp, Homo sapien
caggataggccccagatcgggagac

SEQ ID NO: 1854430 - DNA, 25 bp, Homo sapien
tggccctgaagtcctaagggtcctc

SEQ ID NO: 1854431 - DNA, 25 bp, Homo sapien
cttggcgccatcatggggaaatagc

SEQ ID NO: 1854432 - DNA, 25 bp, Homo sapien
cttttttctcttggcgccatcatgg

SEQ ID NO: 1854433 - DNA, 25 bp, Homo sapien
gcatggccctgaagtcctaagggtc

SEQ ID NO: 1854434 - DNA, 25 bp, Homo sapien
gactcagtaaccttgtcaacagtga

SEQ ID NO: 1854435 - DNA, 25 bp, Homo sapien
gctgactcagtaaccttgtcaacag

SEQ ID NO: 1854436 - DNA, 25 bp, Homo sapien
acatgctgactcagtaaccttgtca

SEQ ID NO: 1854437 - DNA, 25 bp, Homo sapien
catgctgactcagtaaccttgtcaa

SEQ ID NO: 1854438 - DNA, 25 bp, Homo sapien
ccacggtgaaagactgggatgtgtc

SEQ ID NO: 1854439 - DNA, 25 bp, Homo sapien
tccaaggagggctcaaagtccaact

SEQ ID NO: 1854440 - DNA, 25 bp, Homo sapien
gctcaaagtccaactcccataggtg

SEQ ID NO: 1854441 - DNA, 25 bp, Homo sapien
agccatgcccccttttccaaggagg

SEQ ID NO: 1854442 - DNA, 25 bp, Homo sapien
tccaccaggaccgcccaggtccaca

SEQ ID NO: 1854443 - DNA, 25 bp, Homo sapien
caccaggaccgcccaggtccacagc

SEQ ID NO: 1854444 - DNA, 25 bp, Homo sapien
ctccaccaggaccgcccaggtccac

SEQ ID NO: 1854445 - DNA, 25 bp, Homo sapien
ccaccaggaccgcccaggtccacag

SEQ ID NO: 1854446 - DNA, 25 bp, Homo sapien
tcattatcaggtttcttcaagattc

SEQ ID NO: 1854447 - DNA, 25 bp, Homo sapien
ctcattatcaggtttcttcaagatt

SEQ ID NO: 1854448 - DNA, 25 bp, Homo sapien
cttcaagattctgttgggggaaact

SEQ ID NO: 1854449 - DNA, 25 bp, Homo sapien
ctcctggcctggtgtggatgaggca

SEQ ID NO: 1854450 - DNA, 25 bp, Homo sapien
cccaggggatctttgcctgattcct

SEQ ID NO: 1854451 - DNA, 25 bp, Homo sapien
tactcatggtaagcttccactccct

SEQ ID NO: 1854452 - DNA, 25 bp, Homo sapien
atacaggtactcatggtaagcttcc

SEQ ID NO: 1854453 - DNA, 25 bp, Homo sapien
gaaggggcccacatacaggtactca

SEQ ID NO: 1854454 - DNA, 25 bp, Homo sapien
catggtaagcttccactccctctag

SEQ ID NO: 1854455 - DNA, 25 bp, Homo sapien
gaaggcactggcaccagccccccat

SEQ ID NO: 1854456 - DNA, 25 bp, Homo sapien
cgaggtcccctgctcacgaaggcac

SEQ ID NO: 1854457 - DNA, 25 bp, Homo sapien
aggtcccctgctcacgaaggcactg

SEQ ID NO: 1854458 - DNA, 25 bp, Homo sapien
acgaaggcactggcaccagcccccc

SEQ ID NO: 1854459 - DNA, 25 bp, Homo sapien
agtttctctgtgggggagagaaggg

SEQ ID NO: 1854460 - DNA, 25 bp, Homo sapien
cagtttctctgtgggggagagaagg

SEQ ID NO: 1854461 - DNA, 25 bp, Homo sapien
gtttctctgtgggggagagaagggc

SEQ ID NO: 1854462 - DNA, 25 bp, Homo sapien
ccaaatgaggacactttagtgccca

SEQ ID NO: 1854463 - DNA, 25 bp, Homo sapien
gtggggagtgtgagcttccccccaa

SEQ ID NO: 1854464 - DNA, 25 bp, Homo sapien
ggtggggagtgtgagcttcccccca

SEQ ID NO: 1854465 - DNA, 25 bp, Homo sapien
catggttgaatcaggtactcgctgc

SEQ ID NO: 1854466 - DNA, 25 bp, Homo sapien
aacttccagtaggttctctgcctca

SEQ ID NO: 1854467 - DNA, 25 bp, Homo sapien
ggagcagagatttgttttcctatat

SEQ ID NO: 1854468 - DNA, 25 bp, Homo sapien
ttcttttaggagcagagatttgttt

SEQ ID NO: 1854469 - DNA, 25 bp, Homo sapien
gagagtaagcccttcatgacggacc

SEQ ID NO: 1854470 - DNA, 25 bp, Homo sapien
caatatgtggccaggtcttgggtac

SEQ ID NO: 1854471 - DNA, 25 bp, Homo sapien
caataaagtaaaaggcggcgtggtg

SEQ ID NO: 1854472 - DNA, 25 bp, Homo sapien
taagatacgtgcacaccttggtgaa

SEQ ID NO: 1854473 - DNA, 25 bp, Homo sapien
ctctgctgtggggacctcactggac

SEQ ID NO: 1854474 - DNA, 25 bp, Homo sapien
tccctgacagcttccagagcctgag

SEQ ID NO: 1854475 - DNA, 25 bp, Homo sapien
gggacctcactggactccctgacag

SEQ ID NO: 1854476 - DNA, 25 bp, Homo sapien
ttaagggttgttctcttccagctgc

SEQ ID NO: 1854477 - DNA, 25 bp, Homo sapien
gagcctcaaagcctgcctaatcctg

SEQ ID NO: 1854478 - DNA, 25 bp, Homo sapien
tctcagttacagagagggcggccac

SEQ ID NO: 1854479 - DNA, 25 bp, Homo sapien
cctgggaaggtcagttaagtcctgc

SEQ ID NO: 1854480 - DNA, 25 bp, Homo sapien
agaccaagagcggttcagcccaatc

SEQ ID NO: 1854481 - DNA, 25 bp, Homo sapien
gatccaggaatccaatgctccccga

SEQ ID NO: 1854482 - DNA, 25 bp, Homo sapien
ccaaggactcgaggcatctgggtca

SEQ ID NO: 1854483 - DNA, 25 bp, Homo sapien
tgggctcacagtcttatcaacctgc

SEQ ID NO: 1854484 - DNA, 25 bp, Homo sapien
cagctgaggctactaggtgtccaaa

SEQ ID NO: 1854485 - DNA, 25 bp, Homo sapien
tccatttggcgagggtttcctgagg

SEQ ID NO: 1854486 - DNA, 25 bp, Homo sapien
aagacttcagctcccaagaccagcc

SEQ ID NO: 1854487 - DNA, 25 bp, Homo sapien
atgagtccatttggcgagggtttcc

SEQ ID NO: 1854488 - DNA, 25 bp, Homo sapien
ccaggagctcgcagagagctcccaa

SEQ ID NO: 1854489 - DNA, 25 bp, Homo sapien
tgggtcccgatgcctttcatctgct

SEQ ID NO: 1854490 - DNA, 25 bp, Homo sapien
gcaggtgctgtttcagcacctcggt

SEQ ID NO: 1854491 - DNA, 25 bp, Homo sapien
gcacctcggtcagcgccacaaggct

SEQ ID NO: 1854492 - DNA, 25 bp, Homo sapien
gtgctgtttcagcacctcggtcagc

SEQ ID NO: 1854493 - DNA, 25 bp, Homo sapien
tcagacactgctctgaggaaaaaac

SEQ ID NO: 1854494 - DNA, 25 bp, Homo sapien
cagacactgctctgaggaaaaaact

SEQ ID NO: 1854495 - DNA, 25 bp, Homo sapien
gacactgctctgaggaaaaaactgt

SEQ ID NO: 1854496 - DNA, 25 bp, Homo sapien
cactgctctgaggaaaaaactgtcc

SEQ ID NO: 1854497 - DNA, 25 bp, Homo sapien
aatgcgggcgcccagcgtgatgtta

SEQ ID NO: 1854498 - DNA, 25 bp, Homo sapien
tccagccggtggatgcccttttcct

SEQ ID NO: 1854499 - DNA, 25 bp, Homo sapien
gatgagcgcctgcacaaaggtcagc

SEQ ID NO: 1854500 - DNA, 25 bp, Homo sapien
ttgatgcgatccagggcgaacagca

SEQ ID NO: 1854501 - DNA, 25 bp, Homo sapien
ttaagttctccacagggcttgccct

SEQ ID NO: 1854502 - DNA, 25 bp, Homo sapien
ctatgcggatggaattcatgtgagg

SEQ ID NO: 1854503 - DNA, 25 bp, Homo sapien
gtgatgtccccatctatgcggatgg

SEQ ID NO: 1854504 - DNA, 25 bp, Homo sapien
ctgagccccggccatgcaccgggaa

SEQ ID NO: 1854505 - DNA, 25 bp, Homo sapien
tgaggagcaggcaaaggggcagccg

SEQ ID NO: 1854506 - DNA, 25 bp, Homo sapien
ccaccaccagcccaagcctctcttc

SEQ ID NO: 1854507 - DNA, 25 bp, Homo sapien
accaccagcccaagcctctcttccc

SEQ ID NO: 1854508 - DNA, 25 bp, Homo sapien
ggagcaggcaaaggggcagccgggc

SEQ ID NO: 1854509 - DNA, 25 bp, Homo sapien
actgagggcagccaaccgcgtagcc

SEQ ID NO: 1854510 - DNA, 25 bp, Homo sapien
gagacccatgaacggcaggcccact

SEQ ID NO: 1854511 - DNA, 25 bp, Homo sapien
gcgtagcccatgctgctaccctctc

SEQ ID NO: 1854512 - DNA, 25 bp, Homo sapien
gaaatccctagagacccatgaacgg

SEQ ID NO: 1854513 - DNA, 25 bp, Homo sapien
tgaggccggagcacgtctgggctga

SEQ ID NO: 1854514 - DNA, 25 bp, Homo sapien
gccggagcacgtctgggctgagcag

SEQ ID NO: 1854515 - DNA, 25 bp, Homo sapien
cttgaggccggagcacgtctgggct

SEQ ID NO: 1854516 - DNA, 25 bp, Homo sapien
gcttctccttgaggccggagcacgt

SEQ ID NO: 1854517 - DNA, 25 bp, Homo sapien
aagtctgagggcgggatgtcactca

SEQ ID NO: 1854518 - DNA, 25 bp, Homo sapien
gggagaaagaagcaaggcgcctcct

SEQ ID NO: 1854519 - DNA, 25 bp, Homo sapien
tccgacagggactgaaagtctgagg

SEQ ID NO: 1854520 - DNA, 25 bp, Homo sapien
ggaaaggccgcgttctcccgcgcca

SEQ ID NO: 1854521 - DNA, 25 bp, Homo sapien
tccgctcgcccggcggccgcgtaga

SEQ ID NO: 1854522 - DNA, 25 bp, Homo sapien
cggccgcgtagacgcgcaggttcat

SEQ ID NO: 1854523 - DNA, 25 bp, Homo sapien
ccggcggccgcgtagacgcgcaggt

SEQ ID NO: 1854524 - DNA, 25 bp, Homo sapien
acagagaccactgccggtccgctcg

SEQ ID NO: 1854525 - DNA, 25 bp, Homo sapien
cgggcacgggagctggacgcggtgc

SEQ ID NO: 1854526 - DNA, 25 bp, Homo sapien
gggcaagcggttgccgggctccggc

SEQ ID NO: 1854527 - DNA, 25 bp, Homo sapien
gccacgggcaagcggttgccgggct

SEQ ID NO: 1854528 - DNA, 25 bp, Homo sapien
gggcgggcacgggagctggacgcgg

SEQ ID NO: 1854529 - DNA, 25 bp, Homo sapien
aggcacggttctcgcggtgcccaga

SEQ ID NO: 1854530 - DNA, 25 bp, Homo sapien
gtccgagccggaaggagcgggagag

SEQ ID NO: 1854531 - DNA, 25 bp, Homo sapien
ccagcaaggtttaagccgcggcgag

SEQ ID NO: 1854532 - DNA, 25 bp, Homo sapien
tgctccggcaagcgagcaagcgaga

SEQ ID NO: 1854533 - DNA, 25 bp, Homo sapien
agccggccgaggtacgggcgcctgg

SEQ ID NO: 1854534 - DNA, 25 bp, Homo sapien
tggcggcgccgcaacagcggcaaca

SEQ ID NO: 1854535 - DNA, 25 bp, Homo sapien
agcggagcgggagcgaccagcgagc

SEQ ID NO: 1854536 - DNA, 25 bp, Homo sapien
aaaatgagagcgagctagagagcgc

SEQ ID NO: 1854537 - DNA, 25 bp, Homo sapien
ctcatccagggaaatggcaacacca

SEQ ID NO: 1854538 - DNA, 25 bp, Homo sapien
ctactcgtggagtaagcagggagtg

SEQ ID NO: 1854539 - DNA, 25 bp, Homo sapien
gagtgatgctgacccgcccgttcct

SEQ ID NO: 1854540 - DNA, 25 bp, Homo sapien
tcatccagggaaatggcaacaccat

SEQ ID NO: 1854541 - DNA, 25 bp, Homo sapien
gggcaaagccttttgccgaacactg

SEQ ID NO: 1854542 - DNA, 25 bp, Homo sapien
agaggtcatggctgacgctctcctg

SEQ ID NO: 1854543 - DNA, 25 bp, Homo sapien
gcaaagccttttgccgaacactgca

SEQ ID NO: 1854544 - DNA, 25 bp, Homo sapien
catggctgacgctctcctgtgagca

SEQ ID NO: 1854545 - DNA, 25 bp, Homo sapien
caggctccccatcgcgggccagcac

SEQ ID NO: 1854546 - DNA, 25 bp, Homo sapien
ccagcaccgccgcccggtggccgaa

SEQ ID NO: 1854547 - DNA, 25 bp, Homo sapien
agccaggctccccatcgcgggccag

SEQ ID NO: 1854548 - DNA, 25 bp, Homo sapien
ccgcccggtggccgaacgccctcat

SEQ ID NO: 1854549 - DNA, 25 bp, Homo sapien
ccacgccagctaatttgctttttgt

SEQ ID NO: 1854550 - DNA, 25 bp, Homo sapien
gcaattctctgcctcagcatctcga

SEQ ID NO: 1854551 - DNA, 25 bp, Homo sapien
caagcaattctctgcctcagcatct

SEQ ID NO: 1854552 - DNA, 25 bp, Homo sapien
cacgccagctaatttgctttttgtt

SEQ ID NO: 1854553 - DNA, 25 bp, Homo sapien
gaaacatgcttgacctttctggcaa

SEQ ID NO: 1854554 - DNA, 25 bp, Homo sapien
ggcaagcagctcaattgtgcatagg

SEQ ID NO: 1854555 - DNA, 25 bp, Homo sapien
ggtcagaggtttatgtcccagcatc

SEQ ID NO: 1854556 - DNA, 25 bp, Homo sapien
ttaaatgaccagttgcagcgctggc

SEQ ID NO: 1854557 - DNA, 25 bp, Homo sapien
caccattaagaacaaagacatcatc

SEQ ID NO: 1854558 - DNA, 25 bp, Homo sapien
accattaagaacaaagacatcatct

SEQ ID NO: 1854559 - DNA, 25 bp, Homo sapien
tggacactcttacatagccaccatt

SEQ ID NO: 1854560 - DNA, 25 bp, Homo sapien
gacactcttacatagccaccattaa

SEQ ID NO: 1854561 - DNA, 25 bp, Homo sapien
ttcccactgaactgcgtaggctgga

SEQ ID NO: 1854562 - DNA, 25 bp, Homo sapien
tgccagatcgcaaggtctcattctt

SEQ ID NO: 1854563 - DNA, 25 bp, Homo sapien
gggatcaatgtccatagctgccaga

SEQ ID NO: 1854564 - DNA, 25 bp, Homo sapien
aaagggcagcagttgactacagaag

SEQ ID NO: 1854565 - DNA, 25 bp, Homo sapien
tggcctccaagcaggaaaaggacgg

SEQ ID NO: 1854566 - DNA, 25 bp, Homo sapien
tccaagcaggaaaaggacggcactg

SEQ ID NO: 1854567 - DNA, 25 bp, Homo sapien
gatgagtgagtcgagctcgaagtcc

SEQ ID NO: 1854568 - DNA, 25 bp, Homo sapien
gccgcgcaagcagcctccggtgagt

SEQ ID NO: 1854569 - DNA, 25 bp, Homo sapien
tggacagctttgctccgctcccacc

SEQ ID NO: 1854570 - DNA, 25 bp, Homo sapien
ccttctgggactggacagctttgct

SEQ ID NO: 1854571 - DNA, 25 bp, Homo sapien
gacagctttgctccgctcccaccgc

SEQ ID NO: 1854572 - DNA, 25 bp, Homo sapien
ggacagctttgctccgctcccaccg

SEQ ID NO: 1854573 - DNA, 25 bp, Homo sapien
taaccctactttgcttccgccactc

SEQ ID NO: 1854574 - DNA, 25 bp, Homo sapien
agcaagggggcccaaatcgaccata

SEQ ID NO: 1854575 - DNA, 25 bp, Homo sapien
caaatcgaccataaagggtgtaggg

SEQ ID NO: 1854576 - DNA, 25 bp, Homo sapien
ggctgggtgaccgactaccccagtc

SEQ ID NO: 1854577 - DNA, 25 bp, Homo sapien
tatatactgaatactatacatctgg

SEQ ID NO: 1854578 - DNA, 25 bp, Homo sapien
tactgaatactatacatctggcccc

SEQ ID NO: 1854579 - DNA, 25 bp, Homo sapien
tgcctggggatttgtgcccaagccc

SEQ ID NO: 1854580 - DNA, 25 bp, Homo sapien
gaatactatacatctggccccatca

SEQ ID NO: 1854581 - DNA, 25 bp, Homo sapien
gaaagcaaaggtgtctaccagccgc

SEQ ID NO: 1854582 - DNA, 25 bp, Homo sapien
gtgggcggtgagctcaacacccaca

SEQ ID NO: 1854583 - DNA, 25 bp, Homo sapien
aaagcaaaggtgtctaccagccgcc

SEQ ID NO: 1854584 - DNA, 25 bp, Homo sapien
cctgtgggtgggcggtgagctcaac

SEQ ID NO: 1854585 - DNA, 25 bp, Homo sapien
cagcagtggcatccgcttgtgctgg

SEQ ID NO: 1854586 - DNA, 25 bp, Homo sapien
tgctggtagccactctgccagccat

SEQ ID NO: 1854587 - DNA, 25 bp, Homo sapien
gcttgtgctggtagccactctgcca

SEQ ID NO: 1854588 - DNA, 25 bp, Homo sapien
gcatccgcttgtgctggtagccact

SEQ ID NO: 1854589 - DNA, 25 bp, Homo sapien
tctggtttcagtgtggacgagtatg

SEQ ID NO: 1854590 - DNA, 25 bp, Homo sapien
gcacccagttacagcccaagtaagc

SEQ ID NO: 1854591 - DNA, 25 bp, Homo sapien
cctgggagtctgcagcacccagtta

SEQ ID NO: 1854592 - DNA, 25 bp, Homo sapien
gctctggtttcagtgtggacgagta

SEQ ID NO: 1854593 - DNA, 25 bp, Homo sapien
tcagctgggtcatagctgtacatgg

SEQ ID NO: 1854594 - DNA, 25 bp, Homo sapien
tctcccatgtcagagagcagctcct

SEQ ID NO: 1854595 - DNA, 25 bp, Homo sapien
ggagcaggtgatggcgcagccggtc

SEQ ID NO: 1854596 - DNA, 25 bp, Homo sapien
gcctcatgcagttcctcagctgggt

SEQ ID NO: 1854597 - DNA, 25 bp, Homo sapien
tgggtgccttttgggacacactata

SEQ ID NO: 1854598 - DNA, 25 bp, Homo sapien
gctttccccagtgagtaacctgagg

SEQ ID NO: 1854599 - DNA, 25 bp, Homo sapien
aatttcaggcttgtatcaggatggc

SEQ ID NO: 1854600 - DNA, 25 bp, Homo sapien
acagaaaagtcagagcctatgagca

SEQ ID NO: 1854601 - DNA, 25 bp, Homo sapien
cacccttcactcccttaacaggaca

SEQ ID NO: 1854602 - DNA, 25 bp, Homo sapien
ttcactcccttaacaggacagtggg

SEQ ID NO: 1854603 - DNA, 25 bp, Homo sapien
cccttcactcccttaacaggacagt

SEQ ID NO: 1854604 - DNA, 25 bp, Homo sapien
cttcactcccttaacaggacagtgg

SEQ ID NO: 1854605 - DNA, 25 bp, Homo sapien
accaccaccccgaccagggtgatga

SEQ ID NO: 1854606 - DNA, 25 bp, Homo sapien
agccaccaccaccccgaccagggtg

SEQ ID NO: 1854607 - DNA, 25 bp, Homo sapien
ccaccaccccgaccagggtgatgag

SEQ ID NO: 1854608 - DNA, 25 bp, Homo sapien
ccaccaccaccccgaccagggtgat

SEQ ID NO: 1854609 - DNA, 25 bp, Homo sapien
cattgggcacagtggtgttactcat

SEQ ID NO: 1854610 - DNA, 25 bp, Homo sapien
ggcattgggcacagtggtgttactc

SEQ ID NO: 1854611 - DNA, 25 bp, Homo sapien
ctggggggcattgggcacagtggtg

SEQ ID NO: 1854612 - DNA, 25 bp, Homo sapien
ggggcattgggcacagtggtgttac

SEQ ID NO: 1854613 - DNA, 25 bp, Homo sapien
tgggcagtggcgcttcgggagggcg

SEQ ID NO: 1854614 - DNA, 25 bp, Homo sapien
gtggcgcttcgggagggcgcctcca

SEQ ID NO: 1854615 - DNA, 25 bp, Homo sapien
tcgggagggcgcctccactgggctc

SEQ ID NO: 1854616 - DNA, 25 bp, Homo sapien
ggtcagcatgggcagtggcgcttcg

SEQ ID NO: 1854617 - DNA, 25 bp, Homo sapien
ggtcagtccccatcgacagaagcaa

SEQ ID NO: 1854618 - DNA, 25 bp, Homo sapien
gtttgcacgctgatggcccaaggtc

SEQ ID NO: 1854619 - DNA, 25 bp, Homo sapien
cgcttgagtctctatcagagggcaa

SEQ ID NO: 1854620 - DNA, 25 bp, Homo sapien
catctgtctcgtgtgccagggtgga

SEQ ID NO: 1854621 - DNA, 25 bp, Homo sapien
cacggggcatcgagcttgcccttac

SEQ ID NO: 1854622 - DNA, 25 bp, Homo sapien
tagggcacggggcatcgagcttgcc

SEQ ID NO: 1854623 - DNA, 25 bp, Homo sapien
cccgtgtccgtagggcacggggcat

SEQ ID NO: 1854624 - DNA, 25 bp, Homo sapien
tgtccgtagggcacggggcatcgag

SEQ ID NO: 1854625 - DNA, 25 bp, Homo sapien
ctggaagcccgtcacccgaggcgtg

SEQ ID NO: 1854626 - DNA, 25 bp, Homo sapien
cgctgctaggatgcgggccagcaac

SEQ ID NO: 1854627 - DNA, 25 bp, Homo sapien
aacagcggacaggaggtggttccca

SEQ ID NO: 1854628 - DNA, 25 bp, Homo sapien
cagtcgtatgctcatcgtcccaggt

SEQ ID NO: 1854629 - DNA, 25 bp, Homo sapien
tctcgttgcagccagaatagggtcg

SEQ ID NO: 1854630 - DNA, 25 bp, Homo sapien
gaaaagccgtcaggcgcgtgatcaa

SEQ ID NO: 1854631 - DNA, 25 bp, Homo sapien
aaagccggtggcctggagatttctg

SEQ ID NO: 1854632 - DNA, 25 bp, Homo sapien
ggtcgcgccacgctctaacgttgag

SEQ ID NO: 1854633 - DNA, 25 bp, Homo sapien
gcgtgctttatggacaatgcgctcc

SEQ ID NO: 1854634 - DNA, 25 bp, Homo sapien
caggcgtgctttatggacaatgcgc

SEQ ID NO: 1854635 - DNA, 25 bp, Homo sapien
tcagccaggcgtgctttatggacaa

SEQ ID NO: 1854636 - DNA, 25 bp, Homo sapien
gccaggcgtgctttatggacaatgc

SEQ ID NO: 1854637 - DNA, 25 bp, Homo sapien
tgaccgcgtacttccccagcgggta

SEQ ID NO: 1854638 - DNA, 25 bp, Homo sapien
cctcatgcttgttgagccggcggcg

SEQ ID NO: 1854639 - DNA, 25 bp, Homo sapien
catgcttgttgagccggcggcgcat

SEQ ID NO: 1854640 - DNA, 25 bp, Homo sapien
ttccccagcgggtacagccgctcct

SEQ ID NO: 1854641 - DNA, 25 bp, Homo sapien
ccaggggcttgtagttcctgccctt

SEQ ID NO: 1854642 - DNA, 25 bp, Homo sapien
ggtccaggggcttgtagttcctgcc

SEQ ID NO: 1854643 - DNA, 25 bp, Homo sapien
tccaggggcttgtagttcctgccct

SEQ ID NO: 1854644 - DNA, 25 bp, Homo sapien
ggggcttgtagttcctgcccttgta

SEQ ID NO: 1854645 - DNA, 25 bp, Homo sapien
ctagttaataacagtgagaacacag

SEQ ID NO: 1854646 - DNA, 25 bp, Homo sapien
gaacacaggcaatggatttgcggac

SEQ ID NO: 1854647 - DNA, 25 bp, Homo sapien
gtgagaacacaggcaatggatttgc

SEQ ID NO: 1854648 - DNA, 25 bp, Homo sapien
tgagaacacaggcaatggatttgcg

SEQ ID NO: 1854649 - DNA, 25 bp, Homo sapien
tcggatcttagagagcttggaggcc

SEQ ID NO: 1854650 - DNA, 25 bp, Homo sapien
atcttagagagcttggaggccgcac

SEQ ID NO: 1854651 - DNA, 25 bp, Homo sapien
ggatcttagagagcttggaggccgc

SEQ ID NO: 1854652 - DNA, 25 bp, Homo sapien
gactcggatcttagagagcttggag

SEQ ID NO: 1854653 - DNA, 25 bp, Homo sapien
tggcgacgcgcagctgggacagctc

SEQ ID NO: 1854654 - DNA, 25 bp, Homo sapien
cgacgcgcagctgggacagctccac

SEQ ID NO: 1854655 - DNA, 25 bp, Homo sapien
tttggcgacgcgcagctgggacagc

SEQ ID NO: 1854656 - DNA, 25 bp, Homo sapien
gcgacgcgcagctgggacagctcca

SEQ ID NO: 1854657 - DNA, 25 bp, Homo sapien
ttcccgcgaagatctcgagccttga

SEQ ID NO: 1854658 - DNA, 25 bp, Homo sapien
ttcttcccgcgaagatctcgagcct

SEQ ID NO: 1854659 - DNA, 25 bp, Homo sapien
tcccgcgaagatctcgagccttgat

SEQ ID NO: 1854660 - DNA, 25 bp, Homo sapien
tccttcttcccgcgaagatctcgag

SEQ ID NO: 1854661 - DNA, 25 bp, Homo sapien
acaggccgccgacgccgccgcgccg

SEQ ID NO: 1854662 - DNA, 25 bp, Homo sapien
gcacaggccgccgacgccgccgcgc

SEQ ID NO: 1854663 - DNA, 25 bp, Homo sapien
ctgcacaggccgccgacgccgccgc

SEQ ID NO: 1854664 - DNA, 25 bp, Homo sapien
tgctgcacaggccgccgacgccgcc

SEQ ID NO: 1854665 - DNA, 25 bp, Homo sapien
atactggtttttattggttggcaca

SEQ ID NO: 1854666 - DNA, 25 bp, Homo sapien
tactggtttttattggttggcacaa

SEQ ID NO: 1854667 - DNA, 25 bp, Homo sapien
cacagctcaaatggaaggaaactga

SEQ ID NO: 1854668 - DNA, 25 bp, Homo sapien
tgtggctggcctgttctttagagag

SEQ ID NO: 1854669 - DNA, 25 bp, Homo sapien
taacacatagaaaggaacggcaggc

SEQ ID NO: 1854670 - DNA, 25 bp, Homo sapien
tgtacctgtctcagaccaaacctgg

SEQ ID NO: 1854671 - DNA, 25 bp, Homo sapien
tactgccagccgcacccatgagaag

SEQ ID NO: 1854672 - DNA, 25 bp, Homo sapien
ctgccagccgcacccatgagaagga

SEQ ID NO: 1854673 - DNA, 25 bp, Homo sapien
tgtactgccagccgcacccatgaga

SEQ ID NO: 1854674 - DNA, 25 bp, Homo sapien
tgactgtactgccagccgcacccat

SEQ ID NO: 1854675 - DNA, 25 bp, Homo sapien
tagatctagcagtgagagagccctc

SEQ ID NO: 1854676 - DNA, 25 bp, Homo sapien
catgggctggctcctaatatcaaaa

SEQ ID NO: 1854677 - DNA, 25 bp, Homo sapien
gaatcttcacatctggcctggctgg

SEQ ID NO: 1854678 - DNA, 25 bp, Homo sapien
tgaacctggcaaaacgacaatgctg

SEQ ID NO: 1854679 - DNA, 25 bp, Homo sapien
tagaatgctctaggtcaggaaaaga

SEQ ID NO: 1854680 - DNA, 25 bp, Homo sapien
cagccctgcagtccctttttaaaga

SEQ ID NO: 1854681 - DNA, 25 bp, Homo sapien
ccagaggtatcatggtatcccaaga

SEQ ID NO: 1854682 - DNA, 25 bp, Homo sapien
tgttcttatccaatgggacctctcc

SEQ ID NO: 1854683 - DNA, 25 bp, Homo sapien
tacaggcgcccacctaatttctgca

SEQ ID NO: 1854684 - DNA, 25 bp, Homo sapien
acaggcgcccacctaatttctgcat

SEQ ID NO: 1854685 - DNA, 25 bp, Homo sapien
gctgaacactaaatgacacagggct

SEQ ID NO: 1854686 - DNA, 25 bp, Homo sapien
cagggctatgaggtacatacatttc

SEQ ID NO: 1854687 - DNA, 25 bp, Homo sapien
ccagtgagtagacagcaaaatttaa

SEQ ID NO: 1854688 - DNA, 25 bp, Homo sapien
aactgatgttcccaaaagtgctgaa

SEQ ID NO: 1854689 - DNA, 25 bp, Homo sapien
tgtcttaagccacggatcagtcagt

SEQ ID NO: 1854690 - DNA, 25 bp, Homo sapien
tcagagcacatggatgatacccagg

SEQ ID NO: 1854691 - DNA, 25 bp, Homo sapien
tcagggacaggactacattgatgca

SEQ ID NO: 1854692 - DNA, 25 bp, Homo sapien
taataagtgattacgtggcctccca

SEQ ID NO: 1854693 - DNA, 25 bp, Homo sapien
tgtacagcacattataggacaaatt

SEQ ID NO: 1854694 - DNA, 25 bp, Homo sapien
tactgaactgtacagcacattatag

SEQ ID NO: 1854695 - DNA, 25 bp, Homo sapien
agtgaaagtgaccactctactgaac

SEQ ID NO: 1854696 - DNA, 25 bp, Homo sapien
agtgaccactctactgaactgtaca

SEQ ID NO: 1854697 - DNA, 25 bp, Homo sapien
aaagaaaacgtctggccagggccag

SEQ ID NO: 1854698 - DNA, 25 bp, Homo sapien
tcaaagaaaacgtctggccagggcc

SEQ ID NO: 1854699 - DNA, 25 bp, Homo sapien
aatcaaagaaaacgtctggccaggg

SEQ ID NO: 1854700 - DNA, 25 bp, Homo sapien
aaaatcaaagaaaacgtctggccag

SEQ ID NO: 1854701 - DNA, 25 bp, Homo sapien
gagggacagatcatgcacaaaagta

SEQ ID NO: 1854702 - DNA, 25 bp, Homo sapien
acttcagtctagtttccaatttcca

SEQ ID NO: 1854703 - DNA, 25 bp, Homo sapien
tatttgaaagaggaggcctgtgaga

SEQ ID NO: 1854704 - DNA, 25 bp, Homo sapien
tatcaatacaccctttctttgctgc

SEQ ID NO: 1854705 - DNA, 25 bp, Homo sapien
tctgatgcctgacatcgagctctga

SEQ ID NO: 1854706 - DNA, 25 bp, Homo sapien
tgcctgcacgggtttgtgatactgc

SEQ ID NO: 1854707 - DNA, 25 bp, Homo sapien
ggtgccattgttggctgagtagcct

SEQ ID NO: 1854708 - DNA, 25 bp, Homo sapien
tgcagcacttttatggcgtcttcta

SEQ ID NO: 1854709 - DNA, 25 bp, Homo sapien
accaccacagtttatagttccaaag

SEQ ID NO: 1854710 - DNA, 25 bp, Homo sapien
tgtaccaccacagtttatagttcca

SEQ ID NO: 1854711 - DNA, 25 bp, Homo sapien
atgtaaacgtaacagccatctgaga

SEQ ID NO: 1854712 - DNA, 25 bp, Homo sapien
aagatgtaaacgtaacagccatctg

SEQ ID NO: 1854713 - DNA, 25 bp, Homo sapien
caatgttaactgaatcttcccagtc

SEQ ID NO: 1854714 - DNA, 25 bp, Homo sapien
cacatagacatacgtcctgtgcttc

SEQ ID NO: 1854715 - DNA, 25 bp, Homo sapien
gtgacaatgagcacatagacatacg

SEQ ID NO: 1854716 - DNA, 25 bp, Homo sapien
cagtcttccagcacttcagtgacaa

SEQ ID NO: 1854717 - DNA, 25 bp, Homo sapien
atccatgtagtctcacctacctggg

SEQ ID NO: 1854718 - DNA, 25 bp, Homo sapien
aaaactcaccgaggttgggcatggt

SEQ ID NO: 1854719 - DNA, 25 bp, Homo sapien
aaaaaactcaccgaggttgggcatg

SEQ ID NO: 1854720 - DNA, 25 bp, Homo sapien
gtgtatccatgtagtctcacctacc

SEQ ID NO: 1854721 - DNA, 25 bp, Homo sapien
tcaaaaattccaactaatcttccca

SEQ ID NO: 1854722 - DNA, 25 bp, Homo sapien
ccactgagggtctggaaggagagct

SEQ ID NO: 1854723 - DNA, 25 bp, Homo sapien
ctgagggtctggaaggagagctgtt

SEQ ID NO: 1854724 - DNA, 25 bp, Homo sapien
ctgccacaagcctccactgagggtc

SEQ ID NO: 1854725 - DNA, 25 bp, Homo sapien
tgtgctcctgccacaagcctccact

SEQ ID NO: 1854726 - DNA, 25 bp, Homo sapien
tcgggatatgtgtcagggccacatc

SEQ ID NO: 1854727 - DNA, 25 bp, Homo sapien
caggcaaaggttctcccagacagct

SEQ ID NO: 1854728 - DNA, 25 bp, Homo sapien
cacatctgacagatatttggctcac

SEQ ID NO: 1854729 - DNA, 25 bp, Homo sapien
caggctagggcgcatggtcatagct

SEQ ID NO: 1854730 - DNA, 25 bp, Homo sapien
gctattcaggtgggtgaggcaggag

SEQ ID NO: 1854731 - DNA, 25 bp, Homo sapien
tacccgggcgtggtgggtgcccata

SEQ ID NO: 1854732 - DNA, 25 bp, Homo sapien
cagctattcaggtgggtgaggcagg

SEQ ID NO: 1854733 - DNA, 25 bp, Homo sapien
cgggcgtggtgggtgcccataatcc

SEQ ID NO: 1854734 - DNA, 25 bp, Homo sapien
gtatgttcaacagctccttagaggc

SEQ ID NO: 1854735 - DNA, 25 bp, Homo sapien
tctacagtggacattttgaccgaca

SEQ ID NO: 1854736 - DNA, 25 bp, Homo sapien
tctagtaagaagctgacccagtgcc

SEQ ID NO: 1854737 - DNA, 25 bp, Homo sapien
tgaccgacaatgaggtttgcccagc

SEQ ID NO: 1854738 - DNA, 25 bp, Homo sapien
ctgaaaatggtgtttattattctct

SEQ ID NO: 1854739 - DNA, 25 bp, Homo sapien
aaatggtgtttattattctcttgca

SEQ ID NO: 1854740 - DNA, 25 bp, Homo sapien
gaaaatggtgtttattattctcttg

SEQ ID NO: 1854741 - DNA, 25 bp, Homo sapien
aatggtgtttattattctcttgcat

SEQ ID NO: 1854742 - DNA, 25 bp, Homo sapien
tgttaccaagtgaaagagtttctcg

SEQ ID NO: 1854743 - DNA, 25 bp, Homo sapien
ggtctcttttggtagatcaactgca

SEQ ID NO: 1854744 - DNA, 25 bp, Homo sapien
gacacatgtagttctaggtaattca

SEQ ID NO: 1854745 - DNA, 25 bp, Homo sapien
tctcagtcacagaggataagtacct

SEQ ID NO: 1854746 - DNA, 25 bp, Homo sapien
ccatcataatgaatctgcagttctt

SEQ ID NO: 1854747 - DNA, 25 bp, Homo sapien
cttaggggcattatatattcacagc

SEQ ID NO: 1854748 - DNA, 25 bp, Homo sapien
tttgacaagtgaccatcataatgaa

SEQ ID NO: 1854749 - DNA, 25 bp, Homo sapien
cagatttcctcttaggggcattata

SEQ ID NO: 1854750 - DNA, 25 bp, Homo sapien
tgttagttatcttgtttaagaaaca

SEQ ID NO: 1854751 - DNA, 25 bp, Homo sapien
ttgtgttagttatcttgtttaagaa

SEQ ID NO: 1854752 - DNA, 25 bp, Homo sapien
agttatcttgtttaagaaacacatc

SEQ ID NO: 1854753 - DNA, 25 bp, Homo sapien
ttttctcccaatctggcacttgtct

SEQ ID NO: 1854754 - DNA, 25 bp, Homo sapien
tcttgtcttaattgcagtggctagg

SEQ ID NO: 1854755 - DNA, 25 bp, Homo sapien
tatctgtcatgggaatgctttgaac

SEQ ID NO: 1854756 - DNA, 25 bp, Homo sapien
cccaggctagtcagaaccagaaata

SEQ ID NO: 1854757 - DNA, 25 bp, Homo sapien
tctagtttaattatcgagatcaggg

SEQ ID NO: 1854758 - DNA, 25 bp, Homo sapien
caaaaggtatgtaactatcctcctc

SEQ ID NO: 1854759 - DNA, 25 bp, Homo sapien
ggtatgtaactatcctcctctaaat

SEQ ID NO: 1854760 - DNA, 25 bp, Homo sapien
cagtcttacaaaaggtatgtaacta

SEQ ID NO: 1854761 - DNA, 25 bp, Homo sapien
tatcctcctctaaatagtcttcaag

SEQ ID NO: 1854762 - DNA, 25 bp, Homo sapien
gctctttgtaacattcttataattt

SEQ ID NO: 1854763 - DNA, 25 bp, Homo sapien
agctctttgtaacattcttataatt

SEQ ID NO: 1854764 - DNA, 25 bp, Homo sapien
gatgggatcatgcttgccaactaac

SEQ ID NO: 1854765 - DNA, 25 bp, Homo sapien
caaccattctcctatcggtggacat

SEQ ID NO: 1854766 - DNA, 25 bp, Homo sapien
cccaaggagaagacaatatagaacg

SEQ ID NO: 1854767 - DNA, 25 bp, Homo sapien
tcttacaggacgctctatgttggga

SEQ ID NO: 1854768 - DNA, 25 bp, Homo sapien
atatcaaaatgttactagtggcgag

SEQ ID NO: 1854769 - DNA, 25 bp, Homo sapien
gggctgttaataggcgaaaactcac

SEQ ID NO: 1854770 - DNA, 25 bp, Homo sapien
gctatgacagttaggagccaggaac

SEQ ID NO: 1854771 - DNA, 25 bp, Homo sapien
gccaggaacctgagacgaaaacatc

SEQ ID NO: 1854772 - DNA, 25 bp, Homo sapien
cgcatgtgaacctagcactctggga

SEQ ID NO: 1854773 - DNA, 25 bp, Homo sapien
tcacgcatgtgaacctagcactctg

SEQ ID NO: 1854774 - DNA, 25 bp, Homo sapien
acgcatgtgaacctagcactctggg

SEQ ID NO: 1854775 - DNA, 25 bp, Homo sapien
gctcacgcatgtgaacctagcactc

SEQ ID NO: 1854776 - DNA, 25 bp, Homo sapien
caagcaacagtaatgtgtgaaccta

SEQ ID NO: 1854777 - DNA, 25 bp, Homo sapien
ggacatttgaatatagagtcaatac

SEQ ID NO: 1854778 - DNA, 25 bp, Homo sapien
gagtcaatactggataatatcatgg

SEQ ID NO: 1854779 - DNA, 25 bp, Homo sapien
tgaacctaggttaaggcctagtgag

SEQ ID NO: 1854780 - DNA, 25 bp, Homo sapien
tcgatctgttgcccatagcttgctg

SEQ ID NO: 1854781 - DNA, 25 bp, Homo sapien
tgagtagatggaactataagtgcaa

SEQ ID NO: 1854782 - DNA, 25 bp, Homo sapien
agtagatggaactataagtgcaagc

SEQ ID NO: 1854783 - DNA, 25 bp, Homo sapien
gatctgttgcccatagcttgctgca

SEQ ID NO: 1854784 - DNA, 25 bp, Homo sapien
cagggtgactacaaatacagtcggc

SEQ ID NO: 1854785 - DNA, 25 bp, Homo sapien
tatttgtgcactacacgtctgtgga

SEQ ID NO: 1854786 - DNA, 25 bp, Homo sapien
ccttgaacaagttggtagggtgcca

SEQ ID NO: 1854787 - DNA, 25 bp, Homo sapien
gcaaagcaacaggtggcatgagcca

SEQ ID NO: 1854788 - DNA, 25 bp, Homo sapien
ttactatactcttatattaaagcta

SEQ ID NO: 1854789 - DNA, 25 bp, Homo sapien
tttactatactcttatattaaagct

SEQ ID NO: 1854790 - DNA, 25 bp, Homo sapien
tatttactatactcttatattaaag

SEQ ID NO: 1854791 - DNA, 25 bp, Homo sapien
tactatactcttatattaaagctag

SEQ ID NO: 1854792 - DNA, 25 bp, Homo sapien
cagttcaatcccctgttgtttaagg

SEQ ID NO: 1854793 - DNA, 25 bp, Homo sapien
tagtgtttacattgcatgaggtagc

SEQ ID NO: 1854794 - DNA, 25 bp, Homo sapien
gcacactcagtataatggtgtaact

SEQ ID NO: 1854795 - DNA, 25 bp, Homo sapien
cacatataaatgaacccgtgcagtt

SEQ ID NO: 1854796 - DNA, 25 bp, Homo sapien
tacagccttggctgggcagttgctg

SEQ ID NO: 1854797 - DNA, 25 bp, Homo sapien
ctgtcacgagtgatgcctgccggtg

SEQ ID NO: 1854798 - DNA, 25 bp, Homo sapien
cttaactgaggcatttggagagtat

SEQ ID NO: 1854799 - DNA, 25 bp, Homo sapien
ggtgcactgtgacccaagtttccag

SEQ ID NO: 1854800 - DNA, 25 bp, Homo sapien
tactgaatagtaatcccttgttgaa

SEQ ID NO: 1854801 - DNA, 25 bp, Homo sapien
taagtaggacaactgaagttcttta

SEQ ID NO: 1854802 - DNA, 25 bp, Homo sapien
tagtaatcccttgttgaatgagtat

SEQ ID NO: 1854803 - DNA, 25 bp, Homo sapien
tagtttgatacaatccaatctgtct

SEQ ID NO: 1854804 - DNA, 25 bp, Homo sapien
gagggaccggataaccattcattgc

SEQ ID NO: 1854805 - DNA, 25 bp, Homo sapien
catgggaagtaacaaaagtctggca

SEQ ID NO: 1854806 - DNA, 25 bp, Homo sapien
tcatgatgacgaggcacagctgtgc

SEQ ID NO: 1854807 - DNA, 25 bp, Homo sapien
cacagagtgccggttaacattacca

SEQ ID NO: 1854808 - DNA, 25 bp, Homo sapien
agacttcacgaactgctgccacact

SEQ ID NO: 1854809 - DNA, 25 bp, Homo sapien
gacttcacgaactgctgccacactt

SEQ ID NO: 1854810 - DNA, 25 bp, Homo sapien
cacttggctcctcctcgggctccat

SEQ ID NO: 1854811 - DNA, 25 bp, Homo sapien
tgccacacttggctcctcctcgggc

SEQ ID NO: 1854812 - DNA, 25 bp, Homo sapien
atccatctgtctggatggcgactac

SEQ ID NO: 1854813 - DNA, 25 bp, Homo sapien
ggatggcgactactgctcacgagta

SEQ ID NO: 1854814 - DNA, 25 bp, Homo sapien
ggcgactactgctcacgagtagcac

SEQ ID NO: 1854815 - DNA, 25 bp, Homo sapien
tgtctggatggcgactactgctcac

SEQ ID NO: 1854816 - DNA, 25 bp, Homo sapien
gtccctcttgttcctgtcataagag

SEQ ID NO: 1854817 - DNA, 25 bp, Homo sapien
tcagtccctcttgttcctgtcataa

SEQ ID NO: 1854818 - DNA, 25 bp, Homo sapien
agtccctcttgttcctgtcataaga

SEQ ID NO: 1854819 - DNA, 25 bp, Homo sapien
cagtccctcttgttcctgtcataag

SEQ ID NO: 1854820 - DNA, 25 bp, Homo sapien
ggacattgctgctctaaggcaagct

SEQ ID NO: 1854821 - DNA, 25 bp, Homo sapien
tctaaggcaagctcagagcattgct

SEQ ID NO: 1854822 - DNA, 25 bp, Homo sapien
ttgcttctagccttgcatttggaca

SEQ ID NO: 1854823 - DNA, 25 bp, Homo sapien
aacttgcttctagccttgcatttgg

SEQ ID NO: 1854824 - DNA, 25 bp, Homo sapien
tctccagcgtctatatgcaaaggga

SEQ ID NO: 1854825 - DNA, 25 bp, Homo sapien
tataacatgctcttgaatcagtccc

SEQ ID NO: 1854826 - DNA, 25 bp, Homo sapien
ccaactatgttatctgggaggcact

SEQ ID NO: 1854827 - DNA, 25 bp, Homo sapien
tgtggttcctgccttcgttacagca

SEQ ID NO: 1854828 - DNA, 25 bp, Homo sapien
catcgttaaatctgttgctacatct

SEQ ID NO: 1854829 - DNA, 25 bp, Homo sapien
agtcatcgttaaatctgttgctaca

SEQ ID NO: 1854830 - DNA, 25 bp, Homo sapien
taaagtcatcgttaaatctgttgct

SEQ ID NO: 1854831 - DNA, 25 bp, Homo sapien
ttttataaagtcatcgttaaatctg

SEQ ID NO: 1854832 - DNA, 25 bp, Homo sapien
aatattaaataatcggctgggcacg

SEQ ID NO: 1854833 - DNA, 25 bp, Homo sapien
gaattcacaccttgggaaggaggca

SEQ ID NO: 1854834 - DNA, 25 bp, Homo sapien
tctgcccactgaagagctccaatgt

SEQ ID NO: 1854835 - DNA, 25 bp, Homo sapien
tgtgaagcagctcccctttgccaag

SEQ ID NO: 1854836 - DNA, 25 bp, Homo sapien
gaaaattaagccgttgctagtttgc

SEQ ID NO: 1854837 - DNA, 25 bp, Homo sapien
cagtcttgcatcattcgtacaacta

SEQ ID NO: 1854838 - DNA, 25 bp, Homo sapien
tttaaaacaaacagtcttgcatcat

SEQ ID NO: 1854839 - DNA, 25 bp, Homo sapien
tgttgctaatgtcagtgcataacaa

SEQ ID NO: 1854840 - DNA, 25 bp, Homo sapien
ttttaccaccatgcacacgagaaat

SEQ ID NO: 1854841 - DNA, 25 bp, Homo sapien
tataacatattggatttcactgtcc

SEQ ID NO: 1854842 - DNA, 25 bp, Homo sapien
gcatcttatgaatttccaaagcagc

SEQ ID NO: 1854843 - DNA, 25 bp, Homo sapien
agcagctactcttttgtggatttac

SEQ ID NO: 1854844 - DNA, 25 bp, Homo sapien
gcagtggaggaacgtcagggcaaaa

SEQ ID NO: 1854845 - DNA, 25 bp, Homo sapien
agtggaggaacgtcagggcaaaaat

SEQ ID NO: 1854846 - DNA, 25 bp, Homo sapien
tggaggaacgtcagggcaaaaatgt

SEQ ID NO: 1854847 - DNA, 25 bp, Homo sapien
gaggaacgtcagggcaaaaatgtta

SEQ ID NO: 1854848 - DNA, 25 bp, Homo sapien
tctctgccacaaaggccggcccgcg

SEQ ID NO: 1854849 - DNA, 25 bp, Homo sapien
caatgaagtgcactatttctctgcc

SEQ ID NO: 1854850 - DNA, 25 bp, Homo sapien
tccgcacacatgtgcctggctgaca

SEQ ID NO: 1854851 - DNA, 25 bp, Homo sapien
ccggcccgcgcctcgtgcacgccgg

SEQ ID NO: 1854852 - DNA, 25 bp, Homo sapien
gcatgcggcccgcttcttgtagccg

SEQ ID NO: 1854853 - DNA, 25 bp, Homo sapien
ctcgctctcgctgcggaaacacagg

SEQ ID NO: 1854854 - DNA, 25 bp, Homo sapien
tcttgtagccgtcgccgtcgtaggt

SEQ ID NO: 1854855 - DNA, 25 bp, Homo sapien
tcgtaggtgcgggtctggttcgact

SEQ ID NO: 1854856 - DNA, 25 bp, Homo sapien
ggtcgcaggagtcgaggggtgggga

SEQ ID NO: 1854857 - DNA, 25 bp, Homo sapien
ggtgcgggtcgcaggagtcgagggg

SEQ ID NO: 1854858 - DNA, 25 bp, Homo sapien
tgcgggtcgcaggagtcgaggggtg

SEQ ID NO: 1854859 - DNA, 25 bp, Homo sapien
cgggtcgcaggagtcgaggggtggg

SEQ ID NO: 1854860 - DNA, 25 bp, Homo sapien
ctggacggccgcgtgcgcgcgcgcc

SEQ ID NO: 1854861 - DNA, 25 bp, Homo sapien
gcccccggctcggccaagggaagca

SEQ ID NO: 1854862 - DNA, 25 bp, Homo sapien
cagggagggggagcttctccgctac

SEQ ID NO: 1854863 - DNA, 25 bp, Homo sapien
ccccggctcggccaagggaagcagg

SEQ ID NO: 1854864 - DNA, 25 bp, Homo sapien
ccgctgccaccgtcacggctgccgt

SEQ ID NO: 1854865 - DNA, 25 bp, Homo sapien
cgctgccaccgtcacggctgccgtc

SEQ ID NO: 1854866 - DNA, 25 bp, Homo sapien
gcggccgcctcattcccccaggccc

SEQ ID NO: 1854867 - DNA, 25 bp, Homo sapien
tccgcggccgaggatgaaccaaggt

SEQ ID NO: 1854868 - DNA, 25 bp, Homo sapien
gccctcccagttcgcgcggtggaaa

SEQ ID NO: 1854869 - DNA, 25 bp, Homo sapien
tgcgtcagcggcgtaaggctgcacc

SEQ ID NO: 1854870 - DNA, 25 bp, Homo sapien
ggtccagccgcgcaagtctgcggat

SEQ ID NO: 1854871 - DNA, 25 bp, Homo sapien
gcagccggctaattcccctttttga

SEQ ID NO: 1854872 - DNA, 25 bp, Homo sapien
tttgaaagcaaatacaccttggttg

SEQ ID NO: 1854873 - DNA, 25 bp, Homo sapien
agggcacaccagatgctattaatag

SEQ ID NO: 1854874 - DNA, 25 bp, Homo sapien
aatagagacctacttggccctggca

SEQ ID NO: 1854875 - DNA, 25 bp, Homo sapien
attatctgatgaaccattgggctgg

SEQ ID NO: 1854876 - DNA, 25 bp, Homo sapien
aaccattgggctggtgggtagattc

SEQ ID NO: 1854877 - DNA, 25 bp, Homo sapien
agtagtagtggtggtcgggattatc

SEQ ID NO: 1854878 - DNA, 25 bp, Homo sapien
gggtagattcgaggctatggtgcac

SEQ ID NO: 1854879 - DNA, 25 bp, Homo sapien
gatgcacttccaattagctaccagc

SEQ ID NO: 1854880 - DNA, 25 bp, Homo sapien
tacccatgcgggtctttaactcctg

SEQ ID NO: 1854881 - DNA, 25 bp, Homo sapien
ccaagtccccggaacccataagatg

SEQ ID NO: 1854882 - DNA, 25 bp, Homo sapien
tcttgagccactggttggttcagag

SEQ ID NO: 1854883 - DNA, 25 bp, Homo sapien
ctgaccacgtccacgaccaaatccg

SEQ ID NO: 1854884 - DNA, 25 bp, Homo sapien
aggtggctgaccacgtccacgacca

SEQ ID NO: 1854885 - DNA, 25 bp, Homo sapien
cacgtccacgaccaaatccgcctct

SEQ ID NO: 1854886 - DNA, 25 bp, Homo sapien
accacgtccacgaccaaatccgcct

SEQ ID NO: 1854887 - DNA, 25 bp, Homo sapien
tggaggttttgctaactttcaggcc

SEQ ID NO: 1854888 - DNA, 25 bp, Homo sapien
tcaggcctcattataactccagagg

SEQ ID NO: 1854889 - DNA, 25 bp, Homo sapien
tcattggtaaagtgggagtatggcc

SEQ ID NO: 1854890 - DNA, 25 bp, Homo sapien
tgagtacaggctataaatcccagca

SEQ ID NO: 1854891 - DNA, 25 bp, Homo sapien
atccagcaccaggattggaccgttt

SEQ ID NO: 1854892 - DNA, 25 bp, Homo sapien
cattatctgagagcaatcgtgtgct

SEQ ID NO: 1854893 - DNA, 25 bp, Homo sapien
tatctgagagcaatcgtgtgctatg

SEQ ID NO: 1854894 - DNA, 25 bp, Homo sapien
ttttacaaatgacattatctgagag

SEQ ID NO: 1854895 - DNA, 25 bp, Homo sapien
gagagcaatcgtgtgctatgaggac

SEQ ID NO: 1854896 - DNA, 25 bp, Homo sapien
ggacaaaaatgatatgccagtacta

SEQ ID NO: 1854897 - DNA, 25 bp, Homo sapien
gggaacctacctaacattacatcaa

SEQ ID NO: 1854898 - DNA, 25 bp, Homo sapien
taccttagtagctgtaattatcacc

SEQ ID NO: 1854899 - DNA, 25 bp, Homo sapien
taccatcttggttcttaagcccacc

SEQ ID NO: 1854900 - DNA, 25 bp, Homo sapien
ccccagcctcggctttcttgtcggc

SEQ ID NO: 1854901 - DNA, 25 bp, Homo sapien
cagcctcggctttcttgtcggcacc

SEQ ID NO: 1854902 - DNA, 25 bp, Homo sapien
gcctcggctttcttgtcggcaccag

SEQ ID NO: 1854903 - DNA, 25 bp, Homo sapien
agccccagcctcggctttcttgtcg

SEQ ID NO: 1854904 - DNA, 25 bp, Homo sapien
agtaccactccgttaaatataagca

SEQ ID NO: 1854905 - DNA, 25 bp, Homo sapien
aactcactgactccaatcttgcagg

SEQ ID NO: 1854906 - DNA, 25 bp, Homo sapien
gaaagtgaaacatcgatttagaatc

SEQ ID NO: 1854907 - DNA, 25 bp, Homo sapien
caaaggattcctacttcctatcaca

SEQ ID NO: 1854908 - DNA, 25 bp, Homo sapien
aattaccaccatgggagaaaagcag

SEQ ID NO: 1854909 - DNA, 25 bp, Homo sapien
cagtcacagttcaaatggagacgtg

SEQ ID NO: 1854910 - DNA, 25 bp, Homo sapien
tggagacgtgtgcaaaattcaccag

SEQ ID NO: 1854911 - DNA, 25 bp, Homo sapien
gaaaagcagacaagatgctgcccgg

SEQ ID NO: 1854912 - DNA, 25 bp, Homo sapien
ttgtcatcatcaagggctgagcccc

SEQ ID NO: 1854913 - DNA, 25 bp, Homo sapien
catctatgaaatcactgcatgaaga

SEQ ID NO: 1854914 - DNA, 25 bp, Homo sapien
tgcagagtgaaaccaagaatctttc

SEQ ID NO: 1854915 - DNA, 25 bp, Homo sapien
ccccaacacccctaatataggtgat

SEQ ID NO: 1854916 - DNA, 25 bp, Homo sapien
tggcacagcactccgtctgtaggta

SEQ ID NO: 1854917 - DNA, 25 bp, Homo sapien
gtggcacagcactccgtctgtaggt

SEQ ID NO: 1854918 - DNA, 25 bp, Homo sapien
acagcactccgtctgtaggtatctc

SEQ ID NO: 1854919 - DNA, 25 bp, Homo sapien
gcacagcactccgtctgtaggtatc

SEQ ID NO: 1854920 - DNA, 25 bp, Homo sapien
cagcttcccctcttgtgagtctcgc

SEQ ID NO: 1854921 - DNA, 25 bp, Homo sapien
cttgtgagtctcgcaggtcgctcac

SEQ ID NO: 1854922 - DNA, 25 bp, Homo sapien
cctcttgtgagtctcgcaggtcgct

SEQ ID NO: 1854923 - DNA, 25 bp, Homo sapien
agcttcccctcttgtgagtctcgca

SEQ ID NO: 1854924 - DNA, 25 bp, Homo sapien
acagggcaatgtgagaactctgtcc

SEQ ID NO: 1854925 - DNA, 25 bp, Homo sapien
cacagggcaatgtgagaactctgtc

SEQ ID NO: 1854926 - DNA, 25 bp, Homo sapien
cagggcaatgtgagaactctgtccc

SEQ ID NO: 1854927 - DNA, 25 bp, Homo sapien
gttcctgggcttaaccacaggtgtg

SEQ ID NO: 1854928 - DNA, 25 bp, Homo sapien
tcctgggcttaaccacaggtgtgca

SEQ ID NO: 1854929 - DNA, 25 bp, Homo sapien
ttcctgggcttaaccacaggtgtgc

SEQ ID NO: 1854930 - DNA, 25 bp, Homo sapien
gagttcctgggcttaaccacaggtg

SEQ ID NO: 1854931 - DNA, 25 bp, Homo sapien
tcgggaatagtacaacgcactctgc

SEQ ID NO: 1854932 - DNA, 25 bp, Homo sapien
gttctattccaagtcccaagccatg

SEQ ID NO: 1854933 - DNA, 25 bp, Homo sapien
gacaaaggttctagcacttgaccaa

SEQ ID NO: 1854934 - DNA, 25 bp, Homo sapien
cgcactctgcgggaaaagttactca

SEQ ID NO: 1854935 - DNA, 25 bp, Homo sapien
tcacgtagcctcgggacttgagaga

SEQ ID NO: 1854936 - DNA, 25 bp, Homo sapien
ctgttccttcacgtagcctcgggac

SEQ ID NO: 1854937 - DNA, 25 bp, Homo sapien
tctctggacggctacggcgtagggt

SEQ ID NO: 1854938 - DNA, 25 bp, Homo sapien
cagtctctggacggctacggcgtag

SEQ ID NO: 1854939 - DNA, 25 bp, Homo sapien
gcatggccttcatgacatgaaggtt

SEQ ID NO: 1854940 - DNA, 25 bp, Homo sapien
ggccttcatgacatgaaggttgggc

SEQ ID NO: 1854941 - DNA, 25 bp, Homo sapien
tcatgacatgaaggttgggcacatt

SEQ ID NO: 1854942 - DNA, 25 bp, Homo sapien
cttcatgacatgaaggttgggcaca

SEQ ID NO: 1854943 - DNA, 25 bp, Homo sapien
tccgggtgcttaggcatgtggacat

SEQ ID NO: 1854944 - DNA, 25 bp, Homo sapien
atggcaatccggttcttcttaggca

SEQ ID NO: 1854945 - DNA, 25 bp, Homo sapien
ataaatggcaatccggttcttctta

SEQ ID NO: 1854946 - DNA, 25 bp, Homo sapien
tcataaatggcaatccggttcttct

SEQ ID NO: 1854947 - DNA, 25 bp, Homo sapien
agcacttctgagtaacgaggccggg

SEQ ID NO: 1854948 - DNA, 25 bp, Homo sapien
ctgcaagaaggagacgattgtcaag

SEQ ID NO: 1854949 - DNA, 25 bp, Homo sapien
agagcacttctgagtaacgaggccg

SEQ ID NO: 1854950 - DNA, 25 bp, Homo sapien
gacgattgtcaagagcacttctgag

SEQ ID NO: 1854951 - DNA, 25 bp, Homo sapien
tgtattatcgggagcagttggaggc

SEQ ID NO: 1854952 - DNA, 25 bp, Homo sapien
tattatcgggagcagttggaggcca

SEQ ID NO: 1854953 - DNA, 25 bp, Homo sapien
ttatcgggagcagttggaggccatc

SEQ ID NO: 1854954 - DNA, 25 bp, Homo sapien
agttggaggccatcagcgaccgtac

SEQ ID NO: 1854955 - DNA, 25 bp, Homo sapien
taccataaggtacgcagggaaggcc

SEQ ID NO: 1854956 - DNA, 25 bp, Homo sapien
ccggcttcttgaaggcggcagaccc

SEQ ID NO: 1854957 - DNA, 25 bp, Homo sapien
ggaatctcgcggctgtaccataagg

SEQ ID NO: 1854958 - DNA, 25 bp, Homo sapien
aaagcgtgtcggtgggacaccgtct

SEQ ID NO: 1854959 - DNA, 25 bp, Homo sapien
gcccctatcgctactcagaaatcgg

SEQ ID NO: 1854960 - DNA, 25 bp, Homo sapien
tcggacaatcttcgcctaccagcgg

SEQ ID NO: 1854961 - DNA, 25 bp, Homo sapien
ggatgggagccgatggaactcgaac

SEQ ID NO: 1854962 - DNA, 25 bp, Homo sapien
caggatagcccggatgggagccgat

SEQ ID NO: 1854963 - DNA, 25 bp, Homo sapien
ctgcggctgcagggtccggtaccgg

SEQ ID NO: 1854964 - DNA, 25 bp, Homo sapien
tctgcggctgcagggtccggtaccg

SEQ ID NO: 1854965 - DNA, 25 bp, Homo sapien
tgcggctgcagggtccggtaccggg

SEQ ID NO: 1854966 - DNA, 25 bp, Homo sapien
ctctgcggctgcagggtccggtacc

SEQ ID NO: 1854967 - DNA, 25 bp, Homo sapien
gcatgcgcggtgctgcgtctcttcc

SEQ ID NO: 1854968 - DNA, 25 bp, Homo sapien
gagcatgcgcggtgctgcgtctctt

SEQ ID NO: 1854969 - DNA, 25 bp, Homo sapien
ggagcatgcgcggtgctgcgtctct

SEQ ID NO: 1854970 - DNA, 25 bp, Homo sapien
aaggagcatgcgcggtgctgcgtct

SEQ ID NO: 1854971 - DNA, 25 bp, Homo sapien
ctggcgtggacccgccccccgccag

SEQ ID NO: 1854972 - DNA, 25 bp, Homo sapien
aatgtcacatatttatagcctgttg

SEQ ID NO: 1854973 - DNA, 25 bp, Homo sapien
tatagcctgttggatctgttgcttt

SEQ ID NO: 1854974 - DNA, 25 bp, Homo sapien
ttgctttgggcctcactcttgagga

SEQ ID NO: 1854975 - DNA, 25 bp, Homo sapien
tgctttgggcctcactcttgaggag

SEQ ID NO: 1854976 - DNA, 25 bp, Homo sapien
aggttcatccccctttgtagcaagt

SEQ ID NO: 1854977 - DNA, 25 bp, Homo sapien
cccctttgtagcaagtaactagtgc

SEQ ID NO: 1854978 - DNA, 25 bp, Homo sapien
catccccctttgtagcaagtaacta

SEQ ID NO: 1854979 - DNA, 25 bp, Homo sapien
cctttgtagcaagtaactagtgcat

SEQ ID NO: 1854980 - DNA, 25 bp, Homo sapien
gggataattgctgcggtaattatga

SEQ ID NO: 1854981 - DNA, 25 bp, Homo sapien
taattgctgcggtaattatgaagat

SEQ ID NO: 1854982 - DNA, 25 bp, Homo sapien
gctgcggtaattatgaagattgcac

SEQ ID NO: 1854983 - DNA, 25 bp, Homo sapien
tcattggggataattgctgcggtaa

SEQ ID NO: 1854984 - DNA, 25 bp, Homo sapien
cccctccaagggtgtgcgtgcccca

SEQ ID NO: 1854985 - DNA, 25 bp, Homo sapien
caagggtgtgcgtgccccagccctg

SEQ ID NO: 1854986 - DNA, 25 bp, Homo sapien
tcccctccaagggtgtgcgtgcccc

SEQ ID NO: 1854987 - DNA, 25 bp, Homo sapien
gaacagacaacctgccccacactgt

SEQ ID NO: 1854988 - DNA, 25 bp, Homo sapien
cagacaacctgccccacactgtcca

SEQ ID NO: 1854989 - DNA, 25 bp, Homo sapien
ctgtgaacagacaacctgccccaca

SEQ ID NO: 1854990 - DNA, 25 bp, Homo sapien
gtgaacagacaacctgccccacact

SEQ ID NO: 1854991 - DNA, 25 bp, Homo sapien
tcgatccctcccacgctctgctggg

SEQ ID NO: 1854992 - DNA, 25 bp, Homo sapien
tgttgccatccgactctgtggtctc

SEQ ID NO: 1854993 - DNA, 25 bp, Homo sapien
cactctgttgccatccgactctgtg

SEQ ID NO: 1854994 - DNA, 25 bp, Homo sapien
gactctgtggtctctctcgatccct

SEQ ID NO: 1854995 - DNA, 25 bp, Homo sapien
caggtaggcatttcgatggctggaa

SEQ ID NO: 1854996 - DNA, 25 bp, Homo sapien
gcccacacgggcccaggtaggcatt

SEQ ID NO: 1854997 - DNA, 25 bp, Homo sapien
gtgcccacacgggcccaggtaggca

SEQ ID NO: 1854998 - DNA, 25 bp, Homo sapien
cccaggtaggcatttcgatggctgg

SEQ ID NO: 1854999 - DNA, 25 bp, Homo sapien
ataggagccaaacaggccagctgga

SEQ ID NO: 1855000 - DNA, 25 bp, Homo sapien
tgataggagccaaacaggccagctg

SEQ ID NO: 1855001 - DNA, 25 bp, Homo sapien
ctgataggagccaaacaggccagct

SEQ ID NO: 1855002 - DNA, 25 bp, Homo sapien
aggagccaaacaggccagctggagg

SEQ ID NO: 1855003 - DNA, 25 bp, Homo sapien
tcctctgtacctcttgtctccacca

SEQ ID NO: 1855004 - DNA, 25 bp, Homo sapien
gagaggtcttgtcagaaccgtcaga

SEQ ID NO: 1855005 - DNA, 25 bp, Homo sapien
agaaccttgatcctcctcatcaggg

SEQ ID NO: 1855006 - DNA, 25 bp, Homo sapien
catcagggggactgtccctgttgcc

SEQ ID NO: 1855007 - DNA, 25 bp, Homo sapien
ctgcactgggtccacacatcttcct

SEQ ID NO: 1855008 - DNA, 25 bp, Homo sapien
ggccccggaagagggcaagctgcat

SEQ ID NO: 1855009 - DNA, 25 bp, Homo sapien
cttttctccaatccagctgtgacca

SEQ ID NO: 1855010 - DNA, 25 bp, Homo sapien
gagccattgcctcagggacattggg

SEQ ID NO: 1855011 - DNA, 25 bp, Homo sapien
gttccgacacttgtgaaactccgag

SEQ ID NO: 1855012 - DNA, 25 bp, Homo sapien
gccctaggcttcctgactccattag

SEQ ID NO: 1855013 - DNA, 25 bp, Homo sapien
ctgtggtctcagcaatgcacctgtt

SEQ ID NO: 1855014 - DNA, 25 bp, Homo sapien
tctgcggcctggttctgcaaggaac

SEQ ID NO: 1855015 - DNA, 25 bp, Homo sapien
gagaggcccctgagggcgggtttca

SEQ ID NO: 1855016 - DNA, 25 bp, Homo sapien
gtgcagatgtctccctgcaccatgc

SEQ ID NO: 1855017 - DNA, 25 bp, Homo sapien
cctgtggcctttgtcgagtcactgc

SEQ ID NO: 1855018 - DNA, 25 bp, Homo sapien
agtatctttattatccattcccggg

SEQ ID NO: 1855019 - DNA, 25 bp, Homo sapien
tcttgtaatactggcggatggagcg

SEQ ID NO: 1855020 - DNA, 25 bp, Homo sapien
tgcacgaactggtagacgaggcgct

SEQ ID NO: 1855021 - DNA, 25 bp, Homo sapien
gagatgtctggcttccggatgatgc

SEQ ID NO: 1855022 - DNA, 25 bp, Homo sapien
tagttcatggcgggacggttcttgc

SEQ ID NO: 1855023 - DNA, 25 bp, Homo sapien
gggctgagtcctcaattttgaagat

SEQ ID NO: 1855024 - DNA, 25 bp, Homo sapien
ggctgagtcctcaattttgaagatg

SEQ ID NO: 1855025 - DNA, 25 bp, Homo sapien
gctgagtcctcaattttgaagatgc

SEQ ID NO: 1855026 - DNA, 25 bp, Homo sapien
tgggctgagtcctcaattttgaaga

SEQ ID NO: 1855027 - DNA, 25 bp, Homo sapien
ccacctaatgaagcggccatagctg

SEQ ID NO: 1855028 - DNA, 25 bp, Homo sapien
tgagtagcaactccttgaggaactg

SEQ ID NO: 1855029 - DNA, 25 bp, Homo sapien
tccttgttgagccacctaatgaagc

SEQ ID NO: 1855030 - DNA, 25 bp, Homo sapien
ggctgcccggagcatgatgagtcca

SEQ ID NO: 1855031 - DNA, 25 bp, Homo sapien
cccaggtgaagtccgctctttcatc

SEQ ID NO: 1855032 - DNA, 25 bp, Homo sapien
cacagtagtgaatcgccccaggtga

SEQ ID NO: 1855033 - DNA, 25 bp, Homo sapien
agtgaatcgccccaggtgaagtccg

SEQ ID NO: 1855034 - DNA, 25 bp, Homo sapien
atcgccccaggtgaagtccgctctt

SEQ ID NO: 1855035 - DNA, 25 bp, Homo sapien
gggcaatacccaagacatactgtgg

SEQ ID NO: 1855036 - DNA, 25 bp, Homo sapien
gggaaactgttcatggtacactact

SEQ ID NO: 1855037 - DNA, 25 bp, Homo sapien
gagtattcatagactttccctggaa

SEQ ID NO: 1855038 - DNA, 25 bp, Homo sapien
tcctagtatccacggttgtccccag

SEQ ID NO: 1855039 - DNA, 25 bp, Homo sapien
gccggtattggtgctctgtccacag

SEQ ID NO: 1855040 - DNA, 25 bp, Homo sapien
ttctgcacattgctggggctccagt

SEQ ID NO: 1855041 - DNA, 25 bp, Homo sapien
agcgctggcggaactgctcctccga

SEQ ID NO: 1855042 - DNA, 25 bp, Homo sapien
acttccagatgtccaggtgggcgtg

SEQ ID NO: 1855043 - DNA, 25 bp, Homo sapien
ggtaacctggtgcatctgtactgcc

SEQ ID NO: 1855044 - DNA, 25 bp, Homo sapien
gctgctccaggcacatgtgttgaat

SEQ ID NO: 1855045 - DNA, 25 bp, Homo sapien
tccacggaataaagggctagacgca

SEQ ID NO: 1855046 - DNA, 25 bp, Homo sapien
gacactctaccagaaacacctgggc

SEQ ID NO: 1855047 - DNA, 25 bp, Homo sapien
tgtagaagtgccagcatccccaaag

SEQ ID NO: 1855048 - DNA, 25 bp, Homo sapien
cagcgtagcaaatgttgtgggaaca

SEQ ID NO: 1855049 - DNA, 25 bp, Homo sapien
gccttgcctgtgacccatcttacgg

SEQ ID NO: 1855050 - DNA, 25 bp, Homo sapien
catcttacggaagcaggcacatgga

SEQ ID NO: 1855051 - DNA, 25 bp, Homo sapien
ggccgtctcgatgtccttgagcact

SEQ ID NO: 1855052 - DNA, 25 bp, Homo sapien
tacagcatgtcaaagtaggagaggt

SEQ ID NO: 1855053 - DNA, 25 bp, Homo sapien
ttggctgtcaatgaccgggcactgc

SEQ ID NO: 1855054 - DNA, 25 bp, Homo sapien
gctccagcgagtgctcctccaaggt

SEQ ID NO: 1855055 - DNA, 25 bp, Homo sapien
gccgctgctgtttgggctggcggct

SEQ ID NO: 1855056 - DNA, 25 bp, Homo sapien
ccgctgctgtttgggctggcggctg

SEQ ID NO: 1855057 - DNA, 25 bp, Homo sapien
ctgctgtttgggctggcggctgtgt

SEQ ID NO: 1855058 - DNA, 25 bp, Homo sapien
gctgctgtttgggctggcggctgtg

SEQ ID NO: 1855059 - DNA, 25 bp, Homo sapien
tctccatccctgtgggggccgctaa

SEQ ID NO: 1855060 - DNA, 25 bp, Homo sapien
tgtgggggccgctaagctggttatg

SEQ ID NO: 1855061 - DNA, 25 bp, Homo sapien
gactcaggtttgactgcttctccat

SEQ ID NO: 1855062 - DNA, 25 bp, Homo sapien
tcaggtttgactgcttctccatccc

SEQ ID NO: 1855063 - DNA, 25 bp, Homo sapien
agccacgacatggttgggcagacag

SEQ ID NO: 1855064 - DNA, 25 bp, Homo sapien
cagccacgacatggttgggcagaca

SEQ ID NO: 1855065 - DNA, 25 bp, Homo sapien
cgcgcagcctccgtatgcagctggc

SEQ ID NO: 1855066 - DNA, 25 bp, Homo sapien
gcgcagcctccgtatgcagctggca

SEQ ID NO: 1855067 - DNA, 25 bp, Homo sapien
ccgcgcagcctccgtatgcagctgg

SEQ ID NO: 1855068 - DNA, 25 bp, Homo sapien
ggcactacttccagcgctttctggg

SEQ ID NO: 1855069 - DNA, 25 bp, Homo sapien
tgaataaactgctttgccgggccct

SEQ ID NO: 1855070 - DNA, 25 bp, Homo sapien
acttccagcgctttctgggacagga

SEQ ID NO: 1855071 - DNA, 25 bp, Homo sapien
ctacttccagcgctttctgggacag

SEQ ID NO: 1855072 - DNA, 25 bp, Homo sapien
tgttggtctgtaaaatcttgatggg

SEQ ID NO: 1855073 - DNA, 25 bp, Homo sapien
tgctgcagtgccaacttcaggggcc

SEQ ID NO: 1855074 - DNA, 25 bp, Homo sapien
agctgaggccactggcgtgtctcag

SEQ ID NO: 1855075 - DNA, 25 bp, Homo sapien
actggcgtgtctcagccaggcatct

SEQ ID NO: 1855076 - DNA, 25 bp, Homo sapien
gaggccactggcgtgtctcagccag

SEQ ID NO: 1855077 - DNA, 25 bp, Homo sapien
ctgctggcaccgtggcaaggcccaa

SEQ ID NO: 1855078 - DNA, 25 bp, Homo sapien
tcagggctgcgtgcctgtagggagt

SEQ ID NO: 1855079 - DNA, 25 bp, Homo sapien
cagagtgcaggaatgtgctgggagg

SEQ ID NO: 1855080 - DNA, 25 bp, Homo sapien
gaggcagcactcaggttggccactg

SEQ ID NO: 1855081 - DNA, 25 bp, Homo sapien
ggagaaagttctagataatgctgat

SEQ ID NO: 1855082 - DNA, 25 bp, Homo sapien
gctacctccattctgacgggagaaa

SEQ ID NO: 1855083 - DNA, 25 bp, Homo sapien
ctcttgtttcaggagtaactgtgta

SEQ ID NO: 1855084 - DNA, 25 bp, Homo sapien
taactgccgagagcatgaggattct

SEQ ID NO: 1855085 - DNA, 25 bp, Homo sapien
tcggcgccgtctttccctgggtcag

SEQ ID NO: 1855086 - DNA, 25 bp, Homo sapien
cttttcccacgacggggctgcgcga

SEQ ID NO: 1855087 - DNA, 25 bp, Homo sapien
catcagcgagcttttctgggctcct

SEQ ID NO: 1855088 - DNA, 25 bp, Homo sapien
tgcgcgagtgcatcccgagttgcag

SEQ ID NO: 1855089 - DNA, 25 bp, Homo sapien
tgcggctgtggatcatggtggatgt

SEQ ID NO: 1855090 - DNA, 25 bp, Homo sapien
atcatggtggatgtcggggagcagg

SEQ ID NO: 1855091 - DNA, 25 bp, Homo sapien
tggatcatggtggatgtcggggagc

SEQ ID NO: 1855092 - DNA, 25 bp, Homo sapien
cggctgtggatcatggtggatgtcg

SEQ ID NO: 1855093 - DNA, 25 bp, Homo sapien
gagcatctcatagttgggggggatg

SEQ ID NO: 1855094 - DNA, 25 bp, Homo sapien
catctcatagttgggggggatggcc

SEQ ID NO: 1855095 - DNA, 25 bp, Homo sapien
ttgagcatctcatagttggggggga

SEQ ID NO: 1855096 - DNA, 25 bp, Homo sapien
gcatctcatagttgggggggatggc

SEQ ID NO: 1855097 - DNA, 25 bp, Homo sapien
ctgttgacaggagaggagaaggttt

SEQ ID NO: 1855098 - DNA, 25 bp, Homo sapien
tgacaggagaggagaaggtttggac

SEQ ID NO: 1855099 - DNA, 25 bp, Homo sapien
caggagaggagaaggtttggacagt

SEQ ID NO: 1855100 - DNA, 25 bp, Homo sapien
ggagaggagaaggtttggacagtgt

SEQ ID NO: 1855101 - DNA, 25 bp, Homo sapien
tcatctactccataaccgtctgctg

SEQ ID NO: 1855102 - DNA, 25 bp, Homo sapien
tccataaccgtctgctgtgaccagc

SEQ ID NO: 1855103 - DNA, 25 bp, Homo sapien
tcctccatgcacttgcagcctggtt

SEQ ID NO: 1855104 - DNA, 25 bp, Homo sapien
cctgggtggtgtcacccctggcctg

SEQ ID NO: 1855105 - DNA, 25 bp, Homo sapien
gtgggaagcacccagacacaacctg

SEQ ID NO: 1855106 - DNA, 25 bp, Homo sapien
tcctatctctaagcagtcttgcctg

SEQ ID NO: 1855107 - DNA, 25 bp, Homo sapien
gagacttgagagtgcctgtttgctc

SEQ ID NO: 1855108 - DNA, 25 bp, Homo sapien
gaaatggttgggtcacagcaagcag

SEQ ID NO: 1855109 - DNA, 25 bp, Homo sapien
acaaatattcatttatacaataagg

SEQ ID NO: 1855110 - DNA, 25 bp, Homo sapien
tacaaatattcatttatacaataag

SEQ ID NO: 1855111 - DNA, 25 bp, Homo sapien
taatcatacaaatattcatttatac

SEQ ID NO: 1855112 - DNA, 25 bp, Homo sapien
tcatacaaatattcatttatacaat

SEQ ID NO: 1855113 - DNA, 25 bp, Homo sapien
gagtaatcagcttgcacttctgagc

SEQ ID NO: 1855114 - DNA, 25 bp, Homo sapien
aacaaaggaaaggtgcggcgaggca

SEQ ID NO: 1855115 - DNA, 25 bp, Homo sapien
ggtatttattctcatgcccatttcc

SEQ ID NO: 1855116 - DNA, 25 bp, Homo sapien
tctcctgctgggctcagattgaatt

SEQ ID NO: 1855117 - DNA, 25 bp, Homo sapien
gagaaggctgactgcttcttgtaga

SEQ ID NO: 1855118 - DNA, 25 bp, Homo sapien
ccagctgtttggtgaggttctctcc

SEQ ID NO: 1855119 - DNA, 25 bp, Homo sapien
tcaactgtcctcacggcaaaaagaa

SEQ ID NO: 1855120 - DNA, 25 bp, Homo sapien
ttcagaccctatcacctaaccatgg

SEQ ID NO: 1855121 - DNA, 25 bp, Homo sapien
gggtgccagacgcaggtggtcctgc

SEQ ID NO: 1855122 - DNA, 25 bp, Homo sapien
tcctgggtgccagacgcaggtggtc

SEQ ID NO: 1855123 - DNA, 25 bp, Homo sapien
tgccagacgcaggtggtcctgccca

SEQ ID NO: 1855124 - DNA, 25 bp, Homo sapien
ctgggtgccagacgcaggtggtcct

SEQ ID NO: 1855125 - DNA, 25 bp, Homo sapien
gagagaatgaatgatactgataccc

SEQ ID NO: 1855126 - DNA, 25 bp, Homo sapien
ttgctctgaacccataccagtgagg

SEQ ID NO: 1855127 - DNA, 25 bp, Homo sapien
gggctgagaggtagccactaccacc

SEQ ID NO: 1855128 - DNA, 25 bp, Homo sapien
gatactgataccctccctgggctgg

SEQ ID NO: 1855129 - DNA, 25 bp, Homo sapien
gaagggagacaaggtgcttgggaca

SEQ ID NO: 1855130 - DNA, 25 bp, Homo sapien
tgggacatttaacttgccaagtgtg

SEQ ID NO: 1855131 - DNA, 25 bp, Homo sapien
gcctccaaggatgtgcacagaaatg

SEQ ID NO: 1855132 - DNA, 25 bp, Homo sapien
ctcgcctccaaggatgtgcacagaa

SEQ ID NO: 1855133 - DNA, 25 bp, Homo sapien
gaagagcaagacgactctggcaggc

SEQ ID NO: 1855134 - DNA, 25 bp, Homo sapien
tgtctcaggagactggtaccagcag

SEQ ID NO: 1855135 - DNA, 25 bp, Homo sapien
gaacagctgggcatgcatgggctcc

SEQ ID NO: 1855136 - DNA, 25 bp, Homo sapien
gatgtgctgcttcaaggctactaag

SEQ ID NO: 1855137 - DNA, 25 bp, Homo sapien
gagtaagctctagtgaagtcccaga

SEQ ID NO: 1855138 - DNA, 25 bp, Homo sapien
tggtctccaagatcaagtagtcagt

SEQ ID NO: 1855139 - DNA, 25 bp, Homo sapien
gaagccactgcatgaagaatccaaa

SEQ ID NO: 1855140 - DNA, 25 bp, Homo sapien
caataatctagcatcctggcaggga

SEQ ID NO: 1855141 - DNA, 25 bp, Homo sapien
caaaacccaaagtggctgcatggat

SEQ ID NO: 1855142 - DNA, 25 bp, Homo sapien
caagccacagggttgacgaatacaa

SEQ ID NO: 1855143 - DNA, 25 bp, Homo sapien
tgtggtctgcaatccagaggaaccc

SEQ ID NO: 1855144 - DNA, 25 bp, Homo sapien
tctgctggccacacagggaagtttg

SEQ ID NO: 1855145 - DNA, 25 bp, Homo sapien
gccgaaggggtaaggcccatggagc

SEQ ID NO: 1855146 - DNA, 25 bp, Homo sapien
ctggccgaaggggtaaggcccatgg

SEQ ID NO: 1855147 - DNA, 25 bp, Homo sapien
tggccgaaggggtaaggcccatgga

SEQ ID NO: 1855148 - DNA, 25 bp, Homo sapien
actggccgaaggggtaaggcccatg

SEQ ID NO: 1855149 - DNA, 25 bp, Homo sapien
gggcctttataaagcaaccactggc

SEQ ID NO: 1855150 - DNA, 25 bp, Homo sapien
tcagtatgggtaacacagtgtgact

SEQ ID NO: 1855151 - DNA, 25 bp, Homo sapien
ttagttggacatggcgacgcatggc

SEQ ID NO: 1855152 - DNA, 25 bp, Homo sapien
gactccatctccacgcgcaaatttt

SEQ ID NO: 1855153 - DNA, 25 bp, Homo sapien
tctggatggaggtactttcaaaccg

SEQ ID NO: 1855154 - DNA, 25 bp, Homo sapien
gagttctaagacctggtgtaacagg

SEQ ID NO: 1855155 - DNA, 25 bp, Homo sapien
tttcaaaccgggaggcccatccaca

SEQ ID NO: 1855156 - DNA, 25 bp, Homo sapien
tctggtagccaacgacaatcccagc

SEQ ID NO: 1855157 - DNA, 25 bp, Homo sapien
tggtcagtgcttcttccgcctagtg

SEQ ID NO: 1855158 - DNA, 25 bp, Homo sapien
tatcggataacaccatgaggaccct

SEQ ID NO: 1855159 - DNA, 25 bp, Homo sapien
tgagaaataatatgctctcttggtg

SEQ ID NO: 1855160 - DNA, 25 bp, Homo sapien
gctctcttggtgtatactgatggca

SEQ ID NO: 1855161 - DNA, 25 bp, Homo sapien
gaactcttctatgccttagtcaaca

SEQ ID NO: 1855162 - DNA, 25 bp, Homo sapien
taacagaagcagactgactcctgct

SEQ ID NO: 1855163 - DNA, 25 bp, Homo sapien
tatgccttagtcaacatagatagca

SEQ ID NO: 1855164 - DNA, 25 bp, Homo sapien
gctagctccagatacaaaatgctct

SEQ ID NO: 1855165 - DNA, 25 bp, Homo sapien
taatttgtctcttgatctagaccac

SEQ ID NO: 1855166 - DNA, 25 bp, Homo sapien
tatgctattactactgaatgaagtc

SEQ ID NO: 1855167 - DNA, 25 bp, Homo sapien
gttaagatgtgaaacgtctttcctc

SEQ ID NO: 1855168 - DNA, 25 bp, Homo sapien
taaactactggtcaggctgggcacg

SEQ ID NO: 1855169 - DNA, 25 bp, Homo sapien
ccccttctcttctccaagggcacct

SEQ ID NO: 1855170 - DNA, 25 bp, Homo sapien
ctaccccttctcttctccaagggca

SEQ ID NO: 1855171 - DNA, 25 bp, Homo sapien
ccttctcttctccaagggcacctac

SEQ ID NO: 1855172 - DNA, 25 bp, Homo sapien
taccccttctcttctccaagggcac

SEQ ID NO: 1855173 - DNA, 25 bp, Homo sapien
ccttctaccttacgatgcggctgtg

SEQ ID NO: 1855174 - DNA, 25 bp, Homo sapien
gacagctgctgcgttactcctaaaa

SEQ ID NO: 1855175 - DNA, 25 bp, Homo sapien
agcaggagcccatgtgtcaggagca

SEQ ID NO: 1855176 - DNA, 25 bp, Homo sapien
taagttgtttgcgtgactgctggga

SEQ ID NO: 1855177 - DNA, 25 bp, Homo sapien
taagttactgctgcaatgggtcatc

SEQ ID NO: 1855178 - DNA, 25 bp, Homo sapien
tctctttgcgttggctattgctcag

SEQ ID NO: 1855179 - DNA, 25 bp, Homo sapien
aaatgtccttagtatgactcaccag

SEQ ID NO: 1855180 - DNA, 25 bp, Homo sapien
ggaaagtcatttgagaagccactga

SEQ ID NO: 1855181 - DNA, 25 bp, Homo sapien
cctgagaaagaagtttgcccaaaag

SEQ ID NO: 1855182 - DNA, 25 bp, Homo sapien
gcctgagaaagaagtttgcccaaaa

SEQ ID NO: 1855183 - DNA, 25 bp, Homo sapien
gcacaatagtgtgatgtcggctgac

SEQ ID NO: 1855184 - DNA, 25 bp, Homo sapien
gagcacaatagtgtgatgtcggctg

SEQ ID NO: 1855185 - DNA, 25 bp, Homo sapien
acaatagtgtgatgtcggctgactg

SEQ ID NO: 1855186 - DNA, 25 bp, Homo sapien
tggagcacaatagtgtgatgtcggc

SEQ ID NO: 1855187 - DNA, 25 bp, Homo sapien
caactctcttacagatgaccagtgg

SEQ ID NO: 1855188 - DNA, 25 bp, Homo sapien
gaccagtgggtgctaatcttcatca

SEQ ID NO: 1855189 - DNA, 25 bp, Homo sapien
tacaaaaggcagtcaaaccactcgc

SEQ ID NO: 1855190 - DNA, 25 bp, Homo sapien
ggtacttagaactccctcatggcca

SEQ ID NO: 1855191 - DNA, 25 bp, Homo sapien
agatcatgtcaaaacaaactataag

SEQ ID NO: 1855192 - DNA, 25 bp, Homo sapien
gatcatgtcaaaacaaactataagc

SEQ ID NO: 1855193 - DNA, 25 bp, Homo sapien
ctttagaattaaattgctttcaaga

SEQ ID NO: 1855194 - DNA, 25 bp, Homo sapien
ttagaattaaattgctttcaagatc

SEQ ID NO: 1855195 - DNA, 25 bp, Homo sapien
ctaatataaaggagctcagcagtgg

SEQ ID NO: 1855196 - DNA, 25 bp, Homo sapien
taaagataaaccagacatgtgtcac

SEQ ID NO: 1855197 - DNA, 25 bp, Homo sapien
tagaaagacgtaaagtgccaagaga

SEQ ID NO: 1855198 - DNA, 25 bp, Homo sapien
gaaaatggagtcctacagggaagag

SEQ ID NO: 1855199 - DNA, 25 bp, Homo sapien
ccctgggctgcacaaggacatactc

SEQ ID NO: 1855200 - DNA, 25 bp, Homo sapien
ttcctttaccctgggctgcacaagg

SEQ ID NO: 1855201 - DNA, 25 bp, Homo sapien
cttagttcctttaccctgggctgca

SEQ ID NO: 1855202 - DNA, 25 bp, Homo sapien
agttcctttaccctgggctgcacaa

SEQ ID NO: 1855203 - DNA, 25 bp, Homo sapien
cacatctggacgctgacatctgcaa

SEQ ID NO: 1855204 - DNA, 25 bp, Homo sapien
tctggacgctgacatctgcaatctc

SEQ ID NO: 1855205 - DNA, 25 bp, Homo sapien
gctgcacatctggacgctgacatct

SEQ ID NO: 1855206 - DNA, 25 bp, Homo sapien
agcagtgcacatccgccactgtccc

SEQ ID NO: 1855207 - DNA, 25 bp, Homo sapien
ttcacatgtccaaattggtctcccc

SEQ ID NO: 1855208 - DNA, 25 bp, Homo sapien
tgtccaaattggtctcccccgacat

SEQ ID NO: 1855209 - DNA, 25 bp, Homo sapien
ttggtctcccccgacatatttaaga

SEQ ID NO: 1855210 - DNA, 25 bp, Homo sapien
ggtctcccccgacatatttaagaca

SEQ ID NO: 1855211 - DNA, 25 bp, Homo sapien
gaacaatggcactagttggaggagt

SEQ ID NO: 1855212 - DNA, 25 bp, Homo sapien
gggtgatctcccctgataacatcaa

SEQ ID NO: 1855213 - DNA, 25 bp, Homo sapien
ttgggtggtagtgaaaatataaaca

SEQ ID NO: 1855214 - DNA, 25 bp, Homo sapien
tcaatgaactgtggtcgcaggaaca

SEQ ID NO: 1855215 - DNA, 25 bp, Homo sapien
ggcaaaatcaagcaaggtgagaaag

SEQ ID NO: 1855216 - DNA, 25 bp, Homo sapien
gcaaattagactttgaacaagtaag

SEQ ID NO: 1855217 - DNA, 25 bp, Homo sapien
caagcaaggtgagaaagaaattagg

SEQ ID NO: 1855218 - DNA, 25 bp, Homo sapien
tcctctgttaccatgtacctcccaa

SEQ ID NO: 1855219 - DNA, 25 bp, Homo sapien
taactgttataactaactgttacaa

SEQ ID NO: 1855220 - DNA, 25 bp, Homo sapien
ctaactgttataactaactgttaca

SEQ ID NO: 1855221 - DNA, 25 bp, Homo sapien
cctgagtcatccacaacattgggtc

SEQ ID NO: 1855222 - DNA, 25 bp, Homo sapien
attaacttgctagacagggcacccc

SEQ ID NO: 1855223 - DNA, 25 bp, Homo sapien
tttacaaagtcacaggtgtcctgag

SEQ ID NO: 1855224 - DNA, 25 bp, Homo sapien
tcttacataaaaggctggtctagcc

SEQ ID NO: 1855225 - DNA, 25 bp, Homo sapien
tatccggaggtattgactccccttc

SEQ ID NO: 1855226 - DNA, 25 bp, Homo sapien
ctgagtatccggaggtattgactcc

SEQ ID NO: 1855227 - DNA, 25 bp, Homo sapien
ttacaaactgagtatccggaggtat

SEQ ID NO: 1855228 - DNA, 25 bp, Homo sapien
gatccgccatgtttttacaaactga

SEQ ID NO: 1855229 - DNA, 25 bp, Homo sapien
aaagtcataataggcgccaattgct

SEQ ID NO: 1855230 - DNA, 25 bp, Homo sapien
tcataataggcgccaattgctgctt

SEQ ID NO: 1855231 - DNA, 25 bp, Homo sapien
agtcataataggcgccaattgctgc

SEQ ID NO: 1855232 - DNA, 25 bp, Homo sapien
tcaaagtcataataggcgccaattg

SEQ ID NO: 1855233 - DNA, 25 bp, Homo sapien
gatacgccaataatattgctactaa

SEQ ID NO: 1855234 - DNA, 25 bp, Homo sapien
acgccaataatattgctactaaagc

SEQ ID NO: 1855235 - DNA, 25 bp, Homo sapien
ctgggatacgccaataatattgcta

SEQ ID NO: 1855236 - DNA, 25 bp, Homo sapien
gggatacgccaataatattgctact

SEQ ID NO: 1855237 - DNA, 25 bp, Homo sapien
gagcacattgatccctaaagccaac

SEQ ID NO: 1855238 - DNA, 25 bp, Homo sapien
acagatgagcacattgatccctaaa

SEQ ID NO: 1855239 - DNA, 25 bp, Homo sapien
taaaactagtgcttctaattgcaga

SEQ ID NO: 1855240 - DNA, 25 bp, Homo sapien
taaagccaactttcatccaaggatt

SEQ ID NO: 1855241 - DNA, 25 bp, Homo sapien
aaaaataactaatcccatcaaccag

SEQ ID NO: 1855242 - DNA, 25 bp, Homo sapien
accagagataaccatctacagtttg

SEQ ID NO: 1855243 - DNA, 25 bp, Homo sapien
ctttagcctttcattctatttggag

SEQ ID NO: 1855244 - DNA, 25 bp, Homo sapien
ctgacgcgggggtatcaactgagtc

SEQ ID NO: 1855245 - DNA, 25 bp, Homo sapien
aaaagttgaatcttccttagccagc

SEQ ID NO: 1855246 - DNA, 25 bp, Homo sapien
aatgagtagcccaaaacagttcagg

SEQ ID NO: 1855247 - DNA, 25 bp, Homo sapien
catgtacaaaaacaggagaggttac

SEQ ID NO: 1855248 - DNA, 25 bp, Homo sapien
cagtgggaaaagtagagcagcaacc

SEQ ID NO: 1855249 - DNA, 25 bp, Homo sapien
tattgtcagacgagcttactactag

SEQ ID NO: 1855250 - DNA, 25 bp, Homo sapien
tgctgaccagaaagcactttagaag

SEQ ID NO: 1855251 - DNA, 25 bp, Homo sapien
tcagaaacacttgacagacctcagg

SEQ ID NO: 1855252 - DNA, 25 bp, Homo sapien
gggctgaccctctatatttgggaat

SEQ ID NO: 1855253 - DNA, 25 bp, Homo sapien
tcccactcaaacaatggaggtataa

SEQ ID NO: 1855254 - DNA, 25 bp, Homo sapien
ttcccactcaaacaatggaggtata

SEQ ID NO: 1855255 - DNA, 25 bp, Homo sapien
tataagggccttgttatctactacc

SEQ ID NO: 1855256 - DNA, 25 bp, Homo sapien
caatggaggtataagggccttgtta

SEQ ID NO: 1855257 - DNA, 25 bp, Homo sapien
ccgggagatcaccatactgatatcg

SEQ ID NO: 1855258 - DNA, 25 bp, Homo sapien
tacagacacccaaatggcatagcac

SEQ ID NO: 1855259 - DNA, 25 bp, Homo sapien
cttagtacagacacccaaatggcat

SEQ ID NO: 1855260 - DNA, 25 bp, Homo sapien
tactgatatcgaacttagtacagac

SEQ ID NO: 1855261 - DNA, 25 bp, Homo sapien
tctagttttgaatgccaacagaaca

SEQ ID NO: 1855262 - DNA, 25 bp, Homo sapien
ttctgcccaacttttagtgatggct

SEQ ID NO: 1855263 - DNA, 25 bp, Homo sapien
acacatctagttttgaatgccaaca

SEQ ID NO: 1855264 - DNA, 25 bp, Homo sapien
cagaacattcataagtttcctgccc

SEQ ID NO: 1855265 - DNA, 25 bp, Homo sapien
acaggtgcataccattaagcccgac

SEQ ID NO: 1855266 - DNA, 25 bp, Homo sapien
acactgggcctcacctattcacttt

SEQ ID NO: 1855267 - DNA, 25 bp, Homo sapien
ttaagcccgactcatttcgctgtat

SEQ ID NO: 1855268 - DNA, 25 bp, Homo sapien
tcactttccacaacacctaagaaaa

SEQ ID NO: 1855269 - DNA, 25 bp, Homo sapien
gcacgtccttgtcggtggtgcccag

SEQ ID NO: 1855270 - DNA, 25 bp, Homo sapien
tccgggtccaggtctacgtccatgc

SEQ ID NO: 1855271 - DNA, 25 bp, Homo sapien
gggtccaggtctacgtccatgccct

SEQ ID NO: 1855272 - DNA, 25 bp, Homo sapien
actcggagatgagcacgtccttgtc

SEQ ID NO: 1855273 - DNA, 25 bp, Homo sapien
gcgaccccgctcctttgaggtaggc

SEQ ID NO: 1855274 - DNA, 25 bp, Homo sapien
gcttccccgcctcttcacaaccaag

SEQ ID NO: 1855275 - DNA, 25 bp, Homo sapien
ctcataggggtaaactcactctgcc

SEQ ID NO: 1855276 - DNA, 25 bp, Homo sapien
gggccgctgctagctagcttcgcga

SEQ ID NO: 1855277 - DNA, 25 bp, Homo sapien
ctgcagaacttctgggatgatttaa

SEQ ID NO: 1855278 - DNA, 25 bp, Homo sapien
tcatttgcctccaatctcctcgaat

SEQ ID NO: 1855279 - DNA, 25 bp, Homo sapien
cagaacttctgggatgatttaaagt

SEQ ID NO: 1855280 - DNA, 25 bp, Homo sapien
aatctcctcgaatctcacactgcag

SEQ ID NO: 1855281 - DNA, 25 bp, Homo sapien
cccagggacgtttgtattataagag

SEQ ID NO: 1855282 - DNA, 25 bp, Homo sapien
cctttagataggaattggcacatac

SEQ ID NO: 1855283 - DNA, 25 bp, Homo sapien
cttatagggactttctagacaggga

SEQ ID NO: 1855284 - DNA, 25 bp, Homo sapien
cattggccctaatggatagatcagg

SEQ ID NO: 1855285 - DNA, 25 bp, Homo sapien
tccttggcttccctaaatggttgga

SEQ ID NO: 1855286 - DNA, 25 bp, Homo sapien
gccttaacctctgcggctcaaacga

SEQ ID NO: 1855287 - DNA, 25 bp, Homo sapien
tagtgtcgaatcaaacaagcaccca

SEQ ID NO: 1855288 - DNA, 25 bp, Homo sapien
acatccaaggttaggaacaagagcc

SEQ ID NO: 1855289 - DNA, 25 bp, Homo sapien
gagcaacctgcgagactcacaagat

SEQ ID NO: 1855290 - DNA, 25 bp, Homo sapien
agccatgcagtctctctagtcccga

SEQ ID NO: 1855291 - DNA, 25 bp, Homo sapien
ctacgccgtaggcatccagagactg

SEQ ID NO: 1855292 - DNA, 25 bp, Homo sapien
gagactcacaagatgggaagctgac

SEQ ID NO: 1855293 - DNA, 25 bp, Homo sapien
cagggaaggccacaatggtatgatc

SEQ ID NO: 1855294 - DNA, 25 bp, Homo sapien
gctatgtttacacctacctgggagg

SEQ ID NO: 1855295 - DNA, 25 bp, Homo sapien
gaaagctttgtctccagatacccat

SEQ ID NO: 1855296 - DNA, 25 bp, Homo sapien
cttaacagatggaggagtcaacagc

SEQ ID NO: 1855297 - DNA, 25 bp, Homo sapien
taaatgagcttggattgaacctcgt

SEQ ID NO: 1855298 - DNA, 25 bp, Homo sapien
gcttcggaagtcttcatgctagtct

SEQ ID NO: 1855299 - DNA, 25 bp, Homo sapien
cgccatcctatagatgaaaggaaga

SEQ ID NO: 1855300 - DNA, 25 bp, Homo sapien
attgaacctcgtagcggcccgtagt

SEQ ID NO: 1855301 - DNA, 25 bp, Homo sapien
tctgatacatgagcaggacctttgc

SEQ ID NO: 1855302 - DNA, 25 bp, Homo sapien
ctgatacatgagcaggacctttgct

SEQ ID NO: 1855303 - DNA, 25 bp, Homo sapien
ctttctgatacatgagcaggacctt

SEQ ID NO: 1855304 - DNA, 25 bp, Homo sapien
ttctgatacatgagcaggacctttg

SEQ ID NO: 1855305 - DNA, 25 bp, Homo sapien
tgtccctggcgatttctggaaagca

SEQ ID NO: 1855306 - DNA, 25 bp, Homo sapien
tatggttactaacaggttctcagca

SEQ ID NO: 1855307 - DNA, 25 bp, Homo sapien
caactccgaacaaacgcttagtggt

SEQ ID NO: 1855308 - DNA, 25 bp, Homo sapien
gaaatagctcctggttatatggtgg

SEQ ID NO: 1855309 - DNA, 25 bp, Homo sapien
gcgatcctcctatcttagcctctca

SEQ ID NO: 1855310 - DNA, 25 bp, Homo sapien
ctcccaaagtgttaggattataggc

SEQ ID NO: 1855311 - DNA, 25 bp, Homo sapien
ctgtgcccagcgttttttcttttct

SEQ ID NO: 1855312 - DNA, 25 bp, Homo sapien
gctcaagtgatgtgcctgctttagc

SEQ ID NO: 1855313 - DNA, 25 bp, Homo sapien
tgattgtgagtttccatataagttg

SEQ ID NO: 1855314 - DNA, 25 bp, Homo sapien
gaagtacaatacaccaggctttcat

SEQ ID NO: 1855315 - DNA, 25 bp, Homo sapien
ataagttggtacttacatggaaagg

SEQ ID NO: 1855316 - DNA, 25 bp, Homo sapien
cttgaagtacaatacaccaggcttt

SEQ ID NO: 1855317 - DNA, 25 bp, Homo sapien
caaactatgacaagtagatggctgt

SEQ ID NO: 1855318 - DNA, 25 bp, Homo sapien
atggctgtggttagaggactttctc

SEQ ID NO: 1855319 - DNA, 25 bp, Homo sapien
gcactgacagtgagttcatggaaga

SEQ ID NO: 1855320 - DNA, 25 bp, Homo sapien
tcaatcagttgctccatctcagagt

SEQ ID NO: 1855321 - DNA, 25 bp, Homo sapien
atttaattctgtaatagttattcaa

SEQ ID NO: 1855322 - DNA, 25 bp, Homo sapien
ctactcaatgagtaatagtttaaaa

SEQ ID NO: 1855323 - DNA, 25 bp, Homo sapien
caatgagtaatagtttaaaagttat

SEQ ID NO: 1855324 - DNA, 25 bp, Homo sapien
taatttttatgggtgataggttata

SEQ ID NO: 1855325 - DNA, 25 bp, Homo sapien
ccccactgagggtgctaaagagaat

SEQ ID NO: 1855326 - DNA, 25 bp, Homo sapien
tcaggaaagcttcacgagagaacag

SEQ ID NO: 1855327 - DNA, 25 bp, Homo sapien
tttactaagacatgctcaggaaagc

SEQ ID NO: 1855328 - DNA, 25 bp, Homo sapien
tcctccctatgacactgaatggtag

SEQ ID NO: 1855329 - DNA, 25 bp, Homo sapien
aactttgagtgtactggttctgtga

SEQ ID NO: 1855330 - DNA, 25 bp, Homo sapien
aattttaatgttgcaatatctagtc

SEQ ID NO: 1855331 - DNA, 25 bp, Homo sapien
tgagtgtactggttctgtgaaccac

SEQ ID NO: 1855332 - DNA, 25 bp, Homo sapien
gcaatatctagtcaaactttgagtg

SEQ ID NO: 1855333 - DNA, 25 bp, Homo sapien
aaaagaatgatcaacttcccattcc

SEQ ID NO: 1855334 - DNA, 25 bp, Homo sapien
tcccattccaaccagctagacagaa

SEQ ID NO: 1855335 - DNA, 25 bp, Homo sapien
aaaaagaatgatcaacttcccattc

SEQ ID NO: 1855336 - DNA, 25 bp, Homo sapien
ccattccaaccagctagacagaaaa

SEQ ID NO: 1855337 - DNA, 25 bp, Homo sapien
ttaatgatcactcaccaaaatccac

SEQ ID NO: 1855338 - DNA, 25 bp, Homo sapien
gagtatcacaagtaaaagtttctgg

SEQ ID NO: 1855339 - DNA, 25 bp, Homo sapien
tgtgaaaccattaaagccctcagca

SEQ ID NO: 1855340 - DNA, 25 bp, Homo sapien
gcatccttcatggtagagtatcaca

SEQ ID NO: 1855341 - DNA, 25 bp, Homo sapien
gttagctgggcacagtagtgtgtgc

SEQ ID NO: 1855342 - DNA, 25 bp, Homo sapien
aaataagttagctgggcacagtagt

SEQ ID NO: 1855343 - DNA, 25 bp, Homo sapien
gttcaaggctgcagtcatgccgctg

SEQ ID NO: 1855344 - DNA, 25 bp, Homo sapien
caaggctgcagtcatgccgctgcac

SEQ ID NO: 1855345 - DNA, 25 bp, Homo sapien
tcttccgtcagtaacataggccttt

SEQ ID NO: 1855346 - DNA, 25 bp, Homo sapien
cagtcttataggaagtctggaacca

SEQ ID NO: 1855347 - DNA, 25 bp, Homo sapien
aaatcatcatggaatccttggaggc

SEQ ID NO: 1855348 - DNA, 25 bp, Homo sapien
ccagaagatgcttatggcccacgta

SEQ ID NO: 1855349 - DNA, 25 bp, Homo sapien
accttctaacggcttccctcatatg

SEQ ID NO: 1855350 - DNA, 25 bp, Homo sapien
ttttttgtgcttcgagttagggatc

SEQ ID NO: 1855351 - DNA, 25 bp, Homo sapien
cgagttagggatctgtccttttgac

SEQ ID NO: 1855352 - DNA, 25 bp, Homo sapien
taacggcttccctcatatgtttggg

SEQ ID NO: 1855353 - DNA, 25 bp, Homo sapien
ccgagcccaggagctaactgttaca

SEQ ID NO: 1855354 - DNA, 25 bp, Homo sapien
tagggatcacaacattagggacaac

SEQ ID NO: 1855355 - DNA, 25 bp, Homo sapien
tagtataacgtctcataacaggctt

SEQ ID NO: 1855356 - DNA, 25 bp, Homo sapien
aaaaaatttcaccagctagagtagc

SEQ ID NO: 1855357 - DNA, 25 bp, Homo sapien
cagtatttgtaaccaacactactca

SEQ ID NO: 1855358 - DNA, 25 bp, Homo sapien
ggaataacagtcatgttctcctaaa

SEQ ID NO: 1855359 - DNA, 25 bp, Homo sapien
tattgaaacttgcaaggaataacag

SEQ ID NO: 1855360 - DNA, 25 bp, Homo sapien
gatttcccagatggttccttaccat

SEQ ID NO: 1855361 - DNA, 25 bp, Homo sapien
tggaaataccagacatagcaataac

SEQ ID NO: 1855362 - DNA, 25 bp, Homo sapien
accttggaaataccagacatagcaa

SEQ ID NO: 1855363 - DNA, 25 bp, Homo sapien
aaaccttggaaataccagacatagc

SEQ ID NO: 1855364 - DNA, 25 bp, Homo sapien
cgaaaaccttggaaataccagacat

SEQ ID NO: 1855365 - DNA, 25 bp, Homo sapien
agacacagaggtgccagtgatggac

SEQ ID NO: 1855366 - DNA, 25 bp, Homo sapien
gacacagaggtgccagtgatggact

SEQ ID NO: 1855367 - DNA, 25 bp, Homo sapien
gaagcacaaagactccgtgatcaca

SEQ ID NO: 1855368 - DNA, 25 bp, Homo sapien
gagatgaagtgtggtggtccatcct

SEQ ID NO: 1855369 - DNA, 25 bp, Homo sapien
catggctcttgagttcagttctaaa

SEQ ID NO: 1855370 - DNA, 25 bp, Homo sapien
cagttctaaaacgtgatggagatga

SEQ ID NO: 1855371 - DNA, 25 bp, Homo sapien
ttagggaaagctgagcggcgataca

SEQ ID NO: 1855372 - DNA, 25 bp, Homo sapien
cgatacatttcataacggttcagct

SEQ ID NO: 1855373 - DNA, 25 bp, Homo sapien
aagctgagcggcgatacatttcata

SEQ ID NO: 1855374 - DNA, 25 bp, Homo sapien
gatacatttcataacggttcagctg

SEQ ID NO: 1855375 - DNA, 25 bp, Homo sapien
ctcctcagaaaaagaagaaaccagg

SEQ ID NO: 1855376 - DNA, 25 bp, Homo sapien
cctcagaaaaagaagaaaccaggat

SEQ ID NO: 1855377 - DNA, 25 bp, Homo sapien
tcctcagaaaaagaagaaaccagga

SEQ ID NO: 1855378 - DNA, 25 bp, Homo sapien
ctcagaaaaagaagaaaccaggatt

SEQ ID NO: 1855379 - DNA, 25 bp, Homo sapien
aacactgggtcactgtatcgtacta

SEQ ID NO: 1855380 - DNA, 25 bp, Homo sapien
cacagactgtttgcagcattagaca

SEQ ID NO: 1855381 - DNA, 25 bp, Homo sapien
caaccagaagcactatagggattgg

SEQ ID NO: 1855382 - DNA, 25 bp, Homo sapien
gaatatgggacacaaacacatgctg

SEQ ID NO: 1855383 - DNA, 25 bp, Homo sapien
aatttgtgtggtcaagtgagagcct

SEQ ID NO: 1855384 - DNA, 25 bp, Homo sapien
gagagcctcgaaatggggaatgata

SEQ ID NO: 1855385 - DNA, 25 bp, Homo sapien
tgtggtcaagtgagagcctcgaaat

SEQ ID NO: 1855386 - DNA, 25 bp, Homo sapien
tttgtgtggtcaagtgagagcctcg

SEQ ID NO: 1855387 - DNA, 25 bp, Homo sapien
aaatctgagacatcctgactctcga

SEQ ID NO: 1855388 - DNA, 25 bp, Homo sapien
aatctgagacatcctgactctcgag

SEQ ID NO: 1855389 - DNA, 25 bp, Homo sapien
gggatgtcagcaaagtcccctccat

SEQ ID NO: 1855390 - DNA, 25 bp, Homo sapien
gcactgactgtaccatcaaggataa

SEQ ID NO: 1855391 - DNA, 25 bp, Homo sapien
tgggcaaagtaagaagacatcatcc

SEQ ID NO: 1855392 - DNA, 25 bp, Homo sapien
tcctaagggaagattatggctcagc

SEQ ID NO: 1855393 - DNA, 25 bp, Homo sapien
agttcaccattgaggaaggcagtgt

SEQ ID NO: 1855394 - DNA, 25 bp, Homo sapien
taaatcagttcaccattgaggaagg

SEQ ID NO: 1855395 - DNA, 25 bp, Homo sapien
tcagttcaccattgaggaaggcagt

SEQ ID NO: 1855396 - DNA, 25 bp, Homo sapien
aatcagttcaccattgaggaaggca

SEQ ID NO: 1855397 - DNA, 25 bp, Homo sapien
ggtatatggaagggtgaagggtata

SEQ ID NO: 1855398 - DNA, 25 bp, Homo sapien
gaagggtatatggaaggatgaaggg

SEQ ID NO: 1855399 - DNA, 25 bp, Homo sapien
taactaagggacactaggcttaata

SEQ ID NO: 1855400 - DNA, 25 bp, Homo sapien
acactggggtatatggaagggtgaa

SEQ ID NO: 1855401 - DNA, 25 bp, Homo sapien
agtgtctacttctatccttattaac

SEQ ID NO: 1855402 - DNA, 25 bp, Homo sapien
taactgtgcttcaagtttggtggtt

SEQ ID NO: 1855403 - DNA, 25 bp, Homo sapien
ggcctaaacttgaacattaaatgtc

SEQ ID NO: 1855404 - DNA, 25 bp, Homo sapien
ccatattagtgcctatagcctttca

SEQ ID NO: 1855405 - DNA, 25 bp, Homo sapien
cataattttatcctctgttcggtgc

SEQ ID NO: 1855406 - DNA, 25 bp, Homo sapien
tctttgtggtctggtacatgatcga

SEQ ID NO: 1855407 - DNA, 25 bp, Homo sapien
cctctgttcggtgcaaatttagata

SEQ ID NO: 1855408 - DNA, 25 bp, Homo sapien
ttagatatgtagtgagccctctgtg

SEQ ID NO: 1855409 - DNA, 25 bp, Homo sapien
cagaagcccggcgagcagccagtaa

SEQ ID NO: 1855410 - DNA, 25 bp, Homo sapien
gggactaaccagaagcccggcgagc

SEQ ID NO: 1855411 - DNA, 25 bp, Homo sapien
gcccggcgagcagccagtaacacaa

SEQ ID NO: 1855412 - DNA, 25 bp, Homo sapien
cttcagcctcatcagtacatctctt

SEQ ID NO: 1855413 - DNA, 25 bp, Homo sapien
ggattccatcggtgtcggtagcccc

SEQ ID NO: 1855414 - DNA, 25 bp, Homo sapien
agggcgactcgtgggcatcgtccat

SEQ ID NO: 1855415 - DNA, 25 bp, Homo sapien
aagtccacatctgcgtctccgtcag

SEQ ID NO: 1855416 - DNA, 25 bp, Homo sapien
tgtctctccacctttgtcggagggc

SEQ ID NO: 1855417 - DNA, 25 bp, Homo sapien
agatcgcggagatgcctgaggcaga

SEQ ID NO: 1855418 - DNA, 25 bp, Homo sapien
tgaggcagaagctcggaaacccgag

SEQ ID NO: 1855419 - DNA, 25 bp, Homo sapien
tgtcgtcgcgcagcgatgacatcac

SEQ ID NO: 1855420 - DNA, 25 bp, Homo sapien
aggccaggatcttacttcctgtcgt

SEQ ID NO: 1855421 - DNA, 25 bp, Homo sapien
gattagtctaagtggcatatgcagg

SEQ ID NO: 1855422 - DNA, 25 bp, Homo sapien
caagatgttcgtctttgagcctctc

SEQ ID NO: 1855423 - DNA, 25 bp, Homo sapien
gtttaggaaaccgaaggatgctgta

SEQ ID NO: 1855424 - DNA, 25 bp, Homo sapien
tgtagtgaacctcattggattagtc

SEQ ID NO: 1855425 - DNA, 25 bp, Homo sapien
gcacccttgagaggttgggcataat

SEQ ID NO: 1855426 - DNA, 25 bp, Homo sapien
tatttggtgctccttaggcaacagg

SEQ ID NO: 1855427 - DNA, 25 bp, Homo sapien
gatcagtgcctgacaacttacaggt

SEQ ID NO: 1855428 - DNA, 25 bp, Homo sapien
ggtaccccatgatcagaggcacaga

SEQ ID NO: 1855429 - DNA, 25 bp, Homo sapien
cacgggtcataggaggttatggtcc

SEQ ID NO: 1855430 - DNA, 25 bp, Homo sapien
ttttcccacattggattgttcaccc

SEQ ID NO: 1855431 - DNA, 25 bp, Homo sapien
ggttatggtcccagtgaaagttaca

SEQ ID NO: 1855432 - DNA, 25 bp, Homo sapien
gaaagttacattcttggccagaaaa

SEQ ID NO: 1855433 - DNA, 25 bp, Homo sapien
attcttagctaatactgagttggcc

SEQ ID NO: 1855434 - DNA, 25 bp, Homo sapien
tagtgttttcaggacgacattgttc

SEQ ID NO: 1855435 - DNA, 25 bp, Homo sapien
ccaggatgggtgaaacagagttaaa

SEQ ID NO: 1855436 - DNA, 25 bp, Homo sapien
ttgtgcacctagaaatcctccaggg

SEQ ID NO: 1855437 - DNA, 25 bp, Homo sapien
gacctaagacccgaaggcctatggc

SEQ ID NO: 1855438 - DNA, 25 bp, Homo sapien
tggcctcttctccggacctaagacc

SEQ ID NO: 1855439 - DNA, 25 bp, Homo sapien
cggacctaagacccgaaggcctatg

SEQ ID NO: 1855440 - DNA, 25 bp, Homo sapien
gagagtctggttgggccctggctgt

SEQ ID NO: 1855441 - DNA, 25 bp, Homo sapien
gtctctgcccatagaatggctttcc

SEQ ID NO: 1855442 - DNA, 25 bp, Homo sapien
aatgagcatgtcattgggccttggg

SEQ ID NO: 1855443 - DNA, 25 bp, Homo sapien
tcattgggccttggggcaaaggcct

SEQ ID NO: 1855444 - DNA, 25 bp, Homo sapien
gctgagaaactgtgagggccacctg

SEQ ID NO: 1855445 - DNA, 25 bp, Homo sapien
ggtacttaacgtgttcagctgccag

SEQ ID NO: 1855446 - DNA, 25 bp, Homo sapien
ttggtacttaacgtgttcagctgcc

SEQ ID NO: 1855447 - DNA, 25 bp, Homo sapien
tcattggtacttaacgtgttcagct

SEQ ID NO: 1855448 - DNA, 25 bp, Homo sapien
gtacttaacgtgttcagctgccagc

SEQ ID NO: 1855449 - DNA, 25 bp, Homo sapien
gacctttgtccttgaggcacttgtg

SEQ ID NO: 1855450 - DNA, 25 bp, Homo sapien
tgtccttgaggcacttgtgggaatc

SEQ ID NO: 1855451 - DNA, 25 bp, Homo sapien
ccttgaggcacttgtgggaatctgc

SEQ ID NO: 1855452 - DNA, 25 bp, Homo sapien
ttgaggcacttgtgggaatctgctt

SEQ ID NO: 1855453 - DNA, 25 bp, Homo sapien
ccacgtcgtagatcttcattgtgtt

SEQ ID NO: 1855454 - DNA, 25 bp, Homo sapien
acgtcgtagatcttcattgtgtttc

SEQ ID NO: 1855455 - DNA, 25 bp, Homo sapien
tccacgtcgtagatcttcattgtgt

SEQ ID NO: 1855456 - DNA, 25 bp, Homo sapien
tttccacgtcgtagatcttcattgt

SEQ ID NO: 1855457 - DNA, 25 bp, Homo sapien
tcagtattctttattggtttcctgg

SEQ ID NO: 1855458 - DNA, 25 bp, Homo sapien
cagtattctttattggtttcctggg

SEQ ID NO: 1855459 - DNA, 25 bp, Homo sapien
ttcagcggatgcctgtggaactgaa

SEQ ID NO: 1855460 - DNA, 25 bp, Homo sapien
actaggtgttcagcggatgcctgtg

SEQ ID NO: 1855461 - DNA, 25 bp, Homo sapien
tggcagtgaacactactaggtgttc

SEQ ID NO: 1855462 - DNA, 25 bp, Homo sapien
gcagtgaacactactaggtgttcag

SEQ ID NO: 1855463 - DNA, 25 bp, Homo sapien
cgatgtcctttgtgatgtcctctgg

SEQ ID NO: 1855464 - DNA, 25 bp, Homo sapien
ctcgatgtcctttgtgatgtcctct

SEQ ID NO: 1855465 - DNA, 25 bp, Homo sapien
tgtcctttgtgatgtcctctggcat

SEQ ID NO: 1855466 - DNA, 25 bp, Homo sapien
gatgtcctttgtgatgtcctctggc

SEQ ID NO: 1855467 - DNA, 25 bp, Homo sapien
caactggacattccattggtcactg

SEQ ID NO: 1855468 - DNA, 25 bp, Homo sapien
ggtcactgttaggtggtgactgctc

SEQ ID NO: 1855469 - DNA, 25 bp, Homo sapien
aggtggtgactgctcatagcttttc

SEQ ID NO: 1855470 - DNA, 25 bp, Homo sapien
tgtgctcagatatgctaaatattca

SEQ ID NO: 1855471 - DNA, 25 bp, Homo sapien
aattgataattaaaggtattcttcg

SEQ ID NO: 1855472 - DNA, 25 bp, Homo sapien
gcgtatcccgaaagcactgaggcct

SEQ ID NO: 1855473 - DNA, 25 bp, Homo sapien
tgtcagtgtagtcagtgtaaacaag

SEQ ID NO: 1855474 - DNA, 25 bp, Homo sapien
ccctgtaacactctaataccacttt

SEQ ID NO: 1855475 - DNA, 25 bp, Homo sapien
tcccttcactatcttggtgtctgag

SEQ ID NO: 1855476 - DNA, 25 bp, Homo sapien
gctgattaaagccactcccttcact

SEQ ID NO: 1855477 - DNA, 25 bp, Homo sapien
cagctggtcccgctacagtgagatg

SEQ ID NO: 1855478 - DNA, 25 bp, Homo sapien
ttttaagacactagcctgctgatgc

SEQ ID NO: 1855479 - DNA, 25 bp, Homo sapien
aggaaggcttacttgaagccagggg

SEQ ID NO: 1855480 - DNA, 25 bp, Homo sapien
aaggaaggcttacttgaagccaggg

SEQ ID NO: 1855481 - DNA, 25 bp, Homo sapien
gccaaggaaggcttacttgaagcca

SEQ ID NO: 1855482 - DNA, 25 bp, Homo sapien
caaggaaggcttacttgaagccagg

SEQ ID NO: 1855483 - DNA, 25 bp, Homo sapien
gcaatgcaaatccttgtacagagtc

SEQ ID NO: 1855484 - DNA, 25 bp, Homo sapien
cagctgtgtgaaagagtttgtgcgt

SEQ ID NO: 1855485 - DNA, 25 bp, Homo sapien
tctacatgttaccaagcttttactg

SEQ ID NO: 1855486 - DNA, 25 bp, Homo sapien
tactgattaaagcattgctgcaatg

SEQ ID NO: 1855487 - DNA, 25 bp, Homo sapien
ctattttacagaggcctgcccattc

SEQ ID NO: 1855488 - DNA, 25 bp, Homo sapien
tgtctattttacagaggcctgccca

SEQ ID NO: 1855489 - DNA, 25 bp, Homo sapien
ctctgtctattttacagaggcctgc

SEQ ID NO: 1855490 - DNA, 25 bp, Homo sapien
gtctattttacagaggcctgcccat

SEQ ID NO: 1855491 - DNA, 25 bp, Homo sapien
ggttcataccgctgaggtaccagat

SEQ ID NO: 1855492 - DNA, 25 bp, Homo sapien
taccagatgctgtctggcagagcca

SEQ ID NO: 1855493 - DNA, 25 bp, Homo sapien
tctgtcatgcgatgccatactggag

SEQ ID NO: 1855494 - DNA, 25 bp, Homo sapien
tcttgttgctacagagtccgctggg

SEQ ID NO: 1855495 - DNA, 25 bp, Homo sapien
gctgccctgcaaccctcagtggtaa

SEQ ID NO: 1855496 - DNA, 25 bp, Homo sapien
tggctaaaagggtctacaccagtgt

SEQ ID NO: 1855497 - DNA, 25 bp, Homo sapien
tcagtggtaacttaggacagctcct

SEQ ID NO: 1855498 - DNA, 25 bp, Homo sapien
tgttgaatgaagacctcacctgcag

SEQ ID NO: 1855499 - DNA, 25 bp, Homo sapien
ctgaggttggttcagaggccagcct

SEQ ID NO: 1855500 - DNA, 25 bp, Homo sapien
gctgctgctctttatgaactgccca

SEQ ID NO: 1855501 - DNA, 25 bp, Homo sapien
caggcagaattgagtacggtgcgtc

SEQ ID NO: 1855502 - DNA, 25 bp, Homo sapien
tcaggacggaacttgggtgcagctc

SEQ ID NO: 1855503 - DNA, 25 bp, Homo sapien
aactagttagtcgtgatggctgtac

SEQ ID NO: 1855504 - DNA, 25 bp, Homo sapien
cagagtcagaaagcccattgagaca

SEQ ID NO: 1855505 - DNA, 25 bp, Homo sapien
caggattgaatggagctatctttcc

SEQ ID NO: 1855506 - DNA, 25 bp, Homo sapien
ccctcaaaccagtgggcaggattga

SEQ ID NO: 1855507 - DNA, 25 bp, Homo sapien
gatccctacagccttggtgtactgg

SEQ ID NO: 1855508 - DNA, 25 bp, Homo sapien
ggtgtttacatgcttgatccctaca

SEQ ID NO: 1855509 - DNA, 25 bp, Homo sapien
tgcagggcctgggatagaagctcac

SEQ ID NO: 1855510 - DNA, 25 bp, Homo sapien
tcttgggtccaaggtaccagggctc

SEQ ID NO: 1855511 - DNA, 25 bp, Homo sapien
cagactccacttttgtttccagtgc

SEQ ID NO: 1855512 - DNA, 25 bp, Homo sapien
tccacttttgtttccagtgcctggg

SEQ ID NO: 1855513 - DNA, 25 bp, Homo sapien
aaacagactccacttttgtttccag

SEQ ID NO: 1855514 - DNA, 25 bp, Homo sapien
tcaaacagactccacttttgtttcc

SEQ ID NO: 1855515 - DNA, 25 bp, Homo sapien
tcaagttgacaaacttttggcccag

SEQ ID NO: 1855516 - DNA, 25 bp, Homo sapien
cacctgctgattgtgatgtgtcaag

SEQ ID NO: 1855517 - DNA, 25 bp, Homo sapien
gcttcaatgagagtaaggcctccag

SEQ ID NO: 1855518 - DNA, 25 bp, Homo sapien
tgtagtagggaccaaacacctgctg

SEQ ID NO: 1855519 - DNA, 25 bp, Homo sapien
gcacaccaagaaccaaacagcattt

SEQ ID NO: 1855520 - DNA, 25 bp, Homo sapien
tgcacaccaagaaccaaacagcatt

SEQ ID NO: 1855521 - DNA, 25 bp, Homo sapien
cacaccaagaaccaaacagcatttg

SEQ ID NO: 1855522 - DNA, 25 bp, Homo sapien
caccaagaaccaaacagcatttgag

SEQ ID NO: 1855523 - DNA, 25 bp, Homo sapien
attcttactaccccacaagcatact

SEQ ID NO: 1855524 - DNA, 25 bp, Homo sapien
tcttactaccccacaagcatactca

SEQ ID NO: 1855525 - DNA, 25 bp, Homo sapien
cttactaccccacaagcatactcac

SEQ ID NO: 1855526 - DNA, 25 bp, Homo sapien
ttcttactaccccacaagcatactc

SEQ ID NO: 1855527 - DNA, 25 bp, Homo sapien
gctttgatggatttcctgagatacc

SEQ ID NO: 1855528 - DNA, 25 bp, Homo sapien
attagagatgctgtattatcactgc

SEQ ID NO: 1855529 - DNA, 25 bp, Homo sapien
ctgcttagagcaacaaggcccatat

SEQ ID NO: 1855530 - DNA, 25 bp, Homo sapien
ctggagctgtcccattagagatgct

SEQ ID NO: 1855531 - DNA, 25 bp, Homo sapien
atgaaagaaagtaagctggcaccca

SEQ ID NO: 1855532 - DNA, 25 bp, Homo sapien
gaaagaaagtaagctggcacccacc

SEQ ID NO: 1855533 - DNA, 25 bp, Homo sapien
agaaagtaagctggcacccaccagg

SEQ ID NO: 1855534 - DNA, 25 bp, Homo sapien
ctagaccatgaaagaaagtaagctg

SEQ ID NO: 1855535 - DNA, 25 bp, Homo sapien
tttatctacaaattggggtgagcca

SEQ ID NO: 1855536 - DNA, 25 bp, Homo sapien
aaggatttggttatgcgtttcagtt

SEQ ID NO: 1855537 - DNA, 25 bp, Homo sapien
caaacaaaacactgccggagaaact

SEQ ID NO: 1855538 - DNA, 25 bp, Homo sapien
aactactggccaccagcaagactga

SEQ ID NO: 1855539 - DNA, 25 bp, Homo sapien
gtcaggggaagtcccgatggaagcc

SEQ ID NO: 1855540 - DNA, 25 bp, Homo sapien
ggaaccagggaagaacaggctgtca

SEQ ID NO: 1855541 - DNA, 25 bp, Homo sapien
acaggctgtcaggggaagtcccgat

SEQ ID NO: 1855542 - DNA, 25 bp, Homo sapien
gaaccagggaagaacaggctgtcag

SEQ ID NO: 1855543 - DNA, 25 bp, Homo sapien
ggaggttcaagaagccctgacacag

SEQ ID NO: 1855544 - DNA, 25 bp, Homo sapien
gccacactggaggagtcagaagtgt

SEQ ID NO: 1855545 - DNA, 25 bp, Homo sapien
ggctctgggttgttggctgcctcat

SEQ ID NO: 1855546 - DNA, 25 bp, Homo sapien
tgttggctgcctcattgggagaggg

SEQ ID NO: 1855547 - DNA, 25 bp, Homo sapien
ctgggcaagtcggaggtgacatggt

SEQ ID NO: 1855548 - DNA, 25 bp, Homo sapien
agccatttggtggtgtgattaagga

SEQ ID NO: 1855549 - DNA, 25 bp, Homo sapien
catttggtggtgtgattaaggagac

SEQ ID NO: 1855550 - DNA, 25 bp, Homo sapien
tcctgctgcttgggtcagccatttg

SEQ ID NO: 1855551 - DNA, 25 bp, Homo sapien
ggctctggatagtgtagttcaccat

SEQ ID NO: 1855552 - DNA, 25 bp, Homo sapien
aatttagcccgttcatactgaatgg

SEQ ID NO: 1855553 - DNA, 25 bp, Homo sapien
ggaatttagcccgttcatactgaat

SEQ ID NO: 1855554 - DNA, 25 bp, Homo sapien
tagcccgttcatactgaatggaatg

SEQ ID NO: 1855555 - DNA, 25 bp, Homo sapien
aagtctctggaccttgaagccttca

SEQ ID NO: 1855556 - DNA, 25 bp, Homo sapien
gaacccaatacccagggtgagtcag

SEQ ID NO: 1855557 - DNA, 25 bp, Homo sapien
gcagaattgggaacagctaagtctc

SEQ ID NO: 1855558 - DNA, 25 bp, Homo sapien
agaagataacatgtggcccagaacc

SEQ ID NO: 1855559 - DNA, 25 bp, Homo sapien
gtctcctcatagtgtgtgaaccgaa

SEQ ID NO: 1855560 - DNA, 25 bp, Homo sapien
aaagaagtatgtactgtagtgtctt

SEQ ID NO: 1855561 - DNA, 25 bp, Homo sapien
ctgtagtgtcttatggtattacaga

SEQ ID NO: 1855562 - DNA, 25 bp, Homo sapien
ctcctcatagtgtgtgaaccgaaag

SEQ ID NO: 1855563 - DNA, 25 bp, Homo sapien
caaagccatcatgttgagaacgtac

SEQ ID NO: 1855564 - DNA, 25 bp, Homo sapien
ctcagtagccaaacaggatccgtaa

SEQ ID NO: 1855565 - DNA, 25 bp, Homo sapien
acagcaaagccatcatgttgagaac

SEQ ID NO: 1855566 - DNA, 25 bp, Homo sapien
ccgtaatgttttctagtttctgcac

SEQ ID NO: 1855567 - DNA, 25 bp, Homo sapien
aatctcaattctcaggcggttctgg

SEQ ID NO: 1855568 - DNA, 25 bp, Homo sapien
tcaattctcaggcggttctggcgtg

SEQ ID NO: 1855569 - DNA, 25 bp, Homo sapien
tctcaattctcaggcggttctggcg

SEQ ID NO: 1855570 - DNA, 25 bp, Homo sapien
caatctcaattctcaggcggttctg

SEQ ID NO: 1855571 - DNA, 25 bp, Homo sapien
tgctaaccccgggtcctagaagcca

SEQ ID NO: 1855572 - DNA, 25 bp, Homo sapien
tggccctctcgataggcagttcaca

SEQ ID NO: 1855573 - DNA, 25 bp, Homo sapien
gtggccctctcgataggcagttcac

SEQ ID NO: 1855574 - DNA, 25 bp, Homo sapien
ctggatgctaaccccgggtcctaga

SEQ ID NO: 1855575 - DNA, 25 bp, Homo sapien
gctctttaagatggtcccaaaaggc

SEQ ID NO: 1855576 - DNA, 25 bp, Homo sapien
ggcattgtgcactgtctccttgacc

SEQ ID NO: 1855577 - DNA, 25 bp, Homo sapien
ggggagttgctgatagttgctcttt

SEQ ID NO: 1855578 - DNA, 25 bp, Homo sapien
ccaaaaggcattgtgcactgtctcc

SEQ ID NO: 1855579 - DNA, 25 bp, Homo sapien
tcagatgccatattcaacatgatgt

SEQ ID NO: 1855580 - DNA, 25 bp, Homo sapien
ctcttacaattaactagtctccctg

SEQ ID NO: 1855581 - DNA, 25 bp, Homo sapien
caactaatcggaacagggtccatac

SEQ ID NO: 1855582 - DNA, 25 bp, Homo sapien
taccttatatcatactgctctggcc

SEQ ID NO: 1855583 - DNA, 25 bp, Homo sapien
tgcttggaggtaaaaccttctcttc

SEQ ID NO: 1855584 - DNA, 25 bp, Homo sapien
ctgcttggaggtaaaaccttctctt

SEQ ID NO: 1855585 - DNA, 25 bp, Homo sapien
acttcattaacggtttctgtcagac

SEQ ID NO: 1855586 - DNA, 25 bp, Homo sapien
aaacttcattaacggtttctgtcag

SEQ ID NO: 1855587 - DNA, 25 bp, Homo sapien
gaaacttcattaacggtttctgtca

SEQ ID NO: 1855588 - DNA, 25 bp, Homo sapien
aacttcattaacggtttctgtcaga

SEQ ID NO: 1855589 - DNA, 25 bp, Homo sapien
gaaatgaccccaatatgccttttgg

SEQ ID NO: 1855590 - DNA, 25 bp, Homo sapien
ttcatagctgttggaaatgacccca

SEQ ID NO: 1855591 - DNA, 25 bp, Homo sapien
tggaaatgaccccaatatgcctttt

SEQ ID NO: 1855592 - DNA, 25 bp, Homo sapien
ctcaggttcatagctgttggaaatg

SEQ ID NO: 1855593 - DNA, 25 bp, Homo sapien
tcatgtggccacaagaaaaaccaat

SEQ ID NO: 1855594 - DNA, 25 bp, Homo sapien
tcttgagttgttgcacacggacagc

SEQ ID NO: 1855595 - DNA, 25 bp, Homo sapien
aaaccaatctaattcagccgcaaag

SEQ ID NO: 1855596 - DNA, 25 bp, Homo sapien
tcagttaaccagcagcgacctcatg

SEQ ID NO: 1855597 - DNA, 25 bp, Homo sapien
gtcctgaggtttcgggcttacagga

SEQ ID NO: 1855598 - DNA, 25 bp, Homo sapien
tcctgaggtttcgggcttacaggac

SEQ ID NO: 1855599 - DNA, 25 bp, Homo sapien
gccaggatatttcgggggcacactc

SEQ ID NO: 1855600 - DNA, 25 bp, Homo sapien
agtcgccaggatatttcgggggcac

SEQ ID NO: 1855601 - DNA, 25 bp, Homo sapien
gggcacactctccttgacgtctggc

SEQ ID NO: 1855602 - DNA, 25 bp, Homo sapien
tctgagtcgccaggatatttcgggg

SEQ ID NO: 1855603 - DNA, 25 bp, Homo sapien
ctcctcccccgccgcgggtcatcca

SEQ ID NO: 1855604 - DNA, 25 bp, Homo sapien
tcctcctcccccgccgcgggtcatc

SEQ ID NO: 1855605 - DNA, 25 bp, Homo sapien
ctcctcctcccccgccgcgggtcat

SEQ ID NO: 1855606 - DNA, 25 bp, Homo sapien
gcctcgcggcctggcggcctggagc

SEQ ID NO: 1855607 - DNA, 25 bp, Homo sapien
gggcctcgcggcctggcggcctgga

SEQ ID NO: 1855608 - DNA, 25 bp, Homo sapien
ctcgcggcctggcggcctggagcgt

SEQ ID NO: 1855609 - DNA, 25 bp, Homo sapien
cgcggcctggcggcctggagcgtac

SEQ ID NO: 1855610 - DNA, 25 bp, Homo sapien
gttggggcgtcgcacggtgagaaag

SEQ ID NO: 1855611 - DNA, 25 bp, Homo sapien
gcgggttggggcgtcgcacggtgag

SEQ ID NO: 1855612 - DNA, 25 bp, Homo sapien
gagcggcgggttggggcgtcgcacg

SEQ ID NO: 1855613 - DNA, 25 bp, Homo sapien
ggagcggcgggttggggcgtcgcac

SEQ ID NO: 1855614 - DNA, 25 bp, Homo sapien
cggggcctgagaacaaaccgccgcg

SEQ ID NO: 1855615 - DNA, 25 bp, Homo sapien
gcctgagaacaaaccgccgcggtcg

SEQ ID NO: 1855616 - DNA, 25 bp, Homo sapien
gggcacgtgccccccccgccagagc

SEQ ID NO: 1855617 - DNA, 25 bp, Homo sapien
tgccccccccgccagagccggaagc

SEQ ID NO: 1855618 - DNA, 25 bp, Homo sapien
tcgaagccaaccaggcctcgagcgg

SEQ ID NO: 1855619 - DNA, 25 bp, Homo sapien
tgagctcgaagccaaccaggcctcg

SEQ ID NO: 1855620 - DNA, 25 bp, Homo sapien
cgtgcgtccctcctgagctcgaagc

SEQ ID NO: 1855621 - DNA, 25 bp, Homo sapien
accaggcctcgagcggctcgctgcg

SEQ ID NO: 1855622 - DNA, 25 bp, Homo sapien
gcccctcgagaaggatggcctggaa

SEQ ID NO: 1855623 - DNA, 25 bp, Homo sapien
ccgcccctcgagaaggatggcctgg

SEQ ID NO: 1855624 - DNA, 25 bp, Homo sapien
tcccgcccctcgagaaggatggcct

SEQ ID NO: 1855625 - DNA, 25 bp, Homo sapien
agctcccgcccctcgagaaggatgg

SEQ ID NO: 1855626 - DNA, 25 bp, Homo sapien
gctatttccctcagggatgccaact

SEQ ID NO: 1855627 - DNA, 25 bp, Homo sapien
ctgctatttccctcagggatgccaa

SEQ ID NO: 1855628 - DNA, 25 bp, Homo sapien
ctcagggatgccaactgtgaagcag

SEQ ID NO: 1855629 - DNA, 25 bp, Homo sapien
tttccctcagggatgccaactgtga

SEQ ID NO: 1855630 - DNA, 25 bp, Homo sapien
gtggctgtaagaggtagagaatcac

SEQ ID NO: 1855631 - DNA, 25 bp, Homo sapien
tggctgtaagaggtagagaatcaca

SEQ ID NO: 1855632 - DNA, 25 bp, Homo sapien
atcacagaatttaagaggaatcctg

SEQ ID NO: 1855633 - DNA, 25 bp, Homo sapien
gaatttaagaggaatcctggataca

SEQ ID NO: 1855634 - DNA, 25 bp, Homo sapien
cactagtcctattgggttagagccc

SEQ ID NO: 1855635 - DNA, 25 bp, Homo sapien
cctattggatttgacttattggccc

SEQ ID NO: 1855636 - DNA, 25 bp, Homo sapien
ggtagagctgccaaaaaataccaca

SEQ ID NO: 1855637 - DNA, 25 bp, Homo sapien
ttagagccccaattcaataggttcc

SEQ ID NO: 1855638 - DNA, 25 bp, Homo sapien
gaactagcttctggtgtcattgagt

SEQ ID NO: 1855639 - DNA, 25 bp, Homo sapien
taaatgttccttgcgcatgtgaaaa

SEQ ID NO: 1855640 - DNA, 25 bp, Homo sapien
gcacccacaaatttggatatgttgg

SEQ ID NO: 1855641 - DNA, 25 bp, Homo sapien
acctttcaagtgctgatttagtggc

SEQ ID NO: 1855642 - DNA, 25 bp, Homo sapien
tcacctcaaagaaatatgcgggttg

SEQ ID NO: 1855643 - DNA, 25 bp, Homo sapien
tcttttgattaacgttagcttggca

SEQ ID NO: 1855644 - DNA, 25 bp, Homo sapien
caactaggtcaagtcgattgatggg

SEQ ID NO: 1855645 - DNA, 25 bp, Homo sapien
ggaatcctacagtatagaccattta

SEQ ID NO: 1855646 - DNA, 25 bp, Homo sapien
tgcttcagggtttatggcttgtata

SEQ ID NO: 1855647 - DNA, 25 bp, Homo sapien
tagtgacagggtctaatcttgtggc

SEQ ID NO: 1855648 - DNA, 25 bp, Homo sapien
ccgcgtccagcctaacattttttat

SEQ ID NO: 1855649 - DNA, 25 bp, Homo sapien
gcttgtatatcttatcacagtctgc

SEQ ID NO: 1855650 - DNA, 25 bp, Homo sapien
tttatggcacctctctggttgaagg

SEQ ID NO: 1855651 - DNA, 25 bp, Homo sapien
ttcatctatttttatggcacctctc

SEQ ID NO: 1855652 - DNA, 25 bp, Homo sapien
cctctctggttgaaggcaggagcta

SEQ ID NO: 1855653 - DNA, 25 bp, Homo sapien
atctatttttatggcacctctctgg

SEQ ID NO: 1855654 - DNA, 25 bp, Homo sapien
agctgctccactgtgagtggaaagc

SEQ ID NO: 1855655 - DNA, 25 bp, Homo sapien
ctgctccactgtgagtggaaagcag

SEQ ID NO: 1855656 - DNA, 25 bp, Homo sapien
gctgctccactgtgagtggaaagca

SEQ ID NO: 1855657 - DNA, 25 bp, Homo sapien
gactatatgtatttttgggcccggc

SEQ ID NO: 1855658 - DNA, 25 bp, Homo sapien
tttgggcccggcattaattccctca

SEQ ID NO: 1855659 - DNA, 25 bp, Homo sapien
gcccttgccccggagttgctgacta

SEQ ID NO: 1855660 - DNA, 25 bp, Homo sapien
gacgtccagacctcgcactctataa

SEQ ID NO: 1855661 - DNA, 25 bp, Homo sapien
attcttctgaacttgcaaaaggttc

SEQ ID NO: 1855662 - DNA, 25 bp, Homo sapien
tctaattcttctgaacttgcaaaag

SEQ ID NO: 1855663 - DNA, 25 bp, Homo sapien
aatctaattcttctgaacttgcaaa

SEQ ID NO: 1855664 - DNA, 25 bp, Homo sapien
taattcttctgaacttgcaaaaggt

SEQ ID NO: 1855665 - DNA, 25 bp, Homo sapien
ggcacattcatcataggacagacat

SEQ ID NO: 1855666 - DNA, 25 bp, Homo sapien
tagccaatgagacatcagggcacat

SEQ ID NO: 1855667 - DNA, 25 bp, Homo sapien
tgaagccatgtgaccaatatagcca

SEQ ID NO: 1855668 - DNA, 25 bp, Homo sapien
caatatagccaatgagacatcaggg

SEQ ID NO: 1855669 - DNA, 25 bp, Homo sapien
ggcaaaggcccgtgctgcctgcttc

SEQ ID NO: 1855670 - DNA, 25 bp, Homo sapien
aaacacctacagtctggcaaaggcc

SEQ ID NO: 1855671 - DNA, 25 bp, Homo sapien
acacctacagtctggcaaaggcccg

SEQ ID NO: 1855672 - DNA, 25 bp, Homo sapien
aaggcccgtgctgcctgcttcagtc

SEQ ID NO: 1855673 - DNA, 25 bp, Homo sapien
gtgtgagctgtagaaagtctgctgt

SEQ ID NO: 1855674 - DNA, 25 bp, Homo sapien
tgccagtgtaccccatttcccctat

SEQ ID NO: 1855675 - DNA, 25 bp, Homo sapien
gccagtgtaccccatttcccctatg

SEQ ID NO: 1855676 - DNA, 25 bp, Homo sapien
tgtgagctgtagaaagtctgctgtt

SEQ ID NO: 1855677 - DNA, 25 bp, Homo sapien
gcttggcaagtgtgggcacgatgca

SEQ ID NO: 1855678 - DNA, 25 bp, Homo sapien
tgtgggcacgatgcagagatgttgg

SEQ ID NO: 1855679 - DNA, 25 bp, Homo sapien
tcagcatggcacataaccgggggct

SEQ ID NO: 1855680 - DNA, 25 bp, Homo sapien
gggaactattgtcagggatgcccag

SEQ ID NO: 1855681 - DNA, 25 bp, Homo sapien
ggccaggagacaccaccaggggcct

SEQ ID NO: 1855682 - DNA, 25 bp, Homo sapien
caggagacaccaccaggggccttcc

SEQ ID NO: 1855683 - DNA, 25 bp, Homo sapien
ctgggccaggagacaccaccagggg

SEQ ID NO: 1855684 - DNA, 25 bp, Homo sapien
gccaggagacaccaccaggggcctt

SEQ ID NO: 1855685 - DNA, 25 bp, Homo sapien
aggaggggcacgagtccacagagga

SEQ ID NO: 1855686 - DNA, 25 bp, Homo sapien
caggaggggcacgagtccacagagg

SEQ ID NO: 1855687 - DNA, 25 bp, Homo sapien
ggaggggcacgagtccacagaggac

SEQ ID NO: 1855688 - DNA, 25 bp, Homo sapien
gaggggcacgagtccacagaggaca

SEQ ID NO: 1855689 - DNA, 25 bp, Homo sapien
tttccttaatccaggatatccatag

SEQ ID NO: 1855690 - DNA, 25 bp, Homo sapien
ccataggagtggtattggtagatga

SEQ ID NO: 1855691 - DNA, 25 bp, Homo sapien
tccaggatatccataggagtggtat

SEQ ID NO: 1855692 - DNA, 25 bp, Homo sapien
ggtagatgaagtggtccttctccac

SEQ ID NO: 1855693 - DNA, 25 bp, Homo sapien
acacagcctcacactccaagaaagt

SEQ ID NO: 1855694 - DNA, 25 bp, Homo sapien
tcttcctcctgggtacgctgagggc

SEQ ID NO: 1855695 - DNA, 25 bp, Homo sapien
gctctgtgaggctagtctgggtcct

SEQ ID NO: 1855696 - DNA, 25 bp, Homo sapien
tgaggagatcttggtcattgcctct

SEQ ID NO: 1855697 - DNA, 25 bp, Homo sapien
tcagggtccccagtaagtgacaagc

SEQ ID NO: 1855698 - DNA, 25 bp, Homo sapien
cacttgagactaaacttcctgggac

SEQ ID NO: 1855699 - DNA, 25 bp, Homo sapien
gatgctctgaaaagatccctgtagc

SEQ ID NO: 1855700 - DNA, 25 bp, Homo sapien
tgtctccgccttggaatcaacaggt

SEQ ID NO: 1855701 - DNA, 25 bp, Homo sapien
tgcaatgtgaataacgaaaatacgc

SEQ ID NO: 1855702 - DNA, 25 bp, Homo sapien
ataagcattgtgagcagggaggtaa

SEQ ID NO: 1855703 - DNA, 25 bp, Homo sapien
gagaaaaatgaggaatgcatctgca

SEQ ID NO: 1855704 - DNA, 25 bp, Homo sapien
gaaaatacgcaaatgcatagaaagg

SEQ ID NO: 1855705 - DNA, 25 bp, Homo sapien
gatgaagatccctcagatgccccat

SEQ ID NO: 1855706 - DNA, 25 bp, Homo sapien
cacctattgttagagctagggccag

SEQ ID NO: 1855707 - DNA, 25 bp, Homo sapien
tactagtgattgctggaccctgcca

SEQ ID NO: 1855708 - DNA, 25 bp, Homo sapien
gaagcaggcctggtctcaagcagaa

SEQ ID NO: 1855709 - DNA, 25 bp, Homo sapien
ggactgggctcgttctttgtgtctt

SEQ ID NO: 1855710 - DNA, 25 bp, Homo sapien
gaaaatgatgattcattaggtccat

SEQ ID NO: 1855711 - DNA, 25 bp, Homo sapien
cagggtagccatactgaaaatgatg

SEQ ID NO: 1855712 - DNA, 25 bp, Homo sapien
ggtccatatcccctggtcacaagga

SEQ ID NO: 1855713 - DNA, 25 bp, Homo sapien
gatgtaggaaagacccagtttgggc

SEQ ID NO: 1855714 - DNA, 25 bp, Homo sapien
ttgattatgagctggcccacaagcc

SEQ ID NO: 1855715 - DNA, 25 bp, Homo sapien
gctgcccgcagggaacgtattacca

SEQ ID NO: 1855716 - DNA, 25 bp, Homo sapien
cgagcagagccgatggagtcctgta

SEQ ID NO: 1855717 - DNA, 25 bp, Homo sapien
ctccatatcccaaatgagtttctat

SEQ ID NO: 1855718 - DNA, 25 bp, Homo sapien
gaactggtggcatattctcctccat

SEQ ID NO: 1855719 - DNA, 25 bp, Homo sapien
ggtggcatattctcctccatatccc

SEQ ID NO: 1855720 - DNA, 25 bp, Homo sapien
ctggtggcatattctcctccatatc

SEQ ID NO: 1855721 - DNA, 25 bp, Homo sapien
tgctagaggcccatcaaggaagtgg

SEQ ID NO: 1855722 - DNA, 25 bp, Homo sapien
cactgagttagtggacaccggctaa

SEQ ID NO: 1855723 - DNA, 25 bp, Homo sapien
tactggctctagtccccgtgagatg

SEQ ID NO: 1855724 - DNA, 25 bp, Homo sapien
gatttacaggcttaatgccagcacc

SEQ ID NO: 1855725 - DNA, 25 bp, Homo sapien
taatccagggtaattgcgcagaggc

SEQ ID NO: 1855726 - DNA, 25 bp, Homo sapien
gagagagacctatgtttgctaaacc

SEQ ID NO: 1855727 - DNA, 25 bp, Homo sapien
cagtgattctctaccccaagtaggg

SEQ ID NO: 1855728 - DNA, 25 bp, Homo sapien
tacacatggaagaggaccaggacat

SEQ ID NO: 1855729 - DNA, 25 bp, Homo sapien
gtagcattcatcagccaaaacggcc

SEQ ID NO: 1855730 - DNA, 25 bp, Homo sapien
ggtgactgtcctaggctactgctcc

SEQ ID NO: 1855731 - DNA, 25 bp, Homo sapien
gtatgagtgtctctgtacttcccag

SEQ ID NO: 1855732 - DNA, 25 bp, Homo sapien
gccaatgacacagctagattccctg

SEQ ID NO: 1855733 - DNA, 25 bp, Homo sapien
tacggaaggcatagaccactaggct

SEQ ID NO: 1855734 - DNA, 25 bp, Homo sapien
tggaaagccaaacggtgaccatgct

SEQ ID NO: 1855735 - DNA, 25 bp, Homo sapien
ccgttttgcgtctcttggaaagcca

SEQ ID NO: 1855736 - DNA, 25 bp, Homo sapien
gctggccctgggacatcaaactagg

SEQ ID NO: 1855737 - DNA, 25 bp, Homo sapien
gaacttttgtatttgctgcttaacc

SEQ ID NO: 1855738 - DNA, 25 bp, Homo sapien
gtcagaaaacgttatagagcactcg

SEQ ID NO: 1855739 - DNA, 25 bp, Homo sapien
tgggagcgaacaacacaaggatatt

SEQ ID NO: 1855740 - DNA, 25 bp, Homo sapien
ggtaccaagacaaagtataactgag

SEQ ID NO: 1855741 - DNA, 25 bp, Homo sapien
aaagcgcttcgggaccgtaagacag

SEQ ID NO: 1855742 - DNA, 25 bp, Homo sapien
ctggaagatcagtaggcaaggcctg

SEQ ID NO: 1855743 - DNA, 25 bp, Homo sapien
tcgggaccgtaagacagtgagtgct

SEQ ID NO: 1855744 - DNA, 25 bp, Homo sapien
ggcctgcggactgcgcaccttaaag

SEQ ID NO: 1855745 - DNA, 25 bp, Homo sapien
aggaaaggaaagtgcggcggccctg

SEQ ID NO: 1855746 - DNA, 25 bp, Homo sapien
aagagctcggttcagatcccggccg

SEQ ID NO: 1855747 - DNA, 25 bp, Homo sapien
ggaacctggatatcgcgcgaggcaa

SEQ ID NO: 1855748 - DNA, 25 bp, Homo sapien
ccaggataagttggatggctgccgc

SEQ ID NO: 1855749 - DNA, 25 bp, Homo sapien
agaagaagaagaaaatgccaggatt

SEQ ID NO: 1855750 - DNA, 25 bp, Homo sapien
agaagaagaaaatgccaggattctg

SEQ ID NO: 1855751 - DNA, 25 bp, Homo sapien
gaagaagaagaaaatgccaggattc

SEQ ID NO: 1855752 - DNA, 25 bp, Homo sapien
aagaagaagaaaatgccaggattct

SEQ ID NO: 1855753 - DNA, 25 bp, Homo sapien
gctgtagatcagtaacatggaatcc

SEQ ID NO: 1855754 - DNA, 25 bp, Homo sapien
tggaatccatcatatcaacactgga

SEQ ID NO: 1855755 - DNA, 25 bp, Homo sapien
gtgcttttgctgtagatcagtaaca

SEQ ID NO: 1855756 - DNA, 25 bp, Homo sapien
cctcatgtatggagaatcatagata

SEQ ID NO: 1855757 - DNA, 25 bp, Homo sapien
tgttgttagttcagtgccagcatgg

SEQ ID NO: 1855758 - DNA, 25 bp, Homo sapien
acatagccatcctgaagcagtaaca

SEQ ID NO: 1855759 - DNA, 25 bp, Homo sapien
tgaagcagtaacaagcctttctttg

SEQ ID NO: 1855760 - DNA, 25 bp, Homo sapien
tggctctgcccatgtcactgttgtt

SEQ ID NO: 1855761 - DNA, 25 bp, Homo sapien
aacagtttgggtagcaccagtcaaa

SEQ ID NO: 1855762 - DNA, 25 bp, Homo sapien
tatcggttggtaagtcgtgagaatc

SEQ ID NO: 1855763 - DNA, 25 bp, Homo sapien
actgcactgagtttagaggccgtgg

SEQ ID NO: 1855764 - DNA, 25 bp, Homo sapien
gaatggatgtcaaagagagtcttca

SEQ ID NO: 1855765 - DNA, 25 bp, Homo sapien
gcaagattgcttgggaatttagcac

SEQ ID NO: 1855766 - DNA, 25 bp, Homo sapien
ttaagtccttgaggggcacagcgtc

SEQ ID NO: 1855767 - DNA, 25 bp, Homo sapien
gcgtcacacagattctgtgttcaat

SEQ ID NO: 1855768 - DNA, 25 bp, Homo sapien
ttagcaagattgcttgggaatttag

SEQ ID NO: 1855769 - DNA, 25 bp, Homo sapien
agtttgctgccagcagtcagtgtgt

SEQ ID NO: 1855770 - DNA, 25 bp, Homo sapien
tttcatttcgagcataaataccttc

SEQ ID NO: 1855771 - DNA, 25 bp, Homo sapien
agaattagtttcatttcgagcataa

SEQ ID NO: 1855772 - DNA, 25 bp, Homo sapien
gtaagtacatctcttgcctaaatag

SEQ ID NO: 1855773 - DNA, 25 bp, Homo sapien
catctcttgcctaaatagaattagt

SEQ ID NO: 1855774 - DNA, 25 bp, Homo sapien
ggccccacttacagctagcaaaaaa

SEQ ID NO: 1855775 - DNA, 25 bp, Homo sapien
cccacttacagctagcaaaaaatgg

SEQ ID NO: 1855776 - DNA, 25 bp, Homo sapien
attttaataagagctgtgtcctcgc

SEQ ID NO: 1855777 - DNA, 25 bp, Homo sapien
cacttacagctagcaaaaaatggcc

SEQ ID NO: 1855778 - DNA, 25 bp, Homo sapien
caatacatagcatgggatatctctc

SEQ ID NO: 1855779 - DNA, 25 bp, Homo sapien
gctgttagcgtatacaaatgctact

SEQ ID NO: 1855780 - DNA, 25 bp, Homo sapien
ggaaatgggattgcactcaacttct

SEQ ID NO: 1855781 - DNA, 25 bp, Homo sapien
cactttggttacatcgattcttagg

SEQ ID NO: 1855782 - DNA, 25 bp, Homo sapien
aggaggagtcttgcttttatcgccc

SEQ ID NO: 1855783 - DNA, 25 bp, Homo sapien
atgatctgcccacctcggcctccca

SEQ ID NO: 1855784 - DNA, 25 bp, Homo sapien
aggaggaggagtcttgcttttatcg

SEQ ID NO: 1855785 - DNA, 25 bp, Homo sapien
gatgatctgcccacctcggcctccc

SEQ ID NO: 1855786 - DNA, 25 bp, Homo sapien
cagattgataactaccctggtgggc

SEQ ID NO: 1855787 - DNA, 25 bp, Homo sapien
gaggattctgaaagcgtgacccact

SEQ ID NO: 1855788 - DNA, 25 bp, Homo sapien
cggtggagagccaaaggaaccagct

SEQ ID NO: 1855789 - DNA, 25 bp, Homo sapien
tgtatccaggaggaacggcaatccc

SEQ ID NO: 1855790 - DNA, 25 bp, Homo sapien
attgtcaatgccatgtcccagatta

SEQ ID NO: 1855791 - DNA, 25 bp, Homo sapien
acatttttctctgccgttggagcca

SEQ ID NO: 1855792 - DNA, 25 bp, Homo sapien
tgtcccagattacctaatggctgct

SEQ ID NO: 1855793 - DNA, 25 bp, Homo sapien
ttctctgccgttggagccagggtga

SEQ ID NO: 1855794 - DNA, 25 bp, Homo sapien
catctggtaccagttgcttatgcat

SEQ ID NO: 1855795 - DNA, 25 bp, Homo sapien
gcatctggtaccagttgcttatgca

SEQ ID NO: 1855796 - DNA, 25 bp, Homo sapien
agcatctggtaccagttgcttatgc

SEQ ID NO: 1855797 - DNA, 25 bp, Homo sapien
cgtatttgcgttgggatgcattcag

SEQ ID NO: 1855798 - DNA, 25 bp, Homo sapien
ctgcatgcagtcatgggccatgggt

SEQ ID NO: 1855799 - DNA, 25 bp, Homo sapien
attattatcttgggctatacataaa

SEQ ID NO: 1855800 - DNA, 25 bp, Homo sapien
gataagcttggcctccctaggcagt

SEQ ID NO: 1855801 - DNA, 25 bp, Homo sapien
aatttaatgggtacatagtagtagg

SEQ ID NO: 1855802 - DNA, 25 bp, Homo sapien
ttaatgggtacatagtagtaggtgt

SEQ ID NO: 1855803 - DNA, 25 bp, Homo sapien
ttaatttaatgggtacatagtagta

SEQ ID NO: 1855804 - DNA, 25 bp, Homo sapien
atagtagtaggtgtatatttctttt

SEQ ID NO: 1855805 - DNA, 25 bp, Homo sapien
ggaaactgcttcatgcttaagttca

SEQ ID NO: 1855806 - DNA, 25 bp, Homo sapien
cacttccatatcatgatactaaaag

SEQ ID NO: 1855807 - DNA, 25 bp, Homo sapien
tgcttcatgcttaagttcacttcca

SEQ ID NO: 1855808 - DNA, 25 bp, Homo sapien
tactaaaaggtatctaacagctgat

SEQ ID NO: 1855809 - DNA, 25 bp, Homo sapien
tcatttgtgatctgctaggaccact

SEQ ID NO: 1855810 - DNA, 25 bp, Homo sapien
ccagtccagtggaagtacaagccaa

SEQ ID NO: 1855811 - DNA, 25 bp, Homo sapien
ttttggcacactcctcatccaagag

SEQ ID NO: 1855812 - DNA, 25 bp, Homo sapien
tccaagagttgatcgcagaggcaga

SEQ ID NO: 1855813 - DNA, 25 bp, Homo sapien
tgttctcaagtttgtcagaatccag

SEQ ID NO: 1855814 - DNA, 25 bp, Homo sapien
aagtttgtcagaatccagagctctc

SEQ ID NO: 1855815 - DNA, 25 bp, Homo sapien
tctctcctcataaacatgctgttct

SEQ ID NO: 1855816 - DNA, 25 bp, Homo sapien
tcctcataaacatgctgttctcaag

SEQ ID NO: 1855817 - DNA, 25 bp, Homo sapien
gcagagtctcattccaggtcagtgg

SEQ ID NO: 1855818 - DNA, 25 bp, Homo sapien
ggaggccctgagaatagtcgtgcat

SEQ ID NO: 1855819 - DNA, 25 bp, Homo sapien
atagtcgtgcatactggctccctgg

SEQ ID NO: 1855820 - DNA, 25 bp, Homo sapien
tgcagagtctcattccaggtcagtg

SEQ ID NO: 1855821 - DNA, 25 bp, Homo sapien
aatcagaagaggcaggcatagatgg

SEQ ID NO: 1855822 - DNA, 25 bp, Homo sapien
gaggcaggcatagatggcatctcac

SEQ ID NO: 1855823 - DNA, 25 bp, Homo sapien
agaagaggcaggcatagatggcatc

SEQ ID NO: 1855824 - DNA, 25 bp, Homo sapien
ctagaaatcagaagaggcaggcata

SEQ ID NO: 1855825 - DNA, 25 bp, Homo sapien
ctgtaggccccagggatcatagagc

SEQ ID NO: 1855826 - DNA, 25 bp, Homo sapien
gatcatagagctcgggtagctagag

SEQ ID NO: 1855827 - DNA, 25 bp, Homo sapien
ccagggatcatagagctcgggtagc

SEQ ID NO: 1855828 - DNA, 25 bp, Homo sapien
aggccccagggatcatagagctcgg

SEQ ID NO: 1855829 - DNA, 25 bp, Homo sapien
gcacggcctggatgtgccattctct

SEQ ID NO: 1855830 - DNA, 25 bp, Homo sapien
taggtgcagtaatggagatagacac

SEQ ID NO: 1855831 - DNA, 25 bp, Homo sapien
acaatgcttctgtgtgataggtgca

SEQ ID NO: 1855832 - DNA, 25 bp, Homo sapien
gaaggcttccagaggatagttaaga

SEQ ID NO: 1855833 - DNA, 25 bp, Homo sapien
ctccagcagctggctgctcattctt

SEQ ID NO: 1855834 - DNA, 25 bp, Homo sapien
cagcagctggctgctcattcttttc

SEQ ID NO: 1855835 - DNA, 25 bp, Homo sapien
gcagctggctgctcattcttttctt

SEQ ID NO: 1855836 - DNA, 25 bp, Homo sapien
cagctggctgctcattcttttcttc

SEQ ID NO: 1855837 - DNA, 25 bp, Homo sapien
gggtgtgacaggtcatggctgggct

SEQ ID NO: 1855838 - DNA, 25 bp, Homo sapien
acccgtatcagagtgtggaaagcct

SEQ ID NO: 1855839 - DNA, 25 bp, Homo sapien
actagcccactgggcagcgactgca

SEQ ID NO: 1855840 - DNA, 25 bp, Homo sapien
ggattttgtgggcaagggtgtgaca

SEQ ID NO: 1855841 - DNA, 25 bp, Homo sapien
gcaagctgcccatggtttaccctca

SEQ ID NO: 1855842 - DNA, 25 bp, Homo sapien
catgcagcatctgcgtggcttctgg

SEQ ID NO: 1855843 - DNA, 25 bp, Homo sapien
taccctcaggatgaactctaggaag

SEQ ID NO: 1855844 - DNA, 25 bp, Homo sapien
ttctctctgctttgacttgtgctga

SEQ ID NO: 1855845 - DNA, 25 bp, Homo sapien
ctcttcaagggcaggctgtgtttta

SEQ ID NO: 1855846 - DNA, 25 bp, Homo sapien
aagggcaggctgtgttttactcctt

SEQ ID NO: 1855847 - DNA, 25 bp, Homo sapien
tcttcaagggcaggctgtgttttac

SEQ ID NO: 1855848 - DNA, 25 bp, Homo sapien
tcaagggcaggctgtgttttactcc

SEQ ID NO: 1855849 - DNA, 25 bp, Homo sapien
tcgcggatgcgcagctcggccactt

SEQ ID NO: 1855850 - DNA, 25 bp, Homo sapien
ttcttcggctgtatgtcacggccat

SEQ ID NO: 1855851 - DNA, 25 bp, Homo sapien
aacaaaatgagtgtgtcgcggatgc

SEQ ID NO: 1855852 - DNA, 25 bp, Homo sapien
tcctgttttcttcggctgtatgtca

SEQ ID NO: 1855853 - DNA, 25 bp, Homo sapien
ctctgccccatcattgcacctgcag

SEQ ID NO: 1855854 - DNA, 25 bp, Homo sapien
cagcagcatagaacaggacctctgc

SEQ ID NO: 1855855 - DNA, 25 bp, Homo sapien
gcagcatagaacaggacctctgctt

SEQ ID NO: 1855856 - DNA, 25 bp, Homo sapien
tccaaagaaacactaagctctctgg

SEQ ID NO: 1855857 - DNA, 25 bp, Homo sapien
ggagcttcccgggataaactgagcc

SEQ ID NO: 1855858 - DNA, 25 bp, Homo sapien
gcactgaaatcactttacctgcagg

SEQ ID NO: 1855859 - DNA, 25 bp, Homo sapien
tttgtcccaatagctctactgccct

SEQ ID NO: 1855860 - DNA, 25 bp, Homo sapien
gttcattctgatgtccatttgtccc

SEQ ID NO: 1855861 - DNA, 25 bp, Homo sapien
tatccctatacccagtagctgtgtg

SEQ ID NO: 1855862 - DNA, 25 bp, Homo sapien
tgagggttgatatgcttagcacagt

SEQ ID NO: 1855863 - DNA, 25 bp, Homo sapien
taactcacaggcttattttgagggt

SEQ ID NO: 1855864 - DNA, 25 bp, Homo sapien
ctagttccaaatgccctatccctat

SEQ ID NO: 1855865 - DNA, 25 bp, Homo sapien
caagtgcctctgtgttgacaaacgg

SEQ ID NO: 1855866 - DNA, 25 bp, Homo sapien
tgacaaacggccctgcaaaattatg

SEQ ID NO: 1855867 - DNA, 25 bp, Homo sapien
tgtgcctcagcagaattacagatgg

SEQ ID NO: 1855868 - DNA, 25 bp, Homo sapien
aaaagctgggtgcttgcaggacaga

SEQ ID NO: 1855869 - DNA, 25 bp, Homo sapien
aactttccgatagggctcagtagga

SEQ ID NO: 1855870 - DNA, 25 bp, Homo sapien
gatgaagctcttgtgctcatgtata

SEQ ID NO: 1855871 - DNA, 25 bp, Homo sapien
caggccagagctatatttccaaagg

SEQ ID NO: 1855872 - DNA, 25 bp, Homo sapien
cagtaggatcaagccgacccagagt

SEQ ID NO: 1855873 - DNA, 25 bp, Homo sapien
ttcaggaccaactcacctcatggct

SEQ ID NO: 1855874 - DNA, 25 bp, Homo sapien
cacgccgcgctaaccggaaaagaga

SEQ ID NO: 1855875 - DNA, 25 bp, Homo sapien
catgtcttgcgcatgcgctcaaata

SEQ ID NO: 1855876 - DNA, 25 bp, Homo sapien
aaaagagactagcatgtcttgcgca

SEQ ID NO: 1855877 - DNA, 25 bp, Homo sapien
ctacaggatccgaaccctcggcggg

SEQ ID NO: 1855878 - DNA, 25 bp, Homo sapien
cgcggatagggctttcaggaccaac

SEQ ID NO: 1855879 - DNA, 25 bp, Homo sapien
tgaaagccctatccgcgttcatccg

SEQ ID NO: 1855880 - DNA, 25 bp, Homo sapien
tcttttccggttagcgcggcgtgag

SEQ ID NO: 1855881 - DNA, 25 bp, Homo sapien
cccgccgagggttcggatcctgtag

SEQ ID NO: 1855882 - DNA, 25 bp, Homo sapien
tatttgagcgcatgcgcaagacatg

SEQ ID NO: 1855883 - DNA, 25 bp, Homo sapien
agccatgaggtgagttggtcctgaa

SEQ ID NO: 1855884 - DNA, 25 bp, Homo sapien
gagttggtcctgaaagccctatccg

SEQ ID NO: 1855885 - DNA, 25 bp, Homo sapien
agccaggtgaatgttatacacaagc

SEQ ID NO: 1855886 - DNA, 25 bp, Homo sapien
ggtgaatgttatacacaagctcatc

SEQ ID NO: 1855887 - DNA, 25 bp, Homo sapien
gtgaatgttatacacaagctcatcg

SEQ ID NO: 1855888 - DNA, 25 bp, Homo sapien
gtcatcttcacgtgaccaacagcta

SEQ ID NO: 1855889 - DNA, 25 bp, Homo sapien
caggtgaatgttatacacaagctca

SEQ ID NO: 1855890 - DNA, 25 bp, Homo sapien
gccaggtgaatgttatacacaagct

SEQ ID NO: 1855891 - DNA, 25 bp, Homo sapien
tagctgttggtcacgtgaagatgac

SEQ ID NO: 1855892 - DNA, 25 bp, Homo sapien
gcttgtgtataacattcacctggct

SEQ ID NO: 1855893 - DNA, 25 bp, Homo sapien
cgatgagcttgtgtataacattcac

SEQ ID NO: 1855894 - DNA, 25 bp, Homo sapien
gatgagcttgtgtataacattcacc

SEQ ID NO: 1855895 - DNA, 25 bp, Homo sapien
gagcttgtgtataacattcacctgg

SEQ ID NO: 1855896 - DNA, 25 bp, Homo sapien
tgagcttgtgtataacattcacctg

SEQ ID NO: 1855897 - DNA, 25 bp, Homo sapien
caggcacacaacgtggagtcaggca

SEQ ID NO: 1855898 - DNA, 25 bp, Homo sapien
taatcgcccacagatgtaatcggtg

SEQ ID NO: 1855899 - DNA, 25 bp, Homo sapien
tgaaggctcgtgtgctaatcgccca

SEQ ID NO: 1855900 - DNA, 25 bp, Homo sapien
gactagattctagagggttgccaga

SEQ ID NO: 1855901 - DNA, 25 bp, Homo sapien
ggccgctgaaagtcttgaactatct

SEQ ID NO: 1855902 - DNA, 25 bp, Homo sapien
aaagtcttgaactatctctgcccca

SEQ ID NO: 1855903 - DNA, 25 bp, Homo sapien
tgaaagtcttgaactatctctgccc

SEQ ID NO: 1855904 - DNA, 25 bp, Homo sapien
tgtgcccggccgctgaaagtcttga

SEQ ID NO: 1855905 - DNA, 25 bp, Homo sapien
caccaagggtttgtcagattcaagc

SEQ ID NO: 1855906 - DNA, 25 bp, Homo sapien
gaaactcataaatacccacaggtgg

SEQ ID NO: 1855907 - DNA, 25 bp, Homo sapien
gaggtggcctgagcgatatgcaaac

SEQ ID NO: 1855908 - DNA, 25 bp, Homo sapien
accttcaggaagctcgggcagggtc

SEQ ID NO: 1855909 - DNA, 25 bp, Homo sapien
agagacctacgctcgctgtgcggag

SEQ ID NO: 1855910 - DNA, 25 bp, Homo sapien
gcctggcaggtagatgaatcctcaa

SEQ ID NO: 1855911 - DNA, 25 bp, Homo sapien
gccatgcaaggagtctgggcaccag

SEQ ID NO: 1855912 - DNA, 25 bp, Homo sapien
caattaaagcgcagaacagtggcag

SEQ ID NO: 1855913 - DNA, 25 bp, Homo sapien
gtgctcactggtggagacttcgaag

SEQ ID NO: 1855914 - DNA, 25 bp, Homo sapien
tctttgacgagcttgtagacatggt

SEQ ID NO: 1855915 - DNA, 25 bp, Homo sapien
tggagacttcgaagacaaaagcaat

SEQ ID NO: 1855916 - DNA, 25 bp, Homo sapien
tcctgggagtcccggctcgtgacca

SEQ ID NO: 1855917 - DNA, 25 bp, Homo sapien
tccagcacgctgttcatcatgtact

SEQ ID NO: 1855918 - DNA, 25 bp, Homo sapien
ctgcaggatggtgaagttctccagc

SEQ ID NO: 1855919 - DNA, 25 bp, Homo sapien
caggatggtgaagttctccagcacg

SEQ ID NO: 1855920 - DNA, 25 bp, Homo sapien
tgttcatcatgtacttctcgggcag

SEQ ID NO: 1855921 - DNA, 25 bp, Homo sapien
gcgagcggtggatacggtacacaaa

SEQ ID NO: 1855922 - DNA, 25 bp, Homo sapien
cggtggatacggtacacaaagcgcc

SEQ ID NO: 1855923 - DNA, 25 bp, Homo sapien
tacggtacacaaagcgcccgttctc

SEQ ID NO: 1855924 - DNA, 25 bp, Homo sapien
gcacatgggcgagcggtggatacgg

SEQ ID NO: 1855925 - DNA, 25 bp, Homo sapien
cagagaatatggagaaggcgtcact

SEQ ID NO: 1855926 - DNA, 25 bp, Homo sapien
tatggagaaggcgtcactcggcctg

SEQ ID NO: 1855927 - DNA, 25 bp, Homo sapien
gaatatggagaaggcgtcactcggc

SEQ ID NO: 1855928 - DNA, 25 bp, Homo sapien
ctgcagagaatatggagaaggcgtc

SEQ ID NO: 1855929 - DNA, 25 bp, Homo sapien
tggagacgctgatggtcatgctatc

SEQ ID NO: 1855930 - DNA, 25 bp, Homo sapien
tttgccaaaggagcacaccttggtg

SEQ ID NO: 1855931 - DNA, 25 bp, Homo sapien
gctgatggtcatgctatcagcagag

SEQ ID NO: 1855932 - DNA, 25 bp, Homo sapien
caaaggagcacaccttggtggagac

SEQ ID NO: 1855933 - DNA, 25 bp, Homo sapien
tgcccaaggatccatctctggcact

SEQ ID NO: 1855934 - DNA, 25 bp, Homo sapien
aggtcaatgcagtgggcctggatgt

SEQ ID NO: 1855935 - DNA, 25 bp, Homo sapien
aatgcagtgggcctggatgttgcac

SEQ ID NO: 1855936 - DNA, 25 bp, Homo sapien
ctggcactctgcccacaagccatga

SEQ ID NO: 1855937 - DNA, 25 bp, Homo sapien
agggggcttggagcagagaaggcca

SEQ ID NO: 1855938 - DNA, 25 bp, Homo sapien
ttggagcagagaaggccagggggac

SEQ ID NO: 1855939 - DNA, 25 bp, Homo sapien
gggcttggagcagagaaggccaggg

SEQ ID NO: 1855940 - DNA, 25 bp, Homo sapien
agcagagaaggccagggggactcac

SEQ ID NO: 1855941 - DNA, 25 bp, Homo sapien
gtctggccgatgtgcacaaacaggt

SEQ ID NO: 1855942 - DNA, 25 bp, Homo sapien
gaatttgtcatagatctggcgcaca

SEQ ID NO: 1855943 - DNA, 25 bp, Homo sapien
tagggggccccttctcatagagctc

SEQ ID NO: 1855944 - DNA, 25 bp, Homo sapien
tggcgcacatctactgcctccaggg

SEQ ID NO: 1855945 - DNA, 25 bp, Homo sapien
gccggcctctccacaattgtgcaaa

SEQ ID NO: 1855946 - DNA, 25 bp, Homo sapien
ggaagggagcactgcacaggtatag

SEQ ID NO: 1855947 - DNA, 25 bp, Homo sapien
caggtatagaattgcctagggcttc

SEQ ID NO: 1855948 - DNA, 25 bp, Homo sapien
ccagatcctgagttgcagccctgga

SEQ ID NO: 1855949 - DNA, 25 bp, Homo sapien
gtgtcagggtctcgctgcacctcca

SEQ ID NO: 1855950 - DNA, 25 bp, Homo sapien
gctgaatactccaggagccgcagcc

SEQ ID NO: 1855951 - DNA, 25 bp, Homo sapien
tcgctgcacctccatgaaggctgaa

SEQ ID NO: 1855952 - DNA, 25 bp, Homo sapien
cagccgggaggaggcaatggtacgg

SEQ ID NO: 1855953 - DNA, 25 bp, Homo sapien
tgccacacaggcacagaggcagcag

SEQ ID NO: 1855954 - DNA, 25 bp, Homo sapien
ctgccacacaggcacagaggcagca

SEQ ID NO: 1855955 - DNA, 25 bp, Homo sapien
gggagcggggccaggggctcataac

SEQ ID NO: 1855956 - DNA, 25 bp, Homo sapien
ggggagcggggccaggggctcataa

SEQ ID NO: 1855957 - DNA, 25 bp, Homo sapien
tgctgagcgtcggcggcaggggcgg

SEQ ID NO: 1855958 - DNA, 25 bp, Homo sapien
caggggcggctggatggggtaggct

SEQ ID NO: 1855959 - DNA, 25 bp, Homo sapien
gatggggtaggctggctgtgcaaag

SEQ ID NO: 1855960 - DNA, 25 bp, Homo sapien
ggtaggctggctgtgcaaagggctt

SEQ ID NO: 1855961 - DNA, 25 bp, Homo sapien
tgctgtcccaggagaggggggctgc

SEQ ID NO: 1855962 - DNA, 25 bp, Homo sapien
cctgagagggtccaggctgctgtcc

SEQ ID NO: 1855963 - DNA, 25 bp, Homo sapien
tcctgagagggtccaggctgctgtc

SEQ ID NO: 1855964 - DNA, 25 bp, Homo sapien
ccaggagaggggggctgctccagaa

SEQ ID NO: 1855965 - DNA, 25 bp, Homo sapien
catggacgccatgctctgaagggct

SEQ ID NO: 1855966 - DNA, 25 bp, Homo sapien
cactggcagagacgatctgggcaga

SEQ ID NO: 1855967 - DNA, 25 bp, Homo sapien
ggcagaggacatggacgccatgctc

SEQ ID NO: 1855968 - DNA, 25 bp, Homo sapien
gacactggcagagacgatctgggca

SEQ ID NO: 1855969 - DNA, 25 bp, Homo sapien
tctgtcatttgaaaatcctgtatta

SEQ ID NO: 1855970 - DNA, 25 bp, Homo sapien
catttgaaaatcctgtattaggtgt

SEQ ID NO: 1855971 - DNA, 25 bp, Homo sapien
taagttggtttcataatctgtcatt

SEQ ID NO: 1855972 - DNA, 25 bp, Homo sapien
tgtcatttgaaaatcctgtattagg

SEQ ID NO: 1855973 - DNA, 25 bp, Homo sapien
ttttagcttccgaggagcccaagga

SEQ ID NO: 1855974 - DNA, 25 bp, Homo sapien
tcagaagggcctcagtcatgaaccc

SEQ ID NO: 1855975 - DNA, 25 bp, Homo sapien
gaaccccagactctgagatccgcag

SEQ ID NO: 1855976 - DNA, 25 bp, Homo sapien
tagattagaggacatgtgcagcacc

SEQ ID NO: 1855977 - DNA, 25 bp, Homo sapien
cctggctagaacttgcaagtggcta

SEQ ID NO: 1855978 - DNA, 25 bp, Homo sapien
cttcagcttagactgaatctcccga

SEQ ID NO: 1855979 - DNA, 25 bp, Homo sapien
ctcccgagatttccgcctggctaga

SEQ ID NO: 1855980 - DNA, 25 bp, Homo sapien
cagcttagactgaatctcccgagat

SEQ ID NO: 1855981 - DNA, 25 bp, Homo sapien
tatgcagagatagcgccgtgggtga

SEQ ID NO: 1855982 - DNA, 25 bp, Homo sapien
cctgagctatgcagagatagcgccg

SEQ ID NO: 1855983 - DNA, 25 bp, Homo sapien
tgagctatgcagagatagcgccgtg

SEQ ID NO: 1855984 - DNA, 25 bp, Homo sapien
aggcctgagctatgcagagatagcg

SEQ ID NO: 1855985 - DNA, 25 bp, Homo sapien
cccgcaccttcttccgagctagaac

SEQ ID NO: 1855986 - DNA, 25 bp, Homo sapien
actcccgcaccttcttccgagctag

SEQ ID NO: 1855987 - DNA, 25 bp, Homo sapien
ctcccgcaccttcttccgagctaga

SEQ ID NO: 1855988 - DNA, 25 bp, Homo sapien
tcccgcaccttcttccgagctagaa

SEQ ID NO: 1855989 - DNA, 25 bp, Homo sapien
ggttcagacacctcttgacactgcc

SEQ ID NO: 1855990 - DNA, 25 bp, Homo sapien
tctttttggtcttatcatgatcaag

SEQ ID NO: 1855991 - DNA, 25 bp, Homo sapien
gaggaaaacatagacagtgaggagg

SEQ ID NO: 1855992 - DNA, 25 bp, Homo sapien
aaggagcatcccagacctctcatct

SEQ ID NO: 1855993 - DNA, 25 bp, Homo sapien
ttgtgaaagatctgacccagaggca

SEQ ID NO: 1855994 - DNA, 25 bp, Homo sapien
tcacgctttcagcattggcaattgg

SEQ ID NO: 1855995 - DNA, 25 bp, Homo sapien
gcacagagaacccaaatgtcactgt

SEQ ID NO: 1855996 - DNA, 25 bp, Homo sapien
aaacacacagatccttgacgccgct

SEQ ID NO: 1855997 - DNA, 25 bp, Homo sapien
tgataccacctggttaggacctggg

SEQ ID NO: 1855998 - DNA, 25 bp, Homo sapien
cagaagactgcctccagatggttga

SEQ ID NO: 1855999 - DNA, 25 bp, Homo sapien
taagctgtcacacggctgagtgcta

SEQ ID NO: 1856000 - DNA, 25 bp, Homo sapien
gactcacttggacccttagctcaga

SEQ ID NO: 1856001 - DNA, 25 bp, Homo sapien
gatcccctttcactgggatgtaaaa

SEQ ID NO: 1856002 - DNA, 25 bp, Homo sapien
taaagacatgccttgtcctcacaac

SEQ ID NO: 1856003 - DNA, 25 bp, Homo sapien
tatgcccttataatgaagacagtgg

SEQ ID NO: 1856004 - DNA, 25 bp, Homo sapien
aaacagtgacctagtgacccttggc

SEQ ID NO: 1856005 - DNA, 25 bp, Homo sapien
gaatgaatgagggatcgttgccacc

SEQ ID NO: 1856006 - DNA, 25 bp, Homo sapien
tggaacaggccagacttgacatatg

SEQ ID NO: 1856007 - DNA, 25 bp, Homo sapien
cactgggtagggaggctcagaacct

SEQ ID NO: 1856008 - DNA, 25 bp, Homo sapien
aaatttggtgctgcatgagctagac

SEQ ID NO: 1856009 - DNA, 25 bp, Homo sapien
atatagcgtgcaatcaactcatttc

SEQ ID NO: 1856010 - DNA, 25 bp, Homo sapien
tcttccccgtcctcagtttaatata

SEQ ID NO: 1856011 - DNA, 25 bp, Homo sapien
cgtcctcagtttaatatagcgtgca

SEQ ID NO: 1856012 - DNA, 25 bp, Homo sapien
tcagtttaatatagcgtgcaatcaa

SEQ ID NO: 1856013 - DNA, 25 bp, Homo sapien
gcccagaagggtcgagttatcccaa

SEQ ID NO: 1856014 - DNA, 25 bp, Homo sapien
cacagcccgcactggagagaactat

SEQ ID NO: 1856015 - DNA, 25 bp, Homo sapien
tgacccactttcttgggcccactga

SEQ ID NO: 1856016 - DNA, 25 bp, Homo sapien
ctgtgggagtcaccgggcgactatc

SEQ ID NO: 1856017 - DNA, 25 bp, Homo sapien
cgtcaccaaaccggttgggtgagag

SEQ ID NO: 1856018 - DNA, 25 bp, Homo sapien
ttgcgcgcccagactcgcccggcca

SEQ ID NO: 1856019 - DNA, 25 bp, Homo sapien
ggcttgcgcgcccagactcgcccgg

SEQ ID NO: 1856020 - DNA, 25 bp, Homo sapien
cggctggcggcctccgacgtcacca

SEQ ID NO: 1856021 - DNA, 25 bp, Homo sapien
ctgctgctggcgttccagctgttgg

SEQ ID NO: 1856022 - DNA, 25 bp, Homo sapien
acaggatgatcttccgccggccgca

SEQ ID NO: 1856023 - DNA, 25 bp, Homo sapien
ctgacaggatgatcttccgccggcc

SEQ ID NO: 1856024 - DNA, 25 bp, Homo sapien
cctccgcatcgttgtccagcccctt

SEQ ID NO: 1856025 - DNA, 25 bp, Homo sapien
tgtgctggttgctctgggctctggg

SEQ ID NO: 1856026 - DNA, 25 bp, Homo sapien
gtgctggttgctctgggctctgggc

SEQ ID NO: 1856027 - DNA, 25 bp, Homo sapien
gacaaccacgtgagaatgtgcaccc

SEQ ID NO: 1856028 - DNA, 25 bp, Homo sapien
aggggcaagtggcactccccacaca

SEQ ID NO: 1856029 - DNA, 25 bp, Homo sapien
gctgtgcgagtgctcgggaggacaa

SEQ ID NO: 1856030 - DNA, 25 bp, Homo sapien
tcgggaggacaaccacgtgagaatg

SEQ ID NO: 1856031 - DNA, 25 bp, Homo sapien
gactcctggtactctgggtcgccca

SEQ ID NO: 1856032 - DNA, 25 bp, Homo sapien
cagactcctggtactctgggtcgcc

SEQ ID NO: 1856033 - DNA, 25 bp, Homo sapien
gccagactcctggtactctgggtcg

SEQ ID NO: 1856034 - DNA, 25 bp, Homo sapien
catgccagactcctggtactctggg

SEQ ID NO: 1856035 - DNA, 25 bp, Homo sapien
tacacagttgcgtcacagccactgt

SEQ ID NO: 1856036 - DNA, 25 bp, Homo sapien
tcatgagagtcacggtgtcatctaa

SEQ ID NO: 1856037 - DNA, 25 bp, Homo sapien
tgtcctgctcattcactgttacccg

SEQ ID NO: 1856038 - DNA, 25 bp, Homo sapien
gagtcacggtgtcatctaagaacaa

SEQ ID NO: 1856039 - DNA, 25 bp, Homo sapien
tacggtgtcgctttctggtgctcag

SEQ ID NO: 1856040 - DNA, 25 bp, Homo sapien
gagtgcggtgtccttcacacgcagg

SEQ ID NO: 1856041 - DNA, 25 bp, Homo sapien
gagagtcccaaacacgctcagatag

SEQ ID NO: 1856042 - DNA, 25 bp, Homo sapien
gcgtcacaacatgcaggtcacaagt

SEQ ID NO: 1856043 - DNA, 25 bp, Homo sapien
cagaaaccggcctgggcgctgggag

SEQ ID NO: 1856044 - DNA, 25 bp, Homo sapien
cagaactgaagggaacgtgagcccc

SEQ ID NO: 1856045 - DNA, 25 bp, Homo sapien
tccgagccaagctcacagcgctcag

SEQ ID NO: 1856046 - DNA, 25 bp, Homo sapien
ggcgcgcggctttggtcccagacac

SEQ ID NO: 1856047 - DNA, 25 bp, Homo sapien
acactgtgcggcccccggatccccg

SEQ ID NO: 1856048 - DNA, 25 bp, Homo sapien
ggcgccccggatatgagctccaggg

SEQ ID NO: 1856049 - DNA, 25 bp, Homo sapien
gccctccacactgtgcggcccccgg

SEQ ID NO: 1856050 - DNA, 25 bp, Homo sapien
gggcgccccggatatgagctccagg

SEQ ID NO: 1856051 - DNA, 25 bp, Homo sapien
aatgtgcggaatgagccgggctgga

SEQ ID NO: 1856052 - DNA, 25 bp, Homo sapien
gagcgagcgggacggaaagtttgtg

SEQ ID NO: 1856053 - DNA, 25 bp, Homo sapien
cgccgggcccgagggagccgcaagg

SEQ ID NO: 1856054 - DNA, 25 bp, Homo sapien
ctggtccgagctcgcgggggcgctc

SEQ ID NO: 1856055 - DNA, 25 bp, Homo sapien
cagctcgcgcctcggacgcctcctg

SEQ ID NO: 1856056 - DNA, 25 bp, Homo sapien
tcgttctccgcacgcgctgaggaac

SEQ ID NO: 1856057 - DNA, 25 bp, Homo sapien
cctcgttctccgcacgcgctgagga

SEQ ID NO: 1856058 - DNA, 25 bp, Homo sapien
tgggacgggggttgagacttccagc

SEQ ID NO: 1856059 - DNA, 25 bp, Homo sapien
gatgtgcggctccaactccagatgt

SEQ ID NO: 1856060 - DNA, 25 bp, Homo sapien
acaatgactactgctcccggacagg

SEQ ID NO: 1856061 - DNA, 25 bp, Homo sapien
cagtgagaggtcagccccgacacag

SEQ ID NO: 1856062 - DNA, 25 bp, Homo sapien
aggcgagctccgagaccagatgtgc

SEQ ID NO: 1856063 - DNA, 25 bp, Homo sapien
ggtgaaggcgtcctccgccacgcgg

SEQ ID NO: 1856064 - DNA, 25 bp, Homo sapien
tcccgtcgaaactggagagggcgat

SEQ ID NO: 1856065 - DNA, 25 bp, Homo sapien
ccgaactgcagcacgatatagtcgg

SEQ ID NO: 1856066 - DNA, 25 bp, Homo sapien
gcgcacagcgggtaccggtagtcta

SEQ ID NO: 1856067 - DNA, 25 bp, Homo sapien
tatggacacaagacggggtgggggc

SEQ ID NO: 1856068 - DNA, 25 bp, Homo sapien
atggacacaagacggggtgggggcg

SEQ ID NO: 1856069 - DNA, 25 bp, Homo sapien
ctatggacacaagacggggtggggg

SEQ ID NO: 1856070 - DNA, 25 bp, Homo sapien
cacagtgtcagtgcctatggaggag

SEQ ID NO: 1856071 - DNA, 25 bp, Homo sapien
aacctgaagtgatgagccccaagac

SEQ ID NO: 1856072 - DNA, 25 bp, Homo sapien
gagagtgaccctgtgggatgtccca

SEQ ID NO: 1856073 - DNA, 25 bp, Homo sapien
caatgctggaatgggaacctgaagt

SEQ ID NO: 1856074 - DNA, 25 bp, Homo sapien
ggtggtggagaagagccagacctgg

SEQ ID NO: 1856075 - DNA, 25 bp, Homo sapien
tggtggagaagagccagacctgggc

SEQ ID NO: 1856076 - DNA, 25 bp, Homo sapien
gtggtggagaagagccagacctggg

SEQ ID NO: 1856077 - DNA, 25 bp, Homo sapien
agacaggtggcttgttgtgcagttc

SEQ ID NO: 1856078 - DNA, 25 bp, Homo sapien
tgcagttctatgaggctctccagcg

SEQ ID NO: 1856079 - DNA, 25 bp, Homo sapien
taggagccactgtcatcgttccaga

SEQ ID NO: 1856080 - DNA, 25 bp, Homo sapien
tcttgttctgccagcgcaccagcag

SEQ ID NO: 1856081 - DNA, 25 bp, Homo sapien
caaaaagcccaagtccattccctag

SEQ ID NO: 1856082 - DNA, 25 bp, Homo sapien
tgagccccgactcctgtttctcaca

SEQ ID NO: 1856083 - DNA, 25 bp, Homo sapien
cctaggtggccagaatgaatttgtg

SEQ ID NO: 1856084 - DNA, 25 bp, Homo sapien
tcctgtttctcacatagggagccag

SEQ ID NO: 1856085 - DNA, 25 bp, Homo sapien
cacggaagcccagcacgttggtttc

SEQ ID NO: 1856086 - DNA, 25 bp, Homo sapien
ggatggggaccctctcgttctccgc

SEQ ID NO: 1856087 - DNA, 25 bp, Homo sapien
caggaatgatgacggtcatgcgccg

SEQ ID NO: 1856088 - DNA, 25 bp, Homo sapien
tcgttctccgcactcatgccaggaa

SEQ ID NO: 1856089 - DNA, 25 bp, Homo sapien
cacgctgtgggttctgcccgttgtc

SEQ ID NO: 1856090 - DNA, 25 bp, Homo sapien
cattagtgctgtacccacgctgtgg

SEQ ID NO: 1856091 - DNA, 25 bp, Homo sapien
caaagaccgtgaagcggttccccag

SEQ ID NO: 1856092 - DNA, 25 bp, Homo sapien
cctgccgaaggcttgccacattagt

SEQ ID NO: 1856093 - DNA, 25 bp, Homo sapien
taaatgctggcccaacccagggcat

SEQ ID NO: 1856094 - DNA, 25 bp, Homo sapien
ttagagagcttcctacaagggtggg

SEQ ID NO: 1856095 - DNA, 25 bp, Homo sapien
caggcttccccctatgcagaggtct

SEQ ID NO: 1856096 - DNA, 25 bp, Homo sapien
gactgagcaattcatgtcccctgcc

SEQ ID NO: 1856097 - DNA, 25 bp, Homo sapien
gttttcgtttcctgccagccaagag

SEQ ID NO: 1856098 - DNA, 25 bp, Homo sapien
aattggctgtcttgctccgttttcg

SEQ ID NO: 1856099 - DNA, 25 bp, Homo sapien
tcccctcctcgggacagattggtag

SEQ ID NO: 1856100 - DNA, 25 bp, Homo sapien
tcagcttcccgatgaaattctcccc

SEQ ID NO: 1856101 - DNA, 25 bp, Homo sapien
tgcctcgatccatgccctttttgtc

SEQ ID NO: 1856102 - DNA, 25 bp, Homo sapien
taggagggatacatgcctcgatcca

SEQ ID NO: 1856103 - DNA, 25 bp, Homo sapien
caggaagtaggagggatacatgcct

SEQ ID NO: 1856104 - DNA, 25 bp, Homo sapien
gatacatgcctcgatccatgccctt

SEQ ID NO: 1856105 - DNA, 25 bp, Homo sapien
tattaaccctttcgttgctggagtg

SEQ ID NO: 1856106 - DNA, 25 bp, Homo sapien
gaaacattttaacaaccggtgcagc

SEQ ID NO: 1856107 - DNA, 25 bp, Homo sapien
taacaacctgttcgccatggagatg

SEQ ID NO: 1856108 - DNA, 25 bp, Homo sapien
gagcccagatgacataaggcccttg

SEQ ID NO: 1856109 - DNA, 25 bp, Homo sapien
tgattgctcttctttatcaccgtag

SEQ ID NO: 1856110 - DNA, 25 bp, Homo sapien
tcttctttatcaccgtagctgcctc

SEQ ID NO: 1856111 - DNA, 25 bp, Homo sapien
tccttcctcgcgcctttgggagtgc

SEQ ID NO: 1856112 - DNA, 25 bp, Homo sapien
tgctcttctttatcaccgtagctgc

SEQ ID NO: 1856113 - DNA, 25 bp, Homo sapien
tgaggggtccttgtcggcctcccca

SEQ ID NO: 1856114 - DNA, 25 bp, Homo sapien
cttgtcaggactgccttccccaacc

SEQ ID NO: 1856115 - DNA, 25 bp, Homo sapien
gtcaggactgccttccccaaccaga

SEQ ID NO: 1856116 - DNA, 25 bp, Homo sapien
ttccccaaccagaaacatggctgct

SEQ ID NO: 1856117 - DNA, 25 bp, Homo sapien
cctaacacgcagaggtttcggtggg

SEQ ID NO: 1856118 - DNA, 25 bp, Homo sapien
ttattcctaacacgcagaggtttcg

SEQ ID NO: 1856119 - DNA, 25 bp, Homo sapien
cctcccctgctggagcttccttatt

SEQ ID NO: 1856120 - DNA, 25 bp, Homo sapien
cttccttattcctaacacgcagagg

SEQ ID NO: 1856121 - DNA, 25 bp, Homo sapien
gtgtctcagtgagacgccaagccct

SEQ ID NO: 1856122 - DNA, 25 bp, Homo sapien
actgggttcattttgaggcctcaat

SEQ ID NO: 1856123 - DNA, 25 bp, Homo sapien
ggcctcaatcgctgtgtctcagtga

SEQ ID NO: 1856124 - DNA, 25 bp, Homo sapien
gaggaaaaaccctccggtcacagca

SEQ ID NO: 1856125 - DNA, 25 bp, Homo sapien
tcaggtctgcggagctcttctctct

SEQ ID NO: 1856126 - DNA, 25 bp, Homo sapien
tccttcaggtctgcggagctcttct

SEQ ID NO: 1856127 - DNA, 25 bp, Homo sapien
cctctccttcaggtctgcggagctc

SEQ ID NO: 1856128 - DNA, 25 bp, Homo sapien
ctctctcaggggcttcttgggaggc

SEQ ID NO: 1856129 - DNA, 25 bp, Homo sapien
cttcataatgggggtttgagccggg

SEQ ID NO: 1856130 - DNA, 25 bp, Homo sapien
tcataatgggggtttgagccgggcc

SEQ ID NO: 1856131 - DNA, 25 bp, Homo sapien
ttcataatgggggtttgagccgggc

SEQ ID NO: 1856132 - DNA, 25 bp, Homo sapien
aacctggcgtagaccgtctgcggcg

SEQ ID NO: 1856133 - DNA, 25 bp, Homo sapien
ctgaggaacctggcgtagaccgtct

SEQ ID NO: 1856134 - DNA, 25 bp, Homo sapien
cgtctggggcacgggctaccagaaa

SEQ ID NO: 1856135 - DNA, 25 bp, Homo sapien
cgggggtcgcgcttcttggcctcgg

SEQ ID NO: 1856136 - DNA, 25 bp, Homo sapien
gggtccgcgaggcagcgcctctacc

SEQ ID NO: 1856137 - DNA, 25 bp, Homo sapien
ttcagacagggtcccatccgcgggt

SEQ ID NO: 1856138 - DNA, 25 bp, Homo sapien
tcaccctagggatctcccctgggct

SEQ ID NO: 1856139 - DNA, 25 bp, Homo sapien
cactttcaacacttctccccggctt

SEQ ID NO: 1856140 - DNA, 25 bp, Homo sapien
tccttagcctctgtgccggggcggg

SEQ ID NO: 1856141 - DNA, 25 bp, Homo sapien
ccttagcctctgtgccggggcgggt

SEQ ID NO: 1856142 - DNA, 25 bp, Homo sapien
ttagcctctgtgccggggcgggtcg

SEQ ID NO: 1856143 - DNA, 25 bp, Homo sapien
cttagcctctgtgccggggcgggtc

SEQ ID NO: 1856144 - DNA, 25 bp, Homo sapien
ggcctccgggctcaggctttcttct

SEQ ID NO: 1856145 - DNA, 25 bp, Homo sapien
cgggctcaggctttcttcttcatgc

SEQ ID NO: 1856146 - DNA, 25 bp, Homo sapien
ccgggctcaggctttcttcttcatg

SEQ ID NO: 1856147 - DNA, 25 bp, Homo sapien
ctccgggctcaggctttcttcttca

SEQ ID NO: 1856148 - DNA, 25 bp, Homo sapien
ctctcggagggtttcatcccgcaga

SEQ ID NO: 1856149 - DNA, 25 bp, Homo sapien
tcggagggtttcatcccgcagaggc

SEQ ID NO: 1856150 - DNA, 25 bp, Homo sapien
tctcggagggtttcatcccgcagag

SEQ ID NO: 1856151 - DNA, 25 bp, Homo sapien
ggagggtttcatcccgcagaggcat

SEQ ID NO: 1856152 - DNA, 25 bp, Homo sapien
ctttgcctatcgcacccctttctct

SEQ ID NO: 1856153 - DNA, 25 bp, Homo sapien
gcctttgcctatcgcacccctttct

SEQ ID NO: 1856154 - DNA, 25 bp, Homo sapien
tgcctttgcctatcgcacccctttc

SEQ ID NO: 1856155 - DNA, 25 bp, Homo sapien
ggtgcctttgcctatcgcacccctt

SEQ ID NO: 1856156 - DNA, 25 bp, Homo sapien
tgtctgcacctggatggcatcgcct

SEQ ID NO: 1856157 - DNA, 25 bp, Homo sapien
gttgttcagttccagtgtcctccgg

SEQ ID NO: 1856158 - DNA, 25 bp, Homo sapien
tgtcctccggatgttgttgcttgct

SEQ ID NO: 1856159 - DNA, 25 bp, Homo sapien
gttgcttgctcctgcgtgggtctca

SEQ ID NO: 1856160 - DNA, 25 bp, Homo sapien
tgtgtgggctgggtataaacgtctt

SEQ ID NO: 1856161 - DNA, 25 bp, Homo sapien
ccccagggtatgaaaggcgtgagtt

SEQ ID NO: 1856162 - DNA, 25 bp, Homo sapien
cagactattagcttgggctcccatc

SEQ ID NO: 1856163 - DNA, 25 bp, Homo sapien
ggcgtgggagcccttgctcagccat

SEQ ID NO: 1856164 - DNA, 25 bp, Homo sapien
ctctgtgtttttggtggcatctgct

SEQ ID NO: 1856165 - DNA, 25 bp, Homo sapien
gttacagtcctctctgtgtttttgg

SEQ ID NO: 1856166 - DNA, 25 bp, Homo sapien
ctgcttttcctgtgatactttccat

SEQ ID NO: 1856167 - DNA, 25 bp, Homo sapien
tctgcttttcctgtgatactttcca

SEQ ID NO: 1856168 - DNA, 25 bp, Homo sapien
tagttaggtagcactttcccctgga

SEQ ID NO: 1856169 - DNA, 25 bp, Homo sapien
tgttcggatgcagtttcagtggcca

SEQ ID NO: 1856170 - DNA, 25 bp, Homo sapien
tcagtggccaggagcactagataag

SEQ ID NO: 1856171 - DNA, 25 bp, Homo sapien
aacagtagcccgtgactccggaggt

SEQ ID NO: 1856172 - DNA, 25 bp, Homo sapien
cactggcagtcctcgttttggaggt

SEQ ID NO: 1856173 - DNA, 25 bp, Homo sapien
gagttcagtgtgctgctaaggccaa

SEQ ID NO: 1856174 - DNA, 25 bp, Homo sapien
tccagccccagagaatacaggcttc

SEQ ID NO: 1856175 - DNA, 25 bp, Homo sapien
cacatgtaccatactaaaagtggag

SEQ ID NO: 1856176 - DNA, 25 bp, Homo sapien
cagcttaaaaaggtgaaatatccgc

SEQ ID NO: 1856177 - DNA, 25 bp, Homo sapien
tcaggttcaccttagagcaaagtgt

SEQ ID NO: 1856178 - DNA, 25 bp, Homo sapien
tagcaacgatgcattgttctgccac

SEQ ID NO: 1856179 - DNA, 25 bp, Homo sapien
tattttgcaagtcgagcctacctta

SEQ ID NO: 1856180 - DNA, 25 bp, Homo sapien
acacacaaaaaagtgcatctaaatg

SEQ ID NO: 1856181 - DNA, 25 bp, Homo sapien
gaacacacaaaaaagtgcatctaaa

SEQ ID NO: 1856182 - DNA, 25 bp, Homo sapien
cacacaaaaaagtgcatctaaatga

SEQ ID NO: 1856183 - DNA, 25 bp, Homo sapien
cacaaaaaagtgcatctaaatgatt

SEQ ID NO: 1856184 - DNA, 25 bp, Homo sapien
taggctactggctgtgtaccggcat

SEQ ID NO: 1856185 - DNA, 25 bp, Homo sapien
tcttcttgagtggtaatgggcaccc

SEQ ID NO: 1856186 - DNA, 25 bp, Homo sapien
gtaccggcatgggaagctgtcttca

SEQ ID NO: 1856187 - DNA, 25 bp, Homo sapien
tggtgaaccataatacacacgtggg

SEQ ID NO: 1856188 - DNA, 25 bp, Homo sapien
ggagacatgagacccctctactgtg

SEQ ID NO: 1856189 - DNA, 25 bp, Homo sapien
tgtaaatagatccactccaggtcaa

SEQ ID NO: 1856190 - DNA, 25 bp, Homo sapien
gctgcatggatcctaaatgactatg

SEQ ID NO: 1856191 - DNA, 25 bp, Homo sapien
aatgagctggacttaagctgctggc

SEQ ID NO: 1856192 - DNA, 25 bp, Homo sapien
cacatagactataacaaactttaca

SEQ ID NO: 1856193 - DNA, 25 bp, Homo sapien
ttccacctggagtggtcccgtgcca

SEQ ID NO: 1856194 - DNA, 25 bp, Homo sapien
agtcatttctgtttgttccacctgg

SEQ ID NO: 1856195 - DNA, 25 bp, Homo sapien
tttgcttccagaatcacatagacta

SEQ ID NO: 1856196 - DNA, 25 bp, Homo sapien
ggactcttccctccttggcgtggcg

SEQ ID NO: 1856197 - DNA, 25 bp, Homo sapien
aaagcccattgaggaggggccgagt

SEQ ID NO: 1856198 - DNA, 25 bp, Homo sapien
gggccgagttcactgggactcttcc

SEQ ID NO: 1856199 - DNA, 25 bp, Homo sapien
gagttgggggaaagcccattgagga

SEQ ID NO: 1856200 - DNA, 25 bp, Homo sapien
attgcttgactgtctgttccttttt

SEQ ID NO: 1856201 - DNA, 25 bp, Homo sapien
ttccattgcttgactgtctgttcct

SEQ ID NO: 1856202 - DNA, 25 bp, Homo sapien
ttcttccattgcttgactgtctgtt

SEQ ID NO: 1856203 - DNA, 25 bp, Homo sapien
ccattgcttgactgtctgttccttt

SEQ ID NO: 1856204 - DNA, 25 bp, Homo sapien
tgttggcgtatatcctgcggtcccg

SEQ ID NO: 1856205 - DNA, 25 bp, Homo sapien
tgcagtcttgcagccttattctggg

SEQ ID NO: 1856206 - DNA, 25 bp, Homo sapien
cccttggctgactcaaactcgttca

SEQ ID NO: 1856207 - DNA, 25 bp, Homo sapien
tcattggcactgtccagtccaaggg

SEQ ID NO: 1856208 - DNA, 25 bp, Homo sapien
cagtttggttactagcatgtggaca

SEQ ID NO: 1856209 - DNA, 25 bp, Homo sapien
tcagtggaacagaacgaatcattca

SEQ ID NO: 1856210 - DNA, 25 bp, Homo sapien
ggatggcagctatccacatagaaaa

SEQ ID NO: 1856211 - DNA, 25 bp, Homo sapien
gaggcacttgtcttaccagagaaaa

SEQ ID NO: 1856212 - DNA, 25 bp, Homo sapien
ccaggacactatcttcccatactga

SEQ ID NO: 1856213 - DNA, 25 bp, Homo sapien
tgaatcaccgcctgcatgtatttgc

SEQ ID NO: 1856214 - DNA, 25 bp, Homo sapien
aaatgattcagaagctttcgattcc

SEQ ID NO: 1856215 - DNA, 25 bp, Homo sapien
taaaccatattccatctctaaccag

SEQ ID NO: 1856216 - DNA, 25 bp, Homo sapien
cagtctcgcactgtctccagggctg

SEQ ID NO: 1856217 - DNA, 25 bp, Homo sapien
atggcgccatctcagctcactgcaa

SEQ ID NO: 1856218 - DNA, 25 bp, Homo sapien
aatggcgccatctcagctcactgca

SEQ ID NO: 1856219 - DNA, 25 bp, Homo sapien
cacagtctcgcactgtctccagggc

SEQ ID NO: 1856220 - DNA, 25 bp, Homo sapien
taaattcaatgcctgaccaacagtg

SEQ ID NO: 1856221 - DNA, 25 bp, Homo sapien
tactaggatttaccacagcccaagc

SEQ ID NO: 1856222 - DNA, 25 bp, Homo sapien
cagcgcgtacatctcactgccgagt

SEQ ID NO: 1856223 - DNA, 25 bp, Homo sapien
tagagcaggtctaagaggacatgcc

SEQ ID NO: 1856224 - DNA, 25 bp, Homo sapien
tcaccaacacttgaataaattcttt

SEQ ID NO: 1856225 - DNA, 25 bp, Homo sapien
tcagagtagggaatatcagcacaat

SEQ ID NO: 1856226 - DNA, 25 bp, Homo sapien
tattcttaccaagcagtgttgacaa

SEQ ID NO: 1856227 - DNA, 25 bp, Homo sapien
tgagatggaaaggattgcataggga

SEQ ID NO: 1856228 - DNA, 25 bp, Homo sapien
ggcagcctgctccaatttttctttg

SEQ ID NO: 1856229 - DNA, 25 bp, Homo sapien
cccttctctttgacaatggcagcct

SEQ ID NO: 1856230 - DNA, 25 bp, Homo sapien
tatccatctcccaggattctttggc

SEQ ID NO: 1856231 - DNA, 25 bp, Homo sapien
cttgaagtatacggttcccttctct

SEQ ID NO: 1856232 - DNA, 25 bp, Homo sapien
tgccaatttactgctaggccagtgc

SEQ ID NO: 1856233 - DNA, 25 bp, Homo sapien
tcatactgtttgaagaactcacttt

SEQ ID NO: 1856234 - DNA, 25 bp, Homo sapien
gagaaaagcatcagttgaggcctat

SEQ ID NO: 1856235 - DNA, 25 bp, Homo sapien
gacaatggttagatgaacagagaga

SEQ ID NO: 1856236 - DNA, 25 bp, Homo sapien
ttgagacaggatactcttttatttt

SEQ ID NO: 1856237 - DNA, 25 bp, Homo sapien
tttttgagacaggatactcttttat

SEQ ID NO: 1856238 - DNA, 25 bp, Homo sapien
ttctttttttgagacaggatcttgc

SEQ ID NO: 1856239 - DNA, 25 bp, Homo sapien
gatcttgctctgttgtcttttcttt

SEQ ID NO: 1856240 - DNA, 25 bp, Homo sapien
ccagcctggcctagtctattcttaa

SEQ ID NO: 1856241 - DNA, 25 bp, Homo sapien
gctcctaaataagcaatgtccactg

SEQ ID NO: 1856242 - DNA, 25 bp, Homo sapien
gacaacaatcagtggtcataaccag

SEQ ID NO: 1856243 - DNA, 25 bp, Homo sapien
caagcagcagtgcatgaatatactc

SEQ ID NO: 1856244 - DNA, 25 bp, Homo sapien
taagctcagcattaggttcaatgcc

SEQ ID NO: 1856245 - DNA, 25 bp, Homo sapien
ttaagtgtaacttcatatataagct

SEQ ID NO: 1856246 - DNA, 25 bp, Homo sapien
ttcgaagctcttaagtgtaacttca

SEQ ID NO: 1856247 - DNA, 25 bp, Homo sapien
gttcaatgccaaatttaggcttccc

SEQ ID NO: 1856248 - DNA, 25 bp, Homo sapien
gacacagccactgtaattgttagag

SEQ ID NO: 1856249 - DNA, 25 bp, Homo sapien
ttagagtggtactcacgggaggtat

SEQ ID NO: 1856250 - DNA, 25 bp, Homo sapien
ggcttatagctatcagagtgtagga

SEQ ID NO: 1856251 - DNA, 25 bp, Homo sapien
agtgctgtcacttctagtagtacca

SEQ ID NO: 1856252 - DNA, 25 bp, Homo sapien
tgttcttcccgctgcattttctcca

SEQ ID NO: 1856253 - DNA, 25 bp, Homo sapien
ctccagagctttgtcaattccaatt

SEQ ID NO: 1856254 - DNA, 25 bp, Homo sapien
caattggaatgtcgtggtcttctcc

SEQ ID NO: 1856255 - DNA, 25 bp, Homo sapien
aatacattgttcttcccgctgcatt

SEQ ID NO: 1856256 - DNA, 25 bp, Homo sapien
cttccaccacagcggccttccaggt

SEQ ID NO: 1856257 - DNA, 25 bp, Homo sapien
ccttccaccacagcggccttccagg

SEQ ID NO: 1856258 - DNA, 25 bp, Homo sapien
cagttggatatgtttccatggcagg

SEQ ID NO: 1856259 - DNA, 25 bp, Homo sapien
ctaagcagttggatatgtttccatg

SEQ ID NO: 1856260 - DNA, 25 bp, Homo sapien
gttggatatgtttccatggcaggcc

SEQ ID NO: 1856261 - DNA, 25 bp, Homo sapien
ggatatgtttccatggcaggccttt

SEQ ID NO: 1856262 - DNA, 25 bp, Homo sapien
ccaaagcaggacttgaacctaggtc

SEQ ID NO: 1856263 - DNA, 25 bp, Homo sapien
tgtgtgtcacgcactgcaggaaatg

SEQ ID NO: 1856264 - DNA, 25 bp, Homo sapien
tacatataatttgctccgggaggga

SEQ ID NO: 1856265 - DNA, 25 bp, Homo sapien
gattctggtcctcaagcactcaaag

SEQ ID NO: 1856266 - DNA, 25 bp, Homo sapien
ccgtttggttctccggataatgcct

SEQ ID NO: 1856267 - DNA, 25 bp, Homo sapien
gctccttcgtttggatttgaatatc

SEQ ID NO: 1856268 - DNA, 25 bp, Homo sapien
tttctactgttgctccttcgtttgg

SEQ ID NO: 1856269 - DNA, 25 bp, Homo sapien
tgaatatccctctcctttccgtttg

SEQ ID NO: 1856270 - DNA, 25 bp, Homo sapien
tctatagcaagcttagctccttttc

SEQ ID NO: 1856271 - DNA, 25 bp, Homo sapien
aataagtaagttggatctgattctc

SEQ ID NO: 1856272 - DNA, 25 bp, Homo sapien
aaaataagtaagttggatctgattc

SEQ ID NO: 1856273 - DNA, 25 bp, Homo sapien
gattctctatagcaagcttagctcc

SEQ ID NO: 1856274 - DNA, 25 bp, Homo sapien
aaagagagttgcattcgagggaatt

SEQ ID NO: 1856275 - DNA, 25 bp, Homo sapien
gccgagccatatgcatattctggtt

SEQ ID NO: 1856276 - DNA, 25 bp, Homo sapien
agggagactgccagccgagccatat

SEQ ID NO: 1856277 - DNA, 25 bp, Homo sapien
ttcgagggaattttagggagactgc

SEQ ID NO: 1856278 - DNA, 25 bp, Homo sapien
atgtcccatgccttgatgacttggc

SEQ ID NO: 1856279 - DNA, 25 bp, Homo sapien
ccaatgtcccatgccttgatgactt

SEQ ID NO: 1856280 - DNA, 25 bp, Homo sapien
aatgtcccatgccttgatgacttgg

SEQ ID NO: 1856281 - DNA, 25 bp, Homo sapien
cccaatgtcccatgccttgatgact

SEQ ID NO: 1856282 - DNA, 25 bp, Homo sapien
ggtgcccggcacataatatgtattt

SEQ ID NO: 1856283 - DNA, 25 bp, Homo sapien
aaatgcatggcacggtgcccggcac

SEQ ID NO: 1856284 - DNA, 25 bp, Homo sapien
atcaaatgcatggcacggtgcccgg

SEQ ID NO: 1856285 - DNA, 25 bp, Homo sapien
gcccggcacataatatgtatttgat

SEQ ID NO: 1856286 - DNA, 25 bp, Homo sapien
gagccattgcatcagcccagttttt

SEQ ID NO: 1856287 - DNA, 25 bp, Homo sapien
gaggccatattattctcctgtggga

SEQ ID NO: 1856288 - DNA, 25 bp, Homo sapien
gaaactgcttgaacacttacagctg

SEQ ID NO: 1856289 - DNA, 25 bp, Homo sapien
cctagggatcatagggaggccatat

SEQ ID NO: 1856290 - DNA, 25 bp, Homo sapien
gagatactccacagttcgcatggtg

SEQ ID NO: 1856291 - DNA, 25 bp, Homo sapien
tctggagagggttaagcaagcttct

SEQ ID NO: 1856292 - DNA, 25 bp, Homo sapien
ggtaacatacaccaagaataggccg

SEQ ID NO: 1856293 - DNA, 25 bp, Homo sapien
tgacgggagcaatgtgtgagaccac

SEQ ID NO: 1856294 - DNA, 25 bp, Homo sapien
gatgtcatgccaagaaaccactgca

SEQ ID NO: 1856295 - DNA, 25 bp, Homo sapien
tgatgtcatgccaagaaaccactgc

SEQ ID NO: 1856296 - DNA, 25 bp, Homo sapien
gtcatgccaagaaaccactgcaaaa

SEQ ID NO: 1856297 - DNA, 25 bp, Homo sapien
tttgatgtcatgccaagaaaccact

SEQ ID NO: 1856298 - DNA, 25 bp, Homo sapien
ttgaacacactataggatgaaagct

SEQ ID NO: 1856299 - DNA, 25 bp, Homo sapien
tatgagcatcttgaacacactatag

SEQ ID NO: 1856300 - DNA, 25 bp, Homo sapien
tataggatgaaagctacaccatatc

SEQ ID NO: 1856301 - DNA, 25 bp, Homo sapien
ccatattcttatgggaaggtttcta

SEQ ID NO: 1856302 - DNA, 25 bp, Homo sapien
taatttgatgtatgggctattattc

SEQ ID NO: 1856303 - DNA, 25 bp, Homo sapien
ttaatttgatgtatgggctattatt

SEQ ID NO: 1856304 - DNA, 25 bp, Homo sapien
ttgtaatggacataaactttgtctc

SEQ ID NO: 1856305 - DNA, 25 bp, Homo sapien
tctatcatgactggaatcaaacttc

SEQ ID NO: 1856306 - DNA, 25 bp, Homo sapien
caatcatcggcgtttcctcaccatt

SEQ ID NO: 1856307 - DNA, 25 bp, Homo sapien
gactaaagacaaatggttcatttct

SEQ ID NO: 1856308 - DNA, 25 bp, Homo sapien
ataaacctaggcctacagagggtca

SEQ ID NO: 1856309 - DNA, 25 bp, Homo sapien
ttagctttgactcttgtaatgacac

SEQ ID NO: 1856310 - DNA, 25 bp, Homo sapien
aatgacacttagaacacaaacactg

SEQ ID NO: 1856311 - DNA, 25 bp, Homo sapien
tgctgtctcctataataacaatgcc

SEQ ID NO: 1856312 - DNA, 25 bp, Homo sapien
ttttggaggtaatatcctctccctg

SEQ ID NO: 1856313 - DNA, 25 bp, Homo sapien
ttaaaagtagaagagagatgtagag

SEQ ID NO: 1856314 - DNA, 25 bp, Homo sapien
gagagcaaaggcttgagaaaagaac

SEQ ID NO: 1856315 - DNA, 25 bp, Homo sapien
gtcacaggtgagaagtttgatactt

SEQ ID NO: 1856316 - DNA, 25 bp, Homo sapien
ttataaaggcgaaacatgaaatgct

SEQ ID NO: 1856317 - DNA, 25 bp, Homo sapien
ccacaccgaggcgggagtattgctt

SEQ ID NO: 1856318 - DNA, 25 bp, Homo sapien
aatccccacaccgaggcgggagtat

SEQ ID NO: 1856319 - DNA, 25 bp, Homo sapien
tccccacaccgaggcgggagtattg

SEQ ID NO: 1856320 - DNA, 25 bp, Homo sapien
gcaggtcccccgataagaagggata

SEQ ID NO: 1856321 - DNA, 25 bp, Homo sapien
ggttccatccccaagatactatatc

SEQ ID NO: 1856322 - DNA, 25 bp, Homo sapien
caattgacaatgtcacaatgggcta

SEQ ID NO: 1856323 - DNA, 25 bp, Homo sapien
tacatgtgatacaaacagtgtggtt

SEQ ID NO: 1856324 - DNA, 25 bp, Homo sapien
tttgcagcaaacaaccacagttcct

SEQ ID NO: 1856325 - DNA, 25 bp, Homo sapien
ttatctctcataagctgtatccagc

SEQ ID NO: 1856326 - DNA, 25 bp, Homo sapien
tgtatccagctctgtaccaagacaa

SEQ ID NO: 1856327 - DNA, 25 bp, Homo sapien
ctggctaattttatgcattgcctct

SEQ ID NO: 1856328 - DNA, 25 bp, Homo sapien
gagaccccttagctcaaaggtacat

SEQ ID NO: 1856329 - DNA, 25 bp, Homo sapien
tacattaactagcaactggaggaag

SEQ ID NO: 1856330 - DNA, 25 bp, Homo sapien
ggtgattcactagggccaaagagtt

SEQ ID NO: 1856331 - DNA, 25 bp, Homo sapien
tatggacagtcaagaacaaaggacc

SEQ ID NO: 1856332 - DNA, 25 bp, Homo sapien
gatttctaggaacgagccaacaagg

SEQ ID NO: 1856333 - DNA, 25 bp, Homo sapien
gccaatcatgaaaggccatacatta

SEQ ID NO: 1856334 - DNA, 25 bp, Homo sapien
ctgattcatgtatcttgaagctctg

SEQ ID NO: 1856335 - DNA, 25 bp, Homo sapien
gaaaggccatacattatatgatccc

SEQ ID NO: 1856336 - DNA, 25 bp, Homo sapien
cttgaaggcagccaatcatgaaagg

SEQ ID NO: 1856337 - DNA, 25 bp, Homo sapien
gattgttactactgacacgtccaga

SEQ ID NO: 1856338 - DNA, 25 bp, Homo sapien
taggcatactttcaaccggcaaggg

SEQ ID NO: 1856339 - DNA, 25 bp, Homo sapien
gcttaagtgcaaagtggctccgggt

SEQ ID NO: 1856340 - DNA, 25 bp, Homo sapien
cagggcaaacggtacagaaagacgc

SEQ ID NO: 1856341 - DNA, 25 bp, Homo sapien
ggcgaatttcccaatatctactgaa

SEQ ID NO: 1856342 - DNA, 25 bp, Homo sapien
taacctgtagatattctcacagaag

SEQ ID NO: 1856343 - DNA, 25 bp, Homo sapien
tctcaagctactatgacaaggattc

SEQ ID NO: 1856344 - DNA, 25 bp, Homo sapien
tatgtgcaaatatcctttagcccag

SEQ ID NO: 1856345 - DNA, 25 bp, Homo sapien
ataagaagtaacctagttggctggg

SEQ ID NO: 1856346 - DNA, 25 bp, Homo sapien
ggaacacttactaggcgtcaagcat

SEQ ID NO: 1856347 - DNA, 25 bp, Homo sapien
caagcattgtgcctgatactgacat

SEQ ID NO: 1856348 - DNA, 25 bp, Homo sapien
taatggtgaacaagaaagacctagt

SEQ ID NO: 1856349 - DNA, 25 bp, Homo sapien
tcaaccaagcatatacattagtcat

SEQ ID NO: 1856350 - DNA, 25 bp, Homo sapien
taagaaactatcagaacttcatgat

SEQ ID NO: 1856351 - DNA, 25 bp, Homo sapien
gtaagaaaatgcagctcaaccaagc

SEQ ID NO: 1856352 - DNA, 25 bp, Homo sapien
tgttaaaatgcacaacaataaaaca

SEQ ID NO: 1856353 - DNA, 25 bp, Homo sapien
tcctggcctacaatgcacatactgt

SEQ ID NO: 1856354 - DNA, 25 bp, Homo sapien
cagtttcctgttcgtcagtggctac

SEQ ID NO: 1856355 - DNA, 25 bp, Homo sapien
gctacagctctagaggcaatacata

SEQ ID NO: 1856356 - DNA, 25 bp, Homo sapien
tacctgatggctaagacagcaacag

SEQ ID NO: 1856357 - DNA, 25 bp, Homo sapien
cccattctgctcattatttctcaag

SEQ ID NO: 1856358 - DNA, 25 bp, Homo sapien
tatcttcacatcactgcataacttg

SEQ ID NO: 1856359 - DNA, 25 bp, Homo sapien
ctaacaaaattggtctggcaaagct

SEQ ID NO: 1856360 - DNA, 25 bp, Homo sapien
gaggttagaagttcgccctggccaa

SEQ ID NO: 1856361 - DNA, 25 bp, Homo sapien
aactgacaaatctagccaaaatctt

SEQ ID NO: 1856362 - DNA, 25 bp, Homo sapien
ctgggtaagagagtgcaatcctgtc

SEQ ID NO: 1856363 - DNA, 25 bp, Homo sapien
tttctgaggccaaagtgagacgatc

SEQ ID NO: 1856364 - DNA, 25 bp, Homo sapien
gaaaagacagcctataaagcgccta

SEQ ID NO: 1856365 - DNA, 25 bp, Homo sapien
aatcatgggaaagaatacacaacat

SEQ ID NO: 1856366 - DNA, 25 bp, Homo sapien
caacatgaaaagcttaccatttgca

SEQ ID NO: 1856367 - DNA, 25 bp, Homo sapien
gacatctttatgcatcccaggccac

SEQ ID NO: 1856368 - DNA, 25 bp, Homo sapien
gcttatggcgactaaaaagtatttg

SEQ ID NO: 1856369 - DNA, 25 bp, Homo sapien
tagggctttataccttctatcacat

SEQ ID NO: 1856370 - DNA, 25 bp, Homo sapien
gaaggagctttgagagtgccactgc

SEQ ID NO: 1856371 - DNA, 25 bp, Homo sapien
tatggccagacgctaagcttagggc

SEQ ID NO: 1856372 - DNA, 25 bp, Homo sapien
cataccattatgtgttgtgtgtggc

SEQ ID NO: 1856373 - DNA, 25 bp, Homo sapien
gggcagccctgctcattcggtagct

SEQ ID NO: 1856374 - DNA, 25 bp, Homo sapien
gctgtggatcttgagcatatgcctc

SEQ ID NO: 1856375 - DNA, 25 bp, Homo sapien
gagttgacaagtaacccaagagtct

SEQ ID NO: 1856376 - DNA, 25 bp, Homo sapien
gaggaaacactagcagaaacccact

SEQ ID NO: 1856377 - DNA, 25 bp, Homo sapien
tttctgacaaaccaattccagaagc

SEQ ID NO: 1856378 - DNA, 25 bp, Homo sapien
ttgaaaaatcatgggcactgccagc

SEQ ID NO: 1856379 - DNA, 25 bp, Homo sapien
tggcaatcttccatatcaccttggt

SEQ ID NO: 1856380 - DNA, 25 bp, Homo sapien
aaaaatgatgtgtctgcctaaaggc

SEQ ID NO: 1856381 - DNA, 25 bp, Homo sapien
ctattcaccaggttatctgagctga

SEQ ID NO: 1856382 - DNA, 25 bp, Homo sapien
tgtccaaagtcaatctctgagctaa

SEQ ID NO: 1856383 - DNA, 25 bp, Homo sapien
aattggtacaccaatactaccactg

SEQ ID NO: 1856384 - DNA, 25 bp, Homo sapien
caatctctgagctaaaacacaatgt

SEQ ID NO: 1856385 - DNA, 25 bp, Homo sapien
gactgtttgtacttaggaggtcaag

SEQ ID NO: 1856386 - DNA, 25 bp, Homo sapien
catagtgaaatggaccataaaaggg

SEQ ID NO: 1856387 - DNA, 25 bp, Homo sapien
gttttcttcattctcgactgatcaa

SEQ ID NO: 1856388 - DNA, 25 bp, Homo sapien
tgttgattgatatcagacatctgtc

SEQ ID NO: 1856389 - DNA, 25 bp, Homo sapien
catggaagaagttagtccttttatc

SEQ ID NO: 1856390 - DNA, 25 bp, Homo sapien
gacatcatgcctggtatatatatat

SEQ ID NO: 1856391 - DNA, 25 bp, Homo sapien
aagtgttgaggtgttgacattacag

SEQ ID NO: 1856392 - DNA, 25 bp, Homo sapien
ccaaagtgttgaggtgttgacatta

SEQ ID NO: 1856393 - DNA, 25 bp, Homo sapien
gtgagacatcatgcctggtatatat

SEQ ID NO: 1856394 - DNA, 25 bp, Homo sapien
ttccaagaggctataagtcggcctg

SEQ ID NO: 1856395 - DNA, 25 bp, Homo sapien
tataagtcggcctggcactgtggct

SEQ ID NO: 1856396 - DNA, 25 bp, Homo sapien
aaacagccttgattaagccttgatt

SEQ ID NO: 1856397 - DNA, 25 bp, Homo sapien
caaacaactacaatcacaattttca

SEQ ID NO: 1856398 - DNA, 25 bp, Homo sapien
tcagaaacatacaaagacctcatag

SEQ ID NO: 1856399 - DNA, 25 bp, Homo sapien
agttgatggttcaatggcgaactct

SEQ ID NO: 1856400 - DNA, 25 bp, Homo sapien
ggcgaactcttatcagctattagct

SEQ ID NO: 1856401 - DNA, 25 bp, Homo sapien
tagctaactgtaattacctaggcaa

SEQ ID NO: 1856402 - DNA, 25 bp, Homo sapien
tagagactacgatggtcctgccggt

SEQ ID NO: 1856403 - DNA, 25 bp, Homo sapien
cagaatttactgaacggcggccaaa

SEQ ID NO: 1856404 - DNA, 25 bp, Homo sapien
ggcggccaaacgctgaacacactgt

SEQ ID NO: 1856405 - DNA, 25 bp, Homo sapien
tgtcctgaaccacactgaagggtat

SEQ ID NO: 1856406 - DNA, 25 bp, Homo sapien
caataaggcggaagacgttttcacg

SEQ ID NO: 1856407 - DNA, 25 bp, Homo sapien
cagaacagaagagcataaggagccc

SEQ ID NO: 1856408 - DNA, 25 bp, Homo sapien
tactgtgaccggtgcacctttttgg

SEQ ID NO: 1856409 - DNA, 25 bp, Homo sapien
ggcacagcgttcagccgcttcggta

SEQ ID NO: 1856410 - DNA, 25 bp, Homo sapien
ctgcgcggactcctccacaagcggc

SEQ ID NO: 1856411 - DNA, 25 bp, Homo sapien
tgaaggcggggaccgcccgtccaca

SEQ ID NO: 1856412 - DNA, 25 bp, Homo sapien
ggcgatgcggttccccaacgcttgt

SEQ ID NO: 1856413 - DNA, 25 bp, Homo sapien
ccacaagcggccgacagcggcgatg

SEQ ID NO: 1856414 - DNA, 25 bp, Homo sapien
gggctcgccgactccgtcactctcc

SEQ ID NO: 1856415 - DNA, 25 bp, Homo sapien
gtgctccgctaacccttcagcccgc

SEQ ID NO: 1856416 - DNA, 25 bp, Homo sapien
acaccgccgcccgagactggcagcg

SEQ ID NO: 1856417 - DNA, 25 bp, Homo sapien
tccgccttgcccgtgctccgctaac

SEQ ID NO: 1856418 - DNA, 25 bp, Homo sapien
agagtgcttgcacgggaaaactccc

SEQ ID NO: 1856419 - DNA, 25 bp, Homo sapien
tattggcaggcgaagagtgcttgca

SEQ ID NO: 1856420 - DNA, 25 bp, Homo sapien
cgaagagtgcttgcacgggaaaact

SEQ ID NO: 1856421 - DNA, 25 bp, Homo sapien
cttacgtggatattggcaggcgaag

SEQ ID NO: 1856422 - DNA, 25 bp, Homo sapien
ggtcaaaatgtggaacagttggaac

SEQ ID NO: 1856423 - DNA, 25 bp, Homo sapien
caatgataccaagagctggtcaaaa

SEQ ID NO: 1856424 - DNA, 25 bp, Homo sapien
caagagctggtcaaaatgtggaaca

SEQ ID NO: 1856425 - DNA, 25 bp, Homo sapien
aaatgtggaacagttggaactgtca

SEQ ID NO: 1856426 - DNA, 25 bp, Homo sapien
gacacccacccatggttaagcaggt

SEQ ID NO: 1856427 - DNA, 25 bp, Homo sapien
gacttgaaaaatcttaggcggccag

SEQ ID NO: 1856428 - DNA, 25 bp, Homo sapien
ccacagggcttgcttagtaaggagc

SEQ ID NO: 1856429 - DNA, 25 bp, Homo sapien
gattggaacaattctgtccccagcc

SEQ ID NO: 1856430 - DNA, 25 bp, Homo sapien
atgaattatttagccagcgcctgtg

SEQ ID NO: 1856431 - DNA, 25 bp, Homo sapien
tcctgataactggagcatgcagctg

SEQ ID NO: 1856432 - DNA, 25 bp, Homo sapien
gagcaggctagggatctgagaaccc

SEQ ID NO: 1856433 - DNA, 25 bp, Homo sapien
cagagcctggctataaccaagcagt

SEQ ID NO: 1856434 - DNA, 25 bp, Homo sapien
cgcagtccggcagcgaggaatttcc

SEQ ID NO: 1856435 - DNA, 25 bp, Homo sapien
ggattgtcgcttcgtagtccctgtc

SEQ ID NO: 1856436 - DNA, 25 bp, Homo sapien
ggagagtctagccttctgcagcgtg

SEQ ID NO: 1856437 - DNA, 25 bp, Homo sapien
caaagagaatgtgaggtcctcaagg

SEQ ID NO: 1856438 - DNA, 25 bp, Homo sapien
tgtgctgaccctgatgtggatgatc

SEQ ID NO: 1856439 - DNA, 25 bp, Homo sapien
cattaatttcacaggtaccccattc

SEQ ID NO: 1856440 - DNA, 25 bp, Homo sapien
aggtaccccattccgggcactgtgc

SEQ ID NO: 1856441 - DNA, 25 bp, Homo sapien
gctgaccctgatgtggatgatctca

SEQ ID NO: 1856442 - DNA, 25 bp, Homo sapien
cacgctgtgccgtgagaaaggtaca

SEQ ID NO: 1856443 - DNA, 25 bp, Homo sapien
cactcctggcatgagaaatggcaca

SEQ ID NO: 1856444 - DNA, 25 bp, Homo sapien
tttattgaacatgaactccggtgcc

SEQ ID NO: 1856445 - DNA, 25 bp, Homo sapien
caaggaagctttatgagctggagca

SEQ ID NO: 1856446 - DNA, 25 bp, Homo sapien
ggcgtcgtgccagggatttcccaaa

SEQ ID NO: 1856447 - DNA, 25 bp, Homo sapien
ctactcccggcgtcgtgccagggat

SEQ ID NO: 1856448 - DNA, 25 bp, Homo sapien
gcttggtttgccagccccgggaatc

SEQ ID NO: 1856449 - DNA, 25 bp, Homo sapien
tgccagggatttcccaaaccgtcca

SEQ ID NO: 1856450 - DNA, 25 bp, Homo sapien
ttgcagcctgcggtcagcgacgacc

SEQ ID NO: 1856451 - DNA, 25 bp, Homo sapien
gcgacgacccggcactcggcagctc

SEQ ID NO: 1856452 - DNA, 25 bp, Homo sapien
aaccgctcttgcagcctgcggtcag

SEQ ID NO: 1856453 - DNA, 25 bp, Homo sapien
ctcttgcagcctgcggtcagcgacg

SEQ ID NO: 1856454 - DNA, 25 bp, Homo sapien
cttggcatgggggatgtaactctta

SEQ ID NO: 1856455 - DNA, 25 bp, Homo sapien
actcttagttgcaaacagaggtagg

SEQ ID NO: 1856456 - DNA, 25 bp, Homo sapien
ctttgggacgcctcggaaggtcttg

SEQ ID NO: 1856457 - DNA, 25 bp, Homo sapien
aaacagaggtaggagtttgttctgg

SEQ ID NO: 1856458 - DNA, 25 bp, Homo sapien
gatgcttgaaatctgtccgtgatcc

SEQ ID NO: 1856459 - DNA, 25 bp, Homo sapien
tgaaatctgtccgtgatcccaggtc

SEQ ID NO: 1856460 - DNA, 25 bp, Homo sapien
agtcgagaggcaccttcactgccat

SEQ ID NO: 1856461 - DNA, 25 bp, Homo sapien
aatgcacactgcatctcccagtcga

SEQ ID NO: 1856462 - DNA, 25 bp, Homo sapien
ggacttccctatctccaagtccagt

SEQ ID NO: 1856463 - DNA, 25 bp, Homo sapien
gacagcagcccactgctcttctgga

SEQ ID NO: 1856464 - DNA, 25 bp, Homo sapien
tgtgacagggacactctcagacagc

SEQ ID NO: 1856465 - DNA, 25 bp, Homo sapien
ctgtgacagggacactctcagacag

SEQ ID NO: 1856466 - DNA, 25 bp, Homo sapien
ttgtttgaagtgccactatttttca

SEQ ID NO: 1856467 - DNA, 25 bp, Homo sapien
tttgtttgaagtgccactatttttc

SEQ ID NO: 1856468 - DNA, 25 bp, Homo sapien
ttgaagtgccactatttttcatttc

SEQ ID NO: 1856469 - DNA, 25 bp, Homo sapien
cagtgacgtcgcgaggggcgtggcc

SEQ ID NO: 1856470 - DNA, 25 bp, Homo sapien
catcagtgacgtcgcgaggggcgtg

SEQ ID NO: 1856471 - DNA, 25 bp, Homo sapien
tgacatcagtgacgtcgcgaggggc

SEQ ID NO: 1856472 - DNA, 25 bp, Homo sapien
acatcagtgacgtcgcgaggggcgt

SEQ ID NO: 1856473 - DNA, 25 bp, Homo sapien
cctgtgcaccgaaagtacacacatt

SEQ ID NO: 1856474 - DNA, 25 bp, Homo sapien
tctcggagagtgtgggatccacgtt

SEQ ID NO: 1856475 - DNA, 25 bp, Homo sapien
tcgcacgtgttgagcgtcccctgtg

SEQ ID NO: 1856476 - DNA, 25 bp, Homo sapien
tcctgggcaggagtaagcgctagct

SEQ ID NO: 1856477 - DNA, 25 bp, Homo sapien
taaaaaagacgaccagcgtgagagg

SEQ ID NO: 1856478 - DNA, 25 bp, Homo sapien
gaaatcgtgaaatccagcctactga

SEQ ID NO: 1856479 - DNA, 25 bp, Homo sapien
ctgtcggactgcaaagggcttttca

SEQ ID NO: 1856480 - DNA, 25 bp, Homo sapien
ggatgtgaatgcaagcctgtcggac

SEQ ID NO: 1856481 - DNA, 25 bp, Homo sapien
aatgtacttaacacgatgagaacat

SEQ ID NO: 1856482 - DNA, 25 bp, Homo sapien
atgctggcatagatggcaaagaggt

SEQ ID NO: 1856483 - DNA, 25 bp, Homo sapien
gagaacatcggccttgaaggtaaaa

SEQ ID NO: 1856484 - DNA, 25 bp, Homo sapien
taacacgatgagaacatcggccttg

SEQ ID NO: 1856485 - DNA, 25 bp, Homo sapien
tgggtaaggcaggtagtaactcaca

SEQ ID NO: 1856486 - DNA, 25 bp, Homo sapien
ctgggtaaggcaggtagtaactcac

SEQ ID NO: 1856487 - DNA, 25 bp, Homo sapien
ggtaaggcaggtagtaactcacagc

SEQ ID NO: 1856488 - DNA, 25 bp, Homo sapien
gtaaggcaggtagtaactcacagct

SEQ ID NO: 1856489 - DNA, 25 bp, Homo sapien
ttgcagaatcggctccatgggatgg

SEQ ID NO: 1856490 - DNA, 25 bp, Homo sapien
gaggggccagtaactctgggtccca

SEQ ID NO: 1856491 - DNA, 25 bp, Homo sapien
cttaggaagtgagggttgcagaatc

SEQ ID NO: 1856492 - DNA, 25 bp, Homo sapien
gcagagcaaggaccttgtcttgagg

SEQ ID NO: 1856493 - DNA, 25 bp, Homo sapien
cccctcaccacagggagttcatgta

SEQ ID NO: 1856494 - DNA, 25 bp, Homo sapien
gttcccatcaggcagccgttttctg

SEQ ID NO: 1856495 - DNA, 25 bp, Homo sapien
ttttctgctcggagttcagtggaga

SEQ ID NO: 1856496 - DNA, 25 bp, Homo sapien
ggagttcatgtagtcacccaccttg

SEQ ID NO: 1856497 - DNA, 25 bp, Homo sapien
tctgactccagaggacctcacaagc

SEQ ID NO: 1856498 - DNA, 25 bp, Homo sapien
cctagtggtggggatcaagacctcc

SEQ ID NO: 1856499 - DNA, 25 bp, Homo sapien
gtggggatcaagacctccacaggtg

SEQ ID NO: 1856500 - DNA, 25 bp, Homo sapien
caagccgcctcatatccctggggag

SEQ ID NO: 1856501 - DNA, 25 bp, Homo sapien
cccatctgttctcgagcactcctgg

SEQ ID NO: 1856502 - DNA, 25 bp, Homo sapien
gccccatctgttctcgagcactcct

SEQ ID NO: 1856503 - DNA, 25 bp, Homo sapien
catctgttctcgagcactcctggct

SEQ ID NO: 1856504 - DNA, 25 bp, Homo sapien
atctgttctcgagcactcctggctg

SEQ ID NO: 1856505 - DNA, 25 bp, Homo sapien
tatccaaaatggagctcaccccatt

SEQ ID NO: 1856506 - DNA, 25 bp, Homo sapien
cagtgtctttatgctgagggcctga

SEQ ID NO: 1856507 - DNA, 25 bp, Homo sapien
ggcagctgctactaggcatatccac

SEQ ID NO: 1856508 - DNA, 25 bp, Homo sapien
tgatctcaatttccatctagctgtg

SEQ ID NO: 1856509 - DNA, 25 bp, Homo sapien
tttgcaggaggcctttaattgtgaa

SEQ ID NO: 1856510 - DNA, 25 bp, Homo sapien
gtttgcaggaggcctttaattgtga

SEQ ID NO: 1856511 - DNA, 25 bp, Homo sapien
ggtttgcaggaggcctttaattgtg

SEQ ID NO: 1856512 - DNA, 25 bp, Homo sapien
ttgcaggaggcctttaattgtgaag

SEQ ID NO: 1856513 - DNA, 25 bp, Homo sapien
tggcctacagcattctgggctaggt

SEQ ID NO: 1856514 - DNA, 25 bp, Homo sapien
aacagatatgctggtcaaggaggtg

SEQ ID NO: 1856515 - DNA, 25 bp, Homo sapien
ccctgcgcctagtggcctacagcat

SEQ ID NO: 1856516 - DNA, 25 bp, Homo sapien
agcccgggagatgcgctggagcagg

SEQ ID NO: 1856517 - DNA, 25 bp, Homo sapien
gagcccacgatggtcttgtctccct

SEQ ID NO: 1856518 - DNA, 25 bp, Homo sapien
cgtccagcgtcatggcagatgccaa

SEQ ID NO: 1856519 - DNA, 25 bp, Homo sapien
cacttgtagtaaatcccatagagcg

SEQ ID NO: 1856520 - DNA, 25 bp, Homo sapien
cagatgccaaagttggtgttggtga

SEQ ID NO: 1856521 - DNA, 25 bp, Homo sapien
ttctcgctggccatggatgtgcagc

SEQ ID NO: 1856522 - DNA, 25 bp, Homo sapien
actcgctgttctcgctggccatgga

SEQ ID NO: 1856523 - DNA, 25 bp, Homo sapien
caggcccagcgcacttgaatgctgg

SEQ ID NO: 1856524 - DNA, 25 bp, Homo sapien
tgctggcagcaattgctcttacact

SEQ ID NO: 1856525 - DNA, 25 bp, Homo sapien
tttggaatgtgcacacaaggcccct

SEQ ID NO: 1856526 - DNA, 25 bp, Homo sapien
ccatggccccaagttaagagagttc

SEQ ID NO: 1856527 - DNA, 25 bp, Homo sapien
tgatctataatctccaagggtcctg

SEQ ID NO: 1856528 - DNA, 25 bp, Homo sapien
tcagaacctttcaaccgcatggacg

SEQ ID NO: 1856529 - DNA, 25 bp, Homo sapien
ttacaaagctccctcgtagggccag

SEQ ID NO: 1856530 - DNA, 25 bp, Homo sapien
ggcatctccataagtcagaagctgg

SEQ ID NO: 1856531 - DNA, 25 bp, Homo sapien
cgcaaagcattttctcaggatggaa

SEQ ID NO: 1856532 - DNA, 25 bp, Homo sapien
gaatgagtaaacatctccgaggcat

SEQ ID NO: 1856533 - DNA, 25 bp, Homo sapien
atcatttgaacccgggaagcagaga

SEQ ID NO: 1856534 - DNA, 25 bp, Homo sapien
cgagattgtgccactacactccagc

SEQ ID NO: 1856535 - DNA, 25 bp, Homo sapien
gcagtgagccgagattgtgccacta

SEQ ID NO: 1856536 - DNA, 25 bp, Homo sapien
catttgaacccgggaagcagagatt

SEQ ID NO: 1856537 - DNA, 25 bp, Homo sapien
tggggactcaggaggcgcctcccct

SEQ ID NO: 1856538 - DNA, 25 bp, Homo sapien
actcaggaggcgcctcccctgaaga

SEQ ID NO: 1856539 - DNA, 25 bp, Homo sapien
aaaaaggtccctcatagccaggttg

SEQ ID NO: 1856540 - DNA, 25 bp, Homo sapien
tcaaggtccaagcttaggaagtctt

SEQ ID NO: 1856541 - DNA, 25 bp, Homo sapien
gacaagcaggaggatcaggatcttc

SEQ ID NO: 1856542 - DNA, 25 bp, Homo sapien
gttgataatgatcccccgggggcca

SEQ ID NO: 1856543 - DNA, 25 bp, Homo sapien
ggccaggagctgcataggccacaga

SEQ ID NO: 1856544 - DNA, 25 bp, Homo sapien
acagagagggcgacaagcaggagga

SEQ ID NO: 1856545 - DNA, 25 bp, Homo sapien
aaatgaacagagatttttggaaaca

SEQ ID NO: 1856546 - DNA, 25 bp, Homo sapien
gggcagagcaatttggacaacaaat

SEQ ID NO: 1856547 - DNA, 25 bp, Homo sapien
ggcagagcaatttggacaacaaatg

SEQ ID NO: 1856548 - DNA, 25 bp, Homo sapien
taaatggattgcataacggcaccac

SEQ ID NO: 1856549 - DNA, 25 bp, Homo sapien
tctccacagggtcaagtaagcaaac

SEQ ID NO: 1856550 - DNA, 25 bp, Homo sapien
tatattaaagactcgagcctctgag

SEQ ID NO: 1856551 - DNA, 25 bp, Homo sapien
ggtggttacccaatagcctcactgg

SEQ ID NO: 1856552 - DNA, 25 bp, Homo sapien
cagctccaacatgggcagtaagaaa

SEQ ID NO: 1856553 - DNA, 25 bp, Homo sapien
gacactcggcggcagtggctctctt

SEQ ID NO: 1856554 - DNA, 25 bp, Homo sapien
cagcttcgtgatatgtttcaggtca

SEQ ID NO: 1856555 - DNA, 25 bp, Homo sapien
cagtaagaaatctgtgaagccagct

SEQ ID NO: 1856556 - DNA, 25 bp, Homo sapien
ctgcagtgaagacagtacagaaaaa

SEQ ID NO: 1856557 - DNA, 25 bp, Homo sapien
gcagtgaagacagtacagaaaaagc

SEQ ID NO: 1856558 - DNA, 25 bp, Homo sapien
agtgaagacagtacagaaaaagcca

SEQ ID NO: 1856559 - DNA, 25 bp, Homo sapien
cagtgaagacagtacagaaaaagcc

SEQ ID NO: 1856560 - DNA, 25 bp, Homo sapien
catatgcctcagaaagaagtgcctc

SEQ ID NO: 1856561 - DNA, 25 bp, Homo sapien
tgaaatgcctatgtcttcaacatgg

SEQ ID NO: 1856562 - DNA, 25 bp, Homo sapien
tcaaactgggtgtgacaatcaagaa

SEQ ID NO: 1856563 - DNA, 25 bp, Homo sapien
caaggtactcttgtggaaacccaca

SEQ ID NO: 1856564 - DNA, 25 bp, Homo sapien
agggtaatgtttctgaggatggctc

SEQ ID NO: 1856565 - DNA, 25 bp, Homo sapien
agaaagggtaatgtttctgaggatg

SEQ ID NO: 1856566 - DNA, 25 bp, Homo sapien
aaagggtaatgtttctgaggatggc

SEQ ID NO: 1856567 - DNA, 25 bp, Homo sapien
taagaaagggtaatgtttctgagga

SEQ ID NO: 1856568 - DNA, 25 bp, Homo sapien
tgtaagaagcttaaattacctgccc

SEQ ID NO: 1856569 - DNA, 25 bp, Homo sapien
ttaggtgtcactgggatgcaaagat

SEQ ID NO: 1856570 - DNA, 25 bp, Homo sapien
ccctttggtagaggcagttcttaga

SEQ ID NO: 1856571 - DNA, 25 bp, Homo sapien
gatgagtgagatgtagtccctgccc

SEQ ID NO: 1856572 - DNA, 25 bp, Homo sapien
ttctcaaactcctgatattgtgatt

SEQ ID NO: 1856573 - DNA, 25 bp, Homo sapien
aaactcctgatattgtgattcgccc

SEQ ID NO: 1856574 - DNA, 25 bp, Homo sapien
caggcgcccgccactcttcccagct

SEQ ID NO: 1856575 - DNA, 25 bp, Homo sapien
attcgcccaccttggtctcccaaag

SEQ ID NO: 1856576 - DNA, 25 bp, Homo sapien
tgcctccttaatgtctgggaacaca

SEQ ID NO: 1856577 - DNA, 25 bp, Homo sapien
cttctgcctccttaatgtctgggaa

SEQ ID NO: 1856578 - DNA, 25 bp, Homo sapien
ttctgcctccttaatgtctgggaac

SEQ ID NO: 1856579 - DNA, 25 bp, Homo sapien
tctgcctccttaatgtctgggaaca

SEQ ID NO: 1856580 - DNA, 25 bp, Homo sapien
cctgccacaatgagcttgcgaggca

SEQ ID NO: 1856581 - DNA, 25 bp, Homo sapien
gccacaatgagcttgcgaggcacct

SEQ ID NO: 1856582 - DNA, 25 bp, Homo sapien
cacaatgagcttgcgaggcaccttc

SEQ ID NO: 1856583 - DNA, 25 bp, Homo sapien
atgagcttgcgaggcaccttcccca

SEQ ID NO: 1856584 - DNA, 25 bp, Homo sapien
tatttcccactgagggaaaagcgtc

SEQ ID NO: 1856585 - DNA, 25 bp, Homo sapien
cccactgagggaaaagcgtcttgga

SEQ ID NO: 1856586 - DNA, 25 bp, Homo sapien
cagctctataatgtgcacaatgtgg

SEQ ID NO: 1856587 - DNA, 25 bp, Homo sapien
tctgcctatcagctctataatgtgc

SEQ ID NO: 1856588 - DNA, 25 bp, Homo sapien
caaaaagcatgaatggcctaacttg

SEQ ID NO: 1856589 - DNA, 25 bp, Homo sapien
ggcattctagaactattatttgtga

SEQ ID NO: 1856590 - DNA, 25 bp, Homo sapien
tgaggtcttggcatactgccaagct

SEQ ID NO: 1856591 - DNA, 25 bp, Homo sapien
cacacctggctgacttaaaacattt

SEQ ID NO: 1856592 - DNA, 25 bp, Homo sapien
cctgaatgaggttcaaacaaatagt

SEQ ID NO: 1856593 - DNA, 25 bp, Homo sapien
ccctgaatgaggttcaaacaaatag

SEQ ID NO: 1856594 - DNA, 25 bp, Homo sapien
tgaatgaggttcaaacaaatagtca

SEQ ID NO: 1856595 - DNA, 25 bp, Homo sapien
aatgaggttcaaacaaatagtcacc

SEQ ID NO: 1856596 - DNA, 25 bp, Homo sapien
cctcaagaactgtagagtccaggac

SEQ ID NO: 1856597 - DNA, 25 bp, Homo sapien
taaaataagcgctagtcataggtca

SEQ ID NO: 1856598 - DNA, 25 bp, Homo sapien
tgaccttattgatagggaagcacag

SEQ ID NO: 1856599 - DNA, 25 bp, Homo sapien
gtactaagcagtccaaacaacctca

SEQ ID NO: 1856600 - DNA, 25 bp, Homo sapien
tatggttgtgtgtggtcagaatgcc

SEQ ID NO: 1856601 - DNA, 25 bp, Homo sapien
catcatctgtatcaatgggctggcc

SEQ ID NO: 1856602 - DNA, 25 bp, Homo sapien
cagaatgccaaggagtgattaccaa

SEQ ID NO: 1856603 - DNA, 25 bp, Homo sapien
gctcaatgtattaacttaagggccc

SEQ ID NO: 1856604 - DNA, 25 bp, Homo sapien
ttcaaatttcctgtcttcaacaatc

SEQ ID NO: 1856605 - DNA, 25 bp, Homo sapien
attcaaatttcctgtcttcaacaat

SEQ ID NO: 1856606 - DNA, 25 bp, Homo sapien
gattcaaatttcctgtcttcaacaa

SEQ ID NO: 1856607 - DNA, 25 bp, Homo sapien
caaggcaatcatgagcacaaagaag

SEQ ID NO: 1856608 - DNA, 25 bp, Homo sapien
aggcaatcatgagcacaaagaagaa

SEQ ID NO: 1856609 - DNA, 25 bp, Homo sapien
aattcacatggaatcacaaaacatc

SEQ ID NO: 1856610 - DNA, 25 bp, Homo sapien
tcacatggaatcacaaaacatccca

SEQ ID NO: 1856611 - DNA, 25 bp, Homo sapien
gagtctatacagatcagataaacag

SEQ ID NO: 1856612 - DNA, 25 bp, Homo sapien
aagggaagtcttgaatgctgttggt

SEQ ID NO: 1856613 - DNA, 25 bp, Homo sapien
tatcacaaagacgaaatatttagtg

SEQ ID NO: 1856614 - DNA, 25 bp, Homo sapien
caaccctcatgtaaaactatatgga

SEQ ID NO: 1856615 - DNA, 25 bp, Homo sapien
cgtcttagatatggagaagtaacat

SEQ ID NO: 1856616 - DNA, 25 bp, Homo sapien
tgctcgtcttagatatggagaagta

SEQ ID NO: 1856617 - DNA, 25 bp, Homo sapien
acataattaagtaaccagtcctggt

SEQ ID NO: 1856618 - DNA, 25 bp, Homo sapien
cataattaagtaaccagtcctggtg

SEQ ID NO: 1856619 - DNA, 25 bp, Homo sapien
taagaccactcaggccactatgtga

SEQ ID NO: 1856620 - DNA, 25 bp, Homo sapien
aagtatgagcttcacaagactaggg

SEQ ID NO: 1856621 - DNA, 25 bp, Homo sapien
gcacatccaaaggtccaaggtaagt

SEQ ID NO: 1856622 - DNA, 25 bp, Homo sapien
aacagctgatggactaggtgtagac

SEQ ID NO: 1856623 - DNA, 25 bp, Homo sapien
gaagttataaccacctgcagacatt

SEQ ID NO: 1856624 - DNA, 25 bp, Homo sapien
gaattaagttagtcagccctgggtg

SEQ ID NO: 1856625 - DNA, 25 bp, Homo sapien
gccttaagagttctagacagacaag

SEQ ID NO: 1856626 - DNA, 25 bp, Homo sapien
tcattcgggcagctcagattgggaa

SEQ ID NO: 1856627 - DNA, 25 bp, Homo sapien
tactgaaattagcaaacagggcaag

SEQ ID NO: 1856628 - DNA, 25 bp, Homo sapien
gaattcggacctctctagacataga

SEQ ID NO: 1856629 - DNA, 25 bp, Homo sapien
gccagacaggtttttgaattcggac

SEQ ID NO: 1856630 - DNA, 25 bp, Homo sapien
cagggcaagatatgtaccacttaac

SEQ ID NO: 1856631 - DNA, 25 bp, Homo sapien
ccagatccgattagaacttccaagg

SEQ ID NO: 1856632 - DNA, 25 bp, Homo sapien
cagcaggggtattatagccagatcc

SEQ ID NO: 1856633 - DNA, 25 bp, Homo sapien
catgcatgccgtgctccaaatgtca

SEQ ID NO: 1856634 - DNA, 25 bp, Homo sapien
caaggaacgatattgccttgtttga

SEQ ID NO: 1856635 - DNA, 25 bp, Homo sapien
ggtgtatactagttttctacctgaa

SEQ ID NO: 1856636 - DNA, 25 bp, Homo sapien
tgagctaccacaccaaggaatccaa

SEQ ID NO: 1856637 - DNA, 25 bp, Homo sapien
caataggattagagaattgtcttcc

SEQ ID NO: 1856638 - DNA, 25 bp, Homo sapien
tgggatgttgatgttctacctagag

SEQ ID NO: 1856639 - DNA, 25 bp, Homo sapien
gcatttccaaggtcagcaatcttca

SEQ ID NO: 1856640 - DNA, 25 bp, Homo sapien
agcatttccaaggtcagcaatcttc

SEQ ID NO: 1856641 - DNA, 25 bp, Homo sapien
catttccaaggtcagcaatcttcac

SEQ ID NO: 1856642 - DNA, 25 bp, Homo sapien
atttccaaggtcagcaatcttcacc

SEQ ID NO: 1856643 - DNA, 25 bp, Homo sapien
ttggctcaaggggattaacaagaaa

SEQ ID NO: 1856644 - DNA, 25 bp, Homo sapien
ttttggctcaaggggattaacaaga

SEQ ID NO: 1856645 - DNA, 25 bp, Homo sapien
tttggctcaaggggattaacaagaa

SEQ ID NO: 1856646 - DNA, 25 bp, Homo sapien
tggctcaaggggattaacaagaaaa

SEQ ID NO: 1856647 - DNA, 25 bp, Homo sapien
ctacagacaacaggcatcatcaata

SEQ ID NO: 1856648 - DNA, 25 bp, Homo sapien
cagacaacaggcatcatcaataaga

SEQ ID NO: 1856649 - DNA, 25 bp, Homo sapien
acagacaacaggcatcatcaataag

SEQ ID NO: 1856650 - DNA, 25 bp, Homo sapien
tacagacaacaggcatcatcaataa

SEQ ID NO: 1856651 - DNA, 25 bp, Homo sapien
ctttgttgtccagtggtccgttatg

SEQ ID NO: 1856652 - DNA, 25 bp, Homo sapien
ccagtggtccgttatgttcttgctc

SEQ ID NO: 1856653 - DNA, 25 bp, Homo sapien
aatgtgttgttcactgaatgactga

SEQ ID NO: 1856654 - DNA, 25 bp, Homo sapien
catcttcacagggtatctctgcccg

SEQ ID NO: 1856655 - DNA, 25 bp, Homo sapien
ctacagttgaggaagactggcacac

SEQ ID NO: 1856656 - DNA, 25 bp, Homo sapien
ttccataagcgtttgatcctggcca

SEQ ID NO: 1856657 - DNA, 25 bp, Homo sapien
ccattttgggagcttaggaaactag

SEQ ID NO: 1856658 - DNA, 25 bp, Homo sapien
cagatgttataggtgtacaagagtc

SEQ ID NO: 1856659 - DNA, 25 bp, Homo sapien
caccctctgtatcacgttccataag

SEQ ID NO: 1856660 - DNA, 25 bp, Homo sapien
tcctgcattcgcttctctagtaatt

SEQ ID NO: 1856661 - DNA, 25 bp, Homo sapien
ttcctgcattcgcttctctagtaat

SEQ ID NO: 1856662 - DNA, 25 bp, Homo sapien
cttcttattctttgacattttgtca

SEQ ID NO: 1856663 - DNA, 25 bp, Homo sapien
cttcttcttattctttgacattttg

SEQ ID NO: 1856664 - DNA, 25 bp, Homo sapien
tcttattctttgacattttgtcagc

SEQ ID NO: 1856665 - DNA, 25 bp, Homo sapien
tcttcttattctttgacattttgtc

SEQ ID NO: 1856666 - DNA, 25 bp, Homo sapien
tggtttaggctggggagcagtactg

SEQ ID NO: 1856667 - DNA, 25 bp, Homo sapien
ggtttaggctggggagcagtactga

SEQ ID NO: 1856668 - DNA, 25 bp, Homo sapien
taatgatagcgaagtccctaaaaga

SEQ ID NO: 1856669 - DNA, 25 bp, Homo sapien
gattgagtggtgtttaattccctgg

SEQ ID NO: 1856670 - DNA, 25 bp, Homo sapien
taacttctaatgatagcgaagtccc

SEQ ID NO: 1856671 - DNA, 25 bp, Homo sapien
gttgaaatggattgagtggtgttta

SEQ ID NO: 1856672 - DNA, 25 bp, Homo sapien
cagatcgctgccattctgttgcttc

SEQ ID NO: 1856673 - DNA, 25 bp, Homo sapien
tgcagccagcctccgaatgtactgc

SEQ ID NO: 1856674 - DNA, 25 bp, Homo sapien
ctgacaataagatgttctctggttt

SEQ ID NO: 1856675 - DNA, 25 bp, Homo sapien
tcagtgtggatgatacggcacttgg

SEQ ID NO: 1856676 - DNA, 25 bp, Homo sapien
gagtggcagacttgcaaacacaaaa

SEQ ID NO: 1856677 - DNA, 25 bp, Homo sapien
tggcagacttgcaaacacaaaatac

SEQ ID NO: 1856678 - DNA, 25 bp, Homo sapien
atagagtggcagacttgcaaacaca

SEQ ID NO: 1856679 - DNA, 25 bp, Homo sapien
tagagtggcagacttgcaaacacaa

SEQ ID NO: 1856680 - DNA, 25 bp, Homo sapien
agcagatgatgccccaaaacttcaa

SEQ ID NO: 1856681 - DNA, 25 bp, Homo sapien
agcccctgataattggatttgatga

SEQ ID NO: 1856682 - DNA, 25 bp, Homo sapien
gatgatccacttgagcagatgatgc

SEQ ID NO: 1856683 - DNA, 25 bp, Homo sapien
cagtggaagcccctgataattggat

SEQ ID NO: 1856684 - DNA, 25 bp, Homo sapien
tctgcctctcggcactacaggtgtg

SEQ ID NO: 1856685 - DNA, 25 bp, Homo sapien
ttcacaccatgtgccttctaatgca

SEQ ID NO: 1856686 - DNA, 25 bp, Homo sapien
gcccggccagaccactataaaggat

SEQ ID NO: 1856687 - DNA, 25 bp, Homo sapien
caactatgtgaaagactgtcgggaa

SEQ ID NO: 1856688 - DNA, 25 bp, Homo sapien
gagtgcagtgggctcaatctcggct

SEQ ID NO: 1856689 - DNA, 25 bp, Homo sapien
agttcaagtgattctccagcctcag

SEQ ID NO: 1856690 - DNA, 25 bp, Homo sapien
agagtctggctctgtcccccacgct

SEQ ID NO: 1856691 - DNA, 25 bp, Homo sapien
cactgcaacctctgcctccccagtt

SEQ ID NO: 1856692 - DNA, 25 bp, Homo sapien
ttaaagtcatctagtagttgaacaa

SEQ ID NO: 1856693 - DNA, 25 bp, Homo sapien
ggatcattagggtctgaattgcgaa

SEQ ID NO: 1856694 - DNA, 25 bp, Homo sapien
tttaaagtcatctagtagttgaaca

SEQ ID NO: 1856695 - DNA, 25 bp, Homo sapien
gatcattagggtctgaattgcgaac

SEQ ID NO: 1856696 - DNA, 25 bp, Homo sapien
ttatagagaaaattatccatgctaa

SEQ ID NO: 1856697 - DNA, 25 bp, Homo sapien
ttccctactacatgcatggtatgtg

SEQ ID NO: 1856698 - DNA, 25 bp, Homo sapien
catggtatgtgtaaatattgttgtc

SEQ ID NO: 1856699 - DNA, 25 bp, Homo sapien
agaaaattatccatgctaaagagcc

SEQ ID NO: 1856700 - DNA, 25 bp, Homo sapien
gcaaccggatttcatctagtgctgt

SEQ ID NO: 1856701 - DNA, 25 bp, Homo sapien
agcaaccggatttcatctagtgctg

SEQ ID NO: 1856702 - DNA, 25 bp, Homo sapien
tgtttcagtgtaatgttcagcactt

SEQ ID NO: 1856703 - DNA, 25 bp, Homo sapien
gtgctgtttcagtgtaatgttcagc

SEQ ID NO: 1856704 - DNA, 25 bp, Homo sapien
gtatctcccattgaatagatctcca

SEQ ID NO: 1856705 - DNA, 25 bp, Homo sapien
tgttgaaaagtgtccccagcctaac

SEQ ID NO: 1856706 - DNA, 25 bp, Homo sapien
cagcctaactttcggatcacatggt

SEQ ID NO: 1856707 - DNA, 25 bp, Homo sapien
tatcccatgataaccatactgttga

SEQ ID NO: 1856708 - DNA, 25 bp, Homo sapien
acaataatcattaggatcttcttgc

SEQ ID NO: 1856709 - DNA, 25 bp, Homo sapien
tacaataatcattaggatcttcttg

SEQ ID NO: 1856710 - DNA, 25 bp, Homo sapien
tcttcctgctctggtagatcactct

SEQ ID NO: 1856711 - DNA, 25 bp, Homo sapien
cctgctctggtagatcactctcaga

SEQ ID NO: 1856712 - DNA, 25 bp, Homo sapien
ctaagaaatgatacaaaaatgccca

SEQ ID NO: 1856713 - DNA, 25 bp, Homo sapien
taagaaatgatacaaaaatgcccat

SEQ ID NO: 1856714 - DNA, 25 bp, Homo sapien
tcttaagctggaactagggtctaac

SEQ ID NO: 1856715 - DNA, 25 bp, Homo sapien
aatgaaacaccaacacatgagctaa

SEQ ID NO: 1856716 - DNA, 25 bp, Homo sapien
gatcctcaggtgactatactccaaa

SEQ ID NO: 1856717 - DNA, 25 bp, Homo sapien
aatctgagtgcctaagtttatcagg

SEQ ID NO: 1856718 - DNA, 25 bp, Homo sapien
ttttatgaagtttgtgagaggtgag

SEQ ID NO: 1856719 - DNA, 25 bp, Homo sapien
cacgcccagcttgcaagcctcattt

SEQ ID NO: 1856720 - DNA, 25 bp, Homo sapien
aggccctggattttatgaagtttgt

SEQ ID NO: 1856721 - DNA, 25 bp, Homo sapien
cctggattttatgaagtttgtgaga

SEQ ID NO: 1856722 - DNA, 25 bp, Homo sapien
gacaacaagggacttagaatataac

SEQ ID NO: 1856723 - DNA, 25 bp, Homo sapien
tcctctgtgggttaaatactatcaa

SEQ ID NO: 1856724 - DNA, 25 bp, Homo sapien
cacccagcagaaagcggtttcttga

SEQ ID NO: 1856725 - DNA, 25 bp, Homo sapien
taaaacagtagcacagtttgaaagg

SEQ ID NO: 1856726 - DNA, 25 bp, Homo sapien
gcctgtaatactttagccaatttaa

SEQ ID NO: 1856727 - DNA, 25 bp, Homo sapien
aactagtaacagtgatagagaggat

SEQ ID NO: 1856728 - DNA, 25 bp, Homo sapien
ggatttggagagcatgagcaaaaga

SEQ ID NO: 1856729 - DNA, 25 bp, Homo sapien
agcaaaagagcttacctaaagtggg

SEQ ID NO: 1856730 - DNA, 25 bp, Homo sapien
gtccactccggaagattatctgcat

SEQ ID NO: 1856731 - DNA, 25 bp, Homo sapien
cgactgtatacacagcggtctgccg

SEQ ID NO: 1856732 - DNA, 25 bp, Homo sapien
ctattgtgatgtccactccggaaga

SEQ ID NO: 1856733 - DNA, 25 bp, Homo sapien
gcagttaacagacaccgactgtata

SEQ ID NO: 1856734 - DNA, 25 bp, Homo sapien
tttctttcgggcctggagcgcaagc

SEQ ID NO: 1856735 - DNA, 25 bp, Homo sapien
aaaggaggcgaccaaggtgagggtg

SEQ ID NO: 1856736 - DNA, 25 bp, Homo sapien
gcagttaagcgaagctcccggcgct

SEQ ID NO: 1856737 - DNA, 25 bp, Homo sapien
ggcgccagaggacgcccggactgag

SEQ ID NO: 1856738 - DNA, 25 bp, Homo sapien
gggatggatgaagggcgaatgtgga

SEQ ID NO: 1856739 - DNA, 25 bp, Homo sapien
attgcccctcgtggcggaggccgct

SEQ ID NO: 1856740 - DNA, 25 bp, Homo sapien
tggcggaggccgctccaccgctcac

SEQ ID NO: 1856741 - DNA, 25 bp, Homo sapien
ggcgaccattgcccctcgtggcgga

SEQ ID NO: 1856742 - DNA, 25 bp, Homo sapien
gccccggcgaccattgcccctcgtg

SEQ ID NO: 1856743 - DNA, 25 bp, Homo sapien
gcccaaaaccgagcccgctcacact

SEQ ID NO: 1856744 - DNA, 25 bp, Homo sapien
gtgagaccggtaatcgccaggcgcc

SEQ ID NO: 1856745 - DNA, 25 bp, Homo sapien
tgcgcactcgagtggcggcgactcc

SEQ ID NO: 1856746 - DNA, 25 bp, Homo sapien
gcgcctgcgcactcgagtggcggcg

SEQ ID NO: 1856747 - DNA, 25 bp, Homo sapien
aatatgtaagatttctataggtgga

SEQ ID NO: 1856748 - DNA, 25 bp, Homo sapien
ggaaatatgtaagatttctataggt

SEQ ID NO: 1856749 - DNA, 25 bp, Homo sapien
gtggagaaggagatgtcaggcattc

SEQ ID NO: 1856750 - DNA, 25 bp, Homo sapien
taagatttctataggtggagaagga

SEQ ID NO: 1856751 - DNA, 25 bp, Homo sapien
gagatggtctggcacaaagcccaga

SEQ ID NO: 1856752 - DNA, 25 bp, Homo sapien
ggagtatgatcccagcgcagagcaa

SEQ ID NO: 1856753 - DNA, 25 bp, Homo sapien
tctaggtctctggacaattgacccc

SEQ ID NO: 1856754 - DNA, 25 bp, Homo sapien
caggtagtaggagtcacagtcagga

SEQ ID NO: 1856755 - DNA, 25 bp, Homo sapien
catagacggatgatacataggccag

SEQ ID NO: 1856756 - DNA, 25 bp, Homo sapien
cataggccagtaacgctgctgagga

SEQ ID NO: 1856757 - DNA, 25 bp, Homo sapien
gactcctcttctacaggctgttgga

SEQ ID NO: 1856758 - DNA, 25 bp, Homo sapien
tatgaatccataggatggcgtctcc

SEQ ID NO: 1856759 - DNA, 25 bp, Homo sapien
atggttggatggtggtatgatttgc

SEQ ID NO: 1856760 - DNA, 25 bp, Homo sapien
ggaaagaaggcttattcaatagatg

SEQ ID NO: 1856761 - DNA, 25 bp, Homo sapien
aaagaaggcttattcaatagatggt

SEQ ID NO: 1856762 - DNA, 25 bp, Homo sapien
ggttggatggtggtatgatttgcat

SEQ ID NO: 1856763 - DNA, 25 bp, Homo sapien
aacagcacggcgtcgtgaacgctga

SEQ ID NO: 1856764 - DNA, 25 bp, Homo sapien
catcgatgcttaactcagaggagcc

SEQ ID NO: 1856765 - DNA, 25 bp, Homo sapien
tgggtcttggtgatgccagcgtcaa

SEQ ID NO: 1856766 - DNA, 25 bp, Homo sapien
taggtttcccgtatcactgtctcgg

SEQ ID NO: 1856767 - DNA, 25 bp, Homo sapien
gacaccctgcaatgagtatcaaaat

SEQ ID NO: 1856768 - DNA, 25 bp, Homo sapien
cctgcaatgagtatcaaaatgttgg

SEQ ID NO: 1856769 - DNA, 25 bp, Homo sapien
agtgacaccctgcaatgagtatcaa

SEQ ID NO: 1856770 - DNA, 25 bp, Homo sapien
caaaatgttggcgttttgaaaggca

SEQ ID NO: 1856771 - DNA, 25 bp, Homo sapien
tagcagctgatcagtgactaacaga

SEQ ID NO: 1856772 - DNA, 25 bp, Homo sapien
ttgaccttatattgtactgcctttg

SEQ ID NO: 1856773 - DNA, 25 bp, Homo sapien
tggtggcctagcagtctcatagcag

SEQ ID NO: 1856774 - DNA, 25 bp, Homo sapien
ttgattgaccttatattgtactgcc

SEQ ID NO: 1856775 - DNA, 25 bp, Homo sapien
ggttgggatggtaggagggggatca

SEQ ID NO: 1856776 - DNA, 25 bp, Homo sapien
gggatcagagctcctgccaaggcct

SEQ ID NO: 1856777 - DNA, 25 bp, Homo sapien
cctgccaaggcctcctcagtactta

SEQ ID NO: 1856778 - DNA, 25 bp, Homo sapien
tcaatcaggatcagggtggggttgg

SEQ ID NO: 1856779 - DNA, 25 bp, Homo sapien
tatggcacttggtcttcggatgcag

SEQ ID NO: 1856780 - DNA, 25 bp, Homo sapien
cacgtagtgtaccatggagaaatcc

SEQ ID NO: 1856781 - DNA, 25 bp, Homo sapien
taatggaggatgcttcgggatccag

SEQ ID NO: 1856782 - DNA, 25 bp, Homo sapien
tttttctgagacacggacgatactg

SEQ ID NO: 1856783 - DNA, 25 bp, Homo sapien
gcagcggctccagatcatcacagtt

SEQ ID NO: 1856784 - DNA, 25 bp, Homo sapien
ggtgtcacttgaattaaacaagctg

SEQ ID NO: 1856785 - DNA, 25 bp, Homo sapien
cctgcaaatctttcctccttgtaga

SEQ ID NO: 1856786 - DNA, 25 bp, Homo sapien
taagaggcacctttaccatatcaac

SEQ ID NO: 1856787 - DNA, 25 bp, Homo sapien
ctcttttaacagcttatgctttagg

SEQ ID NO: 1856788 - DNA, 25 bp, Homo sapien
ttacaaatgtaattgagctgcagca

SEQ ID NO: 1856789 - DNA, 25 bp, Homo sapien
cagcttatgctttaggtagtaaaca

SEQ ID NO: 1856790 - DNA, 25 bp, Homo sapien
tttacaaatgtaattgagctgcagc

SEQ ID NO: 1856791 - DNA, 25 bp, Homo sapien
agattttcaccccaggaatggtgat

SEQ ID NO: 1856792 - DNA, 25 bp, Homo sapien
ctggaagattttcaccccaggaatg

SEQ ID NO: 1856793 - DNA, 25 bp, Homo sapien
gaagattttcaccccaggaatggtg

SEQ ID NO: 1856794 - DNA, 25 bp, Homo sapien
ttttcaccccaggaatggtgatgat

SEQ ID NO: 1856795 - DNA, 25 bp, Homo sapien
tagctacttaagaacccgtcttggc

SEQ ID NO: 1856796 - DNA, 25 bp, Homo sapien
tacaaatgatctttaactggctgca

SEQ ID NO: 1856797 - DNA, 25 bp, Homo sapien
ctctatcccttaggcagagaaatgg

SEQ ID NO: 1856798 - DNA, 25 bp, Homo sapien
tgtaaatgtgtatctgcagtgcagg

SEQ ID NO: 1856799 - DNA, 25 bp, Homo sapien
tctataaatgttggtgttagggatt

SEQ ID NO: 1856800 - DNA, 25 bp, Homo sapien
taaatgttggtgttagggatttgac

SEQ ID NO: 1856801 - DNA, 25 bp, Homo sapien
ctcccgataatcattgatgcttcta

SEQ ID NO: 1856802 - DNA, 25 bp, Homo sapien
tcattgatgcttctataaatgttgg

SEQ ID NO: 1856803 - DNA, 25 bp, Homo sapien
aaggaaatgcacttgcctttaggtc

SEQ ID NO: 1856804 - DNA, 25 bp, Homo sapien
cagagttggcttaccttgccttgtt

SEQ ID NO: 1856805 - DNA, 25 bp, Homo sapien
taggtcagagttggcttaccttgcc

SEQ ID NO: 1856806 - DNA, 25 bp, Homo sapien
cacttgcctttaggtcagagttggc

SEQ ID NO: 1856807 - DNA, 25 bp, Homo sapien
ctgtgtgaacgaacagtggtgatga

SEQ ID NO: 1856808 - DNA, 25 bp, Homo sapien
gataattagtccaatgtccagtccc

SEQ ID NO: 1856809 - DNA, 25 bp, Homo sapien
ctgagataattagtccaatgtccag

SEQ ID NO: 1856810 - DNA, 25 bp, Homo sapien
aattagtccaatgtccagtcccagg

SEQ ID NO: 1856811 - DNA, 25 bp, Homo sapien
tgtttgtgttctttaggtccatggc

SEQ ID NO: 1856812 - DNA, 25 bp, Homo sapien
taggtccatggcagatctcttttgt

SEQ ID NO: 1856813 - DNA, 25 bp, Homo sapien
tctttaggtccatggcagatctctt

SEQ ID NO: 1856814 - DNA, 25 bp, Homo sapien
gtgttctttaggtccatggcagatc

SEQ ID NO: 1856815 - DNA, 25 bp, Homo sapien
tttcaaggtagggaatgacgttgct

SEQ ID NO: 1856816 - DNA, 25 bp, Homo sapien
tcagaataataccagccagcacagc

SEQ ID NO: 1856817 - DNA, 25 bp, Homo sapien
cacaggctgggtaggttagaaatgg

SEQ ID NO: 1856818 - DNA, 25 bp, Homo sapien
gaatgacgttgctcagaataatacc

SEQ ID NO: 1856819 - DNA, 25 bp, Homo sapien
ccttgccactttgagatattttgca

SEQ ID NO: 1856820 - DNA, 25 bp, Homo sapien
caaatccccaccaaggaatcacaaa

SEQ ID NO: 1856821 - DNA, 25 bp, Homo sapien
gagtactgtggcgtgctatcatagc

SEQ ID NO: 1856822 - DNA, 25 bp, Homo sapien
aatcacaaaaagttagccttgccac

SEQ ID NO: 1856823 - DNA, 25 bp, Homo sapien
acacctgcgcctaccagagatgcaa

SEQ ID NO: 1856824 - DNA, 25 bp, Homo sapien
atcacacctgcgcctaccagagatg

SEQ ID NO: 1856825 - DNA, 25 bp, Homo sapien
tcacacctgcgcctaccagagatgc

SEQ ID NO: 1856826 - DNA, 25 bp, Homo sapien
tcaggagcagcatcacacctgcgcc

SEQ ID NO: 1856827 - DNA, 25 bp, Homo sapien
acagagccagttggagagaaaccat

SEQ ID NO: 1856828 - DNA, 25 bp, Homo sapien
gagacagagccagttggagagaaac

SEQ ID NO: 1856829 - DNA, 25 bp, Homo sapien
aggagacagagccagttggagagaa

SEQ ID NO: 1856830 - DNA, 25 bp, Homo sapien
ctgaggagacagagccagttggaga

SEQ ID NO: 1856831 - DNA, 25 bp, Homo sapien
caggaacgtattggtccctgtctgc

SEQ ID NO: 1856832 - DNA, 25 bp, Homo sapien
aggaacgtattggtccctgtctgca

SEQ ID NO: 1856833 - DNA, 25 bp, Homo sapien
ggaacgtattggtccctgtctgcaa

SEQ ID NO: 1856834 - DNA, 25 bp, Homo sapien
cctgtttgctgcttgggtaactgcc

SEQ ID NO: 1856835 - DNA, 25 bp, Homo sapien
gaggccttctgcttggtgagaagca

SEQ ID NO: 1856836 - DNA, 25 bp, Homo sapien
gaaaagccctagtagctcctcagtg

SEQ ID NO: 1856837 - DNA, 25 bp, Homo sapien
tgaatctttactgccactgctctgt

SEQ ID NO: 1856838 - DNA, 25 bp, Homo sapien
tcctagcaatagcaccagtaaacac

SEQ ID NO: 1856839 - DNA, 25 bp, Homo sapien
tttatcctggataatagtcctagca

SEQ ID NO: 1856840 - DNA, 25 bp, Homo sapien
tctgaaaaatgaactgacgacattg

SEQ ID NO: 1856841 - DNA, 25 bp, Homo sapien
ctgacgacattgcaaaggccgatgg

SEQ ID NO: 1856842 - DNA, 25 bp, Homo sapien
cagaaaggagctcaccaaagataag

SEQ ID NO: 1856843 - DNA, 25 bp, Homo sapien
gtaattgtgaagactggcaatcttc

SEQ ID NO: 1856844 - DNA, 25 bp, Homo sapien
tgtaattgtgaagactggcaatctt

SEQ ID NO: 1856845 - DNA, 25 bp, Homo sapien
aaaggagctcaccaaagataaggag

SEQ ID NO: 1856846 - DNA, 25 bp, Homo sapien
gaatcatgtcaataagcgtctggct

SEQ ID NO: 1856847 - DNA, 25 bp, Homo sapien
ctataaggaatcatgtcaataagcg

SEQ ID NO: 1856848 - DNA, 25 bp, Homo sapien
ttgcaatcacagtgaagccaataat

SEQ ID NO: 1856849 - DNA, 25 bp, Homo sapien
caataagcgtctggctggtttctgt

SEQ ID NO: 1856850 - DNA, 25 bp, Homo sapien
ctagaatgctggtggaattcgcttt

SEQ ID NO: 1856851 - DNA, 25 bp, Homo sapien
tgggaaactcaatgggatactgatt

SEQ ID NO: 1856852 - DNA, 25 bp, Homo sapien
gatacatttgttgattcgcagagca

SEQ ID NO: 1856853 - DNA, 25 bp, Homo sapien
caacaacaacagttagaaatactag

SEQ ID NO: 1856854 - DNA, 25 bp, Homo sapien
tgggaccggcatggaaactaatcat

SEQ ID NO: 1856855 - DNA, 25 bp, Homo sapien
agcactcattgcagactccggaagg

SEQ ID NO: 1856856 - DNA, 25 bp, Homo sapien
cacagcagccaggtaagcactcatt

SEQ ID NO: 1856857 - DNA, 25 bp, Homo sapien
ggcaatgaagcccaaacccaatacg

SEQ ID NO: 1856858 - DNA, 25 bp, Homo sapien
gaatgggctcactttcagaacgttg

SEQ ID NO: 1856859 - DNA, 25 bp, Homo sapien
cagttgaccgttgttgaatgggctc

SEQ ID NO: 1856860 - DNA, 25 bp, Homo sapien
acgttgatcagcagagcactcacca

SEQ ID NO: 1856861 - DNA, 25 bp, Homo sapien
gaaagatcccatgaccagttgaccg

SEQ ID NO: 1856862 - DNA, 25 bp, Homo sapien
tgacacgatccaaaaattacataga

SEQ ID NO: 1856863 - DNA, 25 bp, Homo sapien
taagcgatgttgagaggaggaatca

SEQ ID NO: 1856864 - DNA, 25 bp, Homo sapien
gattaccgaagaacagaaagctgca

SEQ ID NO: 1856865 - DNA, 25 bp, Homo sapien
gaggaatcagttgccttgccagcaa

SEQ ID NO: 1856866 - DNA, 25 bp, Homo sapien
ttataccagcaagtaagtctcccag

SEQ ID NO: 1856867 - DNA, 25 bp, Homo sapien
tcgtaggaacctgtgccatgagcag

SEQ ID NO: 1856868 - DNA, 25 bp, Homo sapien
agggaaagattgtaagcacgcatcg

SEQ ID NO: 1856869 - DNA, 25 bp, Homo sapien
cagaagccaatcctttaatcgatac

SEQ ID NO: 1856870 - DNA, 25 bp, Homo sapien
gttcctgttgaaaggtctcctcatt

SEQ ID NO: 1856871 - DNA, 25 bp, Homo sapien
gtgttcctgttgaaaggtctcctca

SEQ ID NO: 1856872 - DNA, 25 bp, Homo sapien
ggcactggacgtggtgtctgaaggt

SEQ ID NO: 1856873 - DNA, 25 bp, Homo sapien
cttttgtgttcctgttgaaaggtct

SEQ ID NO: 1856874 - DNA, 25 bp, Homo sapien
atgagtttcgcctggacttagagct

SEQ ID NO: 1856875 - DNA, 25 bp, Homo sapien
ctgaagccagagatggcgctcctct

SEQ ID NO: 1856876 - DNA, 25 bp, Homo sapien
tttcgcctggacttagagctgaagc

SEQ ID NO: 1856877 - DNA, 25 bp, Homo sapien
tgaagccagagatggcgctcctctc

SEQ ID NO: 1856878 - DNA, 25 bp, Homo sapien
cccagggacgaccatcattcattca

SEQ ID NO: 1856879 - DNA, 25 bp, Homo sapien
tgactgagtgcccacggcgtgcctg

SEQ ID NO: 1856880 - DNA, 25 bp, Homo sapien
gataagctcccagggacgaccatca

SEQ ID NO: 1856881 - DNA, 25 bp, Homo sapien
agtgcccacggcgtgcctggctctg

SEQ ID NO: 1856882 - DNA, 25 bp, Homo sapien
gtacctgccggtgacggacgcagcc

SEQ ID NO: 1856883 - DNA, 25 bp, Homo sapien
ctgggtacctgccggtgacggacgc

SEQ ID NO: 1856884 - DNA, 25 bp, Homo sapien
tgccggtgacggacgcagcccccgc

SEQ ID NO: 1856885 - DNA, 25 bp, Homo sapien
gggtacctgccggtgacggacgcag

SEQ ID NO: 1856886 - DNA, 25 bp, Homo sapien
gcggcggttcccgagccgttgtggc

SEQ ID NO: 1856887 - DNA, 25 bp, Homo sapien
tgcggacgcggataccggcggcggt

SEQ ID NO: 1856888 - DNA, 25 bp, Homo sapien
tgggatcccacacggctctcgcctg

SEQ ID NO: 1856889 - DNA, 25 bp, Homo sapien
gttcccgagccgttgtggcctagcc

SEQ ID NO: 1856890 - DNA, 25 bp, Homo sapien
gacgaggaagaggagcatgagcagc

SEQ ID NO: 1856891 - DNA, 25 bp, Homo sapien
agcagctgggctagggagccaggaa

SEQ ID NO: 1856892 - DNA, 25 bp, Homo sapien
ggctagggagccaggaaagtggtac

SEQ ID NO: 1856893 - DNA, 25 bp, Homo sapien
gagcatgagcagctgggctagggag

SEQ ID NO: 1856894 - DNA, 25 bp, Homo sapien
ggcctatttggtgccaggcctcgtg

SEQ ID NO: 1856895 - DNA, 25 bp, Homo sapien
tgagtcgtgggatccccttggtatt

SEQ ID NO: 1856896 - DNA, 25 bp, Homo sapien
tttgctattcttgatcgagggccta

SEQ ID NO: 1856897 - DNA, 25 bp, Homo sapien
tggtaaacctgtataccaaggctcc

SEQ ID NO: 1856898 - DNA, 25 bp, Homo sapien
ttgatccccccaaccccatccctca

SEQ ID NO: 1856899 - DNA, 25 bp, Homo sapien
tgatccccccaaccccatccctcat

SEQ ID NO: 1856900 - DNA, 25 bp, Homo sapien
ctttgtaaccattccctcattccct

SEQ ID NO: 1856901 - DNA, 25 bp, Homo sapien
gtaaccattccctcattcccttgat

SEQ ID NO: 1856902 - DNA, 25 bp, Homo sapien
tttgtcagtgtcgttttccaccaca

SEQ ID NO: 1856903 - DNA, 25 bp, Homo sapien
gtatttgccccgccggccacggtga

SEQ ID NO: 1856904 - DNA, 25 bp, Homo sapien
cgcgaggcgtgtgctgccagcttct

SEQ ID NO: 1856905 - DNA, 25 bp, Homo sapien
ttctgcctttggtctccagttattg

SEQ ID NO: 1856906 - DNA, 25 bp, Homo sapien
taaaatctcggctctcggagagtcc

SEQ ID NO: 1856907 - DNA, 25 bp, Homo sapien
ctgttctcgcgagagtactgcggga

SEQ ID NO: 1856908 - DNA, 25 bp, Homo sapien
ccgcccgcggagaggttccatattg

SEQ ID NO: 1856909 - DNA, 25 bp, Homo sapien
ggaggctcccgtttgctggctcttg

SEQ ID NO: 1856910 - DNA, 25 bp, Homo sapien
agaagggcacagcccaacccgaaga

SEQ ID NO: 1856911 - DNA, 25 bp, Homo sapien
gcagacaagctcggggaactgccgg

SEQ ID NO: 1856912 - DNA, 25 bp, Homo sapien
cagacaagctcggggaactgccggg

SEQ ID NO: 1856913 - DNA, 25 bp, Homo sapien
agggcacagcccaacccgaagactg

SEQ ID NO: 1856914 - DNA, 25 bp, Homo sapien
ttgacaacttggaagataaggagct

SEQ ID NO: 1856915 - DNA, 25 bp, Homo sapien
tttctcaggaaaaggtagaatcctc

SEQ ID NO: 1856916 - DNA, 25 bp, Homo sapien
tagtgctccacttcacccctatgtg

SEQ ID NO: 1856917 - DNA, 25 bp, Homo sapien
tggccagcctggatgttctctcatt

SEQ ID NO: 1856918 - DNA, 25 bp, Homo sapien
gaagaaggcctggtagtctcattta

SEQ ID NO: 1856919 - DNA, 25 bp, Homo sapien
tacgaaaaagctaattcaaatctac

SEQ ID NO: 1856920 - DNA, 25 bp, Homo sapien
gaatacaaagcctttgtgaagaagg

SEQ ID NO: 1856921 - DNA, 25 bp, Homo sapien
aaaatggccagtgtcgtctttggcc

SEQ ID NO: 1856922 - DNA, 25 bp, Homo sapien
taaaatttcaggacgggcacttcag

SEQ ID NO: 1856923 - DNA, 25 bp, Homo sapien
taagatgtttttcagctacgagagc

SEQ ID NO: 1856924 - DNA, 25 bp, Homo sapien
catgggaatagactttggcatccac

SEQ ID NO: 1856925 - DNA, 25 bp, Homo sapien
ctacgagagcatcgagtccctgcag

SEQ ID NO: 1856926 - DNA, 25 bp, Homo sapien
attcagcagcgtcccctttgtagcc

SEQ ID NO: 1856927 - DNA, 25 bp, Homo sapien
cattcagcagcgtcccctttgtagc

SEQ ID NO: 1856928 - DNA, 25 bp, Homo sapien
acattcagcagcgtcccctttgtag

SEQ ID NO: 1856929 - DNA, 25 bp, Homo sapien
gcacagggatgaccgctacatcatc

SEQ ID NO: 1856930 - DNA, 25 bp, Homo sapien
acagggatgaccgctacatcatcac

SEQ ID NO: 1856931 - DNA, 25 bp, Homo sapien
agcacagggatgaccgctacatcat

SEQ ID NO: 1856932 - DNA, 25 bp, Homo sapien
cagcacagggatgaccgctacatca

SEQ ID NO: 1856933 - DNA, 25 bp, Homo sapien
cactgagtcccaagttccagtttta

SEQ ID NO: 1856934 - DNA, 25 bp, Homo sapien
gttccagttttaccaataggagcca

SEQ ID NO: 1856935 - DNA, 25 bp, Homo sapien
tctttcctggttgtatgtttcactg

SEQ ID NO: 1856936 - DNA, 25 bp, Homo sapien
tatgtttcactgagtcccaagttcc

SEQ ID NO: 1856937 - DNA, 25 bp, Homo sapien
tgaaataatatagtgtttccattct

SEQ ID NO: 1856938 - DNA, 25 bp, Homo sapien
cccgaggtgatgaaaggatgtgcca

SEQ ID NO: 1856939 - DNA, 25 bp, Homo sapien
ccgaggtgatgaaaggatgtgccat

SEQ ID NO: 1856940 - DNA, 25 bp, Homo sapien
tcccgaggtgatgaaaggatgtgcc

SEQ ID NO: 1856941 - DNA, 25 bp, Homo sapien
ctcccgaggtgatgaaaggatgtgc

SEQ ID NO: 1856942 - DNA, 25 bp, Homo sapien
tgaaggagtgcagtaaatagccaac

SEQ ID NO: 1856943 - DNA, 25 bp, Homo sapien
taaggccaggtgagtaaaattgttc

SEQ ID NO: 1856944 - DNA, 25 bp, Homo sapien
taatttgatgttcgtgacacggccc

SEQ ID NO: 1856945 - DNA, 25 bp, Homo sapien
gacacggcccaagtacctgtttatc

SEQ ID NO: 1856946 - DNA, 25 bp, Homo sapien
cccggagtaatcaggcagccttcat

SEQ ID NO: 1856947 - DNA, 25 bp, Homo sapien
tcacctcagctgatattatggcaag

SEQ ID NO: 1856948 - DNA, 25 bp, Homo sapien
gaatatctgccccagtagtcagaag

SEQ ID NO: 1856949 - DNA, 25 bp, Homo sapien
gtgatacgtacagccaaaaaggacc

SEQ ID NO: 1856950 - DNA, 25 bp, Homo sapien
ccacatacgtgttaggaggctgcat

SEQ ID NO: 1856951 - DNA, 25 bp, Homo sapien
gacagaatcttgtatttgggccaag

SEQ ID NO: 1856952 - DNA, 25 bp, Homo sapien
aggaggcagactgatggcgattccc

SEQ ID NO: 1856953 - DNA, 25 bp, Homo sapien
gcctggactctaagctggagctctt

SEQ ID NO: 1856954 - DNA, 25 bp, Homo sapien
gagactgccccaggcacgaaggtga

SEQ ID NO: 1856955 - DNA, 25 bp, Homo sapien
cagagactgccccaggcacgaaggt

SEQ ID NO: 1856956 - DNA, 25 bp, Homo sapien
ctgccccaggcacgaaggtgagttg

SEQ ID NO: 1856957 - DNA, 25 bp, Homo sapien
gactgccccaggcacgaaggtgagt

SEQ ID NO: 1856958 - DNA, 25 bp, Homo sapien
aggagtacaagcacgcttcaagaat

SEQ ID NO: 1856959 - DNA, 25 bp, Homo sapien
cattatggtgaggaggttcatgctg

SEQ ID NO: 1856960 - DNA, 25 bp, Homo sapien
atttctgtggaggtctcatggtgag

SEQ ID NO: 1856961 - DNA, 25 bp, Homo sapien
tgctggcccatcctcattatggtga

SEQ ID NO: 1856962 - DNA, 25 bp, Homo sapien
cctgccatatgggacagacagggtg

SEQ ID NO: 1856963 - DNA, 25 bp, Homo sapien
ttgtggcggcagtgggcagtccgtg

SEQ ID NO: 1856964 - DNA, 25 bp, Homo sapien
ccagcttattgctgcatcactccag

SEQ ID NO: 1856965 - DNA, 25 bp, Homo sapien
ctctttttagcttgtggcggcagtg

SEQ ID NO: 1856966 - DNA, 25 bp, Homo sapien
gggcagtccgtggcattccccagct

SEQ ID NO: 1856967 - DNA, 25 bp, Homo sapien
gactacaggtctgtgccacccaggt

SEQ ID NO: 1856968 - DNA, 25 bp, Homo sapien
gtggcacaattacatcttactgcaa

SEQ ID NO: 1856969 - DNA, 25 bp, Homo sapien
acaattacatcttactgcaacctca

SEQ ID NO: 1856970 - DNA, 25 bp, Homo sapien
acaggtctgtgccacccaggtgcac

SEQ ID NO: 1856971 - DNA, 25 bp, Homo sapien
gcactgctgatacaactgcactttg

SEQ ID NO: 1856972 - DNA, 25 bp, Homo sapien
ataaaaagatcgagggtaggcctat

SEQ ID NO: 1856973 - DNA, 25 bp, Homo sapien
gatacctgtggcaaactgtaaaggg

SEQ ID NO: 1856974 - DNA, 25 bp, Homo sapien
ctgtaatttctattggcactgctga

SEQ ID NO: 1856975 - DNA, 25 bp, Homo sapien
gaggaagtggcacccctctctaatg

SEQ ID NO: 1856976 - DNA, 25 bp, Homo sapien
tagctctggagatatcacgttcttc

SEQ ID NO: 1856977 - DNA, 25 bp, Homo sapien
tgtgtggtacactatagtagttaag

SEQ ID NO: 1856978 - DNA, 25 bp, Homo sapien
taatgctgctctctccttgtgtggt

SEQ ID NO: 1856979 - DNA, 25 bp, Homo sapien
ttactcagatatcttagtttggtct

SEQ ID NO: 1856980 - DNA, 25 bp, Homo sapien
tgtgaactcatatcccctagctcct

SEQ ID NO: 1856981 - DNA, 25 bp, Homo sapien
tagctcctctgtccaataaggaaca

SEQ ID NO: 1856982 - DNA, 25 bp, Homo sapien
ctcagatatcttagtttggtctgtg

SEQ ID NO: 1856983 - DNA, 25 bp, Homo sapien
ctgccaaaccaaagtcacctagagt

SEQ ID NO: 1856984 - DNA, 25 bp, Homo sapien
gtttttccgtattttagcagccaca

SEQ ID NO: 1856985 - DNA, 25 bp, Homo sapien
tcatctccctgagtcagcaaaggcc

SEQ ID NO: 1856986 - DNA, 25 bp, Homo sapien
tctcctatgtgatatgcttacctga

SEQ ID NO: 1856987 - DNA, 25 bp, Homo sapien
tggatagtcatcactctcctcttta

SEQ ID NO: 1856988 - DNA, 25 bp, Homo sapien
gttgcgttctctgacgtttggatag

SEQ ID NO: 1856989 - DNA, 25 bp, Homo sapien
tgtctctagtctcatagttgcgttc

SEQ ID NO: 1856990 - DNA, 25 bp, Homo sapien
gacgtttggatagtcatcactctcc

SEQ ID NO: 1856991 - DNA, 25 bp, Homo sapien
cataattgattattcccattaggaa

SEQ ID NO: 1856992 - DNA, 25 bp, Homo sapien
tacctttagtgaattattgtacatg

SEQ ID NO: 1856993 - DNA, 25 bp, Homo sapien
ttcccattaggaatacctttagtga

SEQ ID NO: 1856994 - DNA, 25 bp, Homo sapien
aattattgtacatgaccaggaagaa

SEQ ID NO: 1856995 - DNA, 25 bp, Homo sapien
catggctcaatgtagtctgaaactc

SEQ ID NO: 1856996 - DNA, 25 bp, Homo sapien
atggctcaatgtagtctgaaactcc

SEQ ID NO: 1856997 - DNA, 25 bp, Homo sapien
tctgaacttttagaaggcagtatag

SEQ ID NO: 1856998 - DNA, 25 bp, Homo sapien
acttttagaaggcagtatagttcag

SEQ ID NO: 1856999 - DNA, 25 bp, Homo sapien
ttccttgtttcctttggtcctgata

SEQ ID NO: 1857000 - DNA, 25 bp, Homo sapien
ggtcctgatattgtccctgtcctgc

SEQ ID NO: 1857001 - DNA, 25 bp, Homo sapien
ctttggtcctgatattgtccctgtc

SEQ ID NO: 1857002 - DNA, 25 bp, Homo sapien
ttcctggctgtatctccctgaccct

SEQ ID NO: 1857003 - DNA, 25 bp, Homo sapien
tctgaggatggccttacacttgcca

SEQ ID NO: 1857004 - DNA, 25 bp, Homo sapien
ctgaggatggccttacacttgccag

SEQ ID NO: 1857005 - DNA, 25 bp, Homo sapien
tgagaggaccattggagcccagaaa

SEQ ID NO: 1857006 - DNA, 25 bp, Homo sapien
gtctggataacacagtgagatacca

SEQ ID NO: 1857007 - DNA, 25 bp, Homo sapien
ccagaaatttgagtccagtctggat

SEQ ID NO: 1857008 - DNA, 25 bp, Homo sapien
agaggaccattggagcccagaaatt

SEQ ID NO: 1857009 - DNA, 25 bp, Homo sapien
cttaccagccttctctctcatatcc

SEQ ID NO: 1857010 - DNA, 25 bp, Homo sapien
cagccttctctctcatatccctcat

SEQ ID NO: 1857011 - DNA, 25 bp, Homo sapien
ccagccttctctctcatatccctca

SEQ ID NO: 1857012 - DNA, 25 bp, Homo sapien
taccagccttctctctcatatccct

SEQ ID NO: 1857013 - DNA, 25 bp, Homo sapien
agacgcgactttctgggagtcgtgc

SEQ ID NO: 1857014 - DNA, 25 bp, Homo sapien
tggacaatcgctagacctttgtcct

SEQ ID NO: 1857015 - DNA, 25 bp, Homo sapien
gactttctgggagtcgtgcaggcac

SEQ ID NO: 1857016 - DNA, 25 bp, Homo sapien
caatcgctagacctttgtcctcagg

SEQ ID NO: 1857017 - DNA, 25 bp, Homo sapien
gggcggtgcgaaagctctctcctgg

SEQ ID NO: 1857018 - DNA, 25 bp, Homo sapien
gggggcggtgcgaaagctctctcct

SEQ ID NO: 1857019 - DNA, 25 bp, Homo sapien
ggggagctgagaagcgaggaccccc

SEQ ID NO: 1857020 - DNA, 25 bp, Homo sapien
ggagctgagaagcgaggaccccctc

SEQ ID NO: 1857021 - DNA, 25 bp, Homo sapien
ctttcatgaaagtgggcgccgcacc

SEQ ID NO: 1857022 - DNA, 25 bp, Homo sapien
catggtcgagagatgcttgagcagc

SEQ ID NO: 1857023 - DNA, 25 bp, Homo sapien
agatgttctcacctcttctagggcc

SEQ ID NO: 1857024 - DNA, 25 bp, Homo sapien
cgtgggtgggacaaaacacgtctgt

SEQ ID NO: 1857025 - DNA, 25 bp, Homo sapien
tgccataaggtgaactgctacacag

SEQ ID NO: 1857026 - DNA, 25 bp, Homo sapien
ccctagaagcatcagtgagactggc

SEQ ID NO: 1857027 - DNA, 25 bp, Homo sapien
catgaagattgagcccatgcgcgaa

SEQ ID NO: 1857028 - DNA, 25 bp, Homo sapien
gcaagactgcctactgtgaggccca

SEQ ID NO: 1857029 - DNA, 25 bp, Homo sapien
ctgcaattgcagtcttaagcttcac

SEQ ID NO: 1857030 - DNA, 25 bp, Homo sapien
gaccttccctttagctgttgacaca

SEQ ID NO: 1857031 - DNA, 25 bp, Homo sapien
gctgccacgaggtggtccaagcctt

SEQ ID NO: 1857032 - DNA, 25 bp, Homo sapien
ctcctatcaggctgggtgtgcgagt

SEQ ID NO: 1857033 - DNA, 25 bp, Homo sapien
gccacacagtgtcgttgatttaaag

SEQ ID NO: 1857034 - DNA, 25 bp, Homo sapien
taaacctgtgttgtaagatcttggg

SEQ ID NO: 1857035 - DNA, 25 bp, Homo sapien
caatacagcatatggctagggaagg

SEQ ID NO: 1857036 - DNA, 25 bp, Homo sapien
tttagaacgggaaacggctcagatc

SEQ ID NO: 1857037 - DNA, 25 bp, Homo sapien
tagagaagccatactggggatgcga

SEQ ID NO: 1857038 - DNA, 25 bp, Homo sapien
tattcgtccgtttgggggatagaga

SEQ ID NO: 1857039 - DNA, 25 bp, Homo sapien
gggatgcgacgttgatggttcctca

SEQ ID NO: 1857040 - DNA, 25 bp, Homo sapien
catgggcagggagtatcacataagg

SEQ ID NO: 1857041 - DNA, 25 bp, Homo sapien
gaatccaagttagtattaactgagg

SEQ ID NO: 1857042 - DNA, 25 bp, Homo sapien
catctttcttattgacatccccatc

SEQ ID NO: 1857043 - DNA, 25 bp, Homo sapien
tagtattaactgagggattagactt

SEQ ID NO: 1857044 - DNA, 25 bp, Homo sapien
cccatctcgagaatccaagttagta

SEQ ID NO: 1857045 - DNA, 25 bp, Homo sapien
cccaactctgctttgatgtggtatc

SEQ ID NO: 1857046 - DNA, 25 bp, Homo sapien
tgcaggcatagggagtgccatggac

SEQ ID NO: 1857047 - DNA, 25 bp, Homo sapien
cactgcttgttgcactggatgctgg

SEQ ID NO: 1857048 - DNA, 25 bp, Homo sapien
ggcactgcttgttgcactggatgct

SEQ ID NO: 1857049 - DNA, 25 bp, Homo sapien
gcttgttgcactggatgctggctgc

SEQ ID NO: 1857050 - DNA, 25 bp, Homo sapien
actgcttgttgcactggatgctggc

SEQ ID NO: 1857051 - DNA, 25 bp, Homo sapien
caaaaccatcgattatctgctgcaa

SEQ ID NO: 1857052 - DNA, 25 bp, Homo sapien
aaaaccatcgattatctgctgcaag

SEQ ID NO: 1857053 - DNA, 25 bp, Homo sapien
catggggttattgctttgcaggtta

SEQ ID NO: 1857054 - DNA, 25 bp, Homo sapien
tcatggggttattgctttgcaggtt

SEQ ID NO: 1857055 - DNA, 25 bp, Homo sapien
cattcgtggaagtcagccgggtcca

SEQ ID NO: 1857056 - DNA, 25 bp, Homo sapien
tcctccacggccttgctgggtatag

SEQ ID NO: 1857057 - DNA, 25 bp, Homo sapien
tatagtcacggatttctggctggcg

SEQ ID NO: 1857058 - DNA, 25 bp, Homo sapien
gctgtctccacgtccacagggaaca

SEQ ID NO: 1857059 - DNA, 25 bp, Homo sapien
ctcagtggcagggatctctgtcctt

SEQ ID NO: 1857060 - DNA, 25 bp, Homo sapien
tgctgcctcagtggcagggatctct

SEQ ID NO: 1857061 - DNA, 25 bp, Homo sapien
tctctgtccttggttctggtgccat

SEQ ID NO: 1857062 - DNA, 25 bp, Homo sapien
gatctctgtccttggttctggtgcc

SEQ ID NO: 1857063 - DNA, 25 bp, Homo sapien
tgaggaacagatactcttgtgtcac

SEQ ID NO: 1857064 - DNA, 25 bp, Homo sapien
ccccatggtgcgacagcaggttcaa

SEQ ID NO: 1857065 - DNA, 25 bp, Homo sapien
tcatagaatgacaggacacagggtt

SEQ ID NO: 1857066 - DNA, 25 bp, Homo sapien
caagggagccgactgtctgtctaca

SEQ ID NO: 1857067 - DNA, 25 bp, Homo sapien
tgagctatacagaaggcagagcctc

SEQ ID NO: 1857068 - DNA, 25 bp, Homo sapien
ggactttcaaccttaggacttgtga

SEQ ID NO: 1857069 - DNA, 25 bp, Homo sapien
tttcaaccttaggacttgtgatgtt

SEQ ID NO: 1857070 - DNA, 25 bp, Homo sapien
actttcaaccttaggacttgtgatg

SEQ ID NO: 1857071 - DNA, 25 bp, Homo sapien
ctggactttcaaccttaggacttgt

SEQ ID NO: 1857072 - DNA, 25 bp, Homo sapien
catgctacattgccattgtcttccc

SEQ ID NO: 1857073 - DNA, 25 bp, Homo sapien
caaactggtagagtctcctggcgcg

SEQ ID NO: 1857074 - DNA, 25 bp, Homo sapien
tagctaagctaacgtcaaactggta

SEQ ID NO: 1857075 - DNA, 25 bp, Homo sapien
gcaattgtagtggtctcttaggccc

SEQ ID NO: 1857076 - DNA, 25 bp, Homo sapien
cctgtccagcttagaggagtgagcc

SEQ ID NO: 1857077 - DNA, 25 bp, Homo sapien
agcttgctgagggaggagtccgaga

SEQ ID NO: 1857078 - DNA, 25 bp, Homo sapien
tcttaaagctggggtggcgcctgat

SEQ ID NO: 1857079 - DNA, 25 bp, Homo sapien
tgagggaggagtccgagaactcgta

SEQ ID NO: 1857080 - DNA, 25 bp, Homo sapien
acctcttaaagctggggtggcgcct

SEQ ID NO: 1857081 - DNA, 25 bp, Homo sapien
agtgccacaagcttctggatgatga

SEQ ID NO: 1857082 - DNA, 25 bp, Homo sapien
gccacaagcttctggatgatgatct

SEQ ID NO: 1857083 - DNA, 25 bp, Homo sapien
cccagttggccatccacttcttgga

SEQ ID NO: 1857084 - DNA, 25 bp, Homo sapien
tggagaagtgccacaagcttctgga

SEQ ID NO: 1857085 - DNA, 25 bp, Homo sapien
acatgctccactcagctgaggtgcc

SEQ ID NO: 1857086 - DNA, 25 bp, Homo sapien
tagattcacatgctccactcagctg

SEQ ID NO: 1857087 - DNA, 25 bp, Homo sapien
gggtgcttctgagatcacaactggc

SEQ ID NO: 1857088 - DNA, 25 bp, Homo sapien
ccttctggcgtgtggcctctagcct

SEQ ID NO: 1857089 - DNA, 25 bp, Homo sapien
tggaggtggagggccgatggccacc

SEQ ID NO: 1857090 - DNA, 25 bp, Homo sapien
tggagggccgatggccaccaacaca

SEQ ID NO: 1857091 - DNA, 25 bp, Homo sapien
agaaagctgggcctcttgggtcgtc

SEQ ID NO: 1857092 - DNA, 25 bp, Homo sapien
agctgggcctcttgggtcgtcgggc

SEQ ID NO: 1857093 - DNA, 25 bp, Homo sapien
tttcttatggtaaaacgctctcctg

SEQ ID NO: 1857094 - DNA, 25 bp, Homo sapien
taaaacgctctcctgaagctcgacc

SEQ ID NO: 1857095 - DNA, 25 bp, Homo sapien
tatggtaaaacgctctcctgaagct

SEQ ID NO: 1857096 - DNA, 25 bp, Homo sapien
cctgaagctcgaccttttttcttga

SEQ ID NO: 1857097 - DNA, 25 bp, Homo sapien
gcatcttggagcatggaaatgatct

SEQ ID NO: 1857098 - DNA, 25 bp, Homo sapien
tggagcatggaaatgatcttctgaa

SEQ ID NO: 1857099 - DNA, 25 bp, Homo sapien
tcttggagcatggaaatgatcttct

SEQ ID NO: 1857100 - DNA, 25 bp, Homo sapien
ttctgcatcttggagcatggaaatg

SEQ ID NO: 1857101 - DNA, 25 bp, Homo sapien
gaagcacggagggacctggagcccc

SEQ ID NO: 1857102 - DNA, 25 bp, Homo sapien
aggctctgtccagcggaagctcctc

SEQ ID NO: 1857103 - DNA, 25 bp, Homo sapien
gaggctctgtccagcggaagctcct

SEQ ID NO: 1857104 - DNA, 25 bp, Homo sapien
tccgaggctctgtccagcggaagct

SEQ ID NO: 1857105 - DNA, 25 bp, Homo sapien
tggaaggccgatggccgctgacaca

SEQ ID NO: 1857106 - DNA, 25 bp, Homo sapien
gctggagatggaaggccgatggccg

SEQ ID NO: 1857107 - DNA, 25 bp, Homo sapien
ttggcctcctcggagccgtgtttct

SEQ ID NO: 1857108 - DNA, 25 bp, Homo sapien
ggcctcctcggagccgtgtttcttg

SEQ ID NO: 1857109 - DNA, 25 bp, Homo sapien
ctgggtttggcagggccacccccag

SEQ ID NO: 1857110 - DNA, 25 bp, Homo sapien
tcttcccactggtctcccactcttt

SEQ ID NO: 1857111 - DNA, 25 bp, Homo sapien
cactatcatctgaatgatagcatcc

SEQ ID NO: 1857112 - DNA, 25 bp, Homo sapien
ttttgagcaattccactatcatctg

SEQ ID NO: 1857113 - DNA, 25 bp, Homo sapien
ccactcttttgagcaattccactat

SEQ ID NO: 1857114 - DNA, 25 bp, Homo sapien
aaaggtcactagagattccgactca

SEQ ID NO: 1857115 - DNA, 25 bp, Homo sapien
aaggtcactagagattccgactcac

SEQ ID NO: 1857116 - DNA, 25 bp, Homo sapien
aaggactggtgatcagaatcttccc

SEQ ID NO: 1857117 - DNA, 25 bp, Homo sapien
gactggtgatcagaatcttccccac

SEQ ID NO: 1857118 - DNA, 25 bp, Homo sapien
ggactggtgatcagaatcttcccca

SEQ ID NO: 1857119 - DNA, 25 bp, Homo sapien
ggaaggactggtgatcagaatcttc

SEQ ID NO: 1857120 - DNA, 25 bp, Homo sapien
ctccccggagcgcaaggcagcagct

SEQ ID NO: 1857121 - DNA, 25 bp, Homo sapien
ccttagtcacctcggccgcgtgttt

SEQ ID NO: 1857122 - DNA, 25 bp, Homo sapien
acctcggccgcgtgtttcttgtgac

SEQ ID NO: 1857123 - DNA, 25 bp, Homo sapien
gctgccttagtcacctcggccgcgt

SEQ ID NO: 1857124 - DNA, 25 bp, Homo sapien
actggtcgtccagtgaagcgccttc

SEQ ID NO: 1857125 - DNA, 25 bp, Homo sapien
gaatgtctggcccaatcactggtcg

SEQ ID NO: 1857126 - DNA, 25 bp, Homo sapien
gggcccgtcctcacgaagaagttca

SEQ ID NO: 1857127 - DNA, 25 bp, Homo sapien
tggtgtcttgcgaaggcctctgctc

SEQ ID NO: 1857128 - DNA, 25 bp, Homo sapien
gcctgcggcctgtccagagacctgg

SEQ ID NO: 1857129 - DNA, 25 bp, Homo sapien
gccaatggcagtcccacgactccga

SEQ ID NO: 1857130 - DNA, 25 bp, Homo sapien
gctttcttctccgccaggggcctcc

SEQ ID NO: 1857131 - DNA, 25 bp, Homo sapien
ggcagtcccacgactccgagccttt

SEQ ID NO: 1857132 - DNA, 25 bp, Homo sapien
ctgggatcttcagacaagaggtctc

SEQ ID NO: 1857133 - DNA, 25 bp, Homo sapien
tgtgttaggctctgctccctgtcag

SEQ ID NO: 1857134 - DNA, 25 bp, Homo sapien
gagaagatgccactactttggtgct

SEQ ID NO: 1857135 - DNA, 25 bp, Homo sapien
tccctgtcagctggaagttgtgtcc

SEQ ID NO: 1857136 - DNA, 25 bp, Homo sapien
actggctttgatcatcctgactgac

SEQ ID NO: 1857137 - DNA, 25 bp, Homo sapien
cactggctttgatcatcctgactga

SEQ ID NO: 1857138 - DNA, 25 bp, Homo sapien
ggctttgatcatcctgactgaccca

SEQ ID NO: 1857139 - DNA, 25 bp, Homo sapien
agcactggctttgatcatcctgact

SEQ ID NO: 1857140 - DNA, 25 bp, Homo sapien
tttgaacgcagattcaccagctcag

SEQ ID NO: 1857141 - DNA, 25 bp, Homo sapien
taccagagcatccagttctaaccca

SEQ ID NO: 1857142 - DNA, 25 bp, Homo sapien
ggcagaaaacttgaataccagagca

SEQ ID NO: 1857143 - DNA, 25 bp, Homo sapien
acctggcagcctagtgggagaatga

SEQ ID NO: 1857144 - DNA, 25 bp, Homo sapien
gttatatttaagacacaatggccta

SEQ ID NO: 1857145 - DNA, 25 bp, Homo sapien
accaatctttgttgagtactatagc

SEQ ID NO: 1857146 - DNA, 25 bp, Homo sapien
cttatgccattaccaatctttgttg

SEQ ID NO: 1857147 - DNA, 25 bp, Homo sapien
tggacacccattgtcccaacactat

SEQ ID NO: 1857148 - DNA, 25 bp, Homo sapien
ctggaaactccatatgaatatgaag

SEQ ID NO: 1857149 - DNA, 25 bp, Homo sapien
actggaaactccatatgaatatgaa

SEQ ID NO: 1857150 - DNA, 25 bp, Homo sapien
actggaagaagtgatctaggaatcc

SEQ ID NO: 1857151 - DNA, 25 bp, Homo sapien
gaagtgatctaggaatccatcctcc

SEQ ID NO: 1857152 - DNA, 25 bp, Homo sapien
gaagaagtgatctaggaatccatcc

SEQ ID NO: 1857153 - DNA, 25 bp, Homo sapien
tgatctaggaatccatcctcctgct

SEQ ID NO: 1857154 - DNA, 25 bp, Homo sapien
tgccttcatgggagactcggtccct

SEQ ID NO: 1857155 - DNA, 25 bp, Homo sapien
ctgggtgctctatcggtgcctggct

SEQ ID NO: 1857156 - DNA, 25 bp, Homo sapien
tcatttagccccaggattgccctgc

SEQ ID NO: 1857157 - DNA, 25 bp, Homo sapien
tcagtgagggacttcattcccttca

SEQ ID NO: 1857158 - DNA, 25 bp, Homo sapien
tcctggaccatctttcccggagtct

SEQ ID NO: 1857159 - DNA, 25 bp, Homo sapien
tgtcctggaccatctttcccggagt

SEQ ID NO: 1857160 - DNA, 25 bp, Homo sapien
tggaccatctttcccggagtcttta

SEQ ID NO: 1857161 - DNA, 25 bp, Homo sapien
catctttcccggagtctttagaaat

SEQ ID NO: 1857162 - DNA, 25 bp, Homo sapien
gatattaagcttataatagtggcgc

SEQ ID NO: 1857163 - DNA, 25 bp, Homo sapien
ttctgccccggttccttcttaatga

SEQ ID NO: 1857164 - DNA, 25 bp, Homo sapien
tggcgcagggcacgagacatcttct

SEQ ID NO: 1857165 - DNA, 25 bp, Homo sapien
cacgagacatcttctcgtaggtcat

SEQ ID NO: 1857166 - DNA, 25 bp, Homo sapien
catttggatccacaactcggaagat

SEQ ID NO: 1857167 - DNA, 25 bp, Homo sapien
gtcttcccacttgatgtagggctca

SEQ ID NO: 1857168 - DNA, 25 bp, Homo sapien
cagagtctggcgagcccatttggat

SEQ ID NO: 1857169 - DNA, 25 bp, Homo sapien
tcatatcgggtatcaaggagcagct

SEQ ID NO: 1857170 - DNA, 25 bp, Homo sapien
tgcaggcagcgcagctttactggag

SEQ ID NO: 1857171 - DNA, 25 bp, Homo sapien
ctgcaatttagcacagggagtgcag

SEQ ID NO: 1857172 - DNA, 25 bp, Homo sapien
gccccttcgggtgtccatctgagag

SEQ ID NO: 1857173 - DNA, 25 bp, Homo sapien
tctgcacagtgacataagttgaggg

SEQ ID NO: 1857174 - DNA, 25 bp, Homo sapien
cagggtcatccaggtggccgaagtt

SEQ ID NO: 1857175 - DNA, 25 bp, Homo sapien
gatcctgccgtcaatgggggcctgc

SEQ ID NO: 1857176 - DNA, 25 bp, Homo sapien
gggtcttgatgtactggagcagctc

SEQ ID NO: 1857177 - DNA, 25 bp, Homo sapien
gctcgccgctgggtcttgatgtact

SEQ ID NO: 1857178 - DNA, 25 bp, Homo sapien
cagcctgaagatccctccaaaaaag

SEQ ID NO: 1857179 - DNA, 25 bp, Homo sapien
tggagcagctcatacaggacgtcac

SEQ ID NO: 1857180 - DNA, 25 bp, Homo sapien
ttagaggaaagcctgtgcgtttccc

SEQ ID NO: 1857181 - DNA, 25 bp, Homo sapien
cccgcttagaggaaagcctgtgcgt

SEQ ID NO: 1857182 - DNA, 25 bp, Homo sapien
aggaaagcctgtgcgtttccctgac

SEQ ID NO: 1857183 - DNA, 25 bp, Homo sapien
gttcccgcttagaggaaagcctgtg

SEQ ID NO: 1857184 - DNA, 25 bp, Homo sapien
ggatgcagagggcgcgtccgttcat

SEQ ID NO: 1857185 - DNA, 25 bp, Homo sapien
ctcgaacccgtgctccgcggtgcat

SEQ ID NO: 1857186 - DNA, 25 bp, Homo sapien
ggcagagagtactcctgctctgccc

SEQ ID NO: 1857187 - DNA, 25 bp, Homo sapien
agcgcagccagtgcagcacgtcctc

SEQ ID NO: 1857188 - DNA, 25 bp, Homo sapien
cgacggcacacagggaacgttcact

SEQ ID NO: 1857189 - DNA, 25 bp, Homo sapien
accaataactctaacgatagtcctc

SEQ ID NO: 1857190 - DNA, 25 bp, Homo sapien
actctaacgatagtcctcccgacgg

SEQ ID NO: 1857191 - DNA, 25 bp, Homo sapien
taacgatagtcctcccgacggcaca

SEQ ID NO: 1857192 - DNA, 25 bp, Homo sapien
cagttctgaaaatggtcctagagtc

SEQ ID NO: 1857193 - DNA, 25 bp, Homo sapien
gcccagttctgaaaatggtcctaga

SEQ ID NO: 1857194 - DNA, 25 bp, Homo sapien
cagcccagttctgaaaatggtccta

SEQ ID NO: 1857195 - DNA, 25 bp, Homo sapien
gttctgaaaatggtcctagagtctg

SEQ ID NO: 1857196 - DNA, 25 bp, Homo sapien
gaggtgagaatcctcttttgttccc

SEQ ID NO: 1857197 - DNA, 25 bp, Homo sapien
ccatacagggaagcatagttgtgaa

SEQ ID NO: 1857198 - DNA, 25 bp, Homo sapien
tagttgtgaatctccgtgaatccca

SEQ ID NO: 1857199 - DNA, 25 bp, Homo sapien
caaccctggacatcacggttgtcct

SEQ ID NO: 1857200 - DNA, 25 bp, Homo sapien
tggcagcttgcagatccccccttca

SEQ ID NO: 1857201 - DNA, 25 bp, Homo sapien
ggagtcttcctggcagcttgcagat

SEQ ID NO: 1857202 - DNA, 25 bp, Homo sapien
agtcttcctggcagcttgcagatcc

SEQ ID NO: 1857203 - DNA, 25 bp, Homo sapien
tcttcctggcagcttgcagatcccc

SEQ ID NO: 1857204 - DNA, 25 bp, Homo sapien
cttcacatctggcttgcacgtgggt

SEQ ID NO: 1857205 - DNA, 25 bp, Homo sapien
tcacatctggcttgcacgtgggtgc

SEQ ID NO: 1857206 - DNA, 25 bp, Homo sapien
ccagcaggttaatttgagcttcaca

SEQ ID NO: 1857207 - DNA, 25 bp, Homo sapien
gcaggttaatttgagcttcacatct

SEQ ID NO: 1857208 - DNA, 25 bp, Homo sapien
ctgccacagggcttataggagaaat

SEQ ID NO: 1857209 - DNA, 25 bp, Homo sapien
tataggagaaatagccaattctccc

SEQ ID NO: 1857210 - DNA, 25 bp, Homo sapien
gctgccacagggcttataggagaaa

SEQ ID NO: 1857211 - DNA, 25 bp, Homo sapien
cagggcttataggagaaatagccaa

SEQ ID NO: 1857212 - DNA, 25 bp, Homo sapien
gatccgaggagagatatctgccgag

SEQ ID NO: 1857213 - DNA, 25 bp, Homo sapien
cctttccgggtcgttctcacttcat

SEQ ID NO: 1857214 - DNA, 25 bp, Homo sapien
ggatcggagccagcaaagcaaactc

SEQ ID NO: 1857215 - DNA, 25 bp, Homo sapien
gtttcccaagtaatcagacctcagg

SEQ ID NO: 1857216 - DNA, 25 bp, Homo sapien
atgccttcagagctgtgtatgacac

SEQ ID NO: 1857217 - DNA, 25 bp, Homo sapien
ccttcagagctgtgtatgacaccga

SEQ ID NO: 1857218 - DNA, 25 bp, Homo sapien
tcagagctgtgtatgacaccgagag

SEQ ID NO: 1857219 - DNA, 25 bp, Homo sapien
ctgtgtatgacaccgagagagtcag

SEQ ID NO: 1857220 - DNA, 25 bp, Homo sapien
tgaactcggaaccaactgcgtctct

SEQ ID NO: 1857221 - DNA, 25 bp, Homo sapien
gaaagagcgggatgcggttccactt

SEQ ID NO: 1857222 - DNA, 25 bp, Homo sapien
tctctttcgagaagcgccaaggcgt

SEQ ID NO: 1857223 - DNA, 25 bp, Homo sapien
taacctggctccgagaactggaagg

SEQ ID NO: 1857224 - DNA, 25 bp, Homo sapien
gaaggaccctgtgagtctccgcaca

SEQ ID NO: 1857225 - DNA, 25 bp, Homo sapien
ggaccctgtgagtctccgcacatag

SEQ ID NO: 1857226 - DNA, 25 bp, Homo sapien
agtctccgcacataggataggaagg

SEQ ID NO: 1857227 - DNA, 25 bp, Homo sapien
tgtgagtctccgcacataggatagg

SEQ ID NO: 1857228 - DNA, 25 bp, Homo sapien
gagcagggccagactactcggagat

SEQ ID NO: 1857229 - DNA, 25 bp, Homo sapien
cccgatactgtctcggcctgccgtt

SEQ ID NO: 1857230 - DNA, 25 bp, Homo sapien
gatcccgactgacaccttttcctgg

SEQ ID NO: 1857231 - DNA, 25 bp, Homo sapien
tgctccggggttggtgcctgcccac

SEQ ID NO: 1857232 - DNA, 25 bp, Homo sapien
gagacaaatggctcgtgaacccgca

SEQ ID NO: 1857233 - DNA, 25 bp, Homo sapien
gaaagataccttcgagcagggtcga

SEQ ID NO: 1857234 - DNA, 25 bp, Homo sapien
tgaaatacattccacaggcaaaggg

SEQ ID NO: 1857235 - DNA, 25 bp, Homo sapien
gacatgagtgacaagagtggagcca

SEQ ID NO: 1857236 - DNA, 25 bp, Homo sapien
ttacagcaaatggttgttccagaaa

SEQ ID NO: 1857237 - DNA, 25 bp, Homo sapien
aaaatgcagcaacacctgaactctt

SEQ ID NO: 1857238 - DNA, 25 bp, Homo sapien
tacagcaaatggttgttccagaaaa

SEQ ID NO: 1857239 - DNA, 25 bp, Homo sapien
ttccagaaaaaatgcagcaacacct

SEQ ID NO: 1857240 - DNA, 25 bp, Homo sapien
agaagacaaaatgatctagtgcatc

SEQ ID NO: 1857241 - DNA, 25 bp, Homo sapien
gacaaaatgatctagtgcatctctg

SEQ ID NO: 1857242 - DNA, 25 bp, Homo sapien
gaagacaaaatgatctagtgcatct

SEQ ID NO: 1857243 - DNA, 25 bp, Homo sapien
aagacaaaatgatctagtgcatctc

SEQ ID NO: 1857244 - DNA, 25 bp, Homo sapien
ccctggctggggaaactgaagcctc

SEQ ID NO: 1857245 - DNA, 25 bp, Homo sapien
ctggctggggaaactgaagcctcac

SEQ ID NO: 1857246 - DNA, 25 bp, Homo sapien
ctgacaggccctggctggggaaact

SEQ ID NO: 1857247 - DNA, 25 bp, Homo sapien
ggccctggctggggaaactgaagcc

SEQ ID NO: 1857248 - DNA, 25 bp, Homo sapien
tcgaaccatcctatgatcaatgttg

SEQ ID NO: 1857249 - DNA, 25 bp, Homo sapien
gaaccatcctatgatcaatgttgtc

SEQ ID NO: 1857250 - DNA, 25 bp, Homo sapien
ctctcgaaccatcctatgatcaatg

SEQ ID NO: 1857251 - DNA, 25 bp, Homo sapien
catcctatgatcaatgttgtcccca

SEQ ID NO: 1857252 - DNA, 25 bp, Homo sapien
cttgggctgagaaagtagattatga

SEQ ID NO: 1857253 - DNA, 25 bp, Homo sapien
ttgggctgagaaagtagattatgat

SEQ ID NO: 1857254 - DNA, 25 bp, Homo sapien
tactgtgccgccaatcactcaagtg

SEQ ID NO: 1857255 - DNA, 25 bp, Homo sapien
caaccacggatcacgtatacaatgg

SEQ ID NO: 1857256 - DNA, 25 bp, Homo sapien
tttggataacatttgaagcacaggg

SEQ ID NO: 1857257 - DNA, 25 bp, Homo sapien
ccatgggtcgcataactgtgtttca

SEQ ID NO: 1857258 - DNA, 25 bp, Homo sapien
aaaggcagccacctacacagagtga

SEQ ID NO: 1857259 - DNA, 25 bp, Homo sapien
cattgggcaactagtgagaaccact

SEQ ID NO: 1857260 - DNA, 25 bp, Homo sapien
acttctgctgagtggaaaaggcagc

SEQ ID NO: 1857261 - DNA, 25 bp, Homo sapien
tcattcaacaaatagagggctttct

SEQ ID NO: 1857262 - DNA, 25 bp, Homo sapien
ggtcatgtatgccttctgaaaactg

SEQ ID NO: 1857263 - DNA, 25 bp, Homo sapien
gcaacaatgtgttactttgggagat

SEQ ID NO: 1857264 - DNA, 25 bp, Homo sapien
ggagctgacaagttgggtcatgtat

SEQ ID NO: 1857265 - DNA, 25 bp, Homo sapien
taaccacagtgatttgcaacaatgt

SEQ ID NO: 1857266 - DNA, 25 bp, Homo sapien
catgcccggccgcattatgacttgt

SEQ ID NO: 1857267 - DNA, 25 bp, Homo sapien
ccggccgcattatgacttgttgtct

SEQ ID NO: 1857268 - DNA, 25 bp, Homo sapien
tctacctcctaaatctaccttctat

SEQ ID NO: 1857269 - DNA, 25 bp, Homo sapien
cgcattatgacttgttgtcttcctg

SEQ ID NO: 1857270 - DNA, 25 bp, Homo sapien
ttccaagtatgttgagccctcttta

SEQ ID NO: 1857271 - DNA, 25 bp, Homo sapien
ccaagtatgttgagccctctttatt

SEQ ID NO: 1857272 - DNA, 25 bp, Homo sapien
ttcatgcttgagttaataaattgca

SEQ ID NO: 1857273 - DNA, 25 bp, Homo sapien
ttttcatgcttgagttaataaattg

SEQ ID NO: 1857274 - DNA, 25 bp, Homo sapien
ccagaatgtatatccagggtagtga

SEQ ID NO: 1857275 - DNA, 25 bp, Homo sapien
gggtagtgactttcgagcaaatgcg

SEQ ID NO: 1857276 - DNA, 25 bp, Homo sapien
aagcattagccgtcctggcgctgca

SEQ ID NO: 1857277 - DNA, 25 bp, Homo sapien
tgcacgagcgtattctacaattccg

SEQ ID NO: 1857278 - DNA, 25 bp, Homo sapien
taataattgagagggtatgcgcaac

SEQ ID NO: 1857279 - DNA, 25 bp, Homo sapien
caactcagaaaagtgcgcccgctga

SEQ ID NO: 1857280 - DNA, 25 bp, Homo sapien
aaggcgacacccatttacggtgcgg

SEQ ID NO: 1857281 - DNA, 25 bp, Homo sapien
tcttaacgtgaagcgctgggtgact

SEQ ID NO: 1857282 - DNA, 25 bp, Homo sapien
ccattgatgctaaatttggtgcaga

SEQ ID NO: 1857283 - DNA, 25 bp, Homo sapien
aggtcaccattgatgctaaatttgg

SEQ ID NO: 1857284 - DNA, 25 bp, Homo sapien
gcccaggctgaagcatagtagctat

SEQ ID NO: 1857285 - DNA, 25 bp, Homo sapien
tttgacttgcctgtttccagcctgg

SEQ ID NO: 1857286 - DNA, 25 bp, Homo sapien
tagtgatctaggtaaatatcttgtt

SEQ ID NO: 1857287 - DNA, 25 bp, Homo sapien
aataattgattaggagaaattgcaa

SEQ ID NO: 1857288 - DNA, 25 bp, Homo sapien
agtgatctaggtaaatatcttgttt

SEQ ID NO: 1857289 - DNA, 25 bp, Homo sapien
gatattgaatttatttaagggaata

SEQ ID NO: 1857290 - DNA, 25 bp, Homo sapien
gaagcatgaactggcttgctggatg

SEQ ID NO: 1857291 - DNA, 25 bp, Homo sapien
tgcttcacagctgtatattctgggt

SEQ ID NO: 1857292 - DNA, 25 bp, Homo sapien
catgggaggcctgtgaaataaataa

SEQ ID NO: 1857293 - DNA, 25 bp, Homo sapien
caaaatatgggccttcatgggaggc

SEQ ID NO: 1857294 - DNA, 25 bp, Homo sapien
gatacctaccctgctaaactccaag

SEQ ID NO: 1857295 - DNA, 25 bp, Homo sapien
caagagatcttttcgagtgcaacaa

SEQ ID NO: 1857296 - DNA, 25 bp, Homo sapien
aattaaactgattttggagccctgg

SEQ ID NO: 1857297 - DNA, 25 bp, Homo sapien
caagaagcaggctcagtcaagctta

SEQ ID NO: 1857298 - DNA, 25 bp, Homo sapien
gagggcaagctggtaaaagcctaat

SEQ ID NO: 1857299 - DNA, 25 bp, Homo sapien
tgctcctctacaaattcactctaag

SEQ ID NO: 1857300 - DNA, 25 bp, Homo sapien
ccagtatagtaaaatgagccccaca

SEQ ID NO: 1857301 - DNA, 25 bp, Homo sapien
gttttcagagtttcacaggtcaaag

SEQ ID NO: 1857302 - DNA, 25 bp, Homo sapien
gacaccaatcggatgctcattagag

SEQ ID NO: 1857303 - DNA, 25 bp, Homo sapien
caaatcaggccagttgggttatcct

SEQ ID NO: 1857304 - DNA, 25 bp, Homo sapien
tgtccaggagaccttagatatggct

SEQ ID NO: 1857305 - DNA, 25 bp, Homo sapien
cctggcttggaatctggtgtgaaac

SEQ ID NO: 1857306 - DNA, 25 bp, Homo sapien
taagtgtaaaccatgccacagctaa

SEQ ID NO: 1857307 - DNA, 25 bp, Homo sapien
gtagacttccatgccattacaaagg

SEQ ID NO: 1857308 - DNA, 25 bp, Homo sapien
gtatggcatatacttgacactgtcc

SEQ ID NO: 1857309 - DNA, 25 bp, Homo sapien
ggtgtggccttgaccttaccagtac

SEQ ID NO: 1857310 - DNA, 25 bp, Homo sapien
taagtgcctaaataagcaagccagg

SEQ ID NO: 1857311 - DNA, 25 bp, Homo sapien
cccaggaaggttagatgtgtttgca

SEQ ID NO: 1857312 - DNA, 25 bp, Homo sapien
tagccagagaaatcggcaagccaag

SEQ ID NO: 1857313 - DNA, 25 bp, Homo sapien
ccttcagagttggttcctggccaga

SEQ ID NO: 1857314 - DNA, 25 bp, Homo sapien
caggatagctgtttatggccgacgt

SEQ ID NO: 1857315 - DNA, 25 bp, Homo sapien
gagagacccaatccgcctaagttgc

SEQ ID NO: 1857316 - DNA, 25 bp, Homo sapien
gactttctgggccttctaagagcaa

SEQ ID NO: 1857317 - DNA, 25 bp, Homo sapien
caggtattgctagtccacggcaaga

SEQ ID NO: 1857318 - DNA, 25 bp, Homo sapien
ccctcaaagcgcttgtacgtgtaat

SEQ ID NO: 1857319 - DNA, 25 bp, Homo sapien
tgttcttgtagtcagtctcaggatg

SEQ ID NO: 1857320 - DNA, 25 bp, Homo sapien
ctttcatgtaggaaggtattgcccc

SEQ ID NO: 1857321 - DNA, 25 bp, Homo sapien
tacgtgtaattgatgaagacccagt

SEQ ID NO: 1857322 - DNA, 25 bp, Homo sapien
actgccttgcctccaatggactgct

SEQ ID NO: 1857323 - DNA, 25 bp, Homo sapien
gactgctcacggtgctgaagacagg

SEQ ID NO: 1857324 - DNA, 25 bp, Homo sapien
tgcctccaatggactgctcacggtg

SEQ ID NO: 1857325 - DNA, 25 bp, Homo sapien
caatggactgctcacggtgctgaag

SEQ ID NO: 1857326 - DNA, 25 bp, Homo sapien
agttgagcagtctaaacatgggagc

SEQ ID NO: 1857327 - DNA, 25 bp, Homo sapien
ttgtaaacatcatcccaaaattggg

SEQ ID NO: 1857328 - DNA, 25 bp, Homo sapien
gtgacttactcacccagttgagcag

SEQ ID NO: 1857329 - DNA, 25 bp, Homo sapien
gcgcctggcctcactctatgaattt

SEQ ID NO: 1857330 - DNA, 25 bp, Homo sapien
tctggaaactcatcgaagtttgagg

SEQ ID NO: 1857331 - DNA, 25 bp, Homo sapien
atcagattctggaaactcatcgaag

SEQ ID NO: 1857332 - DNA, 25 bp, Homo sapien
tcaatagatattgcagcaggtctct

SEQ ID NO: 1857333 - DNA, 25 bp, Homo sapien
cgaagtttgaggtatcatcaatgct

SEQ ID NO: 1857334 - DNA, 25 bp, Homo sapien
tgccaagaatacacatgccaaaaat

SEQ ID NO: 1857335 - DNA, 25 bp, Homo sapien
gccaagaatacacatgccaaaaatt

SEQ ID NO: 1857336 - DNA, 25 bp, Homo sapien
ccaagaatacacatgccaaaaatta

SEQ ID NO: 1857337 - DNA, 25 bp, Homo sapien
ctgccaagaatacacatgccaaaaa

SEQ ID NO: 1857338 - DNA, 25 bp, Homo sapien
tatattccatgacacacggctgaca

SEQ ID NO: 1857339 - DNA, 25 bp, Homo sapien
gaacctctaaatgtccccttgtgta

SEQ ID NO: 1857340 - DNA, 25 bp, Homo sapien
gggtaatacgcttcctagatgctcc

SEQ ID NO: 1857341 - DNA, 25 bp, Homo sapien
tacagcaggtggtctaggctctcac

SEQ ID NO: 1857342 - DNA, 25 bp, Homo sapien
cagtcaacgccttcaaaaaaagagt

SEQ ID NO: 1857343 - DNA, 25 bp, Homo sapien
tgttcccagtcaacgccttcaaaaa

SEQ ID NO: 1857344 - DNA, 25 bp, Homo sapien
ctgatatgttcccagtcaacgcctt

SEQ ID NO: 1857345 - DNA, 25 bp, Homo sapien
gatatgttcccagtcaacgccttca

SEQ ID NO: 1857346 - DNA, 25 bp, Homo sapien
ttgaggggtctcagaacagaaaggt

SEQ ID NO: 1857347 - DNA, 25 bp, Homo sapien
tatgtctcttgaggggtctcagaac

SEQ ID NO: 1857348 - DNA, 25 bp, Homo sapien
tctcttgaggggtctcagaacagaa

SEQ ID NO: 1857349 - DNA, 25 bp, Homo sapien
tcttatatgtctcttgaggggtctc

SEQ ID NO: 1857350 - DNA, 25 bp, Homo sapien
tgaagtgctctgcatacaacggata

SEQ ID NO: 1857351 - DNA, 25 bp, Homo sapien
gaaatcatgcctctggtaccactag

SEQ ID NO: 1857352 - DNA, 25 bp, Homo sapien
caattgcaggatgccagtaagccca

SEQ ID NO: 1857353 - DNA, 25 bp, Homo sapien
ggtttaagagatactaccacctcga

SEQ ID NO: 1857354 - DNA, 25 bp, Homo sapien
tctcatacatgatcaccccaagcga

SEQ ID NO: 1857355 - DNA, 25 bp, Homo sapien
agtcaggagtgcctactgtggagaa

SEQ ID NO: 1857356 - DNA, 25 bp, Homo sapien
agagcttgttgtacccggtctgcat

SEQ ID NO: 1857357 - DNA, 25 bp, Homo sapien
gtacccggtctgcatgaacacctca

SEQ ID NO: 1857358 - DNA, 25 bp, Homo sapien
aatggctttgcctgagaccgcagaa

SEQ ID NO: 1857359 - DNA, 25 bp, Homo sapien
tatgagtcactagggcgaaggcatc

SEQ ID NO: 1857360 - DNA, 25 bp, Homo sapien
aaattaaatatctggccgggagtgg

SEQ ID NO: 1857361 - DNA, 25 bp, Homo sapien
aaacatggaccacacatcagcgagg

SEQ ID NO: 1857362 - DNA, 25 bp, Homo sapien
taactagaatattgctgagccttgg

SEQ ID NO: 1857363 - DNA, 25 bp, Homo sapien
tgaatagccacgagttcaactgaag

SEQ ID NO: 1857364 - DNA, 25 bp, Homo sapien
tcacactgtcacaagtagctgttcg

SEQ ID NO: 1857365 - DNA, 25 bp, Homo sapien
taaacttgaggtatcttccatgtcc

SEQ ID NO: 1857366 - DNA, 25 bp, Homo sapien
taaaaccagaggtctactgccagag

SEQ ID NO: 1857367 - DNA, 25 bp, Homo sapien
aaactgacatgtggattaggccctc

SEQ ID NO: 1857368 - DNA, 25 bp, Homo sapien
ctagagtctgccactggagctcgct

SEQ ID NO: 1857369 - DNA, 25 bp, Homo sapien
gcatatactgtaaggtagggatcca

SEQ ID NO: 1857370 - DNA, 25 bp, Homo sapien
cttggtactagctgaatgggatcac

SEQ ID NO: 1857371 - DNA, 25 bp, Homo sapien
tacaatatgatttaagcagccgagg

SEQ ID NO: 1857372 - DNA, 25 bp, Homo sapien
cagccgaggaatgaagctaaagcct

SEQ ID NO: 1857373 - DNA, 25 bp, Homo sapien
gggcctaaggttatacaggacgaca

SEQ ID NO: 1857374 - DNA, 25 bp, Homo sapien
tatgtgggcaaacggaagtgctacc

SEQ ID NO: 1857375 - DNA, 25 bp, Homo sapien
tcaacatgttctgaagttccccaag

SEQ ID NO: 1857376 - DNA, 25 bp, Homo sapien
taaagagtcgcagagttcccaagga

SEQ ID NO: 1857377 - DNA, 25 bp, Homo sapien
ttctgtgggtggaacctggacatca

SEQ ID NO: 1857378 - DNA, 25 bp, Homo sapien
ctatttcttttccaggtttctgctt

SEQ ID NO: 1857379 - DNA, 25 bp, Homo sapien
tccaggtttctgctttccttttgga

SEQ ID NO: 1857380 - DNA, 25 bp, Homo sapien
cgtctatttcttttccaggtttctg

SEQ ID NO: 1857381 - DNA, 25 bp, Homo sapien
caggtttctgctttccttttggaat

SEQ ID NO: 1857382 - DNA, 25 bp, Homo sapien
tgtgcttttttcagtcctgtgcaaa

SEQ ID NO: 1857383 - DNA, 25 bp, Homo sapien
atgtgcttttttcagtcctgtgcaa

SEQ ID NO: 1857384 - DNA, 25 bp, Homo sapien
ttaataaatcgaggcgcaggactgc

SEQ ID NO: 1857385 - DNA, 25 bp, Homo sapien
tgtactaaatagttgcccgcagcac

SEQ ID NO: 1857386 - DNA, 25 bp, Homo sapien
gaggtatacggacaactggagcatg

SEQ ID NO: 1857387 - DNA, 25 bp, Homo sapien
gcccttaggagacccggagtagata

SEQ ID NO: 1857388 - DNA, 25 bp, Homo sapien
cagtaaacgtgcatagttcatgcca

SEQ ID NO: 1857389 - DNA, 25 bp, Homo sapien
gctcagatcagtaaacgtgcatagt

SEQ ID NO: 1857390 - DNA, 25 bp, Homo sapien
aacgtgcatagttcatgccaatgcc

SEQ ID NO: 1857391 - DNA, 25 bp, Homo sapien
agaggctgctcagatcagtaaacgt

SEQ ID NO: 1857392 - DNA, 25 bp, Homo sapien
tgctgtccaaaagaaggttgtctgg

SEQ ID NO: 1857393 - DNA, 25 bp, Homo sapien
ttgctgtccaaaagaaggttgtctg

SEQ ID NO: 1857394 - DNA, 25 bp, Homo sapien
ctgtccaaaagaaggttgtctggtt

SEQ ID NO: 1857395 - DNA, 25 bp, Homo sapien
cttgctgtccaaaagaaggttgtct

SEQ ID NO: 1857396 - DNA, 25 bp, Homo sapien
agttggtgaatagagtctatggcta

SEQ ID NO: 1857397 - DNA, 25 bp, Homo sapien
actgtttctgctatataaaactgag

SEQ ID NO: 1857398 - DNA, 25 bp, Homo sapien
taaaactgagtctcctcttctgtca

SEQ ID NO: 1857399 - DNA, 25 bp, Homo sapien
tctatggctaatactgtttctgcta

SEQ ID NO: 1857400 - DNA, 25 bp, Homo sapien
aagaagatacaaagccaccacacac

SEQ ID NO: 1857401 - DNA, 25 bp, Homo sapien
acaagaagatacaaagccaccacac

SEQ ID NO: 1857402 - DNA, 25 bp, Homo sapien
ggaaacaagaagatacaaagccacc

SEQ ID NO: 1857403 - DNA, 25 bp, Homo sapien
ctggaaacaagaagatacaaagcca

SEQ ID NO: 1857404 - DNA, 25 bp, Homo sapien
gattcagtttagacctcacataaag

SEQ ID NO: 1857405 - DNA, 25 bp, Homo sapien
ggtcctaactcaacagtgagaaatg

SEQ ID NO: 1857406 - DNA, 25 bp, Homo sapien
aacacagtatcagtattctagcagt

SEQ ID NO: 1857407 - DNA, 25 bp, Homo sapien
tggacactagtaccctttatgtaac

SEQ ID NO: 1857408 - DNA, 25 bp, Homo sapien
catgattaggtagaggtttagctta

SEQ ID NO: 1857409 - DNA, 25 bp, Homo sapien
ttttcacaacccacaaactgtctgc

SEQ ID NO: 1857410 - DNA, 25 bp, Homo sapien
tctgcctccactagaatgtcacgct

SEQ ID NO: 1857411 - DNA, 25 bp, Homo sapien
tcacgctccgcacgaatgtggccaa

SEQ ID NO: 1857412 - DNA, 25 bp, Homo sapien
ttctatgctaactcttggaggccca

SEQ ID NO: 1857413 - DNA, 25 bp, Homo sapien
tctttagggagacaaggcactcttc

SEQ ID NO: 1857414 - DNA, 25 bp, Homo sapien
tgaccttaatacagaagcaaagctt

SEQ ID NO: 1857415 - DNA, 25 bp, Homo sapien
taacttgcttcaggcttctatgcta

SEQ ID NO: 1857416 - DNA, 25 bp, Homo sapien
tgctttacggagtattttcattgca

SEQ ID NO: 1857417 - DNA, 25 bp, Homo sapien
caagcatatctgctttacggagtat

SEQ ID NO: 1857418 - DNA, 25 bp, Homo sapien
cattgcatacacatgtcccgtatct

SEQ ID NO: 1857419 - DNA, 25 bp, Homo sapien
acacatgtcccgtatctttcttctg

SEQ ID NO: 1857420 - DNA, 25 bp, Homo sapien
ttaaacaccaacaccatctctggca

SEQ ID NO: 1857421 - DNA, 25 bp, Homo sapien
accaacaccatctctggcaaaacag

SEQ ID NO: 1857422 - DNA, 25 bp, Homo sapien
aaacaccaacaccatctctggcaaa

SEQ ID NO: 1857423 - DNA, 25 bp, Homo sapien
acaccaacaccatctctggcaaaac

SEQ ID NO: 1857424 - DNA, 25 bp, Homo sapien
agcatgtgctgatctccggagtcgt

SEQ ID NO: 1857425 - DNA, 25 bp, Homo sapien
tgcctattacttttaaggactcaaa

SEQ ID NO: 1857426 - DNA, 25 bp, Homo sapien
actctgtttccttccgagcatgtgc

SEQ ID NO: 1857427 - DNA, 25 bp, Homo sapien
caagtcttgttctcttcaaacgaag

SEQ ID NO: 1857428 - DNA, 25 bp, Homo sapien
ctcctcatcttttaggccttcttct

SEQ ID NO: 1857429 - DNA, 25 bp, Homo sapien
tcttccatcaccttttctaacttct

SEQ ID NO: 1857430 - DNA, 25 bp, Homo sapien
cctcatcttttaggccttcttcttc

SEQ ID NO: 1857431 - DNA, 25 bp, Homo sapien
catcaccttttctaacttcttttgt

SEQ ID NO: 1857432 - DNA, 25 bp, Homo sapien
aaggtgttgagcctgtcattgccat

SEQ ID NO: 1857433 - DNA, 25 bp, Homo sapien
cagtgtcactttggtcattgtcacc

SEQ ID NO: 1857434 - DNA, 25 bp, Homo sapien
catgttgagcgataaggttgctata

SEQ ID NO: 1857435 - DNA, 25 bp, Homo sapien
cctttgtgtggttactcatggatga

SEQ ID NO: 1857436 - DNA, 25 bp, Homo sapien
gtgtgcactctcctaccctattggt

SEQ ID NO: 1857437 - DNA, 25 bp, Homo sapien
taccatgcaacaaccagaaaaccag

SEQ ID NO: 1857438 - DNA, 25 bp, Homo sapien
ggagttagaatccacccagtgtgca

SEQ ID NO: 1857439 - DNA, 25 bp, Homo sapien
ctgtggctgcataggaaataccatg

SEQ ID NO: 1857440 - DNA, 25 bp, Homo sapien
tcttccataagcatatactgttacc

SEQ ID NO: 1857441 - DNA, 25 bp, Homo sapien
tctgacacagccttaaggtatttga

SEQ ID NO: 1857442 - DNA, 25 bp, Homo sapien
ggtaatctgatacatatatgctctg

SEQ ID NO: 1857443 - DNA, 25 bp, Homo sapien
gtagttaagatgacaggcaccagcc

SEQ ID NO: 1857444 - DNA, 25 bp, Homo sapien
gccatcacccccagctagtttttag

SEQ ID NO: 1857445 - DNA, 25 bp, Homo sapien
tcacccccagctagtttttagtaga

SEQ ID NO: 1857446 - DNA, 25 bp, Homo sapien
catcacccccagctagtttttagta

SEQ ID NO: 1857447 - DNA, 25 bp, Homo sapien
ctacagggacatgccatcaccccca

SEQ ID NO: 1857448 - DNA, 25 bp, Homo sapien
aaaatgtaacaatttgccagggcac

SEQ ID NO: 1857449 - DNA, 25 bp, Homo sapien
ctagaagccattggaggcctttgcc

SEQ ID NO: 1857450 - DNA, 25 bp, Homo sapien
tatattgcctggctaattcagaggc

SEQ ID NO: 1857451 - DNA, 25 bp, Homo sapien
gagatctggtctctctgccggccgt

SEQ ID NO: 1857452 - DNA, 25 bp, Homo sapien
cctcctcggtgcatttcaaacagaa

SEQ ID NO: 1857453 - DNA, 25 bp, Homo sapien
tcaaagggtggagacactcagggtc

SEQ ID NO: 1857454 - DNA, 25 bp, Homo sapien
tgaagcttatctgaagcccagtatc

SEQ ID NO: 1857455 - DNA, 25 bp, Homo sapien
gatttgaagcttatctgaagcccag

SEQ ID NO: 1857456 - DNA, 25 bp, Homo sapien
tttgaagcttatctgaagcccagta

SEQ ID NO: 1857457 - DNA, 25 bp, Homo sapien
tgatttgaagcttatctgaagccca

SEQ ID NO: 1857458 - DNA, 25 bp, Homo sapien
ctaagactaacggagaaaggagccg

SEQ ID NO: 1857459 - DNA, 25 bp, Homo sapien
tgatgaccgagatccctgagggact

SEQ ID NO: 1857460 - DNA, 25 bp, Homo sapien
aggagataaaaaccggtgatgaccg

SEQ ID NO: 1857461 - DNA, 25 bp, Homo sapien
caaggggggctttcgacatctctgc

SEQ ID NO: 1857462 - DNA, 25 bp, Homo sapien
ggagagaggccaagaggctgagagg

SEQ ID NO: 1857463 - DNA, 25 bp, Homo sapien
cggagagaggccaagaggctgagag

SEQ ID NO: 1857464 - DNA, 25 bp, Homo sapien
atggagtgaagacggcggcagcaag

SEQ ID NO: 1857465 - DNA, 25 bp, Homo sapien
aagacggcggcagcaagcaactcac

SEQ ID NO: 1857466 - DNA, 25 bp, Homo sapien
cccgggatggagtgaagacggcggc

SEQ ID NO: 1857467 - DNA, 25 bp, Homo sapien
agtgaagacggcggcagcaagcaac

SEQ ID NO: 1857468 - DNA, 25 bp, Homo sapien
cgcagacgccccttcggccagtagt

SEQ ID NO: 1857469 - DNA, 25 bp, Homo sapien
ccttcggccagtagtctcgacttga

SEQ ID NO: 1857470 - DNA, 25 bp, Homo sapien
tctcgacttgaaggctggcgaagcc

SEQ ID NO: 1857471 - DNA, 25 bp, Homo sapien
agtagtctcgacttgaaggctggcg

SEQ ID NO: 1857472 - DNA, 25 bp, Homo sapien
caacaggcggttacgggtgaggaca

SEQ ID NO: 1857473 - DNA, 25 bp, Homo sapien
gcggttacgggtgaggacaacagga

SEQ ID NO: 1857474 - DNA, 25 bp, Homo sapien
ggcaacaggcggttacgggtgagga

SEQ ID NO: 1857475 - DNA, 25 bp, Homo sapien
caggcggttacgggtgaggacaaca

SEQ ID NO: 1857476 - DNA, 25 bp, Homo sapien
ccgccgcggagacgggctggcgcgg

SEQ ID NO: 1857477 - DNA, 25 bp, Homo sapien
ctgccggaaaagacgcgagcgctga

SEQ ID NO: 1857478 - DNA, 25 bp, Homo sapien
ccgcggagacgggctggcgcggcag

SEQ ID NO: 1857479 - DNA, 25 bp, Homo sapien
cggagacgggctggcgcggcagccc

SEQ ID NO: 1857480 - DNA, 25 bp, Homo sapien
caaataaggtaacacacacgaggca

SEQ ID NO: 1857481 - DNA, 25 bp, Homo sapien
acacgaggcaggcattgaagtccag

SEQ ID NO: 1857482 - DNA, 25 bp, Homo sapien
tttattctagcctggatcctttgcc

SEQ ID NO: 1857483 - DNA, 25 bp, Homo sapien
gctgcacaagcaatccttttattct

SEQ ID NO: 1857484 - DNA, 25 bp, Homo sapien
ctcgagatacccctcctggcatttg

SEQ ID NO: 1857485 - DNA, 25 bp, Homo sapien
ctaggagaaaggctcgagatacccc

SEQ ID NO: 1857486 - DNA, 25 bp, Homo sapien
gaaaggctcgagatacccctcctgg

SEQ ID NO: 1857487 - DNA, 25 bp, Homo sapien
gatacccctcctggcatttgcttgg

SEQ ID NO: 1857488 - DNA, 25 bp, Homo sapien
tccgggtgtttgctaaaggtgatag

SEQ ID NO: 1857489 - DNA, 25 bp, Homo sapien
ttccgggtgtttgctaaaggtgata

SEQ ID NO: 1857490 - DNA, 25 bp, Homo sapien
ctgaccggtctcctttgctgtcggc

SEQ ID NO: 1857491 - DNA, 25 bp, Homo sapien
tctcctttgctgtcggcgccaagtc

SEQ ID NO: 1857492 - DNA, 25 bp, Homo sapien
tgctgtcggcgccaagtcctgcaag

SEQ ID NO: 1857493 - DNA, 25 bp, Homo sapien
gaccggtctcctttgctgtcggcgc

SEQ ID NO: 1857494 - DNA, 25 bp, Homo sapien
gtgtggaatctaggcggccacagtc

SEQ ID NO: 1857495 - DNA, 25 bp, Homo sapien
aatctaggcggccacagtctggtgc

SEQ ID NO: 1857496 - DNA, 25 bp, Homo sapien
ccttcagtgtggaatctaggcggcc

SEQ ID NO: 1857497 - DNA, 25 bp, Homo sapien
cttgagagacgagaaaccagcaaga

SEQ ID NO: 1857498 - DNA, 25 bp, Homo sapien
cgggaggaacgctcgagggagcacc

SEQ ID NO: 1857499 - DNA, 25 bp, Homo sapien
aggaacgctcgagggagcaccaggc

SEQ ID NO: 1857500 - DNA, 25 bp, Homo sapien
ggagcaccaggcctgttacaacgag

SEQ ID NO: 1857501 - DNA, 25 bp, Homo sapien
ctgttacaacgagcgcgcgccgacg

SEQ ID NO: 1857502 - DNA, 25 bp, Homo sapien
gcggctctcgctgcgtttgtagcca

SEQ ID NO: 1857503 - DNA, 25 bp, Homo sapien
ccagagcgcgctcccagcaaccgcg

SEQ ID NO: 1857504 - DNA, 25 bp, Homo sapien
cggcgcaaccgccagagcgcgctcc

SEQ ID NO: 1857505 - DNA, 25 bp, Homo sapien
gcgctcccagcaaccgcggctctcg

SEQ ID NO: 1857506 - DNA, 25 bp, Homo sapien
ccagtatggcgtataaataaaggcg

SEQ ID NO: 1857507 - DNA, 25 bp, Homo sapien
catgtgattccagtatggcgtataa

SEQ ID NO: 1857508 - DNA, 25 bp, Homo sapien
tgggggagcccgtccaatcatgtga

SEQ ID NO: 1857509 - DNA, 25 bp, Homo sapien
cgtataaataaaggcgaggagaagg

SEQ ID NO: 1857510 - DNA, 25 bp, Homo sapien
aatggcggcgccagattgagacaaa

SEQ ID NO: 1857511 - DNA, 25 bp, Homo sapien
cagattgagacaaagaggcgccgcc

SEQ ID NO: 1857512 - DNA, 25 bp, Homo sapien
agattgagacaaagaggcgccgccg

SEQ ID NO: 1857513 - DNA, 25 bp, Homo sapien
attgagacaaagaggcgccgccgcc

SEQ ID NO: 1857514 - DNA, 25 bp, Homo sapien
tcgtcgcaggtacttgagagaaagc

SEQ ID NO: 1857515 - DNA, 25 bp, Homo sapien
ttacctcttacaggtgagtggagtc

SEQ ID NO: 1857516 - DNA, 25 bp, Homo sapien
gtattgtctgggtgctaactccaca

SEQ ID NO: 1857517 - DNA, 25 bp, Homo sapien
cattcttggaccaggcagtattgtc

SEQ ID NO: 1857518 - DNA, 25 bp, Homo sapien
caactaaatccaacgcaacatctgg

SEQ ID NO: 1857519 - DNA, 25 bp, Homo sapien
ccatttctagcttgttgaaacccaa

SEQ ID NO: 1857520 - DNA, 25 bp, Homo sapien
ctggcaaaaccttttcagcaaattc

SEQ ID NO: 1857521 - DNA, 25 bp, Homo sapien
agccttcggctaacaaaaaagcagg

SEQ ID NO: 1857522 - DNA, 25 bp, Homo sapien
gcagccggagcaggtaaatgactac

SEQ ID NO: 1857523 - DNA, 25 bp, Homo sapien
tcccatgggaagcagttggttacac

SEQ ID NO: 1857524 - DNA, 25 bp, Homo sapien
caggccatcagggaaaacgaaatgc

SEQ ID NO: 1857525 - DNA, 25 bp, Homo sapien
agttcttcggcacattcactgggcc

SEQ ID NO: 1857526 - DNA, 25 bp, Homo sapien
atctgtatgcgccttcctggtacat

SEQ ID NO: 1857527 - DNA, 25 bp, Homo sapien
catctgtatgcgccttcctggtaca

SEQ ID NO: 1857528 - DNA, 25 bp, Homo sapien
tgcgcctgcgaacatgattacatgc

SEQ ID NO: 1857529 - DNA, 25 bp, Homo sapien
ggccttagcccctacttcttgagag

SEQ ID NO: 1857530 - DNA, 25 bp, Homo sapien
acatgccgggcaccgtaagaggcta

SEQ ID NO: 1857531 - DNA, 25 bp, Homo sapien
agcacatccatttctagtccacagg

SEQ ID NO: 1857532 - DNA, 25 bp, Homo sapien
accaccttcgtgatcatagtatctc

SEQ ID NO: 1857533 - DNA, 25 bp, Homo sapien
ccttcgtgatcatagtatctcccct

SEQ ID NO: 1857534 - DNA, 25 bp, Homo sapien
cagagtgcaatggataagcctcgcc

SEQ ID NO: 1857535 - DNA, 25 bp, Homo sapien
aaaaccaccttcgtgatcatagtat

SEQ ID NO: 1857536 - DNA, 25 bp, Homo sapien
cagctgcattgggtaaatccttgcc

SEQ ID NO: 1857537 - DNA, 25 bp, Homo sapien
tgggtcagcggtgagccagaaaggg

SEQ ID NO: 1857538 - DNA, 25 bp, Homo sapien
aaagggggctcattctaacagtgct

SEQ ID NO: 1857539 - DNA, 25 bp, Homo sapien
ccttgcctgccagagtgggtcagcg

SEQ ID NO: 1857540 - DNA, 25 bp, Homo sapien
gagtaagttcgtctaggatcggtcc

SEQ ID NO: 1857541 - DNA, 25 bp, Homo sapien
cggttgtatatcagggccgcgctga

SEQ ID NO: 1857542 - DNA, 25 bp, Homo sapien
cacacggtgtctctaagtgcgcggg

SEQ ID NO: 1857543 - DNA, 25 bp, Homo sapien
gagcagctgccgaagtcagttcctt

SEQ ID NO: 1857544 - DNA, 25 bp, Homo sapien
ggcccgtgagcgatggaacttcgac

SEQ ID NO: 1857545 - DNA, 25 bp, Homo sapien
gaacttcgactttgtcaccgagaca

SEQ ID NO: 1857546 - DNA, 25 bp, Homo sapien
cagctgagccgcgactgtgatgcgc

SEQ ID NO: 1857547 - DNA, 25 bp, Homo sapien
gaacccatgcggcagcaaggcctgc

SEQ ID NO: 1857548 - DNA, 25 bp, Homo sapien
aactactgacgtttatatgggcccg

SEQ ID NO: 1857549 - DNA, 25 bp, Homo sapien
gcttgacttagagcagacccatggg

SEQ ID NO: 1857550 - DNA, 25 bp, Homo sapien
tatgggcccggcattgtgctgaaca

SEQ ID NO: 1857551 - DNA, 25 bp, Homo sapien
gacagagtggacgttccccgagttc

SEQ ID NO: 1857552 - DNA, 25 bp, Homo sapien
tgaagtgagcacagcctagggctga

SEQ ID NO: 1857553 - DNA, 25 bp, Homo sapien
cacaggcggttatgaaattcacccc

SEQ ID NO: 1857554 - DNA, 25 bp, Homo sapien
cacttgtccgctgggtggtaccctc

SEQ ID NO: 1857555 - DNA, 25 bp, Homo sapien
actaggcggttgaatgagaggttcc

SEQ ID NO: 1857556 - DNA, 25 bp, Homo sapien
ttagcagcggaacaaggagtcagac

SEQ ID NO: 1857557 - DNA, 25 bp, Homo sapien
ctttctaggagggagacactggccc

SEQ ID NO: 1857558 - DNA, 25 bp, Homo sapien
cactaacgttgagcccctggaggca

SEQ ID NO: 1857559 - DNA, 25 bp, Homo sapien
tgtaaacctctcgagggcagggacc

SEQ ID NO: 1857560 - DNA, 25 bp, Homo sapien
ctgtactccagcctcttccagggtg

SEQ ID NO: 1857561 - DNA, 25 bp, Homo sapien
gtgagattcatctcaaataaataca

SEQ ID NO: 1857562 - DNA, 25 bp, Homo sapien
cttccagggtgacagtgagattcat

SEQ ID NO: 1857563 - DNA, 25 bp, Homo sapien
ccagggtgacagtgagattcatctc

SEQ ID NO: 1857564 - DNA, 25 bp, Homo sapien
cctggagggctaatctgggaacaaa

SEQ ID NO: 1857565 - DNA, 25 bp, Homo sapien
tcactcagtaaatgccaaaggcctc

SEQ ID NO: 1857566 - DNA, 25 bp, Homo sapien
gatggcttggcatcagtaccccatg

SEQ ID NO: 1857567 - DNA, 25 bp, Homo sapien
tgcaaatgcaccaaggaagctccta

SEQ ID NO: 1857568 - DNA, 25 bp, Homo sapien
tcatgggatacagggcaaagagcag

SEQ ID NO: 1857569 - DNA, 25 bp, Homo sapien
aaccatggaagtacctgtgggccca

SEQ ID NO: 1857570 - DNA, 25 bp, Homo sapien
gaaatcgggcacaggatagaccaca

SEQ ID NO: 1857571 - DNA, 25 bp, Homo sapien
cctgaagccaggagtcaaccatgga

SEQ ID NO: 1857572 - DNA, 25 bp, Homo sapien
caccagttggtcagggatctctgcc

SEQ ID NO: 1857573 - DNA, 25 bp, Homo sapien
gccatgctcagcacgtggttgcctg

SEQ ID NO: 1857574 - DNA, 25 bp, Homo sapien
gcgaatgccctgtgccttcatgtag

SEQ ID NO: 1857575 - DNA, 25 bp, Homo sapien
tgtgcggtccacgtagtcccggaag

SEQ ID NO: 1857576 - DNA, 25 bp, Homo sapien
cattcttccacgtgagactgcatgg

SEQ ID NO: 1857577 - DNA, 25 bp, Homo sapien
gctgggcacccgcaatgttaggagt

SEQ ID NO: 1857578 - DNA, 25 bp, Homo sapien
tctgagtaggtgcttccgaaatgcc

SEQ ID NO: 1857579 - DNA, 25 bp, Homo sapien
tgattcagttaaccgagcaatgcct

SEQ ID NO: 1857580 - DNA, 25 bp, Homo sapien
gggggtgtgaggtccgcctggctag

SEQ ID NO: 1857581 - DNA, 25 bp, Homo sapien
gtgtgaggtccgcctggctagaggg

SEQ ID NO: 1857582 - DNA, 25 bp, Homo sapien
ccaaagggggtgtgaggtccgcctg

SEQ ID NO: 1857583 - DNA, 25 bp, Homo sapien
cctggctagaggggctcttgaattt

SEQ ID NO: 1857584 - DNA, 25 bp, Homo sapien
ctggacgatgtcgcgttcagccagc

SEQ ID NO: 1857585 - DNA, 25 bp, Homo sapien
aggagatccgcacgtcgtcgccatc

SEQ ID NO: 1857586 - DNA, 25 bp, Homo sapien
gacgatgtcgcgttcagccagcttc

SEQ ID NO: 1857587 - DNA, 25 bp, Homo sapien
ccccgggaggagatccgcacgtcgt

SEQ ID NO: 1857588 - DNA, 25 bp, Homo sapien
tgcctggcccacgccgacgataatg

SEQ ID NO: 1857589 - DNA, 25 bp, Homo sapien
ctctgcctggcccacgccgacgata

SEQ ID NO: 1857590 - DNA, 25 bp, Homo sapien
ggcccacgccgacgataatgatgga

SEQ ID NO: 1857591 - DNA, 25 bp, Homo sapien
aatgatggacatggggagcttggca

SEQ ID NO: 1857592 - DNA, 25 bp, Homo sapien
aaggagaaatcaggggtaggacagg

SEQ ID NO: 1857593 - DNA, 25 bp, Homo sapien
atgggagagtgaacatggagagaca

SEQ ID NO: 1857594 - DNA, 25 bp, Homo sapien
aaagaaatgggagagtgaacatgga

SEQ ID NO: 1857595 - DNA, 25 bp, Homo sapien
gaaatgggagagtgaacatggagag

SEQ ID NO: 1857596 - DNA, 25 bp, Homo sapien
gcagcaccgagtactgggagccatc

SEQ ID NO: 1857597 - DNA, 25 bp, Homo sapien
tgtccgagatgaccccatcagtaat

SEQ ID NO: 1857598 - DNA, 25 bp, Homo sapien
caatggcctccttggtctgcgccat

SEQ ID NO: 1857599 - DNA, 25 bp, Homo sapien
aatgatgagcagcaccgagtactgg

SEQ ID NO: 1857600 - DNA, 25 bp, Homo sapien
gatgccgtcgatgccacagcatgag

SEQ ID NO: 1857601 - DNA, 25 bp, Homo sapien
cagctgcacagtgcgcaggctgcgg

SEQ ID NO: 1857602 - DNA, 25 bp, Homo sapien
atgaggggttctcctggttgccatt

SEQ ID NO: 1857603 - DNA, 25 bp, Homo sapien
ggctgcggtggtaggcctccaggat

SEQ ID NO: 1857604 - DNA, 25 bp, Homo sapien
ctgcgtcttgtcaggaacaaggaag

SEQ ID NO: 1857605 - DNA, 25 bp, Homo sapien
gcgtcttgtcaggaacaaggaagcc

SEQ ID NO: 1857606 - DNA, 25 bp, Homo sapien
tgcgtcttgtcaggaacaaggaagc

SEQ ID NO: 1857607 - DNA, 25 bp, Homo sapien
gatgatctctccgacggcagtcagc

SEQ ID NO: 1857608 - DNA, 25 bp, Homo sapien
agggcagggaacatcttgtcactgt

SEQ ID NO: 1857609 - DNA, 25 bp, Homo sapien
tgtcactgtcgtagtgctggatgat

SEQ ID NO: 1857610 - DNA, 25 bp, Homo sapien
agtgggaactcgtgggacactctgc

SEQ ID NO: 1857611 - DNA, 25 bp, Homo sapien
aggcagtgaaatcaatggccacagt

SEQ ID NO: 1857612 - DNA, 25 bp, Homo sapien
ggcagtgaaatcaatggccacagtg

SEQ ID NO: 1857613 - DNA, 25 bp, Homo sapien
gaggcagtgaaatcaatggccacag

SEQ ID NO: 1857614 - DNA, 25 bp, Homo sapien
ggaggcagtgaaatcaatggccaca

SEQ ID NO: 1857615 - DNA, 25 bp, Homo sapien
tccgttctctttgtgtacagaggag

SEQ ID NO: 1857616 - DNA, 25 bp, Homo sapien
cgttctctttgtgtacagaggagga

SEQ ID NO: 1857617 - DNA, 25 bp, Homo sapien
ctattccgttctctttgtgtacaga

SEQ ID NO: 1857618 - DNA, 25 bp, Homo sapien
attccgttctctttgtgtacagagg

SEQ ID NO: 1857619 - DNA, 25 bp, Homo sapien
gatgtagtcaaggaaggtgcactct

SEQ ID NO: 1857620 - DNA, 25 bp, Homo sapien
ggtgcactctgactccacagcaaag

SEQ ID NO: 1857621 - DNA, 25 bp, Homo sapien
tgcactctgactccacagcaaagga

SEQ ID NO: 1857622 - DNA, 25 bp, Homo sapien
cctcctttgatgtagtcaaggaagg

SEQ ID NO: 1857623 - DNA, 25 bp, Homo sapien
tcatgctagatacagccagcgcctg

SEQ ID NO: 1857624 - DNA, 25 bp, Homo sapien
ggattctgcacaccataagtaaggg

SEQ ID NO: 1857625 - DNA, 25 bp, Homo sapien
tcatcccaggaaggtcacggttaag

SEQ ID NO: 1857626 - DNA, 25 bp, Homo sapien
gcaagctttctgcatcccgggtgat

SEQ ID NO: 1857627 - DNA, 25 bp, Homo sapien
tgtgccagaattcacgtatttcttt

SEQ ID NO: 1857628 - DNA, 25 bp, Homo sapien
gatctttaccgtggtctcttctgtc

SEQ ID NO: 1857629 - DNA, 25 bp, Homo sapien
agaggccgtcagctgatctttaccg

SEQ ID NO: 1857630 - DNA, 25 bp, Homo sapien
tgtgctgcctgttggtttctggtga

SEQ ID NO: 1857631 - DNA, 25 bp, Homo sapien
tgttcccacagaggccgtcagctga

SEQ ID NO: 1857632 - DNA, 25 bp, Homo sapien
cacgggccagctcccggtaactggt

SEQ ID NO: 1857633 - DNA, 25 bp, Homo sapien
ggtgaactccccaatgaagtcatgg

SEQ ID NO: 1857634 - DNA, 25 bp, Homo sapien
tgttgaattggctctgcccacgggc

SEQ ID NO: 1857635 - DNA, 25 bp, Homo sapien
gtaactggtggtgaactccccaatg

SEQ ID NO: 1857636 - DNA, 25 bp, Homo sapien
tgccagagggccttggtcaatgtgc

SEQ ID NO: 1857637 - DNA, 25 bp, Homo sapien
atcaagcacggccaagacttgtaca

SEQ ID NO: 1857638 - DNA, 25 bp, Homo sapien
agagggccttggtcaatgtgctggc

SEQ ID NO: 1857639 - DNA, 25 bp, Homo sapien
ccagagggccttggtcaatgtgctg

SEQ ID NO: 1857640 - DNA, 25 bp, Homo sapien
gcatccagccggagactgatgccca

SEQ ID NO: 1857641 - DNA, 25 bp, Homo sapien
ctgactatgagcaacttcatggtgg

SEQ ID NO: 1857642 - DNA, 25 bp, Homo sapien
gactgatgcccaagaggtgtccctg

SEQ ID NO: 1857643 - DNA, 25 bp, Homo sapien
gagcctacactgtattgtgtctaca

SEQ ID NO: 1857644 - DNA, 25 bp, Homo sapien
tacaggaacgccagggtaagacgag

SEQ ID NO: 1857645 - DNA, 25 bp, Homo sapien
gactattccaggcaaaggagtacag

SEQ ID NO: 1857646 - DNA, 25 bp, Homo sapien
taagacgaggcaaattccaggtgga

SEQ ID NO: 1857647 - DNA, 25 bp, Homo sapien
ggtagctgtccccaactggcacaga

SEQ ID NO: 1857648 - DNA, 25 bp, Homo sapien
gtcccgatcccagtcgtacacctcc

SEQ ID NO: 1857649 - DNA, 25 bp, Homo sapien
cccagtcgtacacctccaccttgat

SEQ ID NO: 1857650 - DNA, 25 bp, Homo sapien
ccgtcccgatcccagtcgtacacct

SEQ ID NO: 1857651 - DNA, 25 bp, Homo sapien
cgatcccagtcgtacacctccacct

SEQ ID NO: 1857652 - DNA, 25 bp, Homo sapien
ttcccggaccagatagggaggccag

SEQ ID NO: 1857653 - DNA, 25 bp, Homo sapien
tgttcccggaccagatagggaggcc

SEQ ID NO: 1857654 - DNA, 25 bp, Homo sapien
ttcatgttcccggaccagataggga

SEQ ID NO: 1857655 - DNA, 25 bp, Homo sapien
catgttcccggaccagatagggagg

SEQ ID NO: 1857656 - DNA, 25 bp, Homo sapien
agggtctgagggctttgggtgtggg

SEQ ID NO: 1857657 - DNA, 25 bp, Homo sapien
cagaaggggcataagctcagcatgg

SEQ ID NO: 1857658 - DNA, 25 bp, Homo sapien
agccagccctgcacgtcagggagga

SEQ ID NO: 1857659 - DNA, 25 bp, Homo sapien
agaagactgcttgttgagggtctga

SEQ ID NO: 1857660 - DNA, 25 bp, Homo sapien
tgtctgttgggtgcgtgggttacac

SEQ ID NO: 1857661 - DNA, 25 bp, Homo sapien
ggataggcctgatcgttcttggagc

SEQ ID NO: 1857662 - DNA, 25 bp, Homo sapien
tccctggcctccttgattaacacta

SEQ ID NO: 1857663 - DNA, 25 bp, Homo sapien
ggagccagagtgacatccctggcct

SEQ ID NO: 1857664 - DNA, 25 bp, Homo sapien
ctcctccaacggcccagtggtgaag

SEQ ID NO: 1857665 - DNA, 25 bp, Homo sapien
cctccaacggcccagtggtgaagcc

SEQ ID NO: 1857666 - DNA, 25 bp, Homo sapien
tcctccaacggcccagtggtgaagc

SEQ ID NO: 1857667 - DNA, 25 bp, Homo sapien
gacctcggtcttgtggcaaatggtg

SEQ ID NO: 1857668 - DNA, 25 bp, Homo sapien
gaatggagaaagtttgccagactgg

SEQ ID NO: 1857669 - DNA, 25 bp, Homo sapien
ggatttagggtgttcttcatgacct

SEQ ID NO: 1857670 - DNA, 25 bp, Homo sapien
cagagggctctcacgggaatggaga

SEQ ID NO: 1857671 - DNA, 25 bp, Homo sapien
gaagagagggaaaggctgtcaggcc

SEQ ID NO: 1857672 - DNA, 25 bp, Homo sapien
gagggaaaggctgtcaggcccaaac

SEQ ID NO: 1857673 - DNA, 25 bp, Homo sapien
aagagagggaaaggctgtcaggccc

SEQ ID NO: 1857674 - DNA, 25 bp, Homo sapien
gagagggaaaggctgtcaggcccaa

SEQ ID NO: 1857675 - DNA, 25 bp, Homo sapien
tctctggttcctggacgacggaaat

SEQ ID NO: 1857676 - DNA, 25 bp, Homo sapien
tcagctggttcacatctctggttcc

SEQ ID NO: 1857677 - DNA, 25 bp, Homo sapien
ctggttcctggacgacggaaatgat

SEQ ID NO: 1857678 - DNA, 25 bp, Homo sapien
acatctctggttcctggacgacgga

SEQ ID NO: 1857679 - DNA, 25 bp, Homo sapien
ttccatcctcgttgcttctgtagaa

SEQ ID NO: 1857680 - DNA, 25 bp, Homo sapien
ccatcctcgttgcttctgtagaata

SEQ ID NO: 1857681 - DNA, 25 bp, Homo sapien
atcctcgttgcttctgtagaatacc

SEQ ID NO: 1857682 - DNA, 25 bp, Homo sapien
tgtagaataccaagaaggggtcaga

SEQ ID NO: 1857683 - DNA, 25 bp, Homo sapien
cctgtaccgtgagggctcgaggctc

SEQ ID NO: 1857684 - DNA, 25 bp, Homo sapien
tgactgttccctgtaccgtgagggc

SEQ ID NO: 1857685 - DNA, 25 bp, Homo sapien
gtgaaccccaacctccactgctcaa

SEQ ID NO: 1857686 - DNA, 25 bp, Homo sapien
acaagggacagaaggtcggtgactg

SEQ ID NO: 1857687 - DNA, 25 bp, Homo sapien
gctcctcagcggacaggatgatggt

SEQ ID NO: 1857688 - DNA, 25 bp, Homo sapien
tgagctcctcagcggacaggatgat

SEQ ID NO: 1857689 - DNA, 25 bp, Homo sapien
gctgagctcctcagcggacaggatg

SEQ ID NO: 1857690 - DNA, 25 bp, Homo sapien
agctcctcagcggacaggatgatgg

SEQ ID NO: 1857691 - DNA, 25 bp, Homo sapien
ccggaggcttccagaccagtggttc

SEQ ID NO: 1857692 - DNA, 25 bp, Homo sapien
ctggaattcaggctgaatgcgccta

SEQ ID NO: 1857693 - DNA, 25 bp, Homo sapien
tggcatgggtttgcccgtcctggaa

SEQ ID NO: 1857694 - DNA, 25 bp, Homo sapien
ggtttgcccgtcctggaattcaggc

SEQ ID NO: 1857695 - DNA, 25 bp, Homo sapien
ggaattcaggctgaatgcgcctatc

SEQ ID NO: 1857696 - DNA, 25 bp, Homo sapien
gcacatggttaacactgaagtgggc

SEQ ID NO: 1857697 - DNA, 25 bp, Homo sapien
agggaggggcctagcaaatatgaat

SEQ ID NO: 1857698 - DNA, 25 bp, Homo sapien
ggggcagatgttcctagagaaagaa

SEQ ID NO: 1857699 - DNA, 25 bp, Homo sapien
gatgctaatgggtatgctacactca

SEQ ID NO: 1857700 - DNA, 25 bp, Homo sapien
agaaatagggacaagagaggtcacc

SEQ ID NO: 1857701 - DNA, 25 bp, Homo sapien
gaatcgtttatacaggcaagggccc

SEQ ID NO: 1857702 - DNA, 25 bp, Homo sapien
tgcccctggtacttcctgagaaata

SEQ ID NO: 1857703 - DNA, 25 bp, Homo sapien
ggccgtccagagaaatatggacacc

SEQ ID NO: 1857704 - DNA, 25 bp, Homo sapien
atcccagagcccgcttcagagtaac

SEQ ID NO: 1857705 - DNA, 25 bp, Homo sapien
tcccagagcccgcttcagagtaaca

SEQ ID NO: 1857706 - DNA, 25 bp, Homo sapien
cccagagcccgcttcagagtaacag

SEQ ID NO: 1857707 - DNA, 25 bp, Homo sapien
ccagagcccgcttcagagtaacagc

SEQ ID NO: 1857708 - DNA, 25 bp, Homo sapien
cccaggggaccccacaatctctcca

SEQ ID NO: 1857709 - DNA, 25 bp, Homo sapien
tcccaggggaccccacaatctctcc

SEQ ID NO: 1857710 - DNA, 25 bp, Homo sapien
caatctctccaagggtgcagaaggc

SEQ ID NO: 1857711 - DNA, 25 bp, Homo sapien
tctctccaagggtgcagaaggcctg

SEQ ID NO: 1857712 - DNA, 25 bp, Homo sapien
gaagagaccagtgtcacccactctg

SEQ ID NO: 1857713 - DNA, 25 bp, Homo sapien
agaagagaccagtgtcacccactct

SEQ ID NO: 1857714 - DNA, 25 bp, Homo sapien
tttggataaatcaggactcttagag

SEQ ID NO: 1857715 - DNA, 25 bp, Homo sapien
tggataaatcaggactcttagagtc

SEQ ID NO: 1857716 - DNA, 25 bp, Homo sapien
ttggataaatcaggactcttagagt

SEQ ID NO: 1857717 - DNA, 25 bp, Homo sapien
tgtcgatgacttcggtgcgcccaaa

SEQ ID NO: 1857718 - DNA, 25 bp, Homo sapien
cacaatgaacttgcgcacgaagtca

SEQ ID NO: 1857719 - DNA, 25 bp, Homo sapien
caggattgagcgtgttgtcgatgac

SEQ ID NO: 1857720 - DNA, 25 bp, Homo sapien
gcttctcctcgaaaaagtaatccac

SEQ ID NO: 1857721 - DNA, 25 bp, Homo sapien
ggcccaatttataccccattaatga

SEQ ID NO: 1857722 - DNA, 25 bp, Homo sapien
gaagatgttttatagccttcattac

SEQ ID NO: 1857723 - DNA, 25 bp, Homo sapien
caccaggtcctgtcaggcccaattt

SEQ ID NO: 1857724 - DNA, 25 bp, Homo sapien
cattacttggacgaataacaaaggg

SEQ ID NO: 1857725 - DNA, 25 bp, Homo sapien
caatgtcctgtgccagccctttggg

SEQ ID NO: 1857726 - DNA, 25 bp, Homo sapien
atgtcctgtgccagccctttgggac

SEQ ID NO: 1857727 - DNA, 25 bp, Homo sapien
aatgtcctgtgccagccctttggga

SEQ ID NO: 1857728 - DNA, 25 bp, Homo sapien
gcactgctgtcccacttaagggctt

SEQ ID NO: 1857729 - DNA, 25 bp, Homo sapien
tgtcccacttaagggcttcattggg

SEQ ID NO: 1857730 - DNA, 25 bp, Homo sapien
cagcctcctccacattgtagaaagt

SEQ ID NO: 1857731 - DNA, 25 bp, Homo sapien
actgctgtcccacttaagggcttca

SEQ ID NO: 1857732 - DNA, 25 bp, Homo sapien
atcccttgggtatacatgacgcaca

SEQ ID NO: 1857733 - DNA, 25 bp, Homo sapien
tccatcccttgggtatacatgacgc

SEQ ID NO: 1857734 - DNA, 25 bp, Homo sapien
tgttctccatcccttgggtatacat

SEQ ID NO: 1857735 - DNA, 25 bp, Homo sapien
tctccatcccttgggtatacatgac

SEQ ID NO: 1857736 - DNA, 25 bp, Homo sapien
caagcattgccgctgtaattagtca

SEQ ID NO: 1857737 - DNA, 25 bp, Homo sapien
agcgttgccgctattgttaccgttc

SEQ ID NO: 1857738 - DNA, 25 bp, Homo sapien
gttaccgttcttattgtcagagcag

SEQ ID NO: 1857739 - DNA, 25 bp, Homo sapien
ttcttattgtcagagcaggacttac

SEQ ID NO: 1857740 - DNA, 25 bp, Homo sapien
gtgggtcggacttggaaaacatgtc

SEQ ID NO: 1857741 - DNA, 25 bp, Homo sapien
cccgtgaacaatgggcctcgcactt

SEQ ID NO: 1857742 - DNA, 25 bp, Homo sapien
tggcttcaccccgtgaacaatgggc

SEQ ID NO: 1857743 - DNA, 25 bp, Homo sapien
ttggacgggtggcttcaccccgtga

SEQ ID NO: 1857744 - DNA, 25 bp, Homo sapien
gaacaatgggcctcgcacttctggg

SEQ ID NO: 1857745 - DNA, 25 bp, Homo sapien
ctggctgtgtaggtctgaagcaggg

SEQ ID NO: 1857746 - DNA, 25 bp, Homo sapien
tctggctgtgtaggtctgaagcagg

SEQ ID NO: 1857747 - DNA, 25 bp, Homo sapien
agtctggctgtgtaggtctgaagca

SEQ ID NO: 1857748 - DNA, 25 bp, Homo sapien
ctgatggcagccgtccaaataccac

SEQ ID NO: 1857749 - DNA, 25 bp, Homo sapien
gagacaccgtctcttagggcctcag

SEQ ID NO: 1857750 - DNA, 25 bp, Homo sapien
caaataccacatgttgagacaccgt

SEQ ID NO: 1857751 - DNA, 25 bp, Homo sapien
gtttatccaagtggccgccagagat

SEQ ID NO: 1857752 - DNA, 25 bp, Homo sapien
cacacgtgtagcaccagaagtttct

SEQ ID NO: 1857753 - DNA, 25 bp, Homo sapien
ccagaagtttcttcgaggtaaagcg

SEQ ID NO: 1857754 - DNA, 25 bp, Homo sapien
cagaagtttcttcgaggtaaagcgc

SEQ ID NO: 1857755 - DNA, 25 bp, Homo sapien
cacacacacgtgtagcaccagaagt

SEQ ID NO: 1857756 - DNA, 25 bp, Homo sapien
agcctctcggagctgctcccaaaca

SEQ ID NO: 1857757 - DNA, 25 bp, Homo sapien
tctcggagctgctcccaaacaaacg

SEQ ID NO: 1857758 - DNA, 25 bp, Homo sapien
cctctcggagctgctcccaaacaaa

SEQ ID NO: 1857759 - DNA, 25 bp, Homo sapien
ctcggagctgctcccaaacaaacga

SEQ ID NO: 1857760 - DNA, 25 bp, Homo sapien
attgtttagatctgatgacgactcc

SEQ ID NO: 1857761 - DNA, 25 bp, Homo sapien
aaatggccccatagatgccacgttt

SEQ ID NO: 1857762 - DNA, 25 bp, Homo sapien
gcaaacattgcccactctcttcctg

SEQ ID NO: 1857763 - DNA, 25 bp, Homo sapien
agatgccacgtttgcccatccagca

SEQ ID NO: 1857764 - DNA, 25 bp, Homo sapien
gggctcttggcagatcggcaggggc

SEQ ID NO: 1857765 - DNA, 25 bp, Homo sapien
cgtcgccacccgcagctggacagga

SEQ ID NO: 1857766 - DNA, 25 bp, Homo sapien
ctcttggcagatcggcaggggcgca

SEQ ID NO: 1857767 - DNA, 25 bp, Homo sapien
ggcagatcggcaggggcgcagtcct

SEQ ID NO: 1857768 - DNA, 25 bp, Homo sapien
ccaaggagtcgaactcgctcagcga

SEQ ID NO: 1857769 - DNA, 25 bp, Homo sapien
ggccgggatgctgcccgccaaggag

SEQ ID NO: 1857770 - DNA, 25 bp, Homo sapien
tgcccgccaaggagtcgaactcgct

SEQ ID NO: 1857771 - DNA, 25 bp, Homo sapien
gatgctgcccgccaaggagtcgaac

SEQ ID NO: 1857772 - DNA, 25 bp, Homo sapien
gagggacgcgcgtctgtgggcagag

SEQ ID NO: 1857773 - DNA, 25 bp, Homo sapien
tagtcaatccctgcgcgattcacgc

SEQ ID NO: 1857774 - DNA, 25 bp, Homo sapien
gagggaaacgcggagtcgtggagag

SEQ ID NO: 1857775 - DNA, 25 bp, Homo sapien
gggtgacgccgcgaggaggctaggg

SEQ ID NO: 1857776 - DNA, 25 bp, Homo sapien
taagctttgccgagctggaacctcc

SEQ ID NO: 1857777 - DNA, 25 bp, Homo sapien
ggaaaatcaaatctgcccgaagccg

SEQ ID NO: 1857778 - DNA, 25 bp, Homo sapien
gagtaaggctgcacacgtagacttg

SEQ ID NO: 1857779 - DNA, 25 bp, Homo sapien
ttctatgcagccagcaccgagtagg

SEQ ID NO: 1857780 - DNA, 25 bp, Homo sapien
agcatgcttgtggaatatgttctcc

SEQ ID NO: 1857781 - DNA, 25 bp, Homo sapien
gctcaaagcatgcttgtggaatatg

SEQ ID NO: 1857782 - DNA, 25 bp, Homo sapien
ataaacaatgctcaaagcatgcttg

SEQ ID NO: 1857783 - DNA, 25 bp, Homo sapien
caatgctcaaagcatgcttgtggaa

SEQ ID NO: 1857784 - DNA, 25 bp, Homo sapien
aaggtgccggcaggtatggtgtctg

SEQ ID NO: 1857785 - DNA, 25 bp, Homo sapien
tgtcctccagaggggcaaacacttc

SEQ ID NO: 1857786 - DNA, 25 bp, Homo sapien
ctccagaggggcaaacacttcctca

SEQ ID NO: 1857787 - DNA, 25 bp, Homo sapien
atcaaggtgccggcaggtatggtgt

SEQ ID NO: 1857788 - DNA, 25 bp, Homo sapien
tactcgtaggcctcctgaactctct

SEQ ID NO: 1857789 - DNA, 25 bp, Homo sapien
tgtccattcaatgtaaacccatttc

SEQ ID NO: 1857790 - DNA, 25 bp, Homo sapien
agccagccagtctactcgtaggcct

SEQ ID NO: 1857791 - DNA, 25 bp, Homo sapien
ttaagtacattacccgccaagccag

SEQ ID NO: 1857792 - DNA, 25 bp, Homo sapien
tcaagtgtcaggctgcaggagctgc

SEQ ID NO: 1857793 - DNA, 25 bp, Homo sapien
tgacagccccttggaggcagctggc

SEQ ID NO: 1857794 - DNA, 25 bp, Homo sapien
tgctgacagccccttggaggcagct

SEQ ID NO: 1857795 - DNA, 25 bp, Homo sapien
gctgctgctgacagccccttggagg

SEQ ID NO: 1857796 - DNA, 25 bp, Homo sapien
caagggccactggtagtaacaacaa

SEQ ID NO: 1857797 - DNA, 25 bp, Homo sapien
tatgtcgagatgaagaggtaggaca

SEQ ID NO: 1857798 - DNA, 25 bp, Homo sapien
tgttctcagaggttagcccagtggg

SEQ ID NO: 1857799 - DNA, 25 bp, Homo sapien
caggtcaggctgtgtatatgtcgag

SEQ ID NO: 1857800 - DNA, 25 bp, Homo sapien
tcgacgtatatcagagcagacatgc

SEQ ID NO: 1857801 - DNA, 25 bp, Homo sapien
tctcaaggaggattcatggtctgtc

SEQ ID NO: 1857802 - DNA, 25 bp, Homo sapien
taaaagactgaaatagggcgtgcac

SEQ ID NO: 1857803 - DNA, 25 bp, Homo sapien
catttgtgcaaatgctctggcaacc

SEQ ID NO: 1857804 - DNA, 25 bp, Homo sapien
attcctatgccctgacacactcggc

SEQ ID NO: 1857805 - DNA, 25 bp, Homo sapien
aaatggtgtgtttgccgtcaagcca

SEQ ID NO: 1857806 - DNA, 25 bp, Homo sapien
atcttcacgtcgtccacagggcggt

SEQ ID NO: 1857807 - DNA, 25 bp, Homo sapien
tgtttgccgtcaagccactgggtgg

SEQ ID NO: 1857808 - DNA, 25 bp, Homo sapien
ccatagatagatgcaccacctcgac

SEQ ID NO: 1857809 - DNA, 25 bp, Homo sapien
ctggatgaagttcatcttcaaactg

SEQ ID NO: 1857810 - DNA, 25 bp, Homo sapien
tgccatagatagatgcaccacctcg

SEQ ID NO: 1857811 - DNA, 25 bp, Homo sapien
actgtttgccatagatagatgcacc

SEQ ID NO: 1857812 - DNA, 25 bp, Homo sapien
tagccccagagttgaaacctatttg

SEQ ID NO: 1857813 - DNA, 25 bp, Homo sapien
cattacggtcggcagagtccactga

SEQ ID NO: 1857814 - DNA, 25 bp, Homo sapien
gagtattttagacatgagtgcccca

SEQ ID NO: 1857815 - DNA, 25 bp, Homo sapien
tgaatgttatcaacccagaactcag

SEQ ID NO: 1857816 - DNA, 25 bp, Homo sapien
cttttagtcggcttcaccacaggga

SEQ ID NO: 1857817 - DNA, 25 bp, Homo sapien
tagtcggcttcaccacagggagcct

SEQ ID NO: 1857818 - DNA, 25 bp, Homo sapien
cggcttcaccacagggagcctgtca

SEQ ID NO: 1857819 - DNA, 25 bp, Homo sapien
tttagtcggcttcaccacagggagc

SEQ ID NO: 1857820 - DNA, 25 bp, Homo sapien
acctccttggatcatgaagtctttg

SEQ ID NO: 1857821 - DNA, 25 bp, Homo sapien
aaagttcttacaggtctttggagca

SEQ ID NO: 1857822 - DNA, 25 bp, Homo sapien
gtaacctcgacgagccaactcagca

SEQ ID NO: 1857823 - DNA, 25 bp, Homo sapien
tgcttccagtacagctccagcacaa

SEQ ID NO: 1857824 - DNA, 25 bp, Homo sapien
aggaatctgggggaattgccgccat

SEQ ID NO: 1857825 - DNA, 25 bp, Homo sapien
tctccaagtaaacgttgggtggctg

SEQ ID NO: 1857826 - DNA, 25 bp, Homo sapien
ctggtctccaagtaaacgttgggtg

SEQ ID NO: 1857827 - DNA, 25 bp, Homo sapien
caagtaaacgttgggtggctgccag

SEQ ID NO: 1857828 - DNA, 25 bp, Homo sapien
cggcggaatgcttgtctagtaattg

SEQ ID NO: 1857829 - DNA, 25 bp, Homo sapien
aagccggcggcggaatgcttgtcta

SEQ ID NO: 1857830 - DNA, 25 bp, Homo sapien
ccggcggcggaatgcttgtctagta

SEQ ID NO: 1857831 - DNA, 25 bp, Homo sapien
ggcggcggaatgcttgtctagtaat

SEQ ID NO: 1857832 - DNA, 25 bp, Homo sapien
gattagctggggacccgtcgctgct

SEQ ID NO: 1857833 - DNA, 25 bp, Homo sapien
agaggacggtcccttcttccaatgc

SEQ ID NO: 1857834 - DNA, 25 bp, Homo sapien
cgttcaaccctttcgataccaggat

SEQ ID NO: 1857835 - DNA, 25 bp, Homo sapien
ttccggcgtcgattagctggggacc

SEQ ID NO: 1857836 - DNA, 25 bp, Homo sapien
tcattcgcggtggtctccaagtggc

SEQ ID NO: 1857837 - DNA, 25 bp, Homo sapien
gcggtggtctccaagtggcgatacc

SEQ ID NO: 1857838 - DNA, 25 bp, Homo sapien
aatgcaaacttcattcgcggtggtc

SEQ ID NO: 1857839 - DNA, 25 bp, Homo sapien
gcaaacttcattcgcggtggtctcc

SEQ ID NO: 1857840 - DNA, 25 bp, Homo sapien
cgctcgccacgacactgagtgttct

SEQ ID NO: 1857841 - DNA, 25 bp, Homo sapien
tccagatatcgcgagaggtcccgcg

SEQ ID NO: 1857842 - DNA, 25 bp, Homo sapien
tgttttgggcggaagcgctggacga

SEQ ID NO: 1857843 - DNA, 25 bp, Homo sapien
cgctggacgagaggaggaattactc

SEQ ID NO: 1857844 - DNA, 25 bp, Homo sapien
cctggcctaatacttgtatttttgg

SEQ ID NO: 1857845 - DNA, 25 bp, Homo sapien
ctgtgcctggcctaatacttgtatt

SEQ ID NO: 1857846 - DNA, 25 bp, Homo sapien
tcttgacctaaggtgatacacccgc

SEQ ID NO: 1857847 - DNA, 25 bp, Homo sapien
tcgaactcttgacctaaggtgatac

SEQ ID NO: 1857848 - DNA, 25 bp, Homo sapien
taactccctagtccctgaagagaca

SEQ ID NO: 1857849 - DNA, 25 bp, Homo sapien
tatagtcactttactcctgccggcc

SEQ ID NO: 1857850 - DNA, 25 bp, Homo sapien
gagttctaccactgtctctctcgga

SEQ ID NO: 1857851 - DNA, 25 bp, Homo sapien
tcccgacctggtgttgtcttagaca

SEQ ID NO: 1857852 - DNA, 25 bp, Homo sapien
cttaacacctgaggcaaactacttt

SEQ ID NO: 1857853 - DNA, 25 bp, Homo sapien
accttgtcatgaaggcaggtttcca

SEQ ID NO: 1857854 - DNA, 25 bp, Homo sapien
ccagaaaatctagttaccttgcaaa

SEQ ID NO: 1857855 - DNA, 25 bp, Homo sapien
acttgagggtgcaattagtctggct

SEQ ID NO: 1857856 - DNA, 25 bp, Homo sapien
gcatgcatgtgtgaaccagctgtga

SEQ ID NO: 1857857 - DNA, 25 bp, Homo sapien
tggccacttggctaggactctgcca

SEQ ID NO: 1857858 - DNA, 25 bp, Homo sapien
ttggagtctccgtgatgccaggcta

SEQ ID NO: 1857859 - DNA, 25 bp, Homo sapien
gactgacctcttccgggcctttgga

SEQ ID NO: 1857860 - DNA, 25 bp, Homo sapien
tattgacaccactagatagctggcc

SEQ ID NO: 1857861 - DNA, 25 bp, Homo sapien
tgcaaaggacaagcagagttcacag

SEQ ID NO: 1857862 - DNA, 25 bp, Homo sapien
tgaaactccgatgaactgtacctga

SEQ ID NO: 1857863 - DNA, 25 bp, Homo sapien
tcagaattatggatcagaggcagac

SEQ ID NO: 1857864 - DNA, 25 bp, Homo sapien
tctgaggagacaggctactttggcc

SEQ ID NO: 1857865 - DNA, 25 bp, Homo sapien
tgaagcattctgtccaaatgtcctg

SEQ ID NO: 1857866 - DNA, 25 bp, Homo sapien
tacagagatgcgtatgcccagaagt

SEQ ID NO: 1857867 - DNA, 25 bp, Homo sapien
gcagtcaagtagtgaatggatacca

SEQ ID NO: 1857868 - DNA, 25 bp, Homo sapien
cattacctttcagtggtgacccatc

SEQ ID NO: 1857869 - DNA, 25 bp, Homo sapien
gagaaaggcgcatgtctgtttgcac

SEQ ID NO: 1857870 - DNA, 25 bp, Homo sapien
cagcataggactcagtgtacactta

SEQ ID NO: 1857871 - DNA, 25 bp, Homo sapien
tagtgaatgttcaaaccccaaagca

SEQ ID NO: 1857872 - DNA, 25 bp, Homo sapien
acccaccgtggacgcagtgtgacta

SEQ ID NO: 1857873 - DNA, 25 bp, Homo sapien
cataactaagtggaggcctggaact

SEQ ID NO: 1857874 - DNA, 25 bp, Homo sapien
tcaatccaagaatgagccatggcgg

SEQ ID NO: 1857875 - DNA, 25 bp, Homo sapien
cagactttttcagactagtggaggg

SEQ ID NO: 1857876 - DNA, 25 bp, Homo sapien
tactaacattaggtgaacagcattc

SEQ ID NO: 1857877 - DNA, 25 bp, Homo sapien
taggtagaatgctaaatagaaatgc

SEQ ID NO: 1857878 - DNA, 25 bp, Homo sapien
tgaagtagatgtttcttccccacaa

SEQ ID NO: 1857879 - DNA, 25 bp, Homo sapien
tatgtctaaggtatttctaggtaga

SEQ ID NO: 1857880 - DNA, 25 bp, Homo sapien
atggggtcatgggaccgtccaccat

SEQ ID NO: 1857881 - DNA, 25 bp, Homo sapien
tagtctctgtgaggatcccagacat

SEQ ID NO: 1857882 - DNA, 25 bp, Homo sapien
ggagccgctcgacaatccaggaagt

SEQ ID NO: 1857883 - DNA, 25 bp, Homo sapien
tgtagctccgaatacaaaagggcag

SEQ ID NO: 1857884 - DNA, 25 bp, Homo sapien
ggtttccatgaacaggtgtcgcctc

SEQ ID NO: 1857885 - DNA, 25 bp, Homo sapien
gaatggagggctggtactttcttct

SEQ ID NO: 1857886 - DNA, 25 bp, Homo sapien
ccccttgctcagaacgacctatttt

SEQ ID NO: 1857887 - DNA, 25 bp, Homo sapien
gctatctgaggcacttgtctgtcct

SEQ ID NO: 1857888 - DNA, 25 bp, Homo sapien
tgcaccttaggcattgttctctgat

SEQ ID NO: 1857889 - DNA, 25 bp, Homo sapien
ttcagctttgcccattggatgaggt

SEQ ID NO: 1857890 - DNA, 25 bp, Homo sapien
tcatcggacactcaggctgtttcca

SEQ ID NO: 1857891 - DNA, 25 bp, Homo sapien
tatacgtaaggatatatataaggag

SEQ ID NO: 1857892 - DNA, 25 bp, Homo sapien
ttccatttgtcatcggacactcagg

SEQ ID NO: 1857893 - DNA, 25 bp, Homo sapien
gatcctgtacgcgaggcatcaccat

SEQ ID NO: 1857894 - DNA, 25 bp, Homo sapien
tgggtattcacaactgcacaggtaa

SEQ ID NO: 1857895 - DNA, 25 bp, Homo sapien
ggactagagacactgatctgcccaa

SEQ ID NO: 1857896 - DNA, 25 bp, Homo sapien
tagcataggcctagacatgatggtg

SEQ ID NO: 1857897 - DNA, 25 bp, Homo sapien
tgccgggtgacccaatccactgggt

SEQ ID NO: 1857898 - DNA, 25 bp, Homo sapien
ggccctctgcacaagacagactcag

SEQ ID NO: 1857899 - DNA, 25 bp, Homo sapien
aagacagactcagcaaatctgcgag

SEQ ID NO: 1857900 - DNA, 25 bp, Homo sapien
gggattctgccaactccccacctcg

SEQ ID NO: 1857901 - DNA, 25 bp, Homo sapien
caaatatggaactgaagcccggctg

SEQ ID NO: 1857902 - DNA, 25 bp, Homo sapien
ggttgagaccgtgttttttagatga

SEQ ID NO: 1857903 - DNA, 25 bp, Homo sapien
aggtggtcaggcctcacccacggtg

SEQ ID NO: 1857904 - DNA, 25 bp, Homo sapien
catctggacagacacatggcaaata

SEQ ID NO: 1857905 - DNA, 25 bp, Homo sapien
ttactccagggcaaagcatgatcct

SEQ ID NO: 1857906 - DNA, 25 bp, Homo sapien
gctcatagggaggacgagacacact

SEQ ID NO: 1857907 - DNA, 25 bp, Homo sapien
gaagggagcggttcatttcctgccc

SEQ ID NO: 1857908 - DNA, 25 bp, Homo sapien
taggactctttcagtgctcataggg

SEQ ID NO: 1857909 - DNA, 25 bp, Homo sapien
tcagagcccaagtggtctaggactc

SEQ ID NO: 1857910 - DNA, 25 bp, Homo sapien
actcagagttctggctccctccggg

SEQ ID NO: 1857911 - DNA, 25 bp, Homo sapien
tctcagcctcgaggccactcagagt

SEQ ID NO: 1857912 - DNA, 25 bp, Homo sapien
ggccactgggaagaactgcggctct

SEQ ID NO: 1857913 - DNA, 25 bp, Homo sapien
actgggaagaactgcggctctcctc

SEQ ID NO: 1857914 - DNA, 25 bp, Homo sapien
caaggccaggaaaaggcaaggttct

SEQ ID NO: 1857915 - DNA, 25 bp, Homo sapien
aagcctggacccctgactgctgggc

SEQ ID NO: 1857916 - DNA, 25 bp, Homo sapien
gcaaggttctgccctcggccaaagc

SEQ ID NO: 1857917 - DNA, 25 bp, Homo sapien
ctgcgaggcaaatcaaggccaggaa

SEQ ID NO: 1857918 - DNA, 25 bp, Homo sapien
gagaggtagcttcggtacagaacac

SEQ ID NO: 1857919 - DNA, 25 bp, Homo sapien
tcggtacagaacacgagaacccaag

SEQ ID NO: 1857920 - DNA, 25 bp, Homo sapien
cacgagaacccaaggttggtactgc

SEQ ID NO: 1857921 - DNA, 25 bp, Homo sapien
ctacggagaggtagcttcggtacag

SEQ ID NO: 1857922 - DNA, 25 bp, Homo sapien
gaggagtcggtttccaatgccagcc

SEQ ID NO: 1857923 - DNA, 25 bp, Homo sapien
ggagggaggagtcggtttccaatgc

SEQ ID NO: 1857924 - DNA, 25 bp, Homo sapien
ggagtcggtttccaatgccagccgc

SEQ ID NO: 1857925 - DNA, 25 bp, Homo sapien
atgccagccgccctaacaacccagg

SEQ ID NO: 1857926 - DNA, 25 bp, Homo sapien
agttcttgggctttaccacctgcca

SEQ ID NO: 1857927 - DNA, 25 bp, Homo sapien
ggagaagcagttcttgggctttacc

SEQ ID NO: 1857928 - DNA, 25 bp, Homo sapien
gaagcagttcttgggctttaccacc

SEQ ID NO: 1857929 - DNA, 25 bp, Homo sapien
ttgggctttaccacctgccacctgg

SEQ ID NO: 1857930 - DNA, 25 bp, Homo sapien
gaaaaggtcttgtctgatgtataat

SEQ ID NO: 1857931 - DNA, 25 bp, Homo sapien
aagaaaaggtcttgtctgatgtata

SEQ ID NO: 1857932 - DNA, 25 bp, Homo sapien
aaaaggtcttgtctgatgtataatc

SEQ ID NO: 1857933 - DNA, 25 bp, Homo sapien
aaaggtcttgtctgatgtataatct

SEQ ID NO: 1857934 - DNA, 25 bp, Homo sapien
acttaaatgccttatagataccaag

SEQ ID NO: 1857935 - DNA, 25 bp, Homo sapien
ttctgaaattatgtaagatgaaaac

SEQ ID NO: 1857936 - DNA, 25 bp, Homo sapien
tcacaatattgaattccatgaaacc

SEQ ID NO: 1857937 - DNA, 25 bp, Homo sapien
gcatgcaatgaagcatccacaaaac

SEQ ID NO: 1857938 - DNA, 25 bp, Homo sapien
tcaggtacttccagcagtgaatcca

SEQ ID NO: 1857939 - DNA, 25 bp, Homo sapien
cactcaggtacttccagcagtgaat

SEQ ID NO: 1857940 - DNA, 25 bp, Homo sapien
tgcacactcaggtacttccagcagt

SEQ ID NO: 1857941 - DNA, 25 bp, Homo sapien
caggtacttccagcagtgaatccag

SEQ ID NO: 1857942 - DNA, 25 bp, Homo sapien
ggagtaaggggggagcccagcttgc

SEQ ID NO: 1857943 - DNA, 25 bp, Homo sapien
gagtaaggggggagcccagcttgca

SEQ ID NO: 1857944 - DNA, 25 bp, Homo sapien
gtaaggggggagcccagcttgcagc

SEQ ID NO: 1857945 - DNA, 25 bp, Homo sapien
agtaaggggggagcccagcttgcag

SEQ ID NO: 1857946 - DNA, 25 bp, Homo sapien
ccatgaggtcgccaactagcaggaa

SEQ ID NO: 1857947 - DNA, 25 bp, Homo sapien
cagccatgaggtcgccaactagcag

SEQ ID NO: 1857948 - DNA, 25 bp, Homo sapien
atgaggtcgccaactagcaggaagg

SEQ ID NO: 1857949 - DNA, 25 bp, Homo sapien
ttcacagccatgaggtcgccaacta

SEQ ID NO: 1857950 - DNA, 25 bp, Homo sapien
tccagccattaccagggttggcctc

SEQ ID NO: 1857951 - DNA, 25 bp, Homo sapien
ctgcctccagccattaccagggttg

SEQ ID NO: 1857952 - DNA, 25 bp, Homo sapien
ccccgcttgggtccgcaaggcagtg

SEQ ID NO: 1857953 - DNA, 25 bp, Homo sapien
gccaacaccctgtaccaagacctgc

SEQ ID NO: 1857954 - DNA, 25 bp, Homo sapien
acgaacttggtatagctccggatgg

SEQ ID NO: 1857955 - DNA, 25 bp, Homo sapien
cgaacttggtatagctccggatggc

SEQ ID NO: 1857956 - DNA, 25 bp, Homo sapien
gaacttggtatagctccggatggcc

SEQ ID NO: 1857957 - DNA, 25 bp, Homo sapien
acttggtatagctccggatggccag

SEQ ID NO: 1857958 - DNA, 25 bp, Homo sapien
tgcagacttcagcaacacatgccct

SEQ ID NO: 1857959 - DNA, 25 bp, Homo sapien
tcacaagcacgctgcacatgccttt

SEQ ID NO: 1857960 - DNA, 25 bp, Homo sapien
cagagaaggcctggggggcagaaac

SEQ ID NO: 1857961 - DNA, 25 bp, Homo sapien
gactgaagggagtcccgagaaggag

SEQ ID NO: 1857962 - DNA, 25 bp, Homo sapien
tcggcctttaagccacatacagaaa

SEQ ID NO: 1857963 - DNA, 25 bp, Homo sapien
agacaaatctgttgactgctgttgt

SEQ ID NO: 1857964 - DNA, 25 bp, Homo sapien
ctcggcctttaagccacatacagaa

SEQ ID NO: 1857965 - DNA, 25 bp, Homo sapien
aagcacggcagcctctggtcagaca

SEQ ID NO: 1857966 - DNA, 25 bp, Homo sapien
atgtaagcacggcagcctctggtca

SEQ ID NO: 1857967 - DNA, 25 bp, Homo sapien
ctgatgtaagcacggcagcctctgg

SEQ ID NO: 1857968 - DNA, 25 bp, Homo sapien
acggcagcctctggtcagacagctg

SEQ ID NO: 1857969 - DNA, 25 bp, Homo sapien
agcagcacacggaaagaaggacaag

SEQ ID NO: 1857970 - DNA, 25 bp, Homo sapien
cagcacacggaaagaaggacaagtc

SEQ ID NO: 1857971 - DNA, 25 bp, Homo sapien
gcacacggaaagaaggacaagtcct

SEQ ID NO: 1857972 - DNA, 25 bp, Homo sapien
gcagcacacggaaagaaggacaagt

SEQ ID NO: 1857973 - DNA, 25 bp, Homo sapien
tggattctggtcgtttcccagcccc

SEQ ID NO: 1857974 - DNA, 25 bp, Homo sapien
agtgggccagcaggttacagcccca

SEQ ID NO: 1857975 - DNA, 25 bp, Homo sapien
ctgtcatccaccaggtaggcattga

SEQ ID NO: 1857976 - DNA, 25 bp, Homo sapien
agaaaaccacatcgcccaggaggtg

SEQ ID NO: 1857977 - DNA, 25 bp, Homo sapien
taggcattgatgaagtgggccagca

SEQ ID NO: 1857978 - DNA, 25 bp, Homo sapien
ttgaggtcagtgagtcccatgtgcc

SEQ ID NO: 1857979 - DNA, 25 bp, Homo sapien
tgtttaggtacagagtgccctggga

SEQ ID NO: 1857980 - DNA, 25 bp, Homo sapien
aggttccccaagatgcagtgctgag

SEQ ID NO: 1857981 - DNA, 25 bp, Homo sapien
tctaatcttgtcgtccctgcctgtg

SEQ ID NO: 1857982 - DNA, 25 bp, Homo sapien
tcacctctaaagaaagcacatactg

SEQ ID NO: 1857983 - DNA, 25 bp, Homo sapien
tctaaagaaagcacatactgaaaag

SEQ ID NO: 1857984 - DNA, 25 bp, Homo sapien
ttcacctctaaagaaagcacatact

SEQ ID NO: 1857985 - DNA, 25 bp, Homo sapien
cctctaaagaaagcacatactgaaa

SEQ ID NO: 1857986 - DNA, 25 bp, Homo sapien
gttccacttttacatgagccatggc

SEQ ID NO: 1857987 - DNA, 25 bp, Homo sapien
gccatgtagtgaagtcccaggccag

SEQ ID NO: 1857988 - DNA, 25 bp, Homo sapien
gcttggacacgctatggagctctgg

SEQ ID NO: 1857989 - DNA, 25 bp, Homo sapien
catggcctgaaaagggctaagcagc

SEQ ID NO: 1857990 - DNA, 25 bp, Homo sapien
atcttcccaatggagctcagcacac

SEQ ID NO: 1857991 - DNA, 25 bp, Homo sapien
tgaaaatcttcccaatggagctcag

SEQ ID NO: 1857992 - DNA, 25 bp, Homo sapien
acgaagaatcccagcagcccttcct

SEQ ID NO: 1857993 - DNA, 25 bp, Homo sapien
aaaatcttcccaatggagctcagca

SEQ ID NO: 1857994 - DNA, 25 bp, Homo sapien
catgaagaaccaagtagaaaggcaa

SEQ ID NO: 1857995 - DNA, 25 bp, Homo sapien
agaaccaagtagaaaggcaaagagc

SEQ ID NO: 1857996 - DNA, 25 bp, Homo sapien
gaagaaccaagtagaaaggcaaaga

SEQ ID NO: 1857997 - DNA, 25 bp, Homo sapien
tgaagaaccaagtagaaaggcaaag

SEQ ID NO: 1857998 - DNA, 25 bp, Homo sapien
atttcccattaatgaccccaaaatg

SEQ ID NO: 1857999 - DNA, 25 bp, Homo sapien
gaatgggccaatttcccattaatga

SEQ ID NO: 1858000 - DNA, 25 bp, Homo sapien
tcagtctaggggaatgggccaattt

SEQ ID NO: 1858001 - DNA, 25 bp, Homo sapien
tcataatcagtctaggggaatgggc

SEQ ID NO: 1858002 - DNA, 25 bp, Homo sapien
gaaaaggtgcagcaaccaatcccag

SEQ ID NO: 1858003 - DNA, 25 bp, Homo sapien
gctgcccttgataagagatgacgaa

SEQ ID NO: 1858004 - DNA, 25 bp, Homo sapien
tgaactcacacagcactagggcaga

SEQ ID NO: 1858005 - DNA, 25 bp, Homo sapien
gaccctggacagactattgaagcca

SEQ ID NO: 1858006 - DNA, 25 bp, Homo sapien
tgtacttggcctcccgtcccacaaa

SEQ ID NO: 1858007 - DNA, 25 bp, Homo sapien
acttggcctcccgtcccacaaactg

SEQ ID NO: 1858008 - DNA, 25 bp, Homo sapien
gtgggccaacatgcgggacacacac

SEQ ID NO: 1858009 - DNA, 25 bp, Homo sapien
gggtgggccaacatgcgggacacac

SEQ ID NO: 1858010 - DNA, 25 bp, Homo sapien
gggggtgggccaacatgcgggacac

SEQ ID NO: 1858011 - DNA, 25 bp, Homo sapien
cagggggtgggccaacatgcgggac

SEQ ID NO: 1858012 - DNA, 25 bp, Homo sapien
ctacaagtgctcaggagggagaaac

SEQ ID NO: 1858013 - DNA, 25 bp, Homo sapien
ctgtctctggaactggccctcgagg

SEQ ID NO: 1858014 - DNA, 25 bp, Homo sapien
gactcgccaccctcggcctgtctct

SEQ ID NO: 1858015 - DNA, 25 bp, Homo sapien
agagcatggggtggggactcgccac

SEQ ID NO: 1858016 - DNA, 25 bp, Homo sapien
cttcacaactttcttcagggaagtc

SEQ ID NO: 1858017 - DNA, 25 bp, Homo sapien
cagggaagtcttcatatcatccttg

SEQ ID NO: 1858018 - DNA, 25 bp, Homo sapien
catccttgttggaaacctgctcaat

SEQ ID NO: 1858019 - DNA, 25 bp, Homo sapien
ggaaacctgctcaatctcatctgga

SEQ ID NO: 1858020 - DNA, 25 bp, Homo sapien
cccgagtcacagtagagagggcgtt

SEQ ID NO: 1858021 - DNA, 25 bp, Homo sapien
ggactcaggcctcggaacagcccta

SEQ ID NO: 1858022 - DNA, 25 bp, Homo sapien
gcgttggacatcagccggggactca

SEQ ID NO: 1858023 - DNA, 25 bp, Homo sapien
ctaccccgagtcacagtagagaggg

SEQ ID NO: 1858024 - DNA, 25 bp, Homo sapien
tcccagaagacaggctcaagaacgc

SEQ ID NO: 1858025 - DNA, 25 bp, Homo sapien
tacttggcaaactcagccatgattt

SEQ ID NO: 1858026 - DNA, 25 bp, Homo sapien
cccgcagggaatgatgaagtcttca

SEQ ID NO: 1858027 - DNA, 25 bp, Homo sapien
cagcaacttaaatgctgcaacacag

SEQ ID NO: 1858028 - DNA, 25 bp, Homo sapien
ttcttgatgacagttggggagcttg

SEQ ID NO: 1858029 - DNA, 25 bp, Homo sapien
tcttgatgacagttggggagcttgc

SEQ ID NO: 1858030 - DNA, 25 bp, Homo sapien
tgatgacagttggggagcttgcagg

SEQ ID NO: 1858031 - DNA, 25 bp, Homo sapien
cttgatgacagttggggagcttgca

SEQ ID NO: 1858032 - DNA, 25 bp, Homo sapien
gggaccagtgtcctagattggctcc

SEQ ID NO: 1858033 - DNA, 25 bp, Homo sapien
aagctgtatggttcacctgctcgca

SEQ ID NO: 1858034 - DNA, 25 bp, Homo sapien
taaccaacagatggagacaccagag

SEQ ID NO: 1858035 - DNA, 25 bp, Homo sapien
catgtcctctctgtacacgcttaga

SEQ ID NO: 1858036 - DNA, 25 bp, Homo sapien
cctcttttctgttggtgtgggcttt

SEQ ID NO: 1858037 - DNA, 25 bp, Homo sapien
cttttctgttggtgtgggctttcct

SEQ ID NO: 1858038 - DNA, 25 bp, Homo sapien
tcttttctgttggtgtgggctttcc

SEQ ID NO: 1858039 - DNA, 25 bp, Homo sapien
ctcttttctgttggtgtgggctttc

SEQ ID NO: 1858040 - DNA, 25 bp, Homo sapien
ccccagcacattggtcccaagggtg

SEQ ID NO: 1858041 - DNA, 25 bp, Homo sapien
tggggggcatcggctcatgacccac

SEQ ID NO: 1858042 - DNA, 25 bp, Homo sapien
cgtaggtgaagaagctcggcagata

SEQ ID NO: 1858043 - DNA, 25 bp, Homo sapien
agctcggcagatagaggaccttcct

SEQ ID NO: 1858044 - DNA, 25 bp, Homo sapien
aaagggacgctcagagtctcgtggt

SEQ ID NO: 1858045 - DNA, 25 bp, Homo sapien
gagtctcgtggtgattcagcctcac

SEQ ID NO: 1858046 - DNA, 25 bp, Homo sapien
caaagacaaagggacgctcagagtc

SEQ ID NO: 1858047 - DNA, 25 bp, Homo sapien
gtctcgtggtgattcagcctcacca

SEQ ID NO: 1858048 - DNA, 25 bp, Homo sapien
tgccaagtgcctatgcatccctctg

SEQ ID NO: 1858049 - DNA, 25 bp, Homo sapien
ggtctcaatttctggtagtccctac

SEQ ID NO: 1858050 - DNA, 25 bp, Homo sapien
gagacatccctacctcggtctcaat

SEQ ID NO: 1858051 - DNA, 25 bp, Homo sapien
tcatctgtaccgcattgctggccac

SEQ ID NO: 1858052 - DNA, 25 bp, Homo sapien
cccatctccctacggcgcctctggt

SEQ ID NO: 1858053 - DNA, 25 bp, Homo sapien
gcctcccatctccctacggcgcctc

SEQ ID NO: 1858054 - DNA, 25 bp, Homo sapien
catctccctacggcgcctctggtcc

SEQ ID NO: 1858055 - DNA, 25 bp, Homo sapien
ctcccatctccctacggcgcctctg

SEQ ID NO: 1858056 - DNA, 25 bp, Homo sapien
gcaggggatggctgagcgccgtcac

SEQ ID NO: 1858057 - DNA, 25 bp, Homo sapien
ctgagcgccgtcacgcccgcgccca

SEQ ID NO: 1858058 - DNA, 25 bp, Homo sapien
ggatgagcagcttcacgtagagcag

SEQ ID NO: 1858059 - DNA, 25 bp, Homo sapien
cccgcgcccagtgccacgaaaagag

SEQ ID NO: 1858060 - DNA, 25 bp, Homo sapien
ctcagtggtcggggcgttgtcccca

SEQ ID NO: 1858061 - DNA, 25 bp, Homo sapien
cagtggtcggggcgttgtccccaga

SEQ ID NO: 1858062 - DNA, 25 bp, Homo sapien
tcagtggtcggggcgttgtccccag

SEQ ID NO: 1858063 - DNA, 25 bp, Homo sapien
gtgcgcgggcggtggatcgcgagct

SEQ ID NO: 1858064 - DNA, 25 bp, Homo sapien
gtggatcgcgagctcgagcctcgac

SEQ ID NO: 1858065 - DNA, 25 bp, Homo sapien
caggccgagggtggcgaggatgtgc

SEQ ID NO: 1858066 - DNA, 25 bp, Homo sapien
tggcgaggatgtgcgcggtgcgcgg

SEQ ID NO: 1858067 - DNA, 25 bp, Homo sapien
ggcgccacttccgggtccgaagctc

SEQ ID NO: 1858068 - DNA, 25 bp, Homo sapien
ccacttccgggtccgaagctcccat

SEQ ID NO: 1858069 - DNA, 25 bp, Homo sapien
cagggcgccacttccgggtccgaag

SEQ ID NO: 1858070 - DNA, 25 bp, Homo sapien
gccacttccgggtccgaagctccca

SEQ ID NO: 1858071 - DNA, 25 bp, Homo sapien
aggtcactccccgtcacgtgacggg

SEQ ID NO: 1858072 - DNA, 25 bp, Homo sapien
gcgcccggcggcgaggtcactcccc

SEQ ID NO: 1858073 - DNA, 25 bp, Homo sapien
ccggcggcgaggtcactccccgtca

SEQ ID NO: 1858074 - DNA, 25 bp, Homo sapien
ggcgaggtcactccccgtcacgtga

SEQ ID NO: 1858075 - DNA, 25 bp, Homo sapien
ccgggggtcaatggtggcgggcagc

SEQ ID NO: 1858076 - DNA, 25 bp, Homo sapien
tgggacacgccggatgtggctcccc

SEQ ID NO: 1858077 - DNA, 25 bp, Homo sapien
agctcgggagcgtggtgcggcgggt

SEQ ID NO: 1858078 - DNA, 25 bp, Homo sapien
ccggttggaggcctagcaggacact

SEQ ID NO: 1858079 - DNA, 25 bp, Homo sapien
cctggcttcgggagttttctctgca

SEQ ID NO: 1858080 - DNA, 25 bp, Homo sapien
gtcgccgcggcctgcgtggaactct

SEQ ID NO: 1858081 - DNA, 25 bp, Homo sapien
aatatggtctgaggcgcttccaagc

SEQ ID NO: 1858082 - DNA, 25 bp, Homo sapien
aactctgcgcgagctgaatctcctg

SEQ ID NO: 1858083 - DNA, 25 bp, Homo sapien
ctcagagtccgtggttgtaaaattt

SEQ ID NO: 1858084 - DNA, 25 bp, Homo sapien
cagatgtcccctcggcgactgtggg

SEQ ID NO: 1858085 - DNA, 25 bp, Homo sapien
agctgtggagccttcgcacgccttc

SEQ ID NO: 1858086 - DNA, 25 bp, Homo sapien
ccagcctctttgtccgatcgcattt

SEQ ID NO: 1858087 - DNA, 25 bp, Homo sapien
tccccatccttctgaaacttcctca

SEQ ID NO: 1858088 - DNA, 25 bp, Homo sapien
ttccccatccttctgaaacttcctc

SEQ ID NO: 1858089 - DNA, 25 bp, Homo sapien
ccccatccttctgaaacttcctcac

SEQ ID NO: 1858090 - DNA, 25 bp, Homo sapien
taacatttaggaacacccaggccac

SEQ ID NO: 1858091 - DNA, 25 bp, Homo sapien
cagggctgaaccaactcggaataat

SEQ ID NO: 1858092 - DNA, 25 bp, Homo sapien
gcagtgagccgcaaggagcctgtat

SEQ ID NO: 1858093 - DNA, 25 bp, Homo sapien
tagcaggcaaaatatagggaggttc

SEQ ID NO: 1858094 - DNA, 25 bp, Homo sapien
gtgatatcctgaaggtgttggacat

SEQ ID NO: 1858095 - DNA, 25 bp, Homo sapien
gaaggtgttggacatatccactggg

SEQ ID NO: 1858096 - DNA, 25 bp, Homo sapien
tatccactgggtagaagggcaggaa

SEQ ID NO: 1858097 - DNA, 25 bp, Homo sapien
caggaagaggtaccagtgggacctc

SEQ ID NO: 1858098 - DNA, 25 bp, Homo sapien
ttggatgctcaaagcactggcagct

SEQ ID NO: 1858099 - DNA, 25 bp, Homo sapien
cttggatgctcaaagcactggcagc

SEQ ID NO: 1858100 - DNA, 25 bp, Homo sapien
gaggggtaagacaatcctctgaggc

SEQ ID NO: 1858101 - DNA, 25 bp, Homo sapien
agctgaggggtaagacaatcctctg

SEQ ID NO: 1858102 - DNA, 25 bp, Homo sapien
tagtgatgtattgattgcttaaaac

SEQ ID NO: 1858103 - DNA, 25 bp, Homo sapien
gcaaagaagaatgctagtaattgtt

SEQ ID NO: 1858104 - DNA, 25 bp, Homo sapien
tagtaattgttaaacctagtgatgt

SEQ ID NO: 1858105 - DNA, 25 bp, Homo sapien
gataataatagccaggttcggtggc

SEQ ID NO: 1858106 - DNA, 25 bp, Homo sapien
catcctttcggtggttcgggtgcca

SEQ ID NO: 1858107 - DNA, 25 bp, Homo sapien
ggctgtgccctgaccgtgggtttct

SEQ ID NO: 1858108 - DNA, 25 bp, Homo sapien
ctgcctgccagacgggaatccttgt

SEQ ID NO: 1858109 - DNA, 25 bp, Homo sapien
tcgtgcctgctgagccagtgagtca

SEQ ID NO: 1858110 - DNA, 25 bp, Homo sapien
cagtggtcagcaggccacatgcagt

SEQ ID NO: 1858111 - DNA, 25 bp, Homo sapien
cccggtgaactaaggtcaaagctct

SEQ ID NO: 1858112 - DNA, 25 bp, Homo sapien
catggagcagaacaataagacaagc

SEQ ID NO: 1858113 - DNA, 25 bp, Homo sapien
catgtagctcgtagatgccagagcc

SEQ ID NO: 1858114 - DNA, 25 bp, Homo sapien
gctcggtgacagcagagtcgattct

SEQ ID NO: 1858115 - DNA, 25 bp, Homo sapien
taaaactcgccaatgatgctgaagg

SEQ ID NO: 1858116 - DNA, 25 bp, Homo sapien
ctgagtgggagtatggagagtggct

SEQ ID NO: 1858117 - DNA, 25 bp, Homo sapien
cactgatacctaagcttttccaggg

SEQ ID NO: 1858118 - DNA, 25 bp, Homo sapien
cgctgtgggccccaacaaaggaact

SEQ ID NO: 1858119 - DNA, 25 bp, Homo sapien
ttcctctttcggaatgtccgctgtg

SEQ ID NO: 1858120 - DNA, 25 bp, Homo sapien
tccgctgtgggccccaacaaaggaa

SEQ ID NO: 1858121 - DNA, 25 bp, Homo sapien
aggaagcccccgaagatcaacttct

SEQ ID NO: 1858122 - DNA, 25 bp, Homo sapien
gctgtcagggacctgtcccactgcc

SEQ ID NO: 1858123 - DNA, 25 bp, Homo sapien
tcagggacctgtcccactgcccgct

SEQ ID NO: 1858124 - DNA, 25 bp, Homo sapien
ccactgcccgctggaaccagctcag

SEQ ID NO: 1858125 - DNA, 25 bp, Homo sapien
tgcccgctggaaccagctcagcagg

SEQ ID NO: 1858126 - DNA, 25 bp, Homo sapien
tctgggtggataagtttgctgggca

SEQ ID NO: 1858127 - DNA, 25 bp, Homo sapien
gaagactgttcaggacacaagtact

SEQ ID NO: 1858128 - DNA, 25 bp, Homo sapien
gggtctgggtggataagtttgctgg

SEQ ID NO: 1858129 - DNA, 25 bp, Homo sapien
ggtgcccgtggagcacatgtgaaga

SEQ ID NO: 1858130 - DNA, 25 bp, Homo sapien
ggagagcaacaacacccggggatca

SEQ ID NO: 1858131 - DNA, 25 bp, Homo sapien
taccttccaaccaggagagcaacaa

SEQ ID NO: 1858132 - DNA, 25 bp, Homo sapien
gcaacaacacccggggatcaagggc

SEQ ID NO: 1858133 - DNA, 25 bp, Homo sapien
acaacacccggggatcaagggccat

SEQ ID NO: 1858134 - DNA, 25 bp, Homo sapien
attcctatctgggaaatcagggcag

SEQ ID NO: 1858135 - DNA, 25 bp, Homo sapien
ggctggggcgaaaatctgaatcata

SEQ ID NO: 1858136 - DNA, 25 bp, Homo sapien
tctgggaaatcagggcagtctgaag

SEQ ID NO: 1858137 - DNA, 25 bp, Homo sapien
cctatctgggaaatcagggcagtct

SEQ ID NO: 1858138 - DNA, 25 bp, Homo sapien
aaacagaatgagtaatgaggtcaga

SEQ ID NO: 1858139 - DNA, 25 bp, Homo sapien
gtaaacagaatgagtaatgaggtca

SEQ ID NO: 1858140 - DNA, 25 bp, Homo sapien
taaacagaatgagtaatgaggtcag

SEQ ID NO: 1858141 - DNA, 25 bp, Homo sapien
acagaatgagtaatgaggtcagaag

SEQ ID NO: 1858142 - DNA, 25 bp, Homo sapien
ggcctcgcagaagtttcacacttct

SEQ ID NO: 1858143 - DNA, 25 bp, Homo sapien
tcgcagaagtttcacacttctgttt

SEQ ID NO: 1858144 - DNA, 25 bp, Homo sapien
cctcgcagaagtttcacacttctgt

SEQ ID NO: 1858145 - DNA, 25 bp, Homo sapien
ccggcctcgcagaagtttcacactt

SEQ ID NO: 1858146 - DNA, 25 bp, Homo sapien
cacgctggaggttctcccgcctttt

SEQ ID NO: 1858147 - DNA, 25 bp, Homo sapien
ccacgctggaggttctcccgccttt

SEQ ID NO: 1858148 - DNA, 25 bp, Homo sapien
cccttctcagcccgagtgttcagga

SEQ ID NO: 1858149 - DNA, 25 bp, Homo sapien
tgctccccttctcagcccgagtgtt

SEQ ID NO: 1858150 - DNA, 25 bp, Homo sapien
cttctcagcccgagtgttcaggact

SEQ ID NO: 1858151 - DNA, 25 bp, Homo sapien
tctcagcccgagtgttcaggactct

SEQ ID NO: 1858152 - DNA, 25 bp, Homo sapien
accaacttcatcttcacagggctcc

SEQ ID NO: 1858153 - DNA, 25 bp, Homo sapien
caacttcatcttcacagggctcccc

SEQ ID NO: 1858154 - DNA, 25 bp, Homo sapien
aaaccaacttcatcttcacagggct

SEQ ID NO: 1858155 - DNA, 25 bp, Homo sapien
cttaaaccaacttcatcttcacagg

SEQ ID NO: 1858156 - DNA, 25 bp, Homo sapien
gctccagctggaattcgtactttta

SEQ ID NO: 1858157 - DNA, 25 bp, Homo sapien
ggaactcagcaaagcatcgaagaca

SEQ ID NO: 1858158 - DNA, 25 bp, Homo sapien
ttgttggtcaagagctccagctgga

SEQ ID NO: 1858159 - DNA, 25 bp, Homo sapien
cttctgtagaaagatgttgttggtc

SEQ ID NO: 1858160 - DNA, 25 bp, Homo sapien
cttttcactccagggaccatactca

SEQ ID NO: 1858161 - DNA, 25 bp, Homo sapien
gatgtagctgcaactgataatttgt

SEQ ID NO: 1858162 - DNA, 25 bp, Homo sapien
cagggaccatactcagcagcaaggt

SEQ ID NO: 1858163 - DNA, 25 bp, Homo sapien
cagatgtagctgcaactgataattt

SEQ ID NO: 1858164 - DNA, 25 bp, Homo sapien
tgcatccctttcccgcaggagcggg

SEQ ID NO: 1858165 - DNA, 25 bp, Homo sapien
ccttcccagaaatcaggattcgctg

SEQ ID NO: 1858166 - DNA, 25 bp, Homo sapien
gctgagcttttagccggccggaacg

SEQ ID NO: 1858167 - DNA, 25 bp, Homo sapien
gccggaacgactgagggctgcatcc

SEQ ID NO: 1858168 - DNA, 25 bp, Homo sapien
gggcgcgccgagttatgcagatcaa

SEQ ID NO: 1858169 - DNA, 25 bp, Homo sapien
caatcggcctctggttggctggagt

SEQ ID NO: 1858170 - DNA, 25 bp, Homo sapien
gtcgtggcggcgtagagaccattct

SEQ ID NO: 1858171 - DNA, 25 bp, Homo sapien
agaccattctgaccgcgagagctgg

SEQ ID NO: 1858172 - DNA, 25 bp, Homo sapien
aaatcaactcgcttgcccacctgcg

SEQ ID NO: 1858173 - DNA, 25 bp, Homo sapien
ggcagcgccctcagttgtcctccga

SEQ ID NO: 1858174 - DNA, 25 bp, Homo sapien
ggatgctcttgtccaaaatcaactc

SEQ ID NO: 1858175 - DNA, 25 bp, Homo sapien
gacctgcacgccaccaagctggcgc

SEQ ID NO: 1858176 - DNA, 25 bp, Homo sapien
aggtgggcccgctactgggcagcgg

SEQ ID NO: 1858177 - DNA, 25 bp, Homo sapien
ccctggagtcgcagtaccaggtggg

SEQ ID NO: 1858178 - DNA, 25 bp, Homo sapien
ggctcggtctactcaggcatccgcg

SEQ ID NO: 1858179 - DNA, 25 bp, Homo sapien
cagcggcggcttcggctcggtctac

SEQ ID NO: 1858180 - DNA, 25 bp, Homo sapien
caaatagcagcctttctggcaggtc

SEQ ID NO: 1858181 - DNA, 25 bp, Homo sapien
cattagatggtgcttggccctgaga

SEQ ID NO: 1858182 - DNA, 25 bp, Homo sapien
caggacagtgcttgatacaggaaca

SEQ ID NO: 1858183 - DNA, 25 bp, Homo sapien
taggccaaccttcgaagaaatccag

SEQ ID NO: 1858184 - DNA, 25 bp, Homo sapien
gcagttctggatggtgtgccttcca

SEQ ID NO: 1858185 - DNA, 25 bp, Homo sapien
tagtaaaactccgagtgaactggtc

SEQ ID NO: 1858186 - DNA, 25 bp, Homo sapien
tgggagaaatacttgaacttgcctc

SEQ ID NO: 1858187 - DNA, 25 bp, Homo sapien
gaaagatgcgcattctaacctggag

SEQ ID NO: 1858188 - DNA, 25 bp, Homo sapien
gcacaaggccacatatcattaactg

SEQ ID NO: 1858189 - DNA, 25 bp, Homo sapien
tccattgttgaggaacaccattccc

SEQ ID NO: 1858190 - DNA, 25 bp, Homo sapien
tcaaaagccctgacaaaccaagcag

SEQ ID NO: 1858191 - DNA, 25 bp, Homo sapien
taacttccggtacaacattcccaga

SEQ ID NO: 1858192 - DNA, 25 bp, Homo sapien
taactcagcgtcttgaagtgatctt

SEQ ID NO: 1858193 - DNA, 25 bp, Homo sapien
tccttgtaaaggttgtatgcatgct

SEQ ID NO: 1858194 - DNA, 25 bp, Homo sapien
tttggaagatccagtgcaaataact

SEQ ID NO: 1858195 - DNA, 25 bp, Homo sapien
tgtggcggcgtttcctgcccacagt

SEQ ID NO: 1858196 - DNA, 25 bp, Homo sapien
cacgtagatgctgaacttggcctca

SEQ ID NO: 1858197 - DNA, 25 bp, Homo sapien
tacaataaaagaggaagcagccgat

SEQ ID NO: 1858198 - DNA, 25 bp, Homo sapien
gatgagctcgtaagtgatgatccac

SEQ ID NO: 1858199 - DNA, 25 bp, Homo sapien
gaacagggtccaagtgactagctcc

SEQ ID NO: 1858200 - DNA, 25 bp, Homo sapien
gtggtattaaggacagagaagatgc

SEQ ID NO: 1858201 - DNA, 25 bp, Homo sapien
attaaggacagagaagatgcccacc

SEQ ID NO: 1858202 - DNA, 25 bp, Homo sapien
ggtattaaggacagagaagatgccc

SEQ ID NO: 1858203 - DNA, 25 bp, Homo sapien
ctgggtggtattaaggacagagaag

SEQ ID NO: 1858204 - DNA, 25 bp, Homo sapien
tttatacttgttttaccagagcacc

SEQ ID NO: 1858205 - DNA, 25 bp, Homo sapien
ttatacttgttttaccagagcacct

SEQ ID NO: 1858206 - DNA, 25 bp, Homo sapien
tatacttgttttaccagagcacctc

SEQ ID NO: 1858207 - DNA, 25 bp, Homo sapien
tctagaggtcaactcatggcaggga

SEQ ID NO: 1858208 - DNA, 25 bp, Homo sapien
tcatcattcactacactggcgagct

SEQ ID NO: 1858209 - DNA, 25 bp, Homo sapien
tcacgttgtcgtgcaagcatatcgc

SEQ ID NO: 1858210 - DNA, 25 bp, Homo sapien
tcacacattaggagaacacagggct

SEQ ID NO: 1858211 - DNA, 25 bp, Homo sapien
ctattgtgtatctacaggtgctggg

SEQ ID NO: 1858212 - DNA, 25 bp, Homo sapien
tattgtgtatctacaggtgctgggg

SEQ ID NO: 1858213 - DNA, 25 bp, Homo sapien
tctattgtgtatctacaggtgctgg

SEQ ID NO: 1858214 - DNA, 25 bp, Homo sapien
catctattgtgtatctacaggtgct

SEQ ID NO: 1858215 - DNA, 25 bp, Homo sapien
tgccctactgcaattcagcttcatc

SEQ ID NO: 1858216 - DNA, 25 bp, Homo sapien
tgccaagaaaaaaggattgccctac

SEQ ID NO: 1858217 - DNA, 25 bp, Homo sapien
tcaggtggtagaaaggtgagttcac

SEQ ID NO: 1858218 - DNA, 25 bp, Homo sapien
tacagatttgcttatcccagggtta

SEQ ID NO: 1858219 - DNA, 25 bp, Homo sapien
caggatgttccggttgtgattataa

SEQ ID NO: 1858220 - DNA, 25 bp, Homo sapien
ggcagtagggtctctacttgcagaa

SEQ ID NO: 1858221 - DNA, 25 bp, Homo sapien
taaataccctcaatgagcaggatgt

SEQ ID NO: 1858222 - DNA, 25 bp, Homo sapien
tgttctcctgaaagagtggcagtag

SEQ ID NO: 1858223 - DNA, 25 bp, Homo sapien
ggttttgccatggctgccaaggcca

SEQ ID NO: 1858224 - DNA, 25 bp, Homo sapien
gttttgccatggctgccaaggccag

SEQ ID NO: 1858225 - DNA, 25 bp, Homo sapien
cggggttttgccatggctgccaagg

SEQ ID NO: 1858226 - DNA, 25 bp, Homo sapien
gggttttgccatggctgccaaggcc

SEQ ID NO: 1858227 - DNA, 25 bp, Homo sapien
tattgccctggctccggtttttgta

SEQ ID NO: 1858228 - DNA, 25 bp, Homo sapien
gaaattcgtctcttgtaggaaatta

SEQ ID NO: 1858229 - DNA, 25 bp, Homo sapien
tgactgtacgagacaccaagccaaa

SEQ ID NO: 1858230 - DNA, 25 bp, Homo sapien
tttctgctgtggagaatctccgctg

SEQ ID NO: 1858231 - DNA, 25 bp, Homo sapien
tctacggccatgatggtgaagaccc

SEQ ID NO: 1858232 - DNA, 25 bp, Homo sapien
gtgaagacccctgacaacacggtgc

SEQ ID NO: 1858233 - DNA, 25 bp, Homo sapien
tacactgagtacaggaggaagcagc

SEQ ID NO: 1858234 - DNA, 25 bp, Homo sapien
aagatgagatacatgtctacggcca

SEQ ID NO: 1858235 - DNA, 25 bp, Homo sapien
gcagtcatcccacaccactgctgct

SEQ ID NO: 1858236 - DNA, 25 bp, Homo sapien
tggcagtcatcccacaccactgctg

SEQ ID NO: 1858237 - DNA, 25 bp, Homo sapien
tttggcagtcatcccacaccactgc

SEQ ID NO: 1858238 - DNA, 25 bp, Homo sapien
agtcatcccacaccactgctgctgt

SEQ ID NO: 1858239 - DNA, 25 bp, Homo sapien
tttataaagcactaacccattttga

SEQ ID NO: 1858240 - DNA, 25 bp, Homo sapien
tcatgacttaatcccttccccaaag

SEQ ID NO: 1858241 - DNA, 25 bp, Homo sapien
tataaagcactaacccattttgaag

SEQ ID NO: 1858242 - DNA, 25 bp, Homo sapien
ataaagcactaacccattttgaagg

SEQ ID NO: 1858243 - DNA, 25 bp, Homo sapien
gcaagccagatggaagctgtatcac

SEQ ID NO: 1858244 - DNA, 25 bp, Homo sapien
gagtgtcccaaaaagagcaagccag

SEQ ID NO: 1858245 - DNA, 25 bp, Homo sapien
cagatgcctggcgattgctcttggc

SEQ ID NO: 1858246 - DNA, 25 bp, Homo sapien
tagacagggcatgtccaggatgact

SEQ ID NO: 1858247 - DNA, 25 bp, Homo sapien
gggtaccatacagccagatgcaaat

SEQ ID NO: 1858248 - DNA, 25 bp, Homo sapien
ccttgaatgtggtgtgatgcctgca

SEQ ID NO: 1858249 - DNA, 25 bp, Homo sapien
gaccaatgagggtatgtcatgaacc

SEQ ID NO: 1858250 - DNA, 25 bp, Homo sapien
tcctggtaagagaagatgatgtggc

SEQ ID NO: 1858251 - DNA, 25 bp, Homo sapien
tgaggccggctatcacatctctatg

SEQ ID NO: 1858252 - DNA, 25 bp, Homo sapien
taaaggctctacttgtgggagggaa

SEQ ID NO: 1858253 - DNA, 25 bp, Homo sapien
tagcacttggtcagtagcctctggg

SEQ ID NO: 1858254 - DNA, 25 bp, Homo sapien
tctggttcaaggtttctcacagggc

SEQ ID NO: 1858255 - DNA, 25 bp, Homo sapien
gtggtcccactgctcatagccctgg

SEQ ID NO: 1858256 - DNA, 25 bp, Homo sapien
ccctggagactatggcttagagctc

SEQ ID NO: 1858257 - DNA, 25 bp, Homo sapien
cccctgagttcacccaatcttggaa

SEQ ID NO: 1858258 - DNA, 25 bp, Homo sapien
gtgggcagaacctgtacctctctat

SEQ ID NO: 1858259 - DNA, 25 bp, Homo sapien
tgccgacaggaaacaaggtttgagg

SEQ ID NO: 1858260 - DNA, 25 bp, Homo sapien
ggaatgaacacccactcatcttgct

SEQ ID NO: 1858261 - DNA, 25 bp, Homo sapien
gacaggtaatgtgccgacaggaaac

SEQ ID NO: 1858262 - DNA, 25 bp, Homo sapien
ctcacatatgggaatgaacacccac

SEQ ID NO: 1858263 - DNA, 25 bp, Homo sapien
taggaactttgagccccgcctctcg

SEQ ID NO: 1858264 - DNA, 25 bp, Homo sapien
gcttcttccctctcgcgggtaggaa

SEQ ID NO: 1858265 - DNA, 25 bp, Homo sapien
cttccccgtccacctgtgtgcccag

SEQ ID NO: 1858266 - DNA, 25 bp, Homo sapien
cagcccctgacgttaccggtcggct

SEQ ID NO: 1858267 - DNA, 25 bp, Homo sapien
cttgcgcagctcaccaatggcagcg

SEQ ID NO: 1858268 - DNA, 25 bp, Homo sapien
attggtcggcccgtccacggcttgc

SEQ ID NO: 1858269 - DNA, 25 bp, Homo sapien
cacggcttgcgcagctcaccaatgg

SEQ ID NO: 1858270 - DNA, 25 bp, Homo sapien
gcaggattccggctcccaattggtc

SEQ ID NO: 1858271 - DNA, 25 bp, Homo sapien
gatcctaatccctgaatcccgcggg

SEQ ID NO: 1858272 - DNA, 25 bp, Homo sapien
ggattggaccaaacccttccagatc

SEQ ID NO: 1858273 - DNA, 25 bp, Homo sapien
cagcgaagcgaacagcgagctttgg

SEQ ID NO: 1858274 - DNA, 25 bp, Homo sapien
cctgggttggccctcagattgcggg

SEQ ID NO: 1858275 - DNA, 25 bp, Homo sapien
gtactctttagccatcacccctaag

SEQ ID NO: 1858276 - DNA, 25 bp, Homo sapien
cgtgtgccagacaatttactcattt

SEQ ID NO: 1858277 - DNA, 25 bp, Homo sapien
tattgggatgtacttcgtgtgccag

SEQ ID NO: 1858278 - DNA, 25 bp, Homo sapien
tcttctgtatctagggatttcccta

SEQ ID NO: 1858279 - DNA, 25 bp, Homo sapien
aagagtccagcttcagccatattgg

SEQ ID NO: 1858280 - DNA, 25 bp, Homo sapien
tgcttaaagccgacacactggatga

SEQ ID NO: 1858281 - DNA, 25 bp, Homo sapien
cactggatgagatccctaaggaagt

SEQ ID NO: 1858282 - DNA, 25 bp, Homo sapien
gagagatctggactggacctataaa

SEQ ID NO: 1858283 - DNA, 25 bp, Homo sapien
ttagtcaccagctgggtcacactgg

SEQ ID NO: 1858284 - DNA, 25 bp, Homo sapien
tagtcaccagctgggtcacactggt

SEQ ID NO: 1858285 - DNA, 25 bp, Homo sapien
agtcaccagctgggtcacactggtg

SEQ ID NO: 1858286 - DNA, 25 bp, Homo sapien
gtcaccagctgggtcacactggtgg

SEQ ID NO: 1858287 - DNA, 25 bp, Homo sapien
gatgtgtcacttggaccactgtcag

SEQ ID NO: 1858288 - DNA, 25 bp, Homo sapien
tcactaccgccgataggtgctgtct

SEQ ID NO: 1858289 - DNA, 25 bp, Homo sapien
caagtacatgtttgccgatgcccca

SEQ ID NO: 1858290 - DNA, 25 bp, Homo sapien
attccatgccgcgtggatgggccca

SEQ ID NO: 1858291 - DNA, 25 bp, Homo sapien
tcccaagcatcagtgtctcagagtc

SEQ ID NO: 1858292 - DNA, 25 bp, Homo sapien
gacgagccccatcaaactagttggg

SEQ ID NO: 1858293 - DNA, 25 bp, Homo sapien
gaatttctgtgtccagacgagcccc

SEQ ID NO: 1858294 - DNA, 25 bp, Homo sapien
tcaacatgtgaaagcaatctaggtc

SEQ ID NO: 1858295 - DNA, 25 bp, Homo sapien
cagttttagaagctgccatagatgc

SEQ ID NO: 1858296 - DNA, 25 bp, Homo sapien
aaagatgagcttcccacagtatcag

SEQ ID NO: 1858297 - DNA, 25 bp, Homo sapien
taaagtacagtaccacaagaccagg

SEQ ID NO: 1858298 - DNA, 25 bp, Homo sapien
ctgtgccagcttgccaggataggtg

SEQ ID NO: 1858299 - DNA, 25 bp, Homo sapien
ctttcgcagcgatcgcgagcgtgtg

SEQ ID NO: 1858300 - DNA, 25 bp, Homo sapien
cgagcgtgtggcgattgcttctgtc

SEQ ID NO: 1858301 - DNA, 25 bp, Homo sapien
ggcagccagaacctaggtcagggtc

SEQ ID NO: 1858302 - DNA, 25 bp, Homo sapien
caggcgtagtgctcctgcttcctgg

SEQ ID NO: 1858303 - DNA, 25 bp, Homo sapien
agccttggccttctgggctcaggta

SEQ ID NO: 1858304 - DNA, 25 bp, Homo sapien
ccttggccttctgggctcaggtaat

SEQ ID NO: 1858305 - DNA, 25 bp, Homo sapien
aatcctcttacctcagcctcccaag

SEQ ID NO: 1858306 - DNA, 25 bp, Homo sapien
tgtagccttggccttctgggctcag

SEQ ID NO: 1858307 - DNA, 25 bp, Homo sapien
gcacctactaaatgctaagtgcttg

SEQ ID NO: 1858308 - DNA, 25 bp, Homo sapien
tactaaatgctaagtgcttggggat

SEQ ID NO: 1858309 - DNA, 25 bp, Homo sapien
acctactaaatgctaagtgcttggg

SEQ ID NO: 1858310 - DNA, 25 bp, Homo sapien
ctaaatgctaagtgcttggggataa

SEQ ID NO: 1858311 - DNA, 25 bp, Homo sapien
tcatctagtcgccaagcagtatctc

SEQ ID NO: 1858312 - DNA, 25 bp, Homo sapien
gatgggctacctgagctcatctagt

SEQ ID NO: 1858313 - DNA, 25 bp, Homo sapien
tttccagagccactatctctgctgt

SEQ ID NO: 1858314 - DNA, 25 bp, Homo sapien
tacctgagctcatctagtcgccaag

SEQ ID NO: 1858315 - DNA, 25 bp, Homo sapien
gtggagcgggccaaacctcagctgc

SEQ ID NO: 1858316 - DNA, 25 bp, Homo sapien
gtccgtgacgtcatcaggctgcgct

SEQ ID NO: 1858317 - DNA, 25 bp, Homo sapien
gcccctggacctcccaggttgagag

SEQ ID NO: 1858318 - DNA, 25 bp, Homo sapien
cgcagtactggacccgagcgcgacg

SEQ ID NO: 1858319 - DNA, 25 bp, Homo sapien
tcaccaaatatagatggccactgct

SEQ ID NO: 1858320 - DNA, 25 bp, Homo sapien
catgcctttgttcaagacacgtgag

SEQ ID NO: 1858321 - DNA, 25 bp, Homo sapien
cttgggatctaagaactgagtgacc

SEQ ID NO: 1858322 - DNA, 25 bp, Homo sapien
tacataggtcgagtaagcttagtct

SEQ ID NO: 1858323 - DNA, 25 bp, Homo sapien
gtctaaagtgaggtgagggaaagcc

SEQ ID NO: 1858324 - DNA, 25 bp, Homo sapien
aaagtgaggtgagggaaagccttgg

SEQ ID NO: 1858325 - DNA, 25 bp, Homo sapien
gtgaggtgagggaaagccttggcaa

SEQ ID NO: 1858326 - DNA, 25 bp, Homo sapien
ctaaagtgaggtgagggaaagcctt

SEQ ID NO: 1858327 - DNA, 25 bp, Homo sapien
ttacttcttttgtaccctctcacac

SEQ ID NO: 1858328 - DNA, 25 bp, Homo sapien
tgctctctggactcttcactaaacc

SEQ ID NO: 1858329 - DNA, 25 bp, Homo sapien
acttcttttgtaccctctcacactt

SEQ ID NO: 1858330 - DNA, 25 bp, Homo sapien
gactcttcactaaacccaccttaga

SEQ ID NO: 1858331 - DNA, 25 bp, Homo sapien
gtggtgccctgcacccgttccaagg

SEQ ID NO: 1858332 - DNA, 25 bp, Homo sapien
tcttttgagtggtgccctgcacccg

SEQ ID NO: 1858333 - DNA, 25 bp, Homo sapien
tggacttaggtcttttgagtggtgc

SEQ ID NO: 1858334 - DNA, 25 bp, Homo sapien
ttaggtcttttgagtggtgccctgc

SEQ ID NO: 1858335 - DNA, 25 bp, Homo sapien
agatctacacatgggatggccgcca

SEQ ID NO: 1858336 - DNA, 25 bp, Homo sapien
cccgggacactctgctatctgtgga

SEQ ID NO: 1858337 - DNA, 25 bp, Homo sapien
gaccgctggatcaagctagacctga

SEQ ID NO: 1858338 - DNA, 25 bp, Homo sapien
gatggttctgctcaggtgttggccc

SEQ ID NO: 1858339 - DNA, 25 bp, Homo sapien
gagcagttgctctaagccacagtgg

SEQ ID NO: 1858340 - DNA, 25 bp, Homo sapien
gaagccgaggccagtctgatgctga

SEQ ID NO: 1858341 - DNA, 25 bp, Homo sapien
gagcagcactttaaccagcggtctg

SEQ ID NO: 1858342 - DNA, 25 bp, Homo sapien
cattgagggccctggtgagtctact

SEQ ID NO: 1858343 - DNA, 25 bp, Homo sapien
ccactgactggtcccaaagtcaggg

SEQ ID NO: 1858344 - DNA, 25 bp, Homo sapien
actgactggtcccaaagtcagggtg

SEQ ID NO: 1858345 - DNA, 25 bp, Homo sapien
cactgactggtcccaaagtcagggt

SEQ ID NO: 1858346 - DNA, 25 bp, Homo sapien
gctcaggttgaggtatttatgttaa

SEQ ID NO: 1858347 - DNA, 25 bp, Homo sapien
aatatcctgtgcttgagtggtccca

SEQ ID NO: 1858348 - DNA, 25 bp, Homo sapien
gttatcagagataccagcacactcc

SEQ ID NO: 1858349 - DNA, 25 bp, Homo sapien
agagggtgaccttgcgggtagaggg

SEQ ID NO: 1858350 - DNA, 25 bp, Homo sapien
ccaaccgacatagtgaaattagagg

SEQ ID NO: 1858351 - DNA, 25 bp, Homo sapien
caataaagatgatacttgaagttct

SEQ ID NO: 1858352 - DNA, 25 bp, Homo sapien
tctagtggaggtgactgagcacagc

SEQ ID NO: 1858353 - DNA, 25 bp, Homo sapien
gggcagacacatacaataaagatga

SEQ ID NO: 1858354 - DNA, 25 bp, Homo sapien
tcttgccgcagattcagaaggttct

SEQ ID NO: 1858355 - DNA, 25 bp, Homo sapien
tgccgagaaatttgtgaaagccgtt

SEQ ID NO: 1858356 - DNA, 25 bp, Homo sapien
tcccatcaggtgagcatgtggtccc

SEQ ID NO: 1858357 - DNA, 25 bp, Homo sapien
tgcctcttagagcagtcttgccgca

SEQ ID NO: 1858358 - DNA, 25 bp, Homo sapien
tgaatacccgttcccacttgagcat

SEQ ID NO: 1858359 - DNA, 25 bp, Homo sapien
gagtgccagcccacctcatgaatac

SEQ ID NO: 1858360 - DNA, 25 bp, Homo sapien
tccttgtttaggatgcacgtgcttc

SEQ ID NO: 1858361 - DNA, 25 bp, Homo sapien
cctggcagtgggtgaacttcattct

SEQ ID NO: 1858362 - DNA, 25 bp, Homo sapien
agggaataggaattttgaacatgaa

SEQ ID NO: 1858363 - DNA, 25 bp, Homo sapien
gggaataggaattttgaacatgaaa

SEQ ID NO: 1858364 - DNA, 25 bp, Homo sapien
atagtgggaaagttccaggaccctg

SEQ ID NO: 1858365 - DNA, 25 bp, Homo sapien
gccagggttgtaatgttagatagtg

SEQ ID NO: 1858366 - DNA, 25 bp, Homo sapien
gttgtaatgttagatagtgggaaag

SEQ ID NO: 1858367 - DNA, 25 bp, Homo sapien
aaggaggccagggttgtaatgttag

SEQ ID NO: 1858368 - DNA, 25 bp, Homo sapien
aaatgtcctgtctgctaggtcctga

SEQ ID NO: 1858369 - DNA, 25 bp, Homo sapien
tgagcatgggcatcaaacaagagcc

SEQ ID NO: 1858370 - DNA, 25 bp, Homo sapien
cccgctgtgggtaataggactatta

SEQ ID NO: 1858371 - DNA, 25 bp, Homo sapien
tgctcgatttctgggaacgttcccc

SEQ ID NO: 1858372 - DNA, 25 bp, Homo sapien
tgtcctcagtgctttgtgatctgag

SEQ ID NO: 1858373 - DNA, 25 bp, Homo sapien
tttgtcctcagtgctttgtgatctg

SEQ ID NO: 1858374 - DNA, 25 bp, Homo sapien
tatttttaatgcctgtgtggctctg

SEQ ID NO: 1858375 - DNA, 25 bp, Homo sapien
tgctgtttgtcctcagtgctttgtg

SEQ ID NO: 1858376 - DNA, 25 bp, Homo sapien
ggtttgtttaatcggagcctgttca

SEQ ID NO: 1858377 - DNA, 25 bp, Homo sapien
ctgcttgctgctcaagagggggctc

SEQ ID NO: 1858378 - DNA, 25 bp, Homo sapien
ttgctgctcaagagggggctcaaag

SEQ ID NO: 1858379 - DNA, 25 bp, Homo sapien
aattgtgcagctcctgttacaagca

SEQ ID NO: 1858380 - DNA, 25 bp, Homo sapien
gtgcagctcctgttacaagcaggga

SEQ ID NO: 1858381 - DNA, 25 bp, Homo sapien
gaggcgtcagaccaattagtgtcac

SEQ ID NO: 1858382 - DNA, 25 bp, Homo sapien
tcagtctgtgtgactaaaataacag

SEQ ID NO: 1858383 - DNA, 25 bp, Homo sapien
ggtggcactgtgacaatccaggatc

SEQ ID NO: 1858384 - DNA, 25 bp, Homo sapien
cacagctcactccatggtggcactg

SEQ ID NO: 1858385 - DNA, 25 bp, Homo sapien
gtttctccaccagttagtcatcgcc

SEQ ID NO: 1858386 - DNA, 25 bp, Homo sapien
tggtttctccaccagttagtcatcg

SEQ ID NO: 1858387 - DNA, 25 bp, Homo sapien
ggtttctccaccagttagtcatcgc

SEQ ID NO: 1858388 - DNA, 25 bp, Homo sapien
gctggtttctccaccagttagtcat

SEQ ID NO: 1858389 - DNA, 25 bp, Homo sapien
ctttggccccaagagtcctttgtgt

SEQ ID NO: 1858390 - DNA, 25 bp, Homo sapien
tgtatggccttagttccctgggcaa

SEQ ID NO: 1858391 - DNA, 25 bp, Homo sapien
ccatccacgcccttcctctgttctg

SEQ ID NO: 1858392 - DNA, 25 bp, Homo sapien
tcctacttaactggtttcatctcgg

SEQ ID NO: 1858393 - DNA, 25 bp, Homo sapien
gaagatggattaactccgcactccc

SEQ ID NO: 1858394 - DNA, 25 bp, Homo sapien
gggatcgccacatgaccacttcaag

SEQ ID NO: 1858395 - DNA, 25 bp, Homo sapien
ccttgcctgcctgtcgaagatggat

SEQ ID NO: 1858396 - DNA, 25 bp, Homo sapien
tgatttactggccactgtcaccgta

SEQ ID NO: 1858397 - DNA, 25 bp, Homo sapien
ctcccactatttggcttggaaagtg

SEQ ID NO: 1858398 - DNA, 25 bp, Homo sapien
cccactatttggcttggaaagtgct

SEQ ID NO: 1858399 - DNA, 25 bp, Homo sapien
actatttggcttggaaagtgcttcc

SEQ ID NO: 1858400 - DNA, 25 bp, Homo sapien
atttggcttggaaagtgcttcccac

SEQ ID NO: 1858401 - DNA, 25 bp, Homo sapien
ttgattcctgagtgccgcctctgct

SEQ ID NO: 1858402 - DNA, 25 bp, Homo sapien
tccttgattcctgagtgccgcctct

SEQ ID NO: 1858403 - DNA, 25 bp, Homo sapien
ccttgattcctgagtgccgcctctg

SEQ ID NO: 1858404 - DNA, 25 bp, Homo sapien
cttgattcctgagtgccgcctctgc

SEQ ID NO: 1858405 - DNA, 25 bp, Homo sapien
cctccgctagtcagaccatgacatt

SEQ ID NO: 1858406 - DNA, 25 bp, Homo sapien
agtcagaccatgacatttactcagc

SEQ ID NO: 1858407 - DNA, 25 bp, Homo sapien
cgctagtcagaccatgacatttact

SEQ ID NO: 1858408 - DNA, 25 bp, Homo sapien
caccctccgctagtcagaccatgac

SEQ ID NO: 1858409 - DNA, 25 bp, Homo sapien
gctttgtgttctttattgcctctcc

SEQ ID NO: 1858410 - DNA, 25 bp, Homo sapien
tgtgttctttattgcctctcccttg

SEQ ID NO: 1858411 - DNA, 25 bp, Homo sapien
tttgtgttctttattgcctctccct

SEQ ID NO: 1858412 - DNA, 25 bp, Homo sapien
ctttgtgttctttattgcctctccc

SEQ ID NO: 1858413 - DNA, 25 bp, Homo sapien
caccttggtcctattgaggcttgaa

SEQ ID NO: 1858414 - DNA, 25 bp, Homo sapien
ggccaagtggaagcctgtgctggtt

SEQ ID NO: 1858415 - DNA, 25 bp, Homo sapien
gaagccatgcttgaacactaggttg

SEQ ID NO: 1858416 - DNA, 25 bp, Homo sapien
gaagtgcctgcttgatcctgatcaa

SEQ ID NO: 1858417 - DNA, 25 bp, Homo sapien
tctcttgccgaagaaacttcagttc

SEQ ID NO: 1858418 - DNA, 25 bp, Homo sapien
cacagagagcagcatgttcttccgg

SEQ ID NO: 1858419 - DNA, 25 bp, Homo sapien
tagacgagcgtcaggaggataaaga

SEQ ID NO: 1858420 - DNA, 25 bp, Homo sapien
tggtccagtaggcatagacgagcgt

SEQ ID NO: 1858421 - DNA, 25 bp, Homo sapien
tccttgccattagaaccttcctggg

SEQ ID NO: 1858422 - DNA, 25 bp, Homo sapien
ggtgtgcactgtgcctacggcattc

SEQ ID NO: 1858423 - DNA, 25 bp, Homo sapien
gaaccgacaagtctgaggagcacct

SEQ ID NO: 1858424 - DNA, 25 bp, Homo sapien
tacggcattcatcagaccagcgctt

SEQ ID NO: 1858425 - DNA, 25 bp, Homo sapien
ggctttgttcattaggctgtttttc

SEQ ID NO: 1858426 - DNA, 25 bp, Homo sapien
ctttgttcattaggctgtttttctc

SEQ ID NO: 1858427 - DNA, 25 bp, Homo sapien
tgttcattaggctgtttttctcctt

SEQ ID NO: 1858428 - DNA, 25 bp, Homo sapien
gaggctttgttcattaggctgtttt

SEQ ID NO: 1858429 - DNA, 25 bp, Homo sapien
ctgtggagtctggagttcacggcct

SEQ ID NO: 1858430 - DNA, 25 bp, Homo sapien
ggagtctggagttcacggcctccag

SEQ ID NO: 1858431 - DNA, 25 bp, Homo sapien
ggtctctccgacactgggacagctt

SEQ ID NO: 1858432 - DNA, 25 bp, Homo sapien
ccaggtctctccgacactgggacag

SEQ ID NO: 1858433 - DNA, 25 bp, Homo sapien
catccaccccctgccctgcagcccc

SEQ ID NO: 1858434 - DNA, 25 bp, Homo sapien
atccaccccctgccctgcagcccca

SEQ ID NO: 1858435 - DNA, 25 bp, Homo sapien
tccaccccctgccctgcagccccac

SEQ ID NO: 1858436 - DNA, 25 bp, Homo sapien
ccacctccagccccataagcagggc

SEQ ID NO: 1858437 - DNA, 25 bp, Homo sapien
ggccacctccagccccataagcagg

SEQ ID NO: 1858438 - DNA, 25 bp, Homo sapien
gccacctccagccccataagcaggg

SEQ ID NO: 1858439 - DNA, 25 bp, Homo sapien
cacctccagccccataagcagggcc

SEQ ID NO: 1858440 - DNA, 25 bp, Homo sapien
gaccggcaaagtagagacagccaag

SEQ ID NO: 1858441 - DNA, 25 bp, Homo sapien
gactgtgaccggcaaagtagagaca

SEQ ID NO: 1858442 - DNA, 25 bp, Homo sapien
gctgtgactgtgaccggcaaagtag

SEQ ID NO: 1858443 - DNA, 25 bp, Homo sapien
caaagtagagacagccaaggcagag

SEQ ID NO: 1858444 - DNA, 25 bp, Homo sapien
agctccacggctagctgctgttggg

SEQ ID NO: 1858445 - DNA, 25 bp, Homo sapien
gaatttcgtgccagctcatgcacag

SEQ ID NO: 1858446 - DNA, 25 bp, Homo sapien
tcatgcacagataactgccccagca

SEQ ID NO: 1858447 - DNA, 25 bp, Homo sapien
agcatcctggccaggtcagctgatg

SEQ ID NO: 1858448 - DNA, 25 bp, Homo sapien
gtccgcgcccgaagatgccagctgt

SEQ ID NO: 1858449 - DNA, 25 bp, Homo sapien
gccttgcaagttagcgcccgagcca

SEQ ID NO: 1858450 - DNA, 25 bp, Homo sapien
tgataaactagcaaaagcttgttca

SEQ ID NO: 1858451 - DNA, 25 bp, Homo sapien
tcagaaaggcgagggaaccgctgca

SEQ ID NO: 1858452 - DNA, 25 bp, Homo sapien
gaattcattaattaagatgctggca

SEQ ID NO: 1858453 - DNA, 25 bp, Homo sapien
ctctgagcacacaacttttaataag

SEQ ID NO: 1858454 - DNA, 25 bp, Homo sapien
cacattcaatactcagacccgctgg

SEQ ID NO: 1858455 - DNA, 25 bp, Homo sapien
cttttaataagaggacaatatctac

SEQ ID NO: 1858456 - DNA, 25 bp, Homo sapien
tctactgctactgagcatcagtgca

SEQ ID NO: 1858457 - DNA, 25 bp, Homo sapien
gattctcccgcttctttttagtcat

SEQ ID NO: 1858458 - DNA, 25 bp, Homo sapien
ctctagagcgacgcccagattctcc

SEQ ID NO: 1858459 - DNA, 25 bp, Homo sapien
tagagcgacgcccagattctcccgc

SEQ ID NO: 1858460 - DNA, 25 bp, Homo sapien
tctagagcgacgcccagattctccc

SEQ ID NO: 1858461 - DNA, 25 bp, Homo sapien
ttgccgggatcccccagtcatcact

SEQ ID NO: 1858462 - DNA, 25 bp, Homo sapien
ttacttgccgggatcccccagtcat

SEQ ID NO: 1858463 - DNA, 25 bp, Homo sapien
gttacttgccgggatcccccagtca

SEQ ID NO: 1858464 - DNA, 25 bp, Homo sapien
ccgggatcccccagtcatcactgga

SEQ ID NO: 1858465 - DNA, 25 bp, Homo sapien
caagtcgctatgtgcgcatgctcaa

SEQ ID NO: 1858466 - DNA, 25 bp, Homo sapien
cctcattggccaccgagtcagcggg

SEQ ID NO: 1858467 - DNA, 25 bp, Homo sapien
tgcgcatgctcaagtcttcgtgctt

SEQ ID NO: 1858468 - DNA, 25 bp, Homo sapien
tcattggccaccgagtcagcgggag

SEQ ID NO: 1858469 - DNA, 25 bp, Homo sapien
tctgctagctgcgtcttcccagcta

SEQ ID NO: 1858470 - DNA, 25 bp, Homo sapien
tagctgcgtcttcccagctagttca

SEQ ID NO: 1858471 - DNA, 25 bp, Homo sapien
gctagctgcgtcttcccagctagtt

SEQ ID NO: 1858472 - DNA, 25 bp, Homo sapien
tgctagctgcgtcttcccagctagt

SEQ ID NO: 1858473 - DNA, 25 bp, Homo sapien
caggccagggctatcttggcggcac

SEQ ID NO: 1858474 - DNA, 25 bp, Homo sapien
ccagggctatcttggcggcactgtg

SEQ ID NO: 1858475 - DNA, 25 bp, Homo sapien
ggcaattggtgtgggactgagtcca

SEQ ID NO: 1858476 - DNA, 25 bp, Homo sapien
atggcaattggtgtgggactgagtc

SEQ ID NO: 1858477 - DNA, 25 bp, Homo sapien
gatcggttggagtctatttgcaggc

SEQ ID NO: 1858478 - DNA, 25 bp, Homo sapien
ttgtgagcacaaaagagaagactcg

SEQ ID NO: 1858479 - DNA, 25 bp, Homo sapien
gaagactcgggcattcagaaggccc

SEQ ID NO: 1858480 - DNA, 25 bp, Homo sapien
actggtgccccacgtgactgaggct

SEQ ID NO: 1858481 - DNA, 25 bp, Homo sapien
ggctcacgtctctgctacttcctga

SEQ ID NO: 1858482 - DNA, 25 bp, Homo sapien
cattactgggaacgttacattgcac

SEQ ID NO: 1858483 - DNA, 25 bp, Homo sapien
atttagttaagtgaccctgcccata

SEQ ID NO: 1858484 - DNA, 25 bp, Homo sapien
gaaggagcagaacacggctgcctat

SEQ ID NO: 1858485 - DNA, 25 bp, Homo sapien
tgggaggcacggatccgccagctca

SEQ ID NO: 1858486 - DNA, 25 bp, Homo sapien
taatgaaaacacctagctcctggca

SEQ ID NO: 1858487 - DNA, 25 bp, Homo sapien
tccaacttcccagcacaagaggagg

SEQ ID NO: 1858488 - DNA, 25 bp, Homo sapien
tggcagggcgcagccgacacatcgc

SEQ ID NO: 1858489 - DNA, 25 bp, Homo sapien
aaagccggcgcagacgctccagtca

SEQ ID NO: 1858490 - DNA, 25 bp, Homo sapien
tttttatgggctcacttagcttgga

SEQ ID NO: 1858491 - DNA, 25 bp, Homo sapien
tatgggctcacttagcttggaggaa

SEQ ID NO: 1858492 - DNA, 25 bp, Homo sapien
tcaaagccggcgcagacgctccagt

SEQ ID NO: 1858493 - DNA, 25 bp, Homo sapien
gcccatttgttactatttgcaaaga

SEQ ID NO: 1858494 - DNA, 25 bp, Homo sapien
ggtctatttatccagggacaccaca

SEQ ID NO: 1858495 - DNA, 25 bp, Homo sapien
tggtgtacaccaaacatgggctttc

SEQ ID NO: 1858496 - DNA, 25 bp, Homo sapien
accacagctttggaggcagcaaaca

SEQ ID NO: 1858497 - DNA, 25 bp, Homo sapien
tgctgtggtgcaaagacgtagtcct

SEQ ID NO: 1858498 - DNA, 25 bp, Homo sapien
cttgtcaaaagcgtgaatgcctgtg

SEQ ID NO: 1858499 - DNA, 25 bp, Homo sapien
taggccatctgctacgccaaggaga

SEQ ID NO: 1858500 - DNA, 25 bp, Homo sapien
aatgcctgtggctgaacgtggaagt

SEQ ID NO: 1858501 - DNA, 25 bp, Homo sapien
ccagtttctaccaggccctttaatg

SEQ ID NO: 1858502 - DNA, 25 bp, Homo sapien
taccaggccctttaatgctctatcc

SEQ ID NO: 1858503 - DNA, 25 bp, Homo sapien
ttctaccaggccctttaatgctcta

SEQ ID NO: 1858504 - DNA, 25 bp, Homo sapien
ggccctttaatgctctatcctgtgg

SEQ ID NO: 1858505 - DNA, 25 bp, Homo sapien
gatcattgagcccatagcctgtgcc

SEQ ID NO: 1858506 - DNA, 25 bp, Homo sapien
tcactcctgggcacattactaatgg

SEQ ID NO: 1858507 - DNA, 25 bp, Homo sapien
gctgtttgaaaccttgtccatggga

SEQ ID NO: 1858508 - DNA, 25 bp, Homo sapien
taacctcagaggacggtgcaagtca

SEQ ID NO: 1858509 - DNA, 25 bp, Homo sapien
tccgtagcacccataacctcatctt

SEQ ID NO: 1858510 - DNA, 25 bp, Homo sapien
ttggtgagtgaacagcggtgacttg

SEQ ID NO: 1858511 - DNA, 25 bp, Homo sapien
tgagtgaacagcggtgacttgcagc

SEQ ID NO: 1858512 - DNA, 25 bp, Homo sapien
gaactggcggaccagagctccgtag

SEQ ID NO: 1858513 - DNA, 25 bp, Homo sapien
ctggtaagctctggaggttgaacac

SEQ ID NO: 1858514 - DNA, 25 bp, Homo sapien
ggtaagctctggaggttgaacacag

SEQ ID NO: 1858515 - DNA, 25 bp, Homo sapien
tggtaagctctggaggttgaacaca

SEQ ID NO: 1858516 - DNA, 25 bp, Homo sapien
gtaagctctggaggttgaacacagg

SEQ ID NO: 1858517 - DNA, 25 bp, Homo sapien
cttgtcgagccagttcacgcagctg

SEQ ID NO: 1858518 - DNA, 25 bp, Homo sapien
tcacgcagctgggattgggcctcag

SEQ ID NO: 1858519 - DNA, 25 bp, Homo sapien
atcccgcagccttgtcgagccagtt

SEQ ID NO: 1858520 - DNA, 25 bp, Homo sapien
tcttgagtctcctggcccacgtggg

SEQ ID NO: 1858521 - DNA, 25 bp, Homo sapien
catgctcgcacaaaagcagaagggc

SEQ ID NO: 1858522 - DNA, 25 bp, Homo sapien
tacagggcggaaacttcactcacag

SEQ ID NO: 1858523 - DNA, 25 bp, Homo sapien
actgggcatggctctgtcgtgtcca

SEQ ID NO: 1858524 - DNA, 25 bp, Homo sapien
agtttcccctgagcacggtttcctg

SEQ ID NO: 1858525 - DNA, 25 bp, Homo sapien
tgagcatgccggtggctttctccct

SEQ ID NO: 1858526 - DNA, 25 bp, Homo sapien
tgctccagtggtgtgtagccgctcg

SEQ ID NO: 1858527 - DNA, 25 bp, Homo sapien
tgcagtcgatagctgggtttaccag

SEQ ID NO: 1858528 - DNA, 25 bp, Homo sapien
gggtagctaattcctggtcctgtca

SEQ ID NO: 1858529 - DNA, 25 bp, Homo sapien
cttcctctctgggatcctggcccag

SEQ ID NO: 1858530 - DNA, 25 bp, Homo sapien
agggctccaggtgggcaggggggca

SEQ ID NO: 1858531 - DNA, 25 bp, Homo sapien
caggcagcagggctccaggtgggca

SEQ ID NO: 1858532 - DNA, 25 bp, Homo sapien
ggcagcagggctccaggtgggcagg

SEQ ID NO: 1858533 - DNA, 25 bp, Homo sapien
tcctctttggcataagagtgcttct

SEQ ID NO: 1858534 - DNA, 25 bp, Homo sapien
cctgcgacatgtggtcattcaccca

SEQ ID NO: 1858535 - DNA, 25 bp, Homo sapien
tcatcgggaggacctgtggagtctc

SEQ ID NO: 1858536 - DNA, 25 bp, Homo sapien
tgtggagtctccctgcgacatgtgg

SEQ ID NO: 1858537 - DNA, 25 bp, Homo sapien
catgatgtaccagtgtccagatgag

SEQ ID NO: 1858538 - DNA, 25 bp, Homo sapien
ttgctcatgatgtaccagtgtccag

SEQ ID NO: 1858539 - DNA, 25 bp, Homo sapien
ggaccgtcacaaattgctcatgatg

SEQ ID NO: 1858540 - DNA, 25 bp, Homo sapien
tgggatgcaaaagtgggaccgtcac

SEQ ID NO: 1858541 - DNA, 25 bp, Homo sapien
gcctccgcagacaaatgatgtgaga

SEQ ID NO: 1858542 - DNA, 25 bp, Homo sapien
gttggacaccgcctccgcagacaaa

SEQ ID NO: 1858543 - DNA, 25 bp, Homo sapien
acaccgcctccgcagacaaatgatg

SEQ ID NO: 1858544 - DNA, 25 bp, Homo sapien
accgcctccgcagacaaatgatgtg

SEQ ID NO: 1858545 - DNA, 25 bp, Homo sapien
cccagaacaggtaggtaggtccgtg

SEQ ID NO: 1858546 - DNA, 25 bp, Homo sapien
aggcccaggagtagatcttcttttt

SEQ ID NO: 1858547 - DNA, 25 bp, Homo sapien
ggcccaggagtagatcttctttttg

SEQ ID NO: 1858548 - DNA, 25 bp, Homo sapien
ctttttgcccagaacaggtaggtag

SEQ ID NO: 1858549 - DNA, 25 bp, Homo sapien
gtgttttgagggctccacgagagga

SEQ ID NO: 1858550 - DNA, 25 bp, Homo sapien
ctctccagatgatggccactttcca

SEQ ID NO: 1858551 - DNA, 25 bp, Homo sapien
ggctccacgagaggatgtgtaagga

SEQ ID NO: 1858552 - DNA, 25 bp, Homo sapien
cccctctccagatgatggccacttt

SEQ ID NO: 1858553 - DNA, 25 bp, Homo sapien
agcccagttcgtccagaatgtgaag

SEQ ID NO: 1858554 - DNA, 25 bp, Homo sapien
gacaaggatatggaatagacagccc

SEQ ID NO: 1858555 - DNA, 25 bp, Homo sapien
aggcaaagacaaggatatggaatag

SEQ ID NO: 1858556 - DNA, 25 bp, Homo sapien
gaatagacagcccagttcgtccaga

SEQ ID NO: 1858557 - DNA, 25 bp, Homo sapien
tgttgtgtattgctgtgcgtgtatg

SEQ ID NO: 1858558 - DNA, 25 bp, Homo sapien
gggacctgtgataggctcgcgcaca

SEQ ID NO: 1858559 - DNA, 25 bp, Homo sapien
taggctcgcgcacactttgggtcat

SEQ ID NO: 1858560 - DNA, 25 bp, Homo sapien
tatgtttggcattgcaggggacctg

SEQ ID NO: 1858561 - DNA, 25 bp, Homo sapien
caggatgcagccagatcccgctcat

SEQ ID NO: 1858562 - DNA, 25 bp, Homo sapien
agaccccctgcctcaggatgcagcc

SEQ ID NO: 1858563 - DNA, 25 bp, Homo sapien
tcaggatgcagccagatcccgctca

SEQ ID NO: 1858564 - DNA, 25 bp, Homo sapien
ctcgctaagaccccctgcctcagga

SEQ ID NO: 1858565 - DNA, 25 bp, Homo sapien
agatgagagtgaactggcgggtggt

SEQ ID NO: 1858566 - DNA, 25 bp, Homo sapien
gatgagagtgaactggcgggtggtt

SEQ ID NO: 1858567 - DNA, 25 bp, Homo sapien
cagatgagagtgaactggcgggtgg

SEQ ID NO: 1858568 - DNA, 25 bp, Homo sapien
tcagatgagagtgaactggcgggtg

SEQ ID NO: 1858569 - DNA, 25 bp, Homo sapien
gaacgttccaagaggcctgagctga

SEQ ID NO: 1858570 - DNA, 25 bp, Homo sapien
gaaggataacatgggatttgcagcc

SEQ ID NO: 1858571 - DNA, 25 bp, Homo sapien
gatgatgatcctagagctaccttga

SEQ ID NO: 1858572 - DNA, 25 bp, Homo sapien
cagagcttggccgagcaattcaggt

SEQ ID NO: 1858573 - DNA, 25 bp, Homo sapien
ccaatcatttcacccattaataagg

SEQ ID NO: 1858574 - DNA, 25 bp, Homo sapien
tattgatagaacaaccgcgtccgca

SEQ ID NO: 1858575 - DNA, 25 bp, Homo sapien
cctgttgtgcttttaccttggtggc

SEQ ID NO: 1858576 - DNA, 25 bp, Homo sapien
tccgcaactagaggttacatttggg

SEQ ID NO: 1858577 - DNA, 25 bp, Homo sapien
tataagggtcaagggatccccagga

SEQ ID NO: 1858578 - DNA, 25 bp, Homo sapien
actcgatagagaggcgggtgcttcc

SEQ ID NO: 1858579 - DNA, 25 bp, Homo sapien
tgagctggctactctagggcaggaa

SEQ ID NO: 1858580 - DNA, 25 bp, Homo sapien
gaatgcatggagacctagagggcca

SEQ ID NO: 1858581 - DNA, 25 bp, Homo sapien
gactcatttcagacagaggccttga

SEQ ID NO: 1858582 - DNA, 25 bp, Homo sapien
tggcgcacaaagacacagcatgagc

SEQ ID NO: 1858583 - DNA, 25 bp, Homo sapien
gaacctctgaggtgggaaccaagca

SEQ ID NO: 1858584 - DNA, 25 bp, Homo sapien
ttaaggaacaatacccgacagacgc

SEQ ID NO: 1858585 - DNA, 25 bp, Homo sapien
caaaggtgcttgcattcaatagggt

SEQ ID NO: 1858586 - DNA, 25 bp, Homo sapien
aggtggaatttcaggccatcgcagg

SEQ ID NO: 1858587 - DNA, 25 bp, Homo sapien
tgtaagctctccgtcatccataggg

SEQ ID NO: 1858588 - DNA, 25 bp, Homo sapien
aatagggtcatctgtaagctctccg

SEQ ID NO: 1858589 - DNA, 25 bp, Homo sapien
gaaggtggacacacacgctgacgta

SEQ ID NO: 1858590 - DNA, 25 bp, Homo sapien
gtcaatctcaggtgcctaacccagg

SEQ ID NO: 1858591 - DNA, 25 bp, Homo sapien
catatgcacgcatgcctaaagagtc

SEQ ID NO: 1858592 - DNA, 25 bp, Homo sapien
ggtggtacctagacacagacgggca

SEQ ID NO: 1858593 - DNA, 25 bp, Homo sapien
gacagtcacagagctcgcaaagtcc

SEQ ID NO: 1858594 - DNA, 25 bp, Homo sapien
caaatcacagaagcgggacgtctct

SEQ ID NO: 1858595 - DNA, 25 bp, Homo sapien
cactctggacagaatcgtgtgcagc

SEQ ID NO: 1858596 - DNA, 25 bp, Homo sapien
gtctcctggacgtgggacagtcaca

SEQ ID NO: 1858597 - DNA, 25 bp, Homo sapien
caggctggagttcggccttgactta

SEQ ID NO: 1858598 - DNA, 25 bp, Homo sapien
ttggcggatgccattcaggcaagtc

SEQ ID NO: 1858599 - DNA, 25 bp, Homo sapien
acaaggcctatgttgcgccgaggtc

SEQ ID NO: 1858600 - DNA, 25 bp, Homo sapien
acaccacgagtgcagcaaggacaag

SEQ ID NO: 1858601 - DNA, 25 bp, Homo sapien
cagtctttggtacaatgtggacact

SEQ ID NO: 1858602 - DNA, 25 bp, Homo sapien
tgcgtgtgtgcaagtggaacagctg

SEQ ID NO: 1858603 - DNA, 25 bp, Homo sapien
tctgctcatccttgcagccaatgca

SEQ ID NO: 1858604 - DNA, 25 bp, Homo sapien
cagatagaaacttgtgctttaatat

SEQ ID NO: 1858605 - DNA, 25 bp, Homo sapien
gggctccactgcccggcatcaccac

SEQ ID NO: 1858606 - DNA, 25 bp, Homo sapien
acagctgtgggctggactggcaggg

SEQ ID NO: 1858607 - DNA, 25 bp, Homo sapien
tcatctctgcaacgccaagaggaag

SEQ ID NO: 1858608 - DNA, 25 bp, Homo sapien
caagaggaagatggccatgggcccc

SEQ ID NO: 1858609 - DNA, 25 bp, Homo sapien
gaacaggtcagtatgctcatcacga

SEQ ID NO: 1858610 - DNA, 25 bp, Homo sapien
tgtgtactaccccaaaggactgttg

SEQ ID NO: 1858611 - DNA, 25 bp, Homo sapien
aggaggcgctctgataccgtgaaca

SEQ ID NO: 1858612 - DNA, 25 bp, Homo sapien
tggagccagaggtacgcacagatgt

SEQ ID NO: 1858613 - DNA, 25 bp, Homo sapien
ttattgggatccgtctgcttccggg

SEQ ID NO: 1858614 - DNA, 25 bp, Homo sapien
tcagtgtgacgtcatctatggcaat

SEQ ID NO: 1858615 - DNA, 25 bp, Homo sapien
tgacgtcatctatggcaatatcccc

SEQ ID NO: 1858616 - DNA, 25 bp, Homo sapien
ctttattgggatccgtctgcttccg

SEQ ID NO: 1858617 - DNA, 25 bp, Homo sapien
gcgtgcgtgtccagagcccctttgt

SEQ ID NO: 1858618 - DNA, 25 bp, Homo sapien
tgcccttattgccactgagagacca

SEQ ID NO: 1858619 - DNA, 25 bp, Homo sapien
tgctgccacacattgcccttattgc

SEQ ID NO: 1858620 - DNA, 25 bp, Homo sapien
ttccgggaccgcaccaggaggttga

SEQ ID NO: 1858621 - DNA, 25 bp, Homo sapien
tataaggcttggcaccagtagactg

SEQ ID NO: 1858622 - DNA, 25 bp, Homo sapien
cactcgggtctagcaaactggtatc

SEQ ID NO: 1858623 - DNA, 25 bp, Homo sapien
tggacaggactatccagcagggctg

SEQ ID NO: 1858624 - DNA, 25 bp, Homo sapien
tccagtaaggcccagtaaggtccag

SEQ ID NO: 1858625 - DNA, 25 bp, Homo sapien
catagccagtgctaaaattaggaaa

SEQ ID NO: 1858626 - DNA, 25 bp, Homo sapien
gaaagatgggagtaaacccaaatga

SEQ ID NO: 1858627 - DNA, 25 bp, Homo sapien
acatagccagtgctaaaattaggaa

SEQ ID NO: 1858628 - DNA, 25 bp, Homo sapien
atagccagtgctaaaattaggaaag

SEQ ID NO: 1858629 - DNA, 25 bp, Homo sapien
ccagccacgggcaaaatgatctgtg

SEQ ID NO: 1858630 - DNA, 25 bp, Homo sapien
gcttgacccatcaccctagctgtgg

SEQ ID NO: 1858631 - DNA, 25 bp, Homo sapien
gccccagtggatgcagaatcttcta

SEQ ID NO: 1858632 - DNA, 25 bp, Homo sapien
taccattacggctgaggaaaacagt

SEQ ID NO: 1858633 - DNA, 25 bp, Homo sapien
aatcacctttggcagatcaactggg

SEQ ID NO: 1858634 - DNA, 25 bp, Homo sapien
gttatgtgacgctcctaccagtacc

SEQ ID NO: 1858635 - DNA, 25 bp, Homo sapien
taccagtaccattgcctgccaaagg

SEQ ID NO: 1858636 - DNA, 25 bp, Homo sapien
tgatggctgacactggttatgtgac

SEQ ID NO: 1858637 - DNA, 25 bp, Homo sapien
agaacttggcgctggcattgtagag

SEQ ID NO: 1858638 - DNA, 25 bp, Homo sapien
gatgtctcgatgaacatgtagtagc

SEQ ID NO: 1858639 - DNA, 25 bp, Homo sapien
cacagtagaacttggcgctggcatt

SEQ ID NO: 1858640 - DNA, 25 bp, Homo sapien
gatgtgtttcccgtacatgtggtag

SEQ ID NO: 1858641 - DNA, 25 bp, Homo sapien
tgggtgagggcattctgccgcgtcc

SEQ ID NO: 1858642 - DNA, 25 bp, Homo sapien
ttgtctgtcaggtcctgggtatagc

SEQ ID NO: 1858643 - DNA, 25 bp, Homo sapien
tgccgcgtccagtcaaagttgtctg

SEQ ID NO: 1858644 - DNA, 25 bp, Homo sapien
ctgtcaggtcctgggtatagccaca

SEQ ID NO: 1858645 - DNA, 25 bp, Homo sapien
ggaaaccaagtcagaactgaggtgt

SEQ ID NO: 1858646 - DNA, 25 bp, Homo sapien
gggctctgcagaggataccctgctt

SEQ ID NO: 1858647 - DNA, 25 bp, Homo sapien
caggactgggggccagcggatctgg

SEQ ID NO: 1858648 - DNA, 25 bp, Homo sapien
aggataccctgcttgggaccagagg

SEQ ID NO: 1858649 - DNA, 25 bp, Homo sapien
gatgatgcgggaggccatgtcacca

SEQ ID NO: 1858650 - DNA, 25 bp, Homo sapien
tgtgtagtggatgatgcgggaggcc

SEQ ID NO: 1858651 - DNA, 25 bp, Homo sapien
ctctgtgtagtggatgatgcgggag

SEQ ID NO: 1858652 - DNA, 25 bp, Homo sapien
tggatgatgcgggaggccatgtcac

SEQ ID NO: 1858653 - DNA, 25 bp, Homo sapien
accgggatggccttgaccaccgcat

SEQ ID NO: 1858654 - DNA, 25 bp, Homo sapien
ccttgaccaccgcattgtgctggtt

SEQ ID NO: 1858655 - DNA, 25 bp, Homo sapien
ttctccacacgccggaccgggatgg

SEQ ID NO: 1858656 - DNA, 25 bp, Homo sapien
gggatggccttgaccaccgcattgt

SEQ ID NO: 1858657 - DNA, 25 bp, Homo sapien
ctgtagttgagcacagggtcgacag

SEQ ID NO: 1858658 - DNA, 25 bp, Homo sapien
ggtcgacagcgtcgggctccctctg

SEQ ID NO: 1858659 - DNA, 25 bp, Homo sapien
cacgtaggagtagttcttggacagc

SEQ ID NO: 1858660 - DNA, 25 bp, Homo sapien
tgcagcacgtaggagtagttcttgg

SEQ ID NO: 1858661 - DNA, 25 bp, Homo sapien
tgtcgaagtaaaactccgggctgta

SEQ ID NO: 1858662 - DNA, 25 bp, Homo sapien
tcgtagctgccgctgctgtcgcgag

SEQ ID NO: 1858663 - DNA, 25 bp, Homo sapien
agttacggcgtcgaggcgcagctcc

SEQ ID NO: 1858664 - DNA, 25 bp, Homo sapien
ggcagccgagcccacatcgttggag

SEQ ID NO: 1858665 - DNA, 25 bp, Homo sapien
ttggagacgctgcactcgtagctgc

SEQ ID NO: 1858666 - DNA, 25 bp, Homo sapien
ccacacagccgaggcgatgcgctgg

SEQ ID NO: 1858667 - DNA, 25 bp, Homo sapien
gagcagcgcaggagcacgggccggc

SEQ ID NO: 1858668 - DNA, 25 bp, Homo sapien
cgcctggcgcacgtcctgggaactg

SEQ ID NO: 1858669 - DNA, 25 bp, Homo sapien
agctgccctttgaaacgccacacag

SEQ ID NO: 1858670 - DNA, 25 bp, Homo sapien
gctgtcaaggagcattaggggtatc

SEQ ID NO: 1858671 - DNA, 25 bp, Homo sapien
gagcaaagaacacagacctccgtgt

SEQ ID NO: 1858672 - DNA, 25 bp, Homo sapien
agctgggaaggtagtccgggtggcg

SEQ ID NO: 1858673 - DNA, 25 bp, Homo sapien
gatgggagatacttgatgaaatgga

SEQ ID NO: 1858674 - DNA, 25 bp, Homo sapien
ggccctacccttgggcacactgatg

SEQ ID NO: 1858675 - DNA, 25 bp, Homo sapien
ttgtccacgcgggaccagagcactg

SEQ ID NO: 1858676 - DNA, 25 bp, Homo sapien
tcgcattgcagctcggcaggcgatc

SEQ ID NO: 1858677 - DNA, 25 bp, Homo sapien
gaagccattatagcgggccgtctgg

SEQ ID NO: 1858678 - DNA, 25 bp, Homo sapien
tagtaagtactagggattccacctc

SEQ ID NO: 1858679 - DNA, 25 bp, Homo sapien
cttggtccttctgtcctactccggg

SEQ ID NO: 1858680 - DNA, 25 bp, Homo sapien
tcaaaaagagacctgaagtcagcct

SEQ ID NO: 1858681 - DNA, 25 bp, Homo sapien
gagcggagttagagctccccactgg

SEQ ID NO: 1858682 - DNA, 25 bp, Homo sapien
acatcaggcctatgagccaaatgga

SEQ ID NO: 1858683 - DNA, 25 bp, Homo sapien
ccgtacaggctaaagagtagtctct

SEQ ID NO: 1858684 - DNA, 25 bp, Homo sapien
caacacattgcccaatcagagggtc

SEQ ID NO: 1858685 - DNA, 25 bp, Homo sapien
tgagactatctgaaacgtgtttgcc

SEQ ID NO: 1858686 - DNA, 25 bp, Homo sapien
gaggagatgttgacctcgacgctga

SEQ ID NO: 1858687 - DNA, 25 bp, Homo sapien
taggtgccatagtcactgaagtgca

SEQ ID NO: 1858688 - DNA, 25 bp, Homo sapien
cacgtggcacgatagcttcaggtcc

SEQ ID NO: 1858689 - DNA, 25 bp, Homo sapien
cagctcaggatcattgcgggtcacc

SEQ ID NO: 1858690 - DNA, 25 bp, Homo sapien
ggagtgatctggaatgtagcgttct

SEQ ID NO: 1858691 - DNA, 25 bp, Homo sapien
gagtgatctggaatgtagcgttctt

SEQ ID NO: 1858692 - DNA, 25 bp, Homo sapien
gctgtgcagttgtagtagccagagt

SEQ ID NO: 1858693 - DNA, 25 bp, Homo sapien
agggttgcccacattgttggtggct

SEQ ID NO: 1858694 - DNA, 25 bp, Homo sapien
tcagcagacactgcaccgtcacatt

SEQ ID NO: 1858695 - DNA, 25 bp, Homo sapien
ccagagtttcgttcacagacagctt

SEQ ID NO: 1858696 - DNA, 25 bp, Homo sapien
atggccttgtctgggatgccgcaca

SEQ ID NO: 1858697 - DNA, 25 bp, Homo sapien
cacacgttacgcacagacacctggc

SEQ ID NO: 1858698 - DNA, 25 bp, Homo sapien
tctgggatgccgcacacgttacgca

SEQ ID NO: 1858699 - DNA, 25 bp, Homo sapien
gttggtgagccggaaggtgatggcc

SEQ ID NO: 1858700 - DNA, 25 bp, Homo sapien
gatgctacactctccatagccttgg

SEQ ID NO: 1858701 - DNA, 25 bp, Homo sapien
cttggcagtgcctcatcatgggatt

SEQ ID NO: 1858702 - DNA, 25 bp, Homo sapien
tgttgaagtcaaggcagtcccaaaa

SEQ ID NO: 1858703 - DNA, 25 bp, Homo sapien
taactagcaatgttcctggaggaca

SEQ ID NO: 1858704 - DNA, 25 bp, Homo sapien
ttggagttgacagtacagcgcagga

SEQ ID NO: 1858705 - DNA, 25 bp, Homo sapien
ggtagaagttgcctcgcacatcgct

SEQ ID NO: 1858706 - DNA, 25 bp, Homo sapien
ggctcatagatgtcaaccccattgt

SEQ ID NO: 1858707 - DNA, 25 bp, Homo sapien
tggtgcaccgtcagcattggctcat

SEQ ID NO: 1858708 - DNA, 25 bp, Homo sapien
tcagccttgcagtagtagcggccgc

SEQ ID NO: 1858709 - DNA, 25 bp, Homo sapien
gatgcgcagcgtctcgttgaacacc

SEQ ID NO: 1858710 - DNA, 25 bp, Homo sapien
tcctggaacttgtccgaggcgctac

SEQ ID NO: 1858711 - DNA, 25 bp, Homo sapien
tgcgtgcgtgcaatacgctcgatgc

SEQ ID NO: 1858712 - DNA, 25 bp, Homo sapien
gggcctcagcgctgagtgccctgca

SEQ ID NO: 1858713 - DNA, 25 bp, Homo sapien
tcagcgctgagtgccctgcaacggc

SEQ ID NO: 1858714 - DNA, 25 bp, Homo sapien
tcccatactttttcacaagcgcacg

SEQ ID NO: 1858715 - DNA, 25 bp, Homo sapien
atactttttcacaagcgcacgtggg

SEQ ID NO: 1858716 - DNA, 25 bp, Homo sapien
ggtgtagacacgctcgctgatattg

SEQ ID NO: 1858717 - DNA, 25 bp, Homo sapien
atgcctggcccgcatgcacgatctg

SEQ ID NO: 1858718 - DNA, 25 bp, Homo sapien
tgccctgttacaaggcactgcagca

SEQ ID NO: 1858719 - DNA, 25 bp, Homo sapien
gtcctctttcaccacacatgcctgg

SEQ ID NO: 1858720 - DNA, 25 bp, Homo sapien
ctgacaggtgtatttccccactgga

SEQ ID NO: 1858721 - DNA, 25 bp, Homo sapien
acctgacaggtgtatttccccactg

SEQ ID NO: 1858722 - DNA, 25 bp, Homo sapien
cacctgacaggtgtatttccccact

SEQ ID NO: 1858723 - DNA, 25 bp, Homo sapien
cctgacaggtgtatttccccactgg

SEQ ID NO: 1858724 - DNA, 25 bp, Homo sapien
cctggggtccactgtatatttccaa

SEQ ID NO: 1858725 - DNA, 25 bp, Homo sapien
cttcctggggtccactgtatatttc

SEQ ID NO: 1858726 - DNA, 25 bp, Homo sapien
gtccactgtatatttccaagctcct

SEQ ID NO: 1858727 - DNA, 25 bp, Homo sapien
ggggtccactgtatatttccaagct

SEQ ID NO: 1858728 - DNA, 25 bp, Homo sapien
cttttggcccatccagttctggtca

SEQ ID NO: 1858729 - DNA, 25 bp, Homo sapien
gaaagcagcaacagacttttggccc

SEQ ID NO: 1858730 - DNA, 25 bp, Homo sapien
ggtcattctctctccgatcattaga

SEQ ID NO: 1858731 - DNA, 25 bp, Homo sapien
acgcagagcatcttgagggaaagca

SEQ ID NO: 1858732 - DNA, 25 bp, Homo sapien
gcttgcaaagcagggtcttctgacc

SEQ ID NO: 1858733 - DNA, 25 bp, Homo sapien
gggccatgcgccaggtttatacaga

SEQ ID NO: 1858734 - DNA, 25 bp, Homo sapien
tatacagaggcgtttctgcaagggc

SEQ ID NO: 1858735 - DNA, 25 bp, Homo sapien
cagagaagccccttggtacatagta

SEQ ID NO: 1858736 - DNA, 25 bp, Homo sapien
gcaggacatagggttctaggcacct

SEQ ID NO: 1858737 - DNA, 25 bp, Homo sapien
tattgcagaccatggatcctagggc

SEQ ID NO: 1858738 - DNA, 25 bp, Homo sapien
ggacctcagtgggaagcaggacata

SEQ ID NO: 1858739 - DNA, 25 bp, Homo sapien
tggccaaactgagagtgctgcctcc

SEQ ID NO: 1858740 - DNA, 25 bp, Homo sapien
gatgccggcatcctgatcagggtgt

SEQ ID NO: 1858741 - DNA, 25 bp, Homo sapien
ccctgagtagaagaagcgaagccgc

SEQ ID NO: 1858742 - DNA, 25 bp, Homo sapien
ggtgtcaagccctgagtagaagaag

SEQ ID NO: 1858743 - DNA, 25 bp, Homo sapien
gcatcctgatcagggtgtcaagccc

SEQ ID NO: 1858744 - DNA, 25 bp, Homo sapien
tagactccttgtccccggcagtgga

SEQ ID NO: 1858745 - DNA, 25 bp, Homo sapien
gcagtggaaggggatcagcgccaga

SEQ ID NO: 1858746 - DNA, 25 bp, Homo sapien
cgtagactccttgtccccggcagtg

SEQ ID NO: 1858747 - DNA, 25 bp, Homo sapien
gatcagcgccagaagtagaaggcag

SEQ ID NO: 1858748 - DNA, 25 bp, Homo sapien
gaggtggcggcgacccgtgtttctc

SEQ ID NO: 1858749 - DNA, 25 bp, Homo sapien
gcggaggcggcgcttcgatccaaca

SEQ ID NO: 1858750 - DNA, 25 bp, Homo sapien
ccaggagactgaagaggcggaggtg

SEQ ID NO: 1858751 - DNA, 25 bp, Homo sapien
ggccacggacgactgacaaacttgt

SEQ ID NO: 1858752 - DNA, 25 bp, Homo sapien
gggaagaatagcagcccggcgcccc

SEQ ID NO: 1858753 - DNA, 25 bp, Homo sapien
gctgaaagcactcgcggcggcgaag

SEQ ID NO: 1858754 - DNA, 25 bp, Homo sapien
tgaagttagccgagccgccgataaa

SEQ ID NO: 1858755 - DNA, 25 bp, Homo sapien
agcagcgcgggctgggttcggccga

SEQ ID NO: 1858756 - DNA, 25 bp, Homo sapien
tccaggcaagaagggccccagaaaa

SEQ ID NO: 1858757 - DNA, 25 bp, Homo sapien
tgtgctgctttttcgcccctccgag

SEQ ID NO: 1858758 - DNA, 25 bp, Homo sapien
ttttgaaaaatattcgcgctctcgc

SEQ ID NO: 1858759 - DNA, 25 bp, Homo sapien
tccgctcgctcagcaacttgggctt

SEQ ID NO: 1858760 - DNA, 25 bp, Homo sapien
cgttgccagcagcccgcggggcaaa

SEQ ID NO: 1858761 - DNA, 25 bp, Homo sapien
ggccgagccgggtgcaccgttgcca

SEQ ID NO: 1858762 - DNA, 25 bp, Homo sapien
gcggggcaaacacggccgctcgctt

SEQ ID NO: 1858763 - DNA, 25 bp, Homo sapien
aaacacggccgctcgcttcggagac

SEQ ID NO: 1858764 - DNA, 25 bp, Homo sapien
tagtctccgtctccattattgatga

SEQ ID NO: 1858765 - DNA, 25 bp, Homo sapien
ctccatgttccgctgctcagggtct

SEQ ID NO: 1858766 - DNA, 25 bp, Homo sapien
cagggtctgacagtatcagtgtcgc

SEQ ID NO: 1858767 - DNA, 25 bp, Homo sapien
tcatgaaatatttaggctcctccat

SEQ ID NO: 1858768 - DNA, 25 bp, Homo sapien
tgtttcaaagtgactctgataagca

SEQ ID NO: 1858769 - DNA, 25 bp, Homo sapien
ggtgccaatcgttcattttcaaagc

SEQ ID NO: 1858770 - DNA, 25 bp, Homo sapien
gaaggtgccaatcgttcattttcaa

SEQ ID NO: 1858771 - DNA, 25 bp, Homo sapien
aggtgccaatcgttcattttcaaag

SEQ ID NO: 1858772 - DNA, 25 bp, Homo sapien
ttaatcagggggaaattatgccagt

SEQ ID NO: 1858773 - DNA, 25 bp, Homo sapien
gcattaatcagggggaaattatgcc

SEQ ID NO: 1858774 - DNA, 25 bp, Homo sapien
attaatcagggggaaattatgccag

SEQ ID NO: 1858775 - DNA, 25 bp, Homo sapien
ctgcattaatcagggggaaattatg

SEQ ID NO: 1858776 - DNA, 25 bp, Homo sapien
cctcctccagtaaagttcctctgca

SEQ ID NO: 1858777 - DNA, 25 bp, Homo sapien
tcttcttgaaggtgtccctctcccc

SEQ ID NO: 1858778 - DNA, 25 bp, Homo sapien
gggttcctgcactcagacctgaatc

SEQ ID NO: 1858779 - DNA, 25 bp, Homo sapien
ctacagggttcctgcactcagacct

SEQ ID NO: 1858780 - DNA, 25 bp, Homo sapien
tcagcagcgacaccattggtcttat

SEQ ID NO: 1858781 - DNA, 25 bp, Homo sapien
cttcctgtgcgtgataatggtggta

SEQ ID NO: 1858782 - DNA, 25 bp, Homo sapien
gggtaatagcatgagtgggtgctgg

SEQ ID NO: 1858783 - DNA, 25 bp, Homo sapien
cggtgatgtcagcagcgacaccatt

SEQ ID NO: 1858784 - DNA, 25 bp, Homo sapien
tcaacatgttgttcctggattcttt

SEQ ID NO: 1858785 - DNA, 25 bp, Homo sapien
ttgcacacagcctcatcactcttca

SEQ ID NO: 1858786 - DNA, 25 bp, Homo sapien
cagcctcatcactcttcaagaaaaa

SEQ ID NO: 1858787 - DNA, 25 bp, Homo sapien
gttgttcctggattctttcatcttg

SEQ ID NO: 1858788 - DNA, 25 bp, Homo sapien
ggaccaggaatgatgagatgttcca

SEQ ID NO: 1858789 - DNA, 25 bp, Homo sapien
ctccagaagggaccaggaatgatga

SEQ ID NO: 1858790 - DNA, 25 bp, Homo sapien
aagggaccaggaatgatgagatgtt

SEQ ID NO: 1858791 - DNA, 25 bp, Homo sapien
tctccagaagggaccaggaatgatg

SEQ ID NO: 1858792 - DNA, 25 bp, Homo sapien
tcagagagcccccacatctcccagc

SEQ ID NO: 1858793 - DNA, 25 bp, Homo sapien
ctcctctttgcctcctggcttctct

SEQ ID NO: 1858794 - DNA, 25 bp, Homo sapien
gctcctcctctttgcctcctggctt

SEQ ID NO: 1858795 - DNA, 25 bp, Homo sapien
cagagagcccccacatctcccagct

SEQ ID NO: 1858796 - DNA, 25 bp, Homo sapien
tattcctgaaggctaatgtgcgagc

SEQ ID NO: 1858797 - DNA, 25 bp, Homo sapien
tttttattcctgaaggctaatgtgc

SEQ ID NO: 1858798 - DNA, 25 bp, Homo sapien
ggccgggctgtgctaatggcggaca

SEQ ID NO: 1858799 - DNA, 25 bp, Homo sapien
tgaaggctaatgtgcgagcagcgcc

SEQ ID NO: 1858800 - DNA, 25 bp, Homo sapien
tgttaactgtgtggtctcagacaag

SEQ ID NO: 1858801 - DNA, 25 bp, Homo sapien
cagctgaagccctgaccaaggtctt

SEQ ID NO: 1858802 - DNA, 25 bp, Homo sapien
caaggtcttcgccatgaacctaggg

SEQ ID NO: 1858803 - DNA, 25 bp, Homo sapien
gtaaatcaccttgcatagcacttgg

SEQ ID NO: 1858804 - DNA, 25 bp, Homo sapien
tcacaatcaccttttaggatggact

SEQ ID NO: 1858805 - DNA, 25 bp, Homo sapien
aaccctgtagccctcacaatcacct

SEQ ID NO: 1858806 - DNA, 25 bp, Homo sapien
gtagccctcacaatcaccttttagg

SEQ ID NO: 1858807 - DNA, 25 bp, Homo sapien
accttttaggatggacttgagaatg

SEQ ID NO: 1858808 - DNA, 25 bp, Homo sapien
cagtgtctaccggtatggaacgatc

SEQ ID NO: 1858809 - DNA, 25 bp, Homo sapien
ggctggtgcacagtgtctaccggta

SEQ ID NO: 1858810 - DNA, 25 bp, Homo sapien
aacccactcctttccatctgtcctg

SEQ ID NO: 1858811 - DNA, 25 bp, Homo sapien
cgatcaaagcggctcttctgtacac

SEQ ID NO: 1858812 - DNA, 25 bp, Homo sapien
acaaagctggccacgctgctactgt

SEQ ID NO: 1858813 - DNA, 25 bp, Homo sapien
tggagagtgtagtctgtccctccag

SEQ ID NO: 1858814 - DNA, 25 bp, Homo sapien
ctcccactgatgaatgtggagagtg

SEQ ID NO: 1858815 - DNA, 25 bp, Homo sapien
tactgtcagagcgtctctcttcaca

SEQ ID NO: 1858816 - DNA, 25 bp, Homo sapien
cttgtgccagcctgcccgtcacaga

SEQ ID NO: 1858817 - DNA, 25 bp, Homo sapien
agcctgcccgtcacagaccaggtcc

SEQ ID NO: 1858818 - DNA, 25 bp, Homo sapien
gccagcctgcccgtcacagaccagg

SEQ ID NO: 1858819 - DNA, 25 bp, Homo sapien
cgtcacagaccaggtcccaccccat

SEQ ID NO: 1858820 - DNA, 25 bp, Homo sapien
tattatcctttactagaccccactg

SEQ ID NO: 1858821 - DNA, 25 bp, Homo sapien
taatattatcctttactagacccca

SEQ ID NO: 1858822 - DNA, 25 bp, Homo sapien
tagatggctccttttgggccaatgg

SEQ ID NO: 1858823 - DNA, 25 bp, Homo sapien
caatggtgattgcaaactactccca

SEQ ID NO: 1858824 - DNA, 25 bp, Homo sapien
gaacgcctcccaaatgcaccttgag

SEQ ID NO: 1858825 - DNA, 25 bp, Homo sapien
tacataactgccctgttggtcaaag

SEQ ID NO: 1858826 - DNA, 25 bp, Homo sapien
tcaaaggtgattgtaccaagagtac

SEQ ID NO: 1858827 - DNA, 25 bp, Homo sapien
tacacaagcggacataaatcgaacc

SEQ ID NO: 1858828 - DNA, 25 bp, Homo sapien
ctccaaaaaccaaacgtgtcagctg

SEQ ID NO: 1858829 - DNA, 25 bp, Homo sapien
ctgggcatagggactcgcctgggca

SEQ ID NO: 1858830 - DNA, 25 bp, Homo sapien
tgggcatagataatgtacttgtggc

SEQ ID NO: 1858831 - DNA, 25 bp, Homo sapien
accaaacgtgtcagctgtaggaaga

SEQ ID NO: 1858832 - DNA, 25 bp, Homo sapien
gccccggagtactcagaaacctgct

SEQ ID NO: 1858833 - DNA, 25 bp, Homo sapien
aagttctaagaatacgaaggcctca

SEQ ID NO: 1858834 - DNA, 25 bp, Homo sapien
gggcgacagcccgaggctctcgttt

SEQ ID NO: 1858835 - DNA, 25 bp, Homo sapien
tctaagaatacgaaggcctcagccg

SEQ ID NO: 1858836 - DNA, 25 bp, Homo sapien
gagcgagcgcagcaaagcgcccagc

SEQ ID NO: 1858837 - DNA, 25 bp, Homo sapien
tccgcaggccgagtggtgcggcccg

SEQ ID NO: 1858838 - DNA, 25 bp, Homo sapien
agctgaccggcctggaatcccggct

SEQ ID NO: 1858839 - DNA, 25 bp, Homo sapien
ccgccgagcaccatgggagacgctg

SEQ ID NO: 1858840 - DNA, 25 bp, Homo sapien
gggtatattggaatttccagcagta

SEQ ID NO: 1858841 - DNA, 25 bp, Homo sapien
gttaccatatatagagaaaggtggg

SEQ ID NO: 1858842 - DNA, 25 bp, Homo sapien
gataagtgcattggattttctggta

SEQ ID NO: 1858843 - DNA, 25 bp, Homo sapien
catggcagctttttatatgtgatta

SEQ ID NO: 1858844 - DNA, 25 bp, Homo sapien
ctgaagtagagtggtgtggaggaac

SEQ ID NO: 1858845 - DNA, 25 bp, Homo sapien
tgatgtacttaggacctttttggga

SEQ ID NO: 1858846 - DNA, 25 bp, Homo sapien
gaggaacagctgttgatgtatctgc

SEQ ID NO: 1858847 - DNA, 25 bp, Homo sapien
gaacagctgttgatgtatctgcttc

SEQ ID NO: 1858848 - DNA, 25 bp, Homo sapien
ctgataagttgaagtgcagttgcat

SEQ ID NO: 1858849 - DNA, 25 bp, Homo sapien
gaagtgcagttgcataaaataatca

SEQ ID NO: 1858850 - DNA, 25 bp, Homo sapien
cataaaataatcacactcacagcca

SEQ ID NO: 1858851 - DNA, 25 bp, Homo sapien
aataatcacactcacagccacactt

SEQ ID NO: 1858852 - DNA, 25 bp, Homo sapien
agcctgtaaatcgccactgcactcc

SEQ ID NO: 1858853 - DNA, 25 bp, Homo sapien
tgagcctgtaaatcgccactgcact

SEQ ID NO: 1858854 - DNA, 25 bp, Homo sapien
gcctgtaaatcgccactgcactcca

SEQ ID NO: 1858855 - DNA, 25 bp, Homo sapien
gagcctgtaaatcgccactgcactc

SEQ ID NO: 1858856 - DNA, 25 bp, Homo sapien
gactccggctcgaaaaatgaaatga

SEQ ID NO: 1858857 - DNA, 25 bp, Homo sapien
tgtatattgacccacaaaaatactt

SEQ ID NO: 1858858 - DNA, 25 bp, Homo sapien
tacttgcatgtagaaacttttaatt

SEQ ID NO: 1858859 - DNA, 25 bp, Homo sapien
tttattgatttgggaggacatgttc

SEQ ID NO: 1858860 - DNA, 25 bp, Homo sapien
tattgccacaacctattaattccat

SEQ ID NO: 1858861 - DNA, 25 bp, Homo sapien
ttgatattgccacaacctattaatt

SEQ ID NO: 1858862 - DNA, 25 bp, Homo sapien
gatattgccacaacctattaattcc

SEQ ID NO: 1858863 - DNA, 25 bp, Homo sapien
gccacaacctattaattccattcct

SEQ ID NO: 1858864 - DNA, 25 bp, Homo sapien
tgaagggccccctttctcgtctatc

SEQ ID NO: 1858865 - DNA, 25 bp, Homo sapien
gaggctgatgaagggccccctttct

SEQ ID NO: 1858866 - DNA, 25 bp, Homo sapien
ccaaaactccgaagatgaagggcat

SEQ ID NO: 1858867 - DNA, 25 bp, Homo sapien
tctcgtctatcccaaactcctccaa

SEQ ID NO: 1858868 - DNA, 25 bp, Homo sapien
ttggtaacctgatggtcctttgttc

SEQ ID NO: 1858869 - DNA, 25 bp, Homo sapien
tggtaacctgatggtcctttgttca

SEQ ID NO: 1858870 - DNA, 25 bp, Homo sapien
gctggccaggatgacctcgatctct

SEQ ID NO: 1858871 - DNA, 25 bp, Homo sapien
ccatgctggccaggatgacctcgat

SEQ ID NO: 1858872 - DNA, 25 bp, Homo sapien
gcgtgtgccattacacctgggtaat

SEQ ID NO: 1858873 - DNA, 25 bp, Homo sapien
ggcgtgtgccattacacctgggtaa

SEQ ID NO: 1858874 - DNA, 25 bp, Homo sapien
aactgctttgcaagttgagatgaat

SEQ ID NO: 1858875 - DNA, 25 bp, Homo sapien
gtcttctattattctggtaattatg

SEQ ID NO: 1858876 - DNA, 25 bp, Homo sapien
gagatgaattagtttggattctata

SEQ ID NO: 1858877 - DNA, 25 bp, Homo sapien
tggtaattatgataaactgctttgc

SEQ ID NO: 1858878 - DNA, 25 bp, Homo sapien
gcctcttactagagcttcttgttgg

SEQ ID NO: 1858879 - DNA, 25 bp, Homo sapien
ctgttgcctcttactagagcttctt

SEQ ID NO: 1858880 - DNA, 25 bp, Homo sapien
cacgcccagccattgatctgttgcc

SEQ ID NO: 1858881 - DNA, 25 bp, Homo sapien
acgcccagccattgatctgttgcct

SEQ ID NO: 1858882 - DNA, 25 bp, Homo sapien
gggtgtccattccctgctgctaata

SEQ ID NO: 1858883 - DNA, 25 bp, Homo sapien
ggtgtccattccctgctgctaatat

SEQ ID NO: 1858884 - DNA, 25 bp, Homo sapien
tgtgagaaggtttggtacttttcaa

SEQ ID NO: 1858885 - DNA, 25 bp, Homo sapien
gtgtccattccctgctgctaatatt

SEQ ID NO: 1858886 - DNA, 25 bp, Homo sapien
gagcatatgtagaccttcatgtact

SEQ ID NO: 1858887 - DNA, 25 bp, Homo sapien
caagggtgatctgtaaacctccatc

SEQ ID NO: 1858888 - DNA, 25 bp, Homo sapien
tacctttcttgaatgctgacgttgc

SEQ ID NO: 1858889 - DNA, 25 bp, Homo sapien
cacagtgtacttcgttggtgcctca

SEQ ID NO: 1858890 - DNA, 25 bp, Homo sapien
tgtgacggccacatcaggtaccttt

SEQ ID NO: 1858891 - DNA, 25 bp, Homo sapien
acttgggagtcccaggcgggcaaat

SEQ ID NO: 1858892 - DNA, 25 bp, Homo sapien
gaagccttaaagcttctctgctgga

SEQ ID NO: 1858893 - DNA, 25 bp, Homo sapien
tagttaaatagcataaggccgggcg

SEQ ID NO: 1858894 - DNA, 25 bp, Homo sapien
cacgcacactctcactctatattta

SEQ ID NO: 1858895 - DNA, 25 bp, Homo sapien
tccctgatgtaaatagcttaatatg

SEQ ID NO: 1858896 - DNA, 25 bp, Homo sapien
ctgtagataccaaatccgaggatgc

SEQ ID NO: 1858897 - DNA, 25 bp, Homo sapien
gccatttttgtatgaagaccaattc

SEQ ID NO: 1858898 - DNA, 25 bp, Homo sapien
tttcagtgcgccgatagcgtgccac

SEQ ID NO: 1858899 - DNA, 25 bp, Homo sapien
aggtttcagtgcgccgatagcgtgc

SEQ ID NO: 1858900 - DNA, 25 bp, Homo sapien
tcagtgcgccgatagcgtgccactg

SEQ ID NO: 1858901 - DNA, 25 bp, Homo sapien
gtttcagtgcgccgatagcgtgcca

SEQ ID NO: 1858902 - DNA, 25 bp, Homo sapien
gtaaatcttacaaaggcctgtgtag

SEQ ID NO: 1858903 - DNA, 25 bp, Homo sapien
tagatgtatctttgaatgagatggc

SEQ ID NO: 1858904 - DNA, 25 bp, Homo sapien
tttttgaatgtgaaggacagcagtt

SEQ ID NO: 1858905 - DNA, 25 bp, Homo sapien
gaaggacagcagtttatactgatgt

SEQ ID NO: 1858906 - DNA, 25 bp, Homo sapien
tagttctatgcctgcaacaatcatt

SEQ ID NO: 1858907 - DNA, 25 bp, Homo sapien
tttgtccactgtggagactctggaa

SEQ ID NO: 1858908 - DNA, 25 bp, Homo sapien
tgtggagactctggaaatgcatcaa

SEQ ID NO: 1858909 - DNA, 25 bp, Homo sapien
tcaattagttctatgcctgcaacaa

SEQ ID NO: 1858910 - DNA, 25 bp, Homo sapien
cctctgctggccgaggcagtttgtc

SEQ ID NO: 1858911 - DNA, 25 bp, Homo sapien
tctgctggccgaggcagtttgtcct

SEQ ID NO: 1858912 - DNA, 25 bp, Homo sapien
cctcctctgctggccgaggcagttt

SEQ ID NO: 1858913 - DNA, 25 bp, Homo sapien
cagctggggagtcccaccactggca

SEQ ID NO: 1858914 - DNA, 25 bp, Homo sapien
tataatgaataaaagcccgtttggc

SEQ ID NO: 1858915 - DNA, 25 bp, Homo sapien
atgtcattctaagtatgaattttgc

SEQ ID NO: 1858916 - DNA, 25 bp, Homo sapien
ttgaaagcagtgaaattacagagaa

SEQ ID NO: 1858917 - DNA, 25 bp, Homo sapien
tgttcttggcatatgtaagaatttg

SEQ ID NO: 1858918 - DNA, 25 bp, Homo sapien
tgaccaccacagtatagcacaagtt

SEQ ID NO: 1858919 - DNA, 25 bp, Homo sapien
caggtataccttacagataatgcag

SEQ ID NO: 1858920 - DNA, 25 bp, Homo sapien
aatgcttttgtagttggtccaagtg

SEQ ID NO: 1858921 - DNA, 25 bp, Homo sapien
cacagtgtaagcatatgatagggat

SEQ ID NO: 1858922 - DNA, 25 bp, Homo sapien
ttgctagatattgctttctcctcct

SEQ ID NO: 1858923 - DNA, 25 bp, Homo sapien
gaaatgttgcatcgtgtagaagtct

SEQ ID NO: 1858924 - DNA, 25 bp, Homo sapien
tagatgttctgtcggtatttttatc

SEQ ID NO: 1858925 - DNA, 25 bp, Homo sapien
tatcttacctgaatgacatgaacag

SEQ ID NO: 1858926 - DNA, 25 bp, Homo sapien
tctacaggggctttcattcatatat

SEQ ID NO: 1858927 - DNA, 25 bp, Homo sapien
tagtgggacagttgcaatcattgta

SEQ ID NO: 1858928 - DNA, 25 bp, Homo sapien
gatttaattgtaaagcaattccttc

SEQ ID NO: 1858929 - DNA, 25 bp, Homo sapien
attgggtgtgttagagttgatagcc

SEQ ID NO: 1858930 - DNA, 25 bp, Homo sapien
gactgttactagaattccccaagat

SEQ ID NO: 1858931 - DNA, 25 bp, Homo sapien
tgagctcactagtcagagacctgcc

SEQ ID NO: 1858932 - DNA, 25 bp, Homo sapien
tccccaagatgaattagcatgaagg

SEQ ID NO: 1858933 - DNA, 25 bp, Homo sapien
aaaaagtacaacagtgttggccagg

SEQ ID NO: 1858934 - DNA, 25 bp, Homo sapien
tgccttgccaattagaacaaagtgg

SEQ ID NO: 1858935 - DNA, 25 bp, Homo sapien
tccaaactgaatgtaatgggctgtg

SEQ ID NO: 1858936 - DNA, 25 bp, Homo sapien
tttgactcacaaagaagagccatta

SEQ ID NO: 1858937 - DNA, 25 bp, Homo sapien
gctgtgtgctttagggacctggctt

SEQ ID NO: 1858938 - DNA, 25 bp, Homo sapien
taaaacgtccaaaaacactatctgc

SEQ ID NO: 1858939 - DNA, 25 bp, Homo sapien
cctctatcaagtagcctgggtttat

SEQ ID NO: 1858940 - DNA, 25 bp, Homo sapien
tactatctcttaattcaggtgctgt

SEQ ID NO: 1858941 - DNA, 25 bp, Homo sapien
taagatacatactctgtggaaatgg

SEQ ID NO: 1858942 - DNA, 25 bp, Homo sapien
aacatctgacattattagcgctttt

SEQ ID NO: 1858943 - DNA, 25 bp, Homo sapien
atctgacattattagcgcttttgtc

SEQ ID NO: 1858944 - DNA, 25 bp, Homo sapien
catctgacattattagcgcttttgt

SEQ ID NO: 1858945 - DNA, 25 bp, Homo sapien
acatctgacattattagcgcttttg

SEQ ID NO: 1858946 - DNA, 25 bp, Homo sapien
ggaaccaaattcctgccatagattt

SEQ ID NO: 1858947 - DNA, 25 bp, Homo sapien
tatcaccaacatctttcctctgggt

SEQ ID NO: 1858948 - DNA, 25 bp, Homo sapien
gggtcattacccatttgttggcttc

SEQ ID NO: 1858949 - DNA, 25 bp, Homo sapien
ggctttaggaaccaaattcctgcca

SEQ ID NO: 1858950 - DNA, 25 bp, Homo sapien
tccatcctgcttcaccagcaacagt

SEQ ID NO: 1858951 - DNA, 25 bp, Homo sapien
cctgcttcaccagcaacagtaatac

SEQ ID NO: 1858952 - DNA, 25 bp, Homo sapien
agcttccatcctgcttcaccagcaa

SEQ ID NO: 1858953 - DNA, 25 bp, Homo sapien
ttccatcctgcttcaccagcaacag

SEQ ID NO: 1858954 - DNA, 25 bp, Homo sapien
cagtctgcttctgaatgtagaagcc

SEQ ID NO: 1858955 - DNA, 25 bp, Homo sapien
cttctctttatgatagtttccagtc

SEQ ID NO: 1858956 - DNA, 25 bp, Homo sapien
tctgaatgtagaagccttctttcct

SEQ ID NO: 1858957 - DNA, 25 bp, Homo sapien
tttatgatagtttccagtctgcttc

SEQ ID NO: 1858958 - DNA, 25 bp, Homo sapien
gcagagcaaagccaaaatacccata

SEQ ID NO: 1858959 - DNA, 25 bp, Homo sapien
aagaacaccaactggtctatcatgc

SEQ ID NO: 1858960 - DNA, 25 bp, Homo sapien
tctatcatgcattccggcatccctt

SEQ ID NO: 1858961 - DNA, 25 bp, Homo sapien
aaatacccatattcaaagaacacca

SEQ ID NO: 1858962 - DNA, 25 bp, Homo sapien
gcagttttctcgaagagtttcaaga

SEQ ID NO: 1858963 - DNA, 25 bp, Homo sapien
catggagcagttttctcgaagagtt

SEQ ID NO: 1858964 - DNA, 25 bp, Homo sapien
ggagcagttttctcgaagagtttca

SEQ ID NO: 1858965 - DNA, 25 bp, Homo sapien
gggacatggagcagttttctcgaag

SEQ ID NO: 1858966 - DNA, 25 bp, Homo sapien
ttaacgtatcagtcttcttcttcgg

SEQ ID NO: 1858967 - DNA, 25 bp, Homo sapien
tcttcggcatagtcttttagttcct

SEQ ID NO: 1858968 - DNA, 25 bp, Homo sapien
cggcatagtcttttagttcctatat

SEQ ID NO: 1858969 - DNA, 25 bp, Homo sapien
tcagtcttcttcttcggcatagtct

SEQ ID NO: 1858970 - DNA, 25 bp, Homo sapien
gatgttgatctcagattgatattga

SEQ ID NO: 1858971 - DNA, 25 bp, Homo sapien
gatattgatcatttgcgagacccat

SEQ ID NO: 1858972 - DNA, 25 bp, Homo sapien
gagatgatgttgatctcagattgat

SEQ ID NO: 1858973 - DNA, 25 bp, Homo sapien
cagattgatattgatcatttgcgag

SEQ ID NO: 1858974 - DNA, 25 bp, Homo sapien
ttctaggccagttatgttggctcac

SEQ ID NO: 1858975 - DNA, 25 bp, Homo sapien
tgtggttacaacacgatattctagg

SEQ ID NO: 1858976 - DNA, 25 bp, Homo sapien
gcacagtgcatacagttttgggaaa

SEQ ID NO: 1858977 - DNA, 25 bp, Homo sapien
catcaaatgtttcccaggtttactt

SEQ ID NO: 1858978 - DNA, 25 bp, Homo sapien
tcaacgttgcctccaatgatggtag

SEQ ID NO: 1858979 - DNA, 25 bp, Homo sapien
gccacacttggacagaatgactata

SEQ ID NO: 1858980 - DNA, 25 bp, Homo sapien
gagtgacccaacgaaatctctgcag

SEQ ID NO: 1858981 - DNA, 25 bp, Homo sapien
taccttgctaacacgagaagagggc

SEQ ID NO: 1858982 - DNA, 25 bp, Homo sapien
ttattactgtgagtttgctctaacc

SEQ ID NO: 1858983 - DNA, 25 bp, Homo sapien
tcaatcactgcttattactgtgagt

SEQ ID NO: 1858984 - DNA, 25 bp, Homo sapien
cgagagctacagtgcctggctagtc

SEQ ID NO: 1858985 - DNA, 25 bp, Homo sapien
tccagaatcttaacattgctatttg

SEQ ID NO: 1858986 - DNA, 25 bp, Homo sapien
cagtctgtgaaccttcaaaacaaat

SEQ ID NO: 1858987 - DNA, 25 bp, Homo sapien
aacaaatacattccatgttcttatt

SEQ ID NO: 1858988 - DNA, 25 bp, Homo sapien
caaatacattccatgttcttattca

SEQ ID NO: 1858989 - DNA, 25 bp, Homo sapien
gtctgtgaaccttcaaaacaaatac

SEQ ID NO: 1858990 - DNA, 25 bp, Homo sapien
ctggattttgctagaagtttctttc

SEQ ID NO: 1858991 - DNA, 25 bp, Homo sapien
gctagaagtttctttcaccttctga

SEQ ID NO: 1858992 - DNA, 25 bp, Homo sapien
gattttgctagaagtttctttcacc

SEQ ID NO: 1858993 - DNA, 25 bp, Homo sapien
tgctagaagtttctttcaccttctg

SEQ ID NO: 1858994 - DNA, 25 bp, Homo sapien
tagttgagttgtaaattcatgtcag

SEQ ID NO: 1858995 - DNA, 25 bp, Homo sapien
ttattgtctccctgatgtctgatac

SEQ ID NO: 1858996 - DNA, 25 bp, Homo sapien
gatgtctgatacaagctggcaatca

SEQ ID NO: 1858997 - DNA, 25 bp, Homo sapien
aagggtagttgagttgtaaattcat

SEQ ID NO: 1858998 - DNA, 25 bp, Homo sapien
atattattactcttaaacttatgca

SEQ ID NO: 1858999 - DNA, 25 bp, Homo sapien
tattattactcttaaacttatgcat

SEQ ID NO: 1859000 - DNA, 25 bp, Homo sapien
cttaaaacctgtttagttatagctg

SEQ ID NO: 1859001 - DNA, 25 bp, Homo sapien
aaacctgtttagttatagctgtcat

SEQ ID NO: 1859002 - DNA, 25 bp, Homo sapien
aaaacctgtttagttatagctgtca

SEQ ID NO: 1859003 - DNA, 25 bp, Homo sapien
taaaacctgtttagttatagctgtc

SEQ ID NO: 1859004 - DNA, 25 bp, Homo sapien
gagatggaggttttgccatatttgc

SEQ ID NO: 1859005 - DNA, 25 bp, Homo sapien
cccagactggagtgttagtggcggg

SEQ ID NO: 1859006 - DNA, 25 bp, Homo sapien
cagactggagtgttagtggcgggat

SEQ ID NO: 1859007 - DNA, 25 bp, Homo sapien
gatggaggttttgccatatttgcca

SEQ ID NO: 1859008 - DNA, 25 bp, Homo sapien
cataggacagtcctctgcaacaaaa

SEQ ID NO: 1859009 - DNA, 25 bp, Homo sapien
tgagcttgacaaaccctgatacatg

SEQ ID NO: 1859010 - DNA, 25 bp, Homo sapien
taagcaaggtcatagtctttgtcct

SEQ ID NO: 1859011 - DNA, 25 bp, Homo sapien
gctaaatgtcctgcatcacatagga

SEQ ID NO: 1859012 - DNA, 25 bp, Homo sapien
tgtgtgcctgttagaaggcagcatg

SEQ ID NO: 1859013 - DNA, 25 bp, Homo sapien
gcagtcttaccagaaggagtgggat

SEQ ID NO: 1859014 - DNA, 25 bp, Homo sapien
tataaatcgtctgagccttgcaatg

SEQ ID NO: 1859015 - DNA, 25 bp, Homo sapien
gagtgggatagaacagccacaaagc

SEQ ID NO: 1859016 - DNA, 25 bp, Homo sapien
gataaagtgtctgggacttgcgctg

SEQ ID NO: 1859017 - DNA, 25 bp, Homo sapien
aatagaacagcgcatcaagcaaggc

SEQ ID NO: 1859018 - DNA, 25 bp, Homo sapien
cgctgatgcagcgagggctaataga

SEQ ID NO: 1859019 - DNA, 25 bp, Homo sapien
tgctgctagcttccaagacaagttg

SEQ ID NO: 1859020 - DNA, 25 bp, Homo sapien
caaagtataaatctggagaactgag

SEQ ID NO: 1859021 - DNA, 25 bp, Homo sapien
ctgatgagttaaattattatagtcc

SEQ ID NO: 1859022 - DNA, 25 bp, Homo sapien
ggaagaaagatgtaactgacaggga

SEQ ID NO: 1859023 - DNA, 25 bp, Homo sapien
ccagtgagttaaggaagctaaagaa

SEQ ID NO: 1859024 - DNA, 25 bp, Homo sapien
gaggactacagcagtaactgtccat

SEQ ID NO: 1859025 - DNA, 25 bp, Homo sapien
gcccaggtctgttgagctcccagaa

SEQ ID NO: 1859026 - DNA, 25 bp, Homo sapien
gaaggtagcacctgggatttgagcc

SEQ ID NO: 1859027 - DNA, 25 bp, Homo sapien
ccaaaacagtgaggagaggactaca

SEQ ID NO: 1859028 - DNA, 25 bp, Homo sapien
cttaagatggggtaatgagtcatcc

SEQ ID NO: 1859029 - DNA, 25 bp, Homo sapien
catccagtgcactgtgttttgttgt

SEQ ID NO: 1859030 - DNA, 25 bp, Homo sapien
gttttgttgtgtcccgaatgccaca

SEQ ID NO: 1859031 - DNA, 25 bp, Homo sapien
taatgagtcatccagtgcactgtgt

SEQ ID NO: 1859032 - DNA, 25 bp, Homo sapien
tgcttctggaaaaccgggtccacag

SEQ ID NO: 1859033 - DNA, 25 bp, Homo sapien
tggaaaaccgggtccacagcatggt

SEQ ID NO: 1859034 - DNA, 25 bp, Homo sapien
ttctggaaaaccgggtccacagcat

SEQ ID NO: 1859035 - DNA, 25 bp, Homo sapien
ctggaaaaccgggtccacagcatgg

SEQ ID NO: 1859036 - DNA, 25 bp, Homo sapien
tgagaagatcagtatcaatgaagtt

SEQ ID NO: 1859037 - DNA, 25 bp, Homo sapien
gatcagtatcaatgaagtttgtttc

SEQ ID NO: 1859038 - DNA, 25 bp, Homo sapien
ctctgagaagatcagtatcaatgaa

SEQ ID NO: 1859039 - DNA, 25 bp, Homo sapien
gaagatcagtatcaatgaagtttgt

SEQ ID NO: 1859040 - DNA, 25 bp, Homo sapien
tccgtgttttgtgcaggcatcccca

SEQ ID NO: 1859041 - DNA, 25 bp, Homo sapien
gggctagcacacttcagatctggat

SEQ ID NO: 1859042 - DNA, 25 bp, Homo sapien
taattcagggttagacagagctcag

SEQ ID NO: 1859043 - DNA, 25 bp, Homo sapien
gaggtgacactcttaactgttggga

SEQ ID NO: 1859044 - DNA, 25 bp, Homo sapien
atcaccaagtttggcctgcccttga

SEQ ID NO: 1859045 - DNA, 25 bp, Homo sapien
agcatcaccaagtttggcctgccct

SEQ ID NO: 1859046 - DNA, 25 bp, Homo sapien
tattaaggcagtcatagctgtggat

SEQ ID NO: 1859047 - DNA, 25 bp, Homo sapien
tctgtggagcaggtattaaggcagt

SEQ ID NO: 1859048 - DNA, 25 bp, Homo sapien
cctgaggatgccaccgcttatttcc

SEQ ID NO: 1859049 - DNA, 25 bp, Homo sapien
gcctgaggatgccaccgcttatttc

SEQ ID NO: 1859050 - DNA, 25 bp, Homo sapien
ggatgccaccgcttatttcctcctg

SEQ ID NO: 1859051 - DNA, 25 bp, Homo sapien
gccaccgcttatttcctcctgagat

SEQ ID NO: 1859052 - DNA, 25 bp, Homo sapien
gtatgctgagcttattcctgccaca

SEQ ID NO: 1859053 - DNA, 25 bp, Homo sapien
ggatatattgccactcacactgagg

SEQ ID NO: 1859054 - DNA, 25 bp, Homo sapien
cagtttgacttgaacagcagctggg

SEQ ID NO: 1859055 - DNA, 25 bp, Homo sapien
aagaggtgcagagccgattcaggac

SEQ ID NO: 1859056 - DNA, 25 bp, Homo sapien
tctgatgtccttggaaagtttccgt

SEQ ID NO: 1859057 - DNA, 25 bp, Homo sapien
gttaaagttcccacgacgcacatgg

SEQ ID NO: 1859058 - DNA, 25 bp, Homo sapien
aagactagtccacgaacgagacccg

SEQ ID NO: 1859059 - DNA, 25 bp, Homo sapien
tctacacaggatccaaggtcacgag

SEQ ID NO: 1859060 - DNA, 25 bp, Homo sapien
caggatacctgatggccacgtgtgc

SEQ ID NO: 1859061 - DNA, 25 bp, Homo sapien
gcttcaggacccagaccggtgtctt

SEQ ID NO: 1859062 - DNA, 25 bp, Homo sapien
ggtctgcccagcgtttaccactgct

SEQ ID NO: 1859063 - DNA, 25 bp, Homo sapien
tgtcttgctctagggcaacccaggg

SEQ ID NO: 1859064 - DNA, 25 bp, Homo sapien
gccaagctctggtcccgaagaggct

SEQ ID NO: 1859065 - DNA, 25 bp, Homo sapien
caaggccacggttgtactgtgatag

SEQ ID NO: 1859066 - DNA, 25 bp, Homo sapien
tgtcctacgggacctggaacaggga

SEQ ID NO: 1859067 - DNA, 25 bp, Homo sapien
cattcgctcttaggaacacgctcga

SEQ ID NO: 1859068 - DNA, 25 bp, Homo sapien
cttgatatatgtggagccggaagtc

SEQ ID NO: 1859069 - DNA, 25 bp, Homo sapien
tctgaaagtcgcgtgagaagaccca

SEQ ID NO: 1859070 - DNA, 25 bp, Homo sapien
gacgagatgacacgttgagtggcac

SEQ ID NO: 1859071 - DNA, 25 bp, Homo sapien
caaactgtataaacttccggccctg

SEQ ID NO: 1859072 - DNA, 25 bp, Homo sapien
tcctcccgtggaaaagcggagcctc

SEQ ID NO: 1859073 - DNA, 25 bp, Homo sapien
ttaaacttgcaaggcccatggaagc

SEQ ID NO: 1859074 - DNA, 25 bp, Homo sapien
gatgtcattgtcttccgtgggtgct

SEQ ID NO: 1859075 - DNA, 25 bp, Homo sapien
tgatggaggacatcggacttggccc

SEQ ID NO: 1859076 - DNA, 25 bp, Homo sapien
ggtgctaggtgcttttcataggccc

SEQ ID NO: 1859077 - DNA, 25 bp, Homo sapien
tgcctgacagtgaaatgcagtgtta

SEQ ID NO: 1859078 - DNA, 25 bp, Homo sapien
taacatcatcacaacggctggcgtc

SEQ ID NO: 1859079 - DNA, 25 bp, Homo sapien
agtgcgcaggagtggagtggacgga

SEQ ID NO: 1859080 - DNA, 25 bp, Homo sapien
gcagtgttaggactatgttgtaata

SEQ ID NO: 1859081 - DNA, 25 bp, Homo sapien
aatgctaagactctagaggtgggca

SEQ ID NO: 1859082 - DNA, 25 bp, Homo sapien
ggcgctggtgggaaatcccgtcaat

SEQ ID NO: 1859083 - DNA, 25 bp, Homo sapien
gactgtcaacttgccctccaaactg

SEQ ID NO: 1859084 - DNA, 25 bp, Homo sapien
gtgaatcctggtatggaatacgcag

SEQ ID NO: 1859085 - DNA, 25 bp, Homo sapien
ggcctgggaggtacacacatcttta

SEQ ID NO: 1859086 - DNA, 25 bp, Homo sapien
gagcaatttggcagcagacggacta

SEQ ID NO: 1859087 - DNA, 25 bp, Homo sapien
tcaagacaggcttcgcaaaagcagc

SEQ ID NO: 1859088 - DNA, 25 bp, Homo sapien
gaacacacggtttgtacatctgccc

SEQ ID NO: 1859089 - DNA, 25 bp, Homo sapien
tgattgtgagtcttcaggccatgag

SEQ ID NO: 1859090 - DNA, 25 bp, Homo sapien
tgtgagtcttcaggccatgaggcct

SEQ ID NO: 1859091 - DNA, 25 bp, Homo sapien
cataaattacaggtggatgattgtg

SEQ ID NO: 1859092 - DNA, 25 bp, Homo sapien
catgaggcctcttggggactatttc

SEQ ID NO: 1859093 - DNA, 25 bp, Homo sapien
ggccgttcagcctggcttctgactg

SEQ ID NO: 1859094 - DNA, 25 bp, Homo sapien
aaaaagaagacacgaagctgatggg

SEQ ID NO: 1859095 - DNA, 25 bp, Homo sapien
gctcgctgggtgcagcagactggcc

SEQ ID NO: 1859096 - DNA, 25 bp, Homo sapien
tctgactggaagctcgctgggtgca

SEQ ID NO: 1859097 - DNA, 25 bp, Homo sapien
ctggccccttccgcgaggttggagc

SEQ ID NO: 1859098 - DNA, 25 bp, Homo sapien
ggacgtgaacgatgacgtgggccca

SEQ ID NO: 1859099 - DNA, 25 bp, Homo sapien
acgtgggcccaggtcggaagcagcc

SEQ ID NO: 1859100 - DNA, 25 bp, Homo sapien
cagtggtggtcacagaggacgtgaa

SEQ ID NO: 1859101 - DNA, 25 bp, Homo sapien
cgggtggggcggctcttccatgcac

SEQ ID NO: 1859102 - DNA, 25 bp, Homo sapien
ccaggaacaggtgttccctgtacac

SEQ ID NO: 1859103 - DNA, 25 bp, Homo sapien
gccaggaacaggtgttccctgtaca

SEQ ID NO: 1859104 - DNA, 25 bp, Homo sapien
ttcaaacaatggtgtgtcgggtggg

SEQ ID NO: 1859105 - DNA, 25 bp, Homo sapien
aggatgggtgagcacgctgtccctc

SEQ ID NO: 1859106 - DNA, 25 bp, Homo sapien
gtccctcggagcgtcctcagtggtg

SEQ ID NO: 1859107 - DNA, 25 bp, Homo sapien
ctgtgcaaaggatgggtgagcacgc

SEQ ID NO: 1859108 - DNA, 25 bp, Homo sapien
ctgtccctcggagcgtcctcagtgg

SEQ ID NO: 1859109 - DNA, 25 bp, Homo sapien
ttcactctgcaaatgaccagggcct

SEQ ID NO: 1859110 - DNA, 25 bp, Homo sapien
tataataataaaagccacggtggca

SEQ ID NO: 1859111 - DNA, 25 bp, Homo sapien
gagacctaccacaaacaaagacctg

SEQ ID NO: 1859112 - DNA, 25 bp, Homo sapien
ggaaactctgagcaaacaccaggca

SEQ ID NO: 1859113 - DNA, 25 bp, Homo sapien
aagtggcctcagtacacagaacgct

SEQ ID NO: 1859114 - DNA, 25 bp, Homo sapien
aaaagaaggtgaagttgactgggct

SEQ ID NO: 1859115 - DNA, 25 bp, Homo sapien
cagaacgctcgctttttattgtaga

SEQ ID NO: 1859116 - DNA, 25 bp, Homo sapien
tgtccaaagggaggttcttaattga

SEQ ID NO: 1859117 - DNA, 25 bp, Homo sapien
ggaatcgacacttcatttaatagga

SEQ ID NO: 1859118 - DNA, 25 bp, Homo sapien
taatgtatttgtcaggaatcgacac

SEQ ID NO: 1859119 - DNA, 25 bp, Homo sapien
aagagcaattgagaagagtcccaca

SEQ ID NO: 1859120 - DNA, 25 bp, Homo sapien
tggcttgtgcttctaactaaaatca

SEQ ID NO: 1859121 - DNA, 25 bp, Homo sapien
caaagtgctcacaacggctcctgtg

SEQ ID NO: 1859122 - DNA, 25 bp, Homo sapien
gtgacacaccttgacttggcctcca

SEQ ID NO: 1859123 - DNA, 25 bp, Homo sapien
ggactttctggtagccactcacttg

SEQ ID NO: 1859124 - DNA, 25 bp, Homo sapien
ccagctggacacacgaaaagagttc

SEQ ID NO: 1859125 - DNA, 25 bp, Homo sapien
ccagcaaagcgagggggaggcgagc

SEQ ID NO: 1859126 - DNA, 25 bp, Homo sapien
ctgtgagggaatgagactttgccat

SEQ ID NO: 1859127 - DNA, 25 bp, Homo sapien
ggcgagctggcagcgcggctgtgag

SEQ ID NO: 1859128 - DNA, 25 bp, Homo sapien
tgaacccgtgtccttttggagtcca

SEQ ID NO: 1859129 - DNA, 25 bp, Homo sapien
aaagaaccgccacaggccagggagc

SEQ ID NO: 1859130 - DNA, 25 bp, Homo sapien
agctgcagatgtgggtctagggccg

SEQ ID NO: 1859131 - DNA, 25 bp, Homo sapien
ctagggccgaggctttgcagcgtat

SEQ ID NO: 1859132 - DNA, 25 bp, Homo sapien
ctggaagggcatgccccgaaggaaa

SEQ ID NO: 1859133 - DNA, 25 bp, Homo sapien
tgctatctcgttcccggagcacagg

SEQ ID NO: 1859134 - DNA, 25 bp, Homo sapien
tcagatgcgaggccgagctgccaag

SEQ ID NO: 1859135 - DNA, 25 bp, Homo sapien
gccaagctgctatctcgttcccgga

SEQ ID NO: 1859136 - DNA, 25 bp, Homo sapien
gagggctctgcgtgctctgtgggca

SEQ ID NO: 1859137 - DNA, 25 bp, Homo sapien
gacagagtcagcaaccatgctggag

SEQ ID NO: 1859138 - DNA, 25 bp, Homo sapien
gctctctggctaattggcaacccgg

SEQ ID NO: 1859139 - DNA, 25 bp, Homo sapien
ctctgcccttgatatgactgtctgg

SEQ ID NO: 1859140 - DNA, 25 bp, Homo sapien
ggagcctcctcccattatgaaatgc

SEQ ID NO: 1859141 - DNA, 25 bp, Homo sapien
tcctgtgttcacacggaaagacagt

SEQ ID NO: 1859142 - DNA, 25 bp, Homo sapien
gacagtcttccaatttaatcacgca

SEQ ID NO: 1859143 - DNA, 25 bp, Homo sapien
ggcttctcctcaggaacgtgtccac

SEQ ID NO: 1859144 - DNA, 25 bp, Homo sapien
atttaatcacgcagtttgatgctac

SEQ ID NO: 1859145 - DNA, 25 bp, Homo sapien
gacacacctgaaaggaaactcccac

SEQ ID NO: 1859146 - DNA, 25 bp, Homo sapien
ggctgacccgttggctctttctaga

SEQ ID NO: 1859147 - DNA, 25 bp, Homo sapien
aagttaaactaggaggaagcggctg

SEQ ID NO: 1859148 - DNA, 25 bp, Homo sapien
gagcgcagctgatatgtctttgaca

SEQ ID NO: 1859149 - DNA, 25 bp, Homo sapien
atcactaagtaggagacggagccac

SEQ ID NO: 1859150 - DNA, 25 bp, Homo sapien
tgcttcgataaacacaactggaggg

SEQ ID NO: 1859151 - DNA, 25 bp, Homo sapien
gaacagtgaattagcagcgggcata

SEQ ID NO: 1859152 - DNA, 25 bp, Homo sapien
tggccacgccagaactcggtatatg

SEQ ID NO: 1859153 - DNA, 25 bp, Homo sapien
tggacttgatgaagattgaagaccc

SEQ ID NO: 1859154 - DNA, 25 bp, Homo sapien
taaagggtgcctccaggtagcaaag

SEQ ID NO: 1859155 - DNA, 25 bp, Homo sapien
ttttgtattccaacacaggcctgtc

SEQ ID NO: 1859156 - DNA, 25 bp, Homo sapien
gaggagaccgtttcctgccgttgcc

SEQ ID NO: 1859157 - DNA, 25 bp, Homo sapien
ttgggggagcgtgagttggagcctg

SEQ ID NO: 1859158 - DNA, 25 bp, Homo sapien
ttattggtgctgccggttgggggag

SEQ ID NO: 1859159 - DNA, 25 bp, Homo sapien
ttggtgctgccggttgggggagcgt

SEQ ID NO: 1859160 - DNA, 25 bp, Homo sapien
gccggttgggggagcgtgagttgga

SEQ ID NO: 1859161 - DNA, 25 bp, Homo sapien
agcgcatgggagtcgagctgctgac

SEQ ID NO: 1859162 - DNA, 25 bp, Homo sapien
ccgcagcgcatgggagtcgagctgc

SEQ ID NO: 1859163 - DNA, 25 bp, Homo sapien
aggcgcccgcagcgcatgggagtcg

SEQ ID NO: 1859164 - DNA, 25 bp, Homo sapien
cagcgcatgggagtcgagctgctga

SEQ ID NO: 1859165 - DNA, 25 bp, Homo sapien
ctgtccccgattcctcactattttc

SEQ ID NO: 1859166 - DNA, 25 bp, Homo sapien
tccccgattcctcactattttcctc

SEQ ID NO: 1859167 - DNA, 25 bp, Homo sapien
cccctgtccccgattcctcactatt

SEQ ID NO: 1859168 - DNA, 25 bp, Homo sapien
tgtcccctgtccccgattcctcact

SEQ ID NO: 1859169 - DNA, 25 bp, Homo sapien
tagagacaccatgacacggattccc

SEQ ID NO: 1859170 - DNA, 25 bp, Homo sapien
gattcccacaaaatcttcacactgg

SEQ ID NO: 1859171 - DNA, 25 bp, Homo sapien
cagtggcccaaaagttagagacacc

SEQ ID NO: 1859172 - DNA, 25 bp, Homo sapien
gacacctgatggcaactagcatgct

SEQ ID NO: 1859173 - DNA, 25 bp, Homo sapien
catctgcgtgggttgtctctgggta

SEQ ID NO: 1859174 - DNA, 25 bp, Homo sapien
tgagcgtgccctgcaatggcatggt

SEQ ID NO: 1859175 - DNA, 25 bp, Homo sapien
gagtggacttcaacctcatgtggct

SEQ ID NO: 1859176 - DNA, 25 bp, Homo sapien
tcctggccctgcaatggttgagcac

SEQ ID NO: 1859177 - DNA, 25 bp, Homo sapien
ccccgcaagcaagggtaagccatgg

SEQ ID NO: 1859178 - DNA, 25 bp, Homo sapien
caggtcagcctggaagcaccatgaa

SEQ ID NO: 1859179 - DNA, 25 bp, Homo sapien
cctggagagtagacaacgtgcttcg

SEQ ID NO: 1859180 - DNA, 25 bp, Homo sapien
agacagggcacagcaccgagctcag

SEQ ID NO: 1859181 - DNA, 25 bp, Homo sapien
gttatttgtgtaatccctgctctcc

SEQ ID NO: 1859182 - DNA, 25 bp, Homo sapien
tcggtcaatatctccggaggccgct

SEQ ID NO: 1859183 - DNA, 25 bp, Homo sapien
gctcactcctctggtattgaatggt

SEQ ID NO: 1859184 - DNA, 25 bp, Homo sapien
caggctgacactaatcctggaattg

SEQ ID NO: 1859185 - DNA, 25 bp, Homo sapien
tgaaccgtcttcaatggcctctgga

SEQ ID NO: 1859186 - DNA, 25 bp, Homo sapien
tttgattgccgctgctcacaaaggg

SEQ ID NO: 1859187 - DNA, 25 bp, Homo sapien
tgtatgaatccgacacagcctcagt

SEQ ID NO: 1859188 - DNA, 25 bp, Homo sapien
tcccctgagagaagccggctaattt

SEQ ID NO: 1859189 - DNA, 25 bp, Homo sapien
gccataattcaccacatactggaga

SEQ ID NO: 1859190 - DNA, 25 bp, Homo sapien
accacatactggagataggctgggt

SEQ ID NO: 1859191 - DNA, 25 bp, Homo sapien
tcaccacatactggagataggctgg

SEQ ID NO: 1859192 - DNA, 25 bp, Homo sapien
taattcaccacatactggagatagg

SEQ ID NO: 1859193 - DNA, 25 bp, Homo sapien
ttctccaagggcatggcagtcacag

SEQ ID NO: 1859194 - DNA, 25 bp, Homo sapien
agttattccttcatctggcttcagg

SEQ ID NO: 1859195 - DNA, 25 bp, Homo sapien
tatttttgtgcaaccgaatgcttcc

SEQ ID NO: 1859196 - DNA, 25 bp, Homo sapien
tgtcacaagtgattcctgagagctc

SEQ ID NO: 1859197 - DNA, 25 bp, Homo sapien
tgcactgcctcctctctggcccagt

SEQ ID NO: 1859198 - DNA, 25 bp, Homo sapien
cactgcctcctctctggcccagtac

SEQ ID NO: 1859199 - DNA, 25 bp, Homo sapien
cctgcactgcctcctctctggccca

SEQ ID NO: 1859200 - DNA, 25 bp, Homo sapien
ctatcccggctgtccctgcactgcc

SEQ ID NO: 1859201 - DNA, 25 bp, Homo sapien
ctgagacgatggtcctctggaggat

SEQ ID NO: 1859202 - DNA, 25 bp, Homo sapien
agaccaggagcttttgcaaggagag

SEQ ID NO: 1859203 - DNA, 25 bp, Homo sapien
ctgcagaccaggagcttttgcaagg

SEQ ID NO: 1859204 - DNA, 25 bp, Homo sapien
tgactgctttgaggtgcttctgggc

SEQ ID NO: 1859205 - DNA, 25 bp, Homo sapien
ggacctcggaaataattatcaccat

SEQ ID NO: 1859206 - DNA, 25 bp, Homo sapien
gacctcggaaataattatcaccatg

SEQ ID NO: 1859207 - DNA, 25 bp, Homo sapien
gggacctcggaaataattatcacca

SEQ ID NO: 1859208 - DNA, 25 bp, Homo sapien
ggtctgaccgaagccagtaaataaa

SEQ ID NO: 1859209 - DNA, 25 bp, Homo sapien
tggtctgaccgaagccagtaaataa

SEQ ID NO: 1859210 - DNA, 25 bp, Homo sapien
ccaggccctgagccgagtggtcctg

SEQ ID NO: 1859211 - DNA, 25 bp, Homo sapien
cctggagggcagctcaagtagccac

SEQ ID NO: 1859212 - DNA, 25 bp, Homo sapien
ggagggcagctcaagtagccacttg

SEQ ID NO: 1859213 - DNA, 25 bp, Homo sapien
tccaggccctgagccgagtggtcct

SEQ ID NO: 1859214 - DNA, 25 bp, Homo sapien
ttttaatggggattcatttctacca

SEQ ID NO: 1859215 - DNA, 25 bp, Homo sapien
tttaatggggattcatttctaccag

SEQ ID NO: 1859216 - DNA, 25 bp, Homo sapien
ttaatggggattcatttctaccagg

SEQ ID NO: 1859217 - DNA, 25 bp, Homo sapien
tctcaagccctctgtggttggccga

SEQ ID NO: 1859218 - DNA, 25 bp, Homo sapien
gagtgataagtctgcagcacggccg

SEQ ID NO: 1859219 - DNA, 25 bp, Homo sapien
gacacagtgtgactacgaaacagca

SEQ ID NO: 1859220 - DNA, 25 bp, Homo sapien
taaaccagaggttcctcggaggcac

SEQ ID NO: 1859221 - DNA, 25 bp, Homo sapien
tgtgtgtcccaacgatacggatgaa

SEQ ID NO: 1859222 - DNA, 25 bp, Homo sapien
ccaacgatacggatgaaggaggcag

SEQ ID NO: 1859223 - DNA, 25 bp, Homo sapien
tgttgtgtgtcccaacgatacggat

SEQ ID NO: 1859224 - DNA, 25 bp, Homo sapien
tgtcccaacgatacggatgaaggag

SEQ ID NO: 1859225 - DNA, 25 bp, Homo sapien
cctgattagatggtgcagttgactc

SEQ ID NO: 1859226 - DNA, 25 bp, Homo sapien
gaaacaaccatttgcctgattagat

SEQ ID NO: 1859227 - DNA, 25 bp, Homo sapien
cagttgactctctggtagtgtggcc

SEQ ID NO: 1859228 - DNA, 25 bp, Homo sapien
actctctggtagtgtggccgatgga

SEQ ID NO: 1859229 - DNA, 25 bp, Homo sapien
agggagggcttcctgtcctcggaga

SEQ ID NO: 1859230 - DNA, 25 bp, Homo sapien
ggagggagggcttcctgtcctcgga

SEQ ID NO: 1859231 - DNA, 25 bp, Homo sapien
gaggagggagggcttcctgtcctcg

SEQ ID NO: 1859232 - DNA, 25 bp, Homo sapien
gggagggcttcctgtcctcggagac

SEQ ID NO: 1859233 - DNA, 25 bp, Homo sapien
aaagtcattaccatcttgtgtgtaa

SEQ ID NO: 1859234 - DNA, 25 bp, Homo sapien
tgcctggacaccagtccccttaagg

SEQ ID NO: 1859235 - DNA, 25 bp, Homo sapien
gacaccagtccccttaaggtcatta

SEQ ID NO: 1859236 - DNA, 25 bp, Homo sapien
tgtaaagtctgtgcccctgaaacca

SEQ ID NO: 1859237 - DNA, 25 bp, Homo sapien
cagagcggcccaagattagcctaga

SEQ ID NO: 1859238 - DNA, 25 bp, Homo sapien
ttccagaaggatcaccagacggtct

SEQ ID NO: 1859239 - DNA, 25 bp, Homo sapien
tatgatgaaaaccattgcccttagc

SEQ ID NO: 1859240 - DNA, 25 bp, Homo sapien
aattcgttcagcacctgacagtggg

SEQ ID NO: 1859241 - DNA, 25 bp, Homo sapien
ggcaattcaccttttccatgatatt

SEQ ID NO: 1859242 - DNA, 25 bp, Homo sapien
tggcaattcaccttttccatgatat

SEQ ID NO: 1859243 - DNA, 25 bp, Homo sapien
gcaattcaccttttccatgatattt

SEQ ID NO: 1859244 - DNA, 25 bp, Homo sapien
tcccctcaagagctgctaatgaagg

SEQ ID NO: 1859245 - DNA, 25 bp, Homo sapien
tgaaggccctgttagcgctggatga

SEQ ID NO: 1859246 - DNA, 25 bp, Homo sapien
aggagagcactcatcccctcaagag

SEQ ID NO: 1859247 - DNA, 25 bp, Homo sapien
gctggatgacgtcgcacatacccat

SEQ ID NO: 1859248 - DNA, 25 bp, Homo sapien
tccttggctaggactatggtggcca

SEQ ID NO: 1859249 - DNA, 25 bp, Homo sapien
tggtggccaagcaagtctatcaagc

SEQ ID NO: 1859250 - DNA, 25 bp, Homo sapien
caaccccagtgatgctctagtccag

SEQ ID NO: 1859251 - DNA, 25 bp, Homo sapien
tctgatgcgctattccaaggttctc

SEQ ID NO: 1859252 - DNA, 25 bp, Homo sapien
aaaacttcacatctacagcaactgc

SEQ ID NO: 1859253 - DNA, 25 bp, Homo sapien
ggaatgcagtcaatcgaaacactgc

SEQ ID NO: 1859254 - DNA, 25 bp, Homo sapien
taattgatatgtcaaacctccaagg

SEQ ID NO: 1859255 - DNA, 25 bp, Homo sapien
actgcccctctattactgtcgataa

SEQ ID NO: 1859256 - DNA, 25 bp, Homo sapien
aaagacagcaggtttactctggaag

SEQ ID NO: 1859257 - DNA, 25 bp, Homo sapien
tgctgcggcctatcaaaggcaagcc

SEQ ID NO: 1859258 - DNA, 25 bp, Homo sapien
tttataaccacaatttgacccagca

SEQ ID NO: 1859259 - DNA, 25 bp, Homo sapien
tagacatgaaaaccactgctgcggc

SEQ ID NO: 1859260 - DNA, 25 bp, Homo sapien
tgtgcctcaagtccccttagtgcga

SEQ ID NO: 1859261 - DNA, 25 bp, Homo sapien
cactgtgtgcctcaagtccccttag

SEQ ID NO: 1859262 - DNA, 25 bp, Homo sapien
gcctcaagtccccttagtgcgaagt

SEQ ID NO: 1859263 - DNA, 25 bp, Homo sapien
ctcaagtccccttagtgcgaagtca

SEQ ID NO: 1859264 - DNA, 25 bp, Homo sapien
ctttctagctacagttcacttttat

SEQ ID NO: 1859265 - DNA, 25 bp, Homo sapien
tgtagtatagcacaaagatcttccc

SEQ ID NO: 1859266 - DNA, 25 bp, Homo sapien
atgtagtatagcacaaagatcttcc

SEQ ID NO: 1859267 - DNA, 25 bp, Homo sapien
tctagctacagttcacttttattta

SEQ ID NO: 1859268 - DNA, 25 bp, Homo sapien
aattcaaattttaggcaggatggtc

SEQ ID NO: 1859269 - DNA, 25 bp, Homo sapien
gattagtaacacataagaggccagg

SEQ ID NO: 1859270 - DNA, 25 bp, Homo sapien
aatgagtctctctggatcacggatt

SEQ ID NO: 1859271 - DNA, 25 bp, Homo sapien
ggcttcctcctatagcccaggctaa

SEQ ID NO: 1859272 - DNA, 25 bp, Homo sapien
tgaacctgaattcggctgccacaat

SEQ ID NO: 1859273 - DNA, 25 bp, Homo sapien
tctggaaagagcacacaccccttat

SEQ ID NO: 1859274 - DNA, 25 bp, Homo sapien
tatcagagcagttctttgcggcaca

SEQ ID NO: 1859275 - DNA, 25 bp, Homo sapien
tagagtttaacaggaagcaatagcc

SEQ ID NO: 1859276 - DNA, 25 bp, Homo sapien
tttcaaatcagttttaaaacatctg

SEQ ID NO: 1859277 - DNA, 25 bp, Homo sapien
ctgaagggcaaatttgattttcaaa

SEQ ID NO: 1859278 - DNA, 25 bp, Homo sapien
aaatcagttttaaaacatctgcctt

SEQ ID NO: 1859279 - DNA, 25 bp, Homo sapien
tcaaatcagttttaaaacatctgcc

SEQ ID NO: 1859280 - DNA, 25 bp, Homo sapien
gattccagtcacgaggtatgtacct

SEQ ID NO: 1859281 - DNA, 25 bp, Homo sapien
aatataaactcatctgaccttgtgc

SEQ ID NO: 1859282 - DNA, 25 bp, Homo sapien
ttttatattacaggcaagggctaat

SEQ ID NO: 1859283 - DNA, 25 bp, Homo sapien
tattttaactgataccactgtgtcc

SEQ ID NO: 1859284 - DNA, 25 bp, Homo sapien
gcttgggcccaggtatgtgacagtt

SEQ ID NO: 1859285 - DNA, 25 bp, Homo sapien
gaatatctgagggtgcaggctttgc

SEQ ID NO: 1859286 - DNA, 25 bp, Homo sapien
tgctctaaaggtggagctatcaccc

SEQ ID NO: 1859287 - DNA, 25 bp, Homo sapien
tatgtgacagttaaggacagtttca

SEQ ID NO: 1859288 - DNA, 25 bp, Homo sapien
catgtgactgacaatgtgcagcagg

SEQ ID NO: 1859289 - DNA, 25 bp, Homo sapien
tcatgtgactgacaatgtgcagcag

SEQ ID NO: 1859290 - DNA, 25 bp, Homo sapien
atgtgactgacaatgtgcagcaggt

SEQ ID NO: 1859291 - DNA, 25 bp, Homo sapien
gatcatgtgactgacaatgtgcagc

SEQ ID NO: 1859292 - DNA, 25 bp, Homo sapien
catggtaagggtgctgactgagcac

SEQ ID NO: 1859293 - DNA, 25 bp, Homo sapien
taatcaagacttggtcatggtaagg

SEQ ID NO: 1859294 - DNA, 25 bp, Homo sapien
caagacttggtcatggtaagggtgc

SEQ ID NO: 1859295 - DNA, 25 bp, Homo sapien
acttggtcatggtaagggtgctgac

SEQ ID NO: 1859296 - DNA, 25 bp, Homo sapien
caaatgctgtgtagaaaaacggaat

SEQ ID NO: 1859297 - DNA, 25 bp, Homo sapien
aaatgctgtgtagaaaaacggaatt

SEQ ID NO: 1859298 - DNA, 25 bp, Homo sapien
tgacaattacacaaccagaactcat

SEQ ID NO: 1859299 - DNA, 25 bp, Homo sapien
cagaactcattaattggttcacgct

SEQ ID NO: 1859300 - DNA, 25 bp, Homo sapien
gagctgtggacccaataagcaaaga

SEQ ID NO: 1859301 - DNA, 25 bp, Homo sapien
ttcatcatctagctcggtacagtcc

SEQ ID NO: 1859302 - DNA, 25 bp, Homo sapien
tgcatagttgttcatgggccgtgga

SEQ ID NO: 1859303 - DNA, 25 bp, Homo sapien
cgtggaggccctcgtattgtataaa

SEQ ID NO: 1859304 - DNA, 25 bp, Homo sapien
tctggctctacacaaagaggtactg

SEQ ID NO: 1859305 - DNA, 25 bp, Homo sapien
gagattctggctctacacaaagagg

SEQ ID NO: 1859306 - DNA, 25 bp, Homo sapien
tctacacaaagaggtactgatctct

SEQ ID NO: 1859307 - DNA, 25 bp, Homo sapien
gaggtactgatctcttttcatgtac

SEQ ID NO: 1859308 - DNA, 25 bp, Homo sapien
accatggtccactgttgctggttgg

SEQ ID NO: 1859309 - DNA, 25 bp, Homo sapien
caacgtagtagctatagcttcgatc

SEQ ID NO: 1859310 - DNA, 25 bp, Homo sapien
tttagttctgtcagcaaccatggtc

SEQ ID NO: 1859311 - DNA, 25 bp, Homo sapien
tgctggttggtagaaacctcaacgt

SEQ ID NO: 1859312 - DNA, 25 bp, Homo sapien
tatgcagcttttacggatcttcccc

SEQ ID NO: 1859313 - DNA, 25 bp, Homo sapien
gacacactaggcaggtatgcagctt

SEQ ID NO: 1859314 - DNA, 25 bp, Homo sapien
aggtatgcagcttttacggatcttc

SEQ ID NO: 1859315 - DNA, 25 bp, Homo sapien
gcatcaccaattcccctctccagca

SEQ ID NO: 1859316 - DNA, 25 bp, Homo sapien
ctgaaaggagtccttgacgggcacc

SEQ ID NO: 1859317 - DNA, 25 bp, Homo sapien
gctagagctaagaccctgagtgtcc

SEQ ID NO: 1859318 - DNA, 25 bp, Homo sapien
tgacgggcaccaaccagcctgtcat

SEQ ID NO: 1859319 - DNA, 25 bp, Homo sapien
tcagctagagctaagaccctgagtg

SEQ ID NO: 1859320 - DNA, 25 bp, Homo sapien
gttcagacttcagcacctactggga

SEQ ID NO: 1859321 - DNA, 25 bp, Homo sapien
ggatttctggccctctatgcattca

SEQ ID NO: 1859322 - DNA, 25 bp, Homo sapien
tctaggatgaaactggctgaggcat

SEQ ID NO: 1859323 - DNA, 25 bp, Homo sapien
gactttagagtgatgcagataggct

SEQ ID NO: 1859324 - DNA, 25 bp, Homo sapien
gacccaatcatgtacggttgtgcca

SEQ ID NO: 1859325 - DNA, 25 bp, Homo sapien
ggttgtgccaactgaaccacaatcg

SEQ ID NO: 1859326 - DNA, 25 bp, Homo sapien
tggtgacatgtgtagccagaatccc

SEQ ID NO: 1859327 - DNA, 25 bp, Homo sapien
ccagtcataattcttagtgtcccca

SEQ ID NO: 1859328 - DNA, 25 bp, Homo sapien
gtgaatccaaaaacaagatttggca

SEQ ID NO: 1859329 - DNA, 25 bp, Homo sapien
tgaatccaaaaacaagatttggcat

SEQ ID NO: 1859330 - DNA, 25 bp, Homo sapien
tggaatttctgtcccaatttgtgtc

SEQ ID NO: 1859331 - DNA, 25 bp, Homo sapien
ggactgagctttctgctctatttct

SEQ ID NO: 1859332 - DNA, 25 bp, Homo sapien
tatttctagtcttccagtttcctcc

SEQ ID NO: 1859333 - DNA, 25 bp, Homo sapien
gtgtcactttgtttacaaaaccatg

SEQ ID NO: 1859334 - DNA, 25 bp, Homo sapien
ctgaacacacttccagagaattcag

SEQ ID NO: 1859335 - DNA, 25 bp, Homo sapien
tctgaacacacttccagagaattca

SEQ ID NO: 1859336 - DNA, 25 bp, Homo sapien
gaacacacttccagagaattcagtc

SEQ ID NO: 1859337 - DNA, 25 bp, Homo sapien
gcttctgaacacacttccagagaat

SEQ ID NO: 1859338 - DNA, 25 bp, Homo sapien
catacaagttcaccaggatcagtga

SEQ ID NO: 1859339 - DNA, 25 bp, Homo sapien
ggcctttgaatgaaagcactttcca

SEQ ID NO: 1859340 - DNA, 25 bp, Homo sapien
ggtgatgtggcaacagtagatctca

SEQ ID NO: 1859341 - DNA, 25 bp, Homo sapien
cattttagccagtgataagaagagg

SEQ ID NO: 1859342 - DNA, 25 bp, Homo sapien
caaatctcttgtgccttaaccctca

SEQ ID NO: 1859343 - DNA, 25 bp, Homo sapien
gaaaatgtccccatcagatctgtgg

SEQ ID NO: 1859344 - DNA, 25 bp, Homo sapien
gatctgtggcaagtatgctcctaca

SEQ ID NO: 1859345 - DNA, 25 bp, Homo sapien
taaaagtagtactaacagtgaggtg

SEQ ID NO: 1859346 - DNA, 25 bp, Homo sapien
cctttagaataaaccatgtgttgag

SEQ ID NO: 1859347 - DNA, 25 bp, Homo sapien
aagatatggtctgtcctttagaata

SEQ ID NO: 1859348 - DNA, 25 bp, Homo sapien
tctgtcctttagaataaaccatgtg

SEQ ID NO: 1859349 - DNA, 25 bp, Homo sapien
ataaaccatgtgttgagcagaagaa

SEQ ID NO: 1859350 - DNA, 25 bp, Homo sapien
tcacttttacattcggctttattac

SEQ ID NO: 1859351 - DNA, 25 bp, Homo sapien
tcggctttattaccactttagttga

SEQ ID NO: 1859352 - DNA, 25 bp, Homo sapien
ttaccactttagttgatttcatcac

SEQ ID NO: 1859353 - DNA, 25 bp, Homo sapien
agtccctcacttttacattcggctt

SEQ ID NO: 1859354 - DNA, 25 bp, Homo sapien
gtgagtcccaacaattcgaatatac

SEQ ID NO: 1859355 - DNA, 25 bp, Homo sapien
caatgtgaaaaatcttgttcactgt

SEQ ID NO: 1859356 - DNA, 25 bp, Homo sapien
ccttctcaagagtgaaggttttgtt

SEQ ID NO: 1859357 - DNA, 25 bp, Homo sapien
cagccccttctcaagagtgaaggtt

SEQ ID NO: 1859358 - DNA, 25 bp, Homo sapien
tccttgacataagctgatcactcac

SEQ ID NO: 1859359 - DNA, 25 bp, Homo sapien
tctgctccttgacataagctgatca

SEQ ID NO: 1859360 - DNA, 25 bp, Homo sapien
tcaagcttgactctcacggcattcc

SEQ ID NO: 1859361 - DNA, 25 bp, Homo sapien
tgtgcacctcatttagccatctgct

SEQ ID NO: 1859362 - DNA, 25 bp, Homo sapien
gctatgtcctgaactgactgtccag

SEQ ID NO: 1859363 - DNA, 25 bp, Homo sapien
cagagcccactggttaagcaggaat

SEQ ID NO: 1859364 - DNA, 25 bp, Homo sapien
gacaccactcttcccgtgttgagaa

SEQ ID NO: 1859365 - DNA, 25 bp, Homo sapien
tcacacctactgcaaggagacacca

SEQ ID NO: 1859366 - DNA, 25 bp, Homo sapien
gcagtgacaatctccctggtgcttt

SEQ ID NO: 1859367 - DNA, 25 bp, Homo sapien
tggcagtgacaatctccctggtgct

SEQ ID NO: 1859368 - DNA, 25 bp, Homo sapien
ctttggcagtgacaatctccctggt

SEQ ID NO: 1859369 - DNA, 25 bp, Homo sapien
tttggcagtgacaatctccctggtg

SEQ ID NO: 1859370 - DNA, 25 bp, Homo sapien
ctgcattccaactttaaacccgtgg

SEQ ID NO: 1859371 - DNA, 25 bp, Homo sapien
gtacacctttaacatactaaagaca

SEQ ID NO: 1859372 - DNA, 25 bp, Homo sapien
aacccgtggtattccgcagtcttca

SEQ ID NO: 1859373 - DNA, 25 bp, Homo sapien
acacctttaacatactaaagacaat

SEQ ID NO: 1859374 - DNA, 25 bp, Homo sapien
gtgctcttataatcaagccactgac

SEQ ID NO: 1859375 - DNA, 25 bp, Homo sapien
caagaagcacgtaatgcctgtggtt

SEQ ID NO: 1859376 - DNA, 25 bp, Homo sapien
tctgtgtataatgttagtgctctta

SEQ ID NO: 1859377 - DNA, 25 bp, Homo sapien
tataatcaagccactgactggaggg

SEQ ID NO: 1859378 - DNA, 25 bp, Homo sapien
tgagactgtctggtactaggacaac

SEQ ID NO: 1859379 - DNA, 25 bp, Homo sapien
gctatcacttgggtacaaccactga

SEQ ID NO: 1859380 - DNA, 25 bp, Homo sapien
gcctttccaggctgctatcacttgg

SEQ ID NO: 1859381 - DNA, 25 bp, Homo sapien
caacaatacaggagacgataaccat

SEQ ID NO: 1859382 - DNA, 25 bp, Homo sapien
ctgtatcctgattgtaaattccagt

SEQ ID NO: 1859383 - DNA, 25 bp, Homo sapien
tctctgcaacagaaccatgtttatc

SEQ ID NO: 1859384 - DNA, 25 bp, Homo sapien
attttgtctctgcaacagaaccatg

SEQ ID NO: 1859385 - DNA, 25 bp, Homo sapien
tttgtctctgcaacagaaccatgtt

SEQ ID NO: 1859386 - DNA, 25 bp, Homo sapien
tgtctctgcaacagaaccatgttta

SEQ ID NO: 1859387 - DNA, 25 bp, Homo sapien
atcctaataaaacaactgtctctct

SEQ ID NO: 1859388 - DNA, 25 bp, Homo sapien
aacaactgtctctctgacacttcag

SEQ ID NO: 1859389 - DNA, 25 bp, Homo sapien
aaaacaactgtctctctgacacttc

SEQ ID NO: 1859390 - DNA, 25 bp, Homo sapien
ataaaacaactgtctctctgacact

SEQ ID NO: 1859391 - DNA, 25 bp, Homo sapien
gaaatcagcacgaaatcaatacctt

SEQ ID NO: 1859392 - DNA, 25 bp, Homo sapien
caataccttttatgtggccctgaaa

SEQ ID NO: 1859393 - DNA, 25 bp, Homo sapien
tttttcctctgactatagtggcaag

SEQ ID NO: 1859394 - DNA, 25 bp, Homo sapien
gacaccttcagagacaactaaccct

SEQ ID NO: 1859395 - DNA, 25 bp, Homo sapien
gacattttagtgatctttggaacac

SEQ ID NO: 1859396 - DNA, 25 bp, Homo sapien
aggcagtcactaggcgtagctgaga

SEQ ID NO: 1859397 - DNA, 25 bp, Homo sapien
agctgagatgtgatagccatcactc

SEQ ID NO: 1859398 - DNA, 25 bp, Homo sapien
gaacacaatgtccaaaaacagaagg

SEQ ID NO: 1859399 - DNA, 25 bp, Homo sapien
gatgtgccaggactagataagtgcc

SEQ ID NO: 1859400 - DNA, 25 bp, Homo sapien
aaccagcgttgaagaagtcaggagg

SEQ ID NO: 1859401 - DNA, 25 bp, Homo sapien
caagaaatgctattgagttgtccac

SEQ ID NO: 1859402 - DNA, 25 bp, Homo sapien
tctaagtcccttgataaaaccagcg

SEQ ID NO: 1859403 - DNA, 25 bp, Homo sapien
ccacagtatgaagggttaccagata

SEQ ID NO: 1859404 - DNA, 25 bp, Homo sapien
tcttgctcagaggaatttaactatc

SEQ ID NO: 1859405 - DNA, 25 bp, Homo sapien
tgtgagttagaaagtctgcaccctg

SEQ ID NO: 1859406 - DNA, 25 bp, Homo sapien
ccagctatggtttggttgcgaagga

SEQ ID NO: 1859407 - DNA, 25 bp, Homo sapien
aaataaaactaagtctgctgtctta

SEQ ID NO: 1859408 - DNA, 25 bp, Homo sapien
aaaataaaactaagtctgctgtctt

SEQ ID NO: 1859409 - DNA, 25 bp, Homo sapien
gaaaataaaactaagtctgctgtct

SEQ ID NO: 1859410 - DNA, 25 bp, Homo sapien
aacacagacaagtggactaagggcc

SEQ ID NO: 1859411 - DNA, 25 bp, Homo sapien
tgtgatctcaataccacctaaggag

SEQ ID NO: 1859412 - DNA, 25 bp, Homo sapien
gacctgctcgctacaaataatgctg

SEQ ID NO: 1859413 - DNA, 25 bp, Homo sapien
tctgggtactcaagaactctgtgtg

SEQ ID NO: 1859414 - DNA, 25 bp, Homo sapien
tagtatgatcttggtgttctgcaac

SEQ ID NO: 1859415 - DNA, 25 bp, Homo sapien
tgtagtaagaaaggatgcttgcagg

SEQ ID NO: 1859416 - DNA, 25 bp, Homo sapien
gcttgcaggtagaacaaggaagcac

SEQ ID NO: 1859417 - DNA, 25 bp, Homo sapien
caggtgtatgcacaacatccagcca

SEQ ID NO: 1859418 - DNA, 25 bp, Homo sapien
gattgtcatcatatgccactcaaac

SEQ ID NO: 1859419 - DNA, 25 bp, Homo sapien
tagggctatcactgattgtcatcat

SEQ ID NO: 1859420 - DNA, 25 bp, Homo sapien
ggttatagggctatcactgattgtc

SEQ ID NO: 1859421 - DNA, 25 bp, Homo sapien
aaatacgaggttatagggctatcac

SEQ ID NO: 1859422 - DNA, 25 bp, Homo sapien
aaatgaagtaaagcgaaaaggcagg

SEQ ID NO: 1859423 - DNA, 25 bp, Homo sapien
tgatcactctaaaccaattggttcc

SEQ ID NO: 1859424 - DNA, 25 bp, Homo sapien
tggctcccgaacaggcagctgggtt

SEQ ID NO: 1859425 - DNA, 25 bp, Homo sapien
cctaataggtcagcattgatcactc

SEQ ID NO: 1859426 - DNA, 25 bp, Homo sapien
caaaatggcacccaatggttgtgtt

SEQ ID NO: 1859427 - DNA, 25 bp, Homo sapien
gaaagaacaatatgtagcaatatcc

SEQ ID NO: 1859428 - DNA, 25 bp, Homo sapien
caatatccagagacaagtcagggca

SEQ ID NO: 1859429 - DNA, 25 bp, Homo sapien
gatgcatcatacagtggtagccagc

SEQ ID NO: 1859430 - DNA, 25 bp, Homo sapien
gacagcactgttccagaggacctag

SEQ ID NO: 1859431 - DNA, 25 bp, Homo sapien
gaggacctagaataagacagtacac

SEQ ID NO: 1859432 - DNA, 25 bp, Homo sapien
ggacaaaccattgccagatagaaat

SEQ ID NO: 1859433 - DNA, 25 bp, Homo sapien
gacagtacacaagttaagcaagaaa

SEQ ID NO: 1859434 - DNA, 25 bp, Homo sapien
tatagacctagctacctacaaaggc

SEQ ID NO: 1859435 - DNA, 25 bp, Homo sapien
taagaattactaagctccagaccca

SEQ ID NO: 1859436 - DNA, 25 bp, Homo sapien
tgctatttaagagttgtgcccggct

SEQ ID NO: 1859437 - DNA, 25 bp, Homo sapien
tatgctgtcccataaacaagggtgc

SEQ ID NO: 1859438 - DNA, 25 bp, Homo sapien
acaccctaacagagtctatgaagtc

SEQ ID NO: 1859439 - DNA, 25 bp, Homo sapien
tcaaacaccctaacagagtctatga

SEQ ID NO: 1859440 - DNA, 25 bp, Homo sapien
ttcttcaaatggctcctcactgact

SEQ ID NO: 1859441 - DNA, 25 bp, Homo sapien
gacttcgggatcaagttcaaacacc

SEQ ID NO: 1859442 - DNA, 25 bp, Homo sapien
ttattcacatctttcagtttccgca

SEQ ID NO: 1859443 - DNA, 25 bp, Homo sapien
cttattcacatctttcagtttccgc

SEQ ID NO: 1859444 - DNA, 25 bp, Homo sapien
gaatataacctgactctgaccacag

SEQ ID NO: 1859445 - DNA, 25 bp, Homo sapien
tccagttgtgttttaagtgcttcag

SEQ ID NO: 1859446 - DNA, 25 bp, Homo sapien
taagatagccttcaaaaaccctaga

SEQ ID NO: 1859447 - DNA, 25 bp, Homo sapien
taatctctatctactctgtcagcaa

SEQ ID NO: 1859448 - DNA, 25 bp, Homo sapien
tccagcgctgtgagccaaatatagt

SEQ ID NO: 1859449 - DNA, 25 bp, Homo sapien
cctctcacgggactggattagctac

SEQ ID NO: 1859450 - DNA, 25 bp, Homo sapien
gatgtggtaaaaaagcccttgccag

SEQ ID NO: 1859451 - DNA, 25 bp, Homo sapien
taaccctgcgacatggcctacaggg

SEQ ID NO: 1859452 - DNA, 25 bp, Homo sapien
cataaaaagaagggagcggacaggt

SEQ ID NO: 1859453 - DNA, 25 bp, Homo sapien
aagtcacagagtgagtttctctcag

SEQ ID NO: 1859454 - DNA, 25 bp, Homo sapien
cggacaggtttgaatgccttgcttg

SEQ ID NO: 1859455 - DNA, 25 bp, Homo sapien
tccctggctttaccctcagtaagaa

SEQ ID NO: 1859456 - DNA, 25 bp, Homo sapien
ggaagaaatataggacgatgcaaat

SEQ ID NO: 1859457 - DNA, 25 bp, Homo sapien
tttatcaactgcaggatttgccagc

SEQ ID NO: 1859458 - DNA, 25 bp, Homo sapien
atgcaaataccttatctggattcat

SEQ ID NO: 1859459 - DNA, 25 bp, Homo sapien
tgccagctcacaacagttttcagag

SEQ ID NO: 1859460 - DNA, 25 bp, Homo sapien
gaagtggatgttatcaacagtccaa

SEQ ID NO: 1859461 - DNA, 25 bp, Homo sapien
tactgggtgccagatactattctaa

SEQ ID NO: 1859462 - DNA, 25 bp, Homo sapien
gctggacaacgcgagccaatcatgg

SEQ ID NO: 1859463 - DNA, 25 bp, Homo sapien
gagctgagagataacccagtctggt

SEQ ID NO: 1859464 - DNA, 25 bp, Homo sapien
tggtgagacagtttttgttaggctc

SEQ ID NO: 1859465 - DNA, 25 bp, Homo sapien
atgttggtgagacagtttttgttag

SEQ ID NO: 1859466 - DNA, 25 bp, Homo sapien
tgtctgtgaattcctataataacag

SEQ ID NO: 1859467 - DNA, 25 bp, Homo sapien
tgtaggggcaacattttgtctgtga

SEQ ID NO: 1859468 - DNA, 25 bp, Homo sapien
aaaacagaagtactaagtacatgga

SEQ ID NO: 1859469 - DNA, 25 bp, Homo sapien
gagaggaagaatacacccaaagaag

SEQ ID NO: 1859470 - DNA, 25 bp, Homo sapien
agaagttaatatgatgaccccagaa

SEQ ID NO: 1859471 - DNA, 25 bp, Homo sapien
agaatacacccaaagaagttaatat

SEQ ID NO: 1859472 - DNA, 25 bp, Homo sapien
tggtctgcccgccttggcctcccaa

SEQ ID NO: 1859473 - DNA, 25 bp, Homo sapien
catacccagctaaatttgtattttt

SEQ ID NO: 1859474 - DNA, 25 bp, Homo sapien
agtagataggggtttttccatgttg

SEQ ID NO: 1859475 - DNA, 25 bp, Homo sapien
ggtctgcccgccttggcctcccaaa

SEQ ID NO: 1859476 - DNA, 25 bp, Homo sapien
tttccccttattctggcatatcaac

SEQ ID NO: 1859477 - DNA, 25 bp, Homo sapien
agggcatacagtgctaccacttcct

SEQ ID NO: 1859478 - DNA, 25 bp, Homo sapien
ttatagggattagcaagcaggcagc

SEQ ID NO: 1859479 - DNA, 25 bp, Homo sapien
ggcatatcaactcgtatttcccaat

SEQ ID NO: 1859480 - DNA, 25 bp, Homo sapien
tttttgtgtgaacgtacgatttcac

SEQ ID NO: 1859481 - DNA, 25 bp, Homo sapien
cctccggggatcaatcaagtcattc

SEQ ID NO: 1859482 - DNA, 25 bp, Homo sapien
gaaatggtggtatcatatggaggtt

SEQ ID NO: 1859483 - DNA, 25 bp, Homo sapien
cgatttcacttgtctaaggagtgaa

SEQ ID NO: 1859484 - DNA, 25 bp, Homo sapien
caaatccgttttgactaatttggct

SEQ ID NO: 1859485 - DNA, 25 bp, Homo sapien
cactgaatctatggataaatatggg

SEQ ID NO: 1859486 - DNA, 25 bp, Homo sapien
cagttgtccataattgtgcgggtct

SEQ ID NO: 1859487 - DNA, 25 bp, Homo sapien
tgcgggtctacctctaggttctcta

SEQ ID NO: 1859488 - DNA, 25 bp, Homo sapien
gaacttccagtacaacgctaaatgg

SEQ ID NO: 1859489 - DNA, 25 bp, Homo sapien
tgaaagtggatatccccaacatagt

SEQ ID NO: 1859490 - DNA, 25 bp, Homo sapien
tgtacagtgatttgtatcctgccac

SEQ ID NO: 1859491 - DNA, 25 bp, Homo sapien
caacatagtcctgacgttaggagga

SEQ ID NO: 1859492 - DNA, 25 bp, Homo sapien
atgcccagctaagatgggggtctca

SEQ ID NO: 1859493 - DNA, 25 bp, Homo sapien
ggctagtttcaagttcctggtttca

SEQ ID NO: 1859494 - DNA, 25 bp, Homo sapien
gttgtccaggctagtttcaagttcc

SEQ ID NO: 1859495 - DNA, 25 bp, Homo sapien
ccaggctagtttcaagttcctggtt

SEQ ID NO: 1859496 - DNA, 25 bp, Homo sapien
tagttgaactcaggtcacagaaagt

SEQ ID NO: 1859497 - DNA, 25 bp, Homo sapien
tcccctacagctaagagaggatgtc

SEQ ID NO: 1859498 - DNA, 25 bp, Homo sapien
taaacttcagtcaataaatcaggga

SEQ ID NO: 1859499 - DNA, 25 bp, Homo sapien
tcaactgagaaggtgatctacgcca

SEQ ID NO: 1859500 - DNA, 25 bp, Homo sapien
tcatgtttgactccactcctacttc

SEQ ID NO: 1859501 - DNA, 25 bp, Homo sapien
catcatgtttgactccactcctact

SEQ ID NO: 1859502 - DNA, 25 bp, Homo sapien
catgtttgactccactcctacttct

SEQ ID NO: 1859503 - DNA, 25 bp, Homo sapien
gtttgactccactcctacttcttca

SEQ ID NO: 1859504 - DNA, 25 bp, Homo sapien
caacccttgttgcatggcatattca

SEQ ID NO: 1859505 - DNA, 25 bp, Homo sapien
gcacatgtttaaagtggctctacct

SEQ ID NO: 1859506 - DNA, 25 bp, Homo sapien
gcagccaaactgaagcacttgtcat

SEQ ID NO: 1859507 - DNA, 25 bp, Homo sapien
aagttcagtgcctcgttatcatagc

SEQ ID NO: 1859508 - DNA, 25 bp, Homo sapien
gatgggaagacaaccatgatcctgg

SEQ ID NO: 1859509 - DNA, 25 bp, Homo sapien
taaccaagtggagaacctagccatg

SEQ ID NO: 1859510 - DNA, 25 bp, Homo sapien
cagtacaggcctgtgtatgcactgg

SEQ ID NO: 1859511 - DNA, 25 bp, Homo sapien
tatgcactggccaaacttagatggg

SEQ ID NO: 1859512 - DNA, 25 bp, Homo sapien
tcttttctatagactgctaagagaa

SEQ ID NO: 1859513 - DNA, 25 bp, Homo sapien
tatgcccagatgagcactaaaatct

SEQ ID NO: 1859514 - DNA, 25 bp, Homo sapien
aataaacgctcttttctatagactg

SEQ ID NO: 1859515 - DNA, 25 bp, Homo sapien
cactatgcccagatgagcactaaaa

SEQ ID NO: 1859516 - DNA, 25 bp, Homo sapien
tggtgcaagtcctgtcaaatgggca

SEQ ID NO: 1859517 - DNA, 25 bp, Homo sapien
caaatgggcattggtgggttacaca

SEQ ID NO: 1859518 - DNA, 25 bp, Homo sapien
ttcctggagttaaggcagaagaccc

SEQ ID NO: 1859519 - DNA, 25 bp, Homo sapien
gctgtaactgggaccctgagactac

SEQ ID NO: 1859520 - DNA, 25 bp, Homo sapien
cacaagcactgtcaacatgaaggta

SEQ ID NO: 1859521 - DNA, 25 bp, Homo sapien
gagcttgaggccatgatataccaca

SEQ ID NO: 1859522 - DNA, 25 bp, Homo sapien
tccttgagctagagatccagcccct

SEQ ID NO: 1859523 - DNA, 25 bp, Homo sapien
tcccataatgaggtacacggcccct

SEQ ID NO: 1859524 - DNA, 25 bp, Homo sapien
tcagaatccacaaccccagagagac

SEQ ID NO: 1859525 - DNA, 25 bp, Homo sapien
ctagtcagaatccacaaccccagag

SEQ ID NO: 1859526 - DNA, 25 bp, Homo sapien
agtcagaatccacaaccccagagag

SEQ ID NO: 1859527 - DNA, 25 bp, Homo sapien
gtcagaatccacaaccccagagaga

SEQ ID NO: 1859528 - DNA, 25 bp, Homo sapien
aaatctcctcattgttgcccatggc

SEQ ID NO: 1859529 - DNA, 25 bp, Homo sapien
ttaatgtaacaggattctaatctcc

SEQ ID NO: 1859530 - DNA, 25 bp, Homo sapien
ccaacctctgaagcagggtatttat

SEQ ID NO: 1859531 - DNA, 25 bp, Homo sapien
gaacactattattactaatccagct

SEQ ID NO: 1859532 - DNA, 25 bp, Homo sapien
tagcaatctgcaatatcctggtgtc

SEQ ID NO: 1859533 - DNA, 25 bp, Homo sapien
ccatcccttggtgtataagagagca

SEQ ID NO: 1859534 - DNA, 25 bp, Homo sapien
tcctggtgtcaatgagaagctggtt

SEQ ID NO: 1859535 - DNA, 25 bp, Homo sapien
taagatttgcaaggctactctctcc

SEQ ID NO: 1859536 - DNA, 25 bp, Homo sapien
tcccccatcgccctactctcagcag

SEQ ID NO: 1859537 - DNA, 25 bp, Homo sapien
tccattcctctcatgtctcctaccc

SEQ ID NO: 1859538 - DNA, 25 bp, Homo sapien
cctccattcctctcatgtctcctac

SEQ ID NO: 1859539 - DNA, 25 bp, Homo sapien
tcctctcatgtctcctacccaatcc

SEQ ID NO: 1859540 - DNA, 25 bp, Homo sapien
gcttcagacaatttgctcaaatatc

SEQ ID NO: 1859541 - DNA, 25 bp, Homo sapien
ttccatgcttcagacaatttgctca

SEQ ID NO: 1859542 - DNA, 25 bp, Homo sapien
aatctttagcccagatcctgcttcc

SEQ ID NO: 1859543 - DNA, 25 bp, Homo sapien
ccaaatctttagcccagatcctgct

SEQ ID NO: 1859544 - DNA, 25 bp, Homo sapien
cactaccagcttccacaataaggag

SEQ ID NO: 1859545 - DNA, 25 bp, Homo sapien
ccagcttccacaataaggaggactg

SEQ ID NO: 1859546 - DNA, 25 bp, Homo sapien
tatgccctgcaaaatcactaccagc

SEQ ID NO: 1859547 - DNA, 25 bp, Homo sapien
aagtaatatgccctgcaaaatcact

SEQ ID NO: 1859548 - DNA, 25 bp, Homo sapien
agaaaaagaagtgctccaccttggt

SEQ ID NO: 1859549 - DNA, 25 bp, Homo sapien
aaagaaaaagaagtgctccaccttg

SEQ ID NO: 1859550 - DNA, 25 bp, Homo sapien
aagaaaaagaagtgctccaccttgg

SEQ ID NO: 1859551 - DNA, 25 bp, Homo sapien
tatctcaccttaatcagccctacaa

SEQ ID NO: 1859552 - DNA, 25 bp, Homo sapien
gtgatcaccttcactggactagaaa

SEQ ID NO: 1859553 - DNA, 25 bp, Homo sapien
tattctagctcataagtagagcctc

SEQ ID NO: 1859554 - DNA, 25 bp, Homo sapien
gttacataacagactaaatcacagt

SEQ ID NO: 1859555 - DNA, 25 bp, Homo sapien
caagagcattcagtaggtgacatgc

SEQ ID NO: 1859556 - DNA, 25 bp, Homo sapien
catgctaggaaggtccaaatgctct

SEQ ID NO: 1859557 - DNA, 25 bp, Homo sapien
tatgaggaatgcaaagaccagacca

SEQ ID NO: 1859558 - DNA, 25 bp, Homo sapien
caggcttattagatgcacccaatta

SEQ ID NO: 1859559 - DNA, 25 bp, Homo sapien
tttactgtactaccccagtctagcc

SEQ ID NO: 1859560 - DNA, 25 bp, Homo sapien
gaattttccatgatgacacctcttg

SEQ ID NO: 1859561 - DNA, 25 bp, Homo sapien
ctccatttttactgtactaccccag

SEQ ID NO: 1859562 - DNA, 25 bp, Homo sapien
ttccatgatgacacctcttgcagac

SEQ ID NO: 1859563 - DNA, 25 bp, Homo sapien
taacttgcaaaccactactagttgg

SEQ ID NO: 1859564 - DNA, 25 bp, Homo sapien
cctatgttccttgggtacaagccaa

SEQ ID NO: 1859565 - DNA, 25 bp, Homo sapien
ccaaaggtagaaacacggatgatca

SEQ ID NO: 1859566 - DNA, 25 bp, Homo sapien
tatggaatcaggctcacagatgtgc

SEQ ID NO: 1859567 - DNA, 25 bp, Homo sapien
caaaatcgtgcattcctagatggca

SEQ ID NO: 1859568 - DNA, 25 bp, Homo sapien
cacttatctgtgaaggcggcatgaa

SEQ ID NO: 1859569 - DNA, 25 bp, Homo sapien
gtttaggccaagagcacaatctact

SEQ ID NO: 1859570 - DNA, 25 bp, Homo sapien
taggtaaagaagtgaggtccataca

SEQ ID NO: 1859571 - DNA, 25 bp, Homo sapien
taactctccttgcctgtgtttgttg

SEQ ID NO: 1859572 - DNA, 25 bp, Homo sapien
tgttgctgctgttcgttaccagcaa

SEQ ID NO: 1859573 - DNA, 25 bp, Homo sapien
ttgctgctgttcgttaccagcaaaa

SEQ ID NO: 1859574 - DNA, 25 bp, Homo sapien
ttgttgctgctgttcgttaccagca

SEQ ID NO: 1859575 - DNA, 25 bp, Homo sapien
tacttgatctgccactgatgacctg

SEQ ID NO: 1859576 - DNA, 25 bp, Homo sapien
gatctaattggctcctatggtttca

SEQ ID NO: 1859577 - DNA, 25 bp, Homo sapien
gagcacttcagactcagtcctaggt

SEQ ID NO: 1859578 - DNA, 25 bp, Homo sapien
tgctcctgccaaggtgaaccatgca

SEQ ID NO: 1859579 - DNA, 25 bp, Homo sapien
tggccttgcctatctaactcttaat

SEQ ID NO: 1859580 - DNA, 25 bp, Homo sapien
gttaattctagtcccagtacagttc

SEQ ID NO: 1859581 - DNA, 25 bp, Homo sapien
tcaaagatctcttccctgaaggacc

SEQ ID NO: 1859582 - DNA, 25 bp, Homo sapien
gggatgtgtgttcaaaactccccac

SEQ ID NO: 1859583 - DNA, 25 bp, Homo sapien
ttacttaaagcaggtatattctcca

SEQ ID NO: 1859584 - DNA, 25 bp, Homo sapien
aatgtattagaggaactgctaaatc

SEQ ID NO: 1859585 - DNA, 25 bp, Homo sapien
tgattacacatagaaggctaaaaga

SEQ ID NO: 1859586 - DNA, 25 bp, Homo sapien
taacatgtttgtgtatgattacaca

SEQ ID NO: 1859587 - DNA, 25 bp, Homo sapien
atgcagccatgaatcacactgaaaa

SEQ ID NO: 1859588 - DNA, 25 bp, Homo sapien
gatgcagccatgaatcacactgaaa

SEQ ID NO: 1859589 - DNA, 25 bp, Homo sapien
tgcagccatgaatcacactgaaaat

SEQ ID NO: 1859590 - DNA, 25 bp, Homo sapien
ggttagtgctgattctcaagtagaa

SEQ ID NO: 1859591 - DNA, 25 bp, Homo sapien
tttgtgtgtaagagctgaatatgca

SEQ ID NO: 1859592 - DNA, 25 bp, Homo sapien
tattcgttgacagctggttagtgct

SEQ ID NO: 1859593 - DNA, 25 bp, Homo sapien
tatacaaagaatgtgccccaaagtt

SEQ ID NO: 1859594 - DNA, 25 bp, Homo sapien
caacagtccactccaatccacaatc

SEQ ID NO: 1859595 - DNA, 25 bp, Homo sapien
ccaacagtccactccaatccacaat

SEQ ID NO: 1859596 - DNA, 25 bp, Homo sapien
atgccaacagtccactccaatccac

SEQ ID NO: 1859597 - DNA, 25 bp, Homo sapien
tcaatgccaacagtccactccaatc

SEQ ID NO: 1859598 - DNA, 25 bp, Homo sapien
gaagtccaagtgttcgtgctaccac

SEQ ID NO: 1859599 - DNA, 25 bp, Homo sapien
gtgctaccaccgttccttgcaggga

SEQ ID NO: 1859600 - DNA, 25 bp, Homo sapien
caataaagtgctttgggctgaagga

SEQ ID NO: 1859601 - DNA, 25 bp, Homo sapien
tccttgcagggattgagccctctat

SEQ ID NO: 1859602 - DNA, 25 bp, Homo sapien
tctggcagccgacaagcaatctggt

SEQ ID NO: 1859603 - DNA, 25 bp, Homo sapien
tacttctggtctactctcccttgag

SEQ ID NO: 1859604 - DNA, 25 bp, Homo sapien
ctgatgattttactaaccgtgggac

SEQ ID NO: 1859605 - DNA, 25 bp, Homo sapien
gagctaaccttgtatccacagacag

SEQ ID NO: 1859606 - DNA, 25 bp, Homo sapien
ctctgttccttgtgctggaggctct

SEQ ID NO: 1859607 - DNA, 25 bp, Homo sapien
ctgttccttgtgctggaggctcttg

SEQ ID NO: 1859608 - DNA, 25 bp, Homo sapien
gttccattcccagttccgcagctca

SEQ ID NO: 1859609 - DNA, 25 bp, Homo sapien
cagttccgcagctcacttttgtctc

SEQ ID NO: 1859610 - DNA, 25 bp, Homo sapien
acatgacacattcttcaggaataac

SEQ ID NO: 1859611 - DNA, 25 bp, Homo sapien
tcttcaggaataacctccaaattca

SEQ ID NO: 1859612 - DNA, 25 bp, Homo sapien
cttcaggaataacctccaaattcag

SEQ ID NO: 1859613 - DNA, 25 bp, Homo sapien
tcaatacatgacacattcttcagga

SEQ ID NO: 1859614 - DNA, 25 bp, Homo sapien
tctgtcaaaccccatttgttaacca

SEQ ID NO: 1859615 - DNA, 25 bp, Homo sapien
tccaagtccaaatctccttatataa

SEQ ID NO: 1859616 - DNA, 25 bp, Homo sapien
ccaagtccaaatctccttatataag

SEQ ID NO: 1859617 - DNA, 25 bp, Homo sapien
gcagacacgggctggaaaatataat

SEQ ID NO: 1859618 - DNA, 25 bp, Homo sapien
tattgtgaatgatctatcactctga

SEQ ID NO: 1859619 - DNA, 25 bp, Homo sapien
cgacacagatattgtgaatgatcta

SEQ ID NO: 1859620 - DNA, 25 bp, Homo sapien
aatttctgccaagaacgacacagat

SEQ ID NO: 1859621 - DNA, 25 bp, Homo sapien
tcaagttcatccattgacacttcaa

SEQ ID NO: 1859622 - DNA, 25 bp, Homo sapien
gacacttcaatgaagtatgagtaag

SEQ ID NO: 1859623 - DNA, 25 bp, Homo sapien
caagttcatccattgacacttcaat

SEQ ID NO: 1859624 - DNA, 25 bp, Homo sapien
gttcatccattgacacttcaatgaa

SEQ ID NO: 1859625 - DNA, 25 bp, Homo sapien
gccggaacggcagtcatcatcaatt

SEQ ID NO: 1859626 - DNA, 25 bp, Homo sapien
tagcttaatctcgatgccggaacgg

SEQ ID NO: 1859627 - DNA, 25 bp, Homo sapien
tgagtatcaccatctaataaggctg

SEQ ID NO: 1859628 - DNA, 25 bp, Homo sapien
tatctcggtcccacaagagtatccg

SEQ ID NO: 1859629 - DNA, 25 bp, Homo sapien
ggaaaacagtctactcaggttatgg

SEQ ID NO: 1859630 - DNA, 25 bp, Homo sapien
caggtttcagggcaacccagtgctc

SEQ ID NO: 1859631 - DNA, 25 bp, Homo sapien
caggttatggcagcaagtatgtcag

SEQ ID NO: 1859632 - DNA, 25 bp, Homo sapien
cggcatttggcttaacagatgatca

SEQ ID NO: 1859633 - DNA, 25 bp, Homo sapien
ggaagaaaaggtcttaacatgagca

SEQ ID NO: 1859634 - DNA, 25 bp, Homo sapien
gaaaaggtcttaacatgagcagcag

SEQ ID NO: 1859635 - DNA, 25 bp, Homo sapien
aaaaggtcttaacatgagcagcagc

SEQ ID NO: 1859636 - DNA, 25 bp, Homo sapien
aagaaaaggtcttaacatgagcagc

SEQ ID NO: 1859637 - DNA, 25 bp, Homo sapien
ttaggaaagtgtccatttctgacat

SEQ ID NO: 1859638 - DNA, 25 bp, Homo sapien
taggaaagtgtccatttctgacatt

SEQ ID NO: 1859639 - DNA, 25 bp, Homo sapien
agctttgcggttttaatggcatgag

SEQ ID NO: 1859640 - DNA, 25 bp, Homo sapien
catgagaggcataccaagcttcttg

SEQ ID NO: 1859641 - DNA, 25 bp, Homo sapien
ttctgtagtagctttgcggttttaa

SEQ ID NO: 1859642 - DNA, 25 bp, Homo sapien
aatggcatgagaggcataccaagct

SEQ ID NO: 1859643 - DNA, 25 bp, Homo sapien
catgagaggtaaacgcacagcctgc

SEQ ID NO: 1859644 - DNA, 25 bp, Homo sapien
aaatatctttttcgggagctgcaaa

SEQ ID NO: 1859645 - DNA, 25 bp, Homo sapien
tataattgaggtccatatcccggct

SEQ ID NO: 1859646 - DNA, 25 bp, Homo sapien
gatcgcactttaatggcatccagga

SEQ ID NO: 1859647 - DNA, 25 bp, Homo sapien
catgcagcacatacaagttaacttg

SEQ ID NO: 1859648 - DNA, 25 bp, Homo sapien
gaggtagaatcctctagctctggaa

SEQ ID NO: 1859649 - DNA, 25 bp, Homo sapien
tcacttgagaggacttcctgagcat

SEQ ID NO: 1859650 - DNA, 25 bp, Homo sapien
tgagccaggctcaaaaagtccagca

SEQ ID NO: 1859651 - DNA, 25 bp, Homo sapien
tgaagaaaccctcaaataggatttg

SEQ ID NO: 1859652 - DNA, 25 bp, Homo sapien
aaacacatgaagaaaccctcaaata

SEQ ID NO: 1859653 - DNA, 25 bp, Homo sapien
cacatgaagaaaccctcaaatagga

SEQ ID NO: 1859654 - DNA, 25 bp, Homo sapien
tgcacatcagggaagaaacacatga

SEQ ID NO: 1859655 - DNA, 25 bp, Homo sapien
cattaatccagagagcatccaacca

SEQ ID NO: 1859656 - DNA, 25 bp, Homo sapien
caaggagacaagcacagaggttcaa

SEQ ID NO: 1859657 - DNA, 25 bp, Homo sapien
tcactgggttatactctgcctaaaa

SEQ ID NO: 1859658 - DNA, 25 bp, Homo sapien
taaaagtggttttgatgaggctccc

SEQ ID NO: 1859659 - DNA, 25 bp, Homo sapien
ttgaattgagagactgcaagacttt

SEQ ID NO: 1859660 - DNA, 25 bp, Homo sapien
gcaagactttgtcattatacttggt

SEQ ID NO: 1859661 - DNA, 25 bp, Homo sapien
gactttgtcattatacttggttata

SEQ ID NO: 1859662 - DNA, 25 bp, Homo sapien
gaattgagagactgcaagactttgt

SEQ ID NO: 1859663 - DNA, 25 bp, Homo sapien
tccaccacgaatgtgacgtcgccat

SEQ ID NO: 1859664 - DNA, 25 bp, Homo sapien
atgtgacgtcgccatattcttcccc

SEQ ID NO: 1859665 - DNA, 25 bp, Homo sapien
caaggcaccaatatgttcagacaaa

SEQ ID NO: 1859666 - DNA, 25 bp, Homo sapien
cgaaaatattggcacctggctgcta

SEQ ID NO: 1859667 - DNA, 25 bp, Homo sapien
cagtaaaggggcgaagagggtggct

SEQ ID NO: 1859668 - DNA, 25 bp, Homo sapien
ctgcagtaaaggggcgaagagggtg

SEQ ID NO: 1859669 - DNA, 25 bp, Homo sapien
gcagtaaaggggcgaagagggtggc

SEQ ID NO: 1859670 - DNA, 25 bp, Homo sapien
agtaaaggggcgaagagggtggctg

SEQ ID NO: 1859671 - DNA, 25 bp, Homo sapien
ttgtggaatagacgatagtcgttgt

SEQ ID NO: 1859672 - DNA, 25 bp, Homo sapien
tgtggaatagacgatagtcgttgtt

SEQ ID NO: 1859673 - DNA, 25 bp, Homo sapien
cagaaagctactggtacctgacttc

SEQ ID NO: 1859674 - DNA, 25 bp, Homo sapien
gattctaaacaaaacgctcttcctg

SEQ ID NO: 1859675 - DNA, 25 bp, Homo sapien
ggttacccagttgatgttcctatga

SEQ ID NO: 1859676 - DNA, 25 bp, Homo sapien
ctaggcaaaggatcagactgggagt

SEQ ID NO: 1859677 - DNA, 25 bp, Homo sapien
caaagagcaaagttccacaaggtgg

SEQ ID NO: 1859678 - DNA, 25 bp, Homo sapien
tcttgaggaaagagatagcatttac

SEQ ID NO: 1859679 - DNA, 25 bp, Homo sapien
cgccaaagagtccttgaacactgta

SEQ ID NO: 1859680 - DNA, 25 bp, Homo sapien
gaacactgtatgaatctcccctggg

SEQ ID NO: 1859681 - DNA, 25 bp, Homo sapien
gatgtaaccttgactctgatatttt

SEQ ID NO: 1859682 - DNA, 25 bp, Homo sapien
ttgcaaacccaattctaaaccttgc

SEQ ID NO: 1859683 - DNA, 25 bp, Homo sapien
cccaattctaaaccttgcagaagag

SEQ ID NO: 1859684 - DNA, 25 bp, Homo sapien
gaattatcctccagccagtaaagtg

SEQ ID NO: 1859685 - DNA, 25 bp, Homo sapien
catgactggagttcacatgacagga

SEQ ID NO: 1859686 - DNA, 25 bp, Homo sapien
ctggagttcacatgacaggattcct

SEQ ID NO: 1859687 - DNA, 25 bp, Homo sapien
acgtaagaacatgactggagttcac

SEQ ID NO: 1859688 - DNA, 25 bp, Homo sapien
ctacgtaagaacatgactggagttc

SEQ ID NO: 1859689 - DNA, 25 bp, Homo sapien
tgaatgtccagttaagctccaaagt

SEQ ID NO: 1859690 - DNA, 25 bp, Homo sapien
tttgaatgtccagttaagctccaaa

SEQ ID NO: 1859691 - DNA, 25 bp, Homo sapien
ttgaatgtccagttaagctccaaag

SEQ ID NO: 1859692 - DNA, 25 bp, Homo sapien
ttgggctcatgaggctgtagaatgc

SEQ ID NO: 1859693 - DNA, 25 bp, Homo sapien
tccctttcaattgccttatctgctg

SEQ ID NO: 1859694 - DNA, 25 bp, Homo sapien
tctcctgtccctttggagctgcaat

SEQ ID NO: 1859695 - DNA, 25 bp, Homo sapien
tgtctaatttccatcaactctcctg

SEQ ID NO: 1859696 - DNA, 25 bp, Homo sapien
tttttcagatgtgaagagaaaatca

SEQ ID NO: 1859697 - DNA, 25 bp, Homo sapien
catcatctagtagctcattatacat

SEQ ID NO: 1859698 - DNA, 25 bp, Homo sapien
ttttcagatgtgaagagaaaatcat

SEQ ID NO: 1859699 - DNA, 25 bp, Homo sapien
atcatcatcatctagtagctcatta

SEQ ID NO: 1859700 - DNA, 25 bp, Homo sapien
tacatgctctttgctgcaatcaagc

SEQ ID NO: 1859701 - DNA, 25 bp, Homo sapien
gactacatgctctttgctgcaatca

SEQ ID NO: 1859702 - DNA, 25 bp, Homo sapien
cactccacttagtgactacatgctc

SEQ ID NO: 1859703 - DNA, 25 bp, Homo sapien
ttagtgactacatgctctttgctgc

SEQ ID NO: 1859704 - DNA, 25 bp, Homo sapien
ggttgcctaagccaattatgtccta

SEQ ID NO: 1859705 - DNA, 25 bp, Homo sapien
ggatctacttaggaccttacttgag

SEQ ID NO: 1859706 - DNA, 25 bp, Homo sapien
tagcagactcatctaagccatgcag

SEQ ID NO: 1859707 - DNA, 25 bp, Homo sapien
tgaaacacgtgccttcagacagtgg

SEQ ID NO: 1859708 - DNA, 25 bp, Homo sapien
atcttttccagttctcactctccat

SEQ ID NO: 1859709 - DNA, 25 bp, Homo sapien
catcttttccagttctcactctcca

SEQ ID NO: 1859710 - DNA, 25 bp, Homo sapien
aactttgcttatgctggcccctgga

SEQ ID NO: 1859711 - DNA, 25 bp, Homo sapien
ttttctccagccaaagcactctact

SEQ ID NO: 1859712 - DNA, 25 bp, Homo sapien
tgcccacaagaaacaactcaagata

SEQ ID NO: 1859713 - DNA, 25 bp, Homo sapien
gcacccaacgaagtgtctcgccata

SEQ ID NO: 1859714 - DNA, 25 bp, Homo sapien
cagcgatgctcctctgagaccaagc

SEQ ID NO: 1859715 - DNA, 25 bp, Homo sapien
tctgagaccaagctgcgacacagac

SEQ ID NO: 1859716 - DNA, 25 bp, Homo sapien
cccagcgatgctcctctgagaccaa

SEQ ID NO: 1859717 - DNA, 25 bp, Homo sapien
agcgatgctcctctgagaccaagct

SEQ ID NO: 1859718 - DNA, 25 bp, Homo sapien
cccgctccgcacccctctctgcgcc

SEQ ID NO: 1859719 - DNA, 25 bp, Homo sapien
ccgctccgcacccctctctgcgcca

SEQ ID NO: 1859720 - DNA, 25 bp, Homo sapien
gcctaaggcagcttccgcggctttt

SEQ ID NO: 1859721 - DNA, 25 bp, Homo sapien
ttagcaaccgatcgacagcgggctg

SEQ ID NO: 1859722 - DNA, 25 bp, Homo sapien
gcggctttttcgcatcggcccgacc

SEQ ID NO: 1859723 - DNA, 25 bp, Homo sapien
gtccggcgatgcaggcccagaaagt

SEQ ID NO: 1859724 - DNA, 25 bp, Homo sapien
tggttgacaagcataagtgggaagc

SEQ ID NO: 1859725 - DNA, 25 bp, Homo sapien
tcagtattctcttctagtaggccag

SEQ ID NO: 1859726 - DNA, 25 bp, Homo sapien
gcagaaaggtaactgagtgctatga

SEQ ID NO: 1859727 - DNA, 25 bp, Homo sapien
caggttctcccatcaaatcattttc

SEQ ID NO: 1859728 - DNA, 25 bp, Homo sapien
gggagaatatgtttacaatggaaca

SEQ ID NO: 1859729 - DNA, 25 bp, Homo sapien
catattgaggtagatctctggaagc

SEQ ID NO: 1859730 - DNA, 25 bp, Homo sapien
tctggtcgccagtctattaacaagc

SEQ ID NO: 1859731 - DNA, 25 bp, Homo sapien
aaatgctgagaatatgggagaatat

SEQ ID NO: 1859732 - DNA, 25 bp, Homo sapien
tatgtagggctcataggagactgac

SEQ ID NO: 1859733 - DNA, 25 bp, Homo sapien
cactcttcataatcagttggatggc

SEQ ID NO: 1859734 - DNA, 25 bp, Homo sapien
ggtaatgtcatgagggtagaaccct

SEQ ID NO: 1859735 - DNA, 25 bp, Homo sapien
ggtgcctgtctacaagtcaggaagt

SEQ ID NO: 1859736 - DNA, 25 bp, Homo sapien
aaggaaacataaagtgcttctagca

SEQ ID NO: 1859737 - DNA, 25 bp, Homo sapien
taaagcactcacataaatccatttc

SEQ ID NO: 1859738 - DNA, 25 bp, Homo sapien
gcttctagcagtacaagcacggttg

SEQ ID NO: 1859739 - DNA, 25 bp, Homo sapien
gcagtacaagcacggttggcatggc

SEQ ID NO: 1859740 - DNA, 25 bp, Homo sapien
ccactagagtctagagaaatctaaa

SEQ ID NO: 1859741 - DNA, 25 bp, Homo sapien
tccaaaggtcttccactagagtcta

SEQ ID NO: 1859742 - DNA, 25 bp, Homo sapien
tttctgagccattagagattttcaa

SEQ ID NO: 1859743 - DNA, 25 bp, Homo sapien
gaaatctaaatatagtcatccacaa

SEQ ID NO: 1859744 - DNA, 25 bp, Homo sapien
tactggcatcatgaagaccttggga

SEQ ID NO: 1859745 - DNA, 25 bp, Homo sapien
gaggtactacaactttgaggcacaa

SEQ ID NO: 1859746 - DNA, 25 bp, Homo sapien
taaagttgcagcctagcccagtgtc

SEQ ID NO: 1859747 - DNA, 25 bp, Homo sapien
catcacttgtgtaggaatcaccagg

SEQ ID NO: 1859748 - DNA, 25 bp, Homo sapien
ttcaatccagtagccatcaggatct

SEQ ID NO: 1859749 - DNA, 25 bp, Homo sapien
cattaaggttgccattttgttagga

SEQ ID NO: 1859750 - DNA, 25 bp, Homo sapien
ctacattaaggttgccattttgtta

SEQ ID NO: 1859751 - DNA, 25 bp, Homo sapien
tcaaaatttcaatccagtagccatc

SEQ ID NO: 1859752 - DNA, 25 bp, Homo sapien
ggtttcttcacaaatttgactccca

SEQ ID NO: 1859753 - DNA, 25 bp, Homo sapien
catcaggtttcttcacaaatttgac

SEQ ID NO: 1859754 - DNA, 25 bp, Homo sapien
tcttcacaaatttgactcccagttc

SEQ ID NO: 1859755 - DNA, 25 bp, Homo sapien
tcacaaatttgactcccagttcttc

SEQ ID NO: 1859756 - DNA, 25 bp, Homo sapien
cttttacaagcactgtatacatcag

SEQ ID NO: 1859757 - DNA, 25 bp, Homo sapien
tcaggaacagcaattccaatatgac

SEQ ID NO: 1859758 - DNA, 25 bp, Homo sapien
tacaagcactgtatacatcaggaac

SEQ ID NO: 1859759 - DNA, 25 bp, Homo sapien
catcaggaacagcaattccaatatg

SEQ ID NO: 1859760 - DNA, 25 bp, Homo sapien
tgtggtaactctgggtctcatcatc

SEQ ID NO: 1859761 - DNA, 25 bp, Homo sapien
tgccattgtggtaactctgggtctc

SEQ ID NO: 1859762 - DNA, 25 bp, Homo sapien
gaatcctcgagggtctgaattgcca

SEQ ID NO: 1859763 - DNA, 25 bp, Homo sapien
gagggtctgaattgccattgtggta

SEQ ID NO: 1859764 - DNA, 25 bp, Homo sapien
ggaaaacatagctacaatgtcctag

SEQ ID NO: 1859765 - DNA, 25 bp, Homo sapien
cataattggcctaacccctgctaca

SEQ ID NO: 1859766 - DNA, 25 bp, Homo sapien
ggtactggacaagaacaataataag

SEQ ID NO: 1859767 - DNA, 25 bp, Homo sapien
aacccttaaaacagctccatgggct

SEQ ID NO: 1859768 - DNA, 25 bp, Homo sapien
ggagagcgcccaggctattttttca

SEQ ID NO: 1859769 - DNA, 25 bp, Homo sapien
tgtgtcagctcaagtgtagcttttc

SEQ ID NO: 1859770 - DNA, 25 bp, Homo sapien
catttttatcctcataagccaagaa

SEQ ID NO: 1859771 - DNA, 25 bp, Homo sapien
gaaaacttcataatgggaaaatcac

SEQ ID NO: 1859772 - DNA, 25 bp, Homo sapien
cattccaagaactctagtataaaaa

SEQ ID NO: 1859773 - DNA, 25 bp, Homo sapien
caagaactctagtataaaaatccag

SEQ ID NO: 1859774 - DNA, 25 bp, Homo sapien
tccaagaactctagtataaaaatcc

SEQ ID NO: 1859775 - DNA, 25 bp, Homo sapien
agaactctagtataaaaatccagtg

SEQ ID NO: 1859776 - DNA, 25 bp, Homo sapien
acctacaacttgcaagggctctctg

SEQ ID NO: 1859777 - DNA, 25 bp, Homo sapien
tctctgctcagtggtatcttctggt

SEQ ID NO: 1859778 - DNA, 25 bp, Homo sapien
tctgctcagtggtatcttctggttg

SEQ ID NO: 1859779 - DNA, 25 bp, Homo sapien
cacctacaacttgcaagggctctct

SEQ ID NO: 1859780 - DNA, 25 bp, Homo sapien
tgcctttcaatctagaataaccctg

SEQ ID NO: 1859781 - DNA, 25 bp, Homo sapien
gccaataccacagagtagtgattac

SEQ ID NO: 1859782 - DNA, 25 bp, Homo sapien
tgtgctgagtcttccaatcatgaac

SEQ ID NO: 1859783 - DNA, 25 bp, Homo sapien
tgttgaggctatcctccctctggtg

SEQ ID NO: 1859784 - DNA, 25 bp, Homo sapien
tcctttccaacctatatgtctctta

SEQ ID NO: 1859785 - DNA, 25 bp, Homo sapien
tcagcactttgtcaaataagagtgg

SEQ ID NO: 1859786 - DNA, 25 bp, Homo sapien
tattccctatgtagacaatcatgtc

SEQ ID NO: 1859787 - DNA, 25 bp, Homo sapien
aattagggagaaagcatcaccactg

SEQ ID NO: 1859788 - DNA, 25 bp, Homo sapien
aattctccagtgaaatcacctgggt

SEQ ID NO: 1859789 - DNA, 25 bp, Homo sapien
catattagttcatattggatgagga

SEQ ID NO: 1859790 - DNA, 25 bp, Homo sapien
cctgggtctggacaaatcttctttg

SEQ ID NO: 1859791 - DNA, 25 bp, Homo sapien
gaattggtccaattcaagttgtcaa

SEQ ID NO: 1859792 - DNA, 25 bp, Homo sapien
gcactgtttagctatgatccctttt

SEQ ID NO: 1859793 - DNA, 25 bp, Homo sapien
aagcttacgttattaatttgagact

SEQ ID NO: 1859794 - DNA, 25 bp, Homo sapien
cccctttgcactgtttagctatgat

SEQ ID NO: 1859795 - DNA, 25 bp, Homo sapien
tcttaggaggaagcttacgttatta

SEQ ID NO: 1859796 - DNA, 25 bp, Homo sapien
taacttccttagatgtgacactcaa

SEQ ID NO: 1859797 - DNA, 25 bp, Homo sapien
tgaaatcggcgcaccttgaaaaaca

SEQ ID NO: 1859798 - DNA, 25 bp, Homo sapien
gagctttttaagtggcctaatcacc

SEQ ID NO: 1859799 - DNA, 25 bp, Homo sapien
tgacatagccatacattctctggac

SEQ ID NO: 1859800 - DNA, 25 bp, Homo sapien
tagcaatgagatgtgtctgactctt

SEQ ID NO: 1859801 - DNA, 25 bp, Homo sapien
ttagcaatgagatgtgtctgactct

SEQ ID NO: 1859802 - DNA, 25 bp, Homo sapien
agcaatgagatgtgtctgactcttt

SEQ ID NO: 1859803 - DNA, 25 bp, Homo sapien
caaaagtgaaattctgggcgcggtt

SEQ ID NO: 1859804 - DNA, 25 bp, Homo sapien
tggcgactgatttgggaaagctgac

SEQ ID NO: 1859805 - DNA, 25 bp, Homo sapien
cagggtcgcagtctttgaaactagc

SEQ ID NO: 1859806 - DNA, 25 bp, Homo sapien
gcaagaagggctgttgtgacccaca

SEQ ID NO: 1859807 - DNA, 25 bp, Homo sapien
cggcgggatggggttggatagaatg

SEQ ID NO: 1859808 - DNA, 25 bp, Homo sapien
tggggttggatagaatgcggcccgg

SEQ ID NO: 1859809 - DNA, 25 bp, Homo sapien
ggagccgttcccttcggtcctgtgc

SEQ ID NO: 1859810 - DNA, 25 bp, Homo sapien
gttggatagaatgcggcccggtccc

SEQ ID NO: 1859811 - DNA, 25 bp, Homo sapien
gggtccgcgtcggagcagcaactga

SEQ ID NO: 1859812 - DNA, 25 bp, Homo sapien
gcagcaactgagggcggcctcgtcc

SEQ ID NO: 1859813 - DNA, 25 bp, Homo sapien
cttggtactggggtccgcgtcggag

SEQ ID NO: 1859814 - DNA, 25 bp, Homo sapien
tgagggcggcctcgtccgtgaggcc

SEQ ID NO: 1859815 - DNA, 25 bp, Homo sapien
ccaaggaacggaggagtcacccaca

SEQ ID NO: 1859816 - DNA, 25 bp, Homo sapien
ctgcagtatcacagacgacgggacc

SEQ ID NO: 1859817 - DNA, 25 bp, Homo sapien
gccctgtgccgccttaactaggaat

SEQ ID NO: 1859818 - DNA, 25 bp, Homo sapien
tgccgccttaactaggaatggcgcg

SEQ ID NO: 1859819 - DNA, 25 bp, Homo sapien
tcaggaactcccttgctcccataag

SEQ ID NO: 1859820 - DNA, 25 bp, Homo sapien
taggtaggtcttgcatttcggcaca

SEQ ID NO: 1859821 - DNA, 25 bp, Homo sapien
tctgctctacattcaaagactgact

SEQ ID NO: 1859822 - DNA, 25 bp, Homo sapien
tttcagttgacagacctttcagtcc

SEQ ID NO: 1859823 - DNA, 25 bp, Homo sapien
atgtccatctccaggaacccgccct

SEQ ID NO: 1859824 - DNA, 25 bp, Homo sapien
ctaaacaatgtttcagtcctcgggc

SEQ ID NO: 1859825 - DNA, 25 bp, Homo sapien
ccctggcaccgcactccaaatgtcc

SEQ ID NO: 1859826 - DNA, 25 bp, Homo sapien
acgtatacgcgggaatcctcccaag

SEQ ID NO: 1859827 - DNA, 25 bp, Homo sapien
cactgctctagcaggaaaagtatca

SEQ ID NO: 1859828 - DNA, 25 bp, Homo sapien
tatcaaagtccctgataaggcaggg

SEQ ID NO: 1859829 - DNA, 25 bp, Homo sapien
tgttgagcccatgccaagcagtatc

SEQ ID NO: 1859830 - DNA, 25 bp, Homo sapien
ggtccaaatgatgttggatctgtca

SEQ ID NO: 1859831 - DNA, 25 bp, Homo sapien
ccatcaatatcgtgtccacagtatt

SEQ ID NO: 1859832 - DNA, 25 bp, Homo sapien
ctgtccatcaatatcgtgtccacag

SEQ ID NO: 1859833 - DNA, 25 bp, Homo sapien
tccatcaatatcgtgtccacagtat

SEQ ID NO: 1859834 - DNA, 25 bp, Homo sapien
aattattagaacaacctgatataca

SEQ ID NO: 1859835 - DNA, 25 bp, Homo sapien
attattagaacaacctgatatacag

SEQ ID NO: 1859836 - DNA, 25 bp, Homo sapien
ttattagaacaacctgatatacagc

SEQ ID NO: 1859837 - DNA, 25 bp, Homo sapien
catcttaacagatggttgaaagtag

SEQ ID NO: 1859838 - DNA, 25 bp, Homo sapien
catccccatggccttgagtcctgtg

SEQ ID NO: 1859839 - DNA, 25 bp, Homo sapien
catggccttgagtcctgtgttacag

SEQ ID NO: 1859840 - DNA, 25 bp, Homo sapien
aagtagctggctgagagcatcccca

SEQ ID NO: 1859841 - DNA, 25 bp, Homo sapien
tgtgggtggggccagactgtgttac

SEQ ID NO: 1859842 - DNA, 25 bp, Homo sapien
ctgtgggtggggccagactgtgtta

SEQ ID NO: 1859843 - DNA, 25 bp, Homo sapien
gatgatgaatacaaactgtgcttta

SEQ ID NO: 1859844 - DNA, 25 bp, Homo sapien
gaatacaaactgtgctttaggtggg

SEQ ID NO: 1859845 - DNA, 25 bp, Homo sapien
gctttaggtgggaagccagtcctta

SEQ ID NO: 1859846 - DNA, 25 bp, Homo sapien
caaactgtgctttaggtgggaagcc

SEQ ID NO: 1859847 - DNA, 25 bp, Homo sapien
caagatcataaccaaacaacaaaca

SEQ ID NO: 1859848 - DNA, 25 bp, Homo sapien
aagcaagatcataaccaaacaacaa

SEQ ID NO: 1859849 - DNA, 25 bp, Homo sapien
agcaagatcataaccaaacaacaaa

SEQ ID NO: 1859850 - DNA, 25 bp, Homo sapien
gcaagatcataaccaaacaacaaac

SEQ ID NO: 1859851 - DNA, 25 bp, Homo sapien
gtctctttgaacagaccaggtacta

SEQ ID NO: 1859852 - DNA, 25 bp, Homo sapien
tctctttgaacagaccaggtactag

SEQ ID NO: 1859853 - DNA, 25 bp, Homo sapien
ctttgaacagaccaggtactagagc

SEQ ID NO: 1859854 - DNA, 25 bp, Homo sapien
tctttgaacagaccaggtactagag

SEQ ID NO: 1859855 - DNA, 25 bp, Homo sapien
gcatatacaggtcgagcttctcaaa

SEQ ID NO: 1859856 - DNA, 25 bp, Homo sapien
tgataacagacaagggtcagctctg

SEQ ID NO: 1859857 - DNA, 25 bp, Homo sapien
tctgagtcaaagtacagagggcacc

SEQ ID NO: 1859858 - DNA, 25 bp, Homo sapien
tcagggaagcccacttgagattcag

SEQ ID NO: 1859859 - DNA, 25 bp, Homo sapien
tatgtgtgaatataatggatgtttg

SEQ ID NO: 1859860 - DNA, 25 bp, Homo sapien
gagacattctcccattatggctgca

SEQ ID NO: 1859861 - DNA, 25 bp, Homo sapien
ggatgtttgtgttaagcacttagaa

SEQ ID NO: 1859862 - DNA, 25 bp, Homo sapien
tttgcttaatgacgctgatacgtgc

SEQ ID NO: 1859863 - DNA, 25 bp, Homo sapien
atccggtggacccagcaaagtaaag

SEQ ID NO: 1859864 - DNA, 25 bp, Homo sapien
catcatctatgacagtgcttgcaac

SEQ ID NO: 1859865 - DNA, 25 bp, Homo sapien
aacttaaatcatgcactctcaggtg

SEQ ID NO: 1859866 - DNA, 25 bp, Homo sapien
caaagctcagattaataggtgggaa

SEQ ID NO: 1859867 - DNA, 25 bp, Homo sapien
ccactgtcaatttccggtatatctt

SEQ ID NO: 1859868 - DNA, 25 bp, Homo sapien
aatttccggtatatcttgcagagct

SEQ ID NO: 1859869 - DNA, 25 bp, Homo sapien
gtttgcaaatctgctctccagttgc

SEQ ID NO: 1859870 - DNA, 25 bp, Homo sapien
cttgctgggaattcgatgccactgt

SEQ ID NO: 1859871 - DNA, 25 bp, Homo sapien
tctgtttaggtgacatctctgaacc

SEQ ID NO: 1859872 - DNA, 25 bp, Homo sapien
cataaatattttcgcacacacttgg

SEQ ID NO: 1859873 - DNA, 25 bp, Homo sapien
tctcggtttcccttagcaatgggca

SEQ ID NO: 1859874 - DNA, 25 bp, Homo sapien
tgggccgaccccttctcattgagga

SEQ ID NO: 1859875 - DNA, 25 bp, Homo sapien
ttttattaaatctggcaccactttc

SEQ ID NO: 1859876 - DNA, 25 bp, Homo sapien
cttggataatgtattagaaaagaat

SEQ ID NO: 1859877 - DNA, 25 bp, Homo sapien
tggataatgtattagaaaagaattt

SEQ ID NO: 1859878 - DNA, 25 bp, Homo sapien
aagaattttattaaatctggcacca

SEQ ID NO: 1859879 - DNA, 25 bp, Homo sapien
gttgtcaaatatgcttcagatatac

SEQ ID NO: 1859880 - DNA, 25 bp, Homo sapien
ctgttgtcaaatatgcttcagatat

SEQ ID NO: 1859881 - DNA, 25 bp, Homo sapien
tacattaactttttctgttgtcaaa

SEQ ID NO: 1859882 - DNA, 25 bp, Homo sapien
tttctgttgtcaaatatgcttcaga

SEQ ID NO: 1859883 - DNA, 25 bp, Homo sapien
tcatagacagttaccacaggcacag

SEQ ID NO: 1859884 - DNA, 25 bp, Homo sapien
ctggctcatagacagttaccacagg

SEQ ID NO: 1859885 - DNA, 25 bp, Homo sapien
atagacagttaccacaggcacaggc

SEQ ID NO: 1859886 - DNA, 25 bp, Homo sapien
tggctcatagacagttaccacaggc

SEQ ID NO: 1859887 - DNA, 25 bp, Homo sapien
tccactgtctaaaggtccccagggc

SEQ ID NO: 1859888 - DNA, 25 bp, Homo sapien
tccagaagtcaagcaactccactgt

SEQ ID NO: 1859889 - DNA, 25 bp, Homo sapien
tgcaggctgcactaacctccagaag

SEQ ID NO: 1859890 - DNA, 25 bp, Homo sapien
tgagatgattcctcgctggtctaga

SEQ ID NO: 1859891 - DNA, 25 bp, Homo sapien
tgccacacctcaatttgaggatgta

SEQ ID NO: 1859892 - DNA, 25 bp, Homo sapien
tgacctcccactttagatgggaaag

SEQ ID NO: 1859893 - DNA, 25 bp, Homo sapien
ctctgggcagccaaatcatcatgcc

SEQ ID NO: 1859894 - DNA, 25 bp, Homo sapien
acctcaatttgaggatgtactctct

SEQ ID NO: 1859895 - DNA, 25 bp, Homo sapien
tgttgctccagtgagacctgctctg

SEQ ID NO: 1859896 - DNA, 25 bp, Homo sapien
tatgcagctaacaagcggcagagcc

SEQ ID NO: 1859897 - DNA, 25 bp, Homo sapien
gccgacagtaagaagaaggtttaca

SEQ ID NO: 1859898 - DNA, 25 bp, Homo sapien
gtggctgcttctcgcaccagtgact

SEQ ID NO: 1859899 - DNA, 25 bp, Homo sapien
agaacatgtggcttctagtggctca

SEQ ID NO: 1859900 - DNA, 25 bp, Homo sapien
tgtggcttctagtggctcatgggct

SEQ ID NO: 1859901 - DNA, 25 bp, Homo sapien
gcagaacatgtggcttctagtggct

SEQ ID NO: 1859902 - DNA, 25 bp, Homo sapien
gtggcttctagtggctcatgggctt

SEQ ID NO: 1859903 - DNA, 25 bp, Homo sapien
tcagtgagaagatgtttgaaccgtc

SEQ ID NO: 1859904 - DNA, 25 bp, Homo sapien
cacatacaggtctggttcagtgaga

SEQ ID NO: 1859905 - DNA, 25 bp, Homo sapien
gctgatatcacgtaagtccctggca

SEQ ID NO: 1859906 - DNA, 25 bp, Homo sapien
ctagataaccctgaagtctttgggc

SEQ ID NO: 1859907 - DNA, 25 bp, Homo sapien
cgtaagcgagcttctcccaaaatag

SEQ ID NO: 1859908 - DNA, 25 bp, Homo sapien
caatggctgagaaccttcttctgta

SEQ ID NO: 1859909 - DNA, 25 bp, Homo sapien
cccaaaatagtgtcaggatcttgca

SEQ ID NO: 1859910 - DNA, 25 bp, Homo sapien
caaactggtgtgttagagaggacac

SEQ ID NO: 1859911 - DNA, 25 bp, Homo sapien
agctccagcaagatgtaactctcca

SEQ ID NO: 1859912 - DNA, 25 bp, Homo sapien
ccagcaagatgtaactctccaagtt

SEQ ID NO: 1859913 - DNA, 25 bp, Homo sapien
tccagcaagatgtaactctccaagt

SEQ ID NO: 1859914 - DNA, 25 bp, Homo sapien
gctccagcaagatgtaactctccaa

SEQ ID NO: 1859915 - DNA, 25 bp, Homo sapien
aaagatgccctgacattgcttgtct

SEQ ID NO: 1859916 - DNA, 25 bp, Homo sapien
aagatgccctgacattgcttgtctg

SEQ ID NO: 1859917 - DNA, 25 bp, Homo sapien
gatgccctgacattgcttgtctggg

SEQ ID NO: 1859918 - DNA, 25 bp, Homo sapien
gccctgacattgcttgtctgggagc

SEQ ID NO: 1859919 - DNA, 25 bp, Homo sapien
ctggtgtttcgtggctctctgtaag

SEQ ID NO: 1859920 - DNA, 25 bp, Homo sapien
ggtgtttcgtggctctctgtaagat

SEQ ID NO: 1859921 - DNA, 25 bp, Homo sapien
tggtgtttcgtggctctctgtaaga

SEQ ID NO: 1859922 - DNA, 25 bp, Homo sapien
gtgtttcgtggctctctgtaagatg

SEQ ID NO: 1859923 - DNA, 25 bp, Homo sapien
cctattgtatgagagagacactggg

SEQ ID NO: 1859924 - DNA, 25 bp, Homo sapien
tcgagccctctgataaaggaaatac

SEQ ID NO: 1859925 - DNA, 25 bp, Homo sapien
tgacttcttttacaaccatcgagcc

SEQ ID NO: 1859926 - DNA, 25 bp, Homo sapien
accaccagtaacaagtgtgtgctgc

SEQ ID NO: 1859927 - DNA, 25 bp, Homo sapien
caaggaccccaagctgtatgtgtgt

SEQ ID NO: 1859928 - DNA, 25 bp, Homo sapien
gatctggtgctaccggctaagcctg

SEQ ID NO: 1859929 - DNA, 25 bp, Homo sapien
tacgaacagtgttgtccccggatca

SEQ ID NO: 1859930 - DNA, 25 bp, Homo sapien
tatttcacgaatgcaatgtacccgg

SEQ ID NO: 1859931 - DNA, 25 bp, Homo sapien
tatctccaagatgacaaatccgtgg

SEQ ID NO: 1859932 - DNA, 25 bp, Homo sapien
gctatgaatgcgagggctctgtccc

SEQ ID NO: 1859933 - DNA, 25 bp, Homo sapien
gaatgcgagggctctgtccctatct

SEQ ID NO: 1859934 - DNA, 25 bp, Homo sapien
tccgtgggcgtttctggcactggaa

SEQ ID NO: 1859935 - DNA, 25 bp, Homo sapien
gcctggtctgctttctctggaagcc

SEQ ID NO: 1859936 - DNA, 25 bp, Homo sapien
tggtctgctttctctggaagcccac

SEQ ID NO: 1859937 - DNA, 25 bp, Homo sapien
ctgcctggtctgctttctctggaag

SEQ ID NO: 1859938 - DNA, 25 bp, Homo sapien
ttagagtagacttgccctttctgcc

SEQ ID NO: 1859939 - DNA, 25 bp, Homo sapien
tggtgggccctggatcgtgcattcc

SEQ ID NO: 1859940 - DNA, 25 bp, Homo sapien
tctgcccatggaacatttggctgtg

SEQ ID NO: 1859941 - DNA, 25 bp, Homo sapien
ctggatcgtgcattcccctcagggc

SEQ ID NO: 1859942 - DNA, 25 bp, Homo sapien
cactatggagttccctggtgggccc

SEQ ID NO: 1859943 - DNA, 25 bp, Homo sapien
ggagccacgccaggcgagagcaggg

SEQ ID NO: 1859944 - DNA, 25 bp, Homo sapien
tctcagggccaatctatgatgtttc

SEQ ID NO: 1859945 - DNA, 25 bp, Homo sapien
tgggagccacgccaggcgagagcag

SEQ ID NO: 1859946 - DNA, 25 bp, Homo sapien
tcagggccaatctatgatgtttctc

SEQ ID NO: 1859947 - DNA, 25 bp, Homo sapien
tgtgtggggtttgctgaccttgtcc

SEQ ID NO: 1859948 - DNA, 25 bp, Homo sapien
gctgaccttgtcccctggtagtcac

SEQ ID NO: 1859949 - DNA, 25 bp, Homo sapien
gcagcattgtgtcaccatgcagagc

SEQ ID NO: 1859950 - DNA, 25 bp, Homo sapien
cagcattgtgtcaccatgcagagca

SEQ ID NO: 1859951 - DNA, 25 bp, Homo sapien
caatgagtaactccttgggccactc

SEQ ID NO: 1859952 - DNA, 25 bp, Homo sapien
tatcattgcagtcccttatggtgac

SEQ ID NO: 1859953 - DNA, 25 bp, Homo sapien
atcactttgaacctgatccgccggc

SEQ ID NO: 1859954 - DNA, 25 bp, Homo sapien
tgcacaaacatgagcttcagaacct

SEQ ID NO: 1859955 - DNA, 25 bp, Homo sapien
tccttgacctggcaaggtgacttgg

SEQ ID NO: 1859956 - DNA, 25 bp, Homo sapien
tgacctggcaaggtgacttggtgat

SEQ ID NO: 1859957 - DNA, 25 bp, Homo sapien
gtccttgacctggcaaggtgacttg

SEQ ID NO: 1859958 - DNA, 25 bp, Homo sapien
cttgacctggcaaggtgacttggtg

SEQ ID NO: 1859959 - DNA, 25 bp, Homo sapien
tgctggtgctaatccttgtccctga

SEQ ID NO: 1859960 - DNA, 25 bp, Homo sapien
aaaattcgggtgcttggctggcctc

SEQ ID NO: 1859961 - DNA, 25 bp, Homo sapien
tactcagtgctggtgctaatccttg

SEQ ID NO: 1859962 - DNA, 25 bp, Homo sapien
gactctgaggcagctttactcagtg

SEQ ID NO: 1859963 - DNA, 25 bp, Homo sapien
actaatccctcctgggagagagcaa

SEQ ID NO: 1859964 - DNA, 25 bp, Homo sapien
tctgacactaatccctcctgggaga

SEQ ID NO: 1859965 - DNA, 25 bp, Homo sapien
ccccacttctgacactaatccctcc

SEQ ID NO: 1859966 - DNA, 25 bp, Homo sapien
acttctgacactaatccctcctggg

SEQ ID NO: 1859967 - DNA, 25 bp, Homo sapien
gagtggacctgaacgaaccttgaag

SEQ ID NO: 1859968 - DNA, 25 bp, Homo sapien
caaagatgctgggacttgcttgagc

SEQ ID NO: 1859969 - DNA, 25 bp, Homo sapien
taccagcctctgtagcaaacaggca

SEQ ID NO: 1859970 - DNA, 25 bp, Homo sapien
caagagaaggcatactgggacacgc

SEQ ID NO: 1859971 - DNA, 25 bp, Homo sapien
tcctttaaggtagcgagtctttcta

SEQ ID NO: 1859972 - DNA, 25 bp, Homo sapien
ttaacgcaggcatatacaaacatac

SEQ ID NO: 1859973 - DNA, 25 bp, Homo sapien
tagaagcagtgataacagacatcct

SEQ ID NO: 1859974 - DNA, 25 bp, Homo sapien
tttatgaatacggagagacttgact

SEQ ID NO: 1859975 - DNA, 25 bp, Homo sapien
ggtccagctggaatttcggaagagc

SEQ ID NO: 1859976 - DNA, 25 bp, Homo sapien
gcatgatggctttcgtttccctcct

SEQ ID NO: 1859977 - DNA, 25 bp, Homo sapien
ggcttgagcacttgcacatccagag

SEQ ID NO: 1859978 - DNA, 25 bp, Homo sapien
agcatgaagcccctcaagtgtccca

SEQ ID NO: 1859979 - DNA, 25 bp, Homo sapien
gcagcatgtacacagccacttgcca

SEQ ID NO: 1859980 - DNA, 25 bp, Homo sapien
agcatgtacacagccacttgccagg

SEQ ID NO: 1859981 - DNA, 25 bp, Homo sapien
ggcagcagcatgtacacagccactt

SEQ ID NO: 1859982 - DNA, 25 bp, Homo sapien
gagcagtggagccacggcgggcagc

SEQ ID NO: 1859983 - DNA, 25 bp, Homo sapien
tgaccacacgctgtctcttgagaat

SEQ ID NO: 1859984 - DNA, 25 bp, Homo sapien
atactttatctgtgaccacacgctg

SEQ ID NO: 1859985 - DNA, 25 bp, Homo sapien
gggccaagagagacattgcctccac

SEQ ID NO: 1859986 - DNA, 25 bp, Homo sapien
ttgagaatttggatacactctctag

SEQ ID NO: 1859987 - DNA, 25 bp, Homo sapien
agcagggtgtaggcgctgcttttgt

SEQ ID NO: 1859988 - DNA, 25 bp, Homo sapien
ttttgtttgagctttgtagccacaa

SEQ ID NO: 1859989 - DNA, 25 bp, Homo sapien
tttgtttgagctttgtagccacaag

SEQ ID NO: 1859990 - DNA, 25 bp, Homo sapien
gggtgtaggcgctgcttttgtttga

SEQ ID NO: 1859991 - DNA, 25 bp, Homo sapien
tgctggcccagatcagctctctggg

SEQ ID NO: 1859992 - DNA, 25 bp, Homo sapien
gctggcccagatcagctctctgggt

SEQ ID NO: 1859993 - DNA, 25 bp, Homo sapien
ctgctggcccagatcagctctctgg

SEQ ID NO: 1859994 - DNA, 25 bp, Homo sapien
tacttagtgccacagtgtgtctgca

SEQ ID NO: 1859995 - DNA, 25 bp, Homo sapien
gacaggaagcattattaagcagtat

SEQ ID NO: 1859996 - DNA, 25 bp, Homo sapien
gtgtgtctgcagtatctataagtac

SEQ ID NO: 1859997 - DNA, 25 bp, Homo sapien
tgcagtatctataagtacttccgct

SEQ ID NO: 1859998 - DNA, 25 bp, Homo sapien
tgagaatgaattactatggctcccc

SEQ ID NO: 1859999 - DNA, 25 bp, Homo sapien
ttttaatgccgatgacctaaggttg

SEQ ID NO: 1860000 - DNA, 25 bp, Homo sapien
cacccagaggcgattagcaggcttt

SEQ ID NO: 1860001 - DNA, 25 bp, Homo sapien
cccatgctgagggatggattgcctt

SEQ ID NO: 1860002 - DNA, 25 bp, Homo sapien
cttgctgtcacttgttacatgagaa

SEQ ID NO: 1860003 - DNA, 25 bp, Homo sapien
agaaatgcaatagctcttgagacat

SEQ ID NO: 1860004 - DNA, 25 bp, Homo sapien
tagctcttgagacattctgtatcca

SEQ ID NO: 1860005 - DNA, 25 bp, Homo sapien
tcaggctccatgactgagttagtct

SEQ ID NO: 1860006 - DNA, 25 bp, Homo sapien
gcctcattctaaggtacccgtctga

SEQ ID NO: 1860007 - DNA, 25 bp, Homo sapien
tctgagagggttccagggacatatc

SEQ ID NO: 1860008 - DNA, 25 bp, Homo sapien
aaagtgtggtccaaagaccagtggc

SEQ ID NO: 1860009 - DNA, 25 bp, Homo sapien
tccccaagagattaagagtgcagat

SEQ ID NO: 1860010 - DNA, 25 bp, Homo sapien
atctattcactaccccaaagccagg

SEQ ID NO: 1860011 - DNA, 25 bp, Homo sapien
aagccaggatcatgcttagtgggaa

SEQ ID NO: 1860012 - DNA, 25 bp, Homo sapien
tctggcccagatgagtaatttctta

SEQ ID NO: 1860013 - DNA, 25 bp, Homo sapien
aagatatcattgattactattctga

SEQ ID NO: 1860014 - DNA, 25 bp, Homo sapien
cagcggctcttaatctttattgtgc

SEQ ID NO: 1860015 - DNA, 25 bp, Homo sapien
tgccagagatcacacctgggaggct

SEQ ID NO: 1860016 - DNA, 25 bp, Homo sapien
ctttattgtgccagagatcacacct

SEQ ID NO: 1860017 - DNA, 25 bp, Homo sapien
gtcagcggctcttaatctttattgt

SEQ ID NO: 1860018 - DNA, 25 bp, Homo sapien
ttttgagaatgggatccaagtcttt

SEQ ID NO: 1860019 - DNA, 25 bp, Homo sapien
tttaggactgcaagtgatctctccc

SEQ ID NO: 1860020 - DNA, 25 bp, Homo sapien
ggtctatagaccatacttttcaaaa

SEQ ID NO: 1860021 - DNA, 25 bp, Homo sapien
tagcctagtgctccaaagttgtgaa

SEQ ID NO: 1860022 - DNA, 25 bp, Homo sapien
taaagcccttagaaccgtattgtga

SEQ ID NO: 1860023 - DNA, 25 bp, Homo sapien
ggcccacaggtgaaaaagctgctta

SEQ ID NO: 1860024 - DNA, 25 bp, Homo sapien
gaaacaactcaagcagccaacgggt

SEQ ID NO: 1860025 - DNA, 25 bp, Homo sapien
tcaacacttcttgctgaactggccg

SEQ ID NO: 1860026 - DNA, 25 bp, Homo sapien
tttaagctgagaatctccccagtgc

SEQ ID NO: 1860027 - DNA, 25 bp, Homo sapien
gaccacatcagaggttagctgcatg

SEQ ID NO: 1860028 - DNA, 25 bp, Homo sapien
cccagtgcctttctagtgctctaaa

SEQ ID NO: 1860029 - DNA, 25 bp, Homo sapien
tataaattgcgtcggacccacagtg

SEQ ID NO: 1860030 - DNA, 25 bp, Homo sapien
atctccctgccaggggtctcaactg

SEQ ID NO: 1860031 - DNA, 25 bp, Homo sapien
ccctgccaggggtctcaactgtaac

SEQ ID NO: 1860032 - DNA, 25 bp, Homo sapien
ctatctccctgccaggggtctcaac

SEQ ID NO: 1860033 - DNA, 25 bp, Homo sapien
ctccctgccaggggtctcaactgta

SEQ ID NO: 1860034 - DNA, 25 bp, Homo sapien
tattggtcaggaaagactggtccca

SEQ ID NO: 1860035 - DNA, 25 bp, Homo sapien
gtgtcccgacgtacatccaatagaa

SEQ ID NO: 1860036 - DNA, 25 bp, Homo sapien
tggattgaacacagagtaggcgctc

SEQ ID NO: 1860037 - DNA, 25 bp, Homo sapien
gtcccagcacgacggcagaggaatg

SEQ ID NO: 1860038 - DNA, 25 bp, Homo sapien
tccatggtgtctctgatgtgctgcc

SEQ ID NO: 1860039 - DNA, 25 bp, Homo sapien
ctgtgttccatggtgtctctgatgt

SEQ ID NO: 1860040 - DNA, 25 bp, Homo sapien
tgttccatggtgtctctgatgtgct

SEQ ID NO: 1860041 - DNA, 25 bp, Homo sapien
tggtgtctctgatgtgctgccctgg

SEQ ID NO: 1860042 - DNA, 25 bp, Homo sapien
gaacctatgtgctctactccaactg

SEQ ID NO: 1860043 - DNA, 25 bp, Homo sapien
gagctaatttgtgccccatacagaa

SEQ ID NO: 1860044 - DNA, 25 bp, Homo sapien
tattcgtgggagtcatttcttcaga

SEQ ID NO: 1860045 - DNA, 25 bp, Homo sapien
taaaagccctacgtattcagacaga

SEQ ID NO: 1860046 - DNA, 25 bp, Homo sapien
cacttctgtcgtggaagggtattcc

SEQ ID NO: 1860047 - DNA, 25 bp, Homo sapien
gatgcagcggcattgtcagtcacag

SEQ ID NO: 1860048 - DNA, 25 bp, Homo sapien
tcatcaagggatgaacaggttcaac

SEQ ID NO: 1860049 - DNA, 25 bp, Homo sapien
catggctgtggatgacaggatttcc

SEQ ID NO: 1860050 - DNA, 25 bp, Homo sapien
tctccaggtgaactgaaagtgccag

SEQ ID NO: 1860051 - DNA, 25 bp, Homo sapien
tgatgacttaactcggccctctgaa

SEQ ID NO: 1860052 - DNA, 25 bp, Homo sapien
gaaaaactgccctcacaccatgtga

SEQ ID NO: 1860053 - DNA, 25 bp, Homo sapien
gagaacaaagagtatgctaggcctg

SEQ ID NO: 1860054 - DNA, 25 bp, Homo sapien
tgagaattttcacaccagagcaaac

SEQ ID NO: 1860055 - DNA, 25 bp, Homo sapien
gcaatcagcgtttgggttctcaata

SEQ ID NO: 1860056 - DNA, 25 bp, Homo sapien
tcatccttttgtctggcaatcagcg

SEQ ID NO: 1860057 - DNA, 25 bp, Homo sapien
tagtaactgctaatgtgcaagaggg

SEQ ID NO: 1860058 - DNA, 25 bp, Homo sapien
caggaccctcgactctcgctggaat

SEQ ID NO: 1860059 - DNA, 25 bp, Homo sapien
tctcgctggaatcaggacctgcgtg

SEQ ID NO: 1860060 - DNA, 25 bp, Homo sapien
tcacgataactcaattcggagtgaa

SEQ ID NO: 1860061 - DNA, 25 bp, Homo sapien
ctcaattcggagtgaataatttaag

SEQ ID NO: 1860062 - DNA, 25 bp, Homo sapien
ctgaactaggccgggctgggcccgg

SEQ ID NO: 1860063 - DNA, 25 bp, Homo sapien
gggcactcgcgggcctaggtttcca

SEQ ID NO: 1860064 - DNA, 25 bp, Homo sapien
ggcactcgcgggcctaggtttccat

SEQ ID NO: 1860065 - DNA, 25 bp, Homo sapien
tttgtgcgccctgactggcagcagg

SEQ ID NO: 1860066 - DNA, 25 bp, Homo sapien
tcctggggtttgtgcgccctgactg

SEQ ID NO: 1860067 - DNA, 25 bp, Homo sapien
gaaactcagctaaccgctgttccat

SEQ ID NO: 1860068 - DNA, 25 bp, Homo sapien
ggctgcctttagagtcgctgctgct

SEQ ID NO: 1860069 - DNA, 25 bp, Homo sapien
acagcagttgcctccgctcggcccg

SEQ ID NO: 1860070 - DNA, 25 bp, Homo sapien
gttggccgataagggagcgcgcgcc

SEQ ID NO: 1860071 - DNA, 25 bp, Homo sapien
gtgcgcctgcgtggcagaagcccct

SEQ ID NO: 1860072 - DNA, 25 bp, Homo sapien
cgcctcgcgtccgttggccgataag

SEQ ID NO: 1860073 - DNA, 25 bp, Homo sapien
ccaagctcagtagatgaccaaagtc

SEQ ID NO: 1860074 - DNA, 25 bp, Homo sapien
aaaccggcatagtccaagctcagta

SEQ ID NO: 1860075 - DNA, 25 bp, Homo sapien
catagtccaagctcagtagatgacc

SEQ ID NO: 1860076 - DNA, 25 bp, Homo sapien
taaaaggtatgaaaccggcatagtc

SEQ ID NO: 1860077 - DNA, 25 bp, Homo sapien
agggattccatggtggagggcccca

SEQ ID NO: 1860078 - DNA, 25 bp, Homo sapien
agctgctaaagacatggaaggctct

SEQ ID NO: 1860079 - DNA, 25 bp, Homo sapien
aaggctctgtggtgagggattccat

SEQ ID NO: 1860080 - DNA, 25 bp, Homo sapien
agggccccatggtggaggattccat

SEQ ID NO: 1860081 - DNA, 25 bp, Homo sapien
tcatgagaggtatggtgagcacact

SEQ ID NO: 1860082 - DNA, 25 bp, Homo sapien
ctgataggaggagcgttatactgac

SEQ ID NO: 1860083 - DNA, 25 bp, Homo sapien
ttattcaagacaccacacagattcc

SEQ ID NO: 1860084 - DNA, 25 bp, Homo sapien
gaaggctgggcacatgattactgct

SEQ ID NO: 1860085 - DNA, 25 bp, Homo sapien
ctgctagctaaggatggaaaggtct

SEQ ID NO: 1860086 - DNA, 25 bp, Homo sapien
gcagtattccagagacgttcccatg

SEQ ID NO: 1860087 - DNA, 25 bp, Homo sapien
ccaatgggtgtctgcagcgctagct

SEQ ID NO: 1860088 - DNA, 25 bp, Homo sapien
ccttgtccaagggaagatatgcatc

SEQ ID NO: 1860089 - DNA, 25 bp, Homo sapien
tcagacaggaattggaggttccctg

SEQ ID NO: 1860090 - DNA, 25 bp, Homo sapien
cagacaggaattggaggttccctgc

SEQ ID NO: 1860091 - DNA, 25 bp, Homo sapien
agacaggaattggaggttccctgca

SEQ ID NO: 1860092 - DNA, 25 bp, Homo sapien
atgcacagccttgtagctgaagcac

SEQ ID NO: 1860093 - DNA, 25 bp, Homo sapien
gaagtgaaagctcatcagcaagtaa

SEQ ID NO: 1860094 - DNA, 25 bp, Homo sapien
ctgaagcacaagttctaaatgccct

SEQ ID NO: 1860095 - DNA, 25 bp, Homo sapien
ctccgcaggagaatggataggaaga

SEQ ID NO: 1860096 - DNA, 25 bp, Homo sapien
taatggtcggaaagtccgtgacagc

SEQ ID NO: 1860097 - DNA, 25 bp, Homo sapien
tgacagcaggcataccgctggtgct

SEQ ID NO: 1860098 - DNA, 25 bp, Homo sapien
agtccgtgacagcaggcataccgct

SEQ ID NO: 1860099 - DNA, 25 bp, Homo sapien
ctagattgctcttaatggtcggaaa

SEQ ID NO: 1860100 - DNA, 25 bp, Homo sapien
tctcacattccacgatggatgacat

SEQ ID NO: 1860101 - DNA, 25 bp, Homo sapien
cctctcacattccacgatggatgac

SEQ ID NO: 1860102 - DNA, 25 bp, Homo sapien
ctctcacattccacgatggatgaca

SEQ ID NO: 1860103 - DNA, 25 bp, Homo sapien
agaagttacatcttaggctgggcgc

SEQ ID NO: 1860104 - DNA, 25 bp, Homo sapien
ccctgctagctgagatctcggagag

SEQ ID NO: 1860105 - DNA, 25 bp, Homo sapien
tctgggcaaatgatgtagataccct

SEQ ID NO: 1860106 - DNA, 25 bp, Homo sapien
cctaggcaacagtgactccgaaaaa

SEQ ID NO: 1860107 - DNA, 25 bp, Homo sapien
aaaactagaggaaaggcgatccttg

SEQ ID NO: 1860108 - DNA, 25 bp, Homo sapien
gtgcctggcagcaatatgaatgtta

SEQ ID NO: 1860109 - DNA, 25 bp, Homo sapien
aaggcgatccttgttatattacctc

SEQ ID NO: 1860110 - DNA, 25 bp, Homo sapien
atgaagagcacgttgaaaactagag

SEQ ID NO: 1860111 - DNA, 25 bp, Homo sapien
gacctgagggctctaatgtctggct

SEQ ID NO: 1860112 - DNA, 25 bp, Homo sapien
ggccagcatgaggctcaacagagga

SEQ ID NO: 1860113 - DNA, 25 bp, Homo sapien
gagctttgcagacaagatgaatttc

SEQ ID NO: 1860114 - DNA, 25 bp, Homo sapien
ggtgatgaatcctgagggcctgtct

SEQ ID NO: 1860115 - DNA, 25 bp, Homo sapien
ggtgtctcacaagccctcgcaacag

SEQ ID NO: 1860116 - DNA, 25 bp, Homo sapien
gcaaaaggtgtctcacaagccctcg

SEQ ID NO: 1860117 - DNA, 25 bp, Homo sapien
aaggtgtctcacaagccctcgcaac

SEQ ID NO: 1860118 - DNA, 25 bp, Homo sapien
aaaaggtgtctcacaagccctcgca

SEQ ID NO: 1860119 - DNA, 25 bp, Homo sapien
gagtcccagagtcatgtctgttaag

SEQ ID NO: 1860120 - DNA, 25 bp, Homo sapien
catgtctgttaagaagatccaagcc

SEQ ID NO: 1860121 - DNA, 25 bp, Homo sapien
tgtctgttaagaagatccaagccag

SEQ ID NO: 1860122 - DNA, 25 bp, Homo sapien
gggagtcccagagtcatgtctgtta

SEQ ID NO: 1860123 - DNA, 25 bp, Homo sapien
cacgtgtgggagacacatatgcaga

SEQ ID NO: 1860124 - DNA, 25 bp, Homo sapien
tctacagaagctgccgaaactcagg

SEQ ID NO: 1860125 - DNA, 25 bp, Homo sapien
ggaaagtgaactcatcccacacgtg

SEQ ID NO: 1860126 - DNA, 25 bp, Homo sapien
catatgcagagtacaaaacagtcct

SEQ ID NO: 1860127 - DNA, 25 bp, Homo sapien
agccccagtctgatggagacacagc

SEQ ID NO: 1860128 - DNA, 25 bp, Homo sapien
agggagccccagtctgatggagaca

SEQ ID NO: 1860129 - DNA, 25 bp, Homo sapien
tcagggagccccagtctgatggaga

SEQ ID NO: 1860130 - DNA, 25 bp, Homo sapien
ggagccccagtctgatggagacaca

SEQ ID NO: 1860131 - DNA, 25 bp, Homo sapien
acacagctgcatcctcagggagcac

SEQ ID NO: 1860132 - DNA, 25 bp, Homo sapien
ctgaggggagacacagctgcatcct

SEQ ID NO: 1860133 - DNA, 25 bp, Homo sapien
agacacagctgcatcctcagggagc

SEQ ID NO: 1860134 - DNA, 25 bp, Homo sapien
ggagacacagctgcatcctcaggga

SEQ ID NO: 1860135 - DNA, 25 bp, Homo sapien
acagcccagtcctcaggtagcccca

SEQ ID NO: 1860136 - DNA, 25 bp, Homo sapien
gagccccgagctcagggagccccag

SEQ ID NO: 1860137 - DNA, 25 bp, Homo sapien
ctgaggggagacacagcccagtcct

SEQ ID NO: 1860138 - DNA, 25 bp, Homo sapien
gagggagacacagcctcgttctcag

SEQ ID NO: 1860139 - DNA, 25 bp, Homo sapien
ttgagagtgagagccctcacctgct

SEQ ID NO: 1860140 - DNA, 25 bp, Homo sapien
agggtttgagagtgagagccctcac

SEQ ID NO: 1860141 - DNA, 25 bp, Homo sapien
tgaatcctgttgcaccctctgaggg

SEQ ID NO: 1860142 - DNA, 25 bp, Homo sapien
cctgctgacctatcctcatctgcat

SEQ ID NO: 1860143 - DNA, 25 bp, Homo sapien
actttctagctctgatactgggtca

SEQ ID NO: 1860144 - DNA, 25 bp, Homo sapien
ggtaactttctagctctgatactgg

SEQ ID NO: 1860145 - DNA, 25 bp, Homo sapien
taactttctagctctgatactgggt

SEQ ID NO: 1860146 - DNA, 25 bp, Homo sapien
tttctagctctgatactgggtcaga

SEQ ID NO: 1860147 - DNA, 25 bp, Homo sapien
ggctgtctgggcagctcatcccagc

SEQ ID NO: 1860148 - DNA, 25 bp, Homo sapien
caggttatctgactctgagaaggcc

SEQ ID NO: 1860149 - DNA, 25 bp, Homo sapien
ccagcctttgctggcaatggctgcc

SEQ ID NO: 1860150 - DNA, 25 bp, Homo sapien
tctgagaaggccaaaacagccaaca

SEQ ID NO: 1860151 - DNA, 25 bp, Homo sapien
tctaggcaaccttcgagagactcaa

SEQ ID NO: 1860152 - DNA, 25 bp, Homo sapien
cactgggtcagaaaatttcccctgg

SEQ ID NO: 1860153 - DNA, 25 bp, Homo sapien
gtcaacacctaaaacgcagcagctc

SEQ ID NO: 1860154 - DNA, 25 bp, Homo sapien
tcccgtgagctggtataaaagggct

SEQ ID NO: 1860155 - DNA, 25 bp, Homo sapien
gattctgcaatctgcgggctggctg

SEQ ID NO: 1860156 - DNA, 25 bp, Homo sapien
ccatgggcgagtttgggcttcttca

SEQ ID NO: 1860157 - DNA, 25 bp, Homo sapien
tgggcctgcagtgttcaagatggaa

SEQ ID NO: 1860158 - DNA, 25 bp, Homo sapien
aagctgccaggccttaacatgtggg

SEQ ID NO: 1860159 - DNA, 25 bp, Homo sapien
aggccaactcagcctgccacaaggg

SEQ ID NO: 1860160 - DNA, 25 bp, Homo sapien
atccacctggccttgtggggactcg

SEQ ID NO: 1860161 - DNA, 25 bp, Homo sapien
tggggactcgcccttctggaacaag

SEQ ID NO: 1860162 - DNA, 25 bp, Homo sapien
acaagccttgccccctgatttggcc

SEQ ID NO: 1860163 - DNA, 25 bp, Homo sapien
caattcacgagttgtcattggttcc

SEQ ID NO: 1860164 - DNA, 25 bp, Homo sapien
cattggttcctggaccagttgtgca

SEQ ID NO: 1860165 - DNA, 25 bp, Homo sapien
agtcagtattagaggcagggagacc

SEQ ID NO: 1860166 - DNA, 25 bp, Homo sapien
cctacgctgttgtgggagatccagg

SEQ ID NO: 1860167 - DNA, 25 bp, Homo sapien
aagtggtgagtgacatgcgtttgcc

SEQ ID NO: 1860168 - DNA, 25 bp, Homo sapien
taaaatggagatgtactgatgccct

SEQ ID NO: 1860169 - DNA, 25 bp, Homo sapien
catttagtgcctgacaaagtggtga

SEQ ID NO: 1860170 - DNA, 25 bp, Homo sapien
cagagatgttgggtgtgccacaaaa

SEQ ID NO: 1860171 - DNA, 25 bp, Homo sapien
tctatcttctgtggatgcgcccagg

SEQ ID NO: 1860172 - DNA, 25 bp, Homo sapien
cagtctgtcctgagtcctctctatc

SEQ ID NO: 1860173 - DNA, 25 bp, Homo sapien
ccagaccatccaatcctcttatcag

SEQ ID NO: 1860174 - DNA, 25 bp, Homo sapien
agaagccaacccctctctaacctga

SEQ ID NO: 1860175 - DNA, 25 bp, Homo sapien
ggcggcctctgcaaacggctagaga

SEQ ID NO: 1860176 - DNA, 25 bp, Homo sapien
tggatgaggtcaccgaaaaaggccc

SEQ ID NO: 1860177 - DNA, 25 bp, Homo sapien
tgagcggctctgatgacttgcttcc

SEQ ID NO: 1860178 - DNA, 25 bp, Homo sapien
tacagtgtgcgcgatgccaggacaa

SEQ ID NO: 1860179 - DNA, 25 bp, Homo sapien
gaaaggagcttgattcacatatctg

SEQ ID NO: 1860180 - DNA, 25 bp, Homo sapien
caagagcaatttggcctcaccctgc

SEQ ID NO: 1860181 - DNA, 25 bp, Homo sapien
ttaaacacacacgagtgcacaggtg

SEQ ID NO: 1860182 - DNA, 25 bp, Homo sapien
catggagaacccaagaactctagta

SEQ ID NO: 1860183 - DNA, 25 bp, Homo sapien
caaatgccgagctcagtaataccgg

SEQ ID NO: 1860184 - DNA, 25 bp, Homo sapien
cctgctgtggtacggaaacacctga

SEQ ID NO: 1860185 - DNA, 25 bp, Homo sapien
caaatggtgagacaaagaccctgca

SEQ ID NO: 1860186 - DNA, 25 bp, Homo sapien
tgtcccgggcatacatctagctgag

SEQ ID NO: 1860187 - DNA, 25 bp, Homo sapien
gagagctcagactcagtgctggtga

SEQ ID NO: 1860188 - DNA, 25 bp, Homo sapien
cattcatcagctgttcgtaaggcac

SEQ ID NO: 1860189 - DNA, 25 bp, Homo sapien
gggaccttgatacgtggcctttgct

SEQ ID NO: 1860190 - DNA, 25 bp, Homo sapien
ttcacgaaggtgatgctggcgtcct

SEQ ID NO: 1860191 - DNA, 25 bp, Homo sapien
gggcagtgctgggagcccaccgcct

SEQ ID NO: 1860192 - DNA, 25 bp, Homo sapien
gagcccaccgccttgaggccccagc

SEQ ID NO: 1860193 - DNA, 25 bp, Homo sapien
tgctgggagcccaccgccttgaggc

SEQ ID NO: 1860194 - DNA, 25 bp, Homo sapien
agtgctgggagcccaccgccttgag

SEQ ID NO: 1860195 - DNA, 25 bp, Homo sapien
ttcatggccttcttcccgatctgct

SEQ ID NO: 1860196 - DNA, 25 bp, Homo sapien
tcttcccgatctgcttgatgaggtc

SEQ ID NO: 1860197 - DNA, 25 bp, Homo sapien
ttgatgaggtcgttgtaggtctctt

SEQ ID NO: 1860198 - DNA, 25 bp, Homo sapien
gatgaggtcgttgtaggtctcttcc

SEQ ID NO: 1860199 - DNA, 25 bp, Homo sapien
tacagggcgtggtagttggcgctgg

SEQ ID NO: 1860200 - DNA, 25 bp, Homo sapien
tcaaaggactccttccgtcgccgcc

SEQ ID NO: 1860201 - DNA, 25 bp, Homo sapien
cagagctccacgaagtagcggtaca

SEQ ID NO: 1860202 - DNA, 25 bp, Homo sapien
agttgacaaaaagggacagccaggc

SEQ ID NO: 1860203 - DNA, 25 bp, Homo sapien
gcacccccaacataggtctgttgca

SEQ ID NO: 1860204 - DNA, 25 bp, Homo sapien
catgaatacgaagggtgggatcacc

SEQ ID NO: 1860205 - DNA, 25 bp, Homo sapien
taggacgccccacacgatgaagatg

SEQ ID NO: 1860206 - DNA, 25 bp, Homo sapien
gtagaggccctcgatgtagttccac

SEQ ID NO: 1860207 - DNA, 25 bp, Homo sapien
ggccacaaagtcaccgaagccgatg

SEQ ID NO: 1860208 - DNA, 25 bp, Homo sapien
tctcttggtaaggaactgccctagt

SEQ ID NO: 1860209 - DNA, 25 bp, Homo sapien
acctctcttggtaaggaactgccct

SEQ ID NO: 1860210 - DNA, 25 bp, Homo sapien
gtctcttggcacgtcccccgaagaa

SEQ ID NO: 1860211 - DNA, 25 bp, Homo sapien
tggtaaggaactgccctagtctctt

SEQ ID NO: 1860212 - DNA, 25 bp, Homo sapien
tgatccacgtcaggcagagcggcac

SEQ ID NO: 1860213 - DNA, 25 bp, Homo sapien
ctgatccacgtcaggcagagcggca

SEQ ID NO: 1860214 - DNA, 25 bp, Homo sapien
cccgaagagaccatagaaaacacag

SEQ ID NO: 1860215 - DNA, 25 bp, Homo sapien
gaaaacacagaagaggcgaccggcg

SEQ ID NO: 1860216 - DNA, 25 bp, Homo sapien
aaacacagaagaggcgaccggcggg

SEQ ID NO: 1860217 - DNA, 25 bp, Homo sapien
cgaagagaccatagaaaacacagaa

SEQ ID NO: 1860218 - DNA, 25 bp, Homo sapien
attgcattgggccagttccagttgt

SEQ ID NO: 1860219 - DNA, 25 bp, Homo sapien
cattgggccagttccagttgttgaa

SEQ ID NO: 1860220 - DNA, 25 bp, Homo sapien
caatggtggtaatgacggtcgctgc

SEQ ID NO: 1860221 - DNA, 25 bp, Homo sapien
atgacggtcgctgcaaaaatcattg

SEQ ID NO: 1860222 - DNA, 25 bp, Homo sapien
ccagccctccatggagggtgttcta

SEQ ID NO: 1860223 - DNA, 25 bp, Homo sapien
cagccctccatggagggtgttctac

SEQ ID NO: 1860224 - DNA, 25 bp, Homo sapien
ttccctgtagccctttctctctctg

SEQ ID NO: 1860225 - DNA, 25 bp, Homo sapien
ctctctgccctgggctgagcagctg

SEQ ID NO: 1860226 - DNA, 25 bp, Homo sapien
cccttccctgtagccctttctctct

SEQ ID NO: 1860227 - DNA, 25 bp, Homo sapien
ctcccttccctgtagccctttctct

SEQ ID NO: 1860228 - DNA, 25 bp, Homo sapien
gcagcagccggcctgcgtaaatgga

SEQ ID NO: 1860229 - DNA, 25 bp, Homo sapien
catgggtgggttgttctgaaggaaa

SEQ ID NO: 1860230 - DNA, 25 bp, Homo sapien
ctgcgtaaatggatctgcacactct

SEQ ID NO: 1860231 - DNA, 25 bp, Homo sapien
gcatgactgaggtttggtgggaaaa

SEQ ID NO: 1860232 - DNA, 25 bp, Homo sapien
agtaatcttgactcccagacatccc

SEQ ID NO: 1860233 - DNA, 25 bp, Homo sapien
tcactgtgctgactgagtaatcttg

SEQ ID NO: 1860234 - DNA, 25 bp, Homo sapien
tgctgactgagtaatcttgactccc

SEQ ID NO: 1860235 - DNA, 25 bp, Homo sapien
tgagtaatcttgactcccagacatc

SEQ ID NO: 1860236 - DNA, 25 bp, Homo sapien
ccaactggtcttgggttgcagaggt

SEQ ID NO: 1860237 - DNA, 25 bp, Homo sapien
tgctgaaaccaccagcctccaactg

SEQ ID NO: 1860238 - DNA, 25 bp, Homo sapien
caccagcctccaactggtcttgggt

SEQ ID NO: 1860239 - DNA, 25 bp, Homo sapien
ggtggggatcaccaggttgagagga

SEQ ID NO: 1860240 - DNA, 25 bp, Homo sapien
tagtttacgagcaaggtattggcaa

SEQ ID NO: 1860241 - DNA, 25 bp, Homo sapien
gcagctgtagtttacgagcaaggta

SEQ ID NO: 1860242 - DNA, 25 bp, Homo sapien
aggtattggcaagggcccagtggtg

SEQ ID NO: 1860243 - DNA, 25 bp, Homo sapien
gctgtagtttacgagcaaggtattg

SEQ ID NO: 1860244 - DNA, 25 bp, Homo sapien
aaggagcagatactggacgaaaggc

SEQ ID NO: 1860245 - DNA, 25 bp, Homo sapien
caaagcggactttgttaacttgtgg

SEQ ID NO: 1860246 - DNA, 25 bp, Homo sapien
ccgtctcctcgaagaccagagctgg

SEQ ID NO: 1860247 - DNA, 25 bp, Homo sapien
tcgcctgagctttgtctctcccagg

SEQ ID NO: 1860248 - DNA, 25 bp, Homo sapien
agctgatcagtgactgacactggaa

SEQ ID NO: 1860249 - DNA, 25 bp, Homo sapien
gagctgatcagtgactgacactgga

SEQ ID NO: 1860250 - DNA, 25 bp, Homo sapien
gagtcagttcccctgcggactctgg

SEQ ID NO: 1860251 - DNA, 25 bp, Homo sapien
cggactctggaaccatcaggattcc

SEQ ID NO: 1860252 - DNA, 25 bp, Homo sapien
ccctggtgagtcagttcccctgcgg

SEQ ID NO: 1860253 - DNA, 25 bp, Homo sapien
cctgcggactctggaaccatcagga

SEQ ID NO: 1860254 - DNA, 25 bp, Homo sapien
ggaaggaaggatgctctgatccatg

SEQ ID NO: 1860255 - DNA, 25 bp, Homo sapien
gctctttagtccttgtggctgccag

SEQ ID NO: 1860256 - DNA, 25 bp, Homo sapien
tttagtccttgtggctgccagtcct

SEQ ID NO: 1860257 - DNA, 25 bp, Homo sapien
tgggaaggaaggatgctctgatcca

SEQ ID NO: 1860258 - DNA, 25 bp, Homo sapien
cagcttagggtaataagtaactgcc

SEQ ID NO: 1860259 - DNA, 25 bp, Homo sapien
gctggcagcttagggtaataagtaa

SEQ ID NO: 1860260 - DNA, 25 bp, Homo sapien
tggcagcttagggtaataagtaact

SEQ ID NO: 1860261 - DNA, 25 bp, Homo sapien
tggctggcagcttagggtaataagt

SEQ ID NO: 1860262 - DNA, 25 bp, Homo sapien
gcacattcctgactttggattacaa

SEQ ID NO: 1860263 - DNA, 25 bp, Homo sapien
gggccactgtccatagcacattcct

SEQ ID NO: 1860264 - DNA, 25 bp, Homo sapien
cctgactttggattacaaacagtcc

SEQ ID NO: 1860265 - DNA, 25 bp, Homo sapien
catagcacattcctgactttggatt

SEQ ID NO: 1860266 - DNA, 25 bp, Homo sapien
ggggctagtgacagttttccagatt

SEQ ID NO: 1860267 - DNA, 25 bp, Homo sapien
ggctagtgacagttttccagattgt

SEQ ID NO: 1860268 - DNA, 25 bp, Homo sapien
caggggctagtgacagttttccaga

SEQ ID NO: 1860269 - DNA, 25 bp, Homo sapien
tgcaggggctagtgacagttttcca

SEQ ID NO: 1860270 - DNA, 25 bp, Homo sapien
caatcaggtaaaaaccgagggcttg

SEQ ID NO: 1860271 - DNA, 25 bp, Homo sapien
gctaggtttcggatccaatcaggta

SEQ ID NO: 1860272 - DNA, 25 bp, Homo sapien
cgagggcttgtagggagggagggca

SEQ ID NO: 1860273 - DNA, 25 bp, Homo sapien
aatagtccccgtgcaatgtcctctg

SEQ ID NO: 1860274 - DNA, 25 bp, Homo sapien
ctcagcacttatccccttggcgaga

SEQ ID NO: 1860275 - DNA, 25 bp, Homo sapien
atccccttggcgagaggcagccctt

SEQ ID NO: 1860276 - DNA, 25 bp, Homo sapien
cttatccccttggcgagaggcagcc

SEQ ID NO: 1860277 - DNA, 25 bp, Homo sapien
ccactcagcacttatccccttggcg

SEQ ID NO: 1860278 - DNA, 25 bp, Homo sapien
tgggatgcacacgagcacagtctgt

SEQ ID NO: 1860279 - DNA, 25 bp, Homo sapien
tgctggcaacaccctgcaaatactt

SEQ ID NO: 1860280 - DNA, 25 bp, Homo sapien
ctcttagaggactgggtggtgtacc

SEQ ID NO: 1860281 - DNA, 25 bp, Homo sapien
cagagacccatggtaagggcaggtt

SEQ ID NO: 1860282 - DNA, 25 bp, Homo sapien
caagaggcttggctgcactgactag

SEQ ID NO: 1860283 - DNA, 25 bp, Homo sapien
tgactagacttccaaccaaaagggc
